United States Patent Application Publication US 2007/0054278 A1 - sequence listing, part 132

SEQ ID NO: 354222 - DNA, 201 bp, Homo sapiens
ctgccaccacatccacacacaagacatctaccctcaccagactgtttcttcactttaagatgagaggaactggaccaggggctctagttctcccaacaggrctccggtactgatgcaggagaatggcaagaagctagactaaatctcttgccctttgccccggccccctgggggtagactttgaactctaaaaatggatac

SEQ ID NO: 354223 - DNA, 201 bp, Homo sapiens
agtggactgagataacctttgtgggagcccctctcagctgtgacactggaaatccatgacttattccccacattataacgcagacacttgtaattctgtcygggaataggattacgcattcctaaattatttatttattttttaatttttaaatagagacaggctcttgctctgtcacctgactaccagcaatcctcctgc

SEQ ID NO: 354224 - DNA, 201 bp, Homo sapiens
ccccagcctctcatcacgcctcccttcctccctccacacgggaaagcatgtgtatcccattcccacctcctccgactcaggacaattctagagacccaagractgtcctcctcagagaccctggccatcaacccctagtcccactacaccccagtcacagatgcccctgaactgccatatcctggggccccccaggccata

SEQ ID NO: 354225 - DNA, 201 bp, Homo sapiens
atgcctggctaattttttttattttttgtagagacagggtttcactatgtggcccaagctagtctcaaattcctgggctcaagcgatcctcctgcctcagyctcccaagtaacctggattgcaggcacatgccgccacacccagctagttcttgcaattattattattaaggactgtttatccttaggcatcctttctcct

SEQ ID NO: 354226 - DNA, 201 bp, Homo sapiens
ccatggaaatcaacacccgggcccggacccaactcatctcagatggaggaatttttgataaggtgaggagggtacggggcatgggactgcctcatccatcyctccatgatctgccactttcaggatccaagatcaactatgtgtgaatgtcctcactcttaacctatgaacctgtcccttttatacccatgtctttttttt

SEQ ID NO: 354227 - DNA, 201 bp, Homo sapiens
tgaatggaatcttggatttcattcatctcatgctgtctcctgcttccccatcctctgctccacacgaacaagtgaagcctctattcacacttacaattccktttcctagttcagtcctctccgtgtctccactcaccacagtaatgccatgccccagcggacagctgagttgctggcagatgcacacaagggtcaagcctg

SEQ ID NO: 354228 - DNA, 201 bp, Homo sapiens
caccccccaccacacccggctaattttttatattttttttagtagagatggagtttcaccgtattagccaggatggtctcgatctcctgacctcgtgatcygccctccttggcctctcaaagtgctgggattacaggcttgagccaccacgcccggcccaaatagtgaatttttaaccatgggtaatgagtaaaagagaga

SEQ ID NO: 354229 - DNA, 201 bp, Homo sapiens
tcggaaggaggcggctggttggctgtgggatgcatagcctgtgggcgggctccacaccccccctcccatttttgctatcccccctctccccttctgacagygcgaagtggacggagacggaaatagagatgctgagggctgctgtgaagcgatttggggacgatcttaatcacatcagctgtgtcatcaaggaacggacag

SEQ ID NO: 354230 - DNA, 201 bp, Homo sapiens
aggagacgaggaggaatgaggatggcaaatagtgaatttttttttttttttttttgagatggagtcttgctttgttgcccaggctggagtgcagtggcgcsatcttggctcactgcaacctccacctcctgggttcacgccattctcctgcctcagcctcccgagtagctgggactacaggcaccccccaccacacccggc

SEQ ID NO: 354231 - DNA, 201 bp, Homo sapiens
cgcaggagacgaggaggaatgaggatggcaaatagtgaatttttttttttttttttttgagatggagtcttgctttgttgcccaggctggagtgcagtggygcgatcttggctcactgcaacctccacctcctgggttcacgccattctcctgcctcagcctcccgagtagctgggactacaggcaccccccaccacaccc

SEQ ID NO: 354232 - DNA, 201 bp, Homo sapiens
ctctgtgggactgggtttcccgggcgagagactgaatcccttctcccatctctggcatccggcccccgtggagagggctgaggctggggggctgttccgtytctccacccttcgctgtgtcccgtatctcaataaagagaatctgctctcttcagccctgtgtctgtgcttgagtgggggcgagcacggggctgagactag

SEQ ID NO: 354233 - DNA, 201 bp, Homo sapiens
cgtgaaagacaagaagcacactggcccgcaggagacgaggaggaatgaggatggcaaatagtgaatttttttttttttttttttgagatggagtcttgctytgttgcccaggctggagtgcagtggcgcgatcttggctcactgcaacctccacctcctgggttcacgccattctcctgcctcagcctcccgagtagctgg

SEQ ID NO: 354234 - DNA, 201 bp, Homo sapiens
acgcagaagctgggttcagggagggttatatacctgaacccctggggtagattttggagaagggatatgcaggctgtggtacatatatcctcctttcaccrcccaccaaagagaaggttcgccagtgctggcaggatgatgagttgttcagctaccagttcctcaatggtgccaaccccatgctgttgagacgctcgacct

SEQ ID NO: 354235 - DNA, 201 bp, Homo sapiens
ctggaactgcctagaagactttgatcagatcttctggggccagaagagtgccctggctggtcagtggttccccgaggtctccataatcccttaatggcccstctggatgactcatcacactccacagtcccccgtaactctttgcaagaagagaccttatcatatctggtcaactcagagaggccttgagaatgaaaacgc

SEQ ID NO: 354236 - DNA, 201 bp, Homo sapiens
ggccctggagcctgcgcggaggtggccttcccgtgctaccgctgggtgcagggcgaggacatcctgagcctgcccgagggcaccggtgagcaggcggcgtyggggaaggaggcacaaggtcccgggaactgctgcggggctaggagggcagagttaaggacggtcggagcagacttagaggatgtatgggcccagggcagg

SEQ ID NO: 354237 - DNA, 201 bp, Homo sapiens
tccagctcagctgcttccctactttgtcactagttttttagaatccccttgaggactgaaagaatagaattgtcacagttggtcagaagttcctaaaatgytgtggtaatccttccaagaatgtgaatttaggttgcctgagatgctgttattgtatttgatgatggaagtcccctggttatttatataaatgtttgagga

SEQ ID NO: 354238 - DNA, 201 bp, Homo sapiens
cagctaagggaagaaaacataggatgctggagagctggtttggttggaataacacggaagacacccgtgaaagacaagaagcacactggcccgcaggagaygaggaggaatgaggatggcaaatagtgaatttttttttttttttttttgagatggagtcttgctttgttgcccaggctggagtgcagtggcgcgatcttg

SEQ ID NO: 354239 - DNA, 201 bp, Homo sapiens
tagggccccggcgcgtttccccgctccagcccctcctctatttaaagactccctgcaccgtgtcacccaggtcgcgtcccacccttgccggcgccctctgygggactgggtttcccgggcgagagactgaatcccttctcccatctctggcatccggcccccgtggagagggctgaggctggggggctgttccgtctctcc

SEQ ID NO: 354240 - DNA, 201 bp, Homo sapiens
ggctgctagtcagtttgggctactataacaaaacactggccaggcgcggtggctcacgcctgtaatctcagaactttgggaggccaaggggggcgggaatyacctgaggtcaggagttcgagaccagcctggccaacatggtaaaaccccatctctaccaaaaatacaaaaattagccaggcatggtggtgcgtgcctgta

SEQ ID NO: 354241 - DNA, 201 bp, Homo sapiens
ttctgtctcaggtgcctctggggcaccacaaagaaaaatatttctcaggccccaagcccaaagctgtgctaaaccaattccgaacagatttggaaaagctrgaaaaggagattacagcccggaatgagcaacttgactggccctatgaatatctgaagcccagctgcatagagaacagtgtcaccatctgagccctagagt

SEQ ID NO: 354242 - DNA, 201 bp, Homo sapiens
ttcagctaccagttcctcaatggtgccaaccccatgctgttgagacgctcgacctctctgccctccaggctagtgctgccctcggggatggaagagcttcrggctcaactggagaaagaacttcaggtacctctccttcccctgcctggcactgttctctccttagtagtgtggtgagaacggacagagagaatccaaact

SEQ ID NO: 354243 - DNA, 201 bp, Homo sapiens
ctgggactcccaggtgctctctatgcccatgatgctttacggctctgggagatcattgccaggtgagtaaggaggagctgagaaatggtggggccgggggsgggggggctctggcctgaggccagcatggggcaaaagcaagaaggtccagaaaggagaagcagagaactcaatcctggggagagatgaggaaaagtgagg

SEQ ID NO: 354244 - DNA, 201 bp, Homo sapiens
ggcaggatgatgagttgttcagctaccagttcctcaatggtgccaaccccatgctgttgagacgctcgacctctctgccctccaggctagtgctgccctcrgggatggaagagcttcaggctcaactggagaaagaacttcaggtacctctccttcccctgcctggcactgttctctccttagtagtgtggtgagaacgga

SEQ ID NO: 354245 - DNA, 201 bp, Homo sapiens
gggcctgctgggactcccaggtgctctctatgcccatgatgctttacggctctgggagatcattgccaggtgagtaaggaggagctgagaaatggtggggycgggggggggggggctctggcctgaggccagcatggggcaaaagcaagaaggtccagaaaggagaagcagagaactcaatcctggggagagatgaggaaa

SEQ ID NO: 354246 - DNA, 201 bp, Homo sapiens
caagaaatggtggcaaacaggaggtttttatctacaggcaaaggatgagggctgaaataagagaaagcaggagtgcaaagttggcaaagatgggataaacrtgtctggtggataatcaaatgaggcaaagccagagataaaagcaacagtgcatggctgaaaacatggaatacggctaaccacagggagatgaggacaaga

SEQ ID NO: 354247 - DNA, 201 bp, Homo sapiens
catagacaagatggagaccagtctgatgaatggaatcttggatttcattcatctcatgctgtctcctgcttccccatcctctgctccacacgaacaagtgmagcctctattcacacttacaattccttttcctagttcagtcctctccgtgtctccactcaccacagtaatgccatgccccagcggacagctgagttgctg

SEQ ID NO: 354248 - DNA, 201 bp, Homo sapiens
tcactcagtgagacttgtcttcatgtcactatttgcctgtaccctcgtctcccctgcctcatccaactagaattactttttcaagagtcaaaatggcctcytggagttctcatcctgtatccaatggtcctcacacttcagtgtgcatcagaatcacctgaatgcctgttgaaatgcagatttctggatcccatgaccaga

SEQ ID NO: 354249 - DNA, 201 bp, Homo sapiens
actgaggacaagcctaggcaaaatgtgtgcgtatgcatgtgtgtgctgtatgcggtggcaggggtagtaggggaagctctctggaatatttggcagaggaygtgagatttgaatagggaatgaaagagcatttgctgagctgataggagccaaaaccagagcgcagaccattcgggaatgatcagaaaggggcctggccat

SEQ ID NO: 354250 - DNA, 201 bp, Homo sapiens
atagagatgctgagggctgctgtgaagcgatttggggacgatcttaatcacatcagctgtgtcatcaaggaacggacagtgtgagggagggtggctgccaraaaagggcgggtgggcagccttcttcctccttacccaaggttccatcgtcctcagaactcctttccagctcagctgcttccctactttgtcactagtttt

SEQ ID NO: 354251 - DNA, 201 bp, Homo sapiens
actccgggcgtctgagacccaaagagcaggttgtgcgggggcgggaacgaggcgatgctgtctttggaggccctgagaaactgaggttgcacaggagcgcrgctctgtcctcgaaacggcctcagtcgggtccctcctactaagtctggcctgggtccggcctgcacaggaggaggagtttgatcatgacgttgcagagga

SEQ ID NO: 354252 - DNA, 201 bp, Homo sapiens
tgctgtgaagcgatttggggacgatcttaatcacatcagctgtgtcatcaaggaacggacagtgtgagggagggtggctgccagaaaagggcgggtgggcmgccttcttcctccttacccaaggttccatcgtcctcagaactcctttccagctcagctgcttccctactttgtcactagttttttagaatccccttgagg

SEQ ID NO: 354253 - DNA, 201 bp, Homo sapiens
gccttcccgggaggtccaggaaggtcccgccgcacccaccccgttggcctcaccctggctcgggcccctttatcatcctgcagctacgctccgaccaggargcacagccagtccccacagccggctctaccgctctgctcgcaggtttgggctagtctggggcggggacttgggagcgcctaaaacttgcgaggagggcgg

SEQ ID NO: 354254 - DNA, 201 bp, Homo sapiens
tcatcccctacttcctcctggctccccagaagacctggagacctcgggaagtgttctcatctatgttcgctccaacccgggggctcaggcccacctcgatyccgccttcccgggaggtccaggaaggtcccgccgcacccaccccgttggcctcaccctggctcgggcccctttatcatcctgcagctacgctccgaccag

SEQ ID NO: 354255 - DNA, 201 bp, Homo sapiens
cctgggccaggtacttaccagagatgggcagctgggaatttggggcctggagtgagggaggggtctgtgtgcgggtggaccacggggctcgcgtgcttggyaggcactgactctggatccctgcccttccttagctggactggtactcttgggtgcctaatgcaccctgcacgatgcggctgcccccgccaaccaccaagg

SEQ ID NO: 354256 - DNA, 201 bp, Homo sapiens
cctgcaccggccaacacgcctctgtgcacctgggccaggtacttaccagagatgggcagctgggaatttggggcctggagtgagggaggggtctgtgtgcrggtggaccacggggctcgcgtgcttggcaggcactgactctggatccctgcccttccttagctggactggtactcttgggtgcctaatgcaccctgcacg

SEQ ID NO: 354257 - DNA, 201 bp, Homo sapiens
cctggccatgtgagcaggggcagagctggcttcagctccctggccctgctccgttggttggtaggtatgtggaaggaatcgtgagtctccactataagacrgacgtggctgtgaaagacgacccagagctgcagacctggtgtcgagagatcactgaaatcgggctgcaaggggcccaggaccgaggtaagaggagcccct

SEQ ID NO: 354258 - DNA, 201 bp, Homo sapiens
gtctcagacaagcaggagggagaggaaggaccggtcctcaggggcaagacagactgggcagaggctgaggtagaggagtcaggcaattcctaggggacagwtggaccagaagccagactaagccaggctaaggagtatgaggtgggaagctggagaaggccgtgatgaaacgtgctgtgggcacgcggtgtgggcagtggt

SEQ ID NO: 354259 - DNA, 201 bp, Homo sapiens
ccccctgatgacttggccgaccgggggctcctgggagtgaagtcttccttctatgcccaagatgcgctgcggctctgggaaatcatctatcggtgaggcargcgggaaggccagtgggggtgcaagtgggggtggagaagacatgtaggagagcaggaggtctgcgtctggttgggggcctggggccctgacctggccatg

SEQ ID NO: 354260 - DNA, 201 bp, Homo sapiens
ccctcactccttccaccctctgtccacaagtagatgctggtgtctgttgttcccttatttgtgtccatgtgtactcaatgtttagctctcacttataagtragaacataccatatttggctttctgttcctgtgttagtccacttaggattatggcctccagctccatccatgttgctgcagagaacatgatcttgttctt

SEQ ID NO: 354261 - DNA, 201 bp, Homo sapiens
tctcagacaagcaggagggagaggaaggaccggtcctcaggggcaagacagactgggcagaggctgaggtagaggagtcaggcaattcctaggggacagtwggaccagaagccagactaagccaggctaaggagtatgaggtgggaagctggagaaggccgtgatgaaacgtgctgtgggcacgcggtgtgggcagtggtg

SEQ ID NO: 354262 - DNA, 201 bp, Homo sapiens
gctgtgtgacctcaggcaaaatacccaacctctctgattatctgtttcctcttctgtaaaattgaggctcattcaactaggtataaaaattataaggctgrgcacagtgactcacacctgtaatcccagcactttgggaggctgcaggaggatcacctgagcccaggagttggagaccagcctaggcaacgtggtgaaacc

SEQ ID NO: 354263 - DNA, 201 bp, Homo sapiens
agtacaaaaattatcacctgtaatctttggtgtagtggcatgcacctgtagtcccagctacttgggaggctgaggtgggaggatcacctgggcccaaggamgtcaaggctgcagtgagccgtggtgatcctgccacgcactccagcctgggcagcacggtaagaccctgattaaaaaaaaaaatgatatgaggaagtaagc

SEQ ID NO: 354264 - DNA, 201 bp, Homo sapiens
gggatggaggaagcaggtggtttgaatcttgtccacactgtgggaactgaaaggggaagtggaggctggaggaggcaccagaagagcagtttctgcagaaygctggaggcaaagcagcttgcagggtgctaatgcactgagcgggcaggaaggggaggggaggaaacgggagccgtagggagcggcaggagtgagatgggg

SEQ ID NO: 354265 - DNA, 201 bp, Homo sapiens
ggaggcaaagcagcttgcagggtgctaatgcactgagcgggcaggaaggggaggggaggaaacgggagccgtagggagcggcaggagtgagatggggaaascagaacaggtttggaggacgaagggtgaggttaacatgcaaggggggcgggaatcgctgagtgcctggcactcatgccttctctccccacacttgtccct

SEQ ID NO: 354266 - DNA, 201 bp, Homo sapiens
gaggcaaagcagcttgcagggtgctaatgcactgagcgggcaggaaggggaggggaggaaacgggagccgtagggagcggcaggagtgagatggggaaagsagaacaggtttggaggacgaagggtgaggttaacatgcaaggggggcgggaatcgctgagtgcctggcactcatgccttctctccccacacttgtccctg

SEQ ID NO: 354267 - DNA, 201 bp, Homo sapiens
tgttgtggccaccatgaggtgcctgccgtcgatacatcctatcttcaaggtaactccttatccccttctctcttgcctgccactatctctgccccagggcwcgttccgacctctggaggctccctctctgtggggtctcggggtacagagagaaacaatgaatggacaatgtgagagcaacagagaatgagcagggctggc

SEQ ID NO: 354268 - DNA, 201 bp, Homo sapiens
cctcccacctgggaaagtggcgaaaataatcttactctttttatatgtaaagcacagtacatgcaaatgaccaaggattccatccaacaagaggaacccgwgaaataacgttaaaaagatcttttccagacattgattttttttttttttttgagatggagtctccctttgcccagactggagtgcagtgatgcgatctcg

SEQ ID NO: 354269 - DNA, 201 bp, Homo sapiens
gttttttcaagtaggaatgacatacttttgaaaaagtaagttgcttgacttggaattaaatggaattgctttcgttcgttgctatgttgctcggttgctaygtggtctagtagaagctacaaacaaaatccaggagatcacatttcctctgcctcagcccctggaaaagctttatatgcctgagtcctcacctccagttgt

SEQ ID NO: 354270 - DNA, 201 bp, Homo sapiens; identical to SEQ ID NO: 75888

SEQ ID NO: 354271 - DNA, 201 bp, Homo sapiens
ttgcctctgattctgtttaattctacagaagacatactggcaatgtttggtctgatttttcttttaagacggagtctcactttgttgcccaggctgtagtrcagtggcgcaatcttggctcactgatacctctgcttcccgggttctcctgcctcagcctcccgtgtagctgggattacaggtgcccgccaccacacccag

SEQ ID NO: 354272 - DNA, 201 bp, Homo sapiens
ccactatctctgccccagggcacgttccgacctctggaggctccctctctgtggggtctcggggtacagagagaaacaatgaatggacaatgtgagagcarcagagaatgagcagggctggccatgcattttcaaaggggatagcacctcccacctgggaaagtggcgaaaataatcttactctttttatatgtaaagcac

SEQ ID NO: 354273 - DNA, 201 bp, Homo sapiens
ctggcttttgagaaagctcagccccttatcaaaatttactgagcaccatctgcaaaggcactgggctaaggcacctgggagacgcgaaaggaggaaatgcrccaagtctctattcgaaggccttgcagtgtagctggagagacagactgggccagtctgcagaagctccaggactgaggaagtccctgaggacagagacag

SEQ ID NO: 354274 - DNA, 201 bp, Homo sapiens
gagcagtttctgcagaatgctggaggcaaagcagcttgcagggtgctaatgcactgagcgggcaggaaggggaggggaggaaacgggagccgtagggagcrgcaggagtgagatggggaaagcagaacaggtttggaggacgaagggtgaggttaacatgcaaggggggcgggaatcgctgagtgcctggcactcatgcct

SEQ ID NO: 354275 - DNA, 201 bp, Homo sapiens
actgttgagaggccactgaactttacgtctgtgctttttctgaagacctggtgcctttcctgctgtcagcccttgtttcctgcagggatcttgcagctctyctctgactctgcccttccctgtgtttctccctctagcttataattccccacctgcgatacaccctggaaattaacgtccgggccaggactgggctggtct

SEQ ID NO: 354276 - DNA, 201 bp, Homo sapiens
tagaggagtcaggcaattcctaggggacagttggaccagaagccagactaagccaggctaaggagtatgaggtgggaagctggagaaggccgtgatgaaaygtgctgtgggcacgcggtgtgggcagtggtgtttagggtgggttggagaggggagatgctagaaatagggactggggcaacatgccccagcactgacccc

SEQ ID NO: 354277 - DNA, 201 bp, Homo sapiens
aatatttttactgtgactaccaaggtgatgctgaccagcttgctaaacacctaacgtcatggactgactcttgcgagccagtgtgagtcagcagcagcacmccactgagtgggaccctcccggcagagctccccactcccccaccccaacctgctgtcatggtaattcctgtaagagttaactgagcattcctgccgctct

SEQ ID NO: 354278 - DNA, 201 bp, Homo sapiens
cttgcagggtgctaatgcactgagcgggcaggaaggggaggggaggaaacgggagccgtagggagcggcaggagtgagatggggaaagcagaacaggtttrgaggacgaagggtgaggttaacatgcaaggggggcgggaatcgctgagtgcctggcactcatgccttctctccccacacttgtccctgctccagctccag

SEQ ID NO: 354279 - DNA, 201 bp, Homo sapiens
gctcggatgtgggtagtgaccatcaggatggagaggacaggtggatgcgagtgcagagggagatcaaggagaggggaaaggggagccaggccagttgcctscagaaatagcaccgataaagagaacagggtgcccaggtggatttttgtctggccaatgttgaggtaacgggaagacacttaaattatccagcaggcagct

SEQ ID NO: 354280 - DNA, 201 bp, Homo sapiens
cgcctctgtgcacctgggccaggtacttaccagagatgggcagctgggaatttggggcctggagtgagggaggggtctgtgtgcgggtggaccacggggcwcgcgtgcttggcaggcactgactctggatccctgcccttccttagctggactggtactcttgggtgcctaatgcaccctgcacgatgcggctgcccccgc

SEQ ID NO: 354281 - DNA, 201 bp, Homo sapiens
ctcggatgtgggtagtgaccatcaggatggagaggacaggtggatgcgagtgcagagggagatcaaggagaggggaaaggggagccaggccagttgcctgsagaaatagcaccgataaagagaacagggtgcccaggtggatttttgtctggccaatgttgaggtaacgggaagacacttaaattatccagcaggcagctg

SEQ ID NO: 354282 - DNA, 201 bp, Homo sapiens
ggatggaggaagcaggtggtttgaatcttgtccacactgtgggaactgaaaggggaagtggaggctggaggaggcaccagaagagcagtttctgcagaatkctggaggcaaagcagcttgcagggtgctaatgcactgagcgggcaggaaggggaggggaggaaacgggagccgtagggagcggcaggagtgagatgggga

SEQ ID NO: 354283 - DNA, 201 bp, Homo sapiens
gggcaggaaggggaggggaggaaacgggagccgtagggagcggcaggagtgagatggggaaagcagaacaggtttggaggacgaagggtgaggttaacatscaaggggggcgggaatcgctgagtgcctggcactcatgccttctctccccacacttgtccctgctccagctccagctgccccgcacaggatccccaccac

SEQ ID NO: 354284 - DNA, 201 bp, Homo sapiens
cttaccagagatgggcagctgggaatttggggcctggagtgagggaggggtctgtgtgcgggtggaccacggggctcgcgtgcttggcaggcactgactckggatccctgcccttccttagctggactggtactcttgggtgcctaatgcaccctgcacgatgcggctgcccccgccaaccaccaaggatgcaacgctgga

SEQ ID NO: 354285 - DNA, 201 bp, Homo sapiens
acatgatcttgttcttcttcatggctgcatagtattccacagcatatgtctaccacattttctttacctggtctattgttgatgggcatttaggttgattmcatatctttgctattgtgagtagtgctggatgaacatccgtgagcatgtgtgtttatagtaaggcgatttatattttgggaggtatatatccagtaatgg

SEQ ID NO: 354286 - DNA, 201 bp, Homo sapiens
catgatcttgttcttcttcatggctgcatagtattccacagcatatgtctaccacattttctttacctggtctattgttgatgggcatttaggttgattcyatatctttgctattgtgagtagtgctggatgaacatccgtgagcatgtgtgtttatagtaaggcgatttatattttgggaggtatatatccagtaatggg

SEQ ID NO: 354287 - DNA, 201 bp, Homo sapiens
gagatggggaaagcagaacaggtttggaggacgaagggtgaggttaacatgcaaggggggcgggaatcgctgagtgcctggcactcatgccttctctcccsacacttgtccctgctccagctccagctgccccgcacaggatccccaccacctccccttttcttgcctacggatcccccaatggcctggcttctggccaaa

SEQ ID NO: 354288 - DNA, 201 bp, Homo sapiens
tgctccagctccagctgccccgcacaggatccccaccacctccccttttcttgcctacggatcccccaatggcctggcttctggccaaatgctgggtgcgmagctctgacttccagctccatgagctgcagtctcatcttctgaggggacacttgatggctgaggtcattgttgtggccaccatgaggtgcctgccgtcga

SEQ ID NO: 354289 - DNA, 201 bp, Homo sapiens
cgatacaccctggaaattaacgtccgggccaggactgggctggtctctgacatgggaattttcgaccaggtatgggaagagaaagggagattctgggtctrtcttttttccagctctggattcagggcaggtcgattcgcctgaccctgctcaccctcacttctcagataatgagcactggtgggggaggccacgtgcagc

SEQ ID NO: 354290 - DNA, 201 bp, Homo sapiens
taccagagatgggcagctgggaatttggggcctggagtgagggaggggtctgtgtgcgggtggaccacggggctcgcgtgcttggcaggcactgactctgkatccctgcccttccttagctggactggtactcttgggtgcctaatgcaccctgcacgatgcggctgcccccgccaaccaccaaggatgcaacgctggaga

SEQ ID NO: 354291 - DNA, 201 bp, Homo sapiens
ctctgggaaatcatctatcggtgaggcaagcgggaaggccagtgggggtgcaagtgggggtggagaagacatgtaggagagcaggaggtctgcgtctggtwgggggcctggggccctgacctggccatgtgagcaggggcagagctggcttcagctccctggccctgctccgttggttggtaggtatgtggaaggaatcgt

SEQ ID NO: 354292 - DNA, 201 bp, Homo sapiens
gctctgggaaatcatctatcggtgaggcaagcgggaaggccagtgggggtgcaagtgggggtggagaagacatgtaggagagcaggaggtctgcgtctggwtgggggcctggggccctgacctggccatgtgagcaggggcagagctggcttcagctccctggccctgctccgttggttggtaggtatgtggaaggaatcg

SEQ ID NO: 354293 - DNA, 201 bp, Homo sapiens; identical to SEQ ID NO: 75887

SEQ ID NO: 354294 - DNA, 201 bp, Homo sapiens
acagcttcagtcctaaatgtttcttcacctctcgtaatacaagaaaagcagaaagaaacaagggcttgcctagtgcatgcttttctttctgtatccctctycttttccctccttatccttgtgcattttccttcctgcactttctttgagccaataatcccttaggcattgttcactcctttgcaaaccaaagctttgaag

SEQ ID NO: 354295 - DNA, 201 bp, Homo sapiens
accccgtctctactaaaaatacaaaaattagccaggcatgctggctcacccctttaatcccagctacttgagagactgaggcaggattatcccttgaagcygggaggcggaggttgcagtgatctgagatcatgctactatactccagcctgggcaacagagtgagactctatctcaacaaaaaaaaaaaaaaaaaagaaa

SEQ ID NO: 354296 - DNA, 201 bp, Homo sapiens
tggctaacatggtgaaaccccgtctctactaaaaatacaaaaattagccaggcatgctggctcacccctttaatcccagctacttgagagactgaggcagrattatcccttgaagccgggaggcggaggttgcagtgatctgagatcatgctactatactccagcctgggcaacagagtgagactctatctcaacaaaaaa

SEQ ID NO: 354297 - DNA, 201 bp, Homo sapiens
aaggtgagaattttagtgtttttctctctagtgattaaactttcaaaacatctctataaaaatttcttgtactttgtctgctgatcttgattctttttgartatttttctcattgccatattttcctctcagtgttcagtcctaaacgagaagctcgaacaactgctgcaggctttgcacacagattcccaggctgcgcct

SEQ ID NO: 354298 - DNA, 201 bp, Homo sapiens
cagctattgaagcaaaccagttctttccaaaggtggaaaaagcgatacttcaaacttcgaggccgcaccctttactatgcaaaggactcaaaggtaactcrcgagaatactagtttcaagcatttgaggctatggatggatgtaaaattttggttctgtaagctgtttttgtcttggaagcgcactgtagcattatgctct

SEQ ID NO: 354299 - DNA, 201 bp, Homo sapiens
tattcccactggacagagtggaaaggcctcataatacacagagatcctgtagaagcctcagaagggccttgcctcagtaatgggacaggttagccttagastaaaggctgctctggacatgccataacagaacttaaaaagtaagcctgaaatgaatttaagtgtatcccactacaaagcctgacaatatttaaaggaata

SEQ ID NO: 354300 - DNA, 201 bp, Homo sapiens
ctttccaaaggtggaaaaagcgatacttcaaacttcgaggccgcaccctttactatgcaaaggactcaaaggtaactcacgagaatactagtttcaagcawttgaggctatggatggatgtaaaattttggttctgtaagctgtttttgtcttggaagcgcactgtagcattatgctcttatatgaattcaatataaatgt

SEQ ID NO: 354301 - DNA, 201 bp, Homo sapiens
cttgttttgtttaagtatccctggggctcatcacagggcctgttgaagttcttttgaaatgaattgaagaatgtgaataatagttctagttcttcgggatratggaaagctaataaggtttatgctagaggctcttactgctgggactctcttcctgtttttggtttttaggaaaaaagctagaaaatccaacttcagcta

SEQ ID NO: 354302 - DNA, 201 bp, Homo sapiens
ctcaaaggtaactcacgagaatactagtttcaagcatttgaggctatggatggatgtaaaattttggttctgtaagctgtttttgtcttggaagcgcactrtagcattatgctcttatatgaattcaatataaatgtgatctatcggtgaccccatcccaagcgggtctatttgagtcagtcccataacaggtccctaaga

SEQ ID NO: 354303 - DNA, 201 bp, Homo sapiens
tttggggctttgcacatatgcaaagctgtggtgagagtaaaatattctcctgtaatttgtaagacatgagaaatattattcaaaatgttaatgaaaatgcmccattggctctgaatttcatttggttttgaatttcattttaatcgtgtcattgtgcttctgcttctctctagaccagtattaaagagggacagctattga

SEQ ID NO: 354304 - DNA, 201 bp, Homo sapiens
atctatcggtgaccccatcccaagcgggtctatttgagtcagtcccataacaggtccctaagaataatcttttaggaaggctctagtgtagtttcatttckttcttcctttcttctttctttccaattaaaataaaacattaaatgtaaccttattagatgtaataaacgcaacattctgggtttccaccttttaccttgt

SEQ ID NO: 354305 - DNA, 201 bp, Homo sapiens
gtgttgtgacatggcctctaaggtaatcctatagaaaggctctagtgtagtttgctttcttttttccttcctctcttctttccatccaattaaaatgaaayattaaatttaacttttttagatataataaactcagggaccttatattctaataggggtagcacaataaacgtagtaaattacattatgtgtcagaagatg

SEQ ID NO: 354306 - DNA, 201 bp, Homo sapiens
gtaaccttattagatgtaataaacgcaacattctgggtttccaccttttaccttgtaaatctttccctgaccatgagagagagagagagagagagctgctrtagttgctaagaattcatgctctgtgttcagacaagagctcatatcccacttccagcatattccaatggagtggctgtggacagcatgtgttgctgagag

SEQ ID NO: 354307 - DNA, 201 bp, Homo sapiens
gctgagaggaggcttaaaggagaaaatacacatcaagagcttccatagtacctgattcaaaataatcactccagtatgctagcaattaggaatacaaatcrtattgaaataaaatcaagacttaaaatattttttatataaccattgaatcaaataataataatatagttttgggagaagcaatttgtaaaaactcgtatt

SEQ ID NO: 354308 - DNA, 201 bp, Homo sapiens
gctctcaccttgcaaacctggaaacaatgatattgcctctgcctccctggcagagctgttacaagcttcagagacattgcattgtgcatgtgtatgccacrcactcagcaggttccccgtaagtggtagctgttatgcttccagagagcacagcacatttgcattgaaacagtgttcccagggtgtctttaaagccctttt

SEQ ID NO: 354309 - DNA, 201 bp, Homo sapiens
tttttcccccattttctattcctaattcctgtattgaaaaaatgtattgaagagcattgagttaggttttcttctaatgtctttgtatgttttttttcatyaacagtctctgatatttgatgaagttgacctctcagatgctagtgtagctgaagcaagcacgaaaaatgctaacaacagcttcacggtatggttatattc

SEQ ID NO: 354310 - DNA, 201 bp, Homo sapiens
tctgctctaaccttgtctcagcatatcatcaaagacaaatagatgaggaggaaagggactggaaattttatggagatgaaaagtatattggggggtagcakcaacagcttcagtcctaaatgtttcttcacctctcgtaatacaagaaaagcagaaagaaacaagggcttgcctagtgcatgcttttctttctgtatccct

SEQ ID NO: 354311 - DNA, 201 bp, Homo sapiens
gcttctgatgaattgttggagacctaaggccaaaaccttgcttattccttctttcttccacttgaaggtggggtagggtgagatagaaagaacttcaccaktcctactagtaggattagccacttgcttttccctgagcagtgaagaataatcgtctctctgctggagcctcatggagggtgaataaggttttcccccaat

SEQ ID NO: 354312 - DNA, 201 bp, Homo sapiens
aatatacatttgaagttttctgcctttttctcttgtctttctgctctgtggagagtttcagaaaatagaaaccctttctggccatacttctgtctctaaastatttctgctctaaccttgtctcagcatatcatcaaagacaaatagatgaggaggaaagggactggaaattttatggagatgaaaagtatattggggggt

SEQ ID NO: 354313 - DNA, 201 bp, Homo sapiens
agtgctgcttcttgcattgcttttttctttacagatttctttccccctttataaactaaaataagaacagtttactgaatcttaaaaactaccatctttgstttcattggttcacaacaggaccttcttacaaaaggcttgagtatcttgggcttgcaaaggaattaacttccccaaatccatgttggagatggcagttta

SEQ ID NO: 354314 - DNA, 201 bp, Homo sapiens
gggagatgcatagcagtcagaccacaggggatcccatgcagctgggctccagtggagaaagcaagattttccatttccaagcagatttgggccagttcagytgtcttccagcatggttctttggatttcctagacattacaattcttggtctctttcagagtgctgcttcttgcattgcttttttctttacagatttcttt

SEQ ID NO: 354315 - DNA, 201 bp, Homo sapiens
gggagtggtggcttcttcctacccctacggggtcaaggacgccttcccagggctaatggtgctggatgaatgttgagatgaatagatttcaagacagacaratggagcagaggatatttagggcagaggaaggagcttaggaggggtaggccacgcatttggagggctgtgtaggggccttctatggtacatgtaggagct

SEQ ID NO: 354316 - DNA, 201 bp, Homo sapiens
aaatatttgcaaatcacatattagataaatatcttgcatccagaatatgtaaagggcatttaagatgcaaaaataggaaaacagttcaattttaaaaatgsactaaagattcaaacagacatttcaccagtgaagatgtgcacatgaaaaataagcagaggaaaatgctcaaagtcagtagtctttagggaaacgcacatt

SEQ ID NO: 354317 - DNA, 201 bp, Homo sapiens
tgtgagccaccacacctggccatgattgactgaaggggagatgcatagcagtcagaccacaggggatcccatgcagctgggctccagtggagaaagcaagrttttccatttccaagcagatttgggccagttcagctgtcttccagcatggttctttggatttcctagacattacaattcttggtctctttcagagtgctg

SEQ ID NO: 354318 - DNA, 201 bp, Homo sapiens
gaaaaatgaatttttcagatatgatgaccctgcctgccaatctatgattctgtctgggtaccattgccatatttatcttagtgtagtatgtgcatattttrctgtcatttgcccacactttaagaaattaagtggaaaggtgataaatgagggtactaatactagtgatgagaagtatgggtctaacatatgtaatatagt

SEQ ID NO: 354319 - DNA, 201 bp, Homo sapiens
gtttcaaattggaactttttattagatgaaaaatgaatttttcagatatgatgaccctgcctgccaatctatgattctgtctgggtaccattgccatattwatcttagtgtagtatgtgcatattttactgtcatttgcccacactttaagaaattaagtggaaaggtgataaatgagggtactaatactagtgatgagaa

SEQ ID NO: 354320 - DNA, 201 bp, Homo sapiens
tgttctgtgtacaaaagtttcagaaaatgggataactagctagcaggaatattgacgccattgtcatagaaccatagaatttagatttggaatctactttrgggataatttaggccaacccgcctcatttaattggtaaagtgaggtagttgttaaaaatatttcctcagagcacaaagatagctagagacaaagatagct

SEQ ID NO: 354321 - DNA, 201 bp, Homo sapiens
aggcatggtggtccatgcctataatctcaacactttgggaggccaaggtgggaggattacttgagcccaggagttcaagaccagcctgggcaacatagtgsaatcccatctctacaaaaagttttaaaattagctgggtgtggtggtatgtgcctgtagtcctagctactcaggaggctgagttgagaggatcctttgagc

SEQ ID NO: 354322 - DNA, 201 bp, Homo sapiens
tatttgaatacaatgtaggactaggtgttaaatgtgtttggtttttcagctcatgaaaattacagattcctctagatccctccctcgtttttaaagctctrattataagttttaacacaaccttttggatagttatacaactgtcttgtataaattcctaatttctcaattccaaaatttgtttagaaaatgttttagaat

SEQ ID NO: 354323 - DNA, 201 bp, Homo sapiens
tgagcagatatggaaggcttccagagagggtcacattgagctgagtattgaaatgtggttaatgacagtcgtgcaccaggaaaaggatagcattctagcakgactgaactgcacaatggctttggcatttcctcctagtactctgctatgaagcgtccactgaattcatggaacttagttctcatagaaattatcttgatg

SEQ ID NO: 354324 - DNA, 201 bp, Homo sapiens
ggaatggccaaattcgacttcatttcagccatccctcctcttgctgaagtttctaagggtgatatattgacaaagtacaatagtgggtggaaactacatamacggtaaatggaaaatggaaaacctgtgctttgcctgaaaacccagtgctgaactctctggtaaaatgggttctagagatcagggcagtgattgacctag

SEQ ID NO: 354325 - DNA, 201 bp, Homo sapiens
tcatttccacgacattcagttggtattcaattggtatgaatgagtcactaaggccagccaggcttcaaggggggccacagacattaagacagtcgtgtcaraggatttgggacatgatttaaaacctacacacagtaagattactcttcctttcttgtgcagtctctcactcccatctctggagttaataactttgttttt

SEQ ID NO: 354326 - DNA, 201 bp, Homo sapiens
gtcattatgtttggtgtaatgaaatgaatgaactgtttccgtttcttggtcataatctcttgaaaactaacttctgaattcattttacagaaatcttcctygaagagttttagattcggaaaaggctactaaatatgacaattgtgaatgaaggaaaaatcaagtctacaatattatattagagtataacaaataatcttt

SEQ ID NO: 354327 - DNA, 201 bp, Homo sapiens
aatatggattctggtcactgcaaacacatacttctgttggaccttgttttctggctacctgttaacagctaaaagatggcctttacttcactttcaccttycaaatctagtgcatctgattggcagaactcaaatcacatccagaacctatgggagtctgggaaatggagtttttagctttcctgcccatgtgctctgagg

SEQ ID NO: 354328 - DNA, 201 bp, Homo sapiens
tcctgacttggctacatccagttatgtgaccttggacaaatgggttaacctttctaaatcccagtttcctcaacagtcattgagaataacaagagtacctrcctcataggattataaggattaaattaaatgtgataatacaccacaatacctgcagtttaataaaagtggcagttattctcccgagtttatcatctccct

SEQ ID NO: 354329 - DNA, 201 bp, Homo sapiens
ccactggactgtaagtgttaagttgccatctagaggtcaggaggccgctcctattactggtagcactgctgccactgccatagctgtctcatacctacagkgctggtgactagatgccggaatatggattctggtcactgcaaacacatacttctgttggaccttgttttctggctacctgttaacagctaaaagatggcc

SEQ ID NO: 354330 - DNA, 201 bp, Homo sapiens
ttatatttagaactaaatgatcactggaagaaaaagggattttagttcaggggtccctttccacagcagatgtgagtaaagtttattagcattagattatkattctttctacgagggtttaaaaggtctacataaaaagacaccaataaacatgagaacatactcttatggcacatcaaatatcagaaattatgcattcat

SEQ ID NO: 354331 - DNA, 201 bp, Homo sapiens
cataatataattgaaatgagcagagtgggttttagtggtacagaacaaaatgttcttaagaattcctttaatgtttcctttctatttattctgcttttccyttagcttcctctcagttaatacagtttacttcatctctctcttagagggagatcacatcctttgaacttaaaaagctgtcagtttatttttctccattaa

SEQ ID NO: 354332 - DNA, 201 bp, Homo sapiens
tttgatagatgaagaatctgaaacagagaggctaacatctaataatataatgactagaatctgaacctgtccacatcatctggcctcaatttctatcttcrtgactttgctatgctgcgtctttattgtggagttttaaataaatgtggtttaggtagtattcctctaactggttattacatgttcagttgttttttctac

SEQ ID NO: 354333 - DNA, 201 bp, Homo sapiens
ctaaaaatgtgttttaggaagattttgacaccagatttttaaaatgcacagagccaggtaaaagtaagtggttacacttaatgatattagttaaaggtgcrtggaaaaaggaacaaaagtgctgaattatacctttttaaagggtttatgcaaattattatatgtacaatagtcttttaagcctgataattccaatcacca

SEQ ID NO: 354334 - DNA, 201 bp, Homo sapiens
gacagctgaccatccagatttaaaggctgtctacttccattccaaccaaatagaattaggataaaaatatccagctataatgtgagctgcaagggtagttyggggttatttcatcagcaatctaagtgatttttctgattccagccctgcttccccctagttctttctctacagttaaaatgatctgtttatttctttaaa

SEQ ID NO: 354335 - DNA, 201 bp, Homo sapiens
gcagaaaaacatcattagagaaagtctggtatcagaaccttggaaagcttcatgaagctttactattgattattactggtgacactaccttaatgtttcartagcaagaaagaataaagtcatttatccaagatataaaaaaggatcaatagtatggtcatacaaggaatgacaaatacagttttctgaatattatccatc

SEQ ID NO: 354336 - DNA, 201 bp, Homo sapiens
acttaaacatgagttgcaaacttcagagcagaaaaacatcattagagaaagtctggtatcagaaccttggaaagcttcatgaagctttactattgattatyactggtgacactaccttaatgtttcaatagcaagaaagaataaagtcatttatccaagatataaaaaaggatcaatagtatggtcatacaaggaatgaca

SEQ ID NO: 354337 - DNA, 201 bp, Homo sapiens
tgaagaagtcccatttgaggagcagacactctgcctagtgaattaaaggaaggagctgactgattcaggagaatcctgctctgcctggaatagcccagatrggggagaggagagacaactttgagtagagtttggaattggggcctggacgttttccctactgaaatgtaacatgtttttgtgagtagaggtgaccagaga

SEQ ID NO: 354338 - DNA, 201 bp, Homo sapiens
actacagaccataaatgactaacgtttttaaagattcagcattctgattaaacctcaaagcggtgtagatttaaaacagaacctgactttcaaaggattaktctctgactcattaagaccatttgatctatgctagcttatttttccctccaggaaaattcatctgtttattttacagttgaaatctttgttttgtcatta

SEQ ID NO: 354339 - DNA, 201 bp, Homo sapiens
tcttttcatacttttctatattagaaaaagaagaaaacacaaccttacaaatgtaattgttgtgaaaagaatgaaagagagggcacaattattaaagtgtratatatatatatatatatatcagtaaaaatgagaagtgttatcacagtctttatttgaagagtcacatccattgatttgagtttatgatataatgatata

SEQ ID NO: 354340 - DNA, 201 bp, Homo sapiens
ttaaaatttcacacaatgaaaaactcagtttctcagtcttaccagtcacagttcaatggttccatttggctagtggctacgctatcagacagtgcagacarcgaacatttccatcattgcagaaaggtttgttggacagtgctggtcatgggtggcttgaaagttttgtttcagggacttctggaggagaaataatatatt

SEQ ID NO: 354341 - DNA, 201 bp, Homo sapiens
atagtcttctagaacttatggttaaagaaaatttattggaagaacaataacggcaccaaatgatacagcattaaggcacattgagaactaggaataaaccrtttgatttgttgaaagctgtgctgtctagtacagtagccactagctacatgtggctatttaaattaaaaccaattaaaatttcacacaatgaaaaactca

SEQ ID NO: 354342 - DNA, 201 bp, Homo sapiens
taaacgattacttctagtgaaattaaaaacaaaaacaaaagtcgtatatggtttttgtgaatgaaaacagactattgtacaaacctctagaatattaaatrtcaaggttttatgtaatgttaaatgtcattatagtcaatgcataccatctagccttgtggcttttttttttttttttttgacttagtctcgttctgttgc

SEQ ID NO: 354343 - DNA, 201 bp, Homo sapiens
cagcccacatgtcaatggctttagtataattattaggagaaagtaaaagacatggagatctgtaccatttagtaaccaatccttcaaaagatgactcttaygggaataatgaggatccatgatccgtgcaagaccaaagtcgcctatcttcagcaccaagtcttcagtattaatgaaaagattagttggtttgagatctct

SEQ ID NO: 354344 - DNA, 201 bp, Homo sapiens
ctaactatagaaacccttgaaataaggcaaaaaacttgtgttaacctgggaaggaaaggaaaaattgggcagcaggatatgaaggggccatggaaggagcrgtgggtcctcctgagacgctttcctgctttataattttttccattttgactgtgggagatactactgtaatactttcctagatatagcagccgctcaata

SEQ ID NO: 354345 - DNA, 201 bp, Homo sapiens
aggcctaggtctgtgtagtgaattgagcgtcctcagttggatggagttaagagccaaacgtacaacattgtaccatttacaagttttatttcaaaaggagwtttaaatttttatacagtcaaatttctgccaaaagagagattccaaattaatttttgtttatgcaaagcccatatgttgttttccacagtctcaaaaaga

SEQ ID NO: 354346 - DNA, 201 bp, Homo sapiens
gtttgagaccagcctcggcaacatagtgagaccctgtctctgaaaaaaaatttttttaactagctaggcatggtggcatgcgcctgtagtcccagctattstgaaggctgaggtgggaggattgcttgagaccaggagttcaaggctgcagtgagccatgatcatgctactgccctccagcctgggcagcagagcaagacc

SEQ ID NO: 354347 - DNA, 201 bp, Homo sapiens
ctttactgcttattcttaaaattaacactgagttttcaccttaatacatctcttaatattttaaattaagtatcattatctatgatttgagaatatggaastgataactccatgacattttgggtaattccgcctttattgtaaattccttacagacttaataccatctttgctataacaaaggaagtaaaatgtatttgt

SEQ ID NO: 354348 - DNA, 201 bp, Homo sapiens
gaatttagtgtgagtctttgagaagcatcacgaagttcaaagaggtctgtcttggtatctctgtggtaatgctttgtttgaatgttgatgtttcacaaagrgtttacattttatcttcctatttctcacaggcctaggtctgtgtagtgaattgagcgtcctcagttggatggagttaagagccaaacgtacaacattgta

SEQ ID NO: 354349 - DNA, 201 bp, Homo sapiens
gcatgttgaaataaatttgaagtaagaggcttcattttttatatttaatactatattcttctaaaattcacagatacctacatttaatactttactgcttwttcttaaaattaacactgagttttcaccttaatacatctcttaatattttaaattaagtatcattatctatgatttgagaatatggaactgataactcca

SEQ ID NO: 354350 - DNA, 201 bp, Homo sapiens
gaaagcatgttgaaataaatttgaagtaagaggcttcattttttatatttaatactatattcttctaaaattcacagatacctacatttaatactttactrcttattcttaaaattaacactgagttttcaccttaatacatctcttaatattttaaattaagtatcattatctatgatttgagaatatggaactgataac

SEQ ID NO: 354351 - DNA, 201 bp, Homo sapiens
tgaaatacagacttacaaaagaagacttaccaataagattaaaataaattaacaacatatttttatgttgctaaagaataatatatgtgtttcatcgttaycgtatcaaataaaaatctaatggcatgtctaataaataccataacttcaaagtgatgatgaacttatatacaagatatctgaaacatctataacgtaata

SEQ ID NO: 354352 - DNA, 201 bp, Homo sapiens
tatatgaaatacagacttacaaaagaagacttaccaataagattaaaataaattaacaacatatttttatgttgctaaagaataatatatgtgtttcatcrttaccgtatcaaataaaaatctaatggcatgtctaataaataccataacttcaaagtgatgatgaacttatatacaagatatctgaaacatctataacgt

SEQ ID NO: 354353 - DNA, 201 bp, Homo sapiens
gttcttaatcttttttgagttgtaggcacctttggcattctggtgaaaataaagaccccttctcagaatattgttttcaaatgcattatatgaaatacagrcttacaaaagaagacttaccaataagattaaaataaattaacaacatatttttatgttgctaaagaataatatatgtgtttcatcgttaccgtatcaaat

SEQ ID NO: 354354 - DNA, 201 bp, Homo sapiens
tgctgggattactggtgtgtgccaccgtgcccagtttggccacacccaaggacacataggaagttgtttttatctttgttatccccagtgtttagctcagyactggtcctattttgagggtgaaatagatgggtaagtgatcactttagcacaatttattaagtgctgtgatcaagcatagccagctatctttaagggttg

SEQ ID NO: 354355 - DNA, 201 bp, Homo sapiens
tcaggaaggttcacattttgtaaatgctatccttgacaccccatacccaggtcagcttaggtgctctcctaatcatgtaatcattcctttttttcttcatrtaccccggttggccacattctttttatttatttatttatttatttttttgagatggagtctcgctctgtcaaccacgctgcagtgtagtggtgcgatctc

SEQ ID NO: 354356 - DNA, 201 bp, Homo sapiens
atgtcctattttgttagcagcacgagttagcctttctttataaatacctcaccattttcaagtattctagcatcttggctcttgccgccacctagagttcrgttgtggcttattcccacatgctgttatcactgtgtggaaggcctaattcatttgctgtttttttattcctttttataattctggttaattggtagttga

SEQ ID NO: 354357 - DNA, 201 bp, Homo sapiens
cccattaaaaagaatgaagcactgatacatgctatatagaaacactatggaaaatgaacataaaagccaaatgtaatatgactgcatttatatgaaatgcrcagaatagtcataacgcatagagacagaaagtagacggtggttcccaaggacctggaggtgaggtgatcgacggaatggaaaatgacagctagtgggtac

SEQ ID NO: 354358 - DNA, 201 bp, Homo sapiens
cttgcatccagaatatgtaaagggcatttaagatgcaaaaataggaaaacagttcaattttaaaaatggactaaagattcaaacagacatttcaccagtgragatgtgcacatgaaaaataagcagaggaaaatgctcaaagtcagtagtctttagggaaacgcacattaaaaccacaatgagatactatgtacctattag

SEQ ID NO: 354359 - DNA, 201 bp, Homo sapiens
gttgaaatcatgtcaaatatattctcagattacaaaaaaattaaattagaaaaaaaacaaaccccagaaaggtatttggaaaattctcacatatttggaarccaaataatgcacttccaaataacccatggatcaaagaataaatcacaaccctaattataatatatttggaaaagttgggtgaaatcccagaggagctga

SEQ ID NO: 354360 - DNA, 201 bp, Homo sapiens
gactcctacaattttttggcatttcaagatatactttcttttacttcctttttaaattttgcttttgttatatcatttctgtaatgacattcctcaaggasagtaccatattttaaacgttccaaaacacctggaagaatggattggatctagtacttttttgctcaataaatatttgtccattgttaagtgtagaaatgg

SEQ ID NO: 354361 - DNA, 201 bp, Homo sapiens
aatattttgtttgggtttttcttgttttttttttttttcaacatgaactgtaacattttaaatgtattacaataaatatggtcccatgtaaaaaaaggatkatcagaaaattacaaaagttgataatgccaagcacattgagtcttttaaaattcagtggtctccgtgatctgtccctgagataggtccttttccagcccg

SEQ ID NO: 354362 - DNA, 201 bp, Homo sapiens
cagtttttctaaaataattccatttaaattgctgaaagtacattccatttttaaaagaatatatttaagtgaaagttgtagaatagctgttaacattggcraaattactgtatataagacttctagattttatgttttagtaaataaaacaagatcattactctgtacggcaatacaatctgaaaaggttaatttttataa

SEQ ID NO: 354363 - DNA, 201 bp, Homo sapiens
cttccttttccccttctttttctcttctctgcctcccttcctctgcacttggtctcttctctttctctctcttcgccttcaacagttattcattaactatrtattcctctctgagataattacaaaaattggttgcatggactaaaatcaaatttccatttctaaaatgtttagtcatttcctgaagtataaatgttatac

SEQ ID NO: 354364 - DNA, 201 bp, Homo sapiens
ctttaccttacagggcagcagtccagctgagaaaataagcatgggggtacttgtaactttaataatagggaaatgtcataaaagaaatgtgaatagaaagytatgggattactgcagaaaaagcaggcactttatagattttatctttgttaaattttataagaatttttataagaacaaaataaatgttctgtcatcaat

SEQ ID NO: 354365 - DNA, 201 bp, Homo sapiens
acatgtcctgtggttgtacacatggcataggaataggaagtgattagtgctaagttttacaatctgctataaaatgaaagcttaaatggttttaagtactrtcttgtgtacaaattgtaattgttataatgaatctcaaattgactttgatgtacttttccctgtgatcatagagatggatattcagaaaaatgtgtcatg

SEQ ID NO: 354366 - DNA, 201 bp, Homo sapiens
tttcctgagcatatcttaatattaatgggctttattttcacttatccaaactatttgtcttcttactacctgaagttatggatgacccgacagttcacccstgtgaaccagctaatcagtcctctgattatgacagcacagaaacagatgaatctaaggaggaagctaaagatgatggtgccaaagaatcaataactggtg

SEQ ID NO: 354367 - DNA, 201 bp, Homo sapiens
agtctgagtggctctgaaattatgtaataattgtgccaacttaaaaaattataaattatttcatgtagtaaacatcaataaagccattgtccctctaaatmaaaagccataatttaaattataattgtctatctctactaaatggagattttaaaattagctgcttccagaaccaaaacatctacaaaattaaaggtgaga

SEQ ID NO: 354368 - DNA, 201 bp, Homo sapiens
tataatttttcctactgtcatccaggtctgtggacatagttttaccttttctgtaaaaattgtgaagatataatttgatcatctgcttttcttatttagcrttattataaatacctttctgttttgctccatggttcttatacattttaaaattacttttaaagctatctgtgtgtgctagtttttctaaaatgcatttgg

SEQ ID NO: 354369 - DNA, 201 bp, Homo sapiens
gtgatatctctttaagactttaaaaatcttgaccaggcatggtggtccatgcctataatctcaacactttgggaggccaaggtgggaggattacttgagcycaggagttcaagaccagcctgggcaacatagtggaatcccatctctacaaaaagttttaaaattagctgggtgtggtggtatgtgcctgtagtcctagct

SEQ ID NO: 354370 - DNA, 201 bp, Homo sapiens
ttcagggcatgagagttgtttatggacaatgctcacattcaactgtgtttcaaagctaaattgattaggtggttttcctgccaaaacatcttaaatcgagrgaaaaattactttggatcagatctgagaattttaaaaaatattctattttattgttatcctttaatatgtaggaaaactgcattgctgaaaacctaactc

SEQ ID NO: 354371 - DNA, 201 bp, Homo sapiens
cagtagaaataatgtttgtaaaataatgctaggttgctccaagtagtcagtattttcaagtcaccattttcaccaggttctagaatgctgtctaaatttaytaagagaaaggcactccatattgacatttcttgtagaaggttagatgccccttctgtggacatcagtaatactctgtatttccctttcctttacatgtac

SEQ ID NO: 354372 - DNA, 201 bp, Homo sapiens
gagtggctctgaaattatgtaataattgtgccaacttaaaaaattataaattatttcatgtagtaaacatcaataaagccattgtccctctaaatcaaaarccataatttaaattataattgtctatctctactaaatggagattttaaaattagctgcttccagaaccaaaacatctacaaaattaaaggtgagaatttt

SEQ ID NO: 354373 - DNA, 201 bp, Homo sapiens
agtgtttttctctctagtgattaaactttcaaaacatctctataaaaatttcttgtactttgtctgctgatcttgattctttttgaatatttttctcattrccatattttcctctcagtgttcagtcctaaacgagaagctcgaacaactgctgcaggctttgcacacagattcccaggctgcgcctgttctccctggcct

SEQ ID NO: 354374 - DNA, 201 bp, Homo sapiens
aaaagaaaacaaacaaaataaaaaagcccatagccctataaacctaatgaatcaacttataatttttcctactgtcatccaggtctgtggacatagttttwccttttctgtaaaaattgtgaagatataatttgatcatctgcttttcttatttagcattattataaatacctttctgttttgctccatggttcttataca

SEQ ID NO: 354375 - DNA, 201 bp, Homo sapiens
gtataaaatgtctgttgtgttattttgagaaaaatagctgtataaatattataaagatttttttccccatgaaatggagtctgagtggctctgaaattatrtaataattgtgccaacttaaaaaattataaattatttcatgtagtaaacatcaataaagccattgtccctctaaatcaaaagccataatttaaattataa

SEQ ID NO: 354376 - DNA, 201 bp, Homo sapiens
tttaaaattttctttctgtgttttttctttcatttttaattatttctacctttttctgttcttttattttaggatctggggataccgaaagtgggtcatgygaagcgaattctccagggaattaaagagcttggaaggagcactccacagtcggaggtgtaatcatattggtgctattccttggaagagaagttattgcca

SEQ ID NO: 354377 - DNA, 201 bp, Homo sapiens
acacatgtaaattcccctgttaacatcttgcattagtgtggcacatttgttacaactgttgagtcaatactgattgattattattaactaaagtccatagkttccattactctttgagttgtacatctgtgagtttggacaaagatataatcacttgtatccaccactgcagtatcatacaaaattatttcacgaccctaa

SEQ ID NO: 354378 - DNA, 201 bp, Homo sapiens
agggttccatttctggagcagcaataagtgagttgtataaatgccagcaacaataatacagtgtagagttttcttttcttcagatgacgatttatgaagaytcagttgcaacgcatcttacaaaaatcctcaattctgatgaacatgcagtggtcatatcttctgccaagtgagttgtgggttttaagtctttaaatatgg

SEQ ID NO: 354379 - DNA, 201 bp, Homo sapiens
ggacattttcaaacaaaactgatataattacttcccaccgtacccatcattcagtttcagtatttaccaacattttgccatctgcttcctactttattttrctacagtatctctaagaacatcctgaaaattattctactacacttttggtatatagtcctccctctctatccatgggggattggctccaggacccccttg

SEQ ID NO: 354380 - DNA, 201 bp, Homo sapiens
ttttaattattattatacttttagttttagggtacatgtgcacaatgtgcaggttagttacataggtatacatgtgccatgctagtgtgctgcacccattractcatcatttagcattaggtatatctcctaatgctatccctcccccctcccccaaccccacaacagtccccagagtgtgatgttccccttcctgtgtcc

SEQ ID NO: 354381 - DNA, 201 bp, Homo sapiens
acattacaaaaaaaagttccaaaatgctttttataaaatatatgaacttggccttctaaaacaacttgtatagttgtatcatgtgtttatgtacatacatatgtatgtatgtatgtatgtatgtatgtgtagttttaaacctttatgactgtcttagtctgtttagtgctgctataatagaatacctgagattggataatt

SEQ ID NO: 354382 - DNA, 201 bp, Homo sapiens
cattacaaaaaaaagttccaaaatgctttttataaaatatatgaacttggccttctaaaacaacttgtatagttgtatcatgtgtttatgtacatacatatgtatgtatgtatgtatgtatgtatgtgtagttttaaacctttatgactgtcttagtctgtttagtgctgctataatagaatacctgagattggataattt

SEQ ID NO: 354383 - DNA, 201 bp, Homo sapiens
attacaaaaaaaagttccaaaatgctttttataaaatatatgaacttggccttctaaaacaacttgtatagttgtatcatgtgtttatgtacatacatatgtatgtatgtatgtatgtatgtatgtgtagttttaaacctttatgactgtcttagtctgtttagtgctgctataatagaatacctgagattggataattta

SEQ ID NO: 354384 - DNA, 201 bp, Homo sapiens
taatctcagcgctttggaaggccgaggcgggtggatcacaagtcaggagttcaagaccagcgtggctaagatggtgaaaccccgtctctactaaaaatacaaaaaaagtagccaggcacagtggcaggtgcctgtaatcacagctactcggaaggttgaggcaggagaatcacttgaacctgggcagcagaggttgcagtg

SEQ ID NO: 354385 - DNA, 201 bp, Homo sapiens
attcagagagatttggcacataggctgtaattggaaatagccaaggggtagatttcctgaaaaggagggagtggaagctataatgcatgcagtaaggctgraggaaaggaaaggacagaggcagcgagaggattctaattttttaaagcggttttgtcataatggagaggaaggcatagcttggaagctgggacataatca

SEQ ID NO: 354386 - DNA, 201 bp, Homo sapiens
ggaggaataaatggaagacaggatggatccagatgaagggatgcaagaaaatgctgtcaagaccaaagtagagaacccatgtgcagctgtgcgtgcgtgcstgtgcgtgcgtgtgtgtgcgtgtgtgtgtgtgtgtgtgtctgttgctgttttttctagtaatttgcacagccttcatctctgaccatttcttggttccat

SEQ ID NO: 354387 - DNA, 201 bp, Homo sapiens
aatggaagacaggatggatccagatgaagggatgcaagaaaatgctgtcaagaccaaagtagagaacccatgtgcagctgtgcgtgcgtgcctgtgcgtgygtgtgtgtgcgtgtgtgtgtgtgtgtgtgtctgttgctgttttttctagtaatttgcacagccttcatctctgaccatttcttggttccatgctaaccat

SEQ ID NO: 354388 - DNA, 201 bp, Homo sapiens
atggaagacaggatggatccagatgaagggatgcaagaaaatgctgtcaagaccaaagtagagaacccatgtgcagctgtgcgtgcgtgcctgtgcgtgcgtgtgtgtgcgtgtgtgtgtgtgtgtgtgtctgttgctgttttttctagtaatttgcacagccttcatctctgaccatttcttggttccatgctaaccatt

SEQ ID NO: 354389 - DNA, 201 bp, Homo sapiens
tggaagacaggatggatccagatgaagggatgcaagaaaatgctgtcaagaccaaagtagagaacccatgtgcagctgtgcgtgcgtgcctgtgcgtgcgtgtgtgtgcgtgtgtgtgtgtgtgtgtgtctgttgctgttttttctagtaatttgcacagccttcatctctgaccatttcttggttccatgctaaccattt

SEQ ID NO: 354390 - DNA, 201 bp, Homo sapiens
ggaagacaggatggatccagatgaagggatgcaagaaaatgctgtcaagaccaaagtagagaacccatgtgcagctgtgcgtgcgtgcctgtgcgtgcgtgtgtgtgcgtgtgtgtgtgtgtgtgtgtctgttgctgttttttctagtaatttgcacagccttcatctctgaccatttcttggttccatgctaaccatttc

SEQ ID NO: 354391 - DNA, 201 bp, Homo sapiens
gtgagttgtgggttttaagtctttaaatatggtgaaaatgaaatgatagctggctcctaccatttaggtcatttctttgtgagttttcttctcaaaaaatrtcttggaagtagcttataaaattagatgtactaaatttgaattgatttttaaaaatcatgttagcatcttatttgcagtggtgtatacttagagggtatt

SEQ ID NO: 354392 - DNA, 201 bp, Homo sapiens
taaagttactttaaatttaaaaacctgtttttatcttattctcaaaaaattttaaaaaatgtttgcaatcattaaatttttgcttttactttcactacatrtaaacttgggcaaatttcttaacctctttttggttttctcatctctaatatgaggataataatctacctacttcattgggttgctgcgaaggttgaaaag

SEQ ID NO: 354393 - DNA, 201 bp, Homo sapiens
cttggctggggaggttcatatgacgatgacacccaacttcctcagatcctagagaaactggaacgagccagtaccaaaatgttggacaggtaaaagtaaawtcttttctacaactagatggaaaatggcatactgaaatcatttttttgatgatttcttaataaatatttattaataaattttactgactagaagctccac

SEQ ID NO: 354394 - DNA, 201 bp, Homo sapiens
ctcaatatactcagataataaacctgcacatgtccccctgaatctaaaataaaagttgaaattataaaaaaagaaattgtcttcatacaatgaaaaaaaamcaaatttttggagagctgaccatatcagattaacattttctgcttgagctgtggcatgatgaagacctttcattccccatgtttatggccgatttttcca

SEQ ID NO: 354395 - DNA, 201 bp, Homo sapiens
gtgtgccatgttgtagctcccagtgcatggccacgtgctgtgctgcctcctggtcttggggctggttataaatctgcagttcactcatgtgttcctatacraggccttttacagactccaaatagatggtcctgagctgatactgtcattgtcaccatgatcctggagacacagcctgtagctgtgtggaagtaaacttct

SEQ ID NO: 354396 - DNA, 201 bp, Homo sapiens
tagggaatttgccataaagaggctgaagagaaaaaagaggagacaatatataattatttggtactagtaatacaatatatgttaaattttatttcttcttmttattatttttggaagaaaatcactttattccagttatctcacaaacaataaaatcacaacagctggtttaaggaggccacacatttacccagtcccaaa

SEQ ID NO: 354397 - DNA, 201 bp, Homo sapiens
ctgcctaccacaataccttttggtacttttactttttctttctttctttctttctttctttctttctttctttctttctttctttctttctttttctttcyttctttccttctttccttctttccttctttctttctttctttctttctttctttctttctttctttctttctttctttctctttccttctcttctttcct

SEQ ID NO: 354398 - DNA, 201 bp, Homo sapiens
tatagagcttataaatgacagagggctgtattaaattatggtagcatcacctcacgttttacccgattacatttcagatgttttctttgaccttggcctgrctctttgtctaaggctctgctcccagccctagctttgggtttctccctaaccagcttgcctgcccttaagcagattccattctgatgcagcatccctcct

SEQ ID NO: 354399 - DNA, 201 bp, Homo sapiens
tagaaaaatgttaagtggtttggtttaaatgttaattaaaataataagtatgatcataaaatgtatgtaacataattatgctcatttttcttgagtaattyttaaaaaattagtttcataactaattgtttccttaatagccaactagactttatttaaaagttaatagaataaacagcattaattgaaattaagaaacaa

SEQ ID NO: 354400 - DNA, 201 bp, Homo sapiens
agcaatacaattcattgaaaaccccagtggcactgcccaccaaacaaagagagtgtgtagcccacctctcctgggccagtcattgtgcttccattcagcgytttttctagtgttcaatcctgtttcctatttgtgggggatatggaaagaaggcctgttatttctccctcatggaactgctaggataattaagctgagtaa

SEQ ID NO: 354401 - DNA, 201 bp, Homo sapiens
tgggcgtggtggtgggcgcctgtaatcccagctactcgggaggctgaggcaggagaattgcttgaacccaggaggcggaggttgcagtgagctgagatcgygccactgcactccagcctgggtgacagagcaagactctgcctctcaaaaaaaaaaaaagaaaagaaaagaaaaagaaaacacataatgtgtgatgaatta

SEQ ID NO: 354402 - DNA, 201 bp, Homo sapiens
aatcggtgcattctttttgttctgtaatataataataatgagatagtcatacaaacaaatgtatgaaactttgcgattatagaattttggtagattaaaamtgtgtgctgtgaatttaaattataagaataaaatttaaagtgtttatggtaatgaaatcctattttaatacagatcacatgtctttgatattcttctttt

SEQ ID NO: 354403 - DNA, 201 bp, Homo sapiens; identical to SEQ ID NO: 75913

SEQ ID NO: 354404 - DNA, 201 bp, Homo sapiens
tggttggttacatcaaaatgtcatgtgtgggcaaagggattattcttggatgtgagtaggggcatttgataaggaagaagtaaattcagaatttgaaggattcattcattcattcattcattcattcattcgttgttttacccatttacaacacagttacacatacgacattcaggcatttaccagttacgggaaggattt

SEQ ID NO: 354405 - DNA, 201 bp, Homo sapiens
gttggttacatcaaaatgtcatgtgtgggcaaagggattattcttggatgtgagtaggggcatttgataaggaagaagtaaattcagaatttgaaggattcattcattcattcattcattcattcattcgttgttttacccatttacaacacagttacacatacgacattcaggcatttaccagttacgggaaggatttgt

SEQ ID NO: 354406 - DNA, 201 bp, Homo sapiens
tggttacatcaaaatgtcatgtgtgggcaaagggattattcttggatgtgagtaggggcatttgataaggaagaagtaaattcagaatttgaaggattcattcattcattcattcattcattcattcgttgttttacccatttacaacacagttacacatacgacattcaggcatttaccagttacgggaaggatttgtgc

SEQ ID NO: 354407 - DNA, 201 bp, Homo sapiens
ggttacatcaaaatgtcatgtgtgggcaaagggattattcttggatgtgagtaggggcatttgataaggaagaagtaaattcagaatttgaaggattcattcattcattcattcattcattcattcgttgttttacccatttacaacacagttacacatacgacattcaggcatttaccagttacgggaaggatttgtgca

SEQ ID NO: 354408 - DNA, 201 bp, Homo sapiens
gttacatcaaaatgtcatgtgtgggcaaagggattattcttggatgtgagtaggggcatttgataaggaagaagtaaattcagaatttgaaggattcattcattcattcattcattcattcattcgttgttttacccatttacaacacagttacacatacgacattcaggcatttaccagttacgggaaggatttgtgcaa

SEQ ID NO: 354409 - DNA, 201 bp, Homo sapiens
gaagacaggatggatccagatgaagggatgcaagaaaatgctgtcaagaccaaagtagagaacccatgtgcagctgtgcgtgcgtgcctgtgcgtgcgtgtgtgtgcgtgtgtgtgtgtgtgtgtgtctgttgctgttttttctagtaatttgcacagccttcatctctgaccatttcttggttccatgctaaccatttct

SEQ ID NO: 354410 - DNA, 201 bp, Homo sapiens
gcaggatggaatactgcagacagacccactgaagagcgagcgcttcactgggcttcaccctggcatgccctgcacagagagtgaatgctgccagcacacaytacactgtggccagactacagctttctgtcacatggatgtctcagacaaccagaatcagaacatgtgtgtgttttatatgtaaaagtaaacgattacttc

SEQ ID NO: 354411 - DNA, 201 bp, Homo sapiens
tacatcaaaatgtcatgtgtgggcaaagggattattcttggatgtgagtaggggcatttgataaggaagaagtaaattcagaatttgaaggattcattcattcattcattcattcattcattcgttgttttacccatttacaacacagttacacatacgacattcaggcatttaccagttacgggaaggatttgtgcaact

SEQ ID NO: 354412 - DNA, 201 bp, Homo sapiens
gacaggcggatcacgaggtcaggagatggagaccatcttggctaacatggtgaaaccccgtctctaccaaaaagacaaaaaattagccgggcgtgttggckggcgcctgtagtcccagctactcgggaggctgaggcaggagaatggcatgaacccgggaggcggagcttgcagtgagcccaggtcgcaccactgcactcc

SEQ ID NO: 354413 - DNA, 201 bp, Homo sapiens
cagcacacattacactgtggccagactacagctttctgtcacatggatgtctcagacaaccagaatcagaacatgtgtgtgttttatatgtaaaagtaaaygattacttctagtgaaattaaaaacaaaaacaaaagtcgtatatggtttttgtgaatgaaaacagactattgtacaaacctctagaatattaaatgtcaa

SEQ ID NO: 354414 - DNA, 201 bp, Homo sapiens
gttggggtaatttgtccaggttcatactgttattgtatgctggagcctggcttgaaatctgtctgtctgactctaaatttgctctttggtactgactttcaaaagtgttttgttacgattaaattgtaatgatttcataacagttccaggaagacagtcttagagcaagctgtagagtaaaattcttattgaaattcaaag

SEQ ID NO: 354415 - DNA, 201 bp, Homo sapiens
acagtgagcatgctcagtcattaaacctaaattagcttctgctcctactcctgggtgggggcagagcttcctaaaaatgtgttttaggaagattttgacamcagatttttaaaatgcacagagccaggtaaaagtaagtggttacacttaatgatattagttaaaggtgcatggaaaaaggaacaaaagtgctgaattata

SEQ ID NO: 354416 - DNA, 201 bp, Homo sapiens
gttgtaaattttttttcctgtaatgttgcttcctttggtttgtatttctgacttaattggtgataacatagattttatttcaggggtaaattctcaagatrtatgacatttaaaatatacaaaatcattagatgattaatatggatttttagtctttctggtataaatgtcacataataaatctgaatatttttgataact

SEQ ID NO: 354417 - DNA, 201 bp, Homo sapiens
ttgcttcctttggtttgtatttctgacttaattggtgataacatagattttatttcaggggtaaattctcaagatatatgacatttaaaatatacaaaatmattagatgattaatatggatttttagtctttctggtataaatgtcacataataaatctgaatatttttgataactgacatgtagctaatactgatacgca

SEQ ID NO: 354418 - DNA, 201 bp, Homo sapiens
tgtatattaagctggtaccatgtggtaggacattgaaatggttgtttacactataaaaaatgagttgcaattataaaaacaaaggcggaggagggaggccwtagaatgctggcattaaatcttatttttcttaagagtctgtgcaaaatggggcctggagtttcactccaggagcacttttagctgctgccacatgaagct

SEQ ID NO: 354419 - DNA, 201 bp, Homo sapiens
taactctttattgaatgctgtataaatgtgatccatcttggaccctatcctaagggggtctatttgagccagtgttgtgacatggcctctaaggtaatccyatagaaaggctctagtgtagtttgctttcttttttccttcctctcttctttccatccaattaaaatgaaacattaaatttaacttttttagatataataa

SEQ ID NO: 354420 - DNA, 201 bp, Homo sapiens
cctatcctaagggggtctatttgagccagtgttgtgacatggcctctaaggtaatcctatagaaaggctctagtgtagtttgctttcttttttccttcctytcttctttccatccaattaaaatgaaacattaaatttaacttttttagatataataaactcagggaccttatattctaataggggtagcacaataaacgt

SEQ ID NO: 354421 - DNA, 201 bp, Homo sapiens
acctcttcctcccttcttatttgagtatcttcttccccgacaaagcattctcagatcctctagtcttggttagtttccccttcactgtgttctcattgcaycccagatgttgaaagcataaatacagttcagatcacgaagggtcttgtaagccatgccaagtggtttagaagatgacaggaacctactccactgaaatta

SEQ ID NO: 354422 - DNA, 201 bp, Homo sapiens
tttttgagacaagtctcactcttggctgggctggaatgcagtggcgtgatcatagctcactgtagcctcaatctcctgggctcaggtgatcctcctgctcyggctttcccaggcatatgccaccatgctaggctaatttttgagtttttgtagagatggggccttgtgatattgcccaggctggtctcaaacttctggcct

SEQ ID NO: 354423 - DNA, 201 bp, Homo sapiens
aaaaatataattttagcaactttagtttttgatctttagttcttcggacatcaaccccaagttcattgctaaatagtgtttatttgtgaatctggaatttygtttggcatatgtttcaatttgcctttcctgagcatatcttaatattaatgggctttattttcacttatccaaactatttgtcttcttactacctgaagt

SEQ ID NO: 354424 - DNA, 201 bp, Homo sapiens
tttcacaaaccaagagaaaattatgacaagatgatgttataataatggcaagaaaaacctctatttcagagttacaggaagatgcatcaatgctcctctcycttaaagtagcgcattttacagaaactttcagtaaaatgcctagaagagattttgtgatagtgttatatatatttcgagaaatcccatgaagtattgttc

SEQ ID NO: 354425 - DNA, 201 bp, Homo sapiens
aacatactgtcattgaattctatgctttaaaatggttaaaatggggaatttcatgctttatgaattttaccataaaagaatcctctcatacctaaaacacrtctgagtatcagtgggaatctctagtaaggaagcacacaaaaaaatgaagtggttgctaatttgcttctactttgtttagtggatgtcagcatttctgtt

SEQ ID NO: 354426 - DNA, 201 bp, Homo sapiens
accaaaaggaacaacagaagcaccgtatttcgaatagtgccaaagtttaaaaaggaaaaggttcagaagcagaagacaagttcacagcctggtaggtggtycatatggaaggggaaatataacattatgaaaaaagagctgattaaagtgacatcatggaggtcatgaaaatgttctggagctagatggtggttgagcatt

SEQ ID NO: 354427 - DNA, 201 bp, Homo sapiens
gcatgggactgaaaaactgcaggatgaggaggtcgtgggtgtgagcgttcatctcagcactgggcgatgctgctctacaatgatagtgattgccttgcacyggggctgacttatttggtggttttgagtcttgtcttttaacattgctggctgaaatttggaagccagcctcaaattttaaaatatggaaaaactattgtt

SEQ ID NO: 354428 - DNA, 201 bp, Homo sapiens
tgctatgcatgaaacgtactactgaccctctagagtgagaaatgattcaaaatctcccctggggtaaggttggtgtccgccagtcttcacctggctgcccyttcttccttctccacaggtcgcgatgcctcaccagtggcttgagggcaacctgcctgtaagtgccaagtgtgctgtctgcgacaaaacatgtggcagtgt

SEQ ID NO: 354429 - DNA, 201 bp, Homo sapiens
gcctctggactgtgtgaagacagtcagagtaggaaggagatcatgtagacagtggcatgggactgaaaaactgcaggatgaggaggtcgtgggtgtgagcrttcatctcagcactgggcgatgctgctctacaatgatagtgattgccttgcactggggctgacttatttggtggttttgagtcttgtcttttaacattgc

SEQ ID NO: 354430 - DNA, 201 bp, Homo sapiens
agcactctcctaaccttcacatgccccttcctcagctcctttggccaccactgccacaggatcatagtgtctctgtcagcctctgtttgcctcagtgacayggcacactgaggaggggcacccctgctgcccttttcattcctaggctgatggactgaagggctctgtctctaggagtgaataagataccaacaaaagcag

SEQ ID NO: 354431 - DNA, 201 bp, Homo sapiens
attcactatttaggtataataaaaggttacttcattcccccagaatataaatatcctatattccttttagcatatggaacttaatgagcaataagatagarcatgtcttctgattctttccacacttgtgtggcgagcactctcctaaccttcacatgccccttcctcagctcctttggccaccactgccacaggatcata

SEQ ID NO: 354432 - DNA, 201 bp, Homo sapiens
ttagatttggaatctactttagggataatttaggccaacccgcctcatttaattggtaaagtgaggtagttgttaaaaatatttcctcagagcacaaagayagctagagacaaagatagctagagatttttatgtattatgcattgatacttctaaatcatcttcagtttcaaattggaactttttattagatgaaaaatg

SEQ ID NO: 354433 - DNA, 201 bp, Homo sapiens
ttctgggaacgcttagtgatcactttattgtaatccctttacatgcctcagctaaatctacctgaaccctgaagggaaaagcttttaccttacttttataktccttgaacgttcataatagatgctcaataaacgtggggtaaatgagtgaatgctatgcatgaaacgtactactgaccctctagagtgagaaatgattca

SEQ ID NO: 354434 - DNA, 201 bp, Homo sapiens
atggaattacctcagaagatgttaggttttgcaacaatctttctctttgggtattaacaatcattagattgaattatccctttcagatcatcactccattyagaaggctaatgctgtgtgctgagaacagaaaggagatggaggattggatcagctcactgaagtctgtacagaccagagaaccctacgaggtaaaatagc

SEQ ID NO: 354435 - DNA, 201 bp, Homo sapiens
cattaaaatgtaatttttaagaagctatgttaattatttttaatataagaattatttaatgaaaatatagcatccattttaggtgtgacatctgtaagctsttctcttttaaaatgaaggcttaaacatttccattggatttaaatgttcacttagaaaaatgttaagtggtttggtttaaatgttaattaaaataataag

SEQ ID NO: 354436 - DNA, 201 bp, Homo sapiens
aaattttatgctgtgatttcctttaatcattggtccaaaatttcttgtccacttaaaagcagttgctcttttttttttttttttttttttttttttagtgkgtaaattcaaggctcacaaaagatgtgcagtgagagcaacaaataactgtaaatggactaccctggcctccatcgggaaggacattatagaagatgaaga

SEQ ID NO: 354437 - DNA, 201 bp, Homo sapiens
tccttttgataatatggctggggagatttagtgaagcctgtagtgacaacatcacttcatcatcccttctttctacatttgtcatttggtcatctcaacayaatactttccaaagatagggccgtgttggtcaccctcaccaacctattttccatgatgcctggctgtcttgttggtatacttgcactttacagccccctg

SEQ ID NO: 354438 - DNA, 201 bp, Homo sapiens
gtaataattgtgccaacttaaaaaattataaattatttcatgtagtaaacatcaataaagccattgtccctctaaatcaaaagccataatttaaattatarttgtctatctctactaaatggagattttaaaattagctgcttccagaaccaaaacatctacaaaattaaaggtgagaattttagtgtttttctctctagt

SEQ ID NO: 354439 - DNA, 201 bp, Homo sapiens
tgaggcaggagaatcgcttgaacccagcaggtggaggttgcagtgagtcgagattgcgccactgcactccagcctgggtgacagagcaagactttgtctcaaaaaaaaaaaaaatttttttttttactatttatttttattataacctccttgaggatagggactctgtcatacctttttaatcttatggtgccttatcca

SEQ ID NO: 354440 - DNA, 201 bp, Homo sapiens
gaggcaggagaattgcttgaacccgggaagcggaggttgcagtgagccgagatcgtgccactgcactccagcctgggcaacaggaaaagactctgtctctaaaaaaaagaaagaaacagatatgacaaatttatatatatacttgtattgactcaaattaagctaattttagccatagtttgagtttatgattacacaagt

SEQ ID NO: 354441 - DNA, 201 bp, Homo sapiens
tttcaagacagatgctttgacacgtcctatactgtagagaggtcaagtcaaagaagaattgaaaagtgatggttcaatttgttaacttggaggtcatttgrtcccattgatgtgagtagtttcagtgtggggcaggctgggggcaggcattaggctgtactgtgaatgcaaagtgaaaggcaggcagagacaaggtaggta

SEQ ID NO: 354442 - DNA, 201 bp, Homo sapiens
taagatttgaagcatgcattaatttctggtgaagacaaggtctagggttttggagtaggaaattattcaaatccttatacaggtctttcttggcccttcarctgggcttgtgatctctcctgtaatgtctttcttacagaatttagcatatgctgccttatacttagttaagtatttatttttgaccaggcacagtggctc

SEQ ID NO: 354443 - DNA, 201 bp, Homo sapiens
gtccgaggtggttaatagacactatcaataggttgggagagggcacttgtcatccaaagagctgtgtcggactttcagtcagggtgtcatgatcatttgcygtgcctggtgttaccatgttccccttgcccttactgaagatccatgactcggaaaacatagtgctcctgctcagtaaccttcaacctgctgcctctagta

SEQ ID NO: 354444 - DNA, 201 bp, Homo sapiens
ccatccctcctcttgctgaagtttctaagggtgatatattgacaaagtacaatagtgggtggaaactacataaacggtaaatggaaaatggaaaacctgtrctttgcctgaaaacccagtgctgaactctctggtaaaatgggttctagagatcagggcagtgattgacctagcctgggaagttcctcagtgtcatttcca

SEQ ID NO: 354445 - DNA, 201 bp, Homo sapiens
tggttttttgtccctgagatagtttgctgagaatcatggtttccagcttcatccatgtccctacaaaggacatgaactcatcattttttatggctgcatartattccatggtgtatatgtgccacattttcttaatccagtctatcattgttgggcatttgggttggtttcaagtctgctattgtgaatagtgctgcagca

SEQ ID NO: 354446 - DNA, 201 bp, Homo sapiens
gttatctaaattgcctcaggtattctattagttttctattgctgtataacaaccaaccacaaacttagtggcttaaaaaaacaaagcccatttatctcagkttttataggccacacagtattgctagattcttctgctccaggtcttacaatataaataaatagatatgggttgggcagggtggctcatgtctgtaatccc

SEQ ID NO: 354447 - DNA, 201 bp, Homo sapiens
agcagcatgatttatagtcctttgggtatatacccagtaatgggatggctgggtcaaatggcatttctagttctagattcctgaggaatcaccacactgayttccacaacggttgaactagtttacagtcccaccaacagtgtaaaagtgttcctatatctccacatcctctccagcacctgttgtttcctgccttttaat

SEQ ID NO: 354448 - DNA, 201 bp, Homo sapiens
tgtatgctttgtctatgcatggctgtgcagggcccaaatgacttcactgacacctgtttccaggagggggtcttcagagcctccttaggctcttgtcagtmtcataaataattcctcttcttatagcggatggggttaccaaaaaaaataaaaagtagggaagagcttctccatgggatcagatcacagctttggggagtg

SEQ ID NO: 354449 - DNA, 201 bp, Homo sapiens
tagtggcttaaaaaaacaaagcccatttatctcaggttttataggccacacagtattgctagattcttctgctccaggtcttacaatataaataaatagayatgggttgggcagggtggctcatgtctgtaatccctgcactttgggaggctgaggtgggtgggtcacttgaggtcaggagtttgaagccagcctggccaa

SEQ ID NO: 354450 - DNA, 201 bp, Homo sapiens
caggtttgtcaaagatcgaatggttgtagatatgtggcattatttctgagggctctattctgtttcattggtctatatgtctgttttggtaccagtaccaygctgttttggttactgtagccttgtagtatagtttgaagtcaggtagcgtgatgcctccagctttgttcttttggcttgggattgacttggcaatgcggg

SEQ ID NO: 354451 - DNA, 201 bp, Homo sapiens
catgctgttttggttactgtagccttgtagtatagtttgaagtcaggtagcgtgatgcctccagctttgttcttttggcttgggattgacttggcaatgcrggctcttttttggttccatatgaactttaaagtcgttttttccaattctgtgaagaaagtcattggtagcttgatggggatggcattgaatctataaatt

SEQ ID NO: 354452 - DNA, 201 bp, Homo sapiens
ttacaaagttagggactttcctaaaagtgtttttaatatttcaaatcttaattctgaaaaaagttcataaactgtgttaatgatgggcaaaatggcaggtaaaaaaaaaaattgtataggggccgggcatggtggctcacgcctgtaatccctgcactttgggagaacaaggtacctgaggatcacttgagcccaggagtt

SEQ ID NO: 354453 - DNA, 201 bp, Homo sapiens
acaaaaattattgagactttttaacgtacttttaaaaggattattttagaaaaaaatgcttctaggtacctaactcttcaaataggttttcaaagaaaactgttagtttcacttctataaggtaagatgccatttttgaaaggtcatggtatagtgttaaaaagaatcatgtgaagtaattttccacatggcctattaaaa

SEQ ID NO: 354454 - DNA, 201 bp, Homo sapiens
aacccctttagtaaccgtgctctgtcacttttaggatcaaatctgtactctttggtgtggttaaaaggttcctcataattgcccctctgcttttattttcyatttgcagcccatggttgtcacatcacgctgtttataatgcccagcccctgcctgatctctcttcttcaatgtgctcatgtgtcccttggcttacagtat

SEQ ID NO: 354455 - DNA, 201 bp, Homo sapiens
caaaaattattgagactttttaacgtacttttaaaaggattattttagaaaaaaatgcttctaggtacctaactcttcaaataggttttcaaagaaaactgttagtttcacttctataaggtaagatgccatttttgaaaggtcatggtatagtgttaaaaagaatcatgtgaagtaattttccacatggcctattaaaac

SEQ ID NO: 354456 - DNA, 201 bp, Homo sapiens
cttttttgctatcattttcatagttcttttgaagtttttagcatactcaaatatcttttccattccttaagtatgattatggtgtaatggaaaatttaggwtttaaaaatattttagttttgtggtgaccaatacaaaacaagataattattttgttttgaaatttcccattacatatgtgtcttgtacaaagccatttac

SEQ ID NO: 354457 - DNA, 201 bp, Homo sapiens
atggtgaatttgaagtgatgtgagataccctggtgatgtcttgcagtcaattcagagaacagctttaaacactattaaaatggcttaaagtacttttttgstatcattttcatagttcttttgaagtttttagcatactcaaatatcttttccattccttaagtatgattatggtgtaatggaaaatttaggttttaaaaa

SEQ ID NO: 354458 - DNA, 201 bp, Homo sapiens
gcaggttccccgtaagtggtagctgttatgcttccagagagcacagcacatttgcattgaaacagtgttcccagggtgtctttaaagcccttttcagttgrggatttatggattagttgtactttatgcttttatttttcctttctaggaagaaattgcagaaagtaccaccaacttaacttttttcccccattttctatt

SEQ ID NO: 354459 - DNA, 201 bp, Homo sapiens
gaggtcttcccaagaactgactttggctgaattagcgaacacaagcttctgtgtgattctgatggtgaacattttttgcagtacttggggatgagattaayctcctatgcatcctcactaagctcttattcttccccattctcagattcacagagcagagaagtcccttacgggttggtcttggaccagctgtaacaattt

SEQ ID NO: 354460 - DNA, 201 bp, Homo sapiens
ccatgattctgaaatacaggcttaaagacattaagaggggacagttccctggactcctccgcgggacctgtgacaggggtgggaggggtggcttgtttcgytgggccgagttcaaacccattgtgggagggggagcacatgggccagcaggtcctggggcaggtgtgagtgcttttgggctccagccccacggtagcatct

SEQ ID NO: 354461 - DNA, 201 bp, Homo sapiens
cccacatgtgttctaggtgcttttctttaccttatctcattggcctcactgtgtgctaagaattgttagcccattttacagatgagcaaagtgaagctctraaagcttaagggacttacccaaatactaagtgacagaattcaatccagctccaccatcttccctccatatcagattgtctggtgaaaggagcagagaaaa

SEQ ID NO: 354462 - DNA, 201 bp, Homo sapiens
taccacccagagataatcactattaaagattaatatatttaccattttattttcagcagcatttttagttatgtgattccataaacataacacatttttayggaaatcagtcctttatcttaacagtatttttgtaaatgttattaatttctttccaaaaaagacaaaaaggagaatttttttcttccatttacttcagaa

SEQ ID NO: 354463 - DNA, 201 bp, Homo sapiens
ctagaaatgtagaccatattgctatagaatttgaactcatctttgaaaaagagatatttagggaaaaatgaattttgaatactactttcaaatgttctgtkcttgaacaaatgagaaaaggcatttatgtgaacgcattttaggggaattgggacatttttagtagtacattgtgaactttttttgaagaagttatcactg

SEQ ID NO: 354464 - DNA, 201 bp, Homo sapiens
tcctttcctctgctgaggtcctagagtttcctcatctagcctctcttctcaccttctttgtctctgccatgctagggtagttttgtccccctttctaacaygtccattttataatcctttatagttccattatcttatagtcttgatttattttcccatttgtcctcgaaggcttcaaggacctctcttgatgaaacttcc

SEQ ID NO: 354465 - DNA, 201 bp, Homo sapiens
agcatcatcgaatagcccaggttggtttctctcgtcaaacctgactgcacttcttgggctaaggagggttgaaggaatctattctaaacaactcgtacacwggatattcatctataatattctgactttgttgtcatatcagtttttaccatgtcatttataagtgataaagcataatagtctattctgtagaatagtcta

SEQ ID NO: 354466 - DNA, 201 bp, Homo sapiens
tctctcagacttcagaaaagagcagttaaaatactttgaaatattgaatatgaacataagaattacatacaaacatataggtttgtatgtaaatagttaayctatctctatttggagagctaaattataacttaatgctccagtttttatgaatttattttcttttctctgaatgtttgctaataatttaaaagagaaagc

SEQ ID NO: 354467 - DNA, 201 bp, Homo sapiens
gcctcccaaagtgctgggattataggcatgagccaccacacccagcctcttttttttgagatagagtttcgctctgtcaccaggctggagttcagtggcasaatctcggctcactgtaacctccacattcaagcgatactcctgcctcagcctcccaagtagttgggactacaggcgtgtgccaccacacccagctgattt

SEQ ID NO: 354468 - DNA, 201 bp, Homo sapiens
tgcagtggtgcgatcttgcctcactgcaagctccgcctcccaggttcacgccattctcctgcctcagcctcccaagtagctgggactataggtgcccgccmccacgcccggctaatttttgtatttttagtagagacggggtttcaccatgttagccaggatggtcttgatctcctgacctcgtgatccgcccgcctcggc

SEQ ID NO: 354469 - DNA, 201 bp, Homo sapiens
tcttcctcactttttcatctcttgctgccactttctcctttttatttagctccaaccatttcctatcgagtggggaggtatagcatggagggtgcaaggarctcagacatttggatggatttatttaccatttatttaactgtctttgaccagaaaagtatttccagctataaggaacttgacttttatgtttctactcgt

SEQ ID NO: 354470 - DNA, 201 bp, Homo sapiens
aatggcatgtctaataaataccataacttcaaagtgatgatgaacttatatacaagatatctgaaacatctataacgtaatataaaaatgtctcatttcgrttgatgatgaaatcacgggtgttactaatgccttttttcccctacatttataattgagggcgatgctaaacttcagaggttagtgaacataaagatacag

SEQ ID NO: 354471 - DNA, 201 bp, Homo sapiens
tagatgttgtactaatttacattcacaccaacagtgtacaagcattccctttgctccacattcttgctaatacctgttgttttttgactttttaatgactrctctaagatggtgtctcattgtggttttagtttgcatttctcatgatgagtgatgttgagcattttttttgtatgtttcttggccgtttgtatgtctttt

SEQ ID NO: 354472 - DNA, 201 bp, Homo sapiens
tcgtctgaacccgggaggcagaggttgcttgcagtgacctgagacggggccactgcactccagcctgggtaacagagcgagacaccgtctcaaaaaaatawatatataatatagatatacataagtataatatataatttatatataatattatatatataatttataattaaataatatatatttatgcaattatttaat

SEQ ID NO: 354473 - DNA, 201 bp, Homo sapiens
cactgcactccagcctgggtaacagagcgagacaccgtctcaaaaaaatatatatataatatagatatacataagtataatatataatttatatataatattatatatataatttataattaaataatatatatttatgcaattatttaataattatttaaattatattgtttaatatttaatataaatataaaataattt

SEQ ID NO: 354474 - DNA, 201 bp, Homo sapiens
gtttgaagtcaggtagcgtgatgcctccagctttgttcttttggcttgggattgacttggcaatgcgggctcttttttggttccatatgaactttaaagtmgttttttccaattctgtgaagaaagtcattggtagcttgatggggatggcattgaatctataaattaccttgggcagtatggccattttcatgatattga

SEQ ID NO: 354475 - DNA, 201 bp, Homo sapiens
tcatgccatttttttattttaaaggaattctacccataaacaagattttaaatcatcattccacctcagatttctttttgagaggacaaccactgataacraattttcctgctatttttattggcctgtacatttactaaagtcgatttctctacttctagagcttcaactgttcacttccaatgtattagaaagaaaaca

SEQ ID NO: 354476 - DNA, 201 bp, Homo sapiens
acaacgcaagtgccaataaacagacgaatgggtaaagaaaatgtggtgtatacatacagtggagtatttttcagccttaaacaggaagggaattctgacawgttctacagcatggatgaaccttgaaggcattatgctaagtgaaataagccagtcataaagggatatttctgtatgattccacttatatgaggtacctcg

SEQ ID NO: 354477 - DNA, 201 bp, Homo sapiens
attcttcctacccatgagcatggaatgttcttccatttgtttgtatcctcttttatttcattgagcagtggtttgtagttctccttgaagaggtccttcaygtcccttgtaagttggattcctaggtattttattctttttgaagcaattgtgaatgggagttcactcatgatttggctctctgtttgtctgttattggtg

SEQ ID NO: 354478 - DNA, 201 bp, Homo sapiens
ttagaggatatatatgagttcaagatggtcacctgcttctctaggaatccaagggacaacttcaattcctttaggaggtaagtggcctgagactccacackgcctatatcccaagcgaatgaattggtacttaggaagtccaggcagaatctcagtgagatatcctagaccagcatggtggaagcaggaaagagccacaga

SEQ ID NO: 354479 - DNA, 201 bp, Homo sapiens
gtcatctacaaaaagggacaatttgacttcctgttttcctaactgaataccgtttatttccttctcctgcctaattgccctggccagaacttccaacactrtgttgaataggagtggtgagagagggcatccctgtcttgtgccagttttcaaagggaatgcttccagtttttgcccattcagtatgatattggctgtggg

SEQ ID NO: 354480 - DNA, 201 bp, Homo sapiens
cctactgaaaatacaaaaaattagccaggcatggtggcgggtgcctataatcccagctacgtgggaggctgaggcaggagaatcacttgaacctgggaggyggaggttacagtgagccaagatcatgccattgcactccactaggcaacaaaagcaaagctccgtcagaaaaaaaaaaaaaaagaatgttatatagttata

SEQ ID NO: 354481 - DNA, 201 bp, Homo sapiens
aaaaattattgagactttttaacgtacttttaaaaggattattttagaaaaaaatgcttctaggtacctaactcttcaaataggttttcaaagaaaactgttagtttcacttctataaggtaagatgccatttttgaaaggtcatggtatagtgttaaaaagaatcatgtgaagtaattttccacatggcctattaaaaca

SEQ ID NO: 354482 - DNA, 201 bp, Homo sapiens
attcagtatgatattggctgtgggtttgtcataaatagctcttattactttgagatacatcccatcaatacctaatttttttgagagtttttagcatgaagggttgttgaattttgtcaaaggccttttctgcatctgttgagataatcatatggtttttgttgtcggttctgtttatatgctggattatgtttattgatt

SEQ ID NO: 354483 - DNA, 201 bp, Homo sapiens
aaaattattgagactttttaacgtacttttaaaaggattattttagaaaaaaatgcttctaggtacctaactcttcaaataggttttcaaagaaaactgttagtttcacttctataaggtaagatgccatttttgaaaggtcatggtatagtgttaaaaagaatcatgtgaagtaattttccacatggcctattaaaacat

SEQ ID NO: 354484 - DNA, 201 bp, Homo sapiens
tagctcttattactttgagatacatcccatcaatacctaatttttttgagagtttttagcatgaagggttgttgaattttgtcaaaggccttttctgcatstgttgagataatcatatggtttttgttgtcggttctgtttatatgctggattatgtttattgatttgcgtatgttgaaccagccttgcatcccagggatg

SEQ ID NO: 354485 - DNA, 201 bp, Homo sapiens; identical to SEQ ID NO: 75906

SEQ ID NO: 354486 - DNA, 201 bp, Homo sapiens
tggctaatttttgtatttttagtagagatggggtttcaccgtgttggccaggctggtctcgaactcctgacctcaggtgatccaccggcctcggcctcccagtgttgggattacaggcatgagccactgggcacagccaagttctcttatctttcttactgtcttttcactgcctcttagcctctatccctgattccttta

SEQ ID NO: 354487 - DNA, 201 bp, Homo sapiens
tcagggatattggtctaaaattctcttttttttgtcgtgtctctgccaggctttagtatcaggatgatgctgccctcataaaatgagttagggaggattcyttctttttctattgattggaatagtttcagaaggaatagtaccagctcctccttgtacctctggtagaattcagctgtgaatccgtctggtcctggactt

SEQ ID NO: 354488 - DNA, 201 bp, Homo sapiens
cgtatacacagacacagttctatcatatagctggtgttcataagcataatgaaggaagataaagcagggtaaagggagaaagatggagagtgtgtgtgtgkgtgtgtgtgtgtgtgtgtgtgtaaaatatttgggttcaattgaccaggatagactctctttgataaggtaatatttgaacagagatcttagtgaagtgac

SEQ ID NO: 354489 - DNA, 201 bp, Homo sapiens
cctctggtagaattcagctgtgaatccgtctggtcctggactttttttggttggtaagctattaattattgcctcaatttcagagcctgttattggtctaytcagagattcaacttcttcctggtttcgtcttgggagggtgtatgtgtcgaggaatttatccatttcttctagattttctagtttatttgcgtagaggtg

SEQ ID NO: 354490 - DNA, 201 bp, Homo sapiens
tctagattttctagtttatttgcgtagaggtgtttatagtattctctgatggtagtttgtatttctgtgggatcagtggtgatatcccctttatcattttktattgtatctatttgattcttctctctttttttctttattagtcttgctagtggtctatcaattttgttgatcttttaaaaaaaccagcttctggattca

SEQ ID NO: 354491 - DNA, 201 bp, Homo sapiens
gaatctcttgaacctggaaggcggaggttgtggtgagctgagatcgcaccattgcactccagcctgggcaacaagagcaaaactccgtctgaaaaaaaaawatatatatatatatactgtgggctgaggagaataatctagctgagagaaaagattaaatgatgcaaaaaaagagaggagaattactggagcaatgtcctt

SEQ ID NO: 354492 - DNA, 201 bp, Homo sapiens
ttttctagtttatttgcgtagaggtgtttatagtattctctgatggtagtttgtatttctgtgggatcagtggtgatatcccctttatcattttttattgkatctatttgattcttctctctttttttctttattagtcttgctagtggtctatcaattttgttgatcttttaaaaaaaccagcttctggattcattgatt

SEQ ID NO: 354493 - DNA, 201 bp, Homo sapiens
gtttcatcatgttggccaggctggtcacttctgagctcaagtgatccgcccacctgggcctcccaaagtgctgggattacaggtgtgagccaccgcgcccrgccgaaaacaatacaattgtgaagcagttctacaccatgttcgtagcagcgttattcataggagccaaaaagtggaagcaacccaactgttcactgatgg

SEQ ID NO: 354494 - DNA, 201 bp, Homo sapiens
tggcccttgacatcaggacttggtaaggccaagacatcagcgatgtcttccactgatccaaacaccaggcaatgcctagtgatgtagttttttggaatcarttggtagggtttcttgttggtaggggatgctttgacatacttcattaatgctttgtaataatctagcataacactatttagtatgaaatgtctgacagta

SEQ ID NO: 354495 - DNA, 201 bp, Homo sapiens
tgaataccagaacatttataaacagtgaatgagtcttattaagaatagtttactacaatacacactggctaaatagaagtgcgttttgtgaagcactatgrgtggtatgttttgccgcatatttttgttactttgaggtagataacacacatataccaaattcagcattcattttcagttgcttctggtatcgtgtgtttt

SEQ ID NO: 354496 - DNA, 201 bp, Homo sapiens
aatagatattttcatgcaattatgtacagtctcactgtaaatttcaaggcaaaatttgtttcctgtaaaacagatcattgttctatgagaggatggtcttyacttgtcttagtgcatttcttttgtctcctcctgcattgcattattttgctctattcattttgcaaatgacatgtcagttaaaatgaaaactatctcaca

SEQ ID NO: 354497 - DNA, 201 bp, Homo sapiens
cgtaaggatttaatttccaacaagaaaatcatgaaattagtttctggcaaaaagagattttctatttactggtttctgccttacacatttttgtggtctcwggatccagtttaagcttcgctgagcccaaatctcaatttatgaaggcaaaagtaggtttgtacttaagagagacaaatgacaatctagtcagcaacagat

SEQ ID NO: 354498 - DNA, 201 bp, Homo sapiens
gtatgtttgatgaggaatttgaggggaagatttcatagcagaagctgttaatgtggcctgtattgacttaagtggtgacccaactggactgtgaaactgcrggatgcctattgggctcgagctgcttattaaagaggaactcctcactgttgttcagaaatccttcctcatttctctctccccaagcttcccatcctctac

SEQ ID NO: 354499 - DNA, 201 bp, Homo sapiens
ctgtgtggaagtaaacttctaaaacctgtctcttctgagagttactgcatgaaaacaggcaaggatgggtcaagttttggaccagcagcccaagttccacyaaccactctgttatacagaggcttctaagctatgcagagtgctatgaagggtttattcttcttttgcccacctgactgatatactgatgtactttttgaa

SEQ ID NO: 354500 - DNA, 201 bp, Homo sapiens
aaagcattattttacaaagatgaaaatgtagttttctggatacagtgggaataaaaacaactaattttttgtctgctagcactttctagttgctttacttygtgtatcatctcatttaattaaatcccttctcctagagatagctaatattgccatctccattttactggtgaaaaggtttaggaggctttcacattatct

SEQ ID NO: 354501 - DNA, 201 bp, Homo sapiens
ctgggttcagcctccatcctttaaaataatctggaggttaaaagaagaaaaggaatgaaaaagagaaatggtacctatggatatgttagttagcttgattrtgttgtatatatatccaaacatcaagttgtacaccttaaatatatacaattttttatttgtcaattatacctaactggggaaaaaagattggaaataaat

SEQ ID NO: 354502 - DNA, 201 bp, Homo sapiens
attttctttatgcaatcatctgttgatggatactggatacttaggttgattccatatctttgctattgttaatagtgttgtaataaacatataagtgcagktatctttttaatataatgatttcttttcctgtaggtagatacccagtggtgagattgctgtgtcaaatggtagtacaatttttagttctttgagaaatct

SEQ ID NO: 354503 - DNA, 201 bp, Homo sapiens
ggatactggatacttaggttgattccatatctttgctattgttaatagtgttgtaataaacatataagtgcaggtatctttttaatataatgatttctttkcctgtaggtagatacccagtggtgagattgctgtgtcaaatggtagtacaatttttagttctttgagaaatctctatactgttttccatagatgttgtac

SEQ ID NO: 354504 - DNA, 201 bp, Homo sapiens
ataggaaactagtacaatgtggattgactaaacattaataactataatttgtttgaattctaagaaattaaattctagctttgtccaatagtcttcaaaaraaatggtggtgaaattgaattctagctttgaccaatagtcttcaaaagaaatgggggtttattattgaacatatgattatatatgtgtatatatatatat

SEQ ID NO: 354505 - DNA, 201 bp, Homo sapiens
ctctcaaaaaaaaaaaaagaaaagaaaagaaaaagaaaacacataatgtgtgatgaattattttagaaaggttttatgtaaatttttttccctgcaatttktatatctttactttaaaaaaaaatcagtagtttttaaactctgttaactttaacagcaggagttaattaggtttattacttgctcattctattcacccct

SEQ ID NO: 354506 - DNA, 201 bp, Homo sapiens
gctcttggattaagctgaacttcatcaatatcaaagttgttatgtataggccaatcatgctctgaaaactgacagtcatagtacctttcccagttataaawgtgactgtgagtttcatccataagcaaaatattatgagcttcatcttcaatatgaaaaggatggcttgaaattggcttatccattggaaaagaacatatg

SEQ ID NO: 354507 - DNA, 201 bp, Homo sapiens
gaggtggaggttgcagtgagctgagattgcgccattgcactccagcttgggcaacaagagtgaaactccatgtcaaaacacaaacaaaaacatgagtttcttttttttttttttattttgcgtatgtctttttttttaattattattatacttttagttttagggtacatgtgcacaatgtgcaggttagttacataggta

SEQ ID NO: 354508 - DNA, 201 bp, Homo sapiens
ctcatgtaaggatgggagagcgcttcttctgctattaaccaatccatggggctaaatgtcaaaatttgttccaggaaattcagtgcttcgcgactaattcmtggaagtagctgagttaaaggtttgtgtggctcagtcatgtgatttctaatgtaaactggaattacgctgagaagctcctgacgatcttcctcatgtgca

SEQ ID NO: 354509 - DNA, 201 bp, Homo sapiens
tggcctcagccctctcattgtggaagaagatgctgtggaatcgtccagtgaagagtccctgggtgaaagcaaagagcagcttggggatgacgttacaaaaycttcctcccagaaagccgtcaaaccaagggaaatcatgttgcgggcaaatagtttaaagaaagcagtgaggcaagtcattgaggaagccggaaaaggtac

SEQ ID NO: 354510 - DNA, 201 bp, Homo sapiens
tccccagagtgtgatgttccccttcctgtgtccacgtgttctcattgttcaattcccatctatgagtgagaacatgcggtgtttggttttttgtccttgckatagtttactgagaatgatgatttccaatttcatccatgtccctacaaaggacatgaactcatcattttttatggctgcatagtattccatggtgtatat

SEQ ID NO: 354511 - DNA, 201 bp, Homo sapiens
ctggaagtagctgagttaaaggtttgtgtggctcagtcatgtgatttctaatgtaaactggaattacgctgagaagctcctgacgatcttcctcatgtgcracaggaatagattctaaagtcagctgcatctgttcaagttcatgtgcacctgcaaaaagggttttacaaaacagtcagcatttcagcagagatgcagcct

SEQ ID NO: 354512 - DNA, 201 bp, Homo sapiens
ccttgcgatagtttactgagaatgatgatttccaatttcatccatgtccctacaaaggacatgaactcatcattttttatggctgcatagtattccatggygtatatgtgccacattttcttaatccagtctatcattgttggacatttgggttggttccaagtctttgcttttgtgaatagtgccgcaataaacatacgt

SEQ ID NO: 354513 - DNA, 201 bp, Homo sapiens
aggaatagattctaaagtcagctgcatctgttcaagttcatgtgcacctgcaaaaagggttttacaaaacagtcagcatttcagcagagatgcagcctgcwgcccacatgtcaatggctttagtataattattaggagaaagtaaaagacatggagatctgtaccatttagtaaccaatccttcaaaagatgactcttatg

SEQ ID NO: 354514 - DNA, 201 bp, Homo sapiens
tcagatcctagagaaactggaacgagccagtaccaaaatgttggacaggtaaaagtaaattcttttctacaactagatggaaaatggcatactgaaatcatttttttgatgatttcttaataaatatttattaataaattttactgactagaagctccacgaaggcagagccttcctgatcttgtccactggttaatccct

SEQ ID NO: 354515 - DNA, 201 bp, Homo sapiens
actgtttagttccgtaagagagcccacatcatctgttaattggctcccactgggaccaggaatttcaaacactttcacaatgttatcatggtcaagtcttytaataatcttgatttcacatagagcatgtttgacactctggggattggtaaggacaattttcttgatggctactcttttgtcacaatcattgtctacagc

SEQ ID NO: 354516 - DNA, 201 bp, Homo sapiens
gagagagatactccagtagcttgggtgcataaaagtttataatcttatgtgctactgggttcagcctccatcctttaaaataatctggaggttaaaagaaraaaaggaatgaaaaagagaaatggtacctatggatatgttagttagcttgattgtgttgtatatatatccaaacatcaagttgtacaccttaaatatata

SEQ ID NO: 354517 - DNA, 201 bp, Homo sapiens
ataagccccctcatgccctctttcagtcaagacccccacctcctaccccaataatcactgtgctgacttctaatagcatagattggtatctgttttgtacttataaaatagaatcattttgtatgctctcatttgtttctggattctttcactcaatgttatgtttatcagattgatctatactgtggcttggctataaat

SEQ ID NO: 354518 - DNA, 201 bp, Homo sapiens
tgaaatgaattgaagaatgtgaataatagttctagttcttcgggataatggaaagctaataaggtttatgctagaggctcttactgctgggactctcttcytgtttttggtttttaggaaaaaagctagaaaatccaacttcagctagagtaacagtagtaactgacttgaaagtatgtcaaaacaaaaactgttaaggtc

SEQ ID NO: 354519 - DNA, 201 bp, Homo sapiens
cataactaagatgtatagcaatttggaaaacagatgttagtggttaatttaatcttgctttattaacctagtgaaaagtttcataatgattgttcttagtaaaaaaaaaaaaattaatcctataaatagatatgtatgcattctggatttctgtttttgctcatgatactttacattgctatttttattcctacttttaaa

SEQ ID NO: 354520 - DNA, 201 bp, Homo sapiens
catgaaaagcttggccagttataaccttgtatcatggaggactgaccttcccagtgtgtgtgccatgttgtagctcccagtgcatggccacgtgctgtgcygcctcctggtcttggggctggttataaatctgcagttcactcatgtgttcctatacaaggccttttacagactccaaatagatggtcctgagctgatact

SEQ ID NO: 354521 - DNA, 201 bp, Homo sapiens
tttatattagttaaaatattttatagcactctaaaatgatgccatattaatgcaatttaagtggttgtgttttttgccttttaaaactgatttaagtacartttagatggctttatactctgaaagctgataatttatgttaagtttaaaattcatattcctttttctatcttagaaattaggggcttttagaaatgaaat

SEQ ID NO: 354522 - DNA, 201 bp, Homo sapiens
gaatttctgtaacacttaagaaatatttttccaaagatatttactacatactgatactcatgcatgatgtctgtatttttatctaacctattaaactaagtttttttttttgagacagagtcttactctgttgcctaggctggagtgcgtagtacagtcatggctcactgcagcctctgcctctgggttcaagcgattctc

SEQ ID NO: 354523 - DNA, 201 bp, Homo sapiens
ttatatatattatacccataaattcttgcaccctcattgaaatatttatgtaatgacttgactattttataccatgtttacaaacatgattcttgcctttyattaatcattgcagtggtcccacctttgcttacataatttttagatgactgatagcagcaaacctcatattttaacatttatattagttaaaatatttta

SEQ ID NO: 354524 - DNA, 201 bp, Homo sapiens
ggcagcccatttttatcttcaaaaaagagactgatagagaaggttgctgcaaaattggctgcacgtacaggcttgccttttgtcactgctccaaataaatktgaagctctggctgctcatgacgctctggttgagctcagtggagccatgaacactactgcctgtagtctgatgacgatagcaaataatattcgttttctg

SEQ ID NO: 354525 - DNA, 201 bp, Homo sapiens
ttttctagaataccattactattgttgcagaataatttaatcttttaaatatatttgttttcttctacttcctccttcccttttaaaattttatgctgtgrtttcctttaatcattggtccaaaatttcttgtccacttaaaagcagttgctcttttttttttttttttttttttttttttagtgtgtaaattcaaggctc

SEQ ID NO: 354526 - DNA, 201 bp, Homo sapiens
tcttcagttctgaacacggtgagatggctcttccatgacattcagtgtagtttctttctccttctctcactaactttgttagactagaagctacattatcstcttaaaagtttttagctcttatcccaaggactttctgggatatttaagagtgttgtaatctcttctttttaaaaaaattatttacattatggtaaaaat

SEQ ID NO: 354527 - DNA, 201 bp, Homo sapiens
agggatatatccttgttggatgaatgaattagtgacatttgtaaactgtagtgggtttttttggacaaaaagtattaggtcatgttttggcttagagaacwgttttctaatccctccctatgatattggtttatatatattatacccataaattcttgcaccctcattgaaatatttatgtaatgacttgactattttata

SEQ ID NO: 354528 - DNA, 201 bp, Homo sapiens
tgaatgaattataaaaaactagtctgaggaactcattattttaaatacagaaggctatgttactactatttacttttaattgcagttcaggtcagaaaacraaaatagttcattttgtggggggccttttgatgagtatggtaggtagtctcctgtcattgtatggtttccaaaaagctaaagaggacatataaacgttag

SEQ ID NO: 354529 - DNA, 201 bp, Homo sapiens
taaaagaatatatttaagtgaaagttgtagaatagctgttaacattggcgaaattactgtatataagacttctagattttatgttttagtaaataaaacargatcattactctgtacggcaatacaatctgaaaaggttaatttttataagtgtttttttcctctataattgaaactgcctattagcatggctgttattaa

SEQ ID NO: 354530 - DNA, 201 bp, Homo sapiens
ttggtgaacacaattttgcatttcttttgggtgtagatatagaagttgaatttctgagtcctgtgatatcattgcatatgttcagctttaagagacactaycaaatcgtttgtgagagtgtatcagtttgcattcccatcagcagcgtttgagaattctgtagctccatagccttgctagcacttgccattttctagttgt

SEQ ID NO: 354531 - DNA, 201 bp, Homo sapiens
tctatctaatttattaatgtcaacaaaacagagttttagtattttaatattggaattctgtgtaagattgtatttgaaccaggtaccgtggctcatgcctstaattccaacactttgggaggccaaggtgggcagattacttgaagcccaggagttcaagaccagcctgggcaatatgacaaaacctcatctctactcaaa

SEQ ID NO: 354532 - DNA, 201 bp, Homo sapiens
ttacttgaagcccaggagttcaagaccagcctgggcaatatgacaaaacctcatctctactcaaagtatacatactaaaattagccaggtgtggtggtgcktgcctgtagtcccagcttctcaggaggctgaggtgggaggatcacttgagcctgggaggtggaggttgtactagagctaagatggcaccactgcactcca

SEQ ID NO: 354533 - DNA, 201 bp, Homo sapiens
tactgatactcatgcatgatgtctgtatttttatctaacctattaaactaagtttttttttttgagacagagtcttactctgttgcctaggctggagtgcrtagtacagtcatggctcactgcagcctctgcctctgggttcaagcgattctcgtgcctcagcccttgagtagatgggattacaggcatgcaccactacac

SEQ ID NO: 354534 - DNA, 201 bp, Homo sapiens
caaaacctcatctctactcaaagtatacatactaaaattagccaggtgtggtggtgcttgcctgtagtcccagcttctcaggaggctgaggtgggaggatsacttgagcctgggaggtggaggttgtactagagctaagatggcaccactgcactccagcctgggtgacagagtgagatcttgtctcaaaaaaaaaaaaaa

SEQ ID NO: 354535 - DNA, 201 bp, Homo sapiens
agctctagagatctgctgtgtcggcctgagtctgtggccaagaactattctgtgcgttaatgggagaaaattgttcgaggaaagaaatgccagaaggaaaacacacacacacacacacacacacacacacacacacacacacctcagaacagagtaggcacaacaatccttgaagctcatacagaactaggagtagttcat

SEQ ID NO: 354536 - DNA, 201 bp, Homo sapiens
gtggtggtgcttgcctgtagtcccagcttctcaggaggctgaggtgggaggatcacttgagcctgggaggtggaggttgtactagagctaagatggcaccmctgcactccagcctgggtgacagagtgagatcttgtctcaaaaaaaaaaaaaaaaaagattttattagagaaaaggtttccactgccaaaaatgttgtac

SEQ ID NO: 354537 - DNA, 201 bp, Homo sapiens
gctctagagatctgctgtgtcggcctgagtctgtggccaagaactattctgtgcgttaatgggagaaaattgttcgaggaaagaaatgccagaaggaaaacacacacacacacacacacacacacacacacacacacacacctcagaacagagtaggcacaacaatccttgaagctcatacagaactaggagtagttcata

SEQ ID NO: 354538 - DNA, 201 bp, Homo sapiens
tcaggagatcgagaccatcctggctaacacggtgaaaccccgtctctactaaaaatacaaaaaaattagccgggcgtgatggtgggcgcctgtagtcctakctactcgggaggctgaggcaggagaatggcgtgaacccgggaggcggagcttgcagtgagcggagattgcgccactgcactcccgcctgggccacagagc

SEQ ID NO: 354539 - DNA, 201 bp, Homo sapiens
ctctagagatctgctgtgtcggcctgagtctgtggccaagaactattctgtgcgttaatgggagaaaattgttcgaggaaagaaatgccagaaggaaaacacacacacacacacacacacacacacacacacacacacacctcagaacagagtaggcacaacaatccttgaagctcatacagaactaggagtagttcatat

SEQ ID NO: 354540 - DNA, 201 bp, Homo sapiens
tgaggcaggagaatggcgtgaacccgggaggcggagcttgcagtgagcggagattgcgccactgcactcccgcctgggccacagagcgagactctgtctcaaaaaaaaaaaaaaaaaaaaaaaagaatatcctcttccactgcaattctgaagcaaggaagctatgaatgacagaggagaggcttaactgctggtttctca

SEQ ID NO: 354541 - DNA, 201 bp, Homo sapiens
tctagagatctgctgtgtcggcctgagtctgtggccaagaactattctgtgcgttaatgggagaaaattgttcgaggaaagaaatgccagaaggaaaacacacacacacacacacacacacacacacacacacacacacctcagaacagagtaggcacaacaatccttgaagctcatacagaactaggagtagttcatatt

SEQ ID NO: 354542 - DNA, 201 bp, Homo sapiens
ttttcaatccatggttggttgactccatggatgtggaacccatgaatatggagggctaactgtatgtgtgtgtgtgtgcttgtgtgcacgtgtgcatgtgygcacatataatctttttaaaaatctaaaaattaataataattctctaacactatcaatattacttaagccatatcccatttcccttagttttctcagagg

SEQ ID NO: 354543 - DNA, 201 bp, Homo sapiens
ttttttatggctatggtgacaaatgactgcaaacttattggcttaatacaatacaaatttattatcttatagttctggaggtctgaagtccagaatgggtmtcagctaaaatcaaggtattagcaaagctgtgttctttctggaggctctgggaagagaatctatttctttgccttctccaagtgctagagaccactaaca

SEQ ID NO: 354544 - DNA, 201 bp, Homo sapiens
attctctaacactatcaatattacttaagccatatcccatttcccttagttttctcagaggtttttctgtgaaccttgtctgaattttgacaaggtctttaaaaaaaaaaaaaaccacacacactttatttgttcaaaattcagacaatgctcacacactacatttgagtgatatctctttaagactttaaaaatcttgac

SEQ ID NO: 354545 - DNA, 201 bp, Homo sapiens
aggttctggggattaggacatggtctctttgtggagggacattactctgcctactacattttaaatggttgaaatcatgtcaaatatattctcagattacaaaaaaattaaattagaaaaaaaacaaaccccagaaaggtatttggaaaattctcacatatttggaagccaaataatgcacttccaaataacccatggatc

SEQ ID NO: 354546 - DNA, 201 bp, Homo sapiens
tgagttgagaggatcctttgagcatgagagttcgaggctgcagtgagctgtgatcacgccattgcactccaatctggatgacagagtgagatcccgtcttaaaaaaaaaaaacacttaaaaattctataatggtttccctttaaaaaacaattcttactgaggcatgacatatacagtaaagcacctaaatcacaagagca

SEQ ID NO: 354547 - DNA, 201 bp, Homo sapiens
cagaatgggaggaaatatttgcaaactgttcatctgacaagggattaataaccagaatatggaaggaactcaaacaactcaataacaacaacaaaaaatcygatttaaaaatgggcaaaatacttgaatagacatttcttaaaagaagacatacaaatggccaacaggtatatggaaaaatgctcaacatcactaatcatc

SEQ ID NO: 354548 - DNA, 201 bp, Homo sapiens
caactcaataacaacaacaaaaaatccgatttaaaaatgggcaaaatacttgaatagacatttcttaaaagaagacatacaaatggccaacaggtatatgraaaaatgctcaacatcactaatcatcagggaaatgcaaatcaaaaccacaatgagctatcattttacacctgttagaatggctattatcaaaaaggcaaa

SEQ ID NO: 354549 - DNA, 201 bp, Homo sapiens
agttaataatttattgtttatttcaagaactttagaaaaaaataatcgtaatgttacaagcacaaagaaaaggtaaatgtttaaggtgatggatgtcccarttaacctgattttatcattacacattgtatacaagtatcaaaaacagcatgtgtacacccaaaatgttacaattatgatacaacaatgcaaaagtacaaa

SEQ ID NO: 354550 - DNA, 201 bp, Homo sapiens
cccaggagttcagggatgcagttacctatgatcacaccattgcactccagcctaggcaactgagcaagacccccatctctaaaaatgtttttttttttttwaaaaaaagttctaacattgattaaagatataattaggaatttagaattttttaatctctatgggaaaatctgcattctactttcatttatttgacttttg

SEQ ID NO: 354551 - DNA, 201 bp, Homo sapiens
cccttagattcttccctgtgtaacagttgcctagaaagtattaaaacacatgtttcggccaggtgcagtggctcacacctgtaatcgcagcactttgggargccaagatgggcagatcacaaggtcaggagttcgagacaagcctggccaacacagtgacaagcctgtctctactaaaaatacaaaaaaattagctaagtg

SEQ ID NO: 354552 - DNA, 201 bp, Homo sapiens
atctgaaacaaactggttctggaaaggccttcaggtttagatgctgtgtttctattccaactaggaaccttgggataacccctctggaataaagctgaaargaatatggctaaccctaaaacatcttagaaaatattaacatggctgggcgtggtggctcacgcctgtaatcccagcattttgggaggctgaggcaggcgg

SEQ ID NO: 354553 - DNA, 201 bp, Homo sapiens
tattccaactaggaaccttgggataacccctctggaataaagctgaaaggaatatggctaaccctaaaacatcttagaaaatattaacatggctgggcgtggtggctcacgcctgtaatcccagcattttgggaggctgaggcaggcggatcacctgaggtcaggagtttgagacctggctaacatggtgaaaccccgtct

SEQ ID NO: 354554 - DNA, 201 bp, Homo sapiens
aatgggtaaagaaaatgtggtgtatacatacagtggagtatttttcagccttaaacaggaagggaattctgacatgttctacagcatggatgaaccttgarggcattatgctaagtgaaataagccagtcataaagggatatttctgtatgattccacttatatgaggtacctcgagtagtcgaacttacaaagacagaaa

SEQ ID NO: 354555 - DNA, 201 bp, Homo sapiens
tgtaatcccagcattttgggaggctgaggcaggcggatcacctgaggtcaggagtttgagacctggctaacatggtgaaaccccgtctctactaaaaatamaaaaattagccaggcatgctggctcacccctttaatcccagctacttgagagactgaggcaggattatcccttgaagccgggaggcggaggttgcagtga

SEQ ID NO: 354556 - DNA, 201 bp, Homo sapiens
agattggttgcacaatactgtgaatgtacttaacagcactgaactgtacacttaaaaatggttaagatggtaaattttgtcatgtgtattttccctcaataaaaaaaacttgcagaaattgtataacaatgatgtcaaattgaacaatgagaacacatggacacaggaaggggaatatcacacactggggcctgttgtggg

SEQ ID NO: 354557 - DNA, 201 bp, Homo sapiens
tgggagatggaggctgcagtgagctgtgatcacaccattgcactccagcctaggtgagagagtgagactcatctctaaaaaaaaataaaataaaaagaaakaacttgtttttctaatttcctcgtgtttcccttgttcttgtaggttcctattagtttgtctcctctccagtctttagtgcttctagctttcatattgggt

SEQ ID NO: 354558 - DNA, 201 bp, Homo sapiens
aaaaaaacttgcagaaattgtataacaatgatgtcaaattgaacaatgagaacacatggacacaggaaggggaatatcacacactggggcctgttgtgggktggggggaggggggagggatagcattaggagatattcctaatgttaaatgatgagttaatgggtgcagcacaccgacatggcacatgtatacatgtgtaa

SEQ ID NO: 354559 - DNA, 201 bp, Homo sapiens
ggcaaacattgatccttttggtgccacgccgtttattgacccggatctagattccgtgtaagaaaatgcttttgcaaatattttgtttgggtttttcttgttttttttttttttcaacatgaactgtaacattttaaatgtattacaataaatatggtcccatgtaaaaaaaggatgatcagaaaattacaaaagttgata

SEQ ID NO: 354560 - DNA, 201 bp, Homo sapiens
atcacacactggggcctgttgtggggtggggggaggggggagggatagcattaggagatattcctaatgttaaatgatgagttaatgggtgcagcacaccracatggcacatgtatacatgtgtaacaaacctgcacgttgtgcacctgtaccctaaaacttaaagtataataataaaaaaagatgtcaaaatagcatttc

SEQ ID NO: 354561 - DNA, 201 bp, Homo sapiens
cttcatataccccggttggccacattctttttatttatttatttatttatttttttgagatggagtctcgctctgtcaaccacgctgcagtgtagtggtgygatctcggctcactgcaacctctacctgctgggttcaagcgattcttctgcctcagccttccaagtagctggaactacaggtgcacgccaccacgcccag

SEQ ID NO: 354562 - DNA, 201 bp, Homo sapiens
tcacacactggggcctgttgtggggtggggggaggggggagggatagcattaggagatattcctaatgttaaatgatgagttaatgggtgcagcacaccgrcatggcacatgtatacatgtgtaacaaacctgcacgttgtgcacctgtaccctaaaacttaaagtataataataaaaaaagatgtcaaaatagcatttct

SEQ ID NO: 354563 - DNA, 201 bp, Homo sapiens
acttttactttttctttctttctttctttctttctttctttctttctttctttctttctttctttctttttctttctttctttccttctttccttctttcyttctttctttctttctttctttctttctttctttctttctttctttctttctttctctttccttctcttctttccttccttccttccttccttccttcct

SEQ ID NO: 354564 - DNA, 201 bp, Homo sapiens
ttcctagatatagcagccgctcaataaatgttgactcctttttttttttttttttttttttttgagacagagtctccctctgttgcccaggctggagtgcrgtggtgcgatcttggctcactgcagcctctgcctcccaggttcaagtgattctcctgcctcagcctcctgagtaactgggattacaggcacctgccacca

SEQ ID NO: 354565 - DNA, 201 bp, Homo sapiens
aggacatagatcagtttcatcaaagggtccgaggtggttaatagacactatcaataggttgggagagggcacttgtcatccaaagagctgtgtcggacttkcagtcagggtgtcatgatcatttgccgtgcctggtgttaccatgttccccttgcccttactgaagatccatgactcggaaaacatagtgctcctgctcag

SEQ ID NO: 354566 - DNA, 201 bp, Homo sapiens
tggccagggtggtctcgaacttctgacctcaggtgatccacccacctcggcctcccaaagtcctaggattacagggatgagccactgcatccagcctcagkacttttaattttctaaacttgtgtgtgtatatattttttattttcagaaatatcaagagggctcatttggccggtcgagtttagggctatttttgttttt

SEQ ID NO: 354567 - DNA, 201 bp, Homo sapiens
gtgaggagtattgattctagaggtctgacagtggcaagaaagagggacggggaacaggtaacgtccaagttaaaagaggtatgtgtgtatgtgtgtgtgtragagagagagagagagagagaaagagagagaaataagaacatttttaaaggcaaagaaagttgtggcaatggaaagactggatctgttgtagacattgga

SEQ ID NO: 354568 - DNA, 201 bp, Homo sapiens
aaggaacatctctaaatgcacaatattctcataaaaaatcaggatagacattttctgcccctccagaggtatacctttgagcgttgtgtccattttcatasacgtgaaaagaaacagcctgaaatctgctgaaccctggaaaccataaaggcatttccggccaggcgtggtggctcacacctgtaatcccagcactttggg

SEQ ID NO: 354569 - DNA, 201 bp, Homo sapiens
gacattacaaaaaaaagttccaaaatgctttttataaaatatatgaacttggccttctaaaacaacttgtatagttgtatcatgtgtttatgtacatacatatgtatgtatgtatgtatgtatgtatgtgtagttttaaacctttatgactgtcttagtctgtttagtgctgctataatagaatacctgagattggataat

SEQ ID NO: 354570 - DNA, 201 bp, Homo sapiens
ctgcagctttaagacattggactaaaaacagttacagaaagccagctatataaaaatttattcaacttgtaatgcttttatttttggaaaacgatttttcraagtcaggttcattgatctttttgcttttaatttttttaaactaggttattggattccagttggagtctatatggctttactgattttccatgagggtca

SEQ ID NO: 354571 - DNA, 201 bp, Homo sapiens
gaaaaagataatcgaaactgaacagggacctatagatgattactaagtagtgagtggtgtctaccaaagattggagatcaagtttagtaatgttgttactygctgtgcttataacattttctttaagtgggagtagagaacaaacaaatgaattgatccagggttggtggtttatagggcatattggacagaaagagaaag

SEQ ID NO: 354572 - DNA, 201 bp, Homo sapiens
ttacattgctagacaaaaatttttatattgactaattgttgaaaatatcttgtatatattggggtaaataaaatctattatttttgcgtgtttcttttagyttttttactgagagtactagaaaatttaatattatataatggcatacattatatttctattagactgtggtagtctcaataatctagtgtgcagtattgt

SEQ ID NO: 354573 - DNA, 201 bp, Homo sapiens
ccaatttggatgctattgaccacatcttctcacatcttctcttcttttgctttcaaagtttaagttctctctcttttttcttttttttttttttttatatrtatagagtctcactctgtcattcaggctggagtacagtggcacaatcttggctcactgcaaactccgcctaccaggtttaagtgattctcctgcttcagc

SEQ ID NO: 354574 - DNA, 201 bp, Homo sapiens
attatttgattgaagttacttaaattaatatacagttaagtgcttgttctcaagataatagtctaaaaagcaatatggttagtgttactgagagtaaaagttttttttgacttaactttttaatgggaatatgtatatgctggtgctagcatatacatattcattaggtaggagatgtgatcctgagtgtattcactgtaa

SEQ ID NO: 354575 - DNA, 201 bp, Homo sapiens
taagcctattctttaaattttcaaggagatttttctgcagttctttttatatgacaagtttttaaccagtttaaaaagtattatttgttcatgtggtgacttttttttttttttttttttgagtcagagtttctggctctggcacccaggctggagtgcagtggcgctatctctgctcactgcaatctccacttcccaggc

SEQ ID NO: 354576 - DNA, 201 bp, Homo sapiens
gcttaaaacttttcagtagcttcccatttctagggaataaaaactcacatctttatgcaggcctacaaggttctgcctatgtattcaacctcctgtgaagyctggctcctccctgggctatgctccattcatcctggccttatttcagttgcttaaaaattctatactttttctcaccttggggatgtactctcttttgct

SEQ ID NO: 354577 - DNA, 201 bp, Homo sapiens
tcacctggttaactcctgctcagagattagctcaagtgttactcccatatcaccaaaacaactagacatagtaacatgacagtctaaagttgggaaaaggaaaaaaaatatatatatatatatacatatatttgttgttgttgttgagatagactctcattctgtcacccaggatggagtgcagtaatgcaatcatggctc

SEQ ID NO: 354578 - DNA, 201 bp, Homo sapiens
cccaaaagagcctttgagagagagagagagagagggagagagagaagaaaaagaaagaaaagaaagaaagaagaaagggagagaaagaaagagaaaagaaagagagagatgaaataaagaaagaaagaaaagaaagaaagagaaagaaagaaactaaattggttttgacttttgaagtcaaaagccactgtgtataattat

SEQ ID NO: 354579 - DNA, 201 bp, Homo sapiens
ccaaaagagcctttgagagagagagagagagagggagagagagaagaaaaagaaagaaaagaaagaaagaagaaagggagagaaagaaagagaaaagaaagagagagatgaaataaagaaagaaagaaaagaaagaaagagaaagaaagaaactaaattggttttgacttttgaagtcaaaagccactgtgtataattatg

SEQ ID NO: 354580 - DNA, 201 bp, Homo sapiens
caaaagagcctttgagagagagagagagagagggagagagagaagaaaaagaaagaaaagaaagaaagaagaaagggagagaaagaaagagaaaagaaagagagagatgaaataaagaaagaaagaaaagaaagaaagagaaagaaagaaactaaattggttttgacttttgaagtcaaaagccactgtgtataattatga

SEQ ID NO: 354581 - DNA, 201 bp, Homo sapiens
aaaaggagaacagagatagctagtaaaatgtttcatccagaagagaattttagttttgttgttgttcttttgttgtgttttaaaaatgattttgaatgcayttatatgaagagaggaggaatagttagaaccaaaagttgaagactcaggagagagagggaatgactgatgaagcatgattgctgagtaagctgacgggtg

SEQ ID NO: 354582 - DNA, 201 bp, Homo sapiens
aaaagagcctttgagagagagagagagagagggagagagagaagaaaaagaaagaaaagaaagaaagaagaaagggagagaaagaaagagaaaagaaagagagagatgaaataaagaaagaaagaaaagaaagaaagagaaagaaagaaactaaattggttttgacttttgaagtcaaaagccactgtgtataattatgag

SEQ ID NO: 354583 - DNA, 201 bp, Homo sapiens
acaaaacttgttacagctttccaaaccaaaatttccacattttgtttctaatttttaatttcaatttaataattatttaatattctatttgaatttataatatagtaaagtgttgatatccaggaattccctgaggtgtcaactgagatttatatactgacagataacccagactcacccgctctctacagtgacttctga

SEQ ID NO: 354584 - DNA, 201 bp, Homo sapiens
aaagggctttgccttgttctgtagttgatgaacaaccaataaagattttgagcagggaagtgaccagatgagatctgccttaaggaaacaattctggaggsagggagggagtatggaggattaattagacagggggctagttcagtgtaaggaaatacatctgtttttcctgtttctgtccatgtgattgtcttgtgaaca

SEQ ID NO: 354585 - DNA, 201 bp, Homo sapiens
caaaacttgttacagctttccaaaccaaaatttccacattttgtttctaatttttaatttcaatttaataattatttaatattctatttgaatttataatatagtaaagtgttgatatccaggaattccctgaggtgtcaactgagatttatatactgacagataacccagactcacccgctctctacagtgacttctgac

SEQ ID NO: 354586 - DNA, 201 bp, Homo sapiens
ttttaaaaaccatagttatacaaatgcaagtttgggttattttactatttggtaatgcaggaagttctggcggggttcctggcgccattttatctagcgcygccgctgtaggcgtggaagtaccttccctgccctggggtatagcggaagtttggatgcgggctgaactgggcttcgggttggactgggcttctgtggctt

SEQ ID NO: 354587 - DNA, 201 bp, Homo sapiens
ctttgggaagtgattaggtcatgagaatggagtcctcgaatgggattaatgcccttataatagaggattcagagagctcccttaacccttccaccatgtgmggacacagcaagcagaggccatccaggaaccaggaagcaaaacctcatcagacactgaatcagccattgccttgatcttggacttctcagcttccagagc

SEQ ID NO: 354588 - DNA, 201 bp, Homo sapiens
ccactaccacctcgtattcacctgtgaaccttctactcatccataaagtctcacggggaccctcaacagaatctttcaaaactcaccaagagtgtataatrcttagatattttcatctctattcccattacagcgtgttcccattacataccccccactaaagcaattatattgcatcataattattaacacagttatctt

SEQ ID NO: 354589 - DNA, 201 bp, Homo sapiens
tgtctgaaaaaatacatatatttatttatttattttatatctatattccttttatacccactcatgtctgttctgcagtctctgataacttcatcccttcsgtattaactgaaatcacttcttccctctgtgtattgagtcaaaatgaaaggaacgcttccaagctctcctctgatttctcatccttgtccatttttcatc

SEQ ID NO: 354590 - DNA, 201 bp, Homo sapiens
ttaataacaaaataatttgtctttggcaagatagactaacagggactttctgccttaaagaactattctaaacaatggtctgttttcagaccacaggcagsacatgacagtgatcacttagagaaagagggaaaagcaatgtaagaaacaaacctgggtgtgagccctctgattgtcccaacttgctgcctagagagtttt

SEQ ID NO: 354591 - DNA, 201 bp, Homo sapiens
ctgtctgaaaaaatacatatatttatttatttattttatatctatattccttttatacccactcatgtctgttctgcagtctctgataacttcatcccttyggtattaactgaaatcacttcttccctctgtgtattgagtcaaaatgaaaggaacgcttccaagctctcctctgatttctcatccttgtccatttttcat

SEQ ID NO: 354592 - DNA, 201 bp, Homo sapiens
taaaaaccgagattagtgaaaaatttattgtaaagctctgtgaatttaaatatttgtattggccgggcacagtggctcacacctgtaatctcaacacttcrtgaggctgtggtgggcatatcgcttgagcccaggagttcaagaccagcgtgggcaacatggcaaaacaccgtctgtactgaaaatacaaaaattacctgg

SEQ ID NO: 354593 - DNA, 201 bp, Homo sapiens
ctctgtgcatgatggagatggacgattacaccacaacgcaaaggtggaaataagaacaataaacagaagtagcctaagggagagagggcttagattttttyggcaaatgatagagaaatatagaaagatctcaaaggaggaataaatggaagacaggatggatccagatgaagggatgcaagaaaatgctgtcaagaccaa

SEQ ID NO: 354594 - DNA, 201 bp, Homo sapiens
tttatatatgaactttaatatattgaaagaataaaatgggtaaaaataggcacaaataaaaattaaaagttaaaaaccgagattagtgaaaaatttattgyaaagctctgtgaatttaaatatttgtattggccgggcacagtggctcacacctgtaatctcaacacttcatgaggctgtggtgggcatatcgcttgagcc

SEQ ID NO: 354595 - DNA, 201 bp, Homo sapiens
aatatataaaaagggcagcccatttttatcttcaaaaaagagactgatagagaaggttgctgcaaaattggctgcacgtacaggcttgccttttgtcactrctccaaataaatttgaagctctggctgctcatgacgctctggttgagctcagtggagccatgaacactactgcctgtagtctgatgacgatagcaaataa

SEQ ID NO: 354596 - DNA, 201 bp, Homo sapiens
taggtcatagcccacagtattaatttttaaaaccacagagctagttcaacagtttccaatgattagctgaatgtctaagaatcatttgcagattatgtttwaaaaaagttttcaggaaccaccctggacctacacaactagaatctcttgggaaggggtttgggacaccaacatttgaatcactctccttcattgattctt

SEQ ID NO: 354597 - DNA, 201 bp, Homo sapiens
tatgataatgttcatccttctctttgctatctatttggtaagaggaatgaaattttagagcagtgtcctgctcgatataccctcaagattttagagcaggktatgcagtgtattaattctttgttttctttgccatttattaaaatagtgtgtattttgtgcaggagatcaacaattagtagaatgcagtcctttcttata

SEQ ID NO: 354598 - DNA, 201 bp, Homo sapiens
aaaacttgttacagctttccaaaccaaaatttccacattttgtttctaatttttaatttcaatttaataattatttaatattctatttgaatttataatatagtaaagtgttgatatccaggaattccctgaggtgtcaactgagatttatatactgacagataacccagactcacccgctctctacagtgacttctgaca

SEQ ID NO: 354599 - DNA, 201 bp, Homo sapiens
aaacttgttacagctttccaaaccaaaatttccacattttgtttctaatttttaatttcaatttaataattatttaatattctatttgaatttataatatagtaaagtgttgatatccaggaattccctgaggtgtcaactgagatttatatactgacagataacccagactcacccgctctctacagtgacttctgacac

SEQ ID NO: 354600 - DNA, 201 bp, Homo sapiens
aacttgttacagctttccaaaccaaaatttccacattttgtttctaatttttaatttcaatttaataattatttaatattctatttgaatttataatatagtaaagtgttgatatccaggaattccctgaggtgtcaactgagatttatatactgacagataacccagactcacccgctctctacagtgacttctgacacg

SEQ ID NO: 354601 - DNA, 201 bp, Homo sapiens
ggagttcgagaccagcctgaccagtgtatgaaaccccatctctactaaaaatacaaaaattagccgggtgtggtggcacgcacctgtaatcccagctactygggaggctgaggcaggagaattgcttgaacccaggagatggaggttgcagtgagctgagatcacaccactgcactctactagcctgggtgacagagcaag

SEQ ID NO: 354602 - DNA, 201 bp, Homo sapiens
agaagagtgagaattgaaaattcctccactagtaattgttagccaatagaatagcctcccagagcagtccccacagcacttggttgccatgggtttctctyctctcactgcctgccccagtgccatgatgtctggggcttgtctcttctatggcatcccctgattgacttttgtatagcaacctctgtgtcaagtcagtaa

SEQ ID NO: 354603 - DNA, 201 bp, Homo sapiens
atggctgagcgctgttgctcaggcctgtaatcccagcactttggaaagccgagggaggtagatcacctgaggtcaggagtttgagaccagcctggccaacwtaatacaaaaattagccaggtgtggtggtgggtgcctgtaatcccagctactcaggaggctgaggcaggagaattgcttgaacccaggaggtggaggttg

SEQ ID NO: 354604 - DNA, 201 bp, Homo sapiens
aacagttgctaaatccggctcaggtgtttgatttaatgaatggaggtcctcatttagggtaactgattattgataaatcttatttgaatacaatgtaggaytaggtgttaaatgtgtttggtttttcagctcatgaaaattacagattcctctagatccctccctcgtttttaaagctctaattataagttttaacacaac

SEQ ID NO: 354605 - DNA, 201 bp, Homo sapiens
atcctcactgacctttgcactttacacacctgtttaacactcctctaaaagccagcatcgcatatgaaagtgtatacctactggataaatcaggcagtgcytgatttttcaaggattcttagctttacaaaaggctcatcgaagggctgtttttaaagttgcattctccttggggcattaaagtggttttccatctaagga

SEQ ID NO: 354606 - DNA, 201 bp, Homo sapiens
acctttggagaagatgaagttatccagaaagatccttaggaacttagaaaaggagccccacagaactgggattcagacctctgagaagggggcgctctccygatggtggttctaggaatgccagaggaagaagccggagaatgaatgaagccacctgcctctgccagggtgagaaccagtgcccctgagacactggcagca

SEQ ID NO: 354607 - DNA, 201 bp, Homo sapiens
attttttttcactttagaataattccctggagattcatctaaattgtgtgtattgatagttcatttcttcttattgctgagtagtctcgcatctggtgaargaattcttgattgtaagaacataatttggtttgcatttatagtaatgattccttaaagttcacctcccccaaaaaaccactcgttaaaagtccagtgcat

SEQ ID NO: 354608 - DNA, 201 bp, Homo sapiens
tttttaaaattaaacttttaattttgagacaattgtagattcacatgcagttgtaaaaaataatgcagagagagctcgtgtaccctttacccatttccccyccaaaggtaacatcttgcaaagctgtagtacagtatcacaaccaggacattgagatgcataaggtcacaatgctgaacagttctatcaccacaaggaccc

SEQ ID NO: 354609 - DNA, 201 bp, Homo sapiens
tatctgataagcagttaatatccagaaaatgaaaagaactcctacaattcaacaaaaatacaaacaacccaattaaaaaaatgggcaaaggacttgaataracatttcttcaaagatatacaaatcattttgtgtaaggcacaagcaacaaaagcataaatagataaatggtattacatcgagctacaaagctctgcatag

SEQ ID NO: 354610 - DNA, 201 bp, Homo sapiens
aaaaactgtatctttattgtcagtaagtgtggaaaaaaacccgacttgtatgtgtattcacagtttgataggcatattttgaagtcattgttttccatcartattaagtatcatccatttctatgttctctagcaaaagaaaattcttagtgtgatacagctttactctttgtttgactttgtacaaggtccacaaaagga

SEQ ID NO: 354611 - DNA, 201 bp, Homo sapiens
ctcttggaaaatccaggtatgtttgaagtccatagtctgagtgatctctttcctctatgaatttctgtaacacttaagaaatatttttccaaagatatttrctacatactgatactcatgcatgatgtctgtatttttatctaacctattaaactaagtttttttttttgagacagagtcttactctgttgcctaggctgg

SEQ ID NO: 354612 - DNA, 201 bp, Homo sapiens
aattaggtttttctgccaagaaactcataaactaaagtatggaataacacaaatgcttaatcttaatcttggctttggattttgtaagcaaaagcattttytgcatcaatttttttcagtatgcagttgcatatttcattttttgattatgtcaaaagttgaattctcattttatgctgtgtttctcattagttgcagtaa

SEQ ID NO: 354613 - DNA, 201 bp, Homo sapiens
aagatgacacagttttcatagcaacagtatgcaaattaggtttttctgccaagaaactcataaactaaagtatggaataacacaaatgcttaatcttaatyttggctttggattttgtaagcaaaagcattttctgcatcaatttttttcagtatgcagttgcatatttcattttttgattatgtcaaaagttgaattctc

SEQ ID NO: 354614 - DNA, 201 bp, Homo sapiens
ttttgaaagatgacacagttttcatagcaacagtatgcaaattaggtttttctgccaagaaactcataaactaaagtatggaataacacaaatgcttaatyttaatcttggctttggattttgtaagcaaaagcattttctgcatcaatttttttcagtatgcagttgcatatttcattttttgattatgtcaaaagttga

SEQ ID NO: 354615 - DNA, 201 bp, Homo sapiens
aacagttcttttgttttctctccttttacttgaaaagctttcagaaagcttttgaaagatgacacagttttcatagcaacagtatgcaaattaggtttttytgccaagaaactcataaactaaagtatggaataacacaaatgcttaatcttaatcttggctttggattttgtaagcaaaagcattttctgcatcaatttt

SEQ ID NO: 354616 - DNA, 201 bp, Homo sapiens
tattacatgttcatattattcattttaggataggccaaaactcacttctaaaatcttcaaaaattttgaatagtttcattttttcaatacttaagccaaaygacaattttatagatgtgaatatatgttttttaaagttaagtccttcatatcttttcttagtttaactccccaaagaggaaaatgtctctttaaaccagt

SEQ ID NO: 354617 - DNA, 201 bp, Homo sapiens
ttccttagtgcagttttagtggaaatggaaaggagggaacagatctcagaaatactcaggtgtaaatggactgtacttgagattggctgtggatggatgaggggagagaagaaacataacaaatcccaggtttctgataactgaagagggaagcatgaaattcaagttcagactcagccatcatggtttcaaggtgactgt

SEQ ID NO: 354618 - DNA, 201 bp, Homo sapiens
ctagcactgagtaacaataatccagtagtttgccactaagtctaacaaggcgctcttaagaacaacatactggccgggcgcggtggctcacgcctgtaatsccagcactttgggaggccgaggcgggcggatcacgaggtcaggagatcgagaccatcctggctaaaacggggaaaccccgtctctactaaaaatacaaaa

SEQ ID NO: 354619 - DNA, 201 bp, Homo sapiens
aggcaccgcctgattctgaagggctagctgaatcatcatattaaactacttttattttaaaatgctaattgtattatatatcctaattctttaaaaagtakcagtgtgtttacatagccataactcttggcagctaatgggttatagtactagcaagttagaattttcaccaggaaatctaaatacaatagatttttctga

SEQ ID NO: 354620 - DNA, 201 bp, Homo sapiens
cttccagtgggacaaaatgtgtaggtggaagacagtgatactgatgatcctgaaactgtgtaggcctaggttaatgtgttttgtggtttaggttttttttwaaaaagtttaaaaagtaaaaaagttaaaaacaaaaacaattttaatagaaaaatgcttatggattaaggatataaagaaagaaaaagcttttgtataact

SEQ ID NO: 354621 - DNA, 201 bp, Homo sapiens
agggtaactgattattgataaatcttatttgaatacaatgtaggactaggtgttaaatgtgtttggtttttcagctcatgaaaattacagattcctctagwtccctccctcgtttttaaagctctaattataagttttaacacaaccttttggatagttatacaactgtcttgtataaattcctaatttctcaattccaaa

SEQ ID NO: 354622 - DNA, 201 bp, Homo sapiens
aatagaaaaatgcttatggattaaggatataaagaaagaaaaagcttttgtataactatatgtttgtgttttaatctaagtgttagtacaaaagagtcaaraagttaaaagaagtttacaaagtaaaaatgtttcagtaagctaatatttattattgaagaaagaaaaatattttaataaattcagtttagcctgtgtaca

SEQ ID NO: 354623 - DNA, 201 bp, Homo sapiens
gaagaaagaaaaatattttaataaattcagtttagcctgtgtacagtgtttgtaaagtctacagtagtgcaaagtaatgccccaggccttcacattcactygccattcactcactgactcacccaaggcaacttccagtcctataagctccattcatgaattaagtgtcctatacagatgtacctttagcctgtaatccca

SEQ ID NO: 354624 - DNA, 201 bp, Homo sapiens
tcgggaggctgaggcaggagaatcgtctgaacccgggaggcagaggttgcttgcagtgacctgagacggggccactgcactccagcctgggtaacagagcragacaccgtctcaaaaaaatatatatataatatagatatacataagtataatatataatttatatataatattatatatataatttataattaaataata

SEQ ID NO: 354625 - DNA, 201 bp, Homo sapiens
aatcgtctgaacccgggaggcagaggttgcttgcagtgacctgagacggggccactgcactccagcctgggtaacagagcgagacaccgtctcaaaaaaawatatatataatatagatatacataagtataatatataatttatatataatattatatatataatttataattaaataatatatatttatgcaattattta

SEQ ID NO: 354626 - DNA, 201 bp, Homo sapiens
ctgtttatttctttaaaagagaaatattttggggaaaatgaatggaaaagtaaaaagaagataatagtctttcatagtcccaccatccagaattaaatagyatgaacatcttgttatatagttgctcctattcttgtttttattttctggaactaaaattactctgttctttttgcaaatataaatatgatacatcaaaga

SEQ ID NO: 354627 - DNA, 201 bp, Homo sapiens
ccatgttttatttgtccttttacttcaaacaggataaccaaagatatagacagtattcaataaaataaaatagatgaaacaaattctaagagactgtgacrccacatgctacatttaacctaattttattcatgcttgccttgggatggggaatagatcattcagtgaaaacaaaatgtcttatcatgtacaacttttaaa

SEQ ID NO: 354628 - DNA, 201 bp, Homo sapiens
ggtaggataatgcagttacatatacaaactaaaaaaggaaaaagaatatattttgtggtccttaatgtttgattgcactattgtttcccacagcttagccrtatctatttctgtataccaagtattaagctgatatgtagctaaatatttcttacagttctggtaactggtaactagtgctgtgaaaggttttggtattgt

SEQ ID NO: 354629 - DNA, 201 bp, Homo sapiens
gccactatacagcacttctaaagtaaaacatcttctatctccaactgggctgtcaacatagtggactttcatgttctatggatatgaattctttaaggatrtagcccttaattaagctgtaaaaacaatgcatctctcaaccttgacatttaggatctctcctgtctgccccctctacgccccactccaattaactcatcc

SEQ ID NO: 354630 - DNA, 201 bp, Homo sapiens
atctcaatctcaaaaaaaaatagtcatgaattatgcaattattctaattgtatctgcacttacgaagtcagaggtctcctttttcagtccctctgatagtmccacctaagtgctgtcctgctcctgtgaacactttcctgtgcaaccaaacaggaggtgccaggttcccagaactctctaacattacagatctctgtccat

SEQ ID NO: 354631 - DNA, 201 bp, Homo sapiens
tcattgatattttctagacaattatttccccagtgtttaaagagaaatactaataggcgagcatttaaaatgaactattgtcaggcatattatttaattayatcaaaggagtttaactgtttgacactttactcttgtttataacttgggtatttaactactagtaaaaatcacaaaattttaatgtctttaaaataaatg

SEQ ID NO: 354632 - DNA, 201 bp, Homo sapiens
tcttgcatgtcacatctaatactgtaacactttaaatagctttcatgtcagttttaatgttaatgggatttaatttattactaaagtacatttttgttggytaagggcactgcacttttctgttttttaatgtgggattttgcgtaaatattctgtacctaagactttgtgaaagtgtgtctgtgccataatcaacaaatg

SEQ ID NO: 354633 - DNA, 201 bp, Homo sapiens; identical to SEQ ID NO: 75924

SEQ ID NO: 354634 - DNA, 201 bp, Homo sapiens
caggttatttttgttttatgaacttatttttctagctttcacttcctgaatcactgaatataaactaaaatgaatgaactgaatgctaattatgtttcttsctggttaaatatttaatccccaattttctgttttcaataaacttttttccttttctttcatttttaaaattttctttctgtgttttttctttcattttta

SEQ ID NO: 354635 - DNA, 201 bp, Homo sapiens
ggaggccttaactgtttcttttagtttttcagacagtgaataactagcagttattcacccttggataggtttaatttattcctgcaacaaatatttgcaargtacttgctgtgcacactctgcagtcatcatctatttctgaaagttaaatattgaattcttggcacttataagaagaagtttctttaagaagcaagaata

SEQ ID NO: 354636 - DNA, 201 bp, Homo sapiens
aattatctcaagtttgacaatagcattggctatggaaagagtattttccagaaggattcattactgctaaagaactccaagagctcttaaagggtaaacgrgagaaagagagagacaatgaccgaagacttaaaccagtttgatctatttcattcaaaagttgaaaaataaataaattataaaacagggtggatatttgga

SEQ ID NO: 354637 - DNA, 201 bp, Homo sapiens
cactccagcctgagtgacagattgagactctgtctcaaaaaaaaaaaaaaagaatatgataaaaattaatatataatgatatgtgataaaaataaagatakaacaaatgtcacagcatagctttattacagcctataccctcaaaggcataaaaatattgaactcaaactaaaacgtcaaaagcaattgcaacaaaagcca

SEQ ID NO: 354638 - DNA, 201 bp, Homo sapiens
ttgtcttcaagaaaatatatggctgaagttgggagtcatgattcaggctaacaggagtggagatttcccctcatatatgccatcctgtttttaggcagccstgctctgccccattcagcttcgagagacgtgagctttataaagtgtagtagacattccttaggtacttattattgcacacaagtagaggaactcatggag

SEQ ID NO: 354639 - DNA, 201 bp, Homo sapiens
ttatcggaatgtcagtgttcattcattcatttgttcagtatatcattactaagagctattatctgtgccaggaactctggtaagcgccagggctccagtgrtgactgaggtggacatggcctctgctctcactgagcatgcaggctactcagggagacagacatattagtttggggcttattgaattttgaagagccagtg

SEQ ID NO: 354640 - DNA, 201 bp, Homo sapiens
cgagcagagattgtgccactgcactccagcctgagcgacaaaaaaaaagctagtggattaatgtttgtagtagcctgcctccttattttctgaaatacatrtgtgtaagaacaacacacaagaacaactgttgacaagatgcacttactaaagagttagggattcagtcactttagttaagagtacatcttgtaactcctt

SEQ ID NO: 354641 - DNA, 201 bp, Homo sapiens
gtagtacagattctgaaacatcgtgtatttttcagtatttctgtgaaaaggtgtaagtatttatttctattactgtggaaacatgttcttaaagataaatrttctttagtagaatgttcttgttatactttcagtcagaatccaggcccttagattcttccctgtgtaacagttgcctagaaagtattaaaacacatgttt

SEQ ID NO: 354642 - DNA, 201 bp, Homo sapiens; identical to SEQ ID NO: 75914

SEQ ID NO: 354643 - DNA, 201 bp, Homo sapiens
acaagatgtggggggtggatgagaaaaggaacatttcacagaaagagtcttctgtagcacaaaatcataaagctagagaagagctcccattgttctctgcrgttgtagctgtcagcagcggcaagtccttcagaccgatgcctctaaatgctggtgagggatcactcactccttaggtactccattgcttccggtactact

SEQ ID NO: 354644 - DNA, 201 bp, Homo sapiens
gtagaatagctgttaacattggcgaaattactgtatataagacttctagattttatgttttagtaaataaaacaagatcattactctgtacggcaatacartctgaaaaggttaatttttataagtgtttttttcctctataattgaaactgcctattagcatggctgttattaaaatctgtttttctgtaatttcattgt

SEQ ID NO: 354645 - DNA, 201 bp, Homo sapiens
atgaatgtgtagaatggaaaaacatacactaaggcaaagttagaaaagaatagaaagaagatggttaagaattatcttagaaaacgttctttttgcttttyatgggacttttttgttctgttttgtttttatttttaatgcaaattacattctctctcttaaaacttttagacatttgtattgacatggattttaaaaatt

SEQ ID NO: 354646 - DNA, 201 bp, Homo sapiens
agaagcatgcaccgcatttgctgtgaataagcatacattcagggaaaagactgtgtgtgtatgtataaaaaatatacatacataaatgcatatatgtgtaygtgttatatatatacatacaaacatagatatatacaggtacacacacaatgaatgtagcagaatgaatgtgtagaatggaaaaacatacactaaggcaaa

SEQ ID NO: 354647 - DNA, 201 bp, Homo sapiens
agctgaagtaggctctctggccaaggtttaggagtaggattttgtcacgttgtattttcttaccacatattgccattttaaatttccaataagtagtaacrtttgttggagtgatccctttcatgtagaccaagttctaaaatgcattaaattttatcataatacagagaattcctaacaaattaatgaactgttgttgca

SEQ ID NO: 354648 - DNA, 201 bp, Homo sapiens
tcagtgtataatttgtttttcttcttttaagtacaatttttagattactttgataaatggaacatagaaactttcatttactcatttaacttgccgattayattttccacctaaagttatatattccctttctcctgttttgaggacactgtttcaacccctcgacaatgacaatatgctgtgatacttgcattctcaagc

SEQ ID NO: 354649 - DNA, 201 bp, Homo sapiens
agaagcagaagacaagttcacagcctggtaggtggtccatatggaaggggaaatataacattatgaaaaaagagctgattaaagtgacatcatggaggtcrtgaaaatgttctggagctagatggtggttgagcattgtgcagtatgatgaacatactgtcattgaattctatgctttaaaatggttaaaatggggaattt

SEQ ID NO: 354650 - DNA, 201 bp, Homo sapiens
cacatgaagagcgagtatccaatgccttacactctgtggaggtggaattacagaaactgacagagattccttggctttattatatcttacacccaaatgargatgaggtatgtaaaattcagcctgtttctctagaaatgtagaccatattgctatagaatttgaactcatctttgaaaaagagatatttagggaaaaatg

SEQ ID NO: 354651 - DNA, 201 bp, Homo sapiens
agcttagggtttctgttttcgcctatggtccagaaaagtgccacctttggggcatcctttgctctgagaagagaagctgaaaggctgcatgaaagccatcrctcttacctacctccaaaggaaactgaaacacagcttccttgggacaagaggtgactggctctactatggccatgaagaaaaccttttacgaagaaacat

SEQ ID NO: 354652 - DNA, 201 bp, Homo sapiens
tataagaatatataatatctctgtagtttgtgaagcacagtggtaaaatgaacacccgtgaatccagcttcagaatgggaacattttcaatatcatgcatmttcctgtgtgctccttctcagtttactcctttgttgctcctcaattcatgcattcaaagaaatatctatggtgttccaagtactgctgtaggtaccaggg

SEQ ID NO: 354653 - DNA, 201 bp, Homo sapiens
ctttgtgtgacagtagttctgtaggagatgtaattaaggcagttttagttacggccaacttcaggcataaaatccaaattatttttgaagattgaataaayggcatgtacttgaaacagttctcgggttaaaccaggtatctgctgaaatactttcaaagtgtagaatctcaggttatctgcgtttttatttatctgttca

SEQ ID NO: 354654 - DNA, 201 bp, Homo sapiens
ggaaaaaatgaagcagtggctggagagggatgctggggtcaagctacagcttttttaaaaaagtgaaatgacttttttaggagaaagactgtgggctggcyggatgtggtggctcacgcctgtcatcccagcgctttgggaagctgaggcgggtgggtcacctgaggtcaggagttcgagaccagcctgaccaacatggag

SEQ ID NO: 354655 - DNA, 201 bp, Homo sapiens
ggtgagtcacaggaactttactttcctgtacagtggtggactgggggtagttgaagggagaggcgaatatgagcatatgtgagacattctgtaggaaatayttgggtgaggaaggaggccggggtcccatcggagtaagtaagggaaatagccagtagtaaaatgtggattattgtcatcattgtaaccccatgtttgtct

SEQ ID NO: 354656 - DNA, 201 bp, Homo sapiens
tggggagcttgatgtactctttaattagccacaagcaatgtgatcatatgatatataaaacattaaaattattattattttttgagacagagtctccttcygtgatccaggctggagtgcggtggtgtgatcttggctcactgcaacctctgcctcctgggttcaagcaattctcctgcctcagcctcctgagtagctggg

SEQ ID NO: 354657 - DNA, 201 bp, Homo sapiens
atgttgattaattgacaaagatgttgtgaccagaggtttgcaggaacctaaacctagtatttcccatagggtcagtggttcaatatctgttaatctagagwtgtagtgactttattgaacataactactgcaaataatgagaatcaaatgcgtgttaaactattttaagggaaaaatagtattaatttctgtgcttttcaa

SEQ ID NO: 354658 - DNA, 201 bp, Homo sapiens
ggtttttgtcttcaagaaaatatatggctgaagttgggagtcatgattcaggctaacaggagtggagatttcccctcatatatgccatcctgtttttaggsagccctgctctgccccattcagcttcgagagacgtgagctttataaagtgtagtagacattccttaggtacttattattgcacacaagtagaggaactca

SEQ ID NO: 354659 - DNA, 201 bp, Homo sapiens
atgctatagtatggagaaaactgatagcgtttttttttttaattatttgattgaagttacttaaattaatatacagttaagtgcttgttctcaagataatrgtctaaaaagcaatatggttagtgttactgagagtaaaagttttttttgacttaactttttaatgggaatatgtatatgctggtgctagcatatacatat

SEQ ID NO: 354660 - DNA, 201 bp, Homo sapiens
taatgctcttccctaatctgttgcatttgcagtttcaatgaatgaaagagaagtttctagtctttatacttgtgatccctctcactttccaaggatactgmaaaatgaagtattactatatttcattcttcaaaatagcacttcaatatgtctccctctgatttttaagcctaattttttatacaaagattttttatttca

SEQ ID NO: 354661 - DNA, 201 bp, Homo sapiens
gctgtgaatgttaacttatatactgcttatgatcactttgtgtattgatgacaaatatggtaatgctcttccctaatctgttgcatttgcagtttcaatgratgaaagagaagtttctagtctttatacttgtgatccctctcactttccaaggatactgcaaaatgaagtattactatatttcattcttcaaaatagcac

SEQ ID NO: 354662 - DNA, 201 bp, Homo sapiens
ttcaggactattcttagaggtttggataccagtggagtatggcacaacaggctttggagttaaatagacatggattccgatcctggctctacgatttactrgctctgtatgcctaccacgtctctctgagcctcaatgtcatcatcaataatatggagatagtaaatcatagctacatttaaaggctgtgaatgttaactt

SEQ ID NO: 354663 - DNA, 201 bp, Homo sapiens
aaatgatgggttccatgttgggctttagaatttaaattacattaaaaatacctagcagatttcagtaggcaattagaaatgttgatctgaagttgatttaygtctttccctttctctgaaaattagaataacctttatccatctctgttcttctgaaaaatagcccattcttcatggtttctcagggttgctgataatagt

SEQ ID NO: 354664 - DNA, 201 bp, Homo sapiens
tgtagaagttgtccctataaaaaatgatagactaaagcagtaaagatagaaaggacaagcaagattaaagacagtttaggatttaaaattggtaaatgggyatgaattaggaaacaggttgaccttaatgttctaatgaatggctggatgattgtggggtgcctttgatggagccatagggttcaggaagaggagtaggta

SEQ ID NO: 354665 - DNA, 201 bp, Homo sapiens
atatgaacaaatatttatttatttcagtaggagtttattttttagagccattttaggtttacagaaaaactgggcagaaagtaaagagaattcgaattacrttcctatatacttcctcctcccccttcttccctacacatgtaaattcccctgttaacatcttgcattagtgtggcacatttgttacaactgttgagtcaa

SEQ ID NO: 354666 - DNA, 201 bp, Homo sapiens
ccctttcttagaggagcgatactgacttatcgaataaaaggcagcacaagaatacagtgagtcaggtaaagtatgctctccacatagcttctctcccacgsaggcctcccgcgcaccctaatccatgctgctgtatcaccccccgcaactgagaggaaggccacaaatgaaagtgatctgagatctcgtttaatttgtttc

SEQ ID NO: 354667 - DNA, 201 bp, Homo sapiens
aagttaggtttattggaagtcatcttcagagatttttttcttggattattatttcctaataatatttacttaaatatattattaaatatattaaatatatrtagatatatattgcagtttacattgcttaacgtgctcttcacctaaacattcagtagaagtgtaatgtagtttttctttcagatatttgctgcaccatcc

SEQ ID NO: 354668 - DNA, 201 bp, Homo sapiens
agggatgagccactgcatccagcctcagtacttttaattttctaaacttgtgtgtgtatatattttttattttcagaaatatcaagagggctcatttggcyggtcgagtttagggctatttttgtttttcttttcatacttttctatattagaaaaagaagaaaacacaaccttacaaatgtaattgttgtgaaaagaatg

SEQ ID NO: 354669 - DNA, 201 bp, Homo sapiens
aacatcttgcaaagctgtagtacagtatcacaaccaggacattgagatgcataaggtcacaatgctgaacagttctatcaccacaaggacccgtaatacaratccctcatgtttcccttttataggcatacctacttccctcttgccctcacacacttcttaaccccgggcaaccacttctatacttttatcatttcaaga

SEQ ID NO: 354670 - DNA, 201 bp, Homo sapiens
agtacagcaaacaggcctttatgccttttatacttactaattgtgtgataataaaggagttatgtaacatattaaaacctcagtttcctaattttaaaatwgagatacattcatatggttggattgttatacagattaaacgagataactgcaagtgagctttgatttacttcttgttttttcatactttttcctgtgtta

SEQ ID NO: 354671 - DNA, 201 bp, Homo sapiens
tgacagagcagaggttataactttggctctaattacttttagtaatggtaagacaacgtgagttttgtttgtttacatgctgtttacaatggcataatttwaaaaatatatacaattgagatatttattgcctactattttaaagatgttttatgtgttttcacctttggaatatattgttacatttccttgtacagataa

SEQ ID NO: 354672 - DNA, 201 bp, Homo sapiens
gcctttatgccttttatacttactaattgtgtgataataaaggagttatgtaacatattaaaacctcagtttcctaattttaaaatagagatacattcatrtggttggattgttatacagattaaacgagataactgcaagtgagctttgatttacttcttgttttttcatactttttcctgtgttagtcgtgtttctgca

SEQ ID NO: 354673 - DNA, 201 bp, Homo sapiens
atcattgtagagaacagagagatcaaagacagctggactgtacctgtttgtgtaattatttctgatatttttaggaaaagaagtttaacagagtaactcasactgagactgttaaactctgttcatgataaactccatattacataatataggtgaacagattaattccctccatgtaactaagatactctatttacatta

SEQ ID NO: 354674 - DNA, 201 bp, Homo sapiens
taactgcaagtgagctttgatttacttcttgttttttcatactttttcctgtgttagtcgtgtttctgcagtttgttaaattcatgtgtacattttctagyggtgtttgaaggtgtaataatccttccaatttgttaatacatttagaatagtgcttttggggctagaagattggtggtgaccatgctgtcacattgtttc

SEQ ID NO: 354675 - DNA, 201 bp, Homo sapiens
tcagttgcactaactacatttcaagtgttcagtaaccatagtggacagtgcagatgtagaaaatttccatcactgcaaaaattctattggacagcactggygcagatcattgctactcaaaatgtgatccatgggccagcagcatcaatattacctgggagcttacagaaatgcagaatttcaggcccactgcagatctac

SEQ ID NO: 354676 - DNA, 201 bp, Homo sapiens
gtttgtaaatattgtgcaagtgtattttgtaaataaattcctcaaaatttagtctatgattttttaaaaaaaccgaagtctgtaggcaccaagacaccaayttaagtttttaaaaatcacttaacaagtaaaatcatttctcatgttgtttgcagcctgtgtaacagactgctgtgtttgttggataggagacagctcaat

SEQ ID NO: 354677 - DNA, 201 bp, Homo sapiens
tggaggatcggggctggtgggagggcagggaaggggaggccatcagccagaatgtattttctttcagttccatttcctgaggaagaacttgcttttaaagsaggaaagggacagaatcagacctaaataaaattcctgagtatgcaatatttctctttagtgtctcttcacctccctttctgagtttctttcctacatcct

SEQ ID NO: 354678 - DNA, 201 bp, Homo sapiens
gaaagacacggtatttatatcaggagagtgttgtgtaagaaaacatcgtaaccctcttttttattgcccattttccagaaatcttactgctattcaagttwaggttaaccactttttgtctgcagttgggtctatttttactttgtttctatgtcttgtgaccataatgttttaacatataatgttgggaatgtaattatt

SEQ ID NO: 354679 - DNA, 201 bp, Homo sapiens
gctggggtgagaagttcccacctgcacctgactgcaatgactgtaatggctggaattgtcacctcttctccctgataggctcttcctcacctggaggatcrgggctggtgggagggcagggaaggggaggccatcagccagaatgtattttctttcagttccatttcctgaggaagaacttgcttttaaaggaggaaaggg

SEQ ID NO: 354680 - DNA, 201 bp, Homo sapiens
gtatttatatcaggagagtgttgtgtaagaaaacatcgtaaccctcttttttattgcccattttccagaaatcttactgctattcaagtttaggttaaccmctttttgtctgcagttgggtctatttttactttgtttctatgtcttgtgaccataatgttttaacatataatgttgggaatgtaattattttaccacaaa

SEQ ID NO: 354681 - DNA, 201 bp, Homo sapiens
tctgcccatattatgaatttcacaacatttgtaaaaataacagtatgttttcctgatgtggtttagatctccactttattaatacttaaaatacttaatawattaatacttagaatacttaaacatgagttgcaaacttcagagcagaaaaacatcattagagaaagtctggtatcagaaccttggaaagcttcatgaagc

SEQ ID NO: 354682 - DNA, 201 bp, Homo sapiens
ccaccatgcctggcccaagaggcatattctttaaaaatatatgtacaaagttatggagtatatgcacaaagttatttgtatatttttaaaaaatatatacmaagttatgggtatatgtacaaagttatggggtatatgtgcaatttcattacatgcacagattgcatagtgatcaactcagggcttttagggtatacatca

SEQ ID NO: 354683 - DNA, 201 bp, Homo sapiens
tattcaatatttaatataaaagacaatagacatttatacatatatgtcttgcatcatagtttgtatacgcttacagatgcttgctccataaaattattttwaaaaatcacttaaaaatttttttttgccatgtttattcacaggtatctcttggaagttctttgctgttcattttattgctgtccaaatagaaatagtaca

SEQ ID NO: 354684 - DNA, 201 bp, Homo sapiens
taaatattctttagtagaatgttcttgttatactttcagtcagaatccaggcccttagattcttccctgtgtaacagttgcctagaaagtattaaaacacwtgtttcggccaggtgcagtggctcacacctgtaatcgcagcactttgggaggccaagatgggcagatcacaaggtcaggagttcgagacaagcctggcca

SEQ ID NO: 354685 - DNA, 201 bp, Homo sapiens
taaaaattttaggtaactagatctatgtttatatagagttaaccttagttatatgtattacaatgtattgcgtatttttaaacaaatgttaaaataacttwgatggctatgttttatttaacctttatatttttagaatataattttacagttaacaatattctttataggttgctacagctaaggattagactttttttt

SEQ ID NO: 354686 - DNA, 201 bp, Homo sapiens
acctaccagtaactcctaaattggttaaaggtaccatttgctctgcattaacttgcctcagtttagagttaaatctttcttcttgttgtgtactttgagartaattatgttttagaataattttttaaatgtattgagcttttacaagaatatgatagaactgtttgggcaaatcatcattttgaataaataattgagaag

SEQ ID NO: 354687 - DNA, 201 bp, Homo sapiens
cttctctcaccttacatcttcttttccagatgatctgccctaaggtttctctaccagtttttaaactgatgattttaaaccttttgttttccttgttgcayccatttggtcaatgtttatcttaaaatgtgatgcaccattttaaacaaaattcttcagatattttctgtggtgtattagcacattggtacccatacacta

SEQ ID NO: 354688 - DNA, 201 bp, Homo sapiens
tcctcttcctcttcttcttcttcttctcttttctttcttctttcttcttcttcttccttctttcttctttcttcttcttgttcttcatgtggcagcccttwaatgataccaaaaacagctttggtgggatcagatcttctctcaccttacatcttcttttccagatgatctgccctaaggtttctctaccagtttttaaac

SEQ ID NO: 354689 - DNA, 201 bp, Homo sapiens
ggatttcctagacattacaattcttggtctctttcagagtgctgcttcttgcattgcttttttctttacagatttctttccccctttataaactaaaatamgaacagtttactgaatcttaaaaactaccatctttgctttcattggttcacaacaggaccttcttacaaaaggcttgagtatcttgggcttgcaaaggaa

SEQ ID NO: 354690 - DNA, 201 bp, Homo sapiens
agacagattttatgtagaacaaagattaaaaattaatagcagatttctcaacagaaactatgacagatagaagacaatagagcgacagttttaaatggctraaagaaaaaaccatcaacctagaattatatgctcagtgaaaaatatctttcaaaagtgaaggcaaaataaataattttggacaaacaaaaactgtgagaa

SEQ ID NO: 354691 - DNA, 201 bp, Homo sapiens
tgtaaatattttgttctcggaaggtgcctggcttacatagacttgcctatgtgagtgaatgaagtcattattactattattattactagccagcactttcrcatttcctttcttgctcaccatttaaaaatgcatagtaaggtataaggctgagatgcaactgtgcagcagccctcaatattgttcttaaggggagaaaaa

SEQ ID NO: 354692 - DNA, 201 bp, Homo sapiens
tttgcaagttcagagaggaatgaagagcactagaaataattagaatatgggtaaatacaaaagacattttctgattattttccaaattagaggataatcamctttttaaagtaaaactaataatgttttctggggcttataaacttgtgaaatagcagtagaacaaaggaggggagtttgaggaaatggatgtttaccatt

SEQ ID NO: 354693 - DNA, 201 bp, Homo sapiens
atacaaaagacattttctgattattttccaaattagaggataatcaactttttaaagtaaaactaataatgttttctggggcttataaacttgtgaaatarcagtagaacaaaggaggggagtttgaggaaatggatgtttaccattgtaagagtctcatactgtaaccgaagagaaaatattatttgagtgcacattgtg

SEQ ID NO: 354694 - DNA, 201 bp, Homo sapiens
tgtacctaagactttgtgaaagtgtgtctgtgccataatcaacaaatgatatacatcacatgcaagtcaattttatttcaatctatcataagcagtaggcrtgcacgttaagaaaattctctggatattttcataaaattacatgctcccttacctgacaaaacttgttacagctttccaaaccaaaatttccacattttg

SEQ ID NO: 354695 - DNA, 201 bp, Homo sapiens
ctaaagtacatttttgttggctaagggcactgcacttttctgttttttaatgtgggattttgcgtaaatattctgtacctaagactttgtgaaagtgtgtytgtgccataatcaacaaatgatatacatcacatgcaagtcaattttatttcaatctatcataagcagtaggcgtgcacgttaagaaaattctctggatat

SEQ ID NO: 354696 - DNA, 201 bp, Homo sapiens
tctagctttcacttcctgaatcactgaatataaactaaaatgaatgaactgaatgctaattatgtttcttcctggttaaatatttaatccccaattttctrttttcaataaacttttttccttttctttcatttttaaaattttctttctgtgttttttctttcatttttaattatttctacctttttctgttcttttatt

SEQ ID NO: 354697 - DNA, 201 bp, Homo sapiens
ttaaaaaactgtatgcaaaattgtgaactaaatattataaaacatgcataaaatagatatcttgggtttatatattgggaggaattaatattgttaaaatktcagtactctccaaagtgacctacagattcagtgtaatccctatgaaagttccagtggcatttttttcataaatagaaaaatacgttctaaatttcatgt

SEQ ID NO: 354698 - DNA, 201 bp, Homo sapiens
tgaactaaatattataaaacatgcataaaatagatatcttgggtttatatattgggaggaattaatattgttaaaatttcagtactctccaaagtgacctrcagattcagtgtaatccctatgaaagttccagtggcatttttttcataaatagaaaaatacgttctaaatttcatgtagaatctcaagggaccccaaata

SEQ ID NO: 354699 - DNA, 201 bp, Homo sapiens
tttcataaatagaaaaatacgttctaaatttcatgtagaatctcaagggaccccaaatagacaaaacaaatcttggaaaagaacaaagttggatgtctcamactgcctgatttcaaaacttataaactacaataatgcaaagagtggtactggcataaagacagacatatagacgagtggaatagaatagagagcctagaa

SEQ ID NO: 354700 - DNA, 201 bp, Homo sapiens
agtgcaaattgacagattcctgcatctgtatctcacaggatacatatgtatcattgctaccactcacttatttcctgccagatttttagcaattgtgtttkaaaagaaaacctgtagaaaggtagcagaaaacaaatgggtagtgggatatgtgtcagctagttccctaactatagaaacccttgaaataaggcaaaaaac

SEQ ID NO: 354701 - DNA, 201 bp, Homo sapiens
gaaaacctgtagaaaggtagcagaaaacaaatgggtagtgggatatgtgtcagctagttccctaactatagaaacccttgaaataaggcaaaaaacttgtkttaacctgggaaggaaaggaaaaattgggcagcaggatatgaaggggccatggaaggagcggtgggtcctcctgagacgctttcctgctttataattttt

SEQ ID NO: 354702 - DNA, 201 bp, Homo sapiens
attttcttaatagaattgaaaacttttttgattttatgaatacttatattttgatttttgtaaattcagtagttttaggtcacaacaagtaatgttttgtstttcaaatttaatttgattttcattttattttaaacttttatgttcaggggggtccatgtgcaggtttgttacccgggtatattgtgggatgctgaggtt

SEQ ID NO: 354703 - DNA, 201 bp, Homo sapiens
gattttatgaatacttatattttgatttttgtaaattcagtagttttaggtcacaacaagtaatgttttgtctttcaaatttaatttgattttcattttaytttaaacttttatgttcaggggggtccatgtgcaggtttgttacccgggtatattgtgggatgctgaggtttggagtatgagtgatcctgtcacccaggt

SEQ ID NO: 354704 - DNA, 201 bp, Homo sapiens
aaaatatttaatatttaaatatattttgtagttgcatacctatgttttcacaaagtgtaaagatatttaaatattccactcaaaaaatctaaatgtgactrtaaacgcatgtacatttcaaatttaggtagcaagcatcggtatattcctctaggatttggccttgcttttaagcttgatacttttgcacgtattcaggaa

SEQ ID NO: 354705 - DNA, 201 bp, Homo sapiens
tcagttctgggaaattgtcttgaattagctcttccttctgttttctctggtctttctttttggaatcactattatttagatgttggacctcttccacttaytgtgtaattttcctatctccctatctcccccatttttcatctttttgtcttttcattcacacacacaagagaacacgaatacccttgaagccgactggaa

SEQ ID NO: 354706 - DNA, 201 bp, Homo sapiens
ttaactcctgctcagagattagctcaagtgttactcccatatcaccaaaacaactagacatagtaacatgacagtctaaagttgggaaaaggaaaaaaaawatatatatatatatacatatatttgttgttgttgttgagatagactctcattctgtcacccaggatggagtgcagtaatgcaatcatggctcactgcagc

SEQ ID NO: 354707 - DNA, 201 bp, Homo sapiens
cacttctctttatatcctgtccacaatcctgctccatgctactgtccagttttgcttgtataagatcaatagcttcctaactggtctttccgctgccactstgtcttcacagtccattatccacgttgcaaccagagtgttattttagcatcatcaatcaggtgtacacttttctgcttaaaacttttcagtagcttccca

SEQ ID NO: 354708 - DNA, 201 bp, Homo sapiens
aataagcaatttcttatccactccctcccactcccttacccctccaagtctccattgtctatcattccactaggtccttgtatataccttatttaacaccsacttatgagtgagaacatgcaatgtttgtcttcccgtgtcttcttgtttcatttaagataatgacctcaagttccatccaagttgctgcaaaagacatgt

SEQ ID NO: 354709 - DNA, 201 bp, Homo sapiens
gactctgtctccaaaaatgaatatatatatatatggatacaagtgcaattttattaccttcatagtggttaagtcagggcttttacggaatccattgcctsaataacatatattgtacccaataagcaatttcttatccactccctcccactcccttacccctccaagtctccattgtctatcattccactaggtccttgt

SEQ ID NO: 354710 - DNA, 201 bp, Homo sapiens
ccccatctctactaaaactacaaaaaaactagccaggtgtggtggcacgctcctatagtttcagctactcaggaggctgaggcaggcaaatttcttgaatmcagaaggcagaggttgcagtgagccgagatcacgccactgcactccagcttgggcgacagagcaagactctgtctccaaaaatgaatatatatatatatg

SEQ ID NO: 354711 - DNA, 201 bp, Homo sapiens
taacacaatgaaaccccatctctactaaaactacaaaaaaactagccaggtgtggtggcacgctcctatagtttcagctactcaggaggctgaggcaggcraatttcttgaatccagaaggcagaggttgcagtgagccgagatcacgccactgcactccagcttgggcgacagagcaagactctgtctccaaaaatgaat

SEQ ID NO: 354712 - DNA, 201 bp, Homo sapiens
tctctgtgttggttcagtggggggacttgtcgcctgtgtccgtcactgtttaatcaaactagtcattttgttggtaacccctgttatcagcattttttaastcttttctctcaactttgttagatccccaaataagactcatccagtggaaagttgtagccccagatgccggcaactgcgagcccaataaacaggaaatcc

SEQ ID NO: 354713 - DNA, 201 bp, Homo sapiens
ccctgttatcagcattttttaactcttttctctcaactttgttagatccccaaataagactcatccagtggaaagttgtagccccagatgccggcaactgsgagcccaataaacaggaaatccagggaactctgaatatttaatatgtaaaatttgtgtaaccctcctgttttcaataatatattcttgccctcagttatt

SEQ ID NO: 354714 - DNA, 201 bp, Homo sapiens
tacactcattaaggtgtttttaattaggaatttgagaaattaaaactttacacaggtgaaaaaataattaatattataaattgaaaattaggccagggcayggtgcctcatgcctgtaatcccagtactttgggaggccaaggtgggcagatcactggaggccagaagttcaagaccagcctggccaacatggcgaaaccc

SEQ ID NO: 354715 - DNA, 201 bp, Homo sapiens
attacaaattcataggaaacatgattaaatgccaaattctatattagacttaattgcaatagaaggtcagagagagagaaatcagtgtgggccaggatagyaagaggttgcttcatccctgcttgtgtagccttttgtcaaaaatgcacctttaaaactggactcctcatcttctcgcccacactaattcatagagtcagg

SEQ ID NO: 354716 - DNA, 201 bp, Homo sapiens
ggactcctcatcttctcgcccacactaattcatagagtcaggtttgcgagtaaccttaaaggtgctcagttcactggcgctttccggctgatttcatcctktcctgcttgtgtttctttgccttattccacattatcaaggcttgttgattcttcctttgtaacaggtctcagtttgtccattcaatctagtgcctcaaca

SEQ ID NO: 354717 - DNA, 201 bp, Homo sapiens
agttctgtctaggccttatgcagtggctcacccctgtaatctcattgctttgggagtgcaagtcaggaggatcgcttgaggccatgagttagagaccagcyggggcgacacagagagactacatctctaccaaaaaaaatttttttaaattagctcagcatggtgacatggacctgtggtcctagctactcaggaggctaa

SEQ ID NO: 354718 - DNA, 201 bp, Homo sapiens
attttattatatattacaatgtagtaataataaaaataaagtgcacaataaatgtaatgtgcttgagtcatcctgaaaccaccccctccacccccgatccrtggaaaaactgtctttcacgaaaccggtccctggtgctaaaaaggttggggactgctgcattagacaccaccagcgcattaactggtgccgccatggtag

SEQ ID NO: 354719 - DNA, 201 bp, Homo sapiens
aaaacaattttttttattaattgacttcataatatataattttgcccatttaaacctaaagttgaatttacattaataaaacatctcatttacacattttrtataaagagaatctactgctgaaattattggacattcaccttacaggaattcaacccgccttactcttggattatcatagttgccctcagcaccttcaaa

SEQ ID NO: 354720 - DNA, 201 bp, Homo sapiens
aattttgcccatttaaacctaaagttgaatttacattaataaaacatctcatttacacattttgtataaagagaatctactgctgaaattattggacattyaccttacaggaattcaacccgccttactcttggattatcatagttgccctcagcaccttcaaattatctcccttctaatctcttttgcataccattgcta

SEQ ID NO: 354721 - DNA, 201 bp, Homo sapiens
tttgggagtccgaggcgggcggatcacgaggtcaggagatcgagaccatctggctaacacaatgaaaccccatctctactaaaactacaaaaaaactagcyaggtgtggtggcacgctcctatagtttcagctactcaggaggctgaggcaggcaaatttcttgaatccagaaggcagaggttgcagtgagccgagatcac

SEQ ID NO: 354722 - DNA, 201 bp, Homo sapiens
catagttgccctcagcaccttcaaattatctcccttctaatctcttttgcataccattgctagagttaattttcttaaatcactaaatcttttaattaaaygcttgaaactcaaactctgtggtgggggcaagtagacttactagttacagttctgccacaaaatgctctgtggccttaagcaagtctttgttttctcatc

SEQ ID NO: 354723 - DNA, 201 bp, Homo sapiens
taattaattaccttagttgagagtcctaaatctggaacatagcaaaatatgtagtattagagttcataaagcaaaagttggcttccaagcttgaaatgagyccacaaaaaagtaaatgtaggggggatcatgatatccaacatgtttttgtaacttctgatatccttggcagataccaatatttattaatgactgattaat

SEQ ID NO: 354724 - DNA, 201 bp, Homo sapiens
ttttaggtcacatgaataactagactgagaaattcaaatttcctttctatgacatattattaaaattctatcattctcaaaaagaattttttttctgtagkaaacgaggtaaaaattttgcctagcttttgctagaaaacagctcagagcctatttgtgaattgacgatagagaaaaccattccttcatcacctgaggcat

SEQ ID NO: 354725 - DNA, 201 bp, Homo sapiens
ccttttttaggtcacatgaataactagactgagaaattcaaatttcctttctatgacatattattaaaattctatcattctcaaaaagaattttttttctktagtaaacgaggtaaaaattttgcctagcttttgctagaaaacagctcagagcctatttgtgaattgacgatagagaaaaccattccttcatcacctgag

SEQ ID NO: 354726 - DNA, 201 bp, Homo sapiens
acaatttgttgtatttctaagtcagccttttttaggtcacatgaataactagactgagaaattcaaatttcctttctatgacatattattaaaattctatyattctcaaaaagaattttttttctgtagtaaacgaggtaaaaattttgcctagcttttgctagaaaacagctcagagcctatttgtgaattgacgataga

SEQ ID NO: 354727 - DNA, 201 bp, Homo sapiens
aatatatggttaacaactaaaaattaatgcaaaataccaataacaaagcctttctaacatatggaatgagaagagagacttacagcaatggctacttagartcttacaatttgttgtatttctaagtcagccttttttaggtcacatgaataactagactgagaaattcaaatttcctttctatgacatattattaaaatt

SEQ ID NO: 354728 - DNA, 201 bp, Homo sapiens
tctcggcctcccagagtgctgggattacaggcatgagccactgcgcccagccaagaatctccgtatttttaatcactactagaagtggtagatactgtgartaacaaggggaaacaaaaaaaaaagttcataataacagtaatattatctctgaacttttagttctaaaattctataaacatatttatgagaactctataa

SEQ ID NO: 354729 - DNA, 201 bp, Homo sapiens
caccattgatcctaatgatgtgaaatacattttgtatgcatattgtgtaggttgggtggctttaatgaggaaactggactaaagctaagcatgggtgcacrgcagcaaatggttttgtatagtcggatccttgtgttgatagtgtgtaacttgcatgggaaaaagtggaactatggttttgttgaaacaacacctttaacc

SEQ ID NO: 354730 - DNA, 201 bp, Homo sapiens
gaactcctgacttcaagtgatccacccgtctcggcctcccagagtgctgggattacaggcatgagccactgcgcccagccaagaatctccgtatttttaaycactactagaagtggtagatactgtgaataacaaggggaaacaaaaaaaaaagttcataataacagtaatattatctctgaacttttagttctaaaattc

SEQ ID NO: 354731 - DNA, 201 bp, Homo sapiens
atgaaatcaatataaaagaatttattcttctcttaatattccttaatttaaaaaatactaccttaataaggagtgaggctgttcactgtcaaagtacaatkatttattctacgtgaggctggccactgagtcttgttttgttttgtcttttaatctgctggtaaatagcagctggaatcgccacatgaagagcgagtatcc

SEQ ID NO: 354732 - DNA, 201 bp, Homo sapiens
caccaaaataatactttttctatgaagttattaaagttacactagctactcatatgatctttgggaagtaatgattagattaaatctattcagattttttwaaaatgaaatcaatataaaagaatttattcttctcttaatattccttaatttaaaaaatactaccttaataaggagtgaggctgttcactgtcaaagtac

SEQ ID NO: 354733 - DNA, 201 bp, Homo sapiens
acaaccaggaagaattggtagataaatgcttggaaagcatgaaggagggagacaggaaagaagacatttacacagaaaaaaacaccaaaataatacttttkctatgaagttattaaagttacactagctactcatatgatctttgggaagtaatgattagattaaatctattcagattttttaaaaatgaaatcaatataa

SEQ ID NO: 354734 - DNA, 201 bp, Homo sapiens
agctgcactgggagccagctgtgcttttgctaataaagcagcaggatctgctgtccaggggccaggagaagcctggtggctttttaaaaagtggccccacycaagagtccttcctgccaatggacaatgtggccttggcagtggaggctggaggtgtgcccagcagacgcagatgttggagtgtaggcagcattctaagtg

SEQ ID NO: 354735 - DNA, 201 bp, Homo sapiens
ggctttttgctgcttgcactctgtagggtcctacttacttgggacaatgactatactgatttggtgtttgatgagagtacagaatgtttagaaaagctctsagagatgtgttgagaattaagaagtaagtgaataataacctgcaagaggcctgattgaagagaagcagcaggaattaagtggactgctcaaatgagattt

SEQ ID NO: 354736 - DNA, 201 bp, Homo sapiens
tgaataataacctgcaagaggcctgattgaagagaagcagcaggaattaagtggactgctcaaatgagattttttgcctccctttccagaagaagtctgcmgtctgggatcaggagattgttgtatatttatttggggttatagtgtgggtaattggaagccttgtggttttgtggagtgtcattttgaaggaagcataag

SEQ ID NO: 354737 - DNA, 201 bp, Homo sapiens
ccagaagaagtctgcagtctgggatcaggagattgttgtatatttatttggggttatagtgtgggtaattggaagccttgtggttttgtggagtgtcattktgaaggaagcataaggtaaatggagaatgctacttgaatgcagctgggttttcttctgcatgtggtggtgcaggagccctttgatgttattagggtggta

SEQ ID NO: 354738 - DNA, 201 bp, Homo sapiens
cattttgaaggaagcataaggtaaatggagaatgctacttgaatgcagctgggttttcttctgcatgtggtggtgcaggagccctttgatgttattagggyggtagtaattaaacacgtttcttccatatgaaatgattgggatagggagtagtataatatttctgtttctagcatggtttatttattatctacattatat

SEQ ID NO: 354739 - DNA, 201 bp, Homo sapiens
aacaaataagtcccccaaattcagggacttagggaacaaagacatttctctcttatatcccagtccaaggaaagctgctgaagtgagtatctctgttgcaygggaccattcaagggcccaggttcctcccatgttgttgctctgccatttctcccccccagggaattgtctttgcttgggctaaaactgggtcaccacttc

SEQ ID NO: 354740 - DNA, 201 bp, Homo sapiens
ggctggtctcgaactcctgacttcaagtgatccacccgtctcggcctcccagagtgctgggattacaggcatgagccactgcgcccagccaagaatctccrtatttttaatcactactagaagtggtagatactgtgaataacaaggggaaacaaaaaaaaaagttcataataacagtaatattatctctgaacttttagt

SEQ ID NO: 354741 - DNA, 201 bp, Homo sapiens
tctctctgctctgcataggatctttctatctggagacctgacttattaaatgttaaagaaaattttatctaatgcctaaagctggtaattcctcatcattrtttggctgaatttggtaacttgccattcttctaccataggaaagactgatattaatagtaaagcaatattacttttttgtaatagacattacaaaaaaaa

SEQ ID NO: 354742 - DNA, 201 bp, Homo sapiens
ttgaatttctgagtcctgtgatatcattgcatatgttcagctttaagagacactaccaaatcgtttgtgagagtgtatcagtttgcattcccatcagcagygtttgagaattctgtagctccatagccttgctagcacttgccattttctagttgttttcattttagccattttggagctgcatggtggtactgcattgtg

SEQ ID NO: 354743 - DNA, 201 bp, Homo sapiens
ttttacccttaagcctattctttaaattttcaaggagatttttctgcagttctttttatatgacaagtttttaaccagtttaaaaagtattatttgttcaygtggtgacttttttttttttttttttttgagtcagagtttctggctctggcacccaggctggagtgcagtggcgctatctctgctcactgcaatctccac

SEQ ID NO: 354744 - DNA, 201 bp, Homo sapiens
gagctttataaagtgtagtagacattccttaggtacttattattgcacacaagtagaggaactcatggagtttgttccctgaattagcatttgaatatgastggtatggtcctccaggtttgcttaaaagaggacattttctagacacagtgtttcaagaagtaaatttcaagaactctgccttgtttaatccagattggt

SEQ ID NO: 354745 - DNA, 201 bp, Homo sapiens
agagcccctgtgacccagacacctctcattaggccccacctcccaacaccaccacactggggatcaagttttcaacacatgaactgtgggagatacattcmaaccatagcagtgacctaaaattgtatgtttgattttttttaaaaggcatccttttggagatgagtagtgaattatcttctcaaagtctgtttagacttt

SEQ ID NO: 354746 - DNA, 201 bp, Homo sapiens
gtaaaatttttaatgtataagttaataatagaatggatagaatataactcttaaaatgtgccacatggtacaatgctatagtatggagaaaactgatagcrtttttttttttaattatttgattgaagttacttaaattaatatacagttaagtgcttgttctcaagataatagtctaaaaagcaatatggttagtgttac

SEQ ID NO: 354747 - DNA, 201 bp, Homo sapiens
tatggagatagtaaatcatagctacatttaaaggctgtgaatgttaacttatatactgcttatgatcactttgtgtattgatgacaaatatggtaatgctyttccctaatctgttgcatttgcagtttcaatgaatgaaagagaagtttctagtctttatacttgtgatccctctcactttccaaggatactgcaaaatga

SEQ ID NO: 354748 - DNA, 201 bp, Homo sapiens
tccttaagaattaaattctttttctttactcttggttcagctatatagggcctcagtcccttttcttgttctgtcctttccagatagaaaatatttctccrtgaagctgtcagaagcaaaaaaaacacttgaacagccctgccttcttgctcatctgcaggtcttacatcattttctagcaatcggagggactttttctcc

SEQ ID NO: 354749 - DNA, 201 bp, Homo sapiens
ctgcactccagcctgggcgtcagagcaaaactctgtctccaaaaaaaaaaaaaaagatgctcaacatcagtaatcatttgggaaatgcaatcaaaactacratgagataccaccttacacccactaggatggctgctcttaaaaaaaaagataaagaaaatagcaatgttggcaagaatgtagagaaagtgggacccttct

SEQ ID NO: 354750 - DNA, 201 bp, Homo sapiens
acatgaggcacacagtggactctgtagatacactctagaggaagtcagaggcagtgaaggagggctgcctggaagaagtgacctttcatccgagtcttgarggaagagtgagaaaaggagcaatttaagcatgggaaccagcttaggaagaggcccagaggagtgtgaatgcatgctactttcaggaaatctcagagagtt

SEQ ID NO: 354751 - DNA, 201 bp, Homo sapiens
ttttttgaaaccaaaatatacttcccatgttctcatcctgtgaaccaaccaaataatcttattgtaaaaaggaagcgaagattgactaggcttgcttctgrtcaacgtagtttggcttcccatctgtttttaaattttgcagatgaaatcaggctcacttgtctattttcagaatttattcattgactatgcaaacatatt

SEQ ID NO: 354752 - DNA, 201 bp, Homo sapiens
tacatctcttttagatactacagacaacttctgtggcctctaatttacagtgtttttttgaaaccaaaatatacttcccatgttctcatcctgtgaaccarccaaataatcttattgtaaaaaggaagcgaagattgactaggcttgcttctggtcaacgtagtttggcttcccatctgtttttaaattttgcagatgaaa

SEQ ID NO: 354753 - DNA, 201 bp, Homo sapiens
ctgcactccagcctgggtaacagagcgagacaccgtctcaaaaaaatatatatataatatagatatacataagtataatatataatttatatataatattatatatataatttataattaaataatatatatttatgcaattatttaataattatttaaattatattgtttaatatttaatataaatataaaataatttat

SEQ ID NO: 354754 - DNA, 201 bp, Homo sapiens
ggaaaagtattgtctgagttgtcataggatgttgtcctaaactttgatgtttattcttccacatgctagctcaggttttctttggtcatgcctacaaactrgtaagctttataagtagataaggagattaaacaaaccttttatatgtaggtaaatgaaattaggtgtcagaaatcctttctagatcttaaatatggcctt

SEQ ID NO: 354755 - DNA, 201 bp, Homo sapiens
ttaagtccagcatttaagggtgagtcacgagaggaaaggtccagggcgggggtgtgcattctgcacctgcagaaagccacccatatgaagaacccaaggtrggaggaagatgagtgttttgtttggccaatggcaggtagaccagaatgccaggagcagacactgcaggcagtggggagtggggatagaagtgatgtttca

SEQ ID NO: 354756 - DNA, 201 bp, Homo sapiens
ggttgggagttctggggttcctaagcagtgcttaggaaaatacactgctgctagcaggtgaggtcataggaagaggagcagaattgccacgggaaggtgcygaattcatttggaattccgtatagagtgacttttacccagtgccgtgtagttagctgctggcaattttggaattagaatctaggttttctgaagccaggc

SEQ ID NO: 354757 - DNA, 201 bp, Homo sapiens
aattagaatctaggttttctgaagccaggccagtgtcttttctattaaactaagacatgtgttacgtgaaataaaatgtacttgagtttcaggtggtgacrgcatctctaagtggagatgtcaggcaggcagttgtaaatggagctggagtgaaaatgagaataaatacagaaatttattttaggagttatgtatatattt

SEQ ID NO: 354758 - DNA, 201 bp, Homo sapiens
aattggaactatgggaagaagttcattcagagagatttggcacataggctgtaattggaaatagccaaggggtagatttcctgaaaaggagggagtggaakctataatgcatgcagtaaggctgaaggaaaggaaaggacagaggcagcgagaggattctaattttttaaagcggttttgtcataatggagaggaaggcat

SEQ ID NO: 354759 - DNA, 201 bp, Homo sapiens
tgattctcctgcctcagctgccaagtagctgggactacaatcgcgcaccaccatgcctggcaatttttttttttcttttcaatagagacagaatttcactrtgttggccaggctggtctcgaactcctgacttcaagtgatccacccgtctcggcctcccagagtgctgggattacaggcatgagccactgcgcccagcca

SEQ ID NO: 354760 - DNA, 201 bp, Homo sapiens
agacctctcttaccattgcttctgtgtggactccgacagctataattggtttagatgtgcagctagaccctcccctagtctaaggcagtggttttccaccrtggctgccatttgaatcgccacctcctttctcacccgtttccccattgtcactttcctgccttaaacatttccctagctttttgcacttagaagaaaaag

SEQ ID NO: 354761 - DNA, 201 bp, Homo sapiens
atatcatgccttatgcttttcaaactttttaatttatgccaatagatatcttagatataagtttataaacctgaagatgtaagtttataaacctcaaaatrtgtgacttttttaaaaacctgtgctattaacagccctctcccccaacctaagccctgattttgtttactataaattttaaaatattctctcagacttcag

SEQ ID NO: 354762 - DNA, 201 bp, Homo sapiens
catggcagtaggcaagagagcatgtgcaagggaactgccctttataaagccatcacatcttgtgagacttagtcactatcacgagaacagtacaggaaaawctcacccccatgattcagttacctcccactggtctctctcatgattcatagggattatgggagctacaattcaagatgagatttgggtggggacacagcc

SEQ ID NO: 354763 - DNA, 201 bp, Homo sapiens
cagccaatttttgtttttttaatcttaatacattgtttcagtagtggtatcaaaaagagatgcaattactcttcttcacacagcactctttccattattgkttatttctccattttatatacatctttacactatactacctacttatatgttgccttctaattactaattaaatgtttatggaatggagagggaagtcta

SEQ ID NO: 354764 - DNA, 201 bp, Homo sapiens
gatcatagctcactgcaaccttaaactcctgggctcaagcaatcctcctacctcagcccagctaattaaaaaaaaaatcttttttgtagagatgaggtctyactatgttgcctagactggcctcaggtgattgtcccgccttgacctaaatctcttttttaacttttaaatgatgtattcatgatcattgactgcactact

SEQ ID NO: 354765 - DNA, 201 bp, Homo sapiens
aacatgtatttaacatgttttattccaaggtgaattatttagaaatatattagttaactggtccaaagagtagtttaatgagaggtatgagtagtatatcmgtgtatatttgaaaaccctttttaaagttaggtttattggaagtcatcttcagagatttttttcttggattattatttcctaataatatttacttaaata

SEQ ID NO: 354766 - DNA, 201 bp, Homo sapiens
cttgggcaacaagagtgaaactccatgtcaaaacacaaacaaaaacatgagtttcttttttttttttttattttgcgtatgtctttttttttaattattaytatacttttagttttagggtacatgtgcacaatgtgcaggttagttacataggtatacatgtgccatgctagtgtgctgcacccattaactcatcattta

SEQ ID NO: 354767 - DNA, 201 bp, Homo sapiens
gatgaacattaaatagtgggtctgcttttggaaagtagatttatgaaataaggaagggaagattttactttttaattttatacctgcatctgttttctatmgctgctataacaagttaacacaaatttagccacctcaaacacatttatcatcttactgttgtatatgatgggagactggcacagtcttactgggctaaaa

SEQ ID NO: 354768 - DNA, 201 bp, Homo sapiens
atttacatggtaatttacttttcatttaagtgcttaatgagaaagtaaggactgcaaggagctttctgagatgcatatatttttgcttgactttggttctkacttgtacttgaagtattcagctttgagtttcaccagtccccaggtggttgtagagccccagcaatgtaccagggactgtgagaggggctaagtgagatg

SEQ ID NO: 354769 - DNA, 201 bp, Homo sapiens
atttaaagcagctttttctaaagcacataaagatatctgtttaatgtattgggttgagaaaaagtttattattctgttaagtatttcatatttattcattsaacaaatatacattgagcaccaattatgtgccagacaaacccccaggtgcatggacctttgaatgtgaaaagctaaacctgctaatggttaacactgtgt

SEQ ID NO: 354770 - DNA, 201 bp, Homo sapiens
ccagtttgtttatccattcaccaagtgaaagacactggaatgttcccagtttggggtgattacaaatgaaaccacaataaaaatttgtatacatttttgtwtgaacatgtattttcctttcaggaaagcaccacaggactgctgggtcatatggtaggtagaaactgccaaactattttccaaagtgactgtgccattttc

SEQ ID NO: 354771 - DNA, 201 bp, Homo sapiens
ccataatttaaattataattgtctatctctactaaatggagattttaaaattagctgcttccagaaccaaaacatctacaaaattaaaggtgagaattttrgtgtttttctctctagtgattaaactttcaaaacatctctataaaaatttcttgtactttgtctgctgatcttgattctttttgaatatttttctcattg

SEQ ID NO: 354772 - DNA, 201 bp, Homo sapiens
cattaatgctttgtaataatctagcataacactatttagtatgaaatgtctgacagtagttagctactgggggagtaactagcagccacataggcctaatwtttcaagtggcaagagtcacagcattctgtgttatagatctcatgtttgtaagagcagtaggctgagtgtttggcctttgtggtctggtttctgcacaaa

SEQ ID NO: 354773 - DNA, 201 bp, Homo sapiens
ccagtactttgggaggcgaggtgggcagatctcttgaggtcaggagttcgagaccagcctcggcaacatggtgaaaccccgtttctactaaaaatacaaarattagccgggcgtggtggcacgtgcctgtagtcccagctacttgggaggttgaggtgcgagaatcgcttgaacctgggaggcggaggttgcagtgagctg

SEQ ID NO: 354774 - DNA, 201 bp, Homo sapiens
ttgacatcctgggctcaagcgatcctctggccttggcctcctgagtaggtgggactacaagagtgagccacgatgcctggccccacgtggctttggaactstgtttcacagagccatagaattcctcagaggcatcccagaatggggaggctgtgctgcttagattctggatggcctgttcaaagtgcctggtcacatgta

SEQ ID NO: 354775 - DNA, 201 bp, Homo sapiens
gagcatgctcagtcattaaacctaaattagcttctgctcctactcctgggtgggggcagagcttcctaaaaatgtgttttaggaagattttgacaccagakttttaaaatgcacagagccaggtaaaagtaagtggttacacttaatgatattagttaaaggtgcatggaaaaaggaacaaaagtgctgaattataccttt

SEQ ID NO: 354776 - DNA, 201 bp, Homo sapiens
taaagtgcttgtgccatggcattgattcttgcggtcactaggttgattgtctttaatggatgagagaggattagcaattttgattcccctttgcattttaktcttacgtaaggatttaatttccaacaagaaaatcatgaaattagtttctggcaaaaagagattttctatttactggtttctgccttacacatttttgtg

SEQ ID NO: 354777 - DNA, 201 bp, Homo sapiens
taaaatatggaaggatagaaaatctactgtcttttaatttcactctctacaaatagtagttcatttacacattttgtaggtatatctcttctgtatacccrtcctctccacaaagataatattaatgtggacaagatagatagcttcccctaataacaatgaaatggtagtggataaaagcagaatggcttttaatttggg

SEQ ID NO: 354778 - DNA, 201 bp, Homo sapiens
ctcaaaaaataaaaaataaaaaaacatgaacacctgtaattccagcactttgggaggccaaggcgggtggatcatctgaggtcagaagttcaagaccagcytggctaacatggtgaaaccccgtttttactaaaaatacaaaaattagccaggagcagtggcaggtacctgtaatcccagccacttgggaggctgaggcag

SEQ ID NO: 354779 - DNA, 201 bp, Homo sapiens
gaaaaagaaaaaaaataataatttatttgtagtttaagttctaccatggcattttctatgattgttaaatcaataaaatgttcttttttgttgttcatttwaaaaaattcattttaaaaatttgattgctatctgcatggtgttctggaagtttcatttttatctttaacatagccctatgctgtatgtgaatgtattcct

SEQ ID NO: 354780 - DNA, 201 bp, Homo sapiens
ttgttcagtatatcattactaagagctattatctgtgccaggaactctggtaagcgccagggctccagtggtgactgaggtggacatggcctctgctctcrctgagcatgcaggctactcagggagacagacatattagtttggggcttattgaattttgaagagccagtggcatccaagtggagttatccagcagcaatt

SEQ ID NO: 354781 - DNA, 201 bp, Homo sapiens
tatatatattcacttcagcaccgcacataggacttctttctgaaaatcttcatcgttttccataccatgtttgcaaataaagtgcatccatttggaaaatmtttttaaaatatttcttttatatttacagagatagtatttttccccatttcctttgttagtcatatgatttaaagcagctttttctaaagcacataaaga

SEQ ID NO: 354782 - DNA, 201 bp, Homo sapiens
tgggtataccaaggatgtgatagtggccagagctttgaaggaggatgggatggggtgggaggtttagaagaggcagtggaggacgatattgagtagaaggsagagctggtgaaaaagcttggacacagggaagcatggtgtatttggggattaccaagtacttctcttttactttactattaggggaacttaggaggattg

SEQ ID NO: 354783 - DNA, 201 bp, Homo sapiens
tctttccttacagtatagtcctcctagtctggtcattgtttcaaatgccctgtaaaacttattcttgttcatccgtgtcctgtgcctcaggatctcttacycatagttgtattgttttttcattttgctttatcaacaaagtgatttgctgtattcgggcctattttactacctgaaagcccttctctggtatgtcaccaa

SEQ ID NO: 354784 - DNA, 201 bp, Homo sapiens
aacatgggatggctagggagccagctctggtggtgtgcacctataatcccagctacttggaagcctgaggcaggaggattgcttgagcccaggagttcaaractgcagtaagctgtgatggcaccactacattctatcctgagcgacagagcaagaccacatctctcaaaaagaataaataaataaaaataaaggatatat

SEQ ID NO: 354785 - DNA, 201 bp, Homo sapiens
ggtgtatttggggattaccaagtacttctcttttactttactattaggggaacttaggaggattgctgaagatggggctgttaaggaaggtggggcacttrtggacaaaagagtcttgtatgaccagctaagaggtctggaattatgcgggtgatgggtacaccttgaacatattgaaccagagtttggcagtttttcaga

SEQ ID NO: 354786 - DNA, 201 bp, Homo sapiens
cagttcatcctttttaattagcttctttccctaactttgtcatccacgtggtttagaggcaaagcaaagaatttatgacagagctgaacctggtagcatasgcatctcatgatgacattcttctttccttacagtatagtcctcctagtctggtcattgtttcaaatgccctgtaaaacttattcttgttcatccgtgtcc

SEQ ID NO: 354787 - DNA, 201 bp, Homo sapiens
aattcaatccagctccaccatcttccctccatatcagattgtctggtgaaaggagcagagaaaacaaacactaatgagaaatatatatatagctgcagttytgtagcattttgcaacatcatgaaccacaaatagaaacatgggatggctagggagccagctctggtggtgtgcacctataatcccagctacttggaagcc

SEQ ID NO: 354788 - DNA, 201 bp, Homo sapiens
tgtctgtattgtatctatccgtccatccatccatccatccatccatccatccatccatccatgcatccactcatcccctaacaacttgaatatagatcctrtttatgtgctggacttacaaagactaatgaaacacgtctacattttagctgttcactatctagtgtggttatctaatgttgaagaaaagctagagacatg

SEQ ID NO: 354789 - DNA, 201 bp, Homo sapiens
ctttcacatgtaaatggaagaattgtattaaaattccaaacattttttgtaagaaggatgacttttttgcccataatatacgtaatttacatgggttaagsagactgttctatttattaactgaaataataattatatattgtttcaagttctgtaagtactaagatacatgaagaaaaacaaataactttaaaaaacagt

SEQ ID NO: 354790 - DNA, 201 bp, Homo sapiens
aaatttgtgcagaacaaagactttgaccttggtttccctatatacgaaattgataaaataatgattttatgcaaatcataaataaatgagcccaaggtactgtaaatcacagtgtgaatgggaaagaactgtacaaatgcaaactttgtttcccaagccacattatcagtgattctgatatatactcaactttcagaaact

SEQ ID NO: 354791 - DNA, 201 bp, Homo sapiens
atcatcagtcacctcccttccaccctttagagtctccagtgtccattattccacactatgtccatgtgtacacattatttaactcccacgtataagtgagracatgtggtacttctgcttctgagttatttcgctgaagattaatggcttctagttccatccattattctgcagaagacatgattttattcttttttgtga

SEQ ID NO: 354792 - DNA, 201 bp, Homo sapiens
atgatggttcactcgggataaaggtggaaaagagagacccacaccttgggaggctctttccagagagacgccttcaccaatggccttcctttttagctttytactcttacctttttcctcagataagttttccctccccgttatgttgttggtatggaacgaggctgacttcatgtcttaactttaaatttgtgcagaaca

SEQ ID NO: 354793 - DNA, 201 bp, Homo sapiens
gaaacatctataacgtaatataaaaatgtctcatttcggttgatgatgaaatcacgggtgttactaatgccttttttcccctacatttataattgagggcratgctaaacttcagaggttagtgaacataaagatacagatttttaccatgaagttaacaagtcacctgaatctatccatggactcctggtttctgaacct

SEQ ID NO: 354794 - DNA, 201 bp, Homo sapiens
gcttttttactgagagtactagaaaatttaatattatataatggcatacattatatttctattagactgtggtagtctcaataatctagtgtgcagtattktttagggaacatatcttttaaccatgctattaatcttttgtacattatgaatgctcaatatatgttgcagaatacttgatagattgcttatattttatga

SEQ ID NO: 354795 - DNA, 201 bp, Homo sapiens
ggatggtttccatctcttgacctcatggtctgcccgcctcggccttccaaagtgctgggattactggtgtgtgccaccgtgcccagtttggccacacccarggacacataggaagttgtttttatctttgttatccccagtgtttagctcagtactggtcctattttgagggtgaaatagatgggtaagtgatcactttag

SEQ ID NO: 354796 - DNA, 201 bp, Homo sapiens
taagagcaggactggctgcctcaattgctgggagttcgattatcaacaaaatgttactggcaaacattgatccttttggtgccacgccgtttattgaccckgatctagattccgtgtaagaaaatgcttttgcaaatattttgtttgggtttttcttgttttttttttttttcaacatgaactgtaacattttaaatgtat

SEQ ID NO: 354797 - DNA, 201 bp, Homo sapiens
ccaggctggaatacaatggcatgatctcgactcacggcaacctgtgcctcctgggttcaagcaatcctcctgcctctgcctcccaagtagctgggactacmagtgtgcgccaccatgccctgctaatttttgtatttttagtagagacggggtttcaccatgtttgccaggctggtctcgaactcctgatctcaagcaatc

SEQ ID NO: 354798 - DNA, 201 bp, Homo sapiens
agttacctcatagccatcacaacattgtagtacaacacattactctcatgtttgtggtgtaaacaaacctactctgctgccagtcatattaaagtaccatmtaacacacacaattacatacaatacataatacttaatgatgacagtcaatgaatatgttactgattggtttatacatttcctacactatgtatacttttt

SEQ ID NO: 354799 - DNA, 201 bp, Homo sapiens
cacaaccaggacattgagatgcataaggtcacaatgctgaacagttctatcaccacaaggacccgtaatacagatccctcatgtttcccttttataggcayacctacttccctcttgccctcacacacttcttaaccccgggcaaccacttctatacttttatcatttcaagaatattacataaatggaatcatacagtat

SEQ ID NO: 354800 - DNA, 201 bp, Homo sapiens
attcagtgaaaacaaaatgtcttatcatgtacaacttttaaactataataatgatgtaccttaattacttccatgcacacaattctaacattcattttttwaaaaaaataaacacaattaagacttctagagcattttataataaagtaattcctaattaatttttctttgtagctagatcaagcacctccaaaatacaaa

SEQ ID NO: 354801 - DNA, 201 bp, Homo sapiens
aattgattaggtggttttcctgccaaaacatcttaaatcgagagaaaaattactttggatcagatctgagaattttaaaaaatattctattttattgttaycctttaatatgtaggaaaactgcattgctgaaaacctaactcaaatccctgtcccagtgattgactttttttggagacagagtcttgctctgtcacccag

SEQ ID NO: 354802 - DNA, 201 bp, Homo sapiens
gcgaccaaaagtgaccttttacaggtagagacagcgaccaaaatatgagagcaaattatggtgaagccataactagaaattgatcactaacctttaatcasaatctagacataattattgatataaaataactcctggtcatccatattcatgtaaatatattcaatatttaatataaaagacaatagacatttatacata

SEQ ID NO: 354803 - DNA, 201 bp, Homo sapiens
gcccacactaattcatagagtcaggtttgcgagtaaccttaaaggtgctcagttcactggcgctttccggctgatttcatcctgtcctgcttgtgtttctytgccttattccacattatcaaggcttgttgattcttcctttgtaacaggtctcagtttgtccattcaatctagtgcctcaacatgtttatttaagcatct

SEQ ID NO: 354804 - DNA, 201 bp, Homo sapiens
gaacaaaaacttttccataataaataatgcttaggatgaggactgttatgatgataatatcttgacatgccatgtttttaaagaattatatattattttgwatccattgcctcacatatcatcatagcacatagtgatatgcaggcattatttccatttcagaggtgtaagtctgttaactatagaggcttagtttgacca

SEQ ID NO: 354805 - DNA, 201 bp, Homo sapiens
tttgtccacagtggaaggaatggactagtggtgggaaaaattgatagcatggagagcacctagtaaactattgagtccaagagaattagaggagcccaaaytaaggcaatagcaagaggagtggaaagggatggatttaaggaacaaaaacttttccataataaataatgcttaggatgaggactgttatgatgataatat

SEQ ID NO: 354806 - DNA, 201 bp, Homo sapiens
ccctccagaggtatacctttgagcgttgtgtccattttcatacacgtgaaaagaaacagcctgaaatctgctgaaccctggaaaccataaaggcatttccrgccaggcgtggtggctcacacctgtaatcccagcactttgggaggccgagacaggcggatcacgaggtcaggagatggagaccatcttggctaacatggt

SEQ ID NO: 354807 - DNA, 201 bp, Homo sapiens
ggagtggtggcttcttcctacccctacggggtcaaggacgccttcccagggctaatggtgctggatgaatgttgagatgaatagatttcaagacagacaartggagcagaggatatttagggcagaggaaggagcttaggaggggtaggccacgcatttggagggctgtgtaggggccttctatggtacatgtaggagctt

SEQ ID NO: 354808 - DNA, 201 bp, Homo sapiens
atattttccccatattatcttttgacctctctctatggcagtgtccttttatgagtcacaagtgcacactttatgcagcagtgaaccatgaaactggatargacattaaagactctgaaccgttgtttggttatttcaggttattgaggtgtgggtgctaattgagctttcctagtctaaagtgaaaataatatgttaccc

SEQ ID NO: 354809 - DNA, 201 bp, Homo sapiens
agtcccagccactcaggaggctgattgcttgaggagtttgaggctctagtgagccatgatcccagcctgggcaacagagtgagaccctgtctaaaaaaaawttttttttggccgggcgtgatggctcacgtctgtaatcccagcactttgggaggctgaggtgggcagatcatgaggtcaggagatcgagaccatcctggc

SEQ ID NO: 354810 - DNA, 201 bp, Homo sapiens
gcatctgtacttacataaattatagaaccttcacaatggtgatacaaagacaaatgagatagacctcccggactccaaggagtttataatccaggccagtkcaaaaggcaggtaaaacctatcctcagttgagattgacctcctaatttgcctgtgaccttcctgttcatttttctgcagctatgtcaggactcattcctt

SEQ ID NO: 354811 - DNA, 201 bp, Homo sapiens
tcttagttcatttttcttgcttagaacacctgaggctgggtgatttataaggaaaataaatttatttgttacagttctggaggctggaaagtccaagggcwtagctgggcatctggtgagagccttcttcctggcagggactctctgcagagtcccaaggttacacagagtatcacatggcaagggggctgagcatgctaa

SEQ ID NO: 354812 - DNA, 201 bp, Homo sapiens
ttggaattgttgaacttgtgtaaacaaggaagaaaactggcatcaaaaggaaagatctttcaaaaagggataagaaaaataattatgcttccacagcaagrtggtttcttgatgttcattgcttctgccaaacaggcctgttgatttccccgtaggtttaaagctcaaaaagctctactcatgttgagaatttaaaagatt

SEQ ID NO: 354813 - DNA, 201 bp, Homo sapiens
aagatatatgacatttaaaatatacaaaatcattagatgattaatatggatttttagtctttctggtataaatgtcacataataaatctgaatatttttgrtaactgacatgtagctaatactgatacgcacttactataacactctcagcctcaatagatttaaataatttgacttatttagaaatttatatcatttatg

SEQ ID NO: 354814 - DNA, 201 bp, Homo sapiens
ttcactccaggagcacttttagctgctgccacatgaagcttattaagggcaagattttctcctgacacctggcctttctcactgcttcctctcaggagacytctcttaccattgcttctgtgtggactccgacagctataattggtttagatgtgcagctagaccctcccctagtctaaggcagtggttttccaccgtggc

SEQ ID NO: 354815 - DNA, 201 bp, Homo sapiens
cccagacagtgtgctaagtgctctacaggcattatcttataattaagttagatgcaacaagcttgtgaagttggtattgttatttccgatttttaggagasaaaactgaggcatagagttggggtaatttgtccaggttcatactgttattgtatgctggagcctggcttgaaatctgtctgtctgactctaaatttgctc

SEQ ID NO: 354816 - DNA, 201 bp, Homo sapiens
ttctatagaaaaagataatcgaaactgaacagggacctatagatgattactaagtagtgagtggtgtctaccaaagattggagatcaagtttagtaatgtygttactcgctgtgcttataacattttctttaagtgggagtagagaacaaacaaatgaattgatccagggttggtggtttatagggcatattggacagaaa

SEQ ID NO: 354817 - DNA, 201 bp, Homo sapiens
gagacagaaagtagacggtggttcccaaggacctggaggtgaggtgatcgacggaatggaaaatgacagctagtgggtacaccgttactttgcagggtaaygaaaaggttttagaattaacagtgatggttgcacaactttgtgtatatattacaaacaactgaattatctaaaaactttaaaagggttaattttataata

SEQ ID NO: 354818 - DNA, 201 bp, Homo sapiens
gtgtagtggtacacccctgtaatcttagctactcaggaggctgaggcccgagaattgcttgaactcgggaggcggagggtgcggtaagctgagatcacacyactgcactccagcctgggagacagagtgagactctgtctcagaaaacaaacaaacaaacacatgtttctgggccctgccctgggaaattatgagtcggta

SEQ ID NO: 354819 - DNA, 201 bp, Homo sapiens
tgggaggccaagatgggcagatcacaaggtcaggagttcgagacaagcctggccaacacagtgacaagcctgtctctactaaaaatacaaaaaaattagcyaagtgtagtggtacacccctgtaatcttagctactcaggaggctgaggcccgagaattgcttgaactcgggaggcggagggtgcggtaagctgagatcac

SEQ ID NO: 354820 - DNA, 201 bp, Homo sapiens
gtgcagtggctcacacctgtaatcgcagcactttgggaggccaagatgggcagatcacaaggtcaggagttcgagacaagcctggccaacacagtgacaascctgtctctactaaaaatacaaaaaaattagctaagtgtagtggtacacccctgtaatcttagctactcaggaggctgaggcccgagaattgcttgaact

SEQ ID NO: 354821 - DNA, 201 bp, Homo sapiens
caggtgcagtggctcacacctgtaatcgcagcactttgggaggccaagatgggcagatcacaaggtcaggagttcgagacaagcctggccaacacagtgacaagcctgtctctactaaaaatacaaaaaaattagctaagtgtagtggtacacccctgtaatcttagctactcaggaggctgaggcccgagaattgcttga

SEQ ID NO: 354822 - DNA, 201 bp, Homo sapiens
ggaattacattaattaaatttgatcattcacttgatatttatgagacaaggattacatgggtagtgtgcattataatacatatgtttcattttcaaaaatrgacttcaaaagcttcatttatctttaagtgtgcattgatcatattcaaattttgagtattagtgacctttaattatggtagacatctattttctactgat

SEQ ID NO: 354823 - DNA, 201 bp, Homo sapiens
aactgtcttattggagacaacaaacttttctcaatatattatgtctttatggtagtaagaaatagtgtcatgtaaaagttggaaatgaactgtggaatcaracagacagaaatatgatctcagcacctgccatttattcatatagatctcattatcatatgtagcagataatgttctaggcactggagatattgtcagtgt

SEQ ID NO: 354824 - DNA, 201 bp, Homo sapiens
aatagtgtcatgtaaaagttggaaatgaactgtggaatcagacagacagaaatatgatctcagcacctgccatttattcatatagatctcattatcatatrtagcagataatgttctaggcactggagatattgtcagtgtgcaatccagtgggatgattaaaaattttggttctacaagctgtttttgtcttggaggctc

SEQ ID NO: 354825 - DNA, 201 bp, Homo sapiens
tctcttctttccatccaattaaaatgaaacattaaatttaacttttttagatataataaactcagggaccttatattctaataggggtagcacaataaacrtagtaaattacattatgtgtcagaagatggaaagtacttcgtggggtgggtaataagatcaggatgggggaaaatatggtgagcaagcacaagtttcagt

SEQ ID NO: 354826 - DNA, 201 bp, Homo sapiens
agacaatttatttgtccttctctgtcccaccagtgcagcaattctacccgtgcctatgcttttcctgttccctctgacttcagtgattcctcccccatctrtcacggtgggaatcctaccaattcttcaaagcttatttcagataacccatttttttccagcttctttcattcacaaagtatggattgagttcccaccatg

SEQ ID NO: 354827 - DNA, 201 bp, Homo sapiens
atgaaacattaaatttaacttttttagatataataaactcagggaccttatattctaataggggtagcacaataaacgtagtaaattacattatgtgtcasaagatggaaagtacttcgtggggtgggtaataagatcaggatgggggaaaatatggtgagcaagcacaagtttcagtgtgaaacacgcagttactcaggt

SEQ ID NO: 354828 - DNA, 201 bp, Homo sapiens
aactcagtcttcagatcttgtaagatcatgcctcagcattctagtattaccagacaatttatttgtccttctctgtcccaccagtgcagcaattctacccrtgcctatgcttttcctgttccctctgacttcagtgattcctcccccatctatcacggtgggaatcctaccaattcttcaaagcttatttcagataaccca

SEQ ID NO: 354829 - DNA, 201 bp, Homo sapiens
agtattttgctggtgaaaacaaaatgaactagcatacctaaggcacttaaccagagcctggcccagggccacagagtccctgcctacctcttacagctgcmtctccctctgctccctcttgcaaacttttcactgcatttatagcagaaagctctttgaagatgcctcaaatatccatgttgttttaacctttctactttt

SEQ ID NO: 354830 - DNA, 201 bp, Homo sapiens
atcctgatttttcacatttatctctagacagcattggctatttgacagcctccagtttgggctcatgctaccatcactaggatgacttttccttttccatytgcacttgacaaagttccctgttttcttcaagatcccctcaaatagtccttattccatgattcacgagagagagttcagttttctgctggataaatcatc

SEQ ID NO: 354831 - DNA, 201 bp, Homo sapiens
tccctgcctacctcttacagctgcatctccctctgctccctcttgcaaacttttcactgcatttatagcagaaagctctttgaagatgcctcaaatatccrtgttgttttaacctttctacttttgcacacacctaaaatgcccttcccccatctcttgtcataaactccttcaagacccaccttgggcccttgtctggga

SEQ ID NO: 354832 - DNA, 201 bp, Homo sapiens
acctcaaactcctgggctcacgtgatcctccagcctcagcctcccaagtagcagggactacaggtgcatgccaccatgcctggctaacatttttatagagrcagggtctcgctgtgttgcccagtctggtcttcaattcctgacctcaagtgatcctcctgccttagcctcccaaagctctgggattacaggcatgagcca

SEQ ID NO: 354833 - DNA, 201 bp, Homo sapiens
tctgctccctcttgcaaacttttcactgcatttatagcagaaagctctttgaagatgcctcaaatatccatgttgttttaacctttctacttttgcacacrcctaaaatgcccttcccccatctcttgtcataaactccttcaagacccaccttgggcccttgtctgggaacattgctttgactccctctgaggcgagttg

SEQ ID NO: 354834 - DNA, 201 bp, Homo sapiens
gaataattttttaaatgtattgagcttttacaagaatatgatagaactgtttgggcaaatcatcattttgaataaataattgagaagtacaggaaaaataygttcatttcacttgaagatggatgctatttttcttccatttatttgtttatgtatgagacagagtcttactgtgtcacccaggctagagtacagtgatgt

SEQ ID NO: 354835 - DNA, 201 bp, Homo sapiens
cagctactaagtggtggcaccaggaggtgaacccaaggtttctggctccaggacctctgctctttcgtaatcatattatactgcacctccaccatacttamtatatacaaggcagtgtgcacataacactgtattgcaagtattagtgtatgtgcatgtgtcttgcctattatttgtgaattctttgagggcggagaacca

SEQ ID NO: 354836 - DNA, 201 bp, Homo sapiens
tgaacatcaaaaagttgtttttatgagaaattagcccaggagtcctatctatttaaaaaaggggtggctgttctgttactttagtgcaatgggactgtttwtgaatgagacaatagagtgtaaaattaatatagttagcttgtaattagttttagggagagtgaagataattaagttttagagtattttaaaattgagttt

SEQ ID NO: 354837 - DNA, 201 bp, Homo sapiens
tacttactatatacaaggcagtgtgcacataacactgtattgcaagtattagtgtatgtgcatgtgtcttgcctattatttgtgaattctttgagggcggrgaaccatgtcacattcacttttgctctttggggctttgcacatatgcaaagctgtggtgagagtaaaatattctcctgtaatttgtaagacatgagaaat

SEQ ID NO: 354838 - DNA, 201 bp, Homo sapiens
tgaaatactactttttgaggcacatttattgtatcatcatgtaataattcatatgtctgagatgtgagaaataccgtatattaatatgattgatgagatgmtttatttaagaagaaccagaaaacattaatttagttacttgtaatggaacatcagtcttagtcattagtacgctctctgctttttgtcagagttgaacat

SEQ ID NO: 354839 - DNA, 201 bp, Homo sapiens
taatggttttccaaccggctatcatcccaccttgccatactcttaaacttgacacttccgttgtggcctataaaggaaactaaaaaatacaaatatagtgmtgtaaatgttgatattgaaatagacagagatttagaaaagtctttaatggtacagtatttggtctttattttggctagtaatctaacttgttggaaatga

SEQ ID NO: 354840 - DNA, 201 bp, Homo sapiens
tattattcaaaatgttaatgaaaatgcaccattggctctgaatttcatttggttttgaatttcattttaatcgtgtcattgtgcttctgcttctctctagmccagtattaaagagggacagctattgaagcaaaccagttctttccaaaggtggaaaaagcgatacttcaaacttcgaggccgcaccctttactatgcaaa

SEQ ID NO: 354841 - DNA, 201 bp, Homo sapiens
ttatttagatctattatttcatcctgtgaagctctttggaagcttgattctatcatcttaagtttatttcatctgtgaatttgataagcaggcctttgatrttttcatctattagaaagtgttgattacagcagagatgacaatggcatccttactatacactgataattcctcctaagatgatggctgttaggaggattg

SEQ ID NO: 354842 - DNA, 201 bp, Homo sapiens
ttatcttttttatttagatctattatttcatcctgtgaagctctttggaagcttgattctatcatcttaagtttatttcatctgtgaatttgataagcagrcctttgatgttttcatctattagaaagtgttgattacagcagagatgacaatggcatccttactatacactgataattcctcctaagatgatggctgtta

SEQ ID NO: 354843 - DNA, 201 bp, Homo sapiens
ctcttcttttccctccttatccttgtgcattttccttcctgcactttctttgagccaataatcccttaggcattgttcactcctttgcaaaccaaagcttygaaggggagtttgccacaactcagccagatgtgccatttatgacgctcaaaatggtgcattaagtcaattactttttttaaaaagttgatccaatgtttt

SEQ ID NO: 354844 - DNA, 201 bp, Homo sapiens
gtgctgtaagaacatatcagatttcaaagacttaatataaaaacaatctctttaataatttttatatgagtaggtgttaaattacaacattttggattaawtaaaatattaaaatttttgccttttttggctgggcgtggtggctcatgcctgtaatcccagtactttgggaggccgaggcaggtggatcacgaggtcagc

SEQ ID NO: 354845 - DNA, 201 bp, Homo sapiens
ctgagttcctttgaggatgtagagtgattctgcttttttaccttttaccaaatagttcagttgagcatgagtgattaaaaagtataccgaatcaaatattygtgatgcttggactgtcaagcttctagagagcagagtttatatctggtcaggtccctgtggtatcccagtctctgacgcagcgtctgacacacagtccat

SEQ ID NO: 354846 - DNA, 201 bp, Homo sapiens
tttgtgttaaggtctgtggataattagctagaggtaagaaaagacacagtctagccattctatgcagaccacactctttcccatgctcttagagagacacrcatcttctgcttcaagtaccacatggctatttctgcatacacaccatagttacactgctccctcttatgccctgccctagtagatcctctccagtattcc

SEQ ID NO: 354847 - DNA, 201 bp, Homo sapiens
gaaccacaggcatacgccaccacacctagccaatttttgtatgttttgtaaagatggagtttcgccatgttgcccaggctggtctcgaatttctgggctcmagcgatccacctaccttggccccccaaagtgctgggcttagatgagtgaaccacggtgcctggctgtatgtcttaatagaaaagattataatacattttt

SEQ ID NO: 354848 - DNA, 201 bp, Homo sapiens
tactagttagagagtactgtaaacattccttagccttcatatttatcaaataggaataattcctcctacttcatggagttatatagagcagtacttctcaractatttgtggtaaagaaccatggttgggttgtttaaaacatatgtttgatttttaaattttcggtcttttatgtcagtgtcaagttactataaattttg

SEQ ID NO: 354849 - DNA, 201 bp, Homo sapiens
taacttctatgagataatatgtttttaggcagctttcaaatggactttgggagtaaaccttgttggtaggtaagatgtaggctgtggcctatgaagaacakgatgaaccttccctttagaactcaaagtcaccattatgagtgttgattatagtttataggacctcattatgtaaaaactgagaaacgttgagctgctgct

SEQ ID NO: 354850 - DNA, 201 bp, Homo sapiens
cagaaaatttttgtttatcactatgatggtaaaaattgttgtataactatctaacactccttcatacacacagacattcacacacacagccagttgatacrcactatcttacagacttgccataaaataaaattctctaccacaaactccatattcctgatgaaaattttccttgtaaaataaaaagtgtattagaggctt

SEQ ID NO: 354851 - DNA, 201 bp, Homo sapiens
attttcagaagatgccttcagatgccctcttagtgggggaaatgctgaatccttataatgcttagagtctatagcatatttaataataattactactaccyactattgtctttcttgagcatcttctaactagattgtgccttatgcctaatgagtggatgttttgagtttttttgggttttgtcctagataaaacataat

SEQ ID NO: 354852 - DNA, 201 bp, Homo sapiens
gtggggataaaaacaacaacaaacaaaacccatccccaagaacagtattctgtatagaagagaaaactagtcactcttgattatgtggttttgtggtacaktttttgacagttttgctggcttggctttctttcacttcacagatttaactgatttaatttaggatataaatacatgatacttgcagggcttaatagagtt

SEQ ID NO: 354853 - DNA, 201 bp, Homo sapiens
aatacttctttgtatagaattttattatctttcttaatcatttgtgtgatagaatatattagttctcttgtagaaatttggtgactgaaatggttttaaarcattttaaaaggcagataaatgagacagttccatgaaaccaggtagcaatgatttcagataaaaactgcattatcagttgtggctgacttcagagaaaag

SEQ ID NO: 354854 - DNA, 201 bp, Homo sapiens
gaaaattaggaagatatattgagtataaaaagaaaataaaaaagcatccatagtaccaccacctagagatatccacagttaccaattttggcacatttcartctttttattcaacacttagtatgtgtatatttacttgatcttataggccaaacaaatattagaaaaaattacaaattctgaaatacttctttgtataga

SEQ ID NO: 354855 - DNA, 201 bp, Homo sapiens
aggcagtgtacaagaagattactattgtttttatgcctgctaacccaacacctattctacagcccatggatcaaggagtaattttgactttcaagtctttctatctaagaaatatattttgtgaggctgtagctgccctagatagtgatttctctgatgagtctgggcaaagtaaattgaaaaccttctggaaaggattca

SEQ ID NO: 354856 - DNA, 201 bp, Homo sapiens
gcagtgtacaagaagattactattgtttttatgcctgctaacccaacacctattctacagcccatggatcaaggagtaattttgactttcaagtctttctatctaagaaatatattttgtgaggctgtagctgccctagatagtgatttctctgatgagtctgggcaaagtaaattgaaaaccttctggaaaggattcacc

SEQ ID NO: 354857 - DNA, 201 bp, Homo sapiens
atatagtgatcacatttctatgaagatatacttcttataccactgaaattattcatatcagaagaggtaattgttgattcatttttgtacagttttttaayataaaaagcattaaaaatcatatgcatgacacacttaaattttaaaataaatgtatagatatcctgcataatgcaagtactttgacaaagtcttcttcct

SEQ ID NO: 354858 - DNA, 201 bp, Homo sapiens
actattgtttttatgcctgctaacccaacacctattctacagcccatggatcaaggagtaattttgactttcaagtctttctatctaagaaatatattttrtgaggctgtagctgccctagatagtgatttctctgatgagtctgggcaaagtaaattgaaaaccttctggaaaggattcaccattctagatgtcatttaa

SEQ ID NO: 354859 - DNA, 201 bp, Homo sapiens
gctaacccaacacctattctacagcccatggatcaaggagtaattttgactttcaagtctttctatctaagaaatatattttgtgaggctgtagctgcccyagatagtgatttctctgatgagtctgggcaaagtaaattgaaaaccttctggaaaggattcaccattctagatgtcatttaaaatattcatgattcatga

SEQ ID NO: 354860 - DNA, 201 bp, Homo sapiens
tttaaactaaggtatgcacattttctcgacataatgctgttacacacttaacagactacagtatagtataaacataacttttatatgcactaagaaaccaraaaaattaatgtggctggctatattttgatattcacattattgtggttatcttgacccaaacttgcaatatcttcatggtatacgtgtatattctgcctt

SEQ ID NO: 354861 - DNA, 201 bp, Homo sapiens
ccttttaaggttctgtcttatatagtgatcacatttctatgaagatatacttcttataccactgaaattattcatatcagaagaggtaattgttgattcatttttgtacagttttttaacataaaaagcattaaaaatcatatgcatgacacacttaaattttaaaataaatgtatagatatcctgcataatgcaagtact

SEQ ID NO: 354862 - DNA, 201 bp, Homo sapiens; identical to SEQ ID NO: 75927

SEQ ID NO: 354863 - DNA, 201 bp, Homo sapiens
ctggtaatgaaaatttgcttaataaattgaggatcactcttaataaatccgagatttttctcaatacacagaagataggagaataaagcacttttctttgttttttttttttggtttttgtttttgtttctgtttttttgtttttttcgggggggacggagtcttgctctgtcgcccaggctggagtgcaatggcgcgatc

SEQ ID NO: 354864 - DNA, 201 bp, Homo sapiens
tctatattctcagacttggtcttatgacccattggcacagaaaatctttaactcttgctagttcagtcaattgcagccagaatacactccttttaattccttttttttttttttttaagataaggtttaccctgtcatccaggctggagtgcagtagtgcagtctcggctcactgcaacctctgcctaccaggttcaagca

SEQ ID NO: 354865 - DNA, 201 bp, Homo sapiens
gtatcctatccagagagatcttatcttaaatagactatctcccaataaggcttatactgatacacttgtatatattgagtgagcctggacttaatatatamaaatgtatgagtatacacttacatgagtatacactaagtaaccaaagtatttgttagtatattatacatttatagttggccctcataagggcccagtaaa

SEQ ID NO: 354866 - DNA, 201 bp, Homo sapiens
aaccaagctgaaagcttccccctttgaagtgtgtccatagggaatggcgattgcctttttgtatcctatccagagagatcttatcttaaatagactatctyccaataaggcttatactgatacacttgtatatattgagtgagcctggacttaatatataaaaatgtatgagtatacacttacatgagtatacactaagta

SEQ ID NO: 354867 - DNA, 201 bp, Homo sapiens
attcactttttattttggttgtaaaatgattaaattctctccttatctatgaaatagtagttaattgttccatcattaattaatgtttttttttctagttrtataagtttggagagacagtttctattgttttttggacagacacttggagaccagaaagcttctttgacaaagtgaagaagaacagacaaaatggcatgc

SEQ ID NO: 354868 - DNA, 201 bp, Homo sapiens
cgtaggtgaggccggcggcgtgggccttttctctgcacggagccggcgcttttgcagttgcttctgcggaaaggtggtagttaagaatttgtaaaggccasagaactacctacgattctctcagcgggtaattggctgctcctaggtttgtgtaacaagaggcaaaactggtagggttgtttaaaacctcttatcccagtt

SEQ ID NO: 354869 - DNA, 201 bp, Homo sapiens
aagtgagtacatgtaaaaaaacatcaaacagaatgtagactgtggtacttgagtatacctgggagagctaattgcattaataacatattatgtagtttcawggctaagaacagtggcatctagttttctgcctataggggaaggaagatctatgaacctccacggtatatgagtgtaaaccaagcagcccagcagcttctg

SEQ ID NO: 354870 - DNA, 201 bp, Homo sapiens
caggaggtgccttttaaggttctgtcttatatagtgatcacatttctatgaagatatacttcttataccactgaaattattcatatcagaagaggtaattrttgattcatttttgtacagttttttaacataaaaagcattaaaaatcatatgcatgacacacttaaattttaaaataaatgtatagatatcctgcataat

SEQ ID NO: 354871 - DNA, 201 bp, Homo sapiens
aattaattgctcccatgctcaaaaaccttcagtgacttctcatggccttaaatcttgaagtctttcttttttctctagctactctttaaccgctatgctaraaccaaatggtacaactttccatttcataagtgttttgtaatattcttcccctatttctttgctcaagctttttccttaaaagagttcttctcagttcct

SEQ ID NO: 354872 - DNA, 201 bp, Homo sapiens
tgcctgccattttctgctgataatttcaggcatcttcgacttcttttgtcctaggttttttttccttttgtaatcatctactatttggcaatactgccgtsactttgcttgccttgaatttatcatttatcaagtctctgatttcagtttcttatatccattgggaaccctgttctttgtcattaccacgaagatgggcat

SEQ ID NO: 354873 - DNA, 201 bp, Homo sapiens
tttagatagagccatatacctagaaatagtaaatttgtttgtgtgtatatgtatgtgtctactcattttaaataaacttgtgatagagatgtaattttgarccagtttttcatttgcttaaataactcaccaagtaactaatttagttttctttactcttaatgttaagtagtgagattctgttgaaggtgatattaaaaa

SEQ ID NO: 354874 - DNA, 201 bp, Homo sapiens
aagtaaaaggaacttaacaccttcaagaaaagacagacaaataacaaaacagcagtttgatagaatgagatatcaggggatggcatagaggaaagtttggwtatagttttatctttgttacatgttaatgtgaccttggacaagtcctttaactttagtgtcttttttaaatggggtaaaaaacatctactttaggtgttc

SEQ ID NO: 354875 - DNA, 201 bp, Homo sapiens
gtgaggatttttcacaaattaaacataagtcacatttgatataaatatattactgtataaatatttttgtaaaatatatctattatgttatccctaatcartggtgagatctatcctgcaaaaatatacttatcgttcttttattctccctcctttcattcttaatattgagactaggaatagttttcttcagggtaaata

SEQ ID NO: 354876 - DNA, 201 bp, Homo sapiens
gagacagggttttgccacattgcccaggctggtcacaagttcctggactctagtgatctgcccacctcggcctcctaaagtgctgggattgtataggcacragcaaccacacccagcctaaggccagctttgatttaaaaaacatttttttttctcattttttcactcttaggatagaaccaaaatatctaagctcgaaat

SEQ ID NO: 354877 - DNA, 201 bp, Homo sapiens
ctaagttcatgcagatagtgaatgatagagccaggagatgaaccaaagcagtcctgagttgaagtctgccactctttttattattattattatttattatrtttttttattttgagacggagtcttgctatgttgcctaggctggaatgcagtggtgcgatctcggccccctgcaacctctgcctctcgggttcaagcaat

SEQ ID NO: 354878 - DNA, 201 bp, Homo sapiens
caggtaaggaatatagaatgcagcaaggcactgaaattcttagatatgagcaaaaaatatcccttatttaattttaagaccccttcttatttaaataaaayatataaaaagaagattgtttaagatgctgaatcttaaattctttttttcagtacttttaaaatggtaaaatgacacatgacaaaatgtgtcattttaacc

SEQ ID NO: 354879 - DNA, 201 bp, Homo sapiens
ctcaggcagtgtacaagaagattactattgtttttatgcctgctaacccaacacctattctacagcccatggatcaaggagtaattttgactttcaagtctttctatctaagaaatatattttgtgaggctgtagctgccctagatagtgatttctctgatgagtctgggcaaagtaaattgaaaaccttctggaaaggat

SEQ ID NO: 354880 - DNA, 201 bp, Homo sapiens
tcaggcagtgtacaagaagattactattgtttttatgcctgctaacccaacacctattctacagcccatggatcaaggagtaattttgactttcaagtctttctatctaagaaatatattttgtgaggctgtagctgccctagatagtgatttctctgatgagtctgggcaaagtaaattgaaaaccttctggaaaggatt

SEQ ID NO: 354881 - DNA, 201 bp, Homo sapiens; identical to SEQ ID NO: 75925

SEQ ID NO: 354882 - DNA, 201 bp, Homo sapiens
tcctgccaagagtgtaaacatgtccatttttctccgcagtctcaccagcatctgttgttttttgactttttagtaatagccgttctcactggcatgagatrgtatctcattgtggttttgatttgcatttctctaatgatcagtgatgttgagctttttttcatatgtttgttggccgcaaatatatcttcttttgagaag

SEQ ID NO: 354883 - DNA, 201 bp, Homo sapiens
cattttctcccattctataggttgtctgttcactctgatgatagtttcttttgctgtgcagaagctctttagttcaattagatcccatttgtcaatttttkcttttgttgcaattgtttttggtattttcatcatgaagtctttgccccctgcctatgtcctgaatggtattacatagattttcttctgggtttttatagt

SEQ ID NO: 354884 - DNA, 201 bp, Homo sapiens
tgtatacatcgtttctcttaatagtctatttaggcatgttagctatgctgccatttactcatgatggaaattcatatatgaaaagagagattcttgcagcctttgttgcagggaggaaggggataggcactgaaccaattgctaacacaacgtgtgacaggtgctgtcatggaggtcccaggcatgctagcaacccagagg

SEQ ID NO: 354885 - DNA, 201 bp, Homo sapiens
tttgtttggttccactattgtagagacaagaaactggggtcccagaaaatttgtgatttgtgtaaagttccagggttgtttagtagtggggccactttgasaactgggcattcaattcctagtttaggtctttctaccacgttatacctgaggtgaagctaagtatctggtttatacttttatatctttaaaggagaaaaa

SEQ ID NO: 354886 - DNA, 201 bp, Homo sapiens
ttttgaatagcattcttttccatataattatttatttccaatttaaatataattattcctttccagttttaatgatcatgatcatgtgtgaattcgtaaaraaatgatcatgaatttcataggaagatgccataagtaaactcttagcatctgaaatgattaagaggatttgagcctgctgagggattacttactttagtt

SEQ ID NO: 354887 - DNA, 201 bp, Homo sapiens
cttactgcagcctctgcctcctgggttcaagtgattctcctgcctcagcctcccaagtagctgggattacaggcgtgtgccaccacgcccggctaattttytgtatttttagtagagatggggttttaccatgttggccaggctggtcttgaactcctgacctcaggttatcctcccacctcggcctcccaaagtgctggg

SEQ ID NO: 354888 - DNA, 201 bp, Homo sapiens
agtgtatataagtctactcccccgtcttagtccatttgggctgctgtaacaaaacactacaggctaggcagcttataaacaacagaaatttatttctcacrgttctgcaggttgggaaattcaagatcaaggcatcaacagatttggtgtctggtgagggcctgcctagtggttcatagacagcaccttctgcatcttcac

SEQ ID NO: 354889 - DNA, 201 bp, Homo sapiens
tataagacatcatacctttgagatgagagtagattgttttaaagataactttttcttgtcgttttgttttgttttgttttttatacagaaaacaagcatcrttgtgggtccaaggagacattttccgatccaaactgaaaaatcgaccatccagtgaaggaagtattaataaaattctttctggcctagatgatatgtcta

SEQ ID NO: 354890 - DNA, 201 bp, Homo sapiens
tagtggctagcatatagtaagtgcttgataaacgttaggtgcaattattgttgttattattatttcagtgccctgttgccatatttggacaatttctgtcsagtgttttcttctcaaaagatgtatacatcgtttctcttaatagtctatttaggcatgttagctatgctgccatttactcatgatggaaattcatatatg

SEQ ID NO: 354891 - DNA, 201 bp, Homo sapiens
atatctccatatatatggtaaatgcatatatatttaaatacataaaaatatatcataaatatatctgcatctctctctctctctctctctctctctctctmtatatatatatatatatatatatttttttttttttttttttttttgagacagtctctatggcccaagctggagtgcagtggtgcgatctaggctcactgc

SEQ ID NO: 354892 - DNA, 201 bp, Homo sapiens
gttcctgatctaaggaataaaggttcatattgctcaaagatgaggttatcattttctgcagtattatgagaaaaggggatagcaagcctggttctgggtartctaatatccatttgcaaggtttctcccttttgctaatttaatatttttactggtttgataccatttgatgtgccttgtggtctttgtgaaaacgtgtgc

SEQ ID NO: 354893 - DNA, 201 bp, Homo sapiens
tgcatatatatttaaatacataaaaatatatcataaatatatctgcatctctctctctctctctctctctctctctctatatatatatatatatatatatwtttttttttttttttttttttttgagacagtctctatggcccaagctggagtgcagtggtgcgatctaggctcactgcaacctctgcctcccgggttcaa

SEQ ID NO: 354894 - DNA, 201 bp, Homo sapiens
ggataggcactgaaccaattgctaacacaacgtgtgacaggtgctgtcatggaggtcccaggcatgctagcaacccagaggcagaagctctcaccagcccrccacaccagggcaggctgcccaggtgtttatgagcccttctcctccccattcctcacatgatagaaaaaccgttacttcttaatgccaactacagttctt

SEQ ID NO: 354895 - DNA, 201 bp, Homo sapiens
ttatatttttagtagagatggggtttcaccatgtgggccaggctggtcttgaactcctggcctcatgtcatccacctgccttggcctcccaaagtgctggsattacaggtgtgagccaccgtgcctagccagatacctttttttttttttttgagaaaaaacacctctgccctcgtggtcgtcaccaccgcagccacccga

SEQ ID NO: 354896 - DNA, 201 bp, Homo sapiens
tacacctttggtttaattacagctgtattgcttttcacagcatacttatctactataggcttattaattattttgacatctgccctaattaagtcagcttmgttttctgggaattcaagcagcactcagtcttttaattgaactaaaagaaggaaggagaaagaatcttatcctatgtcaaatgaactttggtggctactg

SEQ ID NO: 354897 - DNA, 201 bp, Homo sapiens
tttgtgtgtcctagacttaattgcctttttaaatttgcatagttttctatgcatttaggaaaagataatgctttaaaaagttgtgccaaacaattttaaattttttcaaaatttcaacacagcaaaattccattctaattccattcttttcctgaagacatttctcccttctaacttggactggttgttcttagccctgct

SEQ ID NO: 354898 - DNA, 201 bp, Homo sapiens
ctcacttgtaaagtaaggacagcaatattagctacttcgtagggttgttgtaaggacaagctgagctgacatctttaaggttcttagaacagtgcctggcrgttagtgctgtgtcagtggtggctgccgctgctgtcatcactattaggacctgtcatgatatctttaagattgattaatttatcttgtcctagttagttg

SEQ ID NO: 354899 - DNA, 201 bp, Homo sapiens
ttcccacagccattcattcattaactttttgtccagcctcagcccaagagagagagatttaacctgtaggacacaatcctttcttcttagaatgttagaaygtatctcaatgtactcattaataaaacaagaagatgaagttagtactggttgatctaagtccagctctaaaatactatctattagtgatatcttttactg

SEQ ID NO: 354900 - DNA, 201 bp, Homo sapiens
tcactcgtatttgtatctccagtacttaacatagtgtctgtctgtgctattttaaaaatttatatttatttttattttttaagttgacttcgtaattgtayatattcatgggatacatactgatgtttttttaaaatgtacatgtaatgcttttatttaaaaaaatcttttattttaggttcaggggtacatgtgcaggtt

SEQ ID NO: 354901 - DNA, 201 bp, Homo sapiens
tggtggatcacctgaggtcaggagttcgagaccagcctggccaacatggtgaaaccccgtctctacaaaaaatacaaaattagctgggcgtggtggcgcgcacctgtaatcccagctaccataaggcaggagaatcccttagaacctgggaggtggaagctgcagtgagccaagatcgtgccacggcactccagctgggtg

SEQ ID NO: 354902 - DNA, 201 bp, Homo sapiens
tgttctaagcatctgaggacttcagcagtcaactatatagacaaatattggaggatgacatttgtgtttaatatagaatcttattttggctttttgaaagwgacttcattgttctttattctaagatatcataatctttctagtctgatttgtaaatgcttatttgctaaatcttttcctttataagacatcatacctttg

SEQ ID NO: 354903 - DNA, 201 bp, Homo sapiens
gaatagcattcttttccatataattatttatttccaatttaaatataattattcctttccagttttaatgatcatgatcatgtgtgaattcgtaaagaaaygatcatgaatttcataggaagatgccataagtaaactcttagcatctgaaatgattaagaggatttgagcctgctgagggattacttactttagttgcca

SEQ ID NO: 354904 - DNA, 201 bp, Homo sapiens
tgtgtgaattcgtaaagaaatgatcatgaatttcataggaagatgccataagtaaactcttagcatctgaaatgattaagaggatttgagcctgctgaggrattacttactttagttgccagtcctagaggtaataactgattaagaagtgctgaaaaatgagtggttatactttagcttaaaagaatgatgcagatgtct

SEQ ID NO: 354905 - DNA, 201 bp, Homo sapiens
tcatctgttaaagctttcattcattataaagggatcattgagggactagtgtggggctcccacggggattttcagctcacggagatcctttatttatgggkctcaatatggcattgtttttgttttacatttccttctgagacagagagaactcacataaagcctaaatctggctcttgcaggaagttttggctctgtaaa

SEQ ID NO: 354906 - DNA, 201 bp, Homo sapiens
gcatgacactccaatgatctagcttctgattgtagggttctatacctaaactagatttagttagttgaatcttttggagaattcccttcctcagttttttscttctagcttcattttctagtatgtttcacaattaactgccttcccttatgctttcagaaattctctaaacatcttcctagtgaatcttccacttgtacc

SEQ ID NO: 354907 - DNA, 201 bp, Homo sapiens
gcaaaactgtaaccattccttactaataaacttcttctggaattacaacggtttttacattttgtctttctactctagggctatagtccaatattagcatrccaatcagtagatgctcttgacttagtgatattaattagatacaggtgctgctaatattcagccaagttcatacaaattgacaatcaagtagacaagaat

SEQ ID NO: 354908 - DNA, 201 bp, Homo sapiens
tctctatgaggtcttcattgtggctttagtaaattatgtacagtaattttgagcaaaactgtaaccattccttactaataaacttcttctggaattacaayggtttttacattttgtctttctactctagggctatagtccaatattagcataccaatcagtagatgctcttgacttagtgatattaattagatacaggtg

SEQ ID NO: 354909 - DNA, 201 bp, Homo sapiens
taatgaatatattctccatatgaataatagaaatctttaaaatgttctagactatttctgttttccagttcactgggtactgtgattcactaaataaataygtaaataaatgaatatatatatgtgtgtgtttatatatataaatatatgcacacacacatatttgcccctctatattgatgtacatatgaaatactttac

SEQ ID NO: 354910 - DNA, 201 bp, Homo sapiens
aggctacctaccgatttttaaattaaaacttaattttttaatcactataaataaattagtaaaccttttaaaatataaagttttcttacaatcactttgcrtaattgaatatctcattcttacctagctaatgctttgtgtctcctgtctttttgtttctgttttggcttagtttatttcattgatctctaagctgtcttg

SEQ ID NO: 354911 - DNA, 201 bp, Homo sapiens
tgtatgtctgtgaaaaagacaatgtgttgatagtagaactataaggtagaaagttcctctttctccttctgatccttcccctgcccttttcctcaaatgtgactacaaactgttaacagtttgaagtcccctaagttttaaaatcaaatggaatgaaatggcatttaggaacttggaagagtggaaaccttttttccagac

SEQ ID NO: 354912 - DNA, 201 bp, Homo sapiens
ttgatgtaagttttcagctaagggatactaactacatatcaagaacatgagctcaatctcagtattgaaccacatctttggccttcattcaacattgcgattttttttcccttcccaaggggacctgagaatgctacttgacaaagcatcaaattgttatgaggtcagcatggttcggatgatgcctttaaatatgcatat

SEQ ID NO: 354913 - DNA, 201 bp, Homo sapiens
ggggccactttgacaactgggcattcaattcctagtttaggtctttctaccacgttatacctgaggtgaagctaagtatctggtttatacttttatatctytaaaggagaaaaaaagaaaagaaaaaaaggacctgttcaaaatagtggaacaagctaggcagcgtgatgtgtgcctgtgtggtcccagttacttgggaga

SEQ ID NO: 354914 - DNA, 201 bp, Homo sapiens
tccccaccttctcctgaggctgccagtgtcctgcagccgctgcgcgcgctctcgtcccctctagggactctcctttctccgaggaccccctgcttccggcktctctttcttgtgtcccttgctccctctgcagctccctcggatggcctctcggcctcgtaatgggacagcaccggcttctgcccgtactccggcactcag

SEQ ID NO: 354915 - DNA, 201 bp, Homo sapiens
ggcttgagccaccacacccggctccactatctttttggatattgctttactgcctttccccttatttcccttattttctccttttgcaatagccccacaatttttttttttaatagaaggagtctcactctgttacccaggctagagtgcaatctcagctcactgcaacctccacctcccaggttctccacctcccaggtt

SEQ ID NO: 354916 - DNA, 201 bp, Homo sapiens
aggtaagatctagtgaacatggtcctttaaatccttctgaaaagggcttgtgtgcttttactagtgttacatgattactgtgttaataacttactgtataratatcctaaagtatttttatcttgtatttttgtaaacaggttatggaatttgcagtgatgggtcctggtagtatctaaaaacatatttgtactgcatctg

SEQ ID NO: 354917 - DNA, 201 bp, Homo sapiens; identical to SEQ ID NO: 75944

SEQ ID NO: 354918 - DNA, 201 bp, Homo sapiens
aggtaatttttctctccctcttctaaggtgctggtttgaggtaaaggaagcttgcagcaggcgatgagtttagctgcagttttgtcagaggaggggacaarggagaagaggagaaaccacggaagaccctgtgatgttctggggcttccgttcctgtcttgggaaggcaggagacaaggttgtggagggaatggtgcaaag

SEQ ID NO: 354919 - DNA, 201 bp, Homo sapiens
gatttttattttagattgaaaatgaaaggaagttaatttgttacaaaatactgatgtcagaataatttgctgaaccctttttactgatctttcatttcacttttcctttataccatataaagaaaccatggaacatgttttgttttgaggactttggtattgtatttttatcctctagtgcttaatagatacaacttatgt

SEQ ID NO: 354920 - DNA, 201 bp, Homo sapiens
tttctagtctgatttgtaaatgcttatttgctaaatcttttcctttataagacatcatacctttgagatgagagtagattgttttaaagataactttttcytgtcgttttgttttgttttgttttttatacagaaaacaagcatcgttgtgggtccaaggagacattttccgatccaaactgaaaaatcgaccatccagtg

SEQ ID NO: 354921 - DNA, 201 bp, Homo sapiens
tttattttagattgaaaatgaaaggaagttaatttgttacaaaatactgatgtcagaataatttgctgaaccctttttactgatctttcatttcacttttcctttataccatataaagaaaccatggaacatgttttgttttgaggactttggtattgtatttttatcctctagtgcttaatagatacaacttatgttcag

SEQ ID NO: 354922 - DNA, 201 bp, Homo sapiens
cagaatcatggtgctgagagatcactctggctatggtgtcatatagggctgagggtggaaggccagggagttggtgatggggaggtccaggttttaaaggwcccaaccagtggcagtgaatggggcagccagaagagagatgtgggcagctctgataaattcaaactttttattgatcagaagcagcttattataaagatg

SEQ ID NO: 354923 - DNA, 201 bp, Homo sapiens
tatttattcttcatgttgttgtttgttctttcactaggtcatcactcatgttttttttttttaattgtacttcttttggtacaatattttagtttactaartgatattactaaaatatcattttcttgccttcatgtagggcagcccagtatccaaaaggaagagagttgctgcttaatcctccaaagggcagtggggcat

SEQ ID NO: 354924 - DNA, 201 bp, Homo sapiens
agagacacaaatttaaatgatgagatgctatttatgcctatcaaatgtattaaaaatgtatgcagtattgacaaacgtttagggaatacaaagctcttaarcattgctagttggaatttacaatggtacagccttttggagggcaatttgatcatatgtggaagatgactttaaaaggaattccacttctatgaatttgtc

SEQ ID NO: 354925 - DNA, 201 bp, Homo sapiens
ctttctaccacgttatacctgaggtgaagctaagtatctggtttatacttttatatctttaaaggagaaaaaaagaaaagaaaaaaaggacctgttcaaartagtggaacaagctaggcagcgtgatgtgtgcctgtgtggtcccagttacttgggagactgaggtgggaggatgtttgagcccagtggtcgaagctgtag

SEQ ID NO: 354926 - DNA, 201 bp, Homo sapiens
tacagagatactctagcccactcttgcaacaatattaccaaggtgcatttccagtaatgccagttaagagcttctatggagacgttacccaacatataacmgttgattatagcatttggaaaatatgcctgagggaaaaaataatttatttatcgtcactattattattttgccttttctaccatctgctacaggccattt

SEQ ID NO: 354927 - DNA, 201 bp, Homo sapiens
  misc_feature (1)...(201): n = A,T,C or G
aagctaagtatctggtttatacttttatatctttaaaggagaaaaaaagaaaagaaaaaaaggacctgttcaaaatagtggaacaagctaggcagcgtgangtgtgcctgtgtggtcccagttacttgggagactgaggtgggaggatgtttgagcccagtggtcgaagctgtagtgagctatgatggcgtcactgcactc

SEQ ID NO: 354928 - DNA, 201 bp, Homo sapiens
atctctctcctgctcctttttattaaggaacattggttgatctagacctcaggttaagtacaagaacttcaggatgagattggaggtctctgacttttacygtgttactctagcaatgcggagaataatttctcctctgaagaactgctctggtagagctgtatagtgatttttttttgttcagttataggaaccgataca

SEQ ID NO: 354929 - DNA, 201 bp, Homo sapiens
tgatggaaattcatatatgaaaagagagattcttgcagcctttgttgcagggaggaaggggataggcactgaaccaattgctaacacaacgtgtgacaggwgctgtcatggaggtcccaggcatgctagcaacccagaggcagaagctctcaccagcccgccacaccagggcaggctgcccaggtgtttatgagcccttct

SEQ ID NO: 354930 - DNA, 201 bp, Homo sapiens
aaggcacaatggctcatgcctgtaatcccaacactttggaaggccaaggcggtaggattgcctgagcccaggagttcgagaccagcgtgggcaacatagtagaccccatctctactttaaacaacaacaacagaaaacaaaacaaaacaaaaaaccgcatattatcttttacagataaatgtttggagtataatgtatttg

SEQ ID NO: 354931 - DNA, 201 bp, Homo sapiens
cttttctctgcagcctcaccagcatctgttatattttttgactttttaataaaaaccactctgactggtgtgagatggtgtctcattgtggttttgatttrcatttctctaatgatcagtgatactgagctttttttcttatgcttgttgactgcatgtatgtcgtcttttgaaaggtgtctgctcatgtcctttgcccac

SEQ ID NO: 354932 - DNA, 201 bp, Homo sapiens
gtaactgtattccccagagggctttttgacacaaacccttaatacacacggaactaaaaattggcagtggatccttaaagagaattttatgcctttcttcrtattgtttgtatgtatttacttgttgacagtcttgtaagatagtcaataatatccattatacatatatctcagttaaaatttacatatattaaatgttgc

SEQ ID NO: 354933 - DNA, 201 bp, Homo sapiens
aggctctattataggaccccagcagcacttcctggaagagtaagtatattgtccccattaccacattatatcctgttcttgatcctttctacctcttgttmccctggttgtggaccatgtcagcctgtggttataaaatggctgcattgttaagagaagtgtgtgcctctaatagaatattgttgatttgacagctaatgc

SEQ ID NO: 354934 - DNA, 201 bp, Homo sapiens
cacatgctgaaataattgcttggattagaatatgccggccaggctctattataggaccccagcagcacttcctggaagagtaagtatattgtccccattaycacattatatcctgttcttgatcctttctacctcttgttcccctggttgtggaccatgtcagcctgtggttataaaatggctgcattgttaagagaagtg

SEQ ID NO: 354935 - DNA, 201 bp, Homo sapiens
actttatatttcttattctgtttcattctcttacagctggtcttggaagaacagggacattgatagcctgttatgtaatgaaacactacaggtttacacaygctgaaataattgcttggattagaatatgccggccaggctctattataggaccccagcagcacttcctggaagagtaagtatattgtccccattaccaca

SEQ ID NO: 354936 - DNA, 201 bp, Homo sapiens
aggttcctgtgcaaattgtaagcgttaagtaaatatatatgctgattgaattacagtcatctgtggtgatttgtgctctgttccacctcctgctggctgcrttgtatcccatgttggaagtggctgagtgtggcttcagaatagacacagaggaagtgggagagtgaatatttggatgagggagtatgccttgactaaata

SEQ ID NO: 354937 - DNA, 201 bp, Homo sapiens
tctggagaagcttgaattgcttctttgtagaactttttccatttttattttggaggcaaaacatgagcttaagctgctgtttggtgggtggataatgaagraaagagtctacaagtaaataagcttttctctagcagagaggaaaacagagttcagctatattaaatgatttatctaggatcaaacagatttggtattaag

SEQ ID NO: 354938 - DNA, 201 bp, Homo sapiens
agagtgaatatttggatgagggagtatgccttgactaaatactttctataagcaaatacaaatcatatgacctagagcttttattttttaaaatcagtctrttgctttctcttgaagcacatcattggtgaattgactctatttggcttgatgctttcatacaactgggctgagaaagttcattttacccctcttttgggc

SEQ ID NO: 354939 - DNA, 201 bp, Homo sapiens
atacaaaactgatgtaaattagaaatcaaggcatcttttgtggggctttttcatgttattctaagtgtttttttagttccagtaagacagtcttaatgcartataaccagttttataaaaagatttctagatatgcattaaacatcaaaggtttcaagctgtctcttcagattagtgaggatcatttctgtaagtaggagt

SEQ ID NO: 354940 - DNA, 201 bp, Homo sapiens
ggaagcttgagttgcaacaatgtgtaagatgaattgggtggatggagattggaatcagagaggctaaaaaggaggctattatcatccatctcagagagacraggacttatcaaaagaggatagaagttggactgaagatttagagatgggtaccagggacatttcaagaaaaaagaaaaaaacaaggctttgaagactaac

SEQ ID NO: 354941 - DNA, 201 bp, Homo sapiens
aatcctctgtcatgaagactccatgatcctgtgactgttgagctggtattcttgcacaggacgacctttcctgggatcttgggctgcgtcacttgcacccrttctttaagggattgcctctaggaagcttttgtccttattctttctttcccactggccttgtgctttgcatttctttatttcttttttaaactcagagat

SEQ ID NO: 354942 - DNA, 201 bp, Homo sapiens
gttaatgatgtctttattattcttataaattgcacatgggaaaatagattgagaatgctgtaagaatttaatgtgtttcaagttgcatgtgggtaaaagtmtatggaatttctggatttacttagtttgtatatatagaaagtgcaaaaaggcagtattcctcttgagattgacttttaaaaaaaagattaaaagcagaga

SEQ ID NO: 354943 - DNA, 201 bp, Homo sapiens
ctgcgtcacttgcacccattctttaagggattgcctctaggaagcttttgtccttattctttctttcccactggccttgtgctttgcatttctttatttcytttttaaactcagagatgtgatggtgaggtttgatctttttactgtggaacccaacataggtggccgggattgaggaggtattgcgatgagaaatgactc

SEQ ID NO: 354944 - DNA, 201 bp, Homo sapiens
ccactggccttgtgctttgcatttctttatttcttttttaaactcagagatgtgatggtgaggtttgatctttttactgtggaacccaacataggtggccrggattgaggaggtattgcgatgagaaatgactcaaatgtgacttgatggaagtacatttttcatcaaacaagagttctagttttaaataggggaggggac

SEQ ID NO: 354945 - DNA, 201 bp, Homo sapiens; identical to SEQ ID NO: 75938

SEQ ID NO: 354946 - DNA, 201 bp, Homo sapiens; identical to SEQ ID NO: 75939

SEQ ID NO: 354947 - DNA, 201 bp, Homo sapiens
tctatgaagccatttattgttttaagaatctccccttgtgtatcagagaggttgaattatctgagtagagaaatacagttgtaaattccaaaatgcttcaraaattcacatattattttggagcaggtattaaggatttaatgactgcaggatttagtttaaaaaaatgatttagaagtatttgcagatgaattctaagag

SEQ ID NO: 354948 - DNA, 201 bp, Homo sapiens
ccgccttcggcgcctgctgcctccctcggccaggcttgttgttcgggactgtgagcttcctggctcctgggcagtggggaagcccccgggggcgagtgacytcagctggccacgacccagccctcccccgtgcgtatctcgcttaagatggcagcggagtcaggggaactaatcggggcttgtgagttcatgaaaggtgag

SEQ ID NO: 354949 - DNA, 201 bp, Homo sapiens
acagttgtaaattccaaaatgcttcagaaattcacatattattttggagcaggtattaaggatttaatgactgcaggatttagtttaaaaaaatgatttaraagtatttgcagatgaattctaagaggattctatataacttctcatgttggtctggtgttcctctataaaattagtacagacttgatatttgttacattg

SEQ ID NO: 354950 - DNA, 201 bp, Homo sapiens
tcttgcccccaactcttcacttcccgcgccactgtccccaccttctcctgaggctgccagtgtcctgcagccgctgcgcgcgctctcgtcccctctagggrctctcctttctccgaggaccccctgcttccggcttctctttcttgtgtcccttgctccctctgcagctccctcggatggcctctcggcctcgtaatggga

SEQ ID NO: 354951 - DNA, 201 bp, Homo sapiens
agcttaggacaagagagagtctgctctggcattttgtagggagatgggctggagcctaagggcagaatggaggcccaggttgggttctcctcatttgtcayttgtgaatgtgttctttagtcatcatgaagaatgaatctggtataaggaaggaggcctaacagcacctgatgagaaaagtcttcaaacactcccctggct

SEQ ID NO: 354952 - DNA, 201 bp, Homo sapiens
caaacgtttgtaaatatcatcattttttaaaattacaatatactgggtggcaaggccccagtccacaaattaatataatggtaagcagcaacatttttttracttataaataagagatacacatagcagaaggatgttttgccggtatggtaaacaccaaacagattcacagggaatttagttttcatgtgtaatctggga

SEQ ID NO: 354953 - DNA, 201 bp, Homo sapiens
cacttgctattcttgaaacatttcctcagccgtcatctagggagtgcctgcttctgtagagaagaggggaggaggaaaggtgctggtggcagtgtgctgcrtatggcccactcagcaaaacaggagccccatggttcattcttaatgatatctactttctttagttgacagtttagaaaccatgaggatgggccaggctca

SEQ ID NO: 354954 - DNA, 201 bp, Homo sapiens
gtgctagaacataaatactgactttctttgttgagctttcaggccctctgtactgcatttctgtagtattgtatctttgcaccagcatttaccttgcttaytctcttgttttcttctcccacagtgttcatgcctactgctagtctttaggaagccctttcttggaagccccctgctctccttaccaatttctcatcttta

SEQ ID NO: 354955 - DNA, 201 bp, Homo sapiens
attttggccagattgaatttaagaaatttaagggatatttacatcactgttagatatcacatacatttgaggttcttaaatttgggaattttcccaaagaractaataaagctgtgagaatgatgcgatttctgggaagatagagaaggtctcaaggtctgtatttcacaagtagaaccaggatgggaggagcaagggaag

SEQ ID NO: 354956 - DNA, 201 bp, Homo sapiens
ttgaaatatggaaaaagactgtactaatttctggattcaagccctgtaaacaaacgtgtttttcctgcagggttttgtgatgctttgtaagcgtgttattwgtggatcctttctcataaaggattgccatcaagaagaggtcatttgccactcttcgcacgtctttcttttttttttttgtgaggaccaaatgatttttat

SEQ ID NO: 354957 - DNA, 201 bp, Homo sapiens
ttggcatgccttataacgatcttatagaatttattcatcctgtttttaaagcagttaattttttttgtattgcaagtactctgtgatgaatatgctaactwgtaatgccttgctcagaataggtagtcataaattttgttgaatgaatgagtacttcttggaatgtagcttatctttttgctgaggtgttgggaattttca

SEQ ID NO: 354958 - DNA, 201 bp, Homo sapiens
agcaaaataaggttgacccattctatctcattttcccttatttactctttaagtacacattacttactctctggtagctcctgaatctttatggttaagargggaaaggctgtgttcccatttcctattaggaacctcgtttccatgctctcctgtcttttgaaaacatcatccaaggatactcatatcgttttgtcctca

SEQ ID NO: 354959 - DNA, 201 bp, Homo sapiens
tatggttaagaggggaaaggctgtgttcccatttcctattaggaacctcgtttccatgctctcctgtcttttgaaaacatcatccaaggatactcatatckttttgtcctcatcactgttatcacctcccttcatccctggaagacttttgcttctactttttagctgcctgggcactgccaacattctggacaactgtaa

SEQ ID NO: 354960 - DNA, 201 bp, Homo sapiens
accgaaactgctctaataacgtcttaaatgctgaatctgatggcacttgctggatcctcaaactcctttacttctctgagtaatttcgcactgtgttaacyagtaacttcgtcttaggattcttctcttgtgtgatttcccagttcttttaggcacatttcattttttagtttggaaatttttattccttccaagaaagct

SEQ ID NO: 354961 - DNA, 201 bp, Homo sapiens
aaatgtaatctggatgctgcttggtctgccttctttacatgttggtggattatggaactggaaataatgggactgccataggactggggtcaagcagtccycagaatgcaagtatgtgggcatgtcctcaccacctggagcagttatggaagtacgcctcctgtggcaatttgaatattggaagaactattagaagaagca

SEQ ID NO: 354962 - DNA, 201 bp, Homo sapiens
gtgttcccatttcctattaggaacctcgtttccatgctctcctgtcttttgaaaacatcatccaaggatactcatatcgttttgtcctcatcactgttatyacctcccttcatccctggaagacttttgcttctactttttagctgcctgggcactgccaacattctggacaactgtaacatttttctaatcattatcatc

SEQ ID NO: 354963 - DNA, 201 bp, Homo sapiens
aaatatagaccaagcttgtttaacctgcggctggctttgaatgtggcctaacacaaattcataaacgttcttaaaacattatgagattttttttttttttwaagctcatcagctatccttagtgttagtgtattttatgtgtggcccaagacaattcttcttcttccaatgtggcccagggaagctaaatgattagacacc

SEQ ID NO: 354964 - DNA, 201 bp, Homo sapiens
attgcttagcacattgcttctgacatcttgaatcctgccagcctcctttaaacatttccccctcctcctaactctgctccatgacctctttctgaccctgyctgtttccccagccatctcagttcacctctttccttctacagcctgcatagtcatttttgcttcctttttccaacattctcactgctacttggacattct

SEQ ID NO: 354965 - DNA, 201 bp, Homo sapiens
ctttctgggagggatgaggtttctgcaagaattccacgtgttaatggggtctttaaattgtgatccttcgtatgttaccacccaccttcacttccacttcyctacttctcatatgttttttctgtcttttaaacttgtctttcagatcggttatattttgctactttaaggaatagaccaaaaagcacagtaaatacccac

SEQ ID NO: 354966 - DNA, 201 bp, Homo sapiens
aattggaactgctgataatggacctattgatttttgaacattaagccgtctgctgagtatacagaaattttaacagaacagtattatttaaaagtggttasagtgtgtgtgtttaaatcattggacactgatatacccagacaattaactgtgattttgtttttgtttttattgtttggaccaagtatattattttgctta

SEQ ID NO: 354967 - DNA, 201 bp, Homo sapiens
tttcaatttgaaatcaactgcttgttaaaacataggaatggacccatcctgttcaaagaatgtaggaatatgtgataactctcctaatagttatcagttcytaataggaactggagaatccttgaatctcatcagtttgaatgtggtaaagtatttatattcccttcaaaaatgtctgaaattttgagaaattcatcagta

SEQ ID NO: 354968 - DNA, 201 bp, Homo sapiens
cttcggttttcgggacacccccaaccacaccccccaagtctctctcccttcctctttttcaaatctccgaagctgcgtcgggaggctcacctctttcttcyccttctcgcagctgctgaggtctggagatttgggaaccaaacttgcacctccagttctgcgggtacccccagctcctgcctactctgctggcctgaaaca

SEQ ID NO: 354969 - DNA, 201 bp, Homo sapiens
tgtattattcaagtgatattctggagtgagtctgtttttgcgttttatataaggactaccttttgatgatgaatgataaatgttctacagggttatatttwgctgcatgttgtaacataacagtattttgctcagcttgcgtaagactaagggactgaggttattttggggcgacacattttctcctttcccccattaacg

SEQ ID NO: 354970 - DNA, 201 bp, Homo sapiens
agccattctcatgaggacctatgtgttttttggcctcacctcatattcaggaaactctggctctgtgctaagtaactgctaacatcccagcacgttgagtscttactgcagcctagtgaagctaagctcaccttctcaggtgcaccatcccactggcaagcctagctgtcagaccttcctgatttctgttcttgcaggctt

SEQ ID NO: 354971 - DNA, 201 bp, Homo sapiens
gccattctcatgaggacctatgtgttttttggcctcacctcatattcaggaaactctggctctgtgctaagtaactgctaacatcccagcacgttgagtgsttactgcagcctagtgaagctaagctcaccttctcaggtgcaccatcccactggcaagcctagctgtcagaccttcctgatttctgttcttgcaggcttc

SEQ ID NO: 354972 - DNA, 201 bp, Homo sapiens
gaaagtgtggaaagaaggacctgtccagattttggaggggctgcatatgccaagccaaagagtttctataggcttgtgggcacagaggaaagatgaaatgrtttaaacagtgaagtgacatgattcactgaaggctattcacaatttgaattgtttaggaataagattaaaagatgccacttgtagtcaaggataagaaat

SEQ ID NO: 354973 - DNA, 201 bp, Homo sapiens
ctcagctcactgtaacctccgcctcctgggttcaaccgattctcgtgcctcagcctcctgagtagctgggattacaggcgcgcaccaccacacccagctattttttttttttttttttgtatttttagtagagacgaggtttcaccatgttggccgggtggtcttgatctcctgacctcgtgatctgcctgcctcggcctc

SEQ ID NO: 354974 - DNA, 201 bp, Homo sapiens
tagtccttctactcctaagcctgccccttaatgattgtccttacattggctctttctctttgggtaacctcctgagcattggacctacactcccagcttcytctgggtgttacctgggatagagagaatacaggttccttccattgccagctcctctttggtttcctagccgaataatctcatctttattcatccagtcat

SEQ ID NO: 354975 - DNA, 201 bp, Homo sapiens
gattgaaatatggaaaaagactgtactaatttctggattcaagccctgtaaacaaacgtgtttttcctgcagggttttgtgatgctttgtaagcgtgttayttgtggatcctttctcataaaggattgccatcaagaagaggtcatttgccactcttcgcacgtctttcttttttttttttgtgaggaccaaatgattttt

SEQ ID NO: 354976 - DNA, 201 bp, Homo sapiens
tttaacatttttcaccaacacaaccccttcctgatctccagagccagctgaccctgctttgagatctgctaagaacatagaatttatcagaagtaatttcytctaacttccctcttctctgtctcaaagtttatctgcatctggactcatccatttcttccttcccttttaattccaaagaaactctactgttttccaatg

SEQ ID NO: 354977 - DNA, 201 bp, Homo sapiens
caggctggccttgaactcctaacctcagatgatccacccgcctcggcctcccaaagtgctgggattacaggtgtgagccactgtggcccccttagtgcatytgtattaagatttttattttagattgaaaatgaaaggaagttaatttgttacaaaatactgatgtcagaataatttgctgaaccctttttactgatcttt

SEQ ID NO: 354978 - DNA, 201 bp, Homo sapiens
gtgattttcatgttggtattttgggataggcctacaaatcatattcctcttatagtctactgtttttctggtatcttataaggaaagacttgctggagaawccatccaatttatattgtgagttgggattgacatttgaaatacgatgaggacttcagcctgggcagagtgtgtacttttcttagtttgaacttaccctac

SEQ ID NO: 354979 - DNA, 201 bp, Homo sapiens
ttgaactggtcatgtcccaattgatttttctaattttgtaactgtattccccagagggctttttgacacaaacccttaatacacacggaactaaaaattgrcagtggatccttaaagagaattttatgcctttcttcgtattgtttgtatgtatttacttgttgacagtcttgtaagatagtcaataatatccattataca

SEQ ID NO: 354980 - DNA, 201 bp, Homo sapiens
ctgcagtttgaggtataggaaagatacctgcccaaagagaaatacaacctctatgctaggagaggcattcacaggcaggtaggggcacatctggtggaagsgttcagcaaaggcttcgtggaagagttaagattggcttgaaggatggacaaggtcttatcaggcagagacatgagaggagggatcttggaaaacagcaag

SEQ ID NO: 354981 - DNA, 201 bp, Homo sapiens; identical to SEQ ID NO: 75946

SEQ ID NO: 354982 - DNA, 201 bp, Homo sapiens
gtaagtagaaggcttttcacttcttgaaggatgattgatttgtaaaatacaaacaccaggaaaaactgggaggagggagtggcaggggcctttctttgtcrtttaaactatttgtgttccagggcagatttatcaccactatcagctgcagtgcctgtgacattgctttgtcacatgcttagcttcattatcaggcttgat

SEQ ID NO: 354983 - DNA, 201 bp, Homo sapiens
agggaggcctagctttttctgatttgaggttttgtgtaatactcacttcctctttctcccttctccacttttcataccaatgagtttcacaagcatagccrccaatcctagacttttcctgctgcttgaggcccagctggtagcttactttaccattttggtgccttcaatgaccaacaactaaatggccgggcaccacgt

SEQ ID NO: 354984 - DNA, 201 bp, Homo sapiens
acacatatatatatatatatatagtgtgtatgtgtgtgtgtgttatgctttgctgaaaaggtttttttttttttttttttttttttggaggaaaaatagcmcctaaaaacaaagctaaaaacatagtaaagtttgaggcaaatgtccccagagaaagatcattagcaaattcatgacccagagtctggttgagacttctct

SEQ ID NO: 354985 - DNA, 201 bp, Homo sapiens
cccaggccacttctttaccattgtcttgatagaagttagagccacatttggcctgcaggcctgatgacagaggcacctgttactgccttgacaacagtcascgcacagggcttccttttgttttttcatcatggcatatggagaaaatgataatatttgctcaacaccctgtgatgatagctcatagctgttggcaagtgg

SEQ ID NO: 354986 - DNA, 201 bp, Homo sapiens
gaatgcaagtatgtgggcatgtcctcaccacctggagcagttatggaagtacgcctcctgtggcaatttgaatattggaagaactattagaagaagcattytcctggagctgtctggtagtgttcattacaccactccaaagcctcaagtttaaggaagcaaaattacttcctggccaccgcaactgcaaaagtgagggga

SEQ ID NO: 354987 - DNA, 201 bp, Homo sapiens
ccagatattttactgggtctttgatttcagcgaggagaaatcactagggccgccctgggctggagcctcgagttcctcatgtgcagctcctcctagtgtcrctgggtggtgctgtgcttatggttttgggtctagacccggtttccctctcattttatgctaatcatctagtaggtgttggggagggtgctgttcttttca

SEQ ID NO: 354988 - DNA, 201 bp, Homo sapiens
caggtctgctgttcactaactgagtgactggatgaggaacttttcctctgtgtttttgtttcctcacttgtaaagtaaggacagcaatattagctacttcktagggttgttgtaaggacaagctgagctgacatctttaaggttcttagaacagtgcctggcagttagtgctgtgtcagtggtggctgccgctgctgtcat

SEQ ID NO: 354989 - DNA, 201 bp, Homo sapiens
gagccgcaataaacgtacgtgtgcatgtgtctttatagcagcatgatttatagtcctttgggtatatacccagtaatgggatggctgggtcaaatggtatwtctagttctagatccctgagaaatcaccacactgacttccacaatggttgaactagtttacagtcccaccaacagtgtaaaagtgttcctgtttctctac

SEQ ID NO: 354990 - DNA, 201 bp, Homo sapiens
tatcacatcactttcttgcccccaaatctatggcaccttcattttgcccttttcattgtttaaagaaaaattgggttttacatgatagcagttatgtttaytagctgttgataatatcatcacacttgaatgcagagcagtttctgggcaaggtttgatttcagtgtttttgtggtagcatttgctagactttatatttct

SEQ ID NO: 354991 - DNA, 201 bp, Homo sapiens
atacttaagcatggatgttcttataatgaaaatttcttttaaatttagaatattcctgaaaattctttgaattcaggcctgatgaaaatcattcaaaaatrtatttatcttttaatgcaacaaatattttttaataattttttttattcactcagaatcatatcttgcctaaggtcattatttgtctatgttagggtgata

SEQ ID NO: 354992 - DNA, 201 bp, Homo sapiens
gaagtagtgaggtctgcctacagtagtgagccagaataggagggaagttcccagttactgcagggaaggtgggtgaacttcctgtatgttttatatatatrtatatatatatatatattttatatatatatattttatatatatatattttatatatatatattttatatatatatatagtatgtatgcaatggatctgtt

SEQ ID NO: 354993 - DNA, 201 bp, Homo sapiens
ctttctagtcatacagtttgtcaagaaagaaaatagtgcactacacctgttttgaccaacggaaaagagcaaatgcagcatttttgataggtgcctatgcmgtaagtaccttcttcatgattattttctataatcaggccagtgaaatgctaacactgtcaaagaaaatccaaaccagtttttcagtgggattgagagacg

SEQ ID NO: 354994 - DNA, 201 bp, Homo sapiens
tgaaaaatgagtggttatactttagcttaaaagaatgatgcagatgtctaatgaatgcattagaaaaaatatccaaggacaggatcattacaaagacaggratttctctctttttacccgtgaggtacaaataagataattctgttattttggagctttattcttgatcagattctcattgtcttcctctatttctctgtt

SEQ ID NO: 354995 - DNA, 201 bp, Homo sapiens
gtagttttcttttttttgtctgttttgtctgggttttgtgtcaggataatactagtttcatgaaatgaattgggaattgttcttctctgtttcctggaagrgattgtgagagctggtgtgaattcttaaaatgcttggtagaattctccagtgaaattatctgggcctggggatttctttttaaaattatgaattcaattt

SEQ ID NO: 354996 - DNA, 201 bp, Homo sapiens
aagttttggctctgtaaagcagagcttccattttgaatgaggttatctttatgaagcacagtattatggttgaactctttttcattcttaaatccataaaycaaaaattcccctgttctactttattacaatagatgttttcatcagcttctactgagttggatattttcagaattctaactttgttgcaagccttccatt

SEQ ID NO: 354997 - DNA, 201 bp, Homo sapiens
tcttttagaggctcaataatattccattgtatgtatatatcccattttatttatccattcatttgttgatggacgtttgagttatttctaccttttggttrttgtgaataatgcaactgttctgaacattggtacacaagtatctatttgaatccctagtttcaatgattttgggtatatacctaaaagtggagttactgg

SEQ ID NO: 354998 - DNA, 201 bp, Homo sapiens
aactatctcatgaaacagattctcccaaggtagagttttaggaacaaataagggcctattaagtagaaatattaagaaatattacatatatattatgtatwgtatatataaatatactatattatgtattatatataaatatactatattatatatagtatatataaatatatactatatattatatataaatatatatat

SEQ ID NO: 354999 - DNA, 201 bp, Homo sapiens
ccaatagaaatgtgaaagtcatatcatgaaattagttttaacaatacattttacttgttgtaaatatgttgtttacatatttagtaatatacctaaaatakcatttaacatgtaagcaatacaaaaattattaatgatgtatgtattttgcattttttttgaattaagcctcagaaacccagtgtgtagtttatttatttt

SEQ ID NO: 355000 - DNA, 201 bp, Homo sapiens
gtttttgaagggtgtataatagcaaagagtacattttatgatctctgtgaggaccagtactacctgtttttgctcaccattatgtcccaacacctagcacygtgcctggcatagatatggggctcaagaaattttagttgaatgaatgaatgagtgagtaagtgaatgaggaagaaaggaaagaaaaagatttcaggcaga

SEQ ID NO: 355001 - DNA, 201 bp, Homo sapiens
attcacctgtgcaagtttccagcttgcttgtttacgtgtgcagctctcttttacaggctgctgtttgttaaaagagaaaatgattttagggctgcttttcrttaaaaggaaacccttaccgagggctcccgaaccctcagtacctgcctaagtaatttctttttaactcgtatatcaaaaacatctggtaaatgatcacaa

SEQ ID NO: 355002 - DNA, 201 bp, Homo sapiens
cttttacaggctgctgtttgttaaaagagaaaatgattttagggctgcttttcattaaaaggaaacccttaccgagggctcccgaaccctcagtacctgcmtaagtaatttctttttaactcgtatatcaaaaacatctggtaaatgatcacaattatttgttgttgacagtgaattcctttataagaaataatttgtgta

SEQ ID NO: 355003 - DNA, 201 bp, Homo sapiens
gacgaattcttttttaaaaaatttcaacttttattttagattcaggggtatatgtgcaggtttgtatacaagcatattttgtgatgctaaggtttggggtrtaaatgatcctgtcacccaggtagtgagcatagttcccaatagttagttttgcaaccctttactcccttcttccctccccacttcagtagtccttcatgt

SEQ ID NO: 355004 - DNA, 201 bp, Homo sapiens
agccttgaccttctgggctcaagtgatcctcctgcctcagcctcccaagtagctaggactatagatgtatgccaccacacctggctaattaaaaaaaaaawttttttttttggagacagggtctcattttgtcacccaggctggagtgtagtggcaccatcagaaatcactgcagcctcgacctcccgggctcaagcaatt

SEQ ID NO: 355005 - DNA, 201 bp, Homo sapiens
gggtgagcagatcacttgaggtcaggagttcaagaccagcctggccaacatggtgaaaccccatctctactaaaaatacaaaaattagccaggcgtggtgwcacctgcctgtagtcccagctactcaggaggctgaggcatgagaattgcttgaacctgggaagtggaggttgcagtgagccaagatcatgccactgtatt

SEQ ID NO: 355006 - DNA, 201 bp, Homo sapiens
attatttgctgaatgtttaaattaaatgctgcttttccagctgggtgtgcttgtagtcccagctactcttgaggctgaggcgacaggattgcttgaggccygcagttgaactgaaaagccagcctgccagcctgagcaacatagtgagaccccatctcttaaaaaaaaaaaaaaaagaaagaaatgctgcttttctggcta

SEQ ID NO: 355007 - DNA, 201 bp, Homo sapiens
ttaggaaatgtaaatagggagaggctgggagccataagagcgtcgagtccctatgctcagtctgactcatgtttattgagagcctggcctgtgtaaggcaktatttagatatttgcaattcagagatgataggagatgcttaggtctgaagagcctttatttcctttttggtaaatcaaacataacttattgatggggaac

SEQ ID NO: 355008 - DNA, 201 bp, Homo sapiens
tgtagcactgaggtgcccagccctgcccaccttttgtcccttgatgtagctgcaataaacccttggcctaccccttgtggcagcattctttcttgctctgyagatagcatggtatagtacaaggaatagtgtctaagagtcagaaaacatgtttttcatcttgaagggctctgtgatgatgcactttatctctctcagctt

SEQ ID NO: 355009 - DNA, 201 bp, Homo sapiens
ggtaaagtatttatattcccttcaaaaatgtctgaaattttgagaaattcatcagtacttgcaagtgagttggagttttagcagcaagctatgtattttawccagagtcaaattttaagtttttagcctgggacctgggaaacatagtgaaaccttgtctgtataaaaaataaaaaagaattaaccaggtgtggtggtgca

SEQ ID NO: 355010 - DNA, 201 bp, Homo sapiens
ttcctctccctctgccagcctccatccccaagttggcccaagtgtttgttgttcccctctttgtgtccatgtgttctcatcgtttagttccagcttataartgagaatatgcagtatttggttttctgttcctgcaatagtttgctaaggattatggcctccagctccatccatgttcctgcagaggacatgatcttattc

SEQ ID NO: 355011 - DNA, 201 bp, Homo sapiens
ggatggactttggggtcagggttgagttttttgggaaaattgtccaggatggaagaaggataaagataaagagttcggttggtgtggagatgggattgggmtgggcttagggaagtgaaggaggacaggtcagccacacacagaagcctgcacaacagcttccattgtgttctggactcagaactaggaatattcactata

SEQ ID NO: 355012 - DNA, 201 bp, Homo sapiens
tgtgaaatctttgtgagaaagtattactcaatcctgttgctttaaaaaatatctatgttcttactggtggcgtctccttgatgatgcaattatttcactakatgttgatattttttatgacgaaccacagtgtttttagtttaattctattctgtacagtgtgttataggatagaaataaagtgattttatggaatagttt

SEQ ID NO: 355013 - DNA, 201 bp, Homo sapiens; identical to SEQ ID NO: 75958

SEQ ID NO: 355014 - DNA, 201 bp, Homo sapiens
aggcctacagtaattttcttgtgattagttactaggaagctctgtattaccagatttggagaattcgaatagagttttttaggccgggcatggtggcttaygcctgtaatcctggcactctgggaggctgaggcagatggatcacttgaggtcaggagtttgagaccaggctggccagcataacgaaaccccatctctact

SEQ ID NO: 355015 - DNA, 201 bp, Homo sapiens
ctacacaagtgcattatgtgctcaaatacaaaatagtactagcaataagtgctcactttaacatttaggggcctatgggtccattatggcttggagttatyttaaaagatagaatttaaagtactttatttaaagtgcaaatattaaatcaggatcttagcatgaagttactgtatgccagtaactgttttaggcacttga

SEQ ID NO: 355016 - DNA, 201 bp, Homo sapiens
cagtgcctccccctgcatcagggctattgaagagactagcatttgaagagactagcatggtacttctatttttcaaactttaaagagttatttcagaaggwaagatctagtgaacatggtcctttaaatccttctgaaaagggcttgtgtgcttttactagtgttacatgattactgtgttaataacttactgtataaata

SEQ ID NO: 355017 - DNA, 201 bp, Homo sapiens
tcttagcatgaagttactgtatgccagtaactgttttaggcacttgacattaatgaactctattaatccttacagtagccatatgaaataggcactgttaytaggcccatttacaggagacatacctgaggtagaggtcaaaccatctggccaagatcttgggtacatggtgaggtggtcatttgaacttctgtgctctgg

SEQ ID NO: 355018 - DNA, 201 bp, Homo sapiens
cgggaggcctctcactatactctgctaactctctatgaggtcttcattgtggctttagtaaattatgtacagtaattttgagcaaaactgtaaccattccytactaataaacttcttctggaattacaacggtttttacattttgtctttctactctagggctatagtccaatattagcataccaatcagtagatgctctt

SEQ ID NO: 355019 - DNA, 201 bp, Homo sapiens
agacaaaaatagtacggtttacattttagtagattttttcagacctatattgcctgtctggatctttcctccttcttccctctccccaagtctgaactccsatgtggtttcccgtaccctaatccagtccatcatctctcatcagaccactgtatagccgcttaaatgtgtccctctcccgagtcttgacctccaattcat

SEQ ID NO: 355020 - DNA, 201 bp, Homo sapiens
ccctacaaaggacatgaactcatcattttttatggctgcatagtattccatggttgtatatgtgccacattttcttaatccagtctatcattgttggacawttgggttggttccaagtctttgctattgtgaatagagccgcaataaacgtacgtgtgcatgtgtctttatagcagcatgatttatagtcctttgggtata

SEQ ID NO: 355021 - DNA, 201 bp, Homo sapiens
tccctctccccaagtctgaactccgatgtggtttcccgtaccctaatccagtccatcatctctcatcagaccactgtatagccgcttaaatgtgtccctcycccgagtcttgacctccaattcattctcacagtgatcaatgggaggaaatatatgcaatatatgcaaatgaggggggtcgtgtgggtgtaaagaactctt

SEQ ID NO: 355022 - DNA, 201 bp, Homo sapiens
gaaggtgggtgaacttcctgtatgttttatatatatatatatatatatatatattttatatatatatattttatatatatatattttatatatatatattwtatatatatatatagtatgtatgcaatggatctgttgattgggtttaagttacttttatttaagctgtaattgtttcagttctgctgtttgtggaagtta

SEQ ID NO: 355023 - DNA, 201 bp, Homo sapiens
ttgaatattggaagaactattagaagaagcattctcctggagctgtctggtagtgttcattacaccactccaaagcctcaagtttaaggaagcaaaattamttcctggccaccgcaactgcaaaagtgaggggacccagtgtttccgtatctgttacacccattgctggttcaaagctcacgttggttaagtctataaaat

SEQ ID NO: 355024 - DNA, 201 bp, Homo sapiens
cgtcctacagcgagaaagattttgactatcacatcataatgtgcatgtctctgaggagaagaatatatttatattcattatcacacaggcctttgtactgygtaattatttgctgaatgtttaaattaaatgctgcttttccagctgggtgtgcttgtagtcccagctactcttgaggctgaggcgacaggattgcttgag

SEQ ID NO: 355025 - DNA, 201 bp, Homo sapiens
ttaagattgttaatatggtagattgcatcgattgttttttgtatattgaagaaggcttatgtccctggaataaacaccatttggtcatggtgtgtaattcyttttatatattgctgaactctgttagttaaaaatttttatgtccatattcataagtaacattggtttgtagttttcttttttttgtctgttttgtctggg

SEQ ID NO: 355026 - DNA, 201 bp, Homo sapiens
aaggatataccatactgtattgaacatttttctctctttggtcattttggttgtttcctatgtcttgtcattttaagttgttccaattcacattactgaascaaagtagagctgtgaataattctttttaaagctttagtttcaatttacttaaaaaatatattggtttgttttaatcaacgaaatacttccaggagcacc

SEQ ID NO: 355027 - DNA, 201 bp, Homo sapiens
gagttcgagaccagcgtgggcaacatagtagaccccatctctactttaaacaacaacaacagaaaacaaaacaaaacaaaaaaccgcatattatcttttayagataaatgtttggagtataatgtatttgcaatttaaagactttctataattgctaacaggtgttaagaggatttaaacatccagtcctggtctgttaca

SEQ ID NO: 355028 - DNA, 201 bp, Homo sapiens
ttggagtataatgtatttgcaatttaaagactttctataattgctaacaggtgttaagaggatttaaacatccagtcctggtctgttacagtggatctgcrtcaccatcttcattacaaagttatggttccttgccttgtaaacttgatccaattcagtcctgggtttaaataacatacttttttttcattttctttcttc

SEQ ID NO: 355029 - DNA, 201 bp, Homo sapiens
ctgcttttgtcgctattaagaaatacctgaggctgggtaattcataaagaaaaatggtttatttggctcacaattctgtgggctgtacgagcatggcaccracaacctgcttggctttgcgtgagtcctcaggaagcttacaatcatggtggaaggcaaaaggggatcttgtgtatcacatggcaagagggaacaagagaa

SEQ ID NO: 355030 - DNA, 201 bp, Homo sapiens
gaagtcagagttattgggattttgaaaaactgcatatatgatgccaatatgtgtggtcaaggttgagaactcctgctctgtaagatgtaccatggcaaaawatatatatatatatcaagtatatttatatatatattatatatatatcaagtatatttatatatatattatatatatatcaagtgtgtatatatatatatc

SEQ ID NO: 355031 - DNA, 201 bp, Homo sapiens
taaagaaaaattgttggccgtgtgggtggctcattcctgtaatcccagtgctttaggaggccgaggcaagaggatcacttgaacccatgagttagagaccwgtgtgagtaacatagtaagacctggtctctacaaaaaaaaaataaaaataaaaattagtcaggggtagtggcacacatctgtagtcctagttgcctggga

SEQ ID NO: 355032 - DNA, 201 bp, Homo sapiens
aggcaatcgcttgaacccgggaggcagaggttgcagtgagccaagattgtgccagtgcgctccagcctgggctacaagagtgagacttcgtctaaaaaaaaaaaaaaaaaaaaaaaggaaaaggagtaattctttagagaaatcttgttttagagaggagtccaaaccgggtggaagctgaaggaagatgtggagcttgga

SEQ ID NO: 355033 - DNA, 201 bp, Homo sapiens
atcatttttttttttggtttttttggagatggagtctcactctgttgcccagactggagtgtagtggcacaatcttggctcactgcaacctctgcctcccrggttcaagctattctcctgcctcagcctcccgagtagctgggattacaggtacctgccaccatgcctggctaatttttatatttttaatagagatagggt

SEQ ID NO: 355034 - DNA, 201 bp, Homo sapiens
tttttggtttttttggagatggagtctcactctgttgcccagactggagtgtagtggcacaatcttggctcactgcaacctctgcctcccgggttcaagcyattctcctgcctcagcctcccgagtagctgggattacaggtacctgccaccatgcctggctaatttttatatttttaatagagatagggtttcactatgt

SEQ ID NO: 355035 - DNA, 201 bp, Homo sapiens
agtctcactctgttgcccagactggagtgtagtggcacaatcttggctcactgcaacctctgcctcccgggttcaagctattctcctgcctcagcctccckagtagctgggattacaggtacctgccaccatgcctggctaatttttatatttttaatagagatagggtttcactatgttggaccaggctggtcttgaact

SEQ ID NO: 355036 - DNA, 201 bp, Homo sapiens
atttgtaagggtttcctaaattgtataagaattataaaatatttttcttctcttttcttacaaaattctgccagcgagttgaaaatggtgacttcaactgkattgttccaggaaaatttttagcatttagtggaccacatcctaaaagcaaaattgagaatggtaggtttttttttcctttaccatccaaacatttatttt

SEQ ID NO: 355037 - DNA, 201 bp, Homo sapiens
aagctattctcctgcctcagcctcccgagtagctgggattacaggtacctgccaccatgcctggctaatttttatatttttaatagagatagggtttcacyatgttggaccaggctggtcttgaactccttacctcaggtgatccacctgcttcggcctcccaaagtgctgggattacaggcatgagccactgtgcccaac

SEQ ID NO: 355038 - DNA, 201 bp, Homo sapiens
ggctaatttttatatttttaatagagatagggtttcactatgttggaccaggctggtcttgaactccttacctcaggtgatccacctgcttcggcctcccmaagtgctgggattacaggcatgagccactgtgcccaactggttctcagttttttcattgtcagtttagtattcagttttcttggtcttctaacttattta

SEQ ID NO: 355039 - DNA, 201 bp, Homo sapiens
gggggtggatactttggggcaggaattgttcagactatagaaggtttaggattgccagatttagcaaataaaaatacaggctgcctaattaaatttgaaasttagataaacaatgaatacttttaaaacaaaaagtataaatatgtcccaaatattgcagggaacatgcattctgtattttatctggcaaccccatgtcag

SEQ ID NO: 355040 - DNA, 201 bp, Homo sapiens
tcagattttctgtaaaaatgtctcttaagtgtcactgtcattctcacttctatttaaacacacacacacacgcacacacacacacacacacacacacacasagagagagagagagagaaagatagcttcagactgagaatcccgaccatttgaggcatcagcctgctcctttaatgagagaagcccagtgtcccgtttagt

SEQ ID NO: 355041 - DNA, 201 bp, Homo sapiens
gtatacatcgtttctcttaatagtctatttaggcatgttagctatgctgccatttactcatgatggaaattcatatatgaaaagagagattcttgcagcctttgttgcagggaggaaggggataggcactgaaccaattgctaacacaacgtgtgacaggtgctgtcatggaggtcccaggcatgctagcaacccagaggc

SEQ ID NO: 355042 - DNA, 201 bp, Homo sapiens
atggttgtatatgtgccacattttcttaatccagtctatcattgttggacatttgggttggttccaagtctttgctattgtgaatagagccgcaataaacrtacgtgtgcatgtgtctttatagcagcatgatttatagtcctttgggtatatacccagtaatgggatggctgggtcaaatggtatttctagttctagatc

SEQ ID NO: 355043 - DNA, 201 bp, Homo sapiens
gttggttccaagtctttgctattgtgaatagagccgcaataaacgtacgtgtgcatgtgtctttatagcagcatgatttatagtcctttgggtatataccyagtaatgggatggctgggtcaaatggtatttctagttctagatccctgagaaatcaccacactgacttccacaatggttgaactagtttacagtcccacc

SEQ ID NO: 355044 - DNA, 201 bp, Homo sapiens
aactgaacaatgagaacacttggacatgggaaggggaacatcacacaccagggcctgcctgtcatggggtggggggatgggggagggatagcattgggagmtatacctaatgtaaatgctgagttaataggtgcaacacaccaacatggcacatgtatacatatgtaacaaatgtgcacgttgtgcacatgtaccctagaa

SEQ ID NO: 355045 - DNA, 201 bp, Homo sapiens
acagcagcaaaactcggtctccaaaaaaaaaaaaaaaaaaagaagggttaatgggaaggaaatgtcaggcatctgtagacacaaaattgttgttttagtgsgatgaaaaactttttttttttgtataaagcacagatttacataaacagatatgcagtctatctgtgacagtgaaatttcatggggactgattaggaataa

SEQ ID NO: 355046 - DNA, 201 bp, Homo sapiens
ttcatgcagtaatgcactcactcatcaggagaacatttccccactttgcccaaatacctaccttcaggttgtgaaaggtcaacctgtaaaagatgccccargaatcttcctggaatttagatggcctctgttgggtttcactttgcacttattaataattgagcactgggataaaaataaaaacaaagggtctcatcttgc

SEQ ID NO: 355047 - DNA, 201 bp, Homo sapiens
ttgagtcatccattttcagtgttggcttggcagttagccttcaagggaacaagaggcctttcagttctggggtcagactcagcagagtttgaattgacaawctaggtatgaatctttttaggttctcttcctttcagtgtactactaaattatagtgtatactattgagcaaacaaagtcgtattaatctcagcttgtcta

SEQ ID NO: 355048 - DNA, 201 bp, Homo sapiens
aacatgttcttgtgtcccttcactgttatagtattttcctgtgactacgtatgagccacatgccacgattaagccatttctttcttgtccagtctttgggrcagattttgagaacctgttggcactatgtggctgtcatgaggattaaatgcgctatgcatataaattacctgacacagtaggtgctcaaaaaaggcatgc

SEQ ID NO: 355049 - DNA, 201 bp, Homo sapiens
gccttcaatttcatgtgttacaatttgtactttccatttttcttatatcatggctatttgtgtacaagcctaattttccttattaggttgcaaattccctrtggatggaattatgaccaaatagaaaaacatatactttgttcttggatagaaagacttaacatcataaagctgctacttttcccaaaattaatacattta

SEQ ID NO: 355050 - DNA, 201 bp, Homo sapiens
tccagtctgcccaggcagctccattctggtcacactggctaggaagctttgttttacagaaataatgatgtgcagatgaacatttcttatttgaaagtcargtagccacaccatgctccttatggcctcattctcatagcttttcagttcatttgttgaacagatattaaatgcctcatgtttgctccatatatttgctag

SEQ ID NO: 355051 - DNA, 201 bp, Homo sapiens
tagttgtgatacaaaatttctcactgatccatgacaggctgaaatgtggactattttgttcctgagatattcaagcaattcacaggttatcattattgctrtcttcacctaaagggtgctcttttggggaaagaccatttctattctagaaagtgatttcacattattttagccacattacaatgtagcgcatctgggaac

SEQ ID NO: 355052 - DNA, 201 bp, Homo sapiens
gcatggtggaagaagtgctgagtacagcatgagcttgtcttacacactagttacagtcttgagaagcagtgtgaagtgattattcttgaactggtcatgtsccaattgatttttctaattttgtaactgtattccccagagggctttttgacacaaacccttaatacacacggaactaaaaattggcagtggatccttaaa

SEQ ID NO: 355053 - DNA, 201 bp, Homo sapiens
atcaagttgaatcttacttgaaattagccccagcatgggtgttggaatctgactgccaggattgaaatactggctctacctcttactagctgtatgtgtaygggccagcttttccaggcaccagaaattgagtaattgtaggttttaatgagataatccacataaagcacttagcatagtggctagcatatagtaagtgct

SEQ ID NO: 355054 - DNA, 201 bp, Homo sapiens
gcctgtagcctggagctttgtgccatgtatctgccaggttctcattatactaattgctgaagttgaagaaatggtcttagggttaaaaaaccaaatactcytaagcctagttctttaagccatttaatcaatgtcttaaaattattgcttgtcatttaataggtattgctatacctattgccccaggcattctgctaagta

SEQ ID NO: 355055 - DNA, 201 bp, Homo sapiens
agcctggagctttgtgccatgtatctgccaggttctcattatactaattgctgaagttgaagaaatggtcttagggttaaaaaaccaaatactcctaagcytagttctttaagccatttaatcaatgtcttaaaattattgcttgtcatttaataggtattgctatacctattgccccaggcattctgctaagtacagctc

SEQ ID NO: 355056 - DNA, 201 bp, Homo sapiens
gtttcccaggctggagtgcagtggcatgatctcagctcaccgaaacctccgccttccgggttcaagcaattatcttgcctcagcctcccgagtagctgggrttacaggcatgcaccaccatgcctggctaattttgtatttttagtagagatggggtttctccacgttggtcaggctgatctcaaactcccaacctcaggt

SEQ ID NO: 355057 - DNA, 201 bp, Homo sapiens
gagccactgcgtccggccaggtctttacatcttaatgatttttttttttctttttgaatctggctctgtcgcccaggctggagtacagcaccgtgatctcrgctcattgcaacctctgtctcccaggttcaagtggttctcctgcctcagccttctctttagctgggattacaggcgtgtgccaccatggccggctaattt

SEQ ID NO: 355058 - DNA, 201 bp, Homo sapiens
tgcaatagactttactggcactaagttgttttccctttgggatttatagaagacccttgagtattctcagatgtgtttgacacatagaaaggggtagaatractaggggttgttttagaagactgtatcctgctatttgatttttttttttaaagacccagaaatttagaaatatttttttcttcttcagataaaatactc

SEQ ID NO: 355059 - DNA, 201 bp, Homo sapiens
aaactgcacgttctgcagatgtattctggttttttttttttttaaagaaaataaaattgtggtttaaaagaacacataaaacatacatcttactttttttytttttttttgagacggcgtttcctcttgttgcccaggctggcatgcagtagtgcgatctcggctcactgcaaccttcgcctcccaggttcaagtgactct

SEQ ID NO: 355060 - DNA, 201 bp, Homo sapiens
tgagaattgcttcagcccgggaggcggaggttacagtgagctgagatcacactgctgcactccagcctgggtgacagagcaagactcccatcttggggggraaaaaaaaggcaaaactaatgtacttctcatacttcaacccaaaatagtcttttctttctttttcctttctttttctttttttgagacggagtcttgctc

SEQ ID NO: 355061 - DNA, 201 bp, Homo sapiens
atgagaattgcttcagcccgggaggcggaggttacagtgagctgagatcacactgctgcactccagcctgggtgacagagcaagactcccatcttggggggaaaaaaaaaggcaaaactaatgtacttctcatacttcaacccaaaatagtcttttctttctttttcctttctttttctttttttgagacggagtcttgct

SEQ ID NO: 355062 - DNA, 201 bp, Homo sapiens
tatttatttatttattttatttttttgagacagagtcttgctctgtcgcccaggctggagtgcagtggcacaatctcggctcactgcaagctctgcctccygggttcacgccattctcctgcctcagcctcccaagtagctgggaccacaggcgcccaccaccatgcccggctaattttttgtatttttttagtagagacg

SEQ ID NO: 355063 - DNA, 201 bp, Homo sapiens
tacttctgccgcagctccttggagagcggggatgacatgatcttccggtgcacgtgcaagggggcatggaagtgacgtttgcggtttttgctgcggtccargttcacgaagggattgaacttcatggtgatgctccggctagcggcggcctcaggcctgttttgtttttttttttttttttgagacagtgactcactttgt

SEQ ID NO: 355064 - DNA, 201 bp, Homo sapiens
gtgtgtgtgtgtgtgtgtgtgtgtgtgtgtgtgtgtttgagacaaggtcttgctctgttgcccaggctggagtgcactggtgagaccacgcctcactgcasccctgaccttctgggctcaagtgatctttctgcctcagcctcctgagtagctagaactatacaggcatgtaccaccatgcctgcctaatattttcaattt

SEQ ID NO: 355065 - DNA, 201 bp, Homo sapiens
tgcctggcttaactgatatttttgtctttaaaaaatttcccaaagattagatttaatagagtgttcctttacctcctttgtctaatgctagcatatttttrtctaatatctgtccctgttattgataaatttagaactggctaagatgtatatctggttaacatttttattaaattaaacattttactttgaggtaattgt

SEQ ID NO: 355066 - DNA, 201 bp, Homo sapiens
attgtgtctgttaatatgttgtgaaataaactgtgtgatttgcttttgtagagctctgatccagccacacgccaaatgctaattggtacggttctccatgrggtgtttcaaaaagccataaataatagctttgccccagaaaagctacaagaacttgcttttcaaacaattcaagaaataagacatttgaaggaaatgtaa

SEQ ID NO: 355067 - DNA, 201 bp, Homo sapiens
gcatagttttaggtagacatactttcattttctttgtagttacctaggcatgggtcatgtgctaatttcatgtttaacattttgaggaactaccaaactgytaaagttttgtttagtacattatgttccatagtgatgatgtggacataatcttatctaattcttacaaccacatgtatagcagacagcatagatgccacc

SEQ ID NO: 355068 - DNA, 201 bp, Homo sapiens
ccttgaactacctggacctcgtcgtccttgcggatgggtgtggagcggacattgtacttctgccgcagctccttggagagcggggatgacatgatcttcckgtgcacgtgcaagggggcatggaagtgacgtttgcggtttttgctgcggtccaagttcacgaagggattgaacttcatggtgatgctccggctagcggcg

SEQ ID NO: 355069 - DNA, 201 bp, Homo sapiens
accttgtttgggtgagtacccacgtggacggttgtgctgttggcctactcacgctgcacctgctcagtgtagatgacatctttctttctgtacacctggaytaccttgccaatttgctgacctttgtagtgtccttgaactacctggacctcgtcgtccttgcggatgggtgtggagcggacattgtacttctgccgcagc

SEQ ID NO: 355070 - DNA, 201 bp, Homo sapiens
ttcatctcagcctcctgagtagctgggaccgtaggtgcacaccaccacgcctggctgatttttgtatattttgtagagatggggtctcactgtgttgcacrggctggtcttgaacttctggtctccagtgatccacctgcctcggcctcccaaagtactgggattacaggcatgagccactacacctggcctcattctatt

SEQ ID NO: 355071 - DNA, 201 bp, Homo sapiens
attctggcccattcattcttttagcagatagcagcatatttcttatacagactatgcgaaatggcgagcattcatgtatatttgttttgttgttttagaarcttgtcggtccttccagaatcaactttgttcagattagaccaagaagaaaaaaattgtgatatagataccccattaggaaatctttccaaattgatggaa

SEQ ID NO: 355072 - DNA, 201 bp, Homo sapiens
gtatattctactattaatatttttatttaggctggaccttgtgagccaccacgcctggcctaaataaaaatattaatagtagaataattgataggaaaatmtgggcaggcgaggtggtgcacgcctgtaatcctagcacactgggaggctgaggtgggtatatcgcttgagaccaggagtttgagaccagcctgggcaaca

SEQ ID NO: 355073 - DNA, 201 bp, Homo sapiens
catccatatggttttaaaatatacgtaataaaaggtttcctttgtactccatccctcatctactcagttcttacctcagatagtctcctttttttttttttgagaggctaggtcagagtgtggaggcatggttatggctcactgcatccttgacttctgggctcaagcagccctggctcagtgatcctttcatctcagcct

SEQ ID NO: 355074 - DNA, 201 bp, Homo sapiens
tgatccacctgcctccgcatcccaaagtgctgggattacagatgtgagccactgcgctctgcccatgttagccatttttaagggtacagttcagaggcaaagtacattcaccttgttgtacagccatcaccctatctatctccagaactctttgcatcttcccaaactgaagctttgtgcccttgaaacaataacgctccc

SEQ ID NO: 355075 - DNA, 201 bp, Homo sapiens
gcatcatttgaacctgggaggcaaacgttgcagtgagtagagatcgcgccagcctgggcaacaagagtgaaactctctctcaaaaaaaaaaaaaaattacygtattaggtcaggtgcggtggctcatgcctgttatcccagcactttgggaggccaaggtgggcagattgcttgagcccaggagtttgagaccagcctggc

SEQ ID NO: 355076 - DNA, 201 bp, Homo sapiens
ttttcttatgaaataattaacttttcctttgaaattcaacactctttttcctgttatttttgaatttaaatgtaggtttgaataagcctcagaggcaagcratgaaaaaggtacttctttcaaaagactacacactcatcgtgggtatgcctgggacaggaaaaacaactacgatatgtactctcgtaaggttattattct

SEQ ID NO: 355077 - DNA, 201 bp, Homo sapiens
caggagcatcatttgaacctgggaggcaaacgttgcagtgagtagagatcgcgccagcctgggcaacaagagtgaaactctctctcaaaaaaaaaaaaaaattaccgtattaggtcaggtgcggtggctcatgcctgttatcccagcactttgggaggccaaggtgggcagattgcttgagcccaggagtttgagaccagc

SEQ ID NO: 355078 - DNA, 201 bp, Homo sapiens
tcaccatgttggccaggctggtcttgaacatctgacctcaggtaatccacccgcctcggcctcctggagtgttgggattacaggcgtgagccaccacaccyggcctcaataataatttttaggagtcagatgaacaagtaagttgtaggaaaatgcagacacaatacttacgtatgtaatataaacagaagtttttttctc

SEQ ID NO: 355079 - DNA, 201 bp, Homo sapiens
gcaggagcatcatttgaacctgggaggcaaacgttgcagtgagtagagatcgcgccagcctgggcaacaagagtgaaactctctctcaaaaaaaaaaaaaaattaccgtattaggtcaggtgcggtggctcatgcctgttatcccagcactttgggaggccaaggtgggcagattgcttgagcccaggagtttgagaccag

SEQ ID NO: 355080 - DNA, 201 bp, Homo sapiens
cgggcgagcaccaccacacctggctaattttttatttttatttttttttttttttagtagagatggggttttcaccatgttggccaggctggtcttgaacwtctgacctcaggtaatccacccgcctcggcctcctggagtgttgggattacaggcgtgagccaccacacctggcctcaataataatttttaggagtcaga

SEQ ID NO: 355081 - DNA, 201 bp, Homo sapiens
ggcaggagcatcatttgaacctgggaggcaaacgttgcagtgagtagagatcgcgccagcctgggcaacaagagtgaaactctctctcaaaaaaaaaaaaaaattaccgtattaggtcaggtgcggtggctcatgcctgttatcccagcactttgggaggccaaggtgggcagattgcttgagcccaggagtttgagacca

SEQ ID NO: 355082 - DNA, 201 bp, Homo sapiens
ctttctttcttaaagctacagcacccaatattcccaggtggtctcccatccaagtagtaaccaagctcaaccctgcttagcttctgagataagatgagatyggctgcgttctgggtggtatgggtgtagaccaagcctctatttttgcaaatgttttaaatgtatgacttcatataagatcgtggattcttgtatctgctt

SEQ ID NO: 355083 - DNA, 201 bp, Homo sapiens
attttgtatttttagtagagacagggtttctccatgttggtcaggcttgtctcgaactcctgccctcagatgatctgcctgcctcggcctccgaaaatgcyagggttacaggcgtgagccaccgcgcctggctataattttttttatattgcatttgggagcaggttattatggtttgttttctgtaatggtattatatgt

SEQ ID NO: 355084 - DNA, 201 bp, Homo sapiens
tgcctggctaattttgtatttttagtagagatggggtttctccacgttggtcaggctgatctcaaactcccaacctcaggtgatctgcccatctctgcctyccaaagtgctgagattacaggcatgagccacagagcctggccattttttttctttctttcttaaagctacagcacccaatattcccaggtggtctcccat

SEQ ID NO: 355085 - DNA, 201 bp, Homo sapiens
gagtacagtggtgagatcacaggtcacgtaacctcaaacttttgggctgaaacgatccttccgcttcagcctgctgagtagctgggactatagtttcacaycaccatgcttggcgttatttggatgttttttaaaaattgtggttaaatgcacataaaaattaccgtgttaggccaggtgcaatggctcacccctgtaatc

SEQ ID NO: 355086 - DNA, 201 bp, Homo sapiens
atacaaactgataagcccctaccaccctagagtagttattaagattgcggagcttaaacataaagaaggaactggaataatcatcctgggagggtaagtttataacagcagttctcaaaacttttgctctcaggacccctttacactaaaaaattattaaagactggaaagagcttttgtttatgtgggctatatctatga

SEQ ID NO: 355087 - DNA, 201 bp, Homo sapiens
aataagcttctgagattgcatgttatttagtagtgctgccagagagattttaaatggtttttttttcttttttttgagacggagtttcactcttgttgccyaggctggagtgcaatggcgtgatcttggctcaccgcaacctctgcctcccaggttcaagtgattctcctgcctctgcctcccgagtagctgggatgacag

SEQ ID NO: 355088 - DNA, 201 bp, Homo sapiens
tatatacaaactgataagcccctaccaccctagagtagttattaagattgcggagcttaaacataaagaaggaactggaataatcatcctgggagggtaagtttataacagcagttctcaaaacttttgctctcaggacccctttacactaaaaaattattaaagactggaaagagcttttgtttatgtgggctatatcta

SEQ ID NO: 355089 - DNA, 201 bp, Homo sapiens
ttatatacaaactgataagcccctaccaccctagagtagttattaagattgcggagcttaaacataaagaaggaactggaataatcatcctgggagggtaagtttataacagcagttctcaaaacttttgctctcaggacccctttacactaaaaaattattaaagactggaaagagcttttgtttatgtgggctatatct

SEQ ID NO: 355090 - DNA, 201 bp, Homo sapiens
cagcttcctcccctggtgctaaaccgtgaagcaaggtaggcagacacttaagtgttaattttaaactagattattttcaaggaacagatttagtacactgwtaaacatgaatctgatttattgacagagctcttggcatgagtgaaagcttattcaagaggctggagcagaataagagtgctgttgtacagttaaccgtgc

SEQ ID NO: 355091 - DNA, 201 bp, Homo sapiens
acattttactgtaggttgtggaaaatgtaaaaatgacaggctcaatattagtctgttttgttttgttttgtttttgtttttgtttttgtttttgagaggtrgttttgctcttgttgtccaggttgttgagcaatggtgagatcttggctcactgcaactttcacctcccgggttcaagtgattctcctgcctcagcctcct

SEQ ID NO: 355092 - DNA, 201 bp, Homo sapiens
gaatctgtcatacatatataaatactaataagcttctgagattgcatgttatttagtagtgctgccagagagattttaaatggtttttttttcttttttttgagacggagtttcactcttgttgcctaggctggagtgcaatggcgtgatcttggctcaccgcaacctctgcctcccaggttcaagtgattctcctgcctc

SEQ ID NO: 355093 - DNA, 201 bp, Homo sapiens
tatgtagcgaatctgtcatacatatataaatactaataagcttctgagattgcatgttatttagtagtgctgccagagagattttaaatggtttttttttyttttttttgagacggagtttcactcttgttgcctaggctggagtgcaatggcgtgatcttggctcaccgcaacctctgcctcccaggttcaagtgattct

SEQ ID NO: 355094 - DNA, 201 bp, Homo sapiens
cctcaaaaatttttttttctttttttgagatggagttttgctcatgttccccaggctggggagtaatcttgcaatcttggctcaccacaacctccgcctcygaggttcaagtgattctcctgcctcagcctcccgagtagctgggattacaggcatgcaccaccacacccggctaattttgtatttttagtagggatgggg

SEQ ID NO: 355095 - DNA, 201 bp, Homo sapiens
tttttttgagacagaatttccctcttgttgctcaggctggagtgcaatggcacaatcttggctcactgaaacctcctcttcctgaattcaagtgattctcytgcctcagcctcccgagtaaactgggattacaggcatgggccaccacgccaggctaattttgtacttttagtagagacggggtttctccatgttggtcag

SEQ ID NO: 355096 - DNA, 201 bp, Homo sapiens
tctaaaggtccatttcatagtccttgtgggattcatttaaaaaaataatagtaatatgtacctgtaaagttagaatttttcttttttttttttttttttttaagagacagggtcacactctgctgccctgactggagtatagtggtgcaatcatggctcactgtagcctcgaacttctgggataaagttcacagtgctcct

SEQ ID NO: 355097 - DNA, 201 bp, Homo sapiens
tcctgggttcaagcgattctcctgcctcagcctcacaagtagctgggattacaggcgtccgccaccacgcccggctaatttttgtatttttagtagagacrgggtttcaccatgttgcccaggctggtcttgaactcctgacttcaggaatccacctgcctcggcctcccaaagtgctgggattataggcatgagccaccg

SEQ ID NO: 355098 - DNA, 201 bp, Homo sapiens
ttctaaaggtccatttcatagtccttgtgggattcatttaaaaaaataatagtaatatgtacctgtaaagttagaatttttcttttttttttttttttttttaagagacagggtcacactctgctgccctgactggagtatagtggtgcaatcatggctcactgtagcctcgaacttctgggataaagttcacagtgctcc

SEQ ID NO: 355099 - DNA, 201 bp, Homo sapiens
gaaatttgcagatcaaagtccattaaatccttagctcttctagaagaactctacaatagtcaagtaagcacaattattgtataataatactaacagttaaygtccacagccagaatgaggggagaaactgtactctgggaaatttagtcacattgactggatttgcacatgattaatttatatgtactatacgaccagttt

SEQ ID NO: 355100 - DNA, 201 bp, Homo sapiens
accagtggtagaaatttcttgtttaatgttgtccaatttatactttcctttcttttttctccgccagaaccggggtctttttctgtcgctcaggaaggggkgcagtagcatgatcgtatctcactgcagcctcaaactcctgggctcaagcagtccttccacctcagcctcttgagtagctgggactacaggtgtgcgcca

SEQ ID NO: 355101 - DNA, 201 bp, Homo sapiens
cattttagttatttttcctttatattttccttcgtattatttctaaaattaagataatagaaaaaaaaccacagtactttctttcttttttttttttttttgagacggactttttgctcttgtggcccaggctggagtgcaatggtgcaatctcggctcaccacaacctctgcctcttgggttcaagcgattctcctgcct

SEQ ID NO: 355102 - DNA, 201 bp, Homo sapiens
tgttgtgaaataaactgtgtgatttgcttttgtagagctctgatccagccacacgccaaatgctaattggtacggttctccatgaggtgtttcaaaaagcmataaataatagctttgccccagaaaagctacaagaacttgcttttcaaacaattcaagaaataagacatttgaaggaaatgtaagtagttataagaagaa

SEQ ID NO: 355103 - DNA, 201 bp, Homo sapiens
taggtttgaataagcctcagaggcaagcgatgaaaaaggtacttctttcaaaagactacacactcatcgtgggtatgcctgggacaggaaaaacaactacratatgtactctcgtaaggttattattcttctgcttagagacaaaatatttgtatcagcttctcctcagttcagaggatgtaatattgaatatcaaaaggg

SEQ ID NO: 355104 - DNA, 201 bp, Homo sapiens
ataaagttctgaattactctgtaaaggattgagctaaatcgataggtattaagcctgctttctgtccagtgagattttatcgaaagatttccggcattackttagcaggttggactaaattatttctaagtacaattctgtggctcatgataggactttcagtgaaccacggacaatacccttttccgtaacataagtctc

SEQ ID NO: 355105 - DNA, 201 bp, Homo sapiens
aacactggtggccagacgggcattgataacatcattttagttatttttcctttatattttccttcgtattatttctaaaattaagataatagaaaaaaaamcacagtactttctttcttttttttttttttttgagacggactttttgctcttgtggcccaggctggagtgcaatggtgcaatctcggctcaccacaacct

SEQ ID NO: 355106 - DNA, 201 bp, Homo sapiens
atatttttccacttaggttccagcgccagaacaagttgaaaaaggtggtgtgagcaatgtaacagaagccaaactcatagttttcctaacctccatttttrttaaggtaatttagaattttcaaggctagcaaatattaaagtgcagaataaaagaatgttagactgtaagacacttacaatctggcattaagtctcgttt

SEQ ID NO: 355107 - DNA, 201 bp, Homo sapiens
taacaaaagataacttgcagtgtaatgtgaaaggcgtttggtgttatcactggagaggtaatgactttggaccctcctttggtccctcactgatgcctcartcaaacggggaagacttaagaggtacttaataggagaagggctgttttcttgagagattattattttgcataattttagacagcttggaccgatggatga

SEQ ID NO: 355108 - DNA, 201 bp, Homo sapiens
cactgttttagtagcatataatcctttacgttctcatgaaactaaaaattaagggagcaatgtctaaggaattatttcatcctgggaaatatggacagatwtagagcaaattcagtaattgtattcagtctttgagataggaaagtttgttataaacatcagttgggcacataatgtaaacatttaattattaaattcaga

SEQ ID NO: 355109 - DNA, 201 bp, Homo sapiens
ccaggctggtcttgaactcttggcctcaagagatctgcccgccttggtctctgaaagtgctgggattacaggcatgagccactgtacctggccaattgtgkttttttttaaaagaattttaataatatactctatagttgaaaacattattaatcttttaaaattttattatgcaaaactttatttcaaactttctatttt

SEQ ID NO: 355110 - DNA, 201 bp, Homo sapiens
tgcagctccctgggcacccgacgagcctccggagtcggggcctgcctcccaaggtgttctttggggccacattcagccagagcctggactctccctcgccsagcagttcattgtttcccttgatttcacctctctccctaagttgaggagtttcggccactggaatgtttttataataggaaattgcaaccgccgtaggct

SEQ ID NO: 355111 - DNA, 201 bp, Homo sapiens
gtgactaatattaatattcatttttgttgattctttcaccttcatcttttagacaaagctatttttcatctccaagtcggtagtatagtctttatggccasttgcgtacttatagtactctttagagattgtattatcagcaggctgtatatttttccacttaggttccagcgccagaacaagttgaaaaaggtggtgtga

SEQ ID NO: 355112 - DNA, 201 bp, Homo sapiens
gtattcagtctttgagataggaaagtttgttataaacatcagttgggcacataatgtaaacatttaattattaaattcagaaaagtttaacttaatcaggrtttctttcttttaaattgtgtctttttctatttaggctggatgcagtccctctgatattggtattattgcaccgtacaggcagcaattaaagatcatcaa

SEQ ID NO: 355113 - DNA, 201 bp, Homo sapiens
gctgaacgaactggagctgctgatggagaagagtttttgggaggaggcggagctgccggcggagctgtgagcggagaggggggagggtgtgggaacaaagmgggagatttgaaagaaggagcgggagaggctgcgtccgcaccgcctcagactgaccgggcccggggcccagggacccggtgcagctccctgggcacccga

SEQ ID NO: 355114 - DNA, 201 bp, Homo sapiens
tagattaggtaataaatatacaattgtgtctgttaatatgttgtgaaataaactgtgtgatttgcttttgtagagctctgatccagccacacgccaaatgmtaattggtacggttctccatgaggtgtttcaaaaagccataaataatagctttgccccagaaaagctacaagaacttgcttttcaaacaattcaagaaat

SEQ ID NO: 355115 - DNA, 201 bp, Homo sapiens
gggcatgatggtgggtgcctgtaatcccagctactcaggaggctgaggcatgagaattgcttcagcccgggaggcggaggttacagtgagctgagatcacrctgctgcactccagcctgggtgacagagcaagactcccatcttggggggaaaaaaaaaggcaaaactaatgtacttctcatacttcaacccaaaatagtc

SEQ ID NO: 355116 - DNA, 201 bp, Homo sapiens
ggtccatttagtacagtaagatttcagtagtttggattagtgaatgaggtggcctttggaatttatgacaaatacaagttatgaagcatgttatagataaygtgatttcatttattcatgacaactgcagatggctctctattgtttctaagaagagcaccattcctgtgtatcctatgtgctgcaatcattgctagttag

SEQ ID NO: 355117 - DNA, 201 bp, Homo sapiens
gaattaaataatatcgaaggattcctgatgccatagaacaaaaaccttttgatcttttcatttcaaaaatgagagaaacaaaactacatttcttttacatrttaaataactgatctgttttccttgtttttagcttatagttgcaacaacatgtatgggaataaaccatccaatattttcccgtaaaatttttgatttttg

SEQ ID NO: 355118 - DNA, 201 bp, Homo sapiens
tctgttttagctggcttcctctcacactgccatggtaggggaagaggggtaccacctcattcctgccaggtgggagtcgaagtgtgggttccccactcagycttctttgaccaaagtgggaggttcctcgttaccgctgggcccacttggttggggtggaagtctaggcttctgatgtggtctctactaacatgtggggtt

SEQ ID NO: 355119 - DNA, 201 bp, Homo sapiens
tttaaaatcttggtcagatagttctgacctctctgtcattctggtgttggcatttatagattgtcatctgttttcattgagtttgagattttcctggttcrtctttaattattgatttttttattgaaacatgagcatattttgttgttactgaaaacttctgttttagctggcttcctctcacactgccatggtagggga

SEQ ID NO: 355120 - DNA, 201 bp, Homo sapiens
tttatatacaaactgataagcccctaccaccctagagtagttattaagattgcggagcttaaacataaagaaggaactggaataatcatcctgggagggtaagtttataacagcagttctcaaaacttttgctctcaggacccctttacactaaaaaattattaaagactggaaagagcttttgtttatgtgggctatatc

SEQ ID NO: 355121 - DNA, 201 bp, Homo sapiens
atttccattttattctttctatcttctatttcttggctgagactttgttttttggttcatattcaagcgtgttcataattactcattaaatgttgttaccrtggctgctttaaaatcttggtcagatagttctgacctctctgtcattctggtgttggcatttatagattgtcatctgttttcattgagtttgagattttc

SEQ ID NO: 355122 - DNA, 201 bp, Homo sapiens
attttatatacaaactgataagcccctaccaccctagagtagttattaagattgcggagcttaaacataaagaaggaactggaataatcatcctgggagggtaagtttataacagcagttctcaaaacttttgctctcaggacccctttacactaaaaaattattaaagactggaaagagcttttgtttatgtgggctata

SEQ ID NO: 355123 - DNA, 201 bp, Homo sapiens
acccatcttgccctcccaaagtgctggtattacaggtgtgagacacagcgcctggcctggtatttgttttttgggtttttggggtttttgttttttttttkaattatgaaacatttcccatttttatttataaaattattaattaaatttgcaaaagtagatttacagagcctcaggtaacaaaacaggaaatgaaatgtt

SEQ ID NO: 355124 - DNA, 201 bp, Homo sapiens
gattttatatacaaactgataagcccctaccaccctagagtagttattaagattgcggagcttaaacataaagaaggaactggaataatcatcctgggagggtaagtttataacagcagttctcaaaacttttgctctcaggacccctttacactaaaaaattattaaagactggaaagagcttttgtttatgtgggctat

SEQ ID NO: 355125 - DNA, 201 bp, Homo sapiens
tgagatggaatctcactctgtcacccaggctggagtgcagtggcatgttgtcagctcactgcaatctctgctgtctggattcaagctattctcctgcctcrgccttcaagtagctgggattacaggcgcctgccactgcgcccagctaatttttgtagttttagtagagacagggtttcaccatcttggccaggctggtct

SEQ ID NO: 355126 - DNA, 201 bp, Homo sapiens
accacgcctggaatagtgctgacctatagttagcactgtatttatggttatcatcatggtctttacatctttttttttttttttttttgagatggagtctygctctgtcccccaggctggagtgcagtggcacaatctcggctcactgcaagctccgcctcctgggttcacgccattctcctgcctcagcctcccgagtag

SEQ ID NO: 355127 - DNA, 201 bp, Homo sapiens
tgtgagccactacacttggcctcaaatgtttttttatgtaaaacgtaacttgttttagtttcatttttttctttccagaatgaatttttttttttttttttggacagattcttgctctgttgcccaggctggagtgcaatggcatgatctcagctcactgcaacctccacctcccgggttcaagtgattctcctgcctcag

SEQ ID NO: 355128 - DNA, 201 bp, Homo sapiens
atacaaaaattacctaggtgtggtcgtgcatgtctgtagtcccaggatgaggtgggaggatggcttgagccagaggtgaaggttgcagtgagctgagatcrcaccactgcactccagcctgggtgatagagccagaccttgactcaaaaaaaaaaaattattttaaatcctgttaaaaattttcagtatacactttttcat

SEQ ID NO: 355129 - DNA, 201 bp, Homo sapiens
acaggcgcctgccaccacgcctggaatagtgctgacctatagttagcactgtatttatggttatcatcatggtctttacatctttttttttttttttttttgagatggagtctcgctctgtcccccaggctggagtgcagtggcacaatctcggctcactgcaagctccgcctcctgggttcacgccattctcctgcctca

SEQ ID NO: 355130 - DNA, 201 bp, Homo sapiens
ttgcccaggctggtctcgaactcctgagctcagtcaatccacccgccttggcctcccaaaatgctagaattataggcatgagcctctgcactcggcctcayataaatactttttaaggtattttttcaagggatctcttaatggcagaggactgtgaaccgtaggaagtctgggcatatttctttgaaatcttatgtttat

SEQ ID NO: 355131 - DNA, 201 bp, Homo sapiens
caggtgattctcctgcctcagcctcctgattagctgtaatacagtcatgcgccaccaatcccagctaattatgtatttttagtagagacggggtttcaccrtgttggttaggctagtcttgaacccctgacctcaggtgatccgcccacctcagcctccccaagtgttgggattacaggcgtaagccattgtgcccggccc

SEQ ID NO: 355132 - DNA, 201 bp, Homo sapiens
ttcccctccccacattctctgtgtgtaataggcagtcagagccagcagatgtgaaatgagctaagagttctaattaagtgtttttgtgcttttttttttttcaggccaagtgataatagtaaggataattcaacatgtaacattgaagtcgtgaaaccaatggatattgaagaaagcatttggtcccctaggtttggattg

SEQ ID NO: 355133 - DNA, 201 bp, Homo sapiens
tttcaagtcacacagaacttttactgaaatagattatgcattatgccataagggaaacaccaataaattttaaaggatcagtatcttagaaacgatgttcygcaactgtactgtaacaaagttagaacttaaaaggatatctaaaattctcatggtttgtagactaaggaaatgttgataaatgttttaaaaggtcagtca

SEQ ID NO: 355134 - DNA, 201 bp, Homo sapiens
agcccagggaatcaactactgtgttgtttctttggtcctgagctccctagctggtctgccttctctccacctttcagagtcttcttttgttttttttttttatatataatgcctagggattttagttgtcgtttgtggaaagaataaggaaaagtactccatcttcccagaagcaaagtcctggttgacattaaacaaaca

SEQ ID NO: 355135 - DNA, 201 bp, Homo sapiens
gctgatccagaggctggcttgcttctctacctcaagactggtcagatgtaccctgtgcctgccaaccatctagataaaagaggttgagccgttttttttttagttttacttctttgcccacccccccacttcagcttctagtgatacatatttatacctgacaatctactcacagcacttaataggttataatttgtagct

SEQ ID NO: 355136 - DNA, 201 bp, Homo sapiens
ccgatccttgttgagatttagcctggtgataaccaccttgtttgggtgagtacccacgtggacggttgtgctgttggcctactcacgctgcacctgctcartgtagatgacatctttctttctgtacacctggactaccttgccaatttgctgacctttgtagtgtccttgaactacctggacctcgtcgtccttgcggat

SEQ ID NO: 355137 - DNA, 201 bp, Homo sapiens
tatctcctccttacagatgaggaaacaggcttaattaaccgtgacttgctcttagtcatacatctggtagtgcagagttaggattcaaacctaggtgtgaytttatatacaaactgataagcccctaccaccctagagtagttattaagattgcggagcttaaacataaagaaggaactggaataatcatcctgggagggt

SEQ ID NO: 355138 - DNA, 201 bp, Homo sapiens
cacccatcttgccctcccaaagtgctggtattacaggtgtgagacacagcgcctggcctggtatttgttttttgggtttttggggtttttgttttttttttgaattatgaaacatttcccatttttatttataaaattattaattaaatttgcaaaagtagatttacagagcctcaggtaacaaaacaggaaatgaaatgt

SEQ ID NO: 355139 - DNA, 201 bp, Homo sapiens
gggagatttgaaagaaggagcgggagaggctgcgtccgcaccgcctcagactgaccgggcccggggcccagggacccggtgcagctccctgggcacccgaygagcctccggagtcggggcctgcctcccaaggtgttctttggggccacattcagccagagcctggactctccctcgccgagcagttcattgtttcccttg

SEQ ID NO: 355140 - DNA, 201 bp, Homo sapiens
tcaccatgttgtccaggctagtctcgaactcttgacctcaggtgatccacctgcctcagcctcccaaagtgctgggattacaggcttgagccaccacaccyggcccataatgagtttttcatgtgcttatttgtcatctgtatctcttcttcatgtttttgcccattttggattatatgctttgtagtgttgagttttgag

SEQ ID NO: 355141 - DNA, 201 bp, Homo sapiens
caccaatcccagctaattatgtatttttagtagagacggggtttcaccgtgttggttaggctagtcttgaacccctgacctcaggtgatccgcccacctcrgcctccccaagtgttgggattacaggcgtaagccattgtgcccggccctaaaatgtttttaaatctgcaagttttacatatgtagtgaaaaagacatgat

SEQ ID NO: 355142 - DNA, 201 bp, Homo sapiens
tcagcctcccaagtagctgggattacaggcatgcgccacatattttttttttttagtagagacggggtttcaccatgttgtccaggctagtctcgaactcytgacctcaggtgatccacctgcctcagcctcccaaagtgctgggattacaggcttgagccaccacacctggcccataatgagtttttcatgtgcttattt

SEQ ID NO: 355143 - DNA, 201 bp, Homo sapiens
gtataattttattatataacttctgtcctagaaactataaagtatttgtgtagactatccaatataaattagtgtaatctaaaatgcagatttcatagttstagtacattgttggaactctgtgaagagtttctgaaattgctcaacaggaactttttgggtaaaaatacctaaatattttgtacatgtgcataacagatt

SEQ ID NO: 355144 - DNA, 201 bp, Homo sapiens
gcacctggctatttttttgtatttttagtagaaacggggtttcaccgtgttagccaggatggtcttgatctcctgatctcgtggtgatccagctgccttgrcctcccagagtgctgggattacaagcgttagcccctgcacccggcctcaaaaatttttttttctttttttgagatggagttttgctcatgttccccaggc

SEQ ID NO: 355145 - DNA, 201 bp, Homo sapiens
agtgacgaggtttcaccatgttggccaggctggtcttgagctcccgacctcgtgatccacccgccttggcctcccaaagtgctgggattagaggcatgagycaccgtgcccagctgatactatttttaattttagccattttggtaggtgtttggagattttaatttgcatttacccagttaaaatgtgtgtgtgtgtgtg

SEQ ID NO: 355146 - DNA, 201 bp, Homo sapiens
tggctcactgcaagctccgccttccagctcatgccattctcctgcctcagcctcccgagtagctgggactacaggcgcctgccaccacgcccagctaattytttgtatttttactagagatggggtttcatcatgttagccaggatggtctcaatctcctgaccttgtgatctgcctgtctcggcctcctaaagtgttggg

SEQ ID NO: 355147 - DNA, 201 bp, Homo sapiens
tgatgctgcccaaaatagaagaagaaacccagcatctgaagcaaacacacttagaatatttcagcctttggtgtctaatgttaaccctggagtcacaatcraaggataataaaaagaatcaccaaaatatctggctaatgcctgcttcggaaatgtaagtggtccatttagtacagtaagatttcagtagtttggattagt

SEQ ID NO: 355148 - DNA, 201 bp, Homo sapiens
tagcccgttgcctctaggctacacacttgtactacatgttactgtactgaatactgtaggcaattgtaacaacggtaagtatttgtctatctaaacatatygaaatatagaaaaggtagtgtgttgtattaccacaatagctagatgtcactaggcaatggaattttttagttccattataatcttatgggaccactatcc

SEQ ID NO: 355149 - DNA, 201 bp, Homo sapiens
tcgccgagcagttcattgtttcccttgatttcacctctctccctaagttgaggagtttcggccactggaatgtttttataataggaaattgcaaccgccgwaggcttttctcgatgtttagttggattaacttatccttgggggatctctgcaccctcagcatggtgtatataaatgatcagaggaagttaaccacggtca

SEQ ID NO: 355150 - DNA, 201 bp, Homo sapiens
ttcattgtttcccttgatttcacctctctccctaagttgaggagtttcggccactggaatgtttttataataggaaattgcaaccgccgtaggcttttctygatgtttagttggattaacttatccttgggggatctctgcaccctcagcatggtgtatataaatgatcagaggaagttaaccacggtcataatgtggaat

SEQ ID NO: 355151 - DNA, 201 bp, Homo sapiens
agtagagacagggtttcaccatgttggctagactggcctcgaactcctaacttcaggtgatccacccgcctcagcctcccaaagtgctgggattacaggcrtgagccactgtgcccagcctctttcttcttcttttttttttttttcttttttgatacagagtcttgctctgttgcccaggctggagtgcagtggcatgat

SEQ ID NO: 355152 - DNA, 201 bp, Homo sapiens
ttttttttgagatggagttttgctctgtcgcacaggctggaaatacagtggcactgatctctgctcccggcaacctccgcctcccaggttcaagtgattcycctatctcagcctcccaagtaggtgggattacaggcgcctgccaccacacctggctaattttgtatttttagtagagacagggtttcaccatgttggcta

SEQ ID NO: 355153 - DNA, 201 bp, Homo sapiens
gatagcttattttctatatgtagatatgtattttctttttctttctttttttttgagatggagttttgctctgtcgcacaggctggaaatacagtggcacygatctctgctcccggcaacctccgcctcccaggttcaagtgattctcctatctcagcctcccaagtaggtgggattacaggcgcctgccaccacacctgg

SEQ ID NO: 355154 - DNA, 201 bp, Homo sapiens
gattacagatgtgagccactgcgctctgcccatgttagccatttttaagggtacagttcagaggcaaagtacattcaccttgttgtacagccatcaccctrtctatctccagaactctttgcatcttcccaaactgaagctttgtgcccttgaaacaataacgctcccttctttcctcctcccagcctctgacaaccccca

SEQ ID NO: 355155 - DNA, 201 bp, Homo sapiens
ggccaggcttgtctcgaactgctgaccttgtgatccacctgcctccgcatcccaaagtgctgggattacagatgtgagccactgcgctctgcccatgttarccatttttaagggtacagttcagaggcaaagtacattcaccttgttgtacagccatcaccctatctatctccagaactctttgcatcttcccaaactgaa

SEQ ID NO: 355156 - DNA, 201 bp, Homo sapiens
caatacgtgaccttttgtgtcttgcttctttcacttagcctaatgtttgcaaagttcattcatatttcagcatatatgagaccctcattttttttatggcygaatatattctgttgtatggatacaccacattttgttcatccattcaccagctgatggacatttgagttgtttccacttttttgctgtaatgattaatat

SEQ ID NO: 355157 - DNA, 201 bp, Homo sapiens
ttgacagagctcttggcatgagtgaaagcttattcaagaggctggagcagaataagagtgctgttgtacagttaaccgtgcagtacagaatgaacaggtayttgtaacagtgttagctaggagtggttttcatgtttgtttccatctaccaaaactaaagttatcttttgtaattcccttagtaaaattatgtccttaagt

SEQ ID NO: 355158 - DNA, 201 bp, Homo sapiens
tctaatgggattttcacatgtattttaaaaatatttagtagtttaaaaaaaggcttgtcttgctgttagagttgagttttttgtttgtttgtttgtttgttttgttttgtttttgagatggagtctcgctctgtcgctcaggctgaagtacagtggtgcaatcttggctcactgcaacctctgcttcctgggttcaaatga

SEQ ID NO: 355159 - DNA, 201 bp, Homo sapiens
ctctaatgggattttcacatgtattttaaaaatatttagtagtttaaaaaaaggcttgtcttgctgttagagttgagttttttgtttgtttgtttgtttgttttgttttgtttttgagatggagtctcgctctgtcgctcaggctgaagtacagtggtgcaatcttggctcactgcaacctctgcttcctgggttcaaatg

SEQ ID NO: 355160 - DNA, 201 bp, Homo sapiens
cctctaatgggattttcacatgtattttaaaaatatttagtagtttaaaaaaaggcttgtcttgctgttagagttgagttttttgtttgtttgtttgtttgttttgttttgtttttgagatggagtctcgctctgtcgctcaggctgaagtacagtggtgcaatcttggctcactgcaacctctgcttcctgggttcaaat

SEQ ID NO: 355161 - DNA, 201 bp, Homo sapiens
cttttttttttttttcttttttgatacagagtcttgctctgttgcccaggctggagtgcagtggcatgatttcggcttactgcaacctccgcctcccggggttcaagcaattattctgcctcagcctcccaagtacctgggattacaggcgcccaccaccatacccggctaattttttgtatttttagtagagacagggtt

SEQ ID NO: 355162 - DNA, 201 bp, Homo sapiens
tataccaggtactgttgttacagggataactaaagccctcaggaactcagtgtattggtggtagatgaaaataataaaagtgaagaggtttgctggtggakaaaatgtgggtgacaaaagcagcatgggaccctggcagttaacagcatataaggcatagaaggagataatagaatctgttgaagaaggcttaggataggt

SEQ ID NO: 355163 - DNA, 201 bp, Homo sapiens
cctcaggcctgttttgtttttttttttttttttgagacagtgactcactttgtcacccaggctggagttcagtggcatgatcaaggctcactgcagcctcracctccttggctcaagtgatcctcctgcctcagccctccaagtaggtgggactataggtatatgccagcatactcagcttatttttgtattttttgtaga

SEQ ID NO: 355164 - DNA, 201 bp, Homo sapiens
tgctctgttgcccaggctggagtgcactggtgagaccacgcctcactgcagccctgaccttctgggctcaagtgatctttctgcctcagcctcctgagtarctagaactatacaggcatgtaccaccatgcctgcctaatattttcaatttttttatgttgtccaggctggtcttgaactcttgggttcaaatgatcctcc

SEQ ID NO: 355165 - DNA, 201 bp, Homo sapiens
cctcccaagtagctgggaccacaggggcgcaccacctcatttggctaattaaaaaaagaattttttaaaaagagatggcatctcactttgttgcccaggcmagtcttgaatttctgggttcaagtgatccacttgcctcagcctcccaaagtgctgggattacaagtgtgagccaccatgcctggcctatgatgtattatt

SEQ ID NO: 355166 - DNA, 201 bp, Homo sapiens
gtgtgtgtgtgtgtgtgtgtgtgtgtgtgtgtgtgtgtgtgtgtgtttgagacaaggtcttgctctgttgcccaggctggagtgcactggtgagaccacgsctcactgcagccctgaccttctgggctcaagtgatctttctgcctcagcctcctgagtagctagaactatacaggcatgtaccaccatgcctgcctaata

SEQ ID NO: 355167 - DNA, 201 bp, Homo sapiens
ttaggaggccaaggcgggcggatcacttgaggtcaggagttcaagaccagcctggccaacatggtgaaaccccctctctactaaaaatacaaaaattagcygggcgtagtggcatgcgcctataatcctagctttactcgggaggctgaggcaggagaatcacttgaacccaggaggcagaggttgtagtgagctgagatc

SEQ ID NO: 355168 - DNA, 201 bp, Homo sapiens
ctggattccagcaattctcctgcctcagcctcccaaggagcggggattacaggcatgcaccaccatgcctggctaatttttgtgtttttagtagagacagsgtttcaccatgttggccaggcttgtctcgaactgctgaccttgtgatccacctgcctccgcatcccaaagtgctgggattacagatgtgagccactgcgc

SEQ ID NO: 355169 - DNA, 201 bp, Homo sapiens
aacagaagagtgggtaatcattggatttgcattttcctctggctacattgtagagaattgagttcattaatggaagaaaaactaaaagcaaacctggaagstgttgcagtgacccaggctagaggaaattgaggcagggtagtgttggcagagagaatggaatgactttgagaagtatttagaaagtaaaagtggctggca

SEQ ID NO: 355170 - DNA, 201 bp, Homo sapiens
cccagcactttgggaggccaaggtgggcagattgcttgagcccaggagtttgagaccagcctggccaacatggtgaaacccaatctctactgaaaatacaraaaaattaccttagcatggtggtgtgtgcctgtaattccagctactctgaaggctgagtggggagaatcacttgagcctataaggcagaggttgcaatga

SEQ ID NO: 355171 - DNA, 201 bp, Homo sapiens
ttgcagtatttatttagtgtctaccatgtattaagcactttgcaaatccttgaggaatttatggtcttgcgtgtagacatacatattttctttttttttttgacacatggtctcactccagcccaggctggagtacagtggcatgatcacagttcactgcagcctggacttcctgggatcaagcagtccttctacctcagc

SEQ ID NO: 355172 - DNA, 201 bp, Homo sapiens
tagctgggactatagtttcacaccaccatgcttggcgttatttggatgttttttaaaaattgtggttaaatgcacataaaaattaccgtgttaggccaggygcaatggctcacccctgtaatcccagcactttcagaggccgaggcgggcagatcacgtgaggtcaggggttcaagaccaggctggccaacatggtgaaac

SEQ ID NO: 355173 - DNA, 201 bp, Homo sapiens
aatcccaaaggtgtaactgggactcttccaattagaccatggtatgaattagagcaaattatctgaaatttgatgtcatgtcactgtttcagtgttatttkgatttttttttttttttaaacagggtctcactctgtcacccaggctggagtacagtggtgagatcacaggtcacgtaacctcaaacttttgggctgaaac

SEQ ID NO: 355174 - DNA, 201 bp, Homo sapiens
gtgatctgcccatctctgcctcccaaagtgctgagattacaggcatgagccacagagcctggccattttttttctttctttcttaaagctacagcacccartattcccaggtggtctcccatccaagtagtaaccaagctcaaccctgcttagcttctgagataagatgagatcggctgcgttctgggtggtatgggtgta

SEQ ID NO: 355175 - DNA, 201 bp, Homo sapiens
gtttgagggtgcagtgagctatcattgcaccactgcactccagcctggtcaacagtgagaccctgtctctttagagaaatcaggcagaggaaggcagagaycctgacccaagaggaagcatgaaagacagcaggagcaatggcaagcggcgtaacgcggccctgcagagagtcccagcctccataggtgccttgttcagcc

SEQ ID NO: 355176 - DNA, 201 bp, Homo sapiens
ccttgttcagcccttgcaaggaaggggtcgttttcaccagtttttctcagttaggctgtgatcagtacccagttcaagtcaatcccctgggccagtagtcyacatgtgtggtattcatcatgggctcactatttttcccttcccaggtataaactcccaagctccccagttcactgcttgactgatggaggaaaacagtga

SEQ ID NO: 355177 - DNA, 201 bp, Homo sapiens
cccaacagtgagcacgctgtcgaggcgatgctggctgcggcaagcattggtgccatctggagctccacgtccccggacttcggtgtgaatgtgagtcaggrtctgtgacagagggggcaccccttgccctgtgagcatcctgggcaggggctgcatgggctgaattcccaggggagccggacagcagcgtgagcccagcgg

SEQ ID NO: 355178 - DNA, 201 bp, Homo sapiens
gtggtattcatcatgggctcactatttttcccttcccaggtataaactcccaagctccccagttcactgcttgactgatggaggaaaacagtgattgggtratgaccgttttcttgtttctgcagttcttggccaggctgactgagagatttgtgctgggagtggatatgttcgtggagacactgtggaaagtctggaccg

SEQ ID NO: 355179 - DNA, 201 bp, Homo sapiens
agaattgcttgagcccaggaggcggaggttgcagtgaaccaagattgcaccactgcactccagcttgggcgacagagcgagactccatctcaaacacacacacaacacacacacacacacacacacacacacacaaaacacacaataccatcattacagcttataacaattccttaacatctaatgcaggtccattttctg

SEQ ID NO: 355180 - DNA, 201 bp, Homo sapiens
ctttctgtatgtattgttttgtgtgcacctagacaagttcatctgtaaattgttagaaatggaattgctgagtcaaagggtctgtgcatttaaaaagaagtttttttttttttgagatggagtctcgctgtgtcaccaaggctggagtgcagtggcgcgatctcggctcactgcaagctctgcctcccgggttcacgccat

SEQ ID NO: 355181 - DNA, 201 bp, Homo sapiens
aattgcttgagcccaggaggcggaggttgcagtgaaccaagattgcaccactgcactccagcttgggcgacagagcgagactccatctcaaacacacacacaacacacacacacacacacacacacacacacaaaacacacaataccatcattacagcttataacaattccttaacatctaatgcaggtccattttctgat

SEQ ID NO: 355182 - DNA, 201 bp, Homo sapiens
tgtgcacctagacaagttcatctgtaaattgttagaaatggaattgctgagtcaaagggtctgtgcatttaaaaagaagtttttttttttttgagatggartctcgctgtgtcaccaaggctggagtgcagtggcgcgatctcggctcactgcaagctctgcctcccgggttcacgccattctcctgcctcagcctcccaa

SEQ ID NO: 355183 - DNA, 201 bp, Homo sapiens
acaaggtcttgctttgtcacccagactggagtgcagtggcacgaacacagctcacttgcagcctcaacctcccaggttcgatgatcccccagccttctccygagtagctggaaccacaggtacatgccaccatgcccagctaattttttaattttttgtagagacagtgtctggccatgttgcccaggctagtctctaact

SEQ ID NO: 355184 - DNA, 201 bp, Homo sapiens
cagtttgcagggctttatgaaagcatagcttagtttttggtgactccaaattagaaaaaatgggaaaaaagaagaaaaaaaattgaaaacgttattttgcrggcttgtagtcaagaaaaattagaatttggtccaaactgtagacaataataaaaattgaaaaacattaagcaagactagaatctaacaacaggtgtacta

SEQ ID NO: 355185 - DNA, 201 bp, Homo sapiens
gagaatggcgtgaacctgggaggcggagcttgcagtgagccgagatcaggccactgcactccagcctgggcgacagagtgagactctgtctcaagaaaacmaaaaaaaaaaaagaagaagaaaatgagtctctgctctcaggtttcatctgatctttcatggctagaatggtttattcctagacaggtaggtcccaagtta

SEQ ID NO: 355186 - DNA, 201 bp, Homo sapiens
attgctgagtcaaagggtctgtgcatttaaaaagaagtttttttttttttgagatggagtctcgctgtgtcaccaaggctggagtgcagtggcgcgatctyggctcactgcaagctctgcctcccgggttcacgccattctcctgcctcagcctcccaagtagctgggactacaggcacccgccaccacgccctgctaatt

SEQ ID NO: 355187 - DNA, 201 bp, Homo sapiens
ggctcacgcttgtaatcccagcactttgggaggccgaggcgggtggatcacgaggtcaggagatcgagaccaacctaacacagcgaaaccccatctctacyaaaaatacaaaaaattagccgggtgcggtggcgggcgcctgtagtcccagctactcgggaggctgaggcaggagaatggcgtgaacctgggaggcggagc

SEQ ID NO: 355188 - DNA, 201 bp, Homo sapiens
ccattctcctgcctcagcctcccaagtagctgggactacaggcacccgccaccacgccctgctaattttttgtatttttagtagagacggggtttcaccgygttagccaggatggtctcgatctcctgatcgcgtgatccgcccgccttggcctcccaaagtgctgggattacagacgtgagccaccgcgcccggcctttt

SEQ ID NO: 355189 - DNA, 201 bp, Homo sapiens
aggcaggagaattgcttgaatccacaaggcagaggttgcagtgagccgaggtcgcaccactgtactctagcctgggtgacagagtgagactctgtctccgccccccccaaataaattgccatgtattgacaaacatgtacaagtcacacatactttaaataattgtaggttgagcacggtggatcacacctgtaatcccag

SEQ ID NO: 355190 - DNA, 201 bp, Homo sapiens
gtttacgctcatagccaagtctcatcttcgctgcaaactcagccaacaccaaccatctgccggatgtgggtggaaccccatggtggtgtgacccctgcccsttggatgcttatggcccagcaggggagtcgcgtgtgaatccagacaaacagaaacacccactgcaggggggagaaggagggaaaaagggagccagctgac

SEQ ID NO: 355191 - DNA, 201 bp, Homo sapiens
ctcccgggttcaagcgattctcctgcctcagcctcctgaatagctgggattacaggcgcctgacgccatgcccagctaattttcatatttttagtagagayggtgtttcactgtgttggccaggctgacctttttttcccccatgtttggggcttgtctttgtctctcaaatgcgaaatataaatcatgtttttacaagtt

SEQ ID NO: 355192 - DNA, 201 bp, Homo sapiens
tcggcctcccaaagtgctgggattacaggagtgagccaccgcgcccagctaaatttattttttatactgttccatccacccctcaaacccaaccacactctatgaccacacaacagacgaataatcctttcagaatgtatatcatgtcacttccccactcaaaagctgccaggtggcttctcatcacactttgaataaaac

SEQ ID NO: 355193 - DNA, 201 bp, Homo sapiens
ctcttgggttttgcaaacttgtcagaaataaatcactaactttagaaagctttggtgcaagagccttgaagagtttctggtgttttctttcccgcctgcaycctagcatcactgtcctggtaactggggccaagtggctgtcagtgctggaagagaaggccatgaagccgggtgagtgtgcctcttcagtactcattccct

SEQ ID NO: 355194 - DNA, 201 bp, Homo sapiens
gcgtagtattccatagtatggatgtaccacaatttgcttatccattcacttgttgatggactttttggttgtttcctatttggggctattacaaataaagygactatgaacacttatgtataggactttgtatgaacatacttttcacttctcccaggtaaatacttaggaccagaatggctggattatattgagggtata

SEQ ID NO: 355195 - DNA, 201 bp, Homo sapiens
cctctgcctcccaaagcactgggattacaggcatgagccactgcgcccagccggtcccatcgttttcttatctttattcctgatgaggatttgaagttgcrtggtcatattttctcctctgctttcccctgggggctggagaggaggtggggaagctcaaccttgagacatcaactccggcacatctcgtacttagtaact

SEQ ID NO: 355196 - DNA, 201 bp, Homo sapiens
ccccaacctgcctcccggacagggcagctggccgggcgggggctgaccccccacctccctcccggaccgagatggcagcagtacagtccagcttcggctcrgcatcagtagagatgaggttgtgccatgttgcccaggctggtcttgaactcctgggctcaagtgatctgcccgcctctgcctcccaaagcactgggatta

SEQ ID NO: 355197 - DNA, 201 bp, Homo sapiens
actcgttcgatgagttttccttcaattagcttgaatctctgagatctaactgcctcccctggtcccaggaagtttccaaatctggccaccgtccccctggmatcctggcttttctgggggtagaaacagagggaagtgcacgggtggaatcagtgggtccggtccagcattctgggacgttcatggcgtgtttccctgcgt

SEQ ID NO: 355198 - DNA, 201 bp, Homo sapiens
accacaaaaaaactgattttagacagctgagaatctatatataactgacacataagtatgctatacatatctgtatgtttagaaaatgtttaaaagaggcygggcgcggtggctcacacctgtaatcccagcactttgggaggcctaggtgggtggatcacttgaggtcaggagtttgagaccagacttgccaatatggtg

SEQ ID NO: 355199 - DNA, 201 bp, Homo sapiens
tatattggggacagccaaggtccctgtgagctatgctttctttgaggagacgcctggccgcgatgccctggacccttcagaggtgagctggttccttgtgycccagccattttgtgggtctcagttggatacggatttgacctgatcatagttactaggatttgggactttgagttttccagaaaacactagaaaatgatt

SEQ ID NO: 355200 - DNA, 201 bp, Homo sapiens
gaggcacagagaagggatgcccttgccccacttcaccaggacgccctctgtgcgccccttgcccgctaacctagattcttaatcacaaacacggggtggcraacctgcatttccggggagcggttcacggggatgaagacggcgggcttagccagggccctgggcagtggtggggctgcagctggaggaggaggaacagtc

SEQ ID NO: 355201 - DNA, 201 bp, Homo sapiens
ggcagcaaggagaggatgaagggcagacgcgtacaactctaggcaaataggaaaaaaaaaacgagtttttttttttttgaggtggagtttcactcttgttkcccaggctggagtgcaatggcgtcatcttggctcactgcagcctccgcctcctggcttcaagatattcttctgtctcagcctcccaagtagctgggatta

SEQ ID NO: 355202 - DNA, 201 bp, Homo sapiens
cttaaaaaacgacacaaaccagtcgggcgcggtggctcacgcctgtaatcccagcactttgggaggccgaggcgggcagatcacccaaggttgggagttcragaccagcctgaccaacatggagaaaccccgtctctactaaaaatacaaaattagccgggcttggtggtgcatgcctgtaatcccagctacttgggaggc

SEQ ID NO: 355203 - DNA, 201 bp, Homo sapiens
ttttaatgagctttatcccttccttataattgcagtgggaataaggacccttatgccagtgatcacagttagtttacaaatcgcatcccttacttaagcargggcctaagcagccgattattggctcgggggctttaagatcattgtgcttcgttttctgcatgtttttcctgacttgttccttacccagctgggtgcagg

SEQ ID NO: 355204 - DNA, 201 bp, Homo sapiens
aaaatacaaaattagccgggcttggtggtgcatgcctgtaatcccagctacttgggaggctgaggcaggagaatcgcttgaacctgggaggtggaggttgyggtaagctgagatcacgccattgcactccagcctgggtgacaaagcaagactctgtctcaaaaaaaaaaaacaaaaaaaaacacgacacaaaccaaacca

SEQ ID NO: 355205 - DNA, 201 bp, Homo sapiens
ggagtgcagtgtcgtgatcacagttcactgcaatctccacctccccagttcaagccatccttccacctcagcctcctgagtagctagggttgcacgcgtgygccaccacactggctaatttttgtatttttagtagagatgaggtttctcaccatgttggccaggttggtcttgaactcctgacctcaagtgatccacccg

SEQ ID NO: 355206 - DNA, 201 bp, Homo sapiens
ggctgctcaacgtgtgctactggtcccattctgcagatgtgaaaacgaaggcacagagatgttaggggatctgcctcaactcccagcctgtctgtggaactttttttttttttttttttttttgagatggagtctcgctctctcacccaggctagagtacagtggtgcgatcttggctcactgcaacctccgtatcctggg

SEQ ID NO: 355207 - DNA, 201 bp, Homo sapiens
gctcctgtgagactggcctgcctcaggcactgcagtgcatgtgggaacctccctagggtgccaacccagtcgcctctttcgtaatcctgagaaggagaacragaacgctgcgtctcttttcttttcctcgtctctttaaatgtgtgtgctttaacccaatgtctcagacacttcatgagctcctggtttctcctgtaaagt

SEQ ID NO: 355208 - DNA, 201 bp, Homo sapiens
tctccttcagatcttgactctaacagagtgatgtcttctccagcaactctatgggatgctgcaacccacccaatggcctcttctgttttatctgctcactrtagccacataaatttctatatgtttattctttgcctgtctcctcctatacagcaggtaaactcagggattttctaaaaatctccctttctgctatgtctc

SEQ ID NO: 355209 - DNA, 201 bp, Homo sapiens
gggcgacagagtgagactctgtctcaaaaaaaaaaaaaaaaaattgtatgttcagcaagagtttattggacactctttgtgtctaagacatcttgtaatgyaagactcagagataaactgaagtcgtgttctgcctgcagaatattacattctaatcatggaaataaggccaacatacacagaaacagttgacaatctata

SEQ ID NO: 355210 - DNA, 201 bp, Homo sapiens
ttggcttttccttttaaaataaagttgaggctgggtgcagaggccgggtgtggtggcccaggctggagtgcactggcatgatcatggatggctcactgcarcctcaatctcccaggctcaagcaatcctcccacctcagcttcctgagtagctgggactataggcacacaccactatgcatggctgatttttttttttttt

SEQ ID NO: 355211 - DNA, 201 bp, Homo sapiens
tgaaagactgaaaaattgctcccctgtttttagatcctttcttcatattgcacaccctgtgtgagttgtggaaaatcattggaatgttattccaatagggtttttttttttaagtatagaaaaatcatggagacatggaggcttaaaagggttcgttcattcattcatcttttcactcattcatttgcaaaggtgtgtagt

SEQ ID NO: 355212 - DNA, 201 bp, Homo sapiens
gaaaggaatcgcagatgtccccgagtggttcaaaggcagtcggctcaactatgcagaaaacctcctgcggcacaaagagaatgacagagttgccctttacrttgcaagtaagtcctgatggcgagacctgggatttcctccgtggaagttctagatggtgcatgcatgcggtgccacatatttggagagataggatttcta

SEQ ID NO: 355213 - DNA, 201 bp, Homo sapiens
ttgacttcatattttgtgtatctggttataaattttgtatagcatttaatttggcacttaatataaatccatttgatttgaatagtgtgtgtgtgtacatggtgtgtgtgtgtgtgcactttagtttcgtgagccttgggaaactgattctacaaatatcttatatagagataaatgtatcaggcatttttttgcaaagcg

SEQ ID NO: 355214 - DNA, 201 bp, Homo sapiens
tgcgccaccacgcccagctaatttttatatttttagtagagatggggtttcaccatgttggccaggctggtctcaaactcctgatctcaggtgatccaccyaccttggcctcccaaatgctggcatgagccaccgtgcccagcctggaattgttaatattcttagaatgatgatagtatcatggttttgaggtgaatgatg

SEQ ID NO: 355215 - DNA, 201 bp, Homo sapiens
aactacctaattttctgctatggaaaatatatcagttaggtagaacccacataaacgaaagctctggggacgcttcaataatactgaagagtgcaaacggtcttgagactgagaggtctgggaaacactggtttagcctccagtctgcaggggacaggtgtgaaagtcagctcccaagtcaaccacatttagtcaaaatgc

SEQ ID NO: 355216 - DNA, 201 bp, Homo sapiens
ccaccatgctagctaagttttatattttagtagagacggggtttcaccatgttggtcaggctggtctcaaactcctgacttcatgatcggcctgcctcagyctcccaaagtgctgagattacaggtgtgagtcaccatgcccggccaatttttttttttttttttgagacagggtcttgttctgctgcccagactggagtg

SEQ ID NO: 355217 - DNA, 201 bp, Homo sapiens
cgcctcccaggttcaagcgattctcctgcctcagcctcccgagtagctgggattacaggcacgtgccaccatgcccagctatttttttttttttttagacrgagtcttgctctttcacccagggtagagtgcaatggcactatctcggctcactgcaacctccgcctcctgggttcaagcgattctcctgcctcagcctcc

SEQ ID NO: 355218 - DNA, 201 bp, Homo sapiens
cttgggaggctgaggcagaagaatcgcttgaacctgggagggggaggttgcagtgagctgagattgtgccactgcactccagcctgggcgacagagcacarttccatctcaaaaaataaaaaaaccccaaaaccaaatttctgttgtataaagctcagagaggtcaagtgacctgcacaaaatggaacagctaataaggaa

SEQ ID NO: 355219 - DNA, 201 bp, Homo sapiens
agcccccaaaagttgtaggcaaggggcaggtggtcctggagcttgctctcctggtttccatgcgtctgggcagagcctgacgtgttgggtgtcgtctttgwctttaggatctctcactgagtaggtgtttaatgagtatttgtggaacacatatgttactggggatggttgttttccgttggcattaatccctactttcag

SEQ ID NO: 355220 - DNA, 201 bp, Homo sapiens
agcactccaaggaaggaagcaaaggctgaagcccccaaaagttgtaggcaaggggcaggtggtcctggagcttgctctcctggtttccatgcgtctgggcwgagcctgacgtgttgggtgtcgtctttgtctttaggatctctcactgagtaggtgtttaatgagtatttgtggaacacatatgttactggggatggttgt

SEQ ID NO: 355221 - DNA, 201 bp, Homo sapiens
cccccagaccatttctcctcagatgaatttggctcgcttggacatgctcaaggcttctgaggtgtgtccatcttattaatggattgccaagatttcccttmtaaggttaatctgagctatttcatttttagagagttatgatgacttgtaccattggtccgttgagtcatattcagacttctgggcagagttctggaaatt

SEQ ID NO: 355222 - DNA, 201 bp, Homo sapiens
gggagcgtgggagcagaagagtgtgtctgaagagtcgcatttgatgagagggctgagttgctgacagtgggaaagtttccacctgaagtcggccgcttttkctgtcgtctcccagggtccttgtggtgtcaagaggccattgtggctgcatccttccagattcatggggctggccgcgtctgccttccttagtgatgctgt

SEQ ID NO: 355223 - DNA, 201 bp, Homo sapiens
gagctgtagtctgccgtctggttagttgttgcctctggcatttgcctgagggcccgatgaggcagctgttcccagttctagctaatcctcactgtgtggtrtggacaatgcatttgttacctattgctggtgacaaatcagcccaaaagttagcgacttaaaacaagaataaacctttatcacctctgagtttctgtgggt

SEQ ID NO: 355224 - DNA, 201 bp, Homo sapiens
ctattcagtgagctctctctgtatgtcgggctccatctggcacctgatatgtatcaactaatgtaatcctctcagtaatcctaccaagtaggtggtagtartagccccatttcacagctgaacaaaccaaggcacgaagtctcagttaagactttgtagctgtaggcagtggagctgtagtctgccgtctggttagttgtt

SEQ ID NO: 355225 - DNA, 201 bp, Homo sapiens
taaaataaaattttaaggctgggcgcagtggctcacgcctataatccctgcactcggggaggccgaggcaggtgggtcacttcaggttgggagttcaagaycagcctgaccaacatggagaaaccctgtctctattaaaaataacaaagttagccggacgtggtggtgcatgcctgtaatcccagctactcgggaggctga

SEQ ID NO: 355226 - DNA, 201 bp, Homo sapiens
agggctgaaaattcagaagcctgtagggaccagacaggtgcccaagataataatagttactattcagtgagctctctctgtatgtcgggctccatctggcrcctgatatgtatcaactaatgtaatcctctcagtaatcctaccaagtaggtggtagtagtagccccatttcacagctgaacaaaccaaggcacgaagtct

SEQ ID NO: 355227 - DNA, 201 bp, Homo sapiens
actttccaggctgggtgcagtggctcaagcttgtaatcccagcactttgggaggccaaggcgggtggatcacttgcggtcgggagttcgagaccagcctgrccaacatagtgaaatcccgtctctaccaaaaaatacaaaaaaaaaaaaaaaaaaaaaatagccaggtgtggtggtgggttcctgtagtcccagctactca

SEQ ID NO: 355228 - DNA, 201 bp, Homo sapiens
caagtgtccttctgtgtaccacaagctgcacgtcggctctctgtgcaagcagctgggatggagtttgccaacaaatagaaggcttgggccctgttctcaartagctccgggtggctaggggagagagctcatgtgaagatagtgccacacgttagtggacgctgggcattccacgaatggggcattggtgttgacattctg

SEQ ID NO: 355229 - DNA, 201 bp, Homo sapiens
gcgaactcgtatcctctcctctgtgtcccagcagaggctcacttgtagcctgtatacagtatggggccatgctttggactggatgtcagtagagagcaagscacacatcctcagcagccttgctcccgccctgcaggcttcagggaggaaggcaggggcattccccactccggccgcctctccgtgagcccgtcttcccag

SEQ ID NO: 355230 - DNA, 201 bp, Homo sapiens
acctcctgtctcatcctgtgacttagaatgccttcactgtctgggaatggagcctagtagatctcagcctcattttacccagcccccactcaagatggagytgctctggttcaaatgcctctgacattaagaccagctggctgttaaccttaactttagccaagacaaaccccaattcagttacttacctagggatgggtc

SEQ ID NO: 355231 - DNA, 201 bp, Homo sapiens
cagctcactgcaacctccaccaacccaggctcaggtgatcctcccacctcagcttcccaactagctgggaccacaagtgtgcaccaccacatctggctaaygtttgtattattattattttttttttttttctgagaccgagtattgctctgtcgcccaggctagaatgcagtggccgatctcatctcaccactgcaacct

SEQ ID NO: 355232 - DNA, 201 bp, Homo sapiens
gagcttgatgggttaaaaaaaaaaacacttcacttgctctgtgtgtttcagctatgaggcagtgaggggaagcattattagccatggtgaaataacaatgkgtggtattatttaatcctgcaattgttttaggtgggcctaagttctttcaggcccagggatttggggctcttcatgatgttcatgtcaggaagatcgtgt

SEQ ID NO: 355233 - DNA, 201 bp, Homo sapiens
acttaaaatattctctaaaagacagcccttggccctgtcagcagtgctgattaagcaacttgaaaccttcactcgttcgatgagttttccttcaattagcytgaatctctgagatctaactgcctcccctggtcccaggaagtttccaaatctggccaccgtccccctggaatcctggcttttctgggggtagaaacagag

SEQ ID NO: 355234 - DNA, 201 bp, Homo sapiens
tcctcccccagaccatttctcctcagatgaatttggctcgcttggacatgctcaaggcttctgaggtgtgtccatcttattaatggattgccaagatttcycttctaaggttaatctgagctatttcatttttagagagttatgatgacttgtaccattggtccgttgagtcatattcagacttctgggcagagttctgga

SEQ ID NO: 355235 - DNA, 201 bp, Homo sapiens
attttccccccttcaggtttaaatgttcctgtttttctacctttccctcgcagtatacgctcaacggcaagaaagtggaagttgccgtcaaacagatcatygctggaaaagccgtggagcaaggaggtgctttctcgaaccccgagaccctggatctgtaccgggacatccctgagctgcagggcttctgagtcagactgg

SEQ ID NO: 355236 - DNA, 201 bp, Homo sapiens
gcgcgatctcggctcactgcaacatccacctcccgggttcaagcgattctcctcctgcctcagcctcccgagtggctgggattacaggtgcccgccaccamgcctggctaattttttgtattttcagtaaagacgggatttcaccgtgttcgccaggctggtctcgaactcctgacctcaggtgggccaccgcgccgggcc

SEQ ID NO: 355237 - DNA, 201 bp, Homo sapiens; identical to SEQ ID NO: 75986

SEQ ID NO: 355238 - DNA, 201 bp, Homo sapiens
aacttatatgatcactgagcacgctctaatggtaaggataaattaatgttagaggaaagcggtcccgatccagaccccaagagagggtttttggatctcaygcaataaagaattcaaggcgagtctacagactaaagcaaatgcaagttccttaggaaagtagaggaataaaaagatggctactccatagacagagcaccc

SEQ ID NO: 355239 - DNA, 201 bp, Homo sapiens
aggatcctgcccctgtggaatttgcattctggtgttaaaggaatgaacacaaatacgtagatctctcaaagatgaatctccctctgggtggaaatggactmatgcctggcaaatgcagtaacagggagacaaagagccagaggtggccccagaatttggaggccagggagggggcaacctagaagtcatgtttatatagca

SEQ ID NO: 355240 - DNA, 201 bp, Homo sapiens
atgtctagaattcaactgaagtcaggatacagaccctgaggttgcgcacagtcctgtcaggagagactccaaagtggggattctttggcaaggaagacagrggtttctcactgagcaggcagccatcagtgtccgccatgttgattttctttaccgactctctccctaagacagaaattttgtatttttccagcttcttct

SEQ ID NO: 355241 - DNA, 201 bp, Homo sapiens
tcttactttgatataaagtgctcgttttttatgaccatttaagcctgtgatgaaaatgtctagaattcaactgaagtcaggatacagaccctgaggttgcrcacagtcctgtcaggagagactccaaagtggggattctttggcaaggaagacagaggtttctcactgagcaggcagccatcagtgtccgccatgttgatt

SEQ ID NO: 355242 - DNA, 201 bp, Homo sapiens
ggccccagtacgctctgctttgattctaagtgggggaggaggagggtcacccaaattggatcacagctttcatttgcattgcttacaaaacggataccccrcaagctgacagaagctgctgtgtgtgtgtgagtgtgtgtgtgtatgtgaatgtatacaacaatttagacagtggcaggctgtatttgaagcctatggaat

SEQ ID NO: 355243 - DNA, 201 bp, Homo sapiens
gttctatgtatatagaagtattcacagatttatatttatataaaaataaatgtatatatttacactatgggatgtagagctatctgaatataacatgtatrtacaatttatgaaataataaatgcacaccaagtagtcaccacccagcttaataggggatgaccagtatcgtggaaatccctccctaaattcagcctcttt

SEQ ID NO: 355244 - DNA, 201 bp, Homo sapiens
gcggggagtgttgatgcaaccacaccatggaggccagaaaaagaaatcctcaagcaacactttggcctgatggactcaggggacctgcctgagtctgcagktggaatcacccctttccctttcttctggcctgacctcggggagccactgtgtcggcagctgctgtctgtgcagatgctgcagcttcctgtccctctgctc

SEQ ID NO: 355245 - DNA, 201 bp, Homo sapiens
gcagtgtttcacgcctataatcccaggactttgggagggccaggcaggaggactgcttgaggcttagagtttgagaccagcctggacaacatagcaagagyccatctctacaaaataataataaagcctggtgtggtggctgcacctgtagccctagctacttgggaagctaaggcaggattgcttgagcccgggagtttg

SEQ ID NO: 355246 - DNA, 201 bp, Homo sapiens
cagggtgacaggtgccctcccagaactctagtggtgggtgcagatggctctgtgacaaggaagggtggggaatggtgatgggggacagtcgcagcccctcmcacaggaatgaaggaatctggctgcttctgtgcccgactccatctctcctggacggctgctgctttgcttgagctgggatgggggttaccccgctgggtc

SEQ ID NO: 355247 - DNA, 201 bp, Homo sapiens
ggctttccctgcatttcctgtttgaacagtgtcctggcctccatctttagctttgacagtgtttaccatgggggtgctgagggtgagttcttgtgtatgtkcacatctttctggtggagtggaggcctcttgaggacaggaaccttgtgggtctacctccttttcttcggagctcagctgactgcctggcaaacagcagat

SEQ ID NO: 355248 - DNA, 201 bp, Homo sapiens
cctggagtgcacactgacacgatcatggcttactgcagcctccacctcccaggctcaagtgatcctcccacctcagcctcctgagtagctaggaccacagktgcatgccaccacgctcagttatgtttttttattttttgtagagacggggttccaccatgttgcccaggctgttcttgaactcctaacctcaagtgattc

SEQ ID NO: 355249 - DNA, 201 bp, Homo sapiens
ttttgtatttttagtacaaaaatactaactgtatttttagtaatatggggtttcaccatattagccaggatggtctcgatctcctgactttgtgatccacmcgcctccgcctcccaaagtgctgggattacaggcgtgagccaccgcacccggcctttttttttcttttttttcaagacagggtcttgctgtcacccaggc

SEQ ID NO: 355250 - DNA, 201 bp, Homo sapiens
aagatggattcattttatccatcttctattaatgcagaaaatttgaaatcgattgtatggtgactgaatgaagatgtgcatttatatcattggtctggtasatgagcttgatgggttaaaaaaaaaaacacttcacttgctctgtgtgtttcagctatgaggcagtgaggggaagcattattagccatggtgaaataacaa

SEQ ID NO: 355251 - DNA, 201 bp, Homo sapiens
gtccccagacgctatgttctgctgccctaaggcaactcctgttaccagtatcttgtggctcctgttagggatattcaatgactacatgagcaaataagtaygtatctttttgttttgaaacagagtcctgctatgtttgactagtgtgcagtggcatgatcatggctcactgtggcttcgacttcttgggctccaacaatc

SEQ ID NO: 355252 - DNA, 201 bp, Homo sapiens
gggtttcaccatgttagccagggtggtctccatctcctgatctcgtgatccacctgcctcggcctcccaaagtgctgggattacaggtgtgagccaccacrcccagcattattttaaaatgaattaacacttacatattttttggtttcttagttttatttataatttggtaattatttctagttgtgttactaattttaa

SEQ ID NO: 355253 - DNA, 201 bp, Homo sapiens
agttagcaccaacctgtggctccatcttaggtggtttcccagggacacaggaagctgagggggcagcgctggggggagctgcctagcgcccgctgaagcckcatccctcctgtctttgcaggtcggctggatgatgtggaactggatggtgtcccttctggccacaggagcggccatggtcttgtacgatggctcccccct

SEQ ID NO: 355254 - DNA, 201 bp, Homo sapiens
tcctgcctcagcctcctgagttaactggtagctgggattacagtcacatgccagcatgcctggctaatttttgtattcttagtaaagatggggttttgccrtgttggccaggctggtttcaaactcctgacctcaagtgatccgcccacctcagcctcccaaagtgctgggattacaggcgtaagccactctacccagcca

SEQ ID NO: 355255 - DNA, 201 bp, Homo sapiens
acaggcaccagtcaggcctcatgtaaatgagcagcacaggctgaggagaccacagagtggggtgggactgggtgggaggggcacacaggccatttaagggycagcagcttggtggggacactgctggtgtggccggatcgtccaactagtcgagactaggtgggaacatgaattcaccttgtcgcccaggacggagtgcag

SEQ ID NO: 355256 - DNA, 201 bp, Homo sapiens
atcctgccaaacctgaagctctctctgcctccccagtgatgggttttcttccgcttgtgaaacggcctcctcagcaaatgtccctccaaggcccttctccygggtggactgggagaacacaggcaccgctggaaggcttgggggacccagcctgcccctcctgctctgccaggttgctgtgaggcccgaccccacactgag

SEQ ID NO: 355257 - DNA, 201 bp, Homo sapiens
cagtcaggcctcatgtaaatgagcagcacaggctgaggagaccacagagtggggtgggactgggtgggaggggcacacaggccatttaagggtcagcagcytggtggggacactgctggtgtggccggatcgtccaactagtcgagactaggtgggaacatgaattcaccttgtcgcccaggacggagtgcagtggtgcaa

SEQ ID NO: 355258 - DNA, 201 bp, Homo sapiens
ggagcggagtgtccgtgactagtcctgggggatgccatgggaaagtggggggtgactgccctcccgtgggacccctgggacttgcttcactccagagctgyggtgtggccctgacctcttctctctttccagtgacggcaccctcaaccccaacggggtgcggttcggcagctcggaaatctataacattggtacgtgctt

SEQ ID NO: 355259 - DNA, 201 bp, Homo sapiens
tgggcctgaagaccccctctgaggaagcattgtctgctcagtctgcaacatggctgactgtccctcatcttggacccttcctgtgtcattcctggggtggsgcatccctgtgccagcttccttcccgagggatgggtctgggcgtgatccaagtctccctgccctgtgatggggttctcgggtagggagtgtcaggatggg

SEQ ID NO: 355260 - DNA, 201 bp, Homo sapiens
aaggggcggccgggcagaggcgccccccgcctcccggacggggcggcggccgggcggaggcgcccccaacctgcctcccggacagggcagctggccgggcrggggctgaccccccacctccctcccggaccgagatggcagcagtacagtccagcttcggctcggcatcagtagagatgaggttgtgccatgttgcccagg

SEQ ID NO: 355261 - DNA, 201 bp, Homo sapiens
tttttgacacggtatctcgctctgttgcccaggctggggtgcagtggcacgatctcagcttctcctgcctcagcctcctgagtagctgggattacaggcgygcgccaccacgcccagctaatttttgtatttttagcggagacggtgtttcaccatgttagccaggctggtctcaaactcctgatcttgtgatccacccac

SEQ ID NO: 355262 - DNA, 201 bp, Homo sapiens
actgtgatgtttgtaggtgaatgtgattgtttttagtggatgtgcatagcattgtacagtatggattatactatactttgccgttcccatgttgaaggackttagtttgtttctagtttttcaccctaggcttagtgaagtaagactcacccagagtcttggggccctgcttttattaattgttttatttttttttatatt

SEQ ID NO: 355263 - DNA, 201 bp, Homo sapiens
cacaatttttctcttcctgtgtataaaggggagattcaggcccggaacctgggcatggccgtggaagcgtggaacgaggaaggtgatggctccaccaactrtttctttctgtgattaggcgtgagttgggagtgtgggagcgttcggatgtgtaactttgcttggacatagttctccaaaacagccctcggaggggaggcc

SEQ ID NO: 355264 - DNA, 201 bp, Homo sapiens
tggcctttacccactagaggcatttaggatgacaatgaattttcagccactcaggccaccataaaggtattttctcaaatgttccacccccagaggacccyataacctgtgcgccctccctagggggccctggagggagggcagggttagcaaaggactggccaactcactctttggtgtgatacatgcggttcccagtgc

SEQ ID NO: 355265 - DNA, 201 bp, Homo sapiens
gcccaggctggtcttgaactcctgggctcaagcaatcctcctgcgtcagcctcccaaagtgctggtattacaggggtgaaccactgcacccagcccccatytctattaaaaaaaaatctctttgagaactgtgatgtttgtaggtgaatgtgattgtttttagtggatgtgcatagcattgtacagtatggattatactat

SEQ ID NO: 355266 - DNA, 201 bp, Homo sapiens
gcacacctctgcccagtgcttggattcatcccaaggacacagtccgctgggcagccaatacgcacagtcccttctcatgatctgaggcagtgatgttccaygaagtcactgtgaacacggaacccatacggaacccttgctcctgggggaaatagatttatgtacacacacacacctctcacatcgattatagtcttaaaa

SEQ ID NO: 355267 - DNA, 201 bp, Homo sapiens
aattcctacaaggaaaagtggtcatttttctgtggttttatcccaggggagttggggcacactgtagtaaagggatgtatactctccaagatgcaatgccrcctcgaaatgcctgcctggctcatgggtgtcatgagatctgactagtcaccatgtgtgttcctaaggttcctcagctcatcagatctcaccccaaggtgg

SEQ ID NO: 355268 - DNA, 201 bp, Homo sapiens
atagcatattagacagggctgcccttgaaagcgcagtgaggtatattcagcagcgtgtgttgttctgtgagcacaaatgcatagaacggtggattctgaaygttcaagaagagctggacttttctaagtttcataaaaatgtgatcttgtttaagaaaaggggatgggtggagagtttcaagtatggcacatgttttcaca

SEQ ID NO: 355269 - DNA, 201 bp, Homo sapiens
tatgaaagaagcatgggggatggtgggaggagctagtctccctcccccaaaactccagccatctctagggtacagtggtggctttgttggtggcagggtgkgtctggggaagtaagagaacgaaggtgtgggaggtggaaggaccatggtaacccgcctccttgcgtggagggagacccaccctgccattgccttagccac

SEQ ID NO: 355270 - DNA, 201 bp, Homo sapiens
caggcttgtccttctaaggaagtgcatgggttgggtagcactttgtcgggatctgcaccccgtgtgtgctggactacgtgctctgagccaagctccctggkgggtcctgggggccacacagcagcgaccaggggccagcacgctctgtcctcatggggctggcactgggagggggaaggtaaggaaaagacagaggccaac

SEQ ID NO: 355271 - DNA, 201 bp, Homo sapiens
aagttctcagtggttccttgttgaccacaaaattgcagacggctgcctggcagcttccaggccctccacagcagtggggagcttccacagagtcattttcmtaggctaacccagagctgttcctctccttcccttcctctcccttggagacaggtgtagtctgttgccccaggggcttctggacagcagttggtaaatgag

SEQ ID NO: 355272 - DNA, 201 bp, Homo sapiens
cattgctgcgtagtattccatagtatggatgtaccacaatttgcttatccattcacttgttgatggactttttggttgtttcctatttggggctattacamataaagcgactatgaacacttatgtataggactttgtatgaacatacttttcacttctcccaggtaaatacttaggaccagaatggctggattatattga

SEQ ID NO: 355273 - DNA, 201 bp, Homo sapiens
catttagtgttcatgtctctagtctgtcagagtttcctcacttttggtggaggaagggacttaattatgaatttttttttatttttatttttttttgagayggagtcttgctctgtcacccaggctggagtgcagtggcgcgatctcggcccactgcaagctccacctcctgtgttcacgccattctcctgcctcagcctc

SEQ ID NO: 355274 - DNA, 201 bp, Homo sapiens
aaatccatcccagttgttgcccttatcaatagttcactctttttcattgctgcgtagtattccatagtatggatgtaccacaatttgcttatccattcacytgttgatggactttttggttgtttcctatttggggctattacaaataaagcgactatgaacacttatgtataggactttgtatgaacatacttttcactt

SEQ ID NO: 355275 - DNA, 201 bp, Homo sapiens
ccccccagcttctttcacttaatataattattttgaaatccatcccagttgttgcccttatcaatagttcactctttttcattgctgcgtagtattccatwgtatggatgtaccacaatttgcttatccattcacttgttgatggactttttggttgtttcctatttggggctattacaaataaagcgactatgaacactt

SEQ ID NO: 355276 - DNA, 201 bp, Homo sapiens
atgcatacataaacactcgtatatgtatttttcaccttttaggacatgcgtgtgttccccattgctgatgacatcttccttggcttttctgacatttgtaraagaataagccacatgttttgtgtacccaataggattgtaagaatcttcatttttggccaggcatggtggctcacgcctgtaatcccagcactttgggag

SEQ ID NO: 355277 - DNA, 201 bp, Homo sapiens
caccacacccagctaatttttgtatttttagtagaggtggggtttcttcatgttggccaggctgattttgaactcctgacctcaggtgatccacctgcctyagcctcccaaagtgctgggattacaggcatgagccaccgcgcctggcctatccttgttattttttatttttatttttttttgagacggagtctcgctctg

SEQ ID NO: 355278 - DNA, 201 bp, Homo sapiens
tcctttcttcatattgcacaccctgtgtgagttgtggaaaatcattggaatgttattccaatagggtttttttttttaagtatagaaaaatcatggagacrtggaggcttaaaagggttcgttcattcattcatcttttcactcattcatttgcaaaggtgtgtagttctcaaagtgtggtctgggttcctccagttacat

SEQ ID NO: 355279 - DNA, 201 bp, Homo sapiens
ttaatgaaccaatattggtacatcaattattcgctgaagtctgtactttattcagacttctgtagtttttcctgccacccttttctgtcccaggatcccawctgggatcccacccgatatttggtcctcaggtctcccgaggtcctctcggctgggagtttctcaggctctacttgtttttgatgaccttgacagttttca

SEQ ID NO: 355280 - DNA, 201 bp, Homo sapiens
gtttcaccatgttggttgggctggtcttgaactcctgacctcaggtgatccacctgccttggcctcccacagtgctgggattacaggcgtgagccgccacrccctgccaaaaaggctttatttgatctagtccctaaatcacccccagatagcagattggcaacctgtggacacactaatttaggcatagctatagtagat

SEQ ID NO: 355281 - DNA, 201 bp, Homo sapiens
gaacttcccagcctccagaactgtgtgaaataaatatttagtctatactattgtattacagcatcctgaccttactaagacagatggttgtcttcatatgraaaattaaaatgacaaaaggctttgttttgtttttggagacaaagttttgctgttattgcccaggctggagtgcaatggcacaatctttgctcactgcaa

SEQ ID NO: 355282 - DNA, 201 bp, Homo sapiens
agggagaaggctatcaccaaatactgagtatgctagtaccttgctcttgaacttcccagcctccagaactgtgtgaaataaatatttagtctatactattrtattacagcatcctgaccttactaagacagatggttgtcttcatatgaaaaattaaaatgacaaaaggctttgttttgtttttggagacaaagttttgct

SEQ ID NO: 355283 - DNA, 201 bp, Homo sapiens
ttttcaatctttaccctcttcccacttggtaaatttgttgtgatcaacagctgctcttcccaaattaccttatttaccctttagttcccatggtgtttctrtgactgttatgcaagttgttggacttagtgcaaattataaaacattaaatgttcatttttgcctctaattctttaggaactaggttgtgaatttcatctt

SEQ ID NO: 355284 - DNA, 201 bp, Homo sapiens
gcaggcttgtccttctaaggaagtgcatgggttgggtagcactttgtcgggatctgcaccccgtgtgtgctggactacgtgctctgagccaagctccctgsggggtcctgggggccacacagcagcgaccaggggccagcacgctctgtcctcatggggctggcactgggagggggaaggtaaggaaaagacagaggccaa

SEQ ID NO: 355285 - DNA, 201 bp, Homo sapiens
agctcagttctgtccacctcctggaaactgaatgttgtgtaacagttgaaagcagtcatggcaaaccctgttttgtggcaagaggcatgcggggcaggcayagtcctcgtgatgctgtctcagtgcctctgattaaaacccacatctgttagtaaatgaggggtgagatctctgttgattaccagcatgtcagctctcagc

SEQ ID NO: 355286 - DNA, 201 bp, Homo sapiens
cttgtcttccccaccggggctgggaacagtgaggatgggcaagcttgacttcactgatggcagtgagataattcagctcagcggttgtattataccttttyccccattcctgataccccattggccatcttcctgttatgttattatatccttgccagtctctgccttcctggagccctagcaaggctgtgctttgaaaca

SEQ ID NO: 355287 - DNA, 201 bp, Homo sapiens
gctttaaaccactacactggtcgccaccagcagtgagagggagcgggtgctgggcggggcaggacacttcagctcagttctgtccacctcctggaaactgratgttgtgtaacagttgaaagcagtcatggcaaaccctgttttgtggcaagaggcatgcggggcaggcacagtcctcgtgatgctgtctcagtgcctctg

SEQ ID NO: 355288 - DNA, 201 bp, Homo sapiens
catttgaaatgggaagttagcaccaacctgtggctccatcttaggtggtttcccagggacacaggaagctgagggggcagcgctggggggagctgcctagygcccgctgaagccgcatccctcctgtctttgcaggtcggctggatgatgtggaactggatggtgtcccttctggccacaggagcggccatggtcttgtac

SEQ ID NO: 355289 - DNA, 201 bp, Homo sapiens
gtgtccttgtgccctctgcctttgtgcgtggggagtaggtgtgggtgggccctccaggggacgctggttttgggtcactgtagcccgcatgatttggggayggcactaggctgtggcgggcgggaggcaggttcccgacaccattcatcatggatgaacaatgtcttggggtggttccgtgtcagtccagacctcattctg

SEQ ID NO: 355290 - DNA, 201 bp, Homo sapiens
ggccagggtattctcgaactcctgacctcatgatccacctgcctcggcctcccaaagtgctaggattacaggcgtgagccaccgtgcccccctaatgtttktattttttatagagatggggttttgccatgttgcccagggtggtctcgaactcctgagctccagtgatctgcctgccttggcctcccagagtgctgggat

SEQ ID NO: 355291 - DNA, 201 bp, Homo sapiens
gccacccactgttcatcatgttctcatcgggcaccacgggcgcacccaagtgcatggtgcattccgctggggtaggtctctggggaaggctctgcagggcytcctgttgtctgtttgcttcaacagggcctcccagctgatgatggcagtgttggagttgtcaaactgcaccccatccccggagagtccaacgtgcagctt

SEQ ID NO: 355292 - DNA, 201 bp, Homo sapiens
tcatgttagccacttcatttagcccgacaccccaggggctggactcccactgcagtccatcctttgattgtggatgccacagataaagcagaaacgggtaygtgcccatctgtggagaattgacggggccgggggagccaccctgtgggcttttcattcttagaagagctttaacaaaggtaatcattatgtactgtgatt

SEQ ID NO: 355293 - DNA, 201 bp, Homo sapiens
aatcttcagctaagatttgaaggtgtgggctggccaagattctcgtaggtggagaggaagaagggctgaaaattcagaagcctgtagggaccagacaggtscccaagataataatagttactattcagtgagctctctctgtatgtcgggctccatctggcacctgatatgtatcaactaatgtaatcctctcagtaatcc

SEQ ID NO: 355294 - DNA, 201 bp, Homo sapiens
cagataaaatcttcagctaagatttgaaggtgtgggctggccaagattctcgtaggtggagaggaagaagggctgaaaattcagaagcctgtagggaccaracaggtgcccaagataataatagttactattcagtgagctctctctgtatgtcgggctccatctggcacctgatatgtatcaactaatgtaatcctctca

SEQ ID NO: 355295 - DNA, 201 bp, Homo sapiens
ccctcatggcctgattttccataggacccgtttgcatgtgcctgagggtgatggaggtaaagcgagattaggatgcaggaaggccattgtcacccaacccsggtgttggatgtccccgggtgttggatgtcccccgcctgactgctgcaagaagagcgctgatgaaatcccaggcttgaagcaatcttgttccctcccatg

SEQ ID NO: 355296 - DNA, 201 bp, Homo sapiens
tttcaccatattggccagactagtctcgaactcctgaccttgtattctgcccaccttggcctcccaaagtgttgggattacaggcgtgaaccaccgcgccyggccctagtttgcattttctagcattttatgtaaatgggatgaaacagcatgtgtctccccatgcccaccccccagcttctttcacttaatataattatt

SEQ ID NO: 355297 - DNA, 201 bp, Homo sapiens
aggaggttttagttaaaagcatcattttgtagataagacacctgaggccccagagtgaatcccccaaggccacatagtgaatgagtggcggaagagagacrgtcccaggcaccctcactcttccaatctggtgtcccttatgtagggggctctgatggggccaagcccaccttcctagattggccacagaaattttgcatt

SEQ ID NO: 355298 - DNA, 201 bp, Homo sapiens
ttgaatagttggactttgactcctcacttgtgaataataggaatatattttgcagaatctaacataatacccttaaaattcatactggacaaccatcagtrtgatgtatagtatctggtgtaaacaaattttattcagcatattaaattattctgtgttttgcttttccttgatatgtaggaggtgcaccagtaccagttt

SEQ ID NO: 355299 - DNA, 201 bp, Homo sapiens
accagagcccggcggtcatggcgcttgctcttggaggcacataaagggcttcatttcagatgatgaaagtgcaatggggtgatggagtggagaatgtgggygctctgaattttaaccacgtgctatgacatggggtggggtaaggctcctaatctaggagcagccttctcgaggtctttaaccatctgcataagagatagt

SEQ ID NO: 355300 - DNA, 201 bp, Homo sapiens
ttaccagcacgctgtctcagaaaacgaaaacggaggaaaaaaaccccaaaccccaaacaatcttaataaacacgactgagcaagaaagtggcgctgtgtarggctatttccacccacccggcagctcttaggacacattcccagaagagcggaaagatcattgacgtggaactacacacgaagtgtaattagtgggggaaa

SEQ ID NO: 355301 - DNA, 201 bp, Homo sapiens
aggacaatttgcaggctatgccccacttccagaggtgttttagtaaaaggtgaaagttgtcttttgagacaaagtcttactctgtcacacaggctggagtrcagtggcacattatggctcactgcagcctctacctcccagcctcaagtgatcctcccacctcagcctcctgagtagctgggactacaggtgtgtgctacc

SEQ ID NO: 355302 - DNA, 201 bp, Homo sapiens
gatggctgctgtttacagtgttggactctagacactggccagctgtgcggagtctgatcattttggggaactatgagatgttcacgccgtaggtgtcgttrttgaccggaggagctccagggttgaggcttcccatctcaggcctgctctggatttgcgcttgcccactccagatcgttgtgtcacactttggtcctcttt

SEQ ID NO: 355303 - DNA, 201 bp, Homo sapiens
tcatcatgggctcactatttttcccttcccaggtataaactcccaagctccccagttcactgcttgactgatggaggaaaacagtgattgggtgatgaccrttttcttgtttctgcagttcttggccaggctgactgagagatttgtgctgggagtggatatgttcgtggagacactgtggaaagtctggaccgagctctt

SEQ ID NO: 355304 - DNA, 201 bp, Homo sapiens
atttcaccatgttggtcaggctggtcttgaactcctgacctcatgatccgcccacctcagcctcccaaagtgctgggattacaggtgtaagccaccatgcytgcctttttaaaaaaaaaaacaaaaaaaaaaccagaatcttgctcggttgcccaggctggagtgcaatggcacgatctcggctcactgcagagcgattct

SEQ ID NO: 355305 - DNA, 201 bp, Homo sapiens
ggtgtgaccctccaggccagcccagtaagtgttagctactgtttgaactagtcgggagatgggtgtgttttgagttaaattatgactaaccttttgtaaaygggttgtgagaggctgggagagccgtgtgtggcaggggagtgatcatggcctcccagagctggagtgtagcctcctccccctggagaggtgatatcagag

SEQ ID NO: 355306 - DNA, 201 bp, Homo sapiens
gtgatgggttttcttccgcttgtgaaacggcctcctcagcaaatgtccctccaaggcccttctcctgggtggactgggagaacacaggcaccgctggaagkcttgggggacccagcctgcccctcctgctctgccaggttgctgtgaggcccgaccccacactgaggggccccctgcgtgaatgtgcaccctctcctgtct

SEQ ID NO: 355307 - DNA, 201 bp, Homo sapiens
ggcatggccgtggaagcgtggaacgaggaaggtgatggctccaccaactgtttctttctgtgattaggcgtgagttgggagtgtgggagcgttcggatgtrtaactttgcttggacatagttctccaaaacagccctcggaggggaggcccctgtcacttgcagtgtgatgtcctttccctccagcttggtttaacacccg

SEQ ID NO: 355308 - DNA, 201 bp, Homo sapiens; identical to SEQ ID NO: 75985

SEQ ID NO: 355309 - DNA, 201 bp, Homo sapiens
agacgtttgcatctcacagcgggagggccggcgacatcacatgaagtgacaggcaggcccttggaagccggtgcttagatccttaattagttcacacgtcractgaattttcaagtgaatgaattttaattacatctcaggttaaaaaaaaaaaaaggcgccagtgatcgaggactcgtcactgggctctgttgctcctga

SEQ ID NO: 355310 - DNA, 201 bp, Homo sapiens
gctgtctcagaaaacgaaaacggaggaaaaaaaccccaaaccccaaacaatcttaataaacacgactgagcaagaaagtggcgctgtgtagggctatttcyacccacccggcagctcttaggacacattcccagaagagcggaaagatcattgacgtggaactacacacgaagtgtaattagtgggggaaaaaatattttt

SEQ ID NO: 355311 - DNA, 201 bp, Homo sapiens
ctgacttggttaagaggatccgtgacgccatccgcatgggcttgtctgcgcgacacgtgcccagcctcatcctggaaaccaagggcatcccggtatggccrtctcccgccagcgaggagaccgcagccatcgccccacgagcccacacattgaggggcgcttacatctgagcagcttgccggtgctttatatatcgtttgt

SEQ ID NO: 355312 - DNA, 201 bp, Homo sapiens
ggggtttcaccatgttggccaggatggtctcaacctcctgacctcatgatctgcccgcctcagctttccaaagtgctgggattacaggcatgagccaccgygcccggcattagttttttaaactatttagaagtttcgttctttatttttctttgagaccgagtctcgcttttgtcacccaggctggagtgcatctcggct

SEQ ID NO: 355313 - DNA, 201 bp, Homo sapiens
ttgggtgatccacccgcctcagcctctcaaagtgctgggattacaggcattagccaccatgcctggccacattgtcatagttttttttttttttttttgaratggattcttgctcttttgccaggctagagtgcagtggtgtgatctcggctcactgcaaccttcaactccctggttcaagtgattctcctgcctcaccct

SEQ ID NO: 355314 - DNA, 201 bp, Homo sapiens
accttgggtgatccacccgcctcagcctctcaaagtgctgggattacaggcattagccaccatgcctggccacattgtcatagttttttttttttttttttgagatggattcttgctcttttgccaggctagagtgcagtggtgtgatctcggctcactgcaaccttcaactccctggttcaagtgattctcctgcctcac

SEQ ID NO: 355315 - DNA, 201 bp, Homo sapiens
ctgggagtttctcaggctctacttgtttttgatgaccttgacagttttcaggagcattgatcaggcctttttcttttcttttcaaatctccctgtgtcacscaggctggagtgaagtggtgtgatctctgctcactgcaacctctgcctcccagattcaagcaattctcctgcctcagcctcctgagtaactgggaccaca

SEQ ID NO: 355316 - DNA, 201 bp, Homo sapiens
aaaaaaattgtatgttcagcaagagtttattggacactctttgtgtctaagacatcttgtaatgtaagactcagagataaactgaagtcgtgttctgcctscagaatattacattctaatcatggaaataaggccaacatacacagaaacagttgacaatctatattaaatgccaaaatgagtctccaagttggcaatttt

SEQ ID NO: 355317 - DNA, 201 bp, Homo sapiens
tgtagagacagtgtctggccatgttgcccaggctagtctctaactcccagactcaaacgatcctctggccttggcctcccaaagtgttgggattacaggcrttagccaccatgcctggccctaagccttttttaaaaaaaaattaactttattctttttataagtagagtttaaaaaatagtcttttcttttagagttata

SEQ ID NO: 355318 - DNA, 201 bp, Homo sapiens
gactggagtgcagtggtgtaatcttggctcactgcaacctctgcctcctgggcttaagcagtcctcccctctcagtctcccatgtagctgggattataggygtgtgccgctatgccctactcgtttttttgtttgttttgtatttttgtggctttttttttttttttttaagaccgggttttggcatgttacccaagctgg

SEQ ID NO: 355319 - DNA, 201 bp, Homo sapiens
ttttatttttttttgagatggagtcttgatctgtcgcccagactggagtgcagtggtgtaatcttggctcactgcaacctctgcctcctgggcttaagcartcctcccctctcagtctcccatgtagctgggattataggcgtgtgccgctatgccctactcgtttttttgtttgttttgtatttttgtggcttttttttt

SEQ ID NO: 355320 - DNA, 201 bp, Homo sapiens
tctctgtatgtcgggctccatctggcacctgatatgtatcaactaatgtaatcctctcagtaatcctaccaagtaggtggtagtagtagccccatttcacmgctgaacaaaccaaggcacgaagtctcagttaagactttgtagctgtaggcagtggagctgtagtctgccgtctggttagttgttgcctctggcatttgc

SEQ ID NO: 355321 - DNA, 201 bp, Homo sapiens
gctgatgaggtggggctggaactgagccaaggctgatgggttctgggctcgtggacagttcctgcatcggtttgcagatctctacttaaaaaagagatccygtttttaatttccatcatcaccatgttaaacttcagactgtgccccattttcagtaaggggcgctcttcagaaactgcaatgaagcgtgaatgtcttccc

SEQ ID NO: 355322 - DNA, 201 bp, Homo sapiens
agaggagctcacaagtccccagggggagccccatctcagtaacccccgccactacaaccctgccaaaccaggagctcgggctgtgcgccacaccctttcaytcccttccctaccgttggctgttcttgccgcctctccactgtcctccttcatacgtttgattgagcggttcctcggttcctctgtgaccccggctaggca

SEQ ID NO: 355323 - DNA, 201 bp, Homo sapiens
gtgaacccaggaggcggagcttgcagtgagctgagattgcgccactgcactccaggctgggcgacagagtgagactctgtctcaaaaaaaaaaaaaaaaaattgtatgttcagcaagagtttattggacactctttgtgtctaagacatcttgtaatgtaagactcagagataaactgaagtcgtgttctgcctgcagaat

SEQ ID NO: 355324 - DNA, 201 bp, Homo sapiens
tcctcctctcccttctccccacgggggaagcatcttacttcagacccacttggtgagtgcttccttttgggcaatcattggaaacaaagcgtttgctaatyaggtgatcaatagcaaacaaaggacatgggctcagaagacttcaaggccatttccaaagcctccttcagccgtgttggtacacacatggcttgttcattg

SEQ ID NO: 355325 - DNA, 201 bp, Homo sapiens
gtctcaaactcctgacctcaagcaatccacccatctcggcctcccaaagggttgggattacaggcgtgagccaccgctcctggcgctttttttttttttttaaatggggtctcactctgtcgcccacccaggctggagtgcagtggtgggatcatagctcactgcagacttgagcttctgggctaaagcgatcctctcagc

SEQ ID NO: 355326 - DNA, 201 bp, Homo sapiens
ccaaccacactctatgaccacacaacagacgaataatcctttcagaatgtatatcatgtcacttccccactcaaaagctgccaggtggcttctcatcacastttgaataaaacccaaagtacttaccccacggcctcccaaggcctcatatagccactgcgttaagacagtgccaagcaggcctcagggactttgcatgtg

SEQ ID NO: 355327 - DNA, 201 bp, Homo sapiens
cgcccattggtgcttgacacccagagatgggggagtggggtccactggccatgatgggcacactggttcatacctgttgacaccccaggccattcagaaaygtctccagccttaattcattgagttcaacctttaagaggccttaggccaactcagtcacctcactgctcagacaaagaatcagaggcgtcagcatagcca

SEQ ID NO: 355328 - DNA, 201 bp, Homo sapiens
agatcgggcagccctattagatgggtgaaaccaccttcctccgtgggaagtgttgaagagaagggatttgtaatctgactatctggattttttttttttttaagcctcgcttttctcccccaggctggagtgcgacggcgcaatctcggctcattgcaacctctgcctcctgggttcacgcagttctcctgcctcagcctc

SEQ ID NO: 355329 - DNA, 201 bp, Homo sapiens
ctgttgtaaaccacccagttggtagtggtttgttgcggcagtcacgggaaaccattataccatagccctgttacatgcggaatctctcagcagcgcccatyggtgcttgacacccagagatgggggagtggggtccactggccatgatgggcacactggttcatacctgttgacaccccaggccattcagaaacgtctcca

SEQ ID NO: 355330 - DNA, 201 bp, Homo sapiens
gcttgaacctgggaggtggaggttgcggtgagccgagatcacgccactgcactccagcctaggcaacagagcaagacttcatcttaaaaaaaaaaaaaaaagcccagcattttgcagctttgaagctgctggggatcacgactgtctctgtggcccttacctggccacagatgtaccctggcaacccgctcacagtgccct

SEQ ID NO: 355331 - DNA, 201 bp, Homo sapiens
atgaatttctgttgtaaaccacccagttggtagtggtttgttgcggcagtcacgggaaaccattataccatagccctgttacatgcggaatctctcagcascgcccattggtgcttgacacccagagatgggggagtggggtccactggccatgatgggcacactggttcatacctgttgacaccccaggccattcagaaa

SEQ ID NO: 355332 - DNA, 201 bp, Homo sapiens
tgaactttcagagggagtgtggccccaccaagaccttgatttcagacttccagcctccagaaccgcaagtggatgaatttctgttgtaaaccacccagttkgtagtggtttgttgcggcagtcacgggaaaccattataccatagccctgttacatgcggaatctctcagcagcgcccattggtgcttgacacccagagat

SEQ ID NO: 355333 - DNA, 201 bp, Homo sapiens
tgtaggcgtgagccaccacacccagcccacccttggttaataagagcaggagggctgtgggtcccactgcttagccagtcatgtgggctgaaatgtgctcytcaagaatatgtgttccagtcctaatcctggacctgtgagtgagcccttgtttgggagtggggtctgcagatgtgataaagttaaatgagatcgtcttgg

SEQ ID NO: 355334 - DNA, 201 bp, Homo sapiens
attttctgtagagacagggtcttaccatgttgcccaggctggtctcaaactcttgggctcaaaccattctactgtttcagcctcccaaagtgctgagattrtaggcgtgagccaccacacccagcccacccttggttaataagagcaggagggctgtgggtcccactgcttagccagtcatgtgggctgaaatgtgctcct

SEQ ID NO: 355335 - DNA, 201 bp, Homo sapiens
gagtgcagtggctcaatcacagctcactacagcctcaacttcctgggctcgtgatcctcccacctcagcctcccgagtagctgggaccacaggcccatgcyaccacacctggctaatttttgaattttctgtagagacagggtcttaccatgttgcccaggctggtctcaaactcttgggctcaaaccattctactgtttc

SEQ ID NO: 355336 - DNA, 201 bp, Homo sapiens
tgccttgggggtggggggtgcgctggctgaaccagctactttcaccctgcaggtctggaccacctgggggattgtgaactcaataggtgggccctgccagyattttaaaaagaacgaatcagaatagacaagaatagataatattagcgcagtgccagacgcaatggcccacacctataaccccagcactttgggaacctg

SEQ ID NO: 355337 - DNA, 201 bp, Homo sapiens
caggttcgatgatcccccagccttctcccgagtagctggaaccacaggtacatgccaccatgcccagctaattttttaattttttgtagagacagtgtctsgccatgttgcccaggctagtctctaactcccagactcaaacgatcctctggccttggcctcccaaagtgttgggattacaggcgttagccaccatgcctg

SEQ ID NO: 355338 - DNA, 201 bp, Homo sapiens
tcagtagcaagtgtgcacctcctgtggccttgcttgtgtcgataacacctacattgctttgtctctgtcaccagcaagggtgcaacagacattctgtgacrcatcttcatgcacatgtgtgaatatgtctgtgtgatccattcttagatgtggagttgccgggccagagtgtcctgcatttgaaatgggaagttagcacca

SEQ ID NO: 355339 - DNA, 201 bp, Homo sapiens
gtcagcttgtgttacatgggaggtgactgctcagcttgcagggagttccaggttgccaccctgcaacccatgaatctgacaagaaccacctcagctgctcygacacgctgggcacctgccgtgtgctgggcgccacgccgaggtctttacaggttctgctcttgaatcctctcttagtcccatttctcccacagcagagaa

SEQ ID NO: 355340 - DNA, 201 bp, Homo sapiens
gaacttccttgagttcctttggttgttgcaaaggccttttaagccccacaggccagctcaactatccaattctagcttgttaagaaacccctggcccctgygtaacgagccctgttcctcttttctgtcccgcagtctccaacctgtcccagtatttcagcccagcctcggtgtccagcagcccggcccgcgcgctcctgc

SEQ ID NO: 355341 - DNA, 201 bp, Homo sapiens
cccaggtttaggcggttgtcctgcctcagcctcccgagtagctgggatcacaagcaggcaccaccataactggctcattttggatttttttttttttttttttttttttttgagacggagtctcgctctgtcgcccaggctggagtgcagtggcacgatctcggctcactgcaacttccgcctcccgggttcacgccattc

SEQ ID NO: 355342 - DNA, 201 bp, Homo sapiens
gatgcccatctaatttttgtatttttagtagagatggggtctcaccatgttggccaggatggtctcaaactcctgacatcaagtgatcggcccaccttggsctctcaaaatgatgagattacgggcctgagccactgcacccaggctcaaatctgtgtttttatggattttgttgctcaggatgatagtgatctaaagttt

SEQ ID NO: 355343 - DNA, 201 bp, Homo sapiens
tcataaaccacatcatttgtgtcaacagcctaggcctggcatctccaggctgcactctggccccagctctgcacctggcacaaagaggccctttttgtttrtttttgtttaggatctcactctgttgcccaggctggagtgcagtggctcaatcacagctcactacagcctcaacttcctgggctcgtgatcctcccacct

SEQ ID NO: 355344 - DNA, 201 bp, Homo sapiens
ttagactggtctcaaaattctgggctcaagggatccgtttgtctcggcctcccaaagtgccggaattacaggcataagccactgtgaaggccttaatgaaygacgtttaaaaaaatcataattagcgtatcaaatctatggggttttttgtttgtttgcttgtttttgtttttttgagacagaactctccctctgacgccc

SEQ ID NO: 355345 - DNA, 201 bp, Homo sapiens
aacgcaggtgttgtcataaaccacatcatttgtgtcaacagcctaggcctggcatctccaggctgcactctggccccagctctgcacctggcacaaagagrccctttttgtttgtttttgtttaggatctcactctgttgcccaggctggagtgcagtggctcaatcacagctcactacagcctcaacttcctgggctcgt

SEQ ID NO: 355346 - DNA, 201 bp, Homo sapiens
agtcaccctctgcttgacacgtgtcaaaattctagactcccagagggaacgcaggtgttgtcataaaccacatcatttgtgtcaacagcctaggcctggcrtctccaggctgcactctggccccagctctgcacctggcacaaagaggccctttttgtttgtttttgtttaggatctcactctgttgcccaggctggagtg

SEQ ID NO: 355347 - DNA, 201 bp, Homo sapiens
agaccatctacaggctcaccggttccctaggagcactggcaggactcagcatatagttgtcctcacagccgtgatttattgtgacggaaggacgcaaacaycatcagcaaagggaaaaggtgcgcgaattcccgggcaggccaggcccaagcttcagagttctctccctgtggagtcatacgggacacacttaattccccc

SEQ ID NO: 355348 - DNA, 201 bp, Homo sapiens
ggttcctaagaccatctacaggctcaccggttccctaggagcactggcaggactcagcatatagttgtcctcacagccgtgatttattgtgacggaaggaygcaaacaccatcagcaaagggaaaaggtgcgcgaattcccgggcaggccaggcccaagcttcagagttctctccctgtggagtcatacgggacacactta

SEQ ID NO: 355349 - DNA, 201 bp, Homo sapiens
agccccaccgccctggtccctggtcccagctgccacctgtctcacgggaaggtctgcagttgctgcatgtggcagggttcctaagaccatctacaggctcrccggttccctaggagcactggcaggactcagcatatagttgtcctcacagccgtgatttattgtgacggaaggacgcaaacaccatcagcaaagggaaaa

SEQ ID NO: 355350 - DNA, 201 bp, Homo sapiens
ctggcccctggttttgtgggctaggggaggagggtagtccagtttgatagtgcagtgctagtcacacgtttataatcaggaagagaacattggtgaggcayggcccctccctttctacatgtgggagggggcactgatactggtcttggcggatggcaaggcagcaacggtcatggtaactgagctgggcactcctagtcc

SEQ ID NO: 355351 - DNA, 201 bp, Homo sapiens
actagttatttaggcagaaggggatttcatgagacagagacactcacagaaccatcagaaaggctgaggaagagatgcatggcctcagacactgccgaacwggctgtccagggttgcagctgttgaaaccgttgagttcgaagtcacacaactgtagtataatttgaggaccaggaggccactgctgccgccacaacaact

SEQ ID NO: 355352 - DNA, 201 bp, Homo sapiens
acttgcactccagcctggcgacaaagcgagactccaaataaaataaaattaaattaaaacataaaatactgtagctgcccgggtgtggtggctcacgcctrtaatcccagcactttgggaggccggggtgggcagatcacctgaggtcaggagttcaagaccagcctggccaacatggtgaaaccccgtctctactaaaaa

SEQ ID NO: 355353 - DNA, 201 bp, Homo sapiens
ctgattcagccctgctcttatctcctctgtcctgtaggaaccatccagtcaggatatccagtttaaaatgctgtagccggccaggcatggtggctcatgcstgtaatcccagcactttgggaagctgagatgggtggatcacaaggtgaagagatcgagaccatcctggccaacatggagaaaccccatctctactgaaaa

SEQ ID NO: 355354 - DNA, 201 bp, Homo sapiens
caaacagagagacagtggtcagttcaccgtacttcggtgcacgtttgcagacctggtgggaagaggggcatcttagagccgagacccattcactcttggcrctccaggtggagctgggcctttggggcctggatatatccagggctgcggattttccccccttcaggtttaaatgttcctgtttttctacctttccctcgc

SEQ ID NO: 355355 - DNA, 201 bp, Homo sapiens
ggcagtggagctgtagtctgccgtctggttagttgttgcctctggcatttgcctgagggcccgatgaggcagctgttcccagttctagctaatcctcactrtgtggtgtggacaatgcatttgttacctattgctggtgacaaatcagcccaaaagttagcgacttaaaacaagaataaacctttatcacctctgagtttc

SEQ ID NO: 355356 - DNA, 201 bp, Homo sapiens
tcctgcggggaagtaggcctctggatcttccacttggggtcactcagagaattttagaagtggaggaggttttagttaaaagcatcattttgtagataagrcacctgaggccccagagtgaatcccccaaggccacatagtgaatgagtggcggaagagagacggtcccaggcaccctcactcttccaatctggtgtccct

SEQ ID NO: 355357 - DNA, 201 bp, Homo sapiens
ggcattttctactctcctggtccctgattcagccctgctcttatctcctctgtcctgtaggaaccatccagtcaggatatccagtttaaaatgctgtagcyggccaggcatggtggctcatgcctgtaatcccagcactttgggaagctgagatgggtggatcacaaggtgaagagatcgagaccatcctggccaacatgg

SEQ ID NO: 355358 - DNA, 201 bp, Homo sapiens
gctgggatttgaacccatgcagtcgacagcctggcttgtgctttctcagccacagtgccacctctgaggttattggcattttctactctcctggtccctgwttcagccctgctcttatctcctctgtcctgtaggaaccatccagtcaggatatccagtttaaaatgctgtagccggccaggcatggtggctcatgcctgt

SEQ ID NO: 355359 - DNA, 201 bp, Homo sapiens
catggacacccagctagtaagaggcagagctgggatttgaacccatgcagtcgacagcctggcttgtgctttctcagccacagtgccacctctgaggttaytggcattttctactctcctggtccctgattcagccctgctcttatctcctctgtcctgtaggaaccatccagtcaggatatccagtttaaaatgctgtag

SEQ ID NO: 355360 - DNA, 201 bp, Homo sapiens
attgttagtggaaaccctgcagccccagagagcttatgaatatatataatatgctcatggacacccagctagtaagaggcagagctgggatttgaacccakgcagtcgacagcctggcttgtgctttctcagccacagtgccacctctgaggttattggcattttctactctcctggtccctgattcagccctgctcttat

SEQ ID NO: 355361 - DNA, 201 bp, Homo sapiens
gcggacagtggcagatcatcaggcattaggatctcacaaggaacatgtaacctagatccctcgcatgcagttcacaatagggttcacactcctatgaaaawtttttttttttttgagacagagtctcgctctgttgcccaggttggagtgcaatggcgtgatcttgactcagtgtaacctccacctcccaggttcaagcga

SEQ ID NO: 355362 - DNA, 201 bp, Homo sapiens
agaatcagtgggagcactgagcttgttttcctgcaactagacagttgcatctgttccttctgggggtgacgcggacagtggcagatcatcaggcattaggrtctcacaaggaacatgtaacctagatccctcgcatgcagttcacaatagggttcacactcctatgaaaattttttttttttttgagacagagtctcgctc

SEQ ID NO: 355363 - DNA, 201 bp, Homo sapiens
aggaggctgctgggctcctgtctacttggggacgcctcatgcaggagctggtgtgggggtgggcaggggggcggtggcttcttcctttctctttccctttyctctaccttttcccctctccccagaggaaatggtagcaggatttcttttaagaggatgctgctgtattttgccagcgggtggaaggtggcggtattagct

SEQ ID NO: 355364 - DNA, 201 bp, Homo sapiens
gtgacagagtgagactctgtctccgccccccccaaataaattgccatgtattgacaaacatgtacaagtcacacatactttaaataattgtaggttgagcrcggtggatcacacctgtaatcccagtgctttgggaggctgaggcaggcagatcacctgaggttagaagttcgaaaccagcctggccaacataggaaaacc

SEQ ID NO: 355365 - DNA, 201 bp, Homo sapiens
acagtcactaactgacagtgctcacaggcaccagtcaggcctcatgtaaatgagcagcacaggctgaggagaccacagagtggggtgggactgggtgggargggcacacaggccatttaagggtcagcagcttggtggggacactgctggtgtggccggatcgtccaactagtcgagactaggtgggaacatgaattcacc

SEQ ID NO: 355366 - DNA, 201 bp, Homo sapiens
gcattccacgaatggggcattggtgttgacattctgagtactgcactgttgtatgacagatgcagctgacggctgtaacttcagaagaatgtgtgttcagrgttccaagctaaggaatccaggagtggccaacccggatttattccttgtctatgaggaacatctgaacccccggcccatcccatggaatgcaagctctac

SEQ ID NO: 355367 - DNA, 201 bp, Homo sapiens
ggacacagatgcactcgcctgatgacttcccacgattacatctcccgccatgacactgggaagctccttaagagaaaggactttatttctgtgcactgctstatccccagggcctagcagagagcctgggacagtctctgcactcgataaacagtcactaactgacagtgctcacaggcaccagtcaggcctcatgtaaat

SEQ ID NO: 355368 - DNA, 201 bp, Homo sapiens
ctcgggaacagtgggcaggtgggtggtcattgccctgcatctgaaccctggtgctggatacacaggcagcagccagctctgagcttctgagaacctggtcrttgaagggatagtctcccgctatgctgggcctggcagctagaaatccagctgtgctaggaggggtgagcagggctcagtgcacctgctctgcagagcaat

SEQ ID NO: 355369 - DNA, 201 bp, Homo sapiens
ttttgccttttggatgatcaatgatgactttttcctcctgctttcagggtgtgctggaccggttttctcaaattcagccaaagctcatcttctctgtggargctgttgtctataatggcaaagagcacaaccacatggaaaagctgcagcaggtggttaaaggtgtgtggcccttccggctcccagccggcatggctgggt

SEQ ID NO: 355370 - DNA, 201 bp, Homo sapiens
gagaggatcgcttgagcccaggaggtagaggttgcaatgagctaagatcatgctactgaagtctagcctgggctacagagcaagactctgtctcaaaaaaataaataaataaataataaaatttaaaagataattaacaactaattaaaaactacctaattttctgctatggaaaatatatcagttaggtagaacccacat

SEQ ID NO: 355371 - DNA, 201 bp, Homo sapiens
tgagaggatcgcttgagcccaggaggtagaggttgcaatgagctaagatcatgctactgaagtctagcctgggctacagagcaagactctgtctcaaaaaaataaataaataaataataaaatttaaaagataattaacaactaattaaaaactacctaattttctgctatggaaaatatatcagttaggtagaacccaca

SEQ ID NO: 355372 - DNA, 201 bp, Homo sapiens
gtgagaggatcgcttgagcccaggaggtagaggttgcaatgagctaagatcatgctactgaagtctagcctgggctacagagcaagactctgtctcaaaaaaataaataaataaataataaaatttaaaagataattaacaactaattaaaaactacctaattttctgctatggaaaatatatcagttaggtagaacccac

SEQ ID NO: 355373 - DNA, 201 bp, Homo sapiens
ggtgagaggatcgcttgagcccaggaggtagaggttgcaatgagctaagatcatgctactgaagtctagcctgggctacagagcaagactctgtctcaaawaaataaataaataaataataaaatttaaaagataattaacaactaattaaaaactacctaattttctgctatggaaaatatatcagttaggtagaaccca

SEQ ID NO: 355374 - DNA, 201 bp, Homo sapiens
tttttcttagtacagaacaaaatgaagtctcccatgtctacttctttctacacagacacagcaacaatctgatttctctatcttttccccacctttccccyttttctattccacaaaaccgccatcgtcatcatggcccgttctcaatgagctgttgggtacacctcccagacggggtggtggccgggcagaggggctcct

SEQ ID NO: 355375 - DNA, 201 bp, Homo sapiens
gctgggtttccccagaacaccccaggtaccactgccctctgctgatcgcgtccttcgctgtaatataccatagccatgtgcaggataacatgctgagtccygggagtccccggtcaatcaccgaacctgagcatggtcttggggaccccaacacacatgggtcaaaagtgccaatagcaggctacacagtgaaaatggtaa

SEQ ID NO: 355376 - DNA, 201 bp, Homo sapiens
gtcagtgctggaagagaaggccatgaagccgggtgagtgtgcctcttcagtactcattccctgtactgccaatcaaggaaattaaatccatcctatttcckgcttgcgagtgaggcttcaggcactgggtttagttttaatcttttggtgactctgcaccccagtggaaacccacagtctccagatgctccacacgatcct

SEQ ID NO: 355377 - DNA, 201 bp, Homo sapiens
gcggtcatttttgcaggtggaaaacaggtatatatggatgtgtacatgcacactcatgtatgtatatatatgggtgtattatatgtggattccaagtgaatttttttttttttttttgaggtagagtcttgctctgtcacccaggctggagtgcagtgggtgcgatctcagctcactgcaacctctaccttctgggttcaa

SEQ ID NO: 355378 - DNA, 201 bp, Homo sapiens
caggaggattacttgaggttaggaggtcgaggctgcagtgagctctgattgtgccacggcactccagcctgcgtgacagagtgagaccttgtttcaggggaaaaaaaaaaaaagaagaaagcacctcaactaaatggagacctttggctgtgtccttgtgccctctgcctttgtgcgtggggagtaggtgtgggtgggccc

SEQ ID NO: 355379 - DNA, 201 bp, Homo sapiens
gcacgttgcatccacatctgtttcacggaatcacgcacatgcacgtcgcatccacgtctgtttcgtggaactacacacatgcatgttgcatccatttctgyttcctgtctttgctggtgtattctgtttatggaggatgtagccactggggaagctgggtgagggggacatgggacctctctgttctttctttgaaacttc

SEQ ID NO: 355380 - DNA, 201 bp, Homo sapiens
cccatttttacacagatgtagtttagggtacacacctcaattccccttcacatgacttaagagttgattccattgctgcccatagaaatctttgggtcagtttttttttttttttttaaagacagggttttgctctgttgcccagcctggagtgcacactgacacgatcatggcttactgcagcctccacctcccaggctc

SEQ ID NO: 355381 - DNA, 201 bp, Homo sapiens
agtgcagggagtctcacttacttcctcttgatgccgtttcggagctatttgaaggcagaaatcatttgttttagagcaaaaataagcctgtctttttcacscagggtgaccacaggatccccatgtctcaactgacggtggttccatgtgacaatctaaggccaacaaacatgaaatacgagtggttatttaagactttta

SEQ ID NO: 355382 - DNA, 201 bp, Homo sapiens
gtctgccagcaactgtagttttcagcatgcctgggtttacgaattagagccaaacctgctttgtgaagtttaatggtatttaaaaaaacaccccatagtcttttttttttttttttttccgagatggagtattgctttgtcgcccaggctggaatgcagtggttcagtcttggctcatggcaacctctgccgcccaggttc

SEQ ID NO: 355383 - DNA, 201 bp, Homo sapiens
ggtggctcacgcctgtaatcctagcactttgggaggccaaggtggatggatcacctgaggtcaggagttcaagaccagcctgaccaacatggtgaaacccygtctctaccaaatacaaaaaattagccaggcgtggtgatgcatgcctgtaatcccagctacttgggagcctgaggcaggagaatcgcttgaacccgggag

SEQ ID NO: 355384 - DNA, 201 bp, Homo sapiens
tgatctagggtttccttttggggtgatgacagattgtggaactagataataatggttgcatgatattgtgaacgtactcatgccactgaattgtacacttyaaaatggttaaaatggccaactttatgtgtatatgactacagttttttaaaaaaattggcctggtgcagtggctcacatctgtaatcccaccactttggg

SEQ ID NO: 355385 - DNA, 201 bp, Homo sapiens
tgggaggattgcttgagcccaggagtttgagaccagcctgggcaacatagtgagaccccatctctacgaaaaaccaaaacctttggctaggcatggtggcrcacacctgtggtcccagctacttgggaggttgcatagggaggatcgcttgatcctgggaggttgagactacagtgagctgtgatcacaccactgtactcc

SEQ ID NO: 355386 - DNA, 201 bp, Homo sapiens
attggtccgttgagtcatattcagacttctgggcagagttctggaaattcagtggaattgtcttctcacgtgtgtatgatgaggtaagtagagattttccrtggatatcatctctttttgtggtcgtgcttcaaagtgaaatgctaattttggggaatactgaattgtatctcctttttacaacctcatgcagatgggaaa

SEQ ID NO: 355387 - DNA, 201 bp, Homo sapiens
gcaggggttgcaggcatctgaaggcttgactgaggctagaggaaccacatccaagatggtgtgctcacgtggctgttggtgggaggcctcgttcctcctcstgtgggctgcctcctccagaggcttcctcagtgacctcacagcatggccactggcatcccctagagtgagccagatgggaactgcagtgtctcttatgac

SEQ ID NO: 355388 - DNA, 201 bp, Homo sapiens
gtcaaaagagtaacttctatactgtagaaattatcttcaaatcattttcctgtaccttcacaacactgagtcttacttgtattagttatctttccatgtcrtagatttcctgaaagccatagtttagaacaaacatttcttacctcccagtttctgtgggttacaaatccagcagtggcttagctgggtgatcactcatca

SEQ ID NO: 355389 - DNA, 201 bp, Homo sapiens
ccggtgttggatgtccccgggtgttggatgtcccccgcctgactgctgcaagaagagcgctgatgaaatcccaggcttgaagcaatcttgttccctcccayggaggcgatggctgggccttgtttgtctgagtcctcaggcatccacagtttgctcacctggtccccttatttcaactttccattctgaaaattgtccaac

SEQ ID NO: 355390 - DNA, 201 bp, Homo sapiens
tccagcccctacctgctgaagcctgcttcatagagaaactgaggcacctgtgtggtcttcccgctgccggtctcaccacacacgatgacgatggggtgctyggccacagcctccatgattacttgttcttcggagagaattgggagcttcagccgttcctcctggaaggagaggaagtcagcacttagggagcagcaagac

SEQ ID NO: 355391 - DNA, 201 bp, Homo sapiens
agcccaggagtttgagaccagcctgggcaacatagtgagaccccatctctacgaaaaaccaaaacctttggctaggcatggtggcgcacacctgtggtccyagctacttgggaggttgcatagggaggatcgcttgatcctgggaggttgagactacagtgagctgtgatcacaccactgtactccagcctcagggacagc

SEQ ID NO: 355392 - DNA, 201 bp, Homo sapiens
ggagtgcagtggcttgatctcggctcactgcaagctcctcctcccgggttcacgccattctcctgcctcagcctcccgagtagctgggactacaggcgccsgccaccacgcctggctaattttttgtatttttagtagagatggggtttcaccgtgttagccaggatggtctccatctcctgacctcgtgatccacccgcc

SEQ ID NO: 355393 - DNA, 201 bp, Homo sapiens
aactccacttcccactaccgacccgtctaccacccccttccccgaagcagccagatattctgaacatgtataaatatatggatctatagatctgctccctrttgttggtttttgtttattttgcactatgcgcactgttttgtatttttattttatttttccctgaaacagagtctccctctgtcgcccaggctggagtgc

SEQ ID NO: 355394 - DNA, 201 bp, Homo sapiens
gctgtggaaacagattgctgggctccatccctggagagtctgaggcagtggatctggatggggccctgagagtctgcatttctggcaagctcctgggtgabgctgctgctgctagtccgggcaccaccacactctgagaaccactgagctgggatgtgtaccgtgacatggaatctctggaagacctcttcatgggtgtgg

SEQ ID NO: 355395 - DNA, 201 bp, Homo sapiens
cactgcaagctcctcctcccgggttcacgccattctcctgcctcagcctcccgagtagctgggactacaggcgcccgccaccacgcctggctaattttttktatttttagtagagatggggtttcaccgtgttagccaggatggtctccatctcctgacctcgtgatccacccgccttggcctcccaaagtgctgggatta

SEQ ID NO: 355396 - DNA, 201 bp, Homo sapiens
gaccttctgccccactcctcctcctgctttgaagatacttggagttgtttttactttacaggaaaagaagggagcaatgcgatttgctcggtggctttggraaaccgagcacctactgtgtgcggggcctttcgcgtggagccttttgtttagtttggggaggtcccggatcctgcagcctcctgggaagggtgttgagtc

SEQ ID NO: 355397 - DNA, 201 bp, Homo sapiens
tgaagcaggagaatctcttgaacccaggaggcgaaggttgccttgagtcgagattgcaccagtgcactccagcctgggtgacagagtgagaccctgtctcaaaaaaaaaaaagaagaagaatattggatgtggatgtcaacaggagtcttgaacacttaccatgtgctcaaagcatttcacgtgaatatcccatgtaaagc

SEQ ID NO: 355398 - DNA, 201 bp, Homo sapiens
ggccttatgtaaataaagcccctttagtagttaaaatcaaacatctttcctcttttaatttttttcttttgctggttgttttttccccctaccaggccacgtgtgtgtgtgtgtgtgtgtgtgtgtgtgtgtgtgtgtgtgtgaatttagccactttacagtccttgttcccagcaatttggaactttccttttgatttga

SEQ ID NO: 355399 - DNA, 201 bp, Homo sapiens
ctgctcccacatggttactaaccccctaaggtcgctactgtgtgtgctacccatgtgaattaactctgtttgcttgagcccttgcatagtaagggctctayatgcattgttcatattgcaaagatactactaaatggtccttcaaagggtgatagcagtttctactctcaccagacacgtgtgaaggctagttcccaagcc

SEQ ID NO: 355400 - DNA, 201 bp, Homo sapiens
gccttatgtaaataaagcccctttagtagttaaaatcaaacatctttcctcttttaatttttttcttttgctggttgttttttccccctaccaggccacgtgtgtgtgtgtgtgtgtgtgtgtgtgtgtgtgtgtgtgtgtgaatttagccactttacagtccttgttcccagcaatttggaactttccttttgatttgat

SEQ ID NO: 355401 - DNA, 201 bp, Homo sapiens
agggctgggtatagtggctcacgcctataatcccagcactttgggaggctgaggcaggtagatcacctgaggtcaagagttcgagaccagcctggccaacrtggtgaaaccctgtctctactaaaaatacaaaaattagccaggcctggtggcatgtgcctgtagtcccacctactcggaaggctgacacaggagaatcgc

SEQ ID NO: 355402 - DNA, 201 bp, Homo sapiens
ttcaccatattagccaggatggtctcgatctcctgactttgtgatccacccgcctccgcctcccaaagtgctgggattacaggcgtgagccaccgcacccrgcctttttttttcttttttttcaagacagggtcttgctgtcacccaggctggagtgcagtggtgcagtggtgcagtcagtatttttagtagagacggggt

SEQ ID NO: 355403 - DNA, 201 bp, Homo sapiens
cagcatatagttgtcctcacagccgtgatttattgtgacggaaggacgcaaacaccatcagcaaagggaaaaggtgcgcgaattcccgggcaggccaggcycaagcttcagagttctctccctgtggagtcatacgggacacacttaattcccccagcagagggtgcccaccaaggactccctgcccaggctttttactgg

SEQ ID NO: 355404 - DNA, 201 bp, Homo sapiens
accatgcccagcccgttttatacagctttgatttttatttatttatttttttgagactgagtctcgctttgttgcccaggctgcggtgcagtggcgcaatytgggctcactgcaacctccgctttccaggttcaagtgattctcctgcctcagcctcccgagtagctgggattacaggcgcatgccaccacatctggctaa

SEQ ID NO: 355405 - DNA, 201 bp, Homo sapiens
cctcacagccgtgatttattgtgacggaaggacgcaaacaccatcagcaaagggaaaaggtgcgcgaattcccgggcaggccaggcccaagcttcagagtyctctccctgtggagtcatacgggacacacttaattcccccagcagagggtgcccaccaaggactccctgcccaggctttttactgggggctggtcatgta

SEQ ID NO: 355406 - DNA, 201 bp, Homo sapiens
tgaacccctgacctcaggtgaactgcacacctcggcctcccaaagtgctgggattacaagcgtgagctactgtgcccggcctactttttttcttatagttaaaaaaaaaaaaaaaaaaagattttaagtggtctggccctctctttaaacttctgagtttgggtggatagttgagttgggttgggtggttagagaagaaat

SEQ ID NO: 355407 - DNA, 201 bp, Homo sapiens
aagatactactaaatggtccttcaaagggtgatagcagtttctactctcaccagacacgtgtgaaggctagttcccaagccctttccaacgaagtggctcsttaattttttttttttttttttttttgagaccgagtcttgctctgtcgcccaggctggagtgcagtggcgcgatctcggctcactgcaacctccgcctcc

SEQ ID NO: 355408 - DNA, 201 bp, Homo sapiens
gatccacctgccttagcctcccaaagtgctgggattacaggcatgagccaccgcgcctggcctatccttgttattttttatttttatttttttttgagacrgagtctcgctctgtcgcccaggctggagtgcagtggcgtgatctcggctcactgcaagccctgcctctcgggttcatgccattctcctgcctcagcctgc

SEQ ID NO: 355409 - DNA, 201 bp, Homo sapiens
ccagggtattctcgaactcctgacctcatgatccacctgcctcggcctcccaaagtgctaggattacaggcgtgagccaccgtgcccccctaatgtttttwttttttatagagatggggttttgccatgttgcccagggtggtctcgaactcctgagctccagtgatctgcctgccttggcctcccagagtgctgggatta

SEQ ID NO: 355410 - DNA, 201 bp, Homo sapiens
gttggtcaggctggtcttgaactcctgacctcatgatccgcccacctcagcctcccaaagtgctgggattacaggtgtaagccaccatgcttgcctttttaaaaaaaaaaacaaaaaaaaaaccagaatcttgctcggttgcccaggctggagtgcaatggcacgatctcggctcactgcagagcgattctcctgcgtcag

SEQ ID NO: 355411 - DNA, 201 bp, Homo sapiens
gtagctgggattacagacatgtgccaccacgcccggctaatttttgtatttttaggagagtttttcaccatgttggccaggctggtctggaacttgcgacytcgtgattctcccaactcagcctcccaaagtgctgggattacaggtgtgagacacccgacccggcctcattaaactttttggctttattatgtatgagac

SEQ ID NO: 355412 - DNA, 201 bp, Homo sapiens
ttacagacatgtgccaccacgcccggctaatttttgtatttttaggagagtttttcaccatgttggccaggctggtctggaacttgcgacctcgtgattckcccaactcagcctcccaaagtgctgggattacaggtgtgagacacccgacccggcctcattaaactttttggctttattatgtatgagacagatggtctt

SEQ ID NO: 355413 - DNA, 201 bp, Homo sapiens
tgcccggggtgggggtggtgtaggggtcagggatgactataaaggggcaacaggagggaagggtttggggtggtggaaatgtcctatatctcaattgtggyggttgcaggaaattccgtaaggtggcagagaacctcgcacgtgcatgtttcatccatgtctatttcctggaaccacacatatgcacattgcatccacgtc

SEQ ID NO: 355414 - DNA, 201 bp, Homo sapiens
ctctgggctcaagtgatcgtcccatctcagcctcccaagcagctagggctacaggtatacaccaccacgcctggctagtttttaaatttttttttttttttccaagacagagtctcactctgtcacccaggctggagtgcagtggtgtgatctcagctcatggcagcctcaacctcctgagctcaggtgatcctcccactt

SEQ ID NO: 355415 - DNA, 201 bp, Homo sapiens
cagcaagtggtagtcggtgcatggcttgttaccgtctgtcagggtgttctcaggggcaccacaaggtacaaatcatgtgtcctgtcctccgggagttgcartctagttggagaggtgagacccacctgcagggaggttgagctgtgaccactaggagtgggagggacaggatgtgcccaggggttgacagcagggcctggg

SEQ ID NO: 355416 - DNA, 201 bp, Homo sapiens
tccataggacccgtttgcatgtgcctgagggtgatggaggtaaagcgagattaggatgcaggaaggccattgtcacccaaccccggtgttggatgtccccrggtgttggatgtcccccgcctgactgctgcaagaagagcgctgatgaaatcccaggcttgaagcaatcttgttccctcccatggaggcgatggctgggcc

SEQ ID NO: 355417 - DNA, 201 bp, Homo sapiens
aatagaggcatcggcagcggatccacgagccctgaatgcctgcattcatcaggggagcagctggcgcgttctggaggcgaaacgagcttgcttccgtgtcraagcttttctagttctgtttgatgcgtaagcttcaaggcatccgaaggcctttggaattcgtgtcttatgcgtagaagtttgagtgcaaaatgctttaca

SEQ ID NO: 355418 - DNA, 201 bp, Homo sapiens
tcctgacctcatgatccgcccacctcagcctcccaaagtgctgggattacaggtgtaagccaccatgcttgcctttttaaaaaaaaaaacaaaaaaaaaamcagaatcttgctcggttgcccaggctggagtgcaatggcacgatctcggctcactgcagagcgattctcctgcgtcagcctctgaagtagctggggccac

SEQ ID NO: 355419 - DNA, 201 bp, Homo sapiens
ctggggacacagggacctggtcatgcactgatgatgatgccctttctctcccgtgaaatgcagtggtcctattggctactgaaggtttttgccattttttyttttagagacagggtctcactcgtgcccaggctggaatgcagtggtgcaagcatagctcactccaaccttgaactcctgggctcaagcaatcctcccacc

SEQ ID NO: 355420 - DNA, 201 bp, Homo sapiens
gcaggtagatcacctgaggtcaagagttcgagaccagcctggccaacgtggtgaaaccctgtctctactaaaaatacaaaaattagccaggcctggtggcmtgtgcctgtagtcccacctactcggaaggctgacacaggagaatcgcttgaaccccggaggtggaggttatagtgagtagagatcacgccactgcactcc

SEQ ID NO: 355421 - DNA, 201 bp, Homo sapiens
cccaccttcctagattggccacagaaattttgcattggaaatcatgtttacatgtatgtgcacatggtgcatgcactgcacacgcatgcacacgacaaggmacacatatctacacgtgtacacatgcatgtgcatttacacacgtgcatacgtgcacaggtgcacatgcatgtgtacatgtgtatgtatggctatgcatac

SEQ ID NO: 355422 - DNA, 201 bp, Homo sapiens
cactacacctcaatagactgtgcgtatttaaagtgtacaggttgacaccttttgacatacacacttgtgaaaaattaccacagttaagataaagtttcatrtgattttttttttttttttttttttgagagggagtctcgctctgccacccaggctggagtgcagtggcgcaatctcggctcactgcaagctctgcctccc

SEQ ID NO: 355423 - DNA, 201 bp, Homo sapiens
cacgcatgcacacgacaaggcacacatatctacacgtgtacacatgcatgtgcatttacacacgtgcatacgtgcacaggtgcacatgcatgtgtacatgtgtatgtatggctatgcatacataaacactcgtatatgtatttttcaccttttaggacatgcgtgtgttccccattgctgatgacatcttccttggctttt

SEQ ID NO: 355424 - DNA, 201 bp, Homo sapiens
tcagtttctagcttttaggccagttcagagttcagtccataaaatgatttaaaaatgctctgggccaatgagtgagctggcttcctgggaagaagaaccayttttgctgatttgtgacatagtctcatgttttgctgatctgtagcgtagtctcatgtgtgtgcgtcttggtttgttgtcattctctataggttgtggaca

SEQ ID NO: 355425 - DNA, 201 bp, Homo sapiens
acacctcaatagactgtgcgtatttaaagtgtacaggttgacaccttttgacatacacacttgtgaaaaattaccacagttaagataaagtttcatatgattttttttttttttttttttttgagagggagtctcgctctgccacccaggctggagtgcagtggcgcaatctcggctcactgcaagctctgcctcccgggt

SEQ ID NO: 355426 - DNA, 201 bp, Homo sapiens
acgcatgcacacgacaaggcacacatatctacacgtgtacacatgcatgtgcatttacacacgtgcatacgtgcacaggtgcacatgcatgtgtacatgtgtatgtatggctatgcatacataaacactcgtatatgtatttttcaccttttaggacatgcgtgtgttccccattgctgatgacatcttccttggcttttc

SEQ ID NO: 355427 - DNA, 201 bp, Homo sapiens
cagacgcccaccaccacgcccggctaattttttgtatttttagtagagacggggtttcaccatgttagccaggatggtctcgatctcctgacctcatgatygcctgcctcggcctcccaaagtgctgggattacaggcgtgagccaccacgcccagcctgtttcctataattttttatgttgataatttttcaaagtacta

SEQ ID NO: 355428 - DNA, 201 bp, Homo sapiens
cgcatgcacacgacaaggcacacatatctacacgtgtacacatgcatgtgcatttacacacgtgcatacgtgcacaggtgcacatgcatgtgtacatgtgtatgtatggctatgcatacataaacactcgtatatgtatttttcaccttttaggacatgcgtgtgttccccattgctgatgacatcttccttggcttttct

SEQ ID NO: 355429 - DNA, 201 bp, Homo sapiens
agacggggtttcaccatgttagccaggatggtctcgatctcctgacctcatgatcgcctgcctcggcctcccaaagtgctgggattacaggcgtgagccamcacgcccagcctgtttcctataattttttatgttgataatttttcaaagtactaaaatgctgaaagaacagaacaaggaatagctgcaaacatctcccct

SEQ ID NO: 355430 - DNA, 201 bp, Homo sapiens
gcatgcacacgacaaggcacacatatctacacgtgtacacatgcatgtgcatttacacacgtgcatacgtgcacaggtgcacatgcatgtgtacatgtgtatgtatggctatgcatacataaacactcgtatatgtatttttcaccttttaggacatgcgtgtgttccccattgctgatgacatcttccttggcttttctg

SEQ ID NO: 355431 - DNA, 201 bp, Homo sapiens
gacggggtttcaccatgttagccaggatggtctcgatctcctgacctcatgatcgcctgcctcggcctcccaaagtgctgggattacaggcgtgagccacyacgcccagcctgtttcctataattttttatgttgataatttttcaaagtactaaaatgctgaaagaacagaacaaggaatagctgcaaacatctccccta

SEQ ID NO: 355432 - DNA, 201 bp, Homo sapiens
cttaagcagtcctcccctctcagtctcccatgtagctgggattataggcgtgtgccgctatgccctactcgtttttttgtttgttttgtatttttgtggctttttttttttttttttaagaccgggttttggcatgttacccaagctggactcaaacccctaggctcatatattccacctgccttggcctcccaaagtgct

SEQ ID NO: 355433 - DNA, 201 bp, Homo sapiens
ctcagctgaggcattcctgaaatccgatcttgaacgtgagtcccagctacagtcttgctctgttgccagtgccccacccccaccacatccccctcaccccsctgttccctgtccctcatgaggctgggctagcacccgtcctggaagggttaggccctggtcttttgctcgttgactctcttctcaggaagggtcacttct

SEQ ID NO: 355434 - DNA, 201 bp, Homo sapiens
ttaaatatagtacagtattttgtaacagatagtccatattcaaattgtctttatagctcataaaaaatccaacacccagtcaaggactgctcatgcatttrgtgttcatgtctctagtctgtcagagtttcctcacttttggtggaggaagggacttaattatgaatttttttttatttttatttttttttgagacggagt

SEQ ID NO: 355435 - DNA, 201 bp, Homo sapiens
tgaccccacctgtgttcttttatttttattttattttattgttttattttttgagacggaggctcactctgtcacccaggctggagtgcagtggcgcgatyttggctctctgcaagctccacctcccaggttcacgccattctcctgcctcagcctcccgagtagctgggactacaggcgcccgcccccacgcctggctaa

SEQ ID NO: 355436 - DNA, 201 bp, Homo sapiens
caacacccagtcaaggactgctcatgcatttagtgttcatgtctctagtctgtcagagtttcctcacttttggtggaggaagggacttaattatgaatttwtttttatttttatttttttttgagacggagtcttgctctgtcacccaggctggagtgcagtggcgcgatctcggcccactgcaagctccacctcctgtgt

SEQ ID NO: 355437 - DNA, 201 bp, Homo sapiens
tcatgtctctagtctgtcagagtttcctcacttttggtggaggaagggacttaattatgaatttttttttatttttatttttttttgagacggagtcttgctctgtcacccaggctggagtgcagtggcgcgatctcggcccactgcaagctccacctcctgtgttcacgccattctcctgcctcagcctcccaaatagct

SEQ ID NO: 355438 - DNA, 201 bp, Homo sapiens
catgtctctagtctgtcagagtttcctcacttttggtggaggaagggacttaattatgaatttttttttatttttatttttttttgagacggagtcttgctctgtcacccaggctggagtgcagtggcgcgatctcggcccactgcaagctccacctcctgtgttcacgccattctcctgcctcagcctcccaaatagctg

SEQ ID NO: 355439 - DNA, 201 bp, Homo sapiens
cctgcaccctggagatagatgggggactttgccgtttcttcagacaagcaggactgtgactcacaggccggagagcatcacctctgagtgctggcggagcytcaccaagatcagggtttgcagagtcttgcctgcacttagacgcactttagacccacagagagccttcgagttttctgggggtgggcagtggggggattg

SEQ ID NO: 355440 - DNA, 201 bp, Homo sapiens
tcacgtgtgtatgatgaggtaagtagagattttccgtggatatcatctctttttgtggtcgtgcttcaaagtgaaatgctaattttggggaatactgaatygtatctcctttttacaacctcatgcagatgggaaaaagtcattgccctagagaactggcattaaattatcacagacctcatcgagaactttgcagcctgt

SEQ ID NO: 355441 - DNA, 201 bp, Homo sapiens
gcccttgcaaggaaggggtcgttttcaccagtttttctcagttaggctgtgatcagtacccagttcaagtcaatcccctgggccagtagtccacatgtgtrgtattcatcatgggctcactatttttcccttcccaggtataaactcccaagctccccagttcactgcttgactgatggaggaaaacagtgattgggtgat

SEQ ID NO: 355442 - DNA, 201 bp, Homo sapiens
tcccatttcccagatccccaagaaccagtggttagatctagaggcctggccagggatggtggctcatgcctgtaatcccagcactttgggaggccgaggckggcagatcacttgaggtcaggaattcaagaccagtttggccaacatggttgaaaccccatctctactaaaaatacaaaaaattagccagacatggtgcct

SEQ ID NO: 355443 - DNA, 201 bp, Homo sapiens
tgccattttcagagatgtcagggaaggccaccctctgatccctgcacaccagagagcccagcctgtagcctgcaggccttgtcctcctgaagtgccatcakgtggccgtgtgtgtgtgtgtgtgtgtgtgtgtgtgtgtgtgtgtgtgtctgtgtgtgtaaataggacagccattctcgctcgctctgggtggctgtcacc

SEQ ID NO: 355444 - DNA, 201 bp, Homo sapiens
ttcagagatgtcagggaaggccaccctctgatccctgcacaccagagagcccagcctgtagcctgcaggccttgtcctcctgaagtgccatcaggtggccytgtgtgtgtgtgtgtgtgtgtgtgtgtgtgtgtgtgtgtgtctgtgtgtgtaaataggacagccattctcgctcgctctgggtggctgtcaccatgattc

SEQ ID NO: 355445 - DNA, 201 bp, Homo sapiens
taaataggacagccattctcgctcgctctgggtggctgtcaccatgattcaacaccggctgttggtttcaatgcttgattggttgctaagcaccgtattcrggtcagacacatgttcataggtgtgtttgttttgttgcaacatgaaagctgtcctcgagcagctctcctgggccaggacaggctgacagctggttttgga

SEQ ID NO: 355446 - DNA, 201 bp, Homo sapiens
tcggcccactgcaagctccacctcctgtgttcacgccattctcctgcctcagcctcccaaatagctgggaccaagggtgcccgccatcacgcccggctaattttttttgtatttttagtagagatggggtttcaccgtgttagccaggatagtctggatctcctgacctcgtgatctgcccggctcggcctcccaaagtgc

SEQ ID NO: 355447 - DNA, 201 bp, Homo sapiens
tttccttcaattagcttgaatctctgagatctaactgcctcccctggtcccaggaagtttccaaatctggccaccgtccccctggaatcctggcttttctrggggtagaaacagagggaagtgcacgggtggaatcagtgggtccggtccagcattctgggacgttcatggcgtgtttccctgcgtttcggcccacagtgt

SEQ ID NO: 355448 - DNA, 201 bp, Homo sapiens
gaaattctctgccgccctccggggctctcccaggctggctctctctgtttcttccctggcctcaggcttcctggcaggtcttcctctgggccccactccayctgcccctgggtgttgatctctatgtcctctgttcagaacagcctcttctccctcccgcctaccctgtgggacctgcttattcttgacgctgggctttgg

SEQ ID NO: 355449 - DNA, 201 bp, Homo sapiens
agcctcccaaatagctgggaccaagggtgcccgccatcacgcccggctaattttttttgtatttttagtagagatggggtttcaccgtgttagccaggatrgtctggatctcctgacctcgtgatctgcccggctcggcctcccaaagtgctgggattacaggcatgagccaccgcacccggccccaattatgcatttttt

SEQ ID NO: 355450 - DNA, 201 bp, Homo sapiens
ggcttcctggcaggtcttcctctgggccccactccacctgcccctgggtgttgatctctatgtcctctgttcagaacagcctcttctccctcccgcctacyctgtgggacctgcttattcttgacgctgggctttggagatgctgactccagcggctttctgggtttcctcctcttcctcctgattcagtctgctgcagta

SEQ ID NO: 355451 - DNA, 201 bp, Homo sapiens
gtgcccgccatcacgcccggctaattttttttgtatttttagtagagatggggtttcaccgtgttagccaggatagtctggatctcctgacctcgtgatcygcccggctcggcctcccaaagtgctgggattacaggcatgagccaccgcacccggccccaattatgcatttttttcttttagacaagctctcactctgta

SEQ ID NO: 355452 - DNA, 201 bp, Homo sapiens
ccgaaggcctgatgtcctgaggccaggggccaagtccctgttacctgtatgtcccatgcacttttttaaactgatgctgaagttggccaatgttttacttaaaaaaaaaaaaaaaaagtgcgttggggcagctccaagggcgtctctgtaataatgtcacagtcattcccttgtcccccacccgcccgccgtgaactttgc

SEQ ID NO: 355453 - DNA, 201 bp, Homo sapiens
ttcaccgtgttagccaggatagtctggatctcctgacctcgtgatctgcccggctcggcctcccaaagtgctgggattacaggcatgagccaccgcacccrgccccaattatgcatttttttcttttagacaagctctcactctgtagcccagaatggagtgcagtggcgcagtctcggctcggtgcaacctctgcctcct

SEQ ID NO: 355454 - DNA, 201 bp, Homo sapiens
gcatgagccaccgcacccggccccaattatgcatttttttcttttagacaagctctcactctgtagcccagaatggagtgcagtggcgcagtctcggctcrgtgcaacctctgcctcctgggttcaagcgatcctcccaccttaacctcctgagtagctgggcttacaagcatgtgccaccatgcctatttatttatttat

SEQ ID NO: 355455 - DNA, 201 bp, Homo sapiens
gtagcccagaatggagtgcagtggcgcagtctcggctcggtgcaacctctgcctcctgggttcaagcgatcctcccaccttaacctcctgagtagctgggmttacaagcatgtgccaccatgcctatttatttatttattgtatttttcgtagagacaggatttctcctcgaaatccctgtgttgcccaggctggtctctt

SEQ ID NO: 355456 - DNA, 201 bp, Homo sapiens
gaaatccctgtgttgcccaggctggtctcttgactcctgggctcatgcgatcctcccgccttggcctcccaaagtgctgggattataggcgtgagccactkcgcctggcccagtaagggacttttacagcattgacatttctgaagatcacagactaaatgtcttttttttttttgagctataattcatataccatacagt

SEQ ID NO: 355457 - DNA, 201 bp, Homo sapiens
cgatcctcccgccttggcctcccaaagtgctgggattataggcgtgagccacttcgcctggcccagtaagggacttttacagcattgacatttctgaagakcacagactaaatgtcttttttttttttgagctataattcatataccatacagtttattcattgaaagctcagcggtttgtagtatattcacagtgctgta

SEQ ID NO: 355458 - DNA, 201 bp, Homo sapiens
gatcctcccgccttggcctcccaaagtgctgggattataggcgtgagccacttcgcctggcccagtaagggacttttacagcattgacatttctgaagatyacagactaaatgtcttttttttttttgagctataattcatataccatacagtttattcattgaaagctcagcggtttgtagtatattcacagtgctgtac

SEQ ID NO: 355459 - DNA, 201 bp, Homo sapiens
ggagaattgcttgagcccaggaggcggaggttgcagtgaaccaagattgcaccactgcactccagcttgggcgacagagcgagactccatctcaaacacacacacaacacacacacacacacacacacacacacacaaaacacacaataccatcattacagcttataacaattccttaacatctaatgcaggtccattttc

SEQ ID NO: 355460 - DNA, 201 bp, Homo sapiens
ctttggtgtgatacatgcggttcccagtgcctagcttggaagtggtataaaagagtctcatctcagcttcggaagcctggacttcactcagcttctgtagyatctctgctcgctgggaaaggaaacgagtgtattatgcatttgccatcacgaccctctcttaagaagggaagtgagactctaataaaatttcagcatcat

SEQ ID NO: 355461 - DNA, 201 bp, Homo sapiens
acctttcaaagattccaaacaggtaatgtaccgcattctgacccacaggtccgtgtggacccactggagctcctgcggggaagtaggcctctggatcttcyacttggggtcactcagagaattttagaagtggaggaggttttagttaaaagcatcattttgtagataagacacctgaggccccagagtgaatcccccaag

SEQ ID NO: 355462 - DNA, 201 bp, Homo sapiens
ggtcttgctatgttgtccaggctggtctcaaacttctgggctcaagagatcctcctgccgtggcctcctaaagtgttgggattacaggcatgagccactgygtctagtcacaaagcaggcatttttgaggctgaaacctcactttttgggttcttggtcgtctgatttaatctgtacacttttaaggtcttgcaaaggaat

SEQ ID NO: 355463 - DNA, 201 bp, Homo sapiens
caacttgaaaccttcactcgttcgatgagttttccttcaattagcttgaatctctgagatctaactgcctcccctggtcccaggaagtttccaaatctggycaccgtccccctggaatcctggcttttctgggggtagaaacagagggaagtgcacgggtggaatcagtgggtccggtccagcattctgggacgttcatgg

SEQ ID NO: 355464 - DNA, 201 bp, Homo sapiens; identical to SEQ ID NO: 76000

SEQ ID NO: 355465 - DNA, 201 bp, Homo sapiens
taaatgaattggattaatagaaatgttaaattctttaagtgcatatatgtttaaaattctatgaaaggcagacactttttagctcagggcctggtggctakgttggttctctcctttccaatcagagacctctgccgcaaacatgctctgccagatcctcggtcaggccaagaagcatccgagcttgatccccctctttgt

SEQ ID NO: 355466 - DNA, 201 bp, Homo sapiens
atatatgtttaaaattctatgaaaggcagacactttttagctcagggcctggtggctaggttggttctctcctttccaatcagagacctctgccgcaaacmtgctctgccagatcctcggtcaggccaagaagcatccgagcttgatccccctctttgtatttattggaactggagcttctggagcaacactgtatctctt

SEQ ID NO: 355467 - DNA, 201 bp, Homo sapiens
tagagtttgggggcacaaagactactaaatgtgtttcagcataagcagctggaaatatctatgatcaagcatcaaggaagagatacaacctccatttctargtcgctgaatttattcaataaatatttattgagcattcagcaagtatccagcagagacaaatccaaatctggatgctgctagttcatccacttccttgtt

SEQ ID NO: 355468 - DNA, 201 bp, Homo sapiens; identical to SEQ ID NO: 76007

SEQ ID NO: 355469 - DNA, 201 bp, Homo sapiens
ttggtctgattcaatctataaagaaatgccaaaatgaggaataacctcagtcgttaatttctttaccactatcatggtgttgcatgaacctggcagatggyggttttagtgagccgagatcatgccactacactccatcctgggtgacagagtgagactctgtcacaaaaaaaaaaaaaggcattacaatggagggattgg

SEQ ID NO: 355470 - DNA, 201 bp, Homo sapiens
tatggcttttatggattaaaggagacactggcaattgagaaaagaggaagcttaggttattagaagtttgcatcactttagaatttcctgggcctcgtttrtaacatacaataatggcagcagggggcagtaagataatggcatcaagtcccctgtgcttcttcaacagtaacatttctgtgtccttgaagcctttttgtt

SEQ ID NO: 355471 - DNA, 201 bp, Homo sapiens
aaatgggagctgaacaatgagaacacatggacacactgggaaaaacaacacacactgggcctgtatagggggagagcattaagaagaatagctaatggatkctggacttaatacccaggtgatggattgatctgtgcagcaaacaaccatggcacacatctacctatgtaacaaaactgcacatcctgcacatataccctg

SEQ ID NO: 355472 - DNA, 201 bp, Homo sapiens
gtacgttcattgcagccttattcacaatagcaaagacgtaatcaacctaaatgcctatcaatgatagactagataaagaaaatgtggtacatatacaccayggaatactatgaagctataaaaaagaatgagattatgtcctttgcagggacatggatggagctggaagctgttatcctcagcaaactaacacagtaacag

SEQ ID NO: 355473 - DNA, 201 bp, Homo sapiens
gaaagagaaaaatgaaatttcacaattctatgaaaggttgttttagtatatggcagaccgctagaaagtggtctttcaagaagcaagaaacagaatgagargatcaacttggaatttattttccttcaatgggattttgctaaggcattgcttggtacagcattctgtacaaccagaaaggcaaaaggaaaatagctacat

SEQ ID NO: 355474 - DNA, 201 bp, Homo sapiens
aagagcttctgaacagcaaaagaaactatcatcaaaggaacaacctagcagaatgggagaaaagttttgtaatctgaccatctgacaaagatctaatatcygtagtctacaaggaacttacacaaatacacaagaaaaaaacaaacaaccccattaagaagtgggcaaaggatatgaacagatatttcttgaaagaagaca

SEQ ID NO: 355475 - DNA, 201 bp, Homo sapiens
ggtttgttgaagatcagatggttgcagatgcgtggtcttatttctgagttctctattccgttccattgatctatgtgtttattttgtaccagtgcaatgcyattttggttactgtagccttgttgtatagtttgaaatcagatagggtattgcctccagcttcgctctttttgtttaggattgtcttgcctgtttgggctc

SEQ ID NO: 355476 - DNA, 201 bp, Homo sapiens
gggaaaccccttatgaaatcatcagatcttgagagacttattcactaccacgagaacagtacgggggaaatctgtcaccgtgattcaattatctcccactsgatccctcccacaacacgtgggaattatgggagctacaaatcaagatgagatttgagtgggctcacagccaaagcatatcactatggtagttctattttt

SEQ ID NO: 355477 - DNA, 201 bp, Homo sapiens; identical to SEQ ID NO: 76012

SEQ ID NO: 355478 - DNA, 201 bp, Homo sapiens
ttttctgcatatggctacccagttctcccagtaccatttatgaaatagggaatcctttccccattgctaatttttgtcaggtttgttgaagatcagatggytgcagatgcgtggtcttatttctgagttctctattccgttccattgatctatgtgtttattttgtaccagtgcaatgccattttggttactgtagccttg

SEQ ID NO: 355479 - DNA, 201 bp, Homo sapiens
gctgtcctatgtatagcactttcatttcatttttatctgctaactctttctgtcacattttccaggatgaacttgtgtatacatttggcgaaactgttgcyctgggtgcttctggaattgtaatatggggaaccctcagtataatgcgaagtatggtaagttgaattggtagaaaataggtgaaaatatttctatgtttaa

SEQ ID NO: 355480 - DNA, 201 bp, Homo sapiens
tttcttctagggtttttatagttttgggttttacatgtaagtctttaattcatcttaagttaatttttgtataaagtataaggaagggggtccagtttcarttttctgcatatggctacccagttctcccagtaccatttatgaaatagggaatcctttccccattgctaatttttgtcaggtttgttgaagatcagatgg

SEQ ID NO: 355481 - DNA, 201 bp, Homo sapiens
ttagtcagcctttgggttggacttatgaactatgtaccttggaaatgccacacaacctaccaaatgtgatgaggatacgagggcaatcaacttggggcctmccgctcatgtggaaatttgcttttcatttttcatgttaaagaatgattcccacattatgtacagaagtaatttagaacactaaaattatctcagtatcct

SEQ ID NO: 355482 - DNA, 201 bp, Homo sapiens
ggagggcagctcaggaggtgtcagcctcattttacccagccctattcaagatggagtcactctggttccaatgcttctgacagcagtagagataacacagrtaggagggatttaaagaacgtcaccgtagctaagatacagagaacagcataggggttaagcaaggtccaatatgggactagctttgttaagcagctttgc

SEQ ID NO: 355483 - DNA, 201 bp, Homo sapiens
agctagtattttgttaaggattttagcatctatgttcatcaaggatctcagtctgtagttttcttttttggttgtctcctttcctggttttggtattaggktgatgctggcttcatagaatgaattagggaggattccttctttctctgtcttgtggaatagcgtcaaaaggattggtaccaattcttctttgaatgtctg

SEQ ID NO: 355484 - DNA, 201 bp, Homo sapiens
ttaaaagtgtgcctggctcttagttgattatcttctggatctgggaaggaaggaaagaaaacaaaggggaaggggattctctataggatgtggattcttcycatgagacactgcagggcaattttaaggtatggcaaggaaatagatcttggggttaaatatttttttccttgtctcataatattatgccagtcagattga

SEQ ID NO: 355485 - DNA, 201 bp, Homo sapiens
ttttcatatgtttgtcggccacttgtatatcttcttttgagaattgtctgttcatgcccttagcccacttttcaatgggattgtttgtttttttcttcccratttgtttgagttaaaccatccctgcatccctggtatgaaacccacttgatgatggtggattatctttttgatatgttgttggattcggtcagctagtat

SEQ ID NO: 355486 - DNA, 201 bp, Homo sapiens
tccctgatcattagtgatgttgattattttttcatatgtttgtcggccacttgtatatcttcttttgagaattgtctgttcatgcccttagcccacttttyaatgggattgtttgtttttttcttcccgatttgtttgagttaaaccatccctgcatccctggtatgaaacccacttgatgatggtggattatctttttga

SEQ ID NO: 355487 - DNA, 201 bp, Homo sapiens
tagatgaatccagtatatgaatgcatgcattacaagtaaagaaacatattctattccataattttgtggtagcaaacaaaggaaatacatttttgttctaygtcctcccagtctggtattccttttccaattcataagatattaaataaagaggttttcttccttcactttttaaggaatacagttttgaactcagtttta

SEQ ID NO: 355488 - DNA, 201 bp, Homo sapiens
aaatcaggaaaaatggggaaaaagaggaatagaagaaaaaatttaatagattattttgtagactggtagtcaggaaaaattttagaattcagtccaaactrtaagttcagtccaaataataaaaattgaaaaatattcggcaagactagaatctaacaacaggtgtactacagttatttactgcctcagagaccttttttc

SEQ ID NO: 355489 - DNA, 201 bp, Homo sapiens
ttgtttttattttgcaagtaaaatcactaggttatccagggatgatataaatatagtgtattttaagtgctgcaaggcatttgacaagcctcctgtgatayccttgagtacctgatgatgaaatatgtactagttaatagtaagcaaattcaagtttcaaggctgggcaaataaataaagcaaggttatatccttggcctt

SEQ ID NO: 355490 - DNA, 201 bp, Homo sapiens
acatggtagcagcaagagacaatgagagacaagggaaaggggaaaccccttatgaaatcatcagatcttgagagacttattcactaccacgagaacagtasgggggaaatctgtcaccgtgattcaattatctcccactggatccctcccacaacacgtgggaattatgggagctacaaatcaagatgagatttgagtggg

SEQ ID NO: 355491 - DNA, 201 bp, Homo sapiens
agaaaggcaaaaggaaaatagctacattctcctctctgtaggcccagtagtgatttgggaagatgagaaaaatgttaactagtatagagtttgtatcatayatgagaggaaataatttcatagattcaaacacaggagtagatcctccatcttctaaaatgaaattaaaccccctgcacttaaagttgagaacttggtgaa

SEQ ID NO: 355492 - DNA, 201 bp, Homo sapiens
tttgagtttagtgaaatttaaagtatatcaagttcatttatataatttactaattaactcacttagcatgcatcaattgggtaccaattgatgagtggctytgaaaattgaacaataaactaatcctaaaattaaaggtgtattatatgcattctttaataagctctgagacctacaaagatattttggacataaaatgtt

SEQ ID NO: 355493 - DNA, 201 bp, Homo sapiens
atcttgttggttaaggtaaaaaagaaattatcttctacttcttgctatctctggttttcattcttctgtaaaaaaattgcttaatacactaaattaattckcatttgaactaacttgtcctttgatattctgactgtcttataataattttacagaaatcttgcttgctcctagacaattacatggagactatactgaatc

SEQ ID NO: 355494 - DNA, 201 bp, Homo sapiens
tccatactattttcttttctttttaaaaaaactgaaagctccactcttactctgaggaggagtgaatcaggcattcctcaatgaataggttgacatgacayactatttaagtgtcatgcttgttttttaatggcactttaagcttagattcaaattctactactatgtctctcaaatcatcttcagtattatccataccag

SEQ ID NO: 355495 - DNA, 201 bp, Homo sapiens
acagaaaccaagcccctgttttttttttcccctttcttttgtagctatgaggaatttcagctaattcagacagaccttgttccccataatttgtaattctyattcagatttgaccaagtcaggtagagttggtcaactctgggaccagagagaaagaccagaacaaacaacaaaaaaccccaacagtatgattactgaaca

SEQ ID NO: 355496 - DNA, 201 bp, Homo sapiens
ttgattaggttgttttttgctgttgaattgtttgagttccttgtatattttatatattaatcaattgtcagatgcatagtttccaaatattttctcccatyctacagatttttgctttactctgttcattgcttttcctttgccatgcagaagctttttagtttgttatagtcccatttgcctatttttgtttttgttacc

SEQ ID NO: 355497 - DNA, 201 bp, Homo sapiens
ttaaagccaagagcacagaatattatgttggaagaaaacatttcctttagaccttcaagataaaacattattagcatcaggccaaaacaattatgacccaragaaaaaacttacagtagctgaaaatgaattgaaggacagagctataatttcagtccttttaaaaggggagagaaacctgaaaacaatgagacacagtaa

SEQ ID NO: 355498 - DNA, 201 bp, Homo sapiens
tttaaggaatctccacactgttttccatagtggctgtactagtttacattcccaccagcagtgtagaagtgtttcctgatgactgcatccatgccaacatmtactattttttgattttttgattatggccattcttgcaggagtcaggtggtatcacattgtggttttgatttgcatttccctgatcattagtgatgttga

SEQ ID NO: 355499 - DNA, 201 bp, Homo sapiens
tgagaatggcacttgaattaattagccataggaggtgcttcctgagcaatttaaagccaagagcacagaatattatgttggaagaaaacatttcctttagrccttcaagataaaacattattagcatcaggccaaaacaattatgacccaaagaaaaaacttacagtagctgaaaatgaattgaaggacagagctataatt

SEQ ID NO: 355500 - DNA, 201 bp, Homo sapiens
acaataagccttaataaagacagaatgaagtcagttaaatatgtctctcaaatcttataaactgcctgtaaaactttaattatcttgaccataagatatamtttccataagcctttttataacctttataaccttttattaagaagtgggttaattctccaagaaaaccttgttaatctaacacaggagtccatattctgg

SEQ ID NO: 355501 - DNA, 201 bp, Homo sapiens
ttacctttgtatctagctcatttaggaataaaatgggaagcaggtttgcctgacatagttcccaggttgactttttccttggcttagtgatttgggcgtcmtaaggtttatttttctttcacattctccccttttcttttaaaagtctttcaggaaaagcattttagaagaaaatgggtccctggtgtcaggttttgtctc

SEQ ID NO: 355502 - DNA, 201 bp, Homo sapiens
agagaaacgtaagtcagggtctggagattcaaaatatcttctggaaggtcagggatagtttggaattgagagtaaaggggaaagggacatgtacagtagaygtggatttttaacttttgttataagtctgatttctattcttaatcttgagggaatccctaagcctagccaaaatgctctttttttgtcctacttccaatt

SEQ ID NO: 355503 - DNA, 201 bp, Homo sapiens
ttctgtggctgaggctcatgaattgaagtgacaaaaacatagattaacaggagaatagcaaacaatttttaaaatattatttattttattttttttttttwaaatttactttaagttccaggatacatgtgcagaatgtgtaggtttgttacataggtatacatgtgccatggcggtttgcttcacctatcaacctgttat

SEQ ID NO: 355504 - DNA, 201 bp, Homo sapiens
ctaggaacaataagttataccacatagtttaggtgtgtaataggctatatcatctaggtttgtataagtacactctatgatgttcccacaatgatgaaatwacctacaaatgcattttaaataacatatccttgttattaagggatgcataactgtatataaaaaatgctcaacattgctaatcatcaggaaagtgcaaat

SEQ ID NO: 355505 - DNA, 201 bp, Homo sapiens
tttttgattaggttgttttttgctgttgaattgtttgagttccttgtatattttatatattaatcaattgtcagatgcatagtttccaaatattttctccyatcctacagatttttgctttactctgttcattgcttttcctttgccatgcagaagctttttagtttgttatagtcccatttgcctatttttgtttttgtt

SEQ ID NO: 355506 - DNA, 201 bp, Homo sapiens
tgagccataataagcaatatttaataatattggtagtccaggggaaataactctacactttagagtcacatagcttcttaaaaaaacacttcaggccgggygcggtggctcacgcctgtaatcccagcattttgggaggccaaggcgggcggatcacaaagtcaggagatcgagaccatcctggataacatggtgaaatcc

SEQ ID NO: 355507 - DNA, 201 bp, Homo sapiens
aaaattttattttgggaactgctcttgaaggatttcattatttatttggctcttctttttctccctcctctctctcttcccatcttaaaaagcaggattcygtaaaccaaaaggtatctgagacaggtctcaaaacatttagaaaatttattttgctaaggctatggacacacctgtgacacagcctcaggaggtcctgac

SEQ ID NO: 355508 - DNA, 201 bp, Homo sapiens
ccatcattttaagcacagcaaaagaagatgctgtcaattaaactgttaacattaccaattgtaaaatatgtccccatttagaaaatattaaaatgcattamaagtgtcttggaatctatgaaatacagtaataattatttctctatcaaaataatttgttccatcatatccaagaaaagattatagatatgagcatggtag

SEQ ID NO: 355509 - DNA, 201 bp, Homo sapiens
cagtgataaaacgcctttacaacaggaataagagcttaagtagaattttagatatattcagaattttaagtttctaaatctattttgagagaaaataatcttttttttttttcaaagggatgctaatgactagccaatgctctaggaagacattgagaccagccaacttcttgccttgataactactgaagagacattggg

SEQ ID NO: 355510 - DNA, 201 bp, Homo sapiens
gattgctgatttttccagcagtcctaaggaaatgtgtagtttctcctatgcattctcaactaattccaccttgtgacaaaaggcatgtatttatctgccaygtgattaaaggttaaagataagtttgtgactataagatatagtgaaattaattgacaacttgtaccaaccatatgtcattgaatcaaatacgccatcaac

SEQ ID NO: 355511 - DNA, 201 bp, Homo sapiens
tctcacaatcatggtgaaaggcgaaagccacttcttacatggtagcagcaagagacaatgagagacaagggaaaggggaaaccccttatgaaatcatcagrtcttgagagacttattcactaccacgagaacagtacgggggaaatctgtcaccgtgattcaattatctcccactggatccctcccacaacacgtgggaat

SEQ ID NO: 355512 - DNA, 201 bp, Homo sapiens
gcttatgtaagtatctgaaatctatggtaaaagatttctctaaagtttttattttctgctaatgcagactaaccagtcttaaattttaatgattcttaaascaaggcgacagcaaggtctgactatggtcttgagaaagtgacttttattgatttttgttttgcttttgtttctttttgaataattgtcaagaaataaaat

SEQ ID NO: 355513 - DNA, 201 bp, Homo sapiens
agatttgagtgggctcacagccaaagcatatcactatggtagttctatttttagttttctaagaaacctccatactgtttttcataatggctggactaatwtacattctcaccaagagttcccttttcccacatccttgccagtgcttgctgttttttgtcttttgataacagcaattctaactggggtgaaggatatctt

SEQ ID NO: 355514 - DNA, 201 bp, Homo sapiens
gtgcttgctgttttttgtcttttgataacagcaattctaactggggtgaaggatatcttattgtggttttgatttgcgtttccctgatgattagtaaagaygagtatttttttcatagaccccttggtcacttgtatgttttgacagctgtctactcagatccttcagcaattttttgattaggttgttttttgctgttga

SEQ ID NO: 355515 - DNA, 201 bp, Homo sapiens
cgaaacacagagaggagagaaagaaaaagaacaccaaataataaaacaaattcttttaaaagacgctgatagcgtcggggcatggttcttttctggggtcyatacaaacacgtgctgttccttttctgaggaatcctgtcaggctacaaccaatggaggagcctgttccgcctgggggaaatgactgcagctggatcgagc

SEQ ID NO: 355516 - DNA, 201 bp, Homo sapiens
tcattgttcacctgataggtgaaaatgacatcttgttttaacttggtttctaatcagtaatgttgacatttttttcatagtttattatgggtatcttttatttttttttcagagtaaactttgttttctcatttatacttaaattcaattttagtagactgttgccatttctaaaatttaagatatggctttttagatacc

SEQ ID NO: 355517 - DNA, 201 bp, Homo sapiens
ttgagtttcacttgtatgatcaggaaacgaaacacagagaggagagaaagaaaaagaacaccaaataataaaacaaattcttttaaaagacgctgatagcrtcggggcatggttcttttctggggtccatacaaacacgtgctgttccttttctgaggaatcctgtcaggctacaaccaatggaggagcctgttccgcctg

SEQ ID NO: 355518 - DNA, 201 bp, Homo sapiens
aaggcaatgattcaaggtcctagcattagttgacactttgctatagacaagcaggaccatagaaagcagtgagtcagatcacactgcataaagacacttcrtcctctaaaactgtgaaactccaagatgtgctactctgcaccacaggtgttttgtttgttcacaaagtgtccagtgaggcttatatgtaacagaaactta

SEQ ID NO: 355519 - DNA, 201 bp, Homo sapiens
atggcatgatcttggctcactgcaacctctgtctcctagattcaagcaattctcctgccttagcaccccaagtagctgggattaggggcgtgcaccaccamgcccagctaatttttgtatttttagtagatatggggcttcaccatgttgtccaggctggtcctgaactcctgaccttaagtgatccacccgccttggcct

SEQ ID NO: 355520 - DNA, 201 bp, Homo sapiens
atttataaagaattatgccttttccatcaattttagcatggaaaaataatttcaggcaatatgcttaaaaattgggggaagacaaaagaaatccatatcgwgtaaataaaaataaattttggttttgctcaaaaataaatttcaatgggaaagcatctcttccttatctttttttttcttcttttttttggagatggagtt

SEQ ID NO: 355521 - DNA, 201 bp, Homo sapiens
gccttcagtaagagtactgttaggttgttttcaccagaacctgccttacctgagatctttcctcttagtaattttctatcctgctgatccccaccctgcckttggctacaaattatcacttttccttgttgtttttggaattgagcccagtattatactgaggttttgtttcccctattgcaattgtttttttctgaatta

SEQ ID NO: 355522 - DNA, 201 bp, Homo sapiens
tctcaagatgaagatgaatcattttagttagtcatcgctcatactctgccaaatttgtaaaagagttgtcattatttacccataacttgactatatataayatttaatagaaagtatagtcagttgaacccgtttaatgtattcgagccagcaatttataagccatccttttccatgctatttaaacttgtctggcaggtg

SEQ ID NO: 355523 - DNA, 201 bp, Homo sapiens
gagttggaggttgtagtgagctaagatggtgccactgcactccagcctaggcaacagactgagattgtgtctcaaagattgaatttgctgagattaaaacrccacacacacacacacacacacacacacacacacacacagacaggttcacacactaacatttcaaaagattaaatcttcctttaattgactgggcaaagg

SEQ ID NO: 355524 - DNA, 201 bp, Homo sapiens
ttcttcagcctcaagaatctctggcttgttcaaaacatatctgggtgacactgggaaagttaagacgaggctggaaagaaccaaaggagaggaataatttkacaataataataaaggggaaggaaaaaagagttgatgaaatttcacctaaaatgggattaacttatcttgttgaatcaagttatctatttctggtcaata

SEQ ID NO: 355525 - DNA, 201 bp, Homo sapiens
gcatagtttttactgatcaagttttgaaattcctttctcaagtaagtaaatcagggtatgagggctaggaaatgaaattcacaaaagatgttgattgaaayttaatattatttttgaagggagtgaaatctagcttttaatattagtcaggaatgtgtacacaagtagatcaacattattatatgaatgcaaaacaagaat

SEQ ID NO: 355526 - DNA, 201 bp, Homo sapiens
gctaactctttctgtcacattttccaggatgaacttgtgtatacatttggcgaaactgttgctctgggtgcttctggaattgtaatatggggaaccctcartataatgcgaagtatggtaagttgaattggtagaaaataggtgaaaatatttctatgtttaatgtttttggggattgttttggtattaaataagaaaata

SEQ ID NO: 355527 - DNA, 201 bp, Homo sapiens
atgttgattgaaatttaatattatttttgaagggagtgaaatctagcttttaatattagtcaggaatgtgtacacaagtagatcaacattattatatgaaygcaaaacaagaatacgcttaatctttaatgtaatctctttatctcttagtaagccgggagaattaggtagtatagacagtgtatgaactcagtttctttt

SEQ ID NO: 355528 - DNA, 201 bp, Homo sapiens; identical to SEQ ID NO: 76009

SEQ ID NO: 355529 - DNA, 201 bp, Homo sapiens; identical to SEQ ID NO: 76010

SEQ ID NO: 355530 - DNA, 201 bp, Homo sapiens
tgctatagaacactaggatttattcctcccctttagctgtattgtacccattatctggcctctccctatccttctctcctcccatccttcctactctctawtaatcataacaataattcctctctctgtgatttcaatttttttagctctcacatatgagtgagaacatgagatgcttgtctttctgtgcttgccttattt

SEQ ID NO: 355531 - DNA, 201 bp, Homo sapiens; identical to SEQ ID NO: 76011

SEQ ID NO: 355532 - DNA, 201 bp, Homo sapiens
cccaaaatgtcaaaaggaatcctctccacacctattacagttacctttctcatagttcggaataaattcaaatgagccataataagcaatatttaataatrttggtagtccaggggaaataactctacactttagagtcacatagcttcttaaaaaaacacttcaggccgggtgcggtggctcacgcctgtaatcccagca

SEQ ID NO: 355533 - DNA, 201 bp, Homo sapiens
ttagctcctcatggggtccctcagaccagctggtatcagtagtttcactggtacacaggacttaaaaaacatctcaaagggaaaacttacatttagtaatrttcaagttgtcatgtagagcagttagggggaattgcaatcttatagcagtctacgtgattctgcagcaacagggaaacagtataaggaagtgggtcagag

SEQ ID NO: 355534 - DNA, 201 bp, Homo sapiens
gagagagagagagcttatgcagggaaactcctccttataaaaccatcagatctcactgtgacttcttcactaccacaagaacagcacaggaaagacctgcycccatgactcaattacctcccaccaggtcccttccacaaaacatgggaattcaagatgagatttgggtggggacacaggcaaaccatatcactatgctat

SEQ ID NO: 355535 - DNA, 201 bp, Homo sapiens
acagtttaaaatacaaacaaaactaaagcacagtgaagtgaaatagtttgggcaagatcacattgctactacattgagaaaccagattctaggcctgttgmtcctaatctagaaaactaaattacttagtccagtagtttaggtatttacagacattgcttaaggaattctcagacagataagaattctattcttgttgct

SEQ ID NO: 355536 - DNA, 201 bp, Homo sapiens
tttctaatcagtaatgttgacatttttttcatagtttattatgggtatcttttatttttttttcagagtaaactttgttttctcatttatacttaaattcrattttagtagactgttgccatttctaaaatttaagatatggctttttagataccaatagattatagtgtgaaaagaggaaccaaagattagcattaaaaa

SEQ ID NO: 355537 - DNA, 201 bp, Homo sapiens
gctttcaaatagctagaagattttgattgttcataatatgaatgatgaattagatgacagatatgctaattacccttatttggttattatgcattgtataygtgtattgaaacacacaccgtaccctataaataggtaaaattattatttgtcaattaaagatttaaaaagagaatgttgtcttcttcctaatacagggag

SEQ ID NO: 355538 - DNA, 201 bp, Homo sapiens
catacctgagactgggcaatttacaaaagaaagagatttaatggatttacagttccacatggctgaggaggcctcacaatcatggtggaaggcaaggaggwgcaagtcatgacttacatggctggcagcaggcaaagagagagagagagcttatgcagggaaactcctccttataaaaccatcagatctcactgtgacttc

SEQ ID NO: 355539 - DNA, 201 bp, Homo sapiens
tcccagagtttgggaggacaagacaggaggattgctcaagaccaggagtttaaggccagcctggacaacacagtgagatcccatctctacaaataataataataataataataataataattattattattattattatagtaaggcactagggtttaagaacttcaacatatgaattttgaaagaacacagttcagtcca

SEQ ID NO: 355540 - DNA, 201 bp, Homo sapiens
cccagagtttgggaggacaagacaggaggattgctcaagaccaggagtttaaggccagcctggacaacacagtgagatcccatctctacaaataataataataataataataataataattattattattattattatagtaaggcactagggtttaagaacttcaacatatgaattttgaaagaacacagttcagtccat

SEQ ID NO: 355541 - DNA, 201 bp, Homo sapiens
ttctaacttctctctaagtttaataggatcttctgaaaggtgtgtgttttgggggtggggtggggtgtaaaagggcttttttattttaaaagatctgctgytgtccagaggacatgaattctttgttgtgggtattaaggatacatccacaaaaggaatttcatgggaagacttgcagctgatggggtctgattatatcga

SEQ ID NO: 355542 - DNA, 201 bp, Homo sapiens
ccagagtttgggaggacaagacaggaggattgctcaagaccaggagtttaaggccagcctggacaacacagtgagatcccatctctacaaataataataataataataataataataattattattattattattatagtaaggcactagggtttaagaacttcaacatatgaattttgaaagaacacagttcagtccata

SEQ ID NO: 355543 - DNA, 201 bp, Homo sapiens
aagacaggaggattgctcaagaccaggagtttaaggccagcctggacaacacagtgagatcccatctctacaaataataataataataataataataataattattattattattattatagtaaggcactagggtttaagaacttcaacatatgaattttgaaagaacacagttcagtccataacaaaatcagtaccctt

SEQ ID NO: 355544 - DNA, 201 bp, Homo sapiens
agacaggaggattgctcaagaccaggagtttaaggccagcctggacaacacagtgagatcccatctctacaaataataataataataataataataataattattattattattattatagtaaggcactagggtttaagaacttcaacatatgaattttgaaagaacacagttcagtccataacaaaatcagtaccctta

SEQ ID NO: 355545 - DNA, 201 bp, Homo sapiens
gacaggaggattgctcaagaccaggagtttaaggccagcctggacaacacagtgagatcccatctctacaaataataataataataataataataataatwattattattattattatagtaaggcactagggtttaagaacttcaacatatgaattttgaaagaacacagttcagtccataacaaaatcagtacccttag

SEQ ID NO: 355546 - DNA, 201 bp, Homo sapiens
ctgaaaacttggaacctcagagctagctctgtattttaagacaggtttctctttttcctagagtggtggtcttgggaattaataaattatatcttcttctrtgccccagcttagtgtttccttaagtcctttagtccgggttcactttctttacatggagtctcctggtatttattctgtatatctccattagtttgctag

SEQ ID NO: 355547 - DNA, 201 bp, Homo sapiens
acttttggccattaaaagtaatggccaaaaccacagtaacttttgcaccaactcagtagtacccctgatacatctgtgtggcatgaaagtgtattgtaacygccttgagtttcacttgtatgatcaggaaacgaaacacagagaggagagaaagaaaaagaacaccaaataataaaacaaattcttttaaaagacgctgat

SEQ ID NO: 355548 - DNA, 201 bp, Homo sapiens
taatagctttgatgtatggtgaaggcactgaaaacttggaacctcagagctagctctgtattttaagacaggtttctctttttcctagagtggtggtcttrggaattaataaattatatcttcttctgtgccccagcttagtgtttccttaagtcctttagtccgggttcactttctttacatggagtctcctggtattta

SEQ ID NO: 355549 - DNA, 201 bp, Homo sapiens
gaaatacatagaccatagcaagtatgtattctctagaaaaatgagattaaaaggttccatagtctgttaaacatatgaactactgaattttttatccttakgatcagagaaaactacagaatgtaatttctattgaaagactaatattagagaattaaccaggaaaaaagcaactctgaagaaaatttgcaattcatcaaa

SEQ ID NO: 355550 - DNA, 201 bp, Homo sapiens
tctaatagctttgatgtatggtgaaggcactgaaaacttggaacctcagagctagctctgtattttaagacaggtttctctttttcctagagtggtggtcktgggaattaataaattatatcttcttctgtgccccagcttagtgtttccttaagtcctttagtccgggttcactttctttacatggagtctcctggtatt

SEQ ID NO: 355551 - DNA, 201 bp, Homo sapiens
cctttccccctgcaacattatttttgtgaggttcattcatgctgttttgatggtagtttgttcatcttcattgctgtttaatatttggttgcatacaaacmcacacacacacacacacacacacatatatatgatttatataataaaccactcctaggttatacctaagagaaatgtatagaatgcgcaccaaagaagagg

SEQ ID NO: 355552 - DNA, 201 bp, Homo sapiens
tcaaatctgtagattgttttggatagtatatctaatagctttgatgtatggtgaaggcactgaaaacttggaacctcagagctagctctgtattttaagasaggtttctctttttcctagagtggtggtcttgggaattaataaattatatcttcttctgtgccccagcttagtgtttccttaagtcctttagtccgggtt

SEQ ID NO: 355553 - DNA, 201 bp, Homo sapiens
ggatattagtccctagccagatgaactgtttacaaatattttctctcactcagcaggttatctcttcactctgttggttgttgactttgctgtacagaagmctttcatttaacgtagtcccatttgtctatttttggttttgttgcttgtgtttttgaggtcttagccataaattctgtacccaggccaatgtagtgaagc

SEQ ID NO: 355554 - DNA, 201 bp, Homo sapiens
ttctgagctattggcatggaaagagaaggcaacttccaggtgttgccatggcaattgaaaactgtcatgacgctggcaggcgtgtcttatggagaattgcytttggtgcctctttcatgtttcagccaatcttcagtctggtctggagtaaagtcttgcctcctaacctcaatctgacactaagttccttgttaggacaat

SEQ ID NO: 355555 - DNA, 201 bp, Homo sapiens
agcagggggcagtaagataatggcatcaagtcccctgtgcttcttcaacagtaacatttctgtgtccttgaagcctttttgtttcagcaaacagaaataayagctagtcacagtgctagtcacagtacgtatcctgaaggaaatcagtcagcttatatttcagataaatctggtattacaatgctaaaatcactatatgca

SEQ ID NO: 355556 - DNA, 201 bp, Homo sapiens
ttcccacctcagcctatgtggaggagctgagaccacaagcacgtgccaccatacccaggtaactctttgtatgtttggtagagatatgttgcccaggctcktctcgaactcctaacctcaagtgacccttgtgcctcggcctcccaaagtatcgtgattatagaagtgagccaccatgcttggccgataatttcattttat

SEQ ID NO: 355557 - DNA, 201 bp, Homo sapiens
gagaaagatgggcaaggctgattcaaagcattttgtgctgtttttagtgccctgagatatctcatgttcttagcaggtaacagtcgtttgcatccactgaygtttagatatgaaggatttaaggcctcattcagctagttcttttaggagaacgagggagtctataagagcaccctgtttagtttggttataaagaaagag

SEQ ID NO: 355558 - DNA, 201 bp, Homo sapiens
tggatgaatacataattgactattcccctacctacttcttttcccttgcaacatgtggattatcataccctccttctttccccgccggcctgcttttcccytttaaataccgaggccctcaaattcatttttagaaaaaggcacggaccacagactgtttctgtgactccatgtttatttgttctgggcttatccttaact

SEQ ID NO: 355559 - DNA, 201 bp, Homo sapiens
gcgtgaacccgggaggcggagcttgcagtgagccgagatcgcgccactgcactccagcctgggcgacaaagcgagactccctctcaaaaaaaaaaaaaaawatatatatatacatatatatatataaaaatatatatatatacatatatatatttcgaaaagtatggtatatgtacagttaagatatctgaaaaagtcttg

SEQ ID NO: 355560 - DNA, 201 bp, Homo sapiens
ccatgtgagcccaatgaaaggagaaacctcctttcctggtggccttagaaaaggcttcacaaggacccagtagataacacttgagctgcagcttcaaggtkgagtagaagtttattaagtcgagaagaggagaaaggatattccaggcagaaactaaaaagggagatgtcataatctgggaaatgtcggggagtgtgggtg

SEQ ID NO: 355561 - DNA, 201 bp, Homo sapiens
aagaggagaaaggatattccaggcagaaactaaaaagggagatgtcataatctgggaaatgtcggggagtgtgggtgacactaagaaactaaagagttacstgggaaatgtttagctatcgagacagagctaactgctcaggcttgaattttaactctactatttatttctttgatcctggacaaattatttaatctcttt

SEQ ID NO: 355562 - DNA, 201 bp, Homo sapiens
acctcacaatacaggtgcatcatttagtgttctgtagttgtaagtcatagaaacaggctctggctaatacaagagctgaaagactaagggggagagctgggcggcttggaagatgcagatgggcaggaatccctggatggcttcctcaaggagaagctacaggaaggatcttgctcaagagaaagagtctgattggcctaa

SEQ ID NO: 355563 - DNA, 201 bp, Homo sapiens
agctccgcctcccgggttcccaccattctcctgcctcagcctcccgagtagctgggactataggcgcccgccaccacgcctggctaatttttttgtatttktagtagagacagggtttcaccctgtttagccaggatggtctcaatctcctgaccttgtgatccgcccacctcggactcccaaagtgctgggattacaggc

SEQ ID NO: 355564 - DNA, 201 bp, Homo sapiens
attttattttttttgagacagggtcttgctctgtcgcccaggctggactgcagtggcacgatctcggctcactgcaagctccgcctcccaggttcacgccrttctcccgcctcaccctccggagtagctgggactacaggcgcgtgccgccacgcccagctatgttttttgttttttgttttttggggttttttttgtatt

SEQ ID NO: 355565 - DNA, 201 bp, Homo sapiens
aggtcaggagttcgagaccggcctgggccacatggcaaaactctgtctctactaaaaatacaaaaattagctgggcatggtgatgcactactaatctcagmtactctggaggctgaggcatgagaatcgcttgaacccaggaggtggaggttgcagtgagccgaaattgcgccactgcattccagcctgggcaacagactg

SEQ ID NO: 355566 - DNA, 201 bp, Homo sapiens
tggaaggaaaagcgaatcaaccgattcagtgatgttagtgcatccagaaacaggcttttgggaaaagcttgacctgagctgattaaatcctgaagcacaarggaagcagccacatcaaaaagttagcatgagagcagtggcgtgctcatcctctggtagcctttactgggcatttgtggagtaagagagaaaagaaaagca

SEQ ID NO: 355567 - DNA, 201 bp, Homo sapiens
ccctcaaggaagtagagcataattcaccaccccttaagttgtgccagatttagtaactcccttccaaaggggacagtgtagaaaggagaggaaaagagtamcttcacaatggaagaaactgacagagtaccctcaaccaggtgatgaaggttaacatcagcatcgatcggtcatgttgatagcatgtatccttgatattga

SEQ ID NO: 355568 - DNA, 201 bp, Homo sapiens
gatcataagttgattcattataagtagggaaccaactatacttaactttttattttttatttttttttattttttttgagacagagtctcgctctgtcgcsgaggctggagtgcagtggcgtgatctcggctcactgcaagctccgcctcccgggttcccaccattctcctgcctcagcctcccgagtagctgggactata

SEQ ID NO: 355569 - DNA, 201 bp, Homo sapiens
gcaacctccgcctcccaggttcacgccattctcctgcctcagcctcctgagtagctgagactacaggcacccgccaccacgcccggctatttttttttttwtatatttttagtacagacggggtttcaccatgttagccaggatggtctcgatctcctgacctcatgatctgcccgcctcagcctcccaaagtgctgggat

SEQ ID NO: 355570 - DNA, 201 bp, Homo sapiens
atttttcgtatttttagtagagacggggtttcaccatgttagccaggatggtctcgatctcctgacctcgtgatccgcccgcctcggcctcccaaagtgcygggattacagacgtgagccaccgtgcctggcctaaaagtagattttttaattacagtagtagctatttttatatcttatcagccagtcagattctgagta

SEQ ID NO: 355571 - DNA, 201 bp, Homo sapiens
agctgggactacaggcacccgccaccacgcccagctaatttttcgtatttttagtagagacggggtttcaccatgttagccaggatggtctcgatctcctracctcgtgatccgcccgcctcggcctcccaaagtgctgggattacagacgtgagccaccgtgcctggcctaaaagtagattttttaattacagtagtagc

SEQ ID NO: 355572 - DNA, 201 bp, Homo sapiens
ccgagtagctgggactacaggcacccgccaccacgcccagctaatttttcgtatttttagtagagacggggtttcaccatgttagccaggatggtctcgawctcctgacctcgtgatccgcccgcctcggcctcccaaagtgctgggattacagacgtgagccaccgtgcctggcctaaaagtagattttttaattacagt

SEQ ID NO: 355573 - DNA, 201 bp, Homo sapiens
cttccgagtagctgggactacaggcacccgccaccacgcccagctaatttttcgtatttttagtagagacggggtttcaccatgttagccaggatggtctygatctcctgacctcgtgatccgcccgcctcggcctcccaaagtgctgggattacagacgtgagccaccgtgcctggcctaaaagtagattttttaattac

SEQ ID NO: 355574 - DNA, 201 bp, Homo sapiens
taatttatgagtactctgtcaagtcatgaattcaaacttaatgcagaatgggcttttaaattctaatatattgttacttgcaattcagctgactgacttakgtgttgtccttagggagagtggaggttttttggttcgttggtgggttggtttttgctttttttttctttctgagttccaggtttaagttgcccccctccc

SEQ ID NO: 355575 - DNA, 201 bp, Homo sapiens
gcagatccgaagccaaccctccgctgggacaaactctaggcaacaacaccagatgaatattgtgtcctatgggacttcccggggagggcccttcccattgwcgttaacagtccccctgcgaagccgctgcgcgctcctactggctggttgagatgccaatcgccaaggctggctttccattggttccaggagggcactgcg

SEQ ID NO: 355576 - DNA, 201 bp, Homo sapiens
aggatcttgctttgccacccaggctgaagtgcagtggtaagatcctggctcattgcagccttgaaatcctgggctcaagcagtcctcctgcctcagctttytgagtagctgggactataggcacgcaccactgtatggctaatttgtctttttttttttttttcccttccgtggagatggaatctcactgtgttgcccagg

SEQ ID NO: 355577 - DNA, 201 bp, Homo sapiens
ggatctgtggtcccccgagtgcgccgctggaatgctgggaaatgtagtctctgtcgcgtcgcacagtgcaactcagctgccgtctcagacggctagtgtgytcagtggctggagcaggtccctaaagcctctgcagatccgaagccaaccctccgctgggacaaactctaggcaacaacaccagatgaatattgtgtccta

SEQ ID NO: 355578 - DNA, 201 bp, Homo sapiens
tcttctcgcagctccactaggcagtgccccagtagggactctgtgtgggggctccaaccccacatttcccttacttactgccctagctgaggcgctttatkagggccctgcctctgtagcaaacttttgtctgggcatccaggcatttccatacatctaaactccaggcggaggttcccaaacctcaattcttgacttctg

SEQ ID NO: 355579 - DNA, 201 bp, Homo sapiens
tggaatgctgggaaatgtagtctctgtcgcgtcgcacagtgcaactcagctgccgtctcagacggctagtgtgctcagtggctggagcaggtccctaaagsctctgcagatccgaagccaaccctccgctgggacaaactctaggcaacaacaccagatgaatattgtgtcctatgggacttcccggggagggcccttccc

SEQ ID NO: 355580 - DNA, 201 bp, Homo sapiens
tgagaagaggtattagtgtattggagaaagagttaagaggcttttgtgcctagggcatagtgattgaggggccttgtagaccatggaaagaactcgatttktttaagtgcagaggaaagccagggattgacatctaacttacagttttaaaagaccctttccttctatgaagagaatggagaaggaggcaagaatagaagc

SEQ ID NO: 355581 - DNA, 201 bp, Homo sapiens
aatctggttagcagtaagctgttaaaacaaatatgtttttagccagatgatgaccaatcatcaaagcttgtctttcatttctagcatttttagccaaatgyttcctcggttttttttttgtgtttttgtttttgttttggctcctcagaagtcaacttgaagtttcctcttttgaggaccagcttttctcattgttattat

SEQ ID NO: 355582 - DNA, 201 bp, Homo sapiens
agcgatgtgtaacacaaatcatgtgacaacagaattctttccatatcttggtaaagtcttccccttactttcttctattgatttaaacagaaatttacttrgatgtgacccatttgataaggaccagctgataaagtataccagctgattcaaataattgctccagctaatttacatgaaggttttcctattttattgttt

SEQ ID NO: 355583 - DNA, 201 bp, Homo sapiens
tagccaaatgtttcctcggttttttttttgtgtttttgtttttgttttggctcctcagaagtcaacttgaagtttcctcttttgaggaccagcttttctcrttgttattattttaagacatctaccttaataacttttatttctccttactaatagactattatggatttccattttataaagatgttcccaaattgctgc

SEQ ID NO: 355584 - DNA, 201 bp, Homo sapiens
tccgtggagatggaatctcactgtgttgcccaggctggtcttggattcctgggctcaagcagtcttcctgctttggcctcccaaagtgttggtattacagrcatgtgccactgcacccagcctgaattgccctttttacagtccactggaccctgaaagcatcgcttgtggttgctcagcctgaagagaattctaatgaac

SEQ ID NO: 355585 - DNA, 201 bp, Homo sapiens
ggtatgagtattaaataagactgaaaaataaaaaagagggactgttagcacagcacgtgacatatatgttgaaagtaggtactcaaatattagctcttttmccctgactcttgtttctttgaggactacctttaaactatgaatatagctagatgccagataaggctagaaatattgttcaccttttccctggcctcatgc

SEQ ID NO: 355586 - DNA, 201 bp, Homo sapiens
ggttgagatgccaatcgccaaggctggctttccattggttccaggagggcactgcgaggctagggggaaggagaagggatcagaagcgggagctgaggggrgagagaggccggtcctggtctggccgctgcggctgctagcccgaggtctccaagccgggctgcggctccatcctcggctcctgggcaccgtctgcgaggc

SEQ ID NO: 355587 - DNA, 201 bp, Homo sapiens
cccaggttcccatctttctcctgcctcagccttccgagtagctgggactacaggcacccgccaccacgcccagctaatttttcgtatttttagtagagacrgggtttcaccatgttagccaggatggtctcgatctcctgacctcgtgatccgcccgcctcggcctcccaaagtgctgggattacagacgtgagccaccgt

SEQ ID NO: 355588 - DNA, 201 bp, Homo sapiens
cacctcccaggttcccatctttctcctgcctcagccttccgagtagctgggactacaggcacccgccaccacgcccagctaatttttcgtatttttagtasagacggggtttcaccatgttagccaggatggtctcgatctcctgacctcgtgatccgcccgcctcggcctcccaaagtgctgggattacagacgtgagcc

SEQ ID NO: 355589 - DNA, 201 bp, Homo sapiens
ttgcccaggctggagtgcagtggcaagatctcggctcactgcaagctccacctcccaggttcccatctttctcctgcctcagccttccgagtagctgggaytacaggcacccgccaccacgcccagctaatttttcgtatttttagtagagacggggtttcaccatgttagccaggatggtctcgatctcctgacctcgtg

SEQ ID NO: 355590 - DNA, 201 bp, Homo sapiens
tttttgatatggagtctcgctctgttgcccaggctggagtgcagtggcaagatctcggctcactgcaagctccacctcccaggttcccatctttctcctgyctcagccttccgagtagctgggactacaggcacccgccaccacgcccagctaatttttcgtatttttagtagagacggggtttcaccatgttagccagga

SEQ ID NO: 355591 - DNA, 201 bp, Homo sapiens
attttttaaagttttaatagttttaaaagtagattttttttttttttttgatatggagtctcgctctgttgcccaggctggagtgcagtggcaagatctcrgctcactgcaagctccacctcccaggttcccatctttctcctgcctcagccttccgagtagctgggactacaggcacccgccaccacgcccagctaattt

SEQ ID NO: 355592 - DNA, 201 bp, Homo sapiens
aaattttaaggctccaaaatgagctcctttgactccaggtctcacaaacaggtcacggtgatgcaagaggcgggttctcatggtcttgggcagctccgccyctgtggctttgcagggtacagcctccctcctgcctgctttcaccagctggcgttaagtgtctgcggcttttccaggtgcacggtgcaagttggtggatct

SEQ ID NO: 355593 - DNA, 201 bp, Homo sapiens
gtctcgccctgtcacccaggctggagtgcagtggcgtgatctcagctcactgccagctccgcctcccaggttcaagcaactctcctgtctcagcctcccargtagctgggattacaggcatacaccaccacaccggttaattttttttttgtatttttagtagagacagggtttcaccatattggtcaagctggtctcgaa

SEQ ID NO: 355594 - DNA, 201 bp, Homo sapiens
ggttcccaaacctcaattcttgacttctgtgcacccgcatgctcaacaccacatggaagctgctaaggcttgggtcctccaccctctgaagccacagcccragctgtacattggccccttttagccacggctggagcagctgggacatggcaccaagtggctgcacacagcatggggaacctgggcccagcccgtgaaacc

SEQ ID NO: 355595 - DNA, 201 bp, Homo sapiens
ctgggactacaggcgtgcgccaccacatctggctaatttttgtattttgagtagagatggggtttcaccatgttggccatcctggtctcgaactccggacmtcaagtgatctgcccgcctcagcctcccaaagtgctgggattacaggtgtgagccaccacgcccagccagttactttcttaacagttctttctctcactt

SEQ ID NO: 355596 - DNA, 201 bp, Homo sapiens
tactcaggctgcttggtgcaggtgagaagaggtattagtgtattggagaaagagttaagaggcttttgtgcctagggcatagtgattgaggggccttgtasaccatggaaagaactcgatttttttaagtgcagaggaaagccagggattgacatctaacttacagttttaaaagaccctttccttctatgaagagaatgg

SEQ ID NO: 355597 - DNA, 201 bp, Homo sapiens
cctctgttctctctgttctacctttctagaacttctattagttagacactagaactcttggactattcttggactataagtttttgtgcctttactctccyttttttttttttttttttttttgagacagggtctccctctgtcgcccaggctggagtgcagtcgcatgatctcggctcactgcagcattgattttgtgga

SEQ ID NO: 355598 - DNA, 201 bp, Homo sapiens
cttgaacccgggaggcggaggttgtggtgagccgagatcgtgccattcactccagtcggggcaacaagagcgaaactctgtctccaaaaaaaaaaaaaaaagaaaagcaattaagtccttaacctggttatttacagagaaaagacattcatgttgtggaaatcaaccatgtatttttagctacttctctcccttgaaata

SEQ ID NO: 355599 - DNA, 201 bp, Homo sapiens
tgttaaaacaaatatgtttttagccagatgatgaccaatcatcaaagcttgtctttcatttctagcatttttagccaaatgtttcctcggttttttttttktgtttttgtttttgttttggctcctcagaagtcaacttgaagtttcctcttttgaggaccagcttttctcattgttattattttaagacatctaccttaa

SEQ ID NO: 355600 - DNA, 201 bp, Homo sapiens
ttaagacatctaccttaataacttttatttctccttactaatagactattatggatttccattttataaagatgttcccaaattgctgcatttctaccatraactaagggcttccttttcacccctaaaattacagaacttagaggggccttcaatggcctcaatcccaacgtcgttggatggagctctctttgtatttct

SEQ ID NO: 355601 - DNA, 201 bp, Homo sapiens
ggtagcacgtgtccaaggctaggccttcttgtgctcacccctgattatgccagggctgggagaaaaggatctggcctttctagctgctgtagtgcaaagcrgtcactgccttccacaaggtagagactctcttctttgggaagagagtctgatcacaagatagcaaaaaaagaaaaccaaaaaaaagacacatgtaaacta

SEQ ID NO: 355602 - DNA, 201 bp, Homo sapiens
ctcacccctgattatgccagggctgggagaaaaggatctggcctttctagctgctgtagtgcaaagcagtcactgccttccacaaggtagagactctcttstttgggaagagagtctgatcacaagatagcaaaaaaagaaaaccaaaaaaaagacacatgtaaactatatctatattatacatatatttatctgcagctc

SEQ ID NO: 355603 - DNA, 201 bp, Homo sapiens
cgcggcacactggagtctaagttacagaggaaccgagtgcaggggatgctgggatttgtagtccccgggcctctttgtggtgcgctgggatctgtggtccmccgagtgcgccgctggaatgctgggaaatgtagtctctgtcgcgtcgcacagtgcaactcagctgccgtctcagacggctagtgtgctcagtggctggag

SEQ ID NO: 355604 - DNA, 201 bp, Homo sapiens
tgagactagaagctacaaaatgaaaagatctgcatgaacctaactggagaatgatgggaaggcgtctgggctgggaggaggctgggaggcctttaagactrtcgtcattggaagccagcgtgggagagaagggattacaactggcagtgctttcaggtccgacataagagagaacaccaaaaagtgttcttacctctgagc

SEQ ID NO: 355605 - DNA, 201 bp, Homo sapiens
acctctaagaaaatgctgcttatattgtgtcctgctcgctggtcctagtcctttagacctcaaagcatgagaagcaagcctttggtgtggttcagaggacwacctgagcaggcttccctgtcttttttacgcccctggtctgagaggttgctgatagcttcctttggtggttctcagggtaggaagaggctcactctagag

SEQ ID NO: 355606 - DNA, 201 bp, Homo sapiens
ggaggttgcagtgagctgagatcgcactccagcctgggcaacaaagcgagtgagtgaaacagagtgagtgagactctgtctaaaaaaaaaaaaaaaaaaawgtgatatggatgaaatagacatatattttcacatatataactaagaccataaattttatcaaataatatatgaatttaaagatattgtccccctctatac

SEQ ID NO: 355607 - DNA, 201 bp, Homo sapiens
cagatcacacgggtggagaggaacggcactgtctggagatgtattgagcatagaaggagagtttgttaggaattgcacaccctgaggggagaatgacacarccaatgtgatctgaaagcgacagtacattcatgcagggatgcccacaagcaggttgagtgcacagaaagatagactcctcatcacattgcaggcactctg

SEQ ID NO: 355608 - DNA, 201 bp, Homo sapiens
caaatattaacaactgctcttagaaccagtgcatttttccatgttgcaatatggagcataccaccaaatgctttctctggctgcaattttcttttcttttyttttttttttagtagagatggggtctcactatgttgcccagtctggtcttgaactcctgggctcagctgatcctcccggcttggcctcccaaagttctgg

SEQ ID NO: 355609 - DNA, 201 bp, Homo sapiens
gctgttaaaacaaatatgtttttagccagatgatgaccaatcatcaaagcttgtctttcatttctagcatttttagccaaatgtttcctcggttttttttktgtgtttttgtttttgttttggctcctcagaagtcaacttgaagtttcctcttttgaggaccagcttttctcattgttattattttaagacatctacctt

SEQ ID NO: 355610 - DNA, 201 bp, Homo sapiens
acctgggacgtggaggttgcagtgagccgagattgcaccactgcactccagcctggacaacagattgggactccgtctcaaaaataaaataaagtaaaatraaaattaaaaaataaaatacactgacgatagctgatgaactaaaaaataaataaaaaagttttaagaaagtttacaaatttgtgttgggccacatgcagc

SEQ ID NO: 355611 - DNA, 201 bp, Homo sapiens
gtgtggatctgtttattatataaaaaatgatgttgactatttccatttaaaacgaatcaagtctctcagaaccagtgtactcattccaaaatactcatagwtgattgttacaaactactttaacaggagtgtccaatcttttggcttccctgggccacattggaagaagaattatcttggagcacatgtaaaatacaccaa

SEQ ID NO: 355612 - DNA, 201 bp, Homo sapiens
actactttaacaggagtgtccaatcttttggcttccctgggccacattggaagaagaattatcttggagcacatgtaaaatacaccaacgggccaggcacygtggctcatgcctgtaatcccagcactttgggagaccgaggcaggtggattgcttgaggtcaggggtttgagaccagcctgggcaacatagtgaaacccc

SEQ ID NO: 355613 - DNA, 201 bp, Homo sapiens
gaatatttacttccttttttacctttcctaacgcttaatactttgcaaactattggttttgttctgaagcttacttttaagatattcttattttacatacsaaagtgcttccttatgtttgcctggttccaaattagagggtaccagagcccgatctcctctaagcaggaggcttcccataggaaaggaatgttcctttgt

SEQ ID NO: 355614 - DNA, 201 bp, Homo sapiens
gattgcaacactgcagtccagcctgggcaatgaagcaagaccctgtctcaaaaaaaagaaaaaaactattctaaaataaatgtttatttttaaaaaaaaaagactagaatagaataacacctgataaaacaatttatttcttggtgaattgatatgaattgaaatgttttagattttccatccctagattggtaatgagga

SEQ ID NO: 355615 - DNA, 201 bp, Homo sapiens
aatgagcagtgattgcaacactgcagtccagcctgggcaatgaagcaagaccctgtctcaaaaaaaagaaaaaaactattctaaaataaatgtttattttwaaaaaaaaaagactagaatagaataacacctgataaaacaatttatttcttggtgaattgatatgaattgaaatgttttagattttccatccctagattg

SEQ ID NO: 355616 - DNA, 201 bp, Homo sapiens
caatgagcagtgattgcaacactgcagtccagcctgggcaatgaagcaagaccctgtctcaaaaaaaagaaaaaaactattctaaaataaatgtttatttwtaaaaaaaaaagactagaatagaataacacctgataaaacaatttatttcttggtgaattgatatgaattgaaatgttttagattttccatccctagatt

SEQ ID NO: 355617 - DNA, 201 bp, Homo sapiens
tttatatttttatcttttattatttatttatttttatttgtttgtttatttatttttatttatttattttattttttttgagacagggtcttgctctgtcrcccaggctggactgcagtggcacgatctcggctcactgcaagctccgcctcccaggttcacgccattctcccgcctcaccctccggagtagctgggacta

SEQ ID NO: 355618 - DNA, 201 bp, Homo sapiens
tttttatttgttatttaatttatttccatgcaaaagctcatctatgtgaaagctagtggctttttatatttttatcttttattatttatttatttttatttgtttgtttatttatttttatttatttattttattttttttgagacagggtcttgctctgtcgcccaggctggactgcagtggcacgatctcggctcactg

SEQ ID NO: 355619 - DNA, 201 bp, Homo sapiens
ttttttatttgttatttaatttatttccatgcaaaagctcatctatgtgaaagctagtggctttttatatttttatcttttattatttatttatttttatttgtttgtttatttatttttatttatttattttattttttttgagacagggtcttgctctgtcgcccaggctggactgcagtggcacgatctcggctcact

SEQ ID NO: 355620 - DNA, 201 bp, Homo sapiens
atgataccttataggtcattgtgatctttttaagaataatagatagtggcagatacagtggctcacacctgtaatcccaacactttgggaggctaaggtgyatggatcccttgagctcaggagtttgagaccagcctgggaacatggtgaaaccctgcctctaccaaaaatacaaaaattagccaggcatggtagtgtgtg

SEQ ID NO: 355621 - DNA, 201 bp, Homo sapiens
attttttatttgttatttaatttatttccatgcaaaagctcatctatgtgaaagctagtggctttttatatttttatcttttattatttatttatttttatttgtttgtttatttatttttatttatttattttattttttttgagacagggtcttgctctgtcgcccaggctggactgcagtggcacgatctcggctcac

SEQ ID NO: 355622 - DNA, 201 bp, Homo sapiens
aatgcactatgcttgctattacattattacaatcattatttacctttgctttaaagtaggatatcagaaaagtcagagccttagtgattgttttttacttyagcttcgatacctgtgagccttttttcacatttctgggaattaattgtggctcttggagtgacaacagaagaaacccccagatgacactgaaaaaccaga

SEQ ID NO: 355623 - DNA, 201 bp, Homo sapiens
tcctctgttcacccttttgccaggtgagtgaggggccactcacttggcacatggactggaggaagggtggttcccaaatgaagagcaaggtgctgttaccyaaaggcaggaaaatagatgtgggccaggccaaagcccacctttcgactattgtgagtactgtagggaaggatactgcccctgaggtctgcaggcttctat

SEQ ID NO: 355624 - DNA, 201 bp, Homo sapiens
cccttgtctcagtgtttaagtcacagccagatttatttttcacttgaaaattatcctcttctaatgtggtcatatctcctatattcttttttttccctcarttcaccagatacaggggccagggtttagcccaggataatgaattttttaacaattagagttaccagaggaaaaaaagacattttccagaaaatacttaag

SEQ ID NO: 355625 - DNA, 201 bp, Homo sapiens
atagtttcattcaagggatagaaaagaggaggtctactttttaatagccacacacatagctatactcaatggagatcattattttgaaatatttaagctcmcaatatttaagtgcaacttacaacagggaagttttgttatcataaatggaattttgttttcaatgtggatcagtacaaattcaataactcaatacatcat

SEQ ID NO: 355626 - DNA, 201 bp, Homo sapiens
cactccagcctgggcaacagagggagactccgtctcaaaaaaaaaaaaaaaaagacaaaagccattttcttctcacagcaatggaagtgaagactattgaratgatttgttttagagagattctcttggggtgatatggctggctttactctgcagttggtacatggtatggtacatctggggcacttgtagccagcctct

SEQ ID NO: 355627 - DNA, 201 bp, Homo sapiens
atatgtaagccagccagaggtgtccatgaatgcagtatcagaaagtcagtcggatctataagcaccctgtgtgcagagcactctactaagggctttagagkgtaccaaggagtggagacatgctctcacttctgatttgtgagcttgacagggatgaatgtaaccacataagttaaatgtcatgttagacttgtagcccca

SEQ ID NO: 355628 - DNA, 201 bp, Homo sapiens
gaggtcaggagttcgagaccggcctgggccacatggcaaaactctgtctctactaaaaatacaaaaattagctgggcatggtgatgcactactaatctcarctactctggaggctgaggcatgagaatcgcttgaacccaggaggtggaggttgcagtgagccgaaattgcgccactgcattccagcctgggcaacagact

SEQ ID NO: 355629 - DNA, 201 bp, Homo sapiens
tgcacagaaagatagactcctcatcacattgcaggcactctgctgaataaccctttgttatattttgagacttttctttttttttttttttttttttgagrcggaatcttgctctgtcgccaggctggagtgcagtacatgatcttggctcactgctcactgcaacctccgcctcctctgttcaagcgattctcctgcctc

SEQ ID NO: 355630 - DNA, 201 bp, Homo sapiens
cattttttatttgttatttaatttatttccatgcaaaagctcatctatgtgaaagctagtggctttttatatttttatcttttattatttatttatttttatttgtttgtttatttatttttatttatttattttattttttttgagacagggtcttgctctgtcgcccaggctggactgcagtggcacgatctcggctca

SEQ ID NO: 355631 - DNA, 201 bp, Homo sapiens
tatatatataattttttttttttgagatggagttttgctcttgtcacccaggctggagtgcaatggcacgatctcagctcactgcaacctctgcctccgargttcaagtggttctcctgcctcagcctcctaagtagctgggattacgggcatgcgccaccacacccagctaattttgtatttttagtagagacggggttt

SEQ ID NO: 355632 - DNA, 201 bp, Homo sapiens
cccaaagtgctgggattacaggtgagccatcgctcctggcctagacactttccatctacgaaattttcttgaattaatttattgatgccatcctcccctcwgttctctctgttctacctttctagaacttctattagttagacactagaactcttggactattcttggactataagtttttgtgcctttactctccttttt

SEQ ID NO: 355633 - DNA, 201 bp, Homo sapiens
tgggcgtggtcgcacgctcctataatcccacctactggggaggctgaggcaggagaattgcttgaacctgggaggcggaggttgcagtgagccgagatcgygccattgcactccagcctgggcaacaagagcaaaactcatctaaagaaaaaaaataaatcgtttaatacttgaaacttttagtgtttggaaattgtcctg

SEQ ID NO: 355634 - DNA, 201 bp, Homo sapiens
agagaacatcagttaaccagcttcataagttgtaacctcaaaccagagaaattcacctaaaatatacagaattttattatattaatttttagtgtctgtaraggttatgtcttatctctcttttttaatgctcctttttaaaacttatgtctttatctgtaagcctctttattcttctaagttacttttttcttttagttt

SEQ ID NO: 355635 - DNA, 201 bp, Homo sapiens
tctactaaaaatacaacaattagctgggcgtggtcgcacgctcctataatcccacctactggggaggctgaggcaggagaattgcttgaacctgggaggcrgaggttgcagtgagccgagatcgtgccattgcactccagcctgggcaacaagagcaaaactcatctaaagaaaaaaaataaatcgtttaatacttgaaac

SEQ ID NO: 355636 - DNA, 201 bp, Homo sapiens
tgttggccaagatggtcttgatctcttgacctcgtgatccgcccgcctcggcctccaaaagtgctgcaattacaggcgtgagccacgacgcccagccgagrcttttctcgtatagcagcaaaacctagacagaatctctccagagggtaaaatatagtgttattacacacatgatgattccagtcagctgtgttgtttagg

SEQ ID NO: 355637 - DNA, 201 bp, Homo sapiens
gtgcagtggcgtgatctcagctccctgcaacctccgcctcccggattccagccatcccgagtagcctcagcctcccgagtagctgggattacaggcatgcrctaccatgcccaactgatttttgtatttttagtagagacagggtttcagttggccagactggtctcaaactccccctgacctcagatgatccacccttct

SEQ ID NO: 355638 - DNA, 201 bp, Homo sapiens
aggagaatggcgtgaacctgggaagcggagcttgcagtgagccgagattgcgccactgcagtccaacctgggcgacagagtgagactacatctcaaaaaaraaaaaagaattattgatttatagccattgttgggccaatacaatcaatgggatttccgtttagcctttggagattttatagaaatggtctcagaagagag

SEQ ID NO: 355639 - DNA, 201 bp, Homo sapiens
cccaggaggcagaggttgcagtgagctgagatcgcactactgcactccagcctggtcgacagagcaagactgtgtctaaaaaaaaaaaaaaaaaaaaaaaagcgttagtccttgaatccacttcagatttaaaaaaaaaaatagtttcattcaagggatagaaaagaggaggtctactttttaatagccacacacatagct

SEQ ID NO: 355640 - DNA, 201 bp, Homo sapiens
acccaggaggcagaggttgcagtgagctgagatcgcactactgcactccagcctggtcgacagagcaagactgtgtctaaaaaaaaaaaaaaaaaaaaaaaagcgttagtccttgaatccacttcagatttaaaaaaaaaaatagtttcattcaagggatagaaaagaggaggtctactttttaatagccacacacatagc

SEQ ID NO: 355641 - DNA, 201 bp, Homo sapiens
caggattcaaggcaatatccctgtgcctccaaataacctgaaagaaacagtggcccttttgggaacatgcccttgggaaaaggccttgtattatttcttcytcagtcaggaggtgctgggaagcaaataaaagtgcaaagggagcctctaagaatctctttggatatgtctcttctagcttgtttctgaccagttccaggc

SEQ ID NO: 355642 - DNA, 201 bp, Homo sapiens
agctttttttttttttttttttttttttgagacggagtctcgctctgtcacccaggctggagtgcagtggcgtgatctcagctccctgcaacctccgcctyccggattccagccatcccgagtagcctcagcctcccgagtagctgggattacaggcatgcactaccatgcccaactgatttttgtatttttagtagagac

SEQ ID NO: 355643 - DNA, 201 bp, Homo sapiens
aagcccacctttcgactattgtgagtactgtagggaaggatactgcccctgaggtctgcaggcttctatatgtaagccagccagaggtgtccatgaatgcrgtatcagaaagtcagtcggatctataagcaccctgtgtgcagagcactctactaagggctttagagtgtaccaaggagtggagacatgctctcacttctg

SEQ ID NO: 355644 - DNA, 201 bp, Homo sapiens
tgctctcatgagcagatctatagtagctaggattgatttcaaatattaacaactgctcttagaaccagtgcatttttccatgttgcaatatggagcatacsaccaaatgctttctctggctgcaattttcttttcttttcttttttttttagtagagatggggtctcactatgttgcccagtctggtcttgaactcctggg

SEQ ID NO: 355645 - DNA, 201 bp, Homo sapiens
taagtgcaacttacaacagggaagttttgttatcataaatggaattttgttttcaatgtggatcagtacaaattcaataactcaatacatcatcttccttstctactaagcatatccccaagagaacattgttaggaagggcaaaagggccatttccatggtatatttgaggaagtctgcttgcctttctcaccctgtcat

SEQ ID NO: 355646 - DNA, 201 bp, Homo sapiens
tcactgatcatgtgcataccctccctacacactagcaattcctctcctagaaatgtgtgcaagtgtctacaaaaagaaacatgtaagaatgctcactacgrctttgctaataatagtccaaaaaataacaacccaaatgcccgccaacagtggaaaagataaattgtggtataaacatacaacagaatactattcagcaat

SEQ ID NO: 355647 - DNA, 201 bp, Homo sapiens
cactgtttgttgttagttcctaaagcactgccacgggagacttatactcctggggtctcttcatgtccccaagagggagttgatggaagatggttattaayctataccaacttcagtttattagcttttctgcttcccaaacatgtttttggcagagaaatagattccacagatccctttatagtgcttctctatcccttt

SEQ ID NO: 355648 - DNA, 201 bp, Homo sapiens
tgggaggcggaggttgcagtgagccgagatcgtgccattgcactccagcctgggcaacaagagcaaaactcatctaaagaaaaaaaataaatcgtttaatwcttgaaacttttagtgtttggaaattgtcctggtccacaggaggggacatgtttaaaaggagatgtctgttgggaggctgaggcaggcaagttgcttgag

SEQ ID NO: 355649 - DNA, 201 bp, Homo sapiens; identical to SEQ ID NO: 76028

SEQ ID NO: 355650 - DNA, 201 bp, Homo sapiens
cttagagcaacatcttgaaaacttcaatggtatatgatggccaagctatgttgtaatcaaagtcgaatatgtcttcttgcccaaacctttgggaataaatrccactccaacaacttcaacaaaagaaatggtctgcccccaaaacttctgttcttgccccagtctgcttgcattataggggaagagagtaattttgctaat

SEQ ID NO: 355651 - DNA, 201 bp, Homo sapiens
gtgttgctaaatgactgttgggttggaagtcattgctttaaaattttctacttttaatttgaccgacttgttctgatgtctttctaggtacccatggccamatgaaatgcagctttgatgggaagctaaaatctcaagacacagtactgatgaacctgtataaacgagtcttccccaaatggacttatgatccatatgtac

SEQ ID NO: 355652 - DNA, 201 bp, Homo sapiens
tatctggtgccttgcctaggtgagaataaccagagggatagggaaaagaagtctgtaatttacttaatttgtttgggcttttacagatttcttgaaggaargttctaaggtggtaaagaaggtccccaaaggaacatccagttaccaagctgaatggattttggatggtggcagccaaagtggtggggaaggagatgaata

SEQ ID NO: 355653 - DNA, 201 bp, Homo sapiens
tcagtagatccagacagaatggtcatcaagagagttgttctgagtggtcatcctttcaaaatttttactaagatggcagtagtacgttacatgttcttcarcagaggtgggtatgaaggaggaggatgggatctgattgcctttgtggtataaaggttgggtttacattttgtgggtaaatgtttcatcttggtctttaat

SEQ ID NO: 355654 - DNA, 201 bp, Homo sapiens
tgattgcctttgtggtataaaggttgggtttacattttgtgggtaaatgtttcatcttggtctttaatgtgtttgattctaagaggatgtgctgtggtttmaaccagtggaactgagaacgaagtggggccggagaggacatatcaaggaacctttaggtaaggaaacacgggatttgagaccatgtctgcatttctgcag

SEQ ID NO: 355655 - DNA, 201 bp, Homo sapiens
tttagcattctgtcgcactcatcttatacatgaggactgatatttctgggtctttctggttactgtgttagatttaggagatttttggttcatggttgacyatcacctgcttttggttttcagatttgtgctacggatgctgtagatgatatggaagaaggtcttaaagtcctaatgaaggcagaccctggtagacaggaa

SEQ ID NO: 355656 - DNA, 201 bp, Homo sapiens
ctgggaacaaagaggtatcagctatgttaaatgaaaaagtgtgatctgggtaaatgaagcatcttgaaggatgagggttggctttaaaaattttatctgaragactcaacatatttggagaaagcttcctcgctattgggactttgaaaggtaactccatgattgctttctgctttcttgtggcaggttggctggtatgtc

SEQ ID NO: 355657 - DNA, 201 bp, Homo sapiens
gtttatagaacacactcaagatgtggttgctttcctcaagggacttaattgggctggaacaaaatggcatgtgtgaaataaagattgagatagcatatggytagagtgcggaccagcagtggaagttgagaaagtagactagcaagcttcacataagagatcagacttgagctaggtgttgagaaggataaatgtgattta

SEQ ID NO: 355658 - DNA, 201 bp, Homo sapiens
ctcaggctggagtgcagtggtgcgatctgggctcactgcaagctctccctcctgggttcacgccattctcctgcctcagcctcctgagtagctgggactamaggcgcccaccaccatgcctggctaatttttttgtatttttagtagagacggggtttcactgtgttagccaggatggtctcaatctcctgacctcatgat

SEQ ID NO: 355659 - DNA, 201 bp, Homo sapiens
tttgggagattgaggtgggtggatcacaaggtgaggagttcgagaccagcctggccaacatggtgaaacccggtctctactaaaaatacaaaaattagccrggcgtggtggcatgtgcctgtaatcccagctactcaggaggctgaggcaggagaactgcttgaacccgggaggcagaggttgcagtcagctgagatcaca

SEQ ID NO: 355660 - DNA, 201 bp, Homo sapiens
atagaacacactcaagatgtggttgctttcctcaagggacttaattgggctggaacaaaatggcatgtgtgaaataaagattgagatagcatatggttagrgtgcggaccagcagtggaagttgagaaagtagactagcaagcttcacataagagatcagacttgagctaggtgttgagaaggataaatgtgatttatgag

SEQ ID NO: 355661 - DNA, 201 bp, Homo sapiens; identical to SEQ ID NO: 76048

SEQ ID NO: 355662 - DNA, 201 bp, Homo sapiens
agctcgcgcggggccccgccccctcccctggcggcgcgggcactgaatgggcagctccggatccagccatccccgccatcgccgccacccctcccccggcyttgggctcccagcgccgctgccgtcactgggcggggagctgcggggctgcgaagcaaacaagccgggagcgccggccgggtcccccgggcagaggggcgc

SEQ ID NO: 355663 - DNA, 201 bp, Homo sapiens
accattaattagcattgtcagttcttagaatgagtctgaatctgctagtttggtttgccttctttcagtttaggcaattgtattcctagactatgaagatktttgtttttcttacttggtccccagatgtcagtattgaatatggtggtgaggcgtgaccctggcaacactgaacctgtgaaagccaaggaagagctcata

SEQ ID NO: 355664 - DNA, 201 bp, Homo sapiens; identical to SEQ ID NO: 76034

SEQ ID NO: 355665 - DNA, 201 bp, Homo sapiens
tatgtttgagtagtggtattttttttttttttttttagaataatgtgctggtgccaaccacctcttcttactgtgtcttctatctgcaggggatctgcacrttgtgttagacatggctaaagtagctgataccatcctgttcctccttgatccactagaaggctgggacagcaccggtgattactgtctttcctgcctctt

SEQ ID NO: 355666 - DNA, 201 bp, Homo sapiens
ttccctttaaatcctagaggaattaaaccccaaaaggacccagacatggcaatggaggtaagactgatattcttaattcatgttcatatgaaagttggcayaggaaggaaacttaaattcagagaagatagtctgtacacttaggtgaatgaggagactgctagtctgaagtaaggcaatagtcagttataaataggttga

SEQ ID NO: 355667 - DNA, 201 bp, Homo sapiens
aaacttaaattcagagaagatagtctgtacacttaggtgaatgaggagactgctagtctgaagtaaggcaatagtcagttataaataggttgataaatcayatatttatccagcactttctaggtagtctgcactgtgattggctctgagtttatagaacacactcaagatgtggttgctttcctcaagggacttaattgg

SEQ ID NO: 355668 - DNA, 201 bp, Homo sapiens
tgtttgagtagtggtattttttttttttttttttagaataatgtgctggtgccaaccacctcttcttactgtgtcttctatctgcaggggatctgcacgtygtgttagacatggctaaagtagctgataccatcctgttcctccttgatccactagaaggctgggacagcaccggtgattactgtctttcctgcctctttg

SEQ ID NO: 355669 - DNA, 201 bp, Homo sapiens
atccatatcatccctggctgacctcaccatgggagactctttgttcatggcttctgcatcgaaagtgacacgaagagtgcctcgatattctttagcactgkttttctgctcaccctccccacggccagaccagtttctttctaaatgtctcttcctttctgaacttctcctgggtcctaatccatcaggctcatcaattct

SEQ ID NO: 355670 - DNA, 201 bp, Homo sapiens
gaagttcttgtttcgggtttttggactcctgcttctcagagcctttgcccccactgctcaagcctttgtcaggctttcctctatccatatcatccctggcygacctcaccatgggagactctttgttcatggcttctgcatcgaaagtgacacgaagagtgcctcgatattctttagcactgtttttctgctcaccctccc

SEQ ID NO: 355671 - DNA, 201 bp, Homo sapiens
tgtcctcgtctaaggaatcggttgaggacacagacacttgcttcttcagtcgtggcctctccttggtcctatcctgtcggcggcggcgacatccattatcygtcaggccagctccctcagcgctgttgttgctgccagctgagctggtgctgcgcgtgcggtagcgattccttcgtttgtctgagcgggagtagcgctttg

SEQ ID NO: 355672 - DNA, 201 bp, Homo sapiens; identical to SEQ ID NO: 76060

SEQ ID NO: 355673 - DNA, 201 bp, Homo sapiens
taaggagagcagtgcttggtaccaccttaacagctttcatttgaccaatggctctttctaccttactggctgctccttctcagcctcctttgtggtttccyctttatttctgttagcatgctcaaccttttctctatctacactcacaagatctcattagtctcatttcttaaattattacctatggtctaacaacaccaa

SEQ ID NO: 355674 - DNA, 201 bp, Homo sapiens
ccatgcctggctattttttttttttttttttttttttgtatttttagtaaagacagggtttcaccgtgttagccaggatggtctcaatttcctgaccttgkgatccgcctgcctcagcctcccaaagtgctgggattacaggtgtgacccaccgtgcctggccacataagtttctattctaaattctcctgactttttcct

SEQ ID NO: 355675 - DNA, 201 bp, Homo sapiens; identical to SEQ ID NO: 76062

SEQ ID NO: 355676 - DNA, 201 bp, Homo sapiens
tgagacggagtctcactctgtcacccaggctggagtgcagtggcacgatcttggctcactgcaagctccacctcccaggttcacgccattctcctgcctcwgcctcccgagtagctgggactacaggtgcctgccaccatgcctggctagtttttttttgtttttttttttgtatttttagtagagacggggtttcaccgt

SEQ ID NO: 355677 - DNA, 201 bp, Homo sapiens
cttacagccaacaacaacaaaaggaaatccaaatgttcatttgagctatgtaaacttaaaattattattttttctttttcaagagatagggtcctgcttaygttgcccaggccacagtacagtggctattcatagacgtgataataacacactcccgggctcaagcaagcctcccgccttagcctcccaagtagccgggac

SEQ ID NO: 355678 - DNA, 201 bp, Homo sapiens; identical to SEQ ID NO: 76059

SEQ ID NO: 355679 - DNA, 201 bp, Homo sapiens
agtgctgaaccaggtaaaatagctgagttcttcctgtttagctactggtaaagctgttgggctatattcaattattttatatgtatacattaaatataaarctgcttacagtttatattttcactaaaggttcctttggtggatgcactggtggtacctgtaggtggaggaggaatgcttgctggaatagcaattacagtt

SEQ ID NO: 355680 - DNA, 201 bp, Homo sapiens
ctgccagctgagctggtgctgcgcgtgcggtagcgattccttcgtttgtctgagcgggagtagcgctttgcggagcccggcctcccgcgggccgggtcgtsgtgggtttccctcaccccctccccttttcccatcctctttcctttttctccttttgcagcccctactctcccaccacctgggctcttttctatctcggcc

SEQ ID NO: 355681 - DNA, 201 bp, Homo sapiens
agaatggcgtgaacccgggaggcggagcttgcagtgagccgagatcgcgccactgcactgcagcccgggctacaacagagcgagactaggtctaaaaaaawaaaaaaaaaaaatttagccgggcatggtggcaggtgcctataatcccagctacttgggaggctgaggcaggaaaatcacttgaacccggccctgggggta

SEQ ID NO: 355682 - DNA, 201 bp, Homo sapiens
tccctactaaatacaaaacattagccaggtgtggtgctacatgcctgtaatcccagctacttgggaggctgaggcaggagaatcgcttgaatccgggaggyggaggttgcagtgagctgagattgccccattgcactccagcctgggcaacaagagcgaaactccatctcaaaataataataataataataatttgtagag

SEQ ID NO: 355683 - DNA, 201 bp, Homo sapiens
caacaaattgtaccaccatttaagtcaaaacccaggagttactctttttaaagaaaaatttttggctgggcacggtggctcacacctgtaatcccagtackttgggaggccgaggtgggtggatcacaaggtcaagagatcaagactatcctggccaattagctgggcatggtggcacgctcctgtaatctcagctacttg

SEQ ID NO: 355684 - DNA, 201 bp, Homo sapiens
agggttttaatgtattttttttttttgcacccaagctgttgattgctaaatgtaatagtctgatcgtgacactgaataaatgtctttttaaaaaaaaaaaacaacaaaaaaaccaccaattttaaataattcatgggtcaaaaaagaaaacaagactaaaatattggattatttagaaattataataatgaaaatattgca

SEQ ID NO: 355685 - DNA, 201 bp, Homo sapiens
aaaatttaaatttataaattaaaaataatataaaaattgaatccaattcattcaagtagcttcacaacgatgattaaaagaaaggtggagctgggcacggkggcttacacctgtaatcccagcactttgggaggccgaggcaggcggatcacgaggtcagaagttcaagaccagcctggacaacatggtgaaaccccgtgt

SEQ ID NO: 355686 - DNA, 201 bp, Homo sapiens
cattccaacaaagggttttaatgtattttttttttttgcacccaagctgttgattgctaaatgtaatagtctgatcgtgacactgaataaatgtctttttwaaaaaaaaaaacaacaaaaaaaccaccaattttaaataattcatgggtcaaaaaagaaaacaagactaaaatattggattatttagaaattataataatg

SEQ ID NO: 355687 - DNA, 201 bp, Homo sapiens
atcacttgaggtcaggagttcgagaccagcctggccaacatggcgaaaccccgtctctactaaaaatacaaaaactagccgggtgtggtggtgggtgcctrtaatcccagctacttgggagactgaggcaggagaatcacttgaaccaaggaggtagaggctgcagtgagccgagatcacgccactgcactccagcctggg

SEQ ID NO: 355688 - DNA, 201 bp, Homo sapiens; identical to SEQ ID NO: 76056

SEQ ID NO: 355689 - DNA, 201 bp, Homo sapiens
tgtttctttttcatgtttatgtaaatacttctgactattgcacactgttatcttcagtgacctcataccctggccactggtcctgggccaagatgggccaragtccttacccagaatttttttaactgaaactgagaaagaaaattccccttcagtgtggaagccataaaatgtaaaacatacgagctgtcagcagccacg

SEQ ID NO: 355690 - DNA, 201 bp, Homo sapiens
gaggccaaggtgggcagatcacttgaggtcaggagttcgagaccagcctggccaacatggcgaaaccccgtctctactaaaaatacaaaaactagccgggygtggtggtgggtgcctataatcccagctacttgggagactgaggcaggagaatcacttgaaccaaggaggtagaggctgcagtgagccgagatcacgcca

SEQ ID NO: 355691 - DNA, 201 bp, Homo sapiens
ctcatgcctgtaatcccagcactttgggaggccaaggtgggcagatcacttgaggtcaggagttcgagaccagcctggccaacatggcgaaaccccgtctytactaaaaatacaaaaactagccgggtgtggtggtgggtgcctataatcccagctacttgggagactgaggcaggagaatcacttgaaccaaggaggtag

SEQ ID NO: 355692 - DNA, 201 bp, Homo sapiens
ttgacccgggaggcggaggttgcagtgagccgagattgtgccactgcactccagcctgggctacagagcgagactccgtctcaaaaaaaaaaaaaaaaaaaggaagatggagaccagtggcagtgccaacagtgccaagagatgggtggtgtgggtggggagtgggctttagccttctgtaatcaccatcagttacttccc

SEQ ID NO: 355693 - DNA, 201 bp, Homo sapiens
gccctccggactgatgcggtccctggagagcaggttgctgagctgcagttcctggttgtcagccacccggagaagcctgtgcagctcctgttgctgcaggytcctcatgtgctgctctacctcctcgggactcatggtgctggtaggtagagggctacacacatactgtcctgacggagtcgggtagcctgggtagtaagg

SEQ ID NO: 355694 - DNA, 201 bp, Homo sapiens
catcgaaagtgacacgaagagtgcctcgatattctttagcactgtttttctgctcaccctccccacggccagaccagtttctttctaaatgtctcttcctytctgaacttctcctgggtcctaatccatcaggctcatcaattctgtcctcgtctaaggaatcggttgaggacacagacacttgcttcttcagtcgtggcc

SEQ ID NO: 355695 - DNA, 201 bp, Homo sapiens
gcgcggcctggcctcctttaattccttcatgttttctgttatgtcggggaaagagtttgggagggaaaggtagaagataagaataaagaaggaagataggrgaaagactgtcattctggttaagtaacaaaaaaagtcgagcaagaattacatatccaaatgctaatactggtaggcaaagaaggacatttctgtagaagc

SEQ ID NO: 355696 - DNA, 201 bp, Homo sapiens
atcgtgacactgaataaatgtctttttaaaaaaaaaaaacaacaaaaaaaccaccaattttaaataattcatgggtcaaaaaagaaaacaagactaaaatmttggattatttagaaattataataatgaaaatattgcataatggaatccatgatattaaagcacttctcagaggaaaaatcatataagtaaccttatatg

SEQ ID NO: 355697 - DNA, 201 bp, Homo sapiens
cagctctggaataaaatacatgcaacttccagctccaaatacaccacagaaaaagctagactcaagttttgagattcctgcaaattaaccacctcccctgrcaggaaataaaaaatgtgaccaggtaggtatactactcactctggtttccattctgcagagcagaatgtcattctaaagatagttgtgtctaggaaaata

SEQ ID NO: 355698 - DNA, 201 bp, Homo sapiens
aaatacaccacagaaaaagctagactcaagttttgagattcctgcaaattaaccacctcccctggcaggaaataaaaaatgtgaccaggtaggtatactaytcactctggtttccattctgcagagcagaatgtcattctaaagatagttgtgtctaggaaaatagtttttccccatatgtcttcacctaaatttaacaac

SEQ ID NO: 355699 - DNA, 201 bp, Homo sapiens
gggaggctgaggcaggagaattgcttgacccgggaggcggaggttgcagtgagccgagattgtgccactgcactccagcctgggctacagagcgagactcygtctcaaaaaaaaaaaaaaaaaaaggaagatggagaccagtggcagtgccaacagtgccaagagatgggtggtgtgggtggggagtgggctttagccttc

SEQ ID NO: 355700 - DNA, 201 bp, Homo sapiens
tcacgccattctcctgcctctgcctcccgagtagctgggactacaggtgcctgccaccatgcctggctagtttttttttgtttttttttttgtatttttaktagagacggggtttcaccgtgttagccaggatggtcttgatctccctacctcgtgatccgcccacctcggcctcccaaagtgctgggattacaggcgtga

SEQ ID NO: 355701 - DNA, 201 bp, Homo sapiens
tcagctctggaataaaatacatgcaacttccagctccaaatacaccacagaaaaagctagactcaagttttgagattcctgcaaattaaccacctcccctsgcaggaaataaaaaatgtgaccaggtaggtatactactcactctggtttccattctgcagagcagaatgtcattctaaagatagttgtgtctaggaaaat

SEQ ID NO: 355702 - DNA, 201 bp, Homo sapiens
gctggagtgcagcggcacaatctcggctcactgcaacctccgcctcctgggttcaagcgattcttctgcctcagcctcccgagtagctgggactacaggcrcgtgccaccatgcccagctaatttttgattctttagtacagacagggtttcaccatattggccaggctggtctcgaactcctgacctcgtgatctgcccg

SEQ ID NO: 355703 - DNA, 201 bp, Homo sapiens
ctccctttccgaacgacggtggccgcgctgggaggaaaagcgcccgccgccggttccagaggggcgggaccggagcgagagcctgggtggggcgggcgggsgctgcgcgtgcgcagaggtgcggccggggaggcgcgcggaggctggagctggaggcgcggcgccggtgagctgaggtgaggcgaggccgggccgtgccag

SEQ ID NO: 355704 - DNA, 201 bp, Homo sapiens
gtcctgcctcagcctgggactacaggagcctgccaccatgcctggctattttttttttttttttttttttttgtatttttagtaaagacagggtttcaccrtgttagccaggatggtctcaatttcctgaccttgtgatccgcctgcctcagcctcccaaagtgctgggattacaggtgtgacccaccgtgcctggccaca

SEQ ID NO: 355705 - DNA, 201 bp, Homo sapiens
caagctccacctcccgggttcacaccattgtcctgcctcagcctgggactacaggagcctgccaccatgcctggctattttttttttttttttttttttttgtatttttagtaaagacagggtttcaccgtgttagccaggatggtctcaatttcctgaccttgtgatccgcctgcctcagcctcccaaagtgctgggatt

SEQ ID NO: 355706 - DNA, 201 bp, Homo sapiens
cgtcgtgggtttccctcaccccctccccttttcccatcctctttcctttttctccttttgcagcccctactctcccaccacctgggctcttttctatctcrgccctgtctggtttattcgcaacttcctccttcgcaacatttcccctacactcatcttcctctactctcagttgttctacctggttgaggacttcttcct

SEQ ID NO: 355707 - DNA, 201 bp, Homo sapiens
gcaagctccacctcccgggttcacaccattgtcctgcctcagcctgggactacaggagcctgccaccatgcctggctattttttttttttttttttttttttgtatttttagtaaagacagggtttcaccgtgttagccaggatggtctcaatttcctgaccttgtgatccgcctgcctcagcctcccaaagtgctgggat

SEQ ID NO: 355708 - DNA, 201 bp, Homo sapiens
tgttgttgctgccagctgagctggtgctgcgcgtgcggtagcgattccttcgtttgtctgagcgggagtagcgctttgcggagcccggcctcccgcgggcygggtcgtcgtgggtttccctcaccccctccccttttcccatcctctttcctttttctccttttgcagcccctactctcccaccacctgggctcttttcta

SEQ ID NO: 355709 - DNA, 201 bp, Homo sapiens
gggccgtgccaggccaggcgggcgtttgcggcggtggctgccgttgctgttgtcgtggacaccaaggacactgctagtctgggactcgggttgacagagayacccctcagcctgggctcctctggacaccttaggccaggctctcccgccacaggcccggcctagcgccgcgggccattacttgggaccttgaagatctgc

SEQ ID NO: 355710 - DNA, 201 bp, Homo sapiens
tgcaagctccacctcccgggttcacaccattgtcctgcctcagcctgggactacaggagcctgccaccatgcctggctattttttttttttttttttttttttgtatttttagtaaagacagggtttcaccgtgttagccaggatggtctcaatttcctgaccttgtgatccgcctgcctcagcctcccaaagtgctggga

SEQ ID NO: 355711 - DNA, 201 bp, Homo sapiens
tatgagctcttccttggctttcacaggttcagtgttgccagggtcacgcctcaccaccatattcaatactgacatctggggaccaagtaagaaaaacaaamatcttcatagtctaggaatacaattgcctaaactgaaagaaggcaaaccaaactagcagattcagactcattctaagaactgacaatgctaattaatggt

SEQ ID NO: 355712 - DNA, 201 bp, Homo sapiens
ggcgggcgggggctgcgcgtgcgcagaggtgcggccggggaggcgcgcggaggctggagctggaggcgcggcgccggtgagctgaggtgaggcgaggccgrgccgtgccaggccaggcgggcgtttgcggcggtggctgccgttgctgttgtcgtggacaccaaggacactgctagtctgggactcgggttgacagagaca

SEQ ID NO: 355713 - DNA, 201 bp, Homo sapiens
taagtttaaaaggtaggttcatgaagtatccacaaagataaagcagtttaacccaagaatagctcaccctcggcagtctgtaacttggtggggggcggggrgatggggaaagctattcctactactttctagagcagcgggagaaaatagccttaataatccaattatgttaatcaacaaaaaccaatttcacagactggc

SEQ ID NO: 355714 - DNA, 201 bp, Homo sapiens
cttcctttctgaacttctcctgggtcctaatccatcaggctcatcaattctgtcctcgtctaaggaatcggttgaggacacagacacttgcttcttcagtsgtggcctctccttggtcctatcctgtcggcggcggcgacatccattatccgtcaggccagctccctcagcgctgttgttgctgccagctgagctggtgct

SEQ ID NO: 355715 - DNA, 201 bp, Homo sapiens
aaatgtctcttcctttctgaacttctcctgggtcctaatccatcaggctcatcaattctgtcctcgtctaaggaatcggttgaggacacagacacttgctkcttcagtcgtggcctctccttggtcctatcctgtcggcggcggcgacatccattatccgtcaggccagctccctcagcgctgttgttgctgccagctgag

SEQ ID NO: 355716 - DNA, 201 bp, Homo sapiens; identical to SEQ ID NO: 76067

SEQ ID NO: 355717 - DNA, 201 bp, Homo sapiens
actcccattttgtgcataattattctacatggcaaacaaaaagaccatgattattttataaaaccacatctgtctagataaagcaaaccatatttttatgycactccataatattaagcaacgtgattaagtattcacatctgtcatccttttattcttctcctttatcatcagctaaaaagaaaacatgaaagaagtgaa

SEQ ID NO: 355718 - DNA, 201 bp, Homo sapiens
cccatgtggaggtgtggtggccctcaaagtccatggctccattccagagcagtgcctgggccactgggctcccaggagatgcccggcctgcgcttctagtwcctccctctgactgtgtccccactgctgttgcagaccccacaggaggattacgtggaggctgcagtgaagcagtccttgcaggtgcacctgtcgggggcc

SEQ ID NO: 355719 - DNA, 201 bp, Homo sapiens
agccatgtagttattccctagtagcttccacccatttttgctaaagggtgtgatctgctaagactcggaccccagtacggggtgtgctggtggtgagccgktggccagggcatctgagccatctctctgacctccaggtgggctatgccatccgctttgaagactgcacttcagagaacaccttgatcaaatacatgactg

SEQ ID NO: 355720 - DNA, 201 bp, Homo sapiens
attatcaggtaacttcacccggggcccaggaatctagtgtcaagtcaggggtgcccttggtctcccatgtttacccaggagctctttttcttttgtgcatkgcacccagtggagaagggaaatacttttttcctctgacctcatgcctggggtacactgcacaaagtaacgggatggcaccattttgttttagctcacctg

SEQ ID NO: 355721 - DNA, 201 bp, Homo sapiens
aagaaatgaacccgagagcccacgacatcgacctaaaggtagactcactgttttggtggcttgtgaggattcaagtgtataaaaggcagagtgagtgactygtcttcagtgagattgctgaggcattgagtcagaattcccgattctaccatgaacatcttgggatagttggttctgagtcaggtgggcacagctctgcac

SEQ ID NO: 355722 - DNA, 201 bp, Homo sapiens
cgatgagtccaaccgctcaattagatcccggctgagctgcgtgtggcagagatgcctgcatgtggcactgtgaacctcctcttagatgccttcaggaggcrtgtgaggtctggtggccccacctttgctgatgggaggatggatgaggggccccagtggtggcagcctgcctcttccctgataggtttccactgctcctcc

SEQ ID NO: 355723 - DNA, 201 bp, Homo sapiens
gttttagcgtctgttgatggccattgcctagatccatatttagggttgcaaaatggtgctgggctttggcttaccccttttcgtagcataattctccccayaccaggctcccttgcatcttatgcctgtctcttccagccagcaggtaatcacatcttccctgtttttctgtacttcctagcatagttgtgaacttgattt

SEQ ID NO: 355724 - DNA, 201 bp, Homo sapiens
ttgagccctcatgttttagagtagacctttttaaaaattattttaatttttctcaaattgtcagggcaacctattgacatgtttgaagttctatgtgtggktaggtggtagtgttagaacctctgggatgtgcttagtgggcctggacccccctgtacttagagtgaaggttctttttcccttcctagggtcgagaggagg

SEQ ID NO: 355725 - DNA, 201 bp, Homo sapiens
ggtggatcacctatggccaggaattcgagaccagcctggccaacatggtgaaaccccgtctctactaaaaatacaaaaaattagctgggcgtggtggcagrtgccacctgtaatccaagctactcaggaggctgaggcaggagaattgcttgaaccctggaggcggaggttgcagtgagctaggatcgctccactgcactc

SEQ ID NO: 355726 - DNA, 201 bp, Homo sapiens
tcaagcgattcttctgtcttggcctcccaaactgttggcattataggtgtgagccactctgcctggctctcttccccttttttgttccaattaaaaaaatyaatgtattcactatagagcgttagtgaatatagaaaaatatcaagaaaataaaacccagccatgattctagtcccaggcccattggttctagaaatgaaa

SEQ ID NO: 355727 - DNA, 201 bp, Homo sapiens
acctcccacctcagactcccaaggggctgagattgcaggcaggcaccaccacacctggctaatttgttcatattttgtagagatggggtcttgctatgttrcccaggctggtattgtgaactcctggcttcaagcgattcttctgtcttggcctcccaaactgttggcattataggtgtgagccactctgcctggctctct

SEQ ID NO: 355728 - DNA, 201 bp, Homo sapiens
cttcagtgtctacatcactgacctctgtggtatttcctcctgcctatgactgagggtagaatcctctggtccttttttccccaagctaacacatcacaccytcattgtaaccacggaaatgaggatttgtacgctcagctcttacacggtatggtagcagtagaaatggcggtaagaggtcttagttctgggttaggtctc

SEQ ID NO: 355729 - DNA, 201 bp, Homo sapiens
gagaggttagggttccagtgtctcacagctcctccctgggctctcaggtgacctcagaccagattgtggagcatctggaggaactggagaacgcgcctgcmctggctgtgctgcccatctactctcagctgccttctgacctccaggccaaaatcttccagaaggtgtgtcagcaggaatgtccaggagtggctcttggag

SEQ ID NO: 355730 - DNA, 201 bp, Homo sapiens
tttcagacattatcggtctgctcgggtagagactccatcccatccgggtggtgtgagcgaagagttttgggaacgcagtcggcagagagagcgggagcggmgggaacatggtgtctatgcctcgtccaaagaagaaaaggattggaagaaggagaaatcgcgggatcgagactatgaccgcaagagggacagaggtaaact

SEQ ID NO: 355731 - DNA, 201 bp, Homo sapiens
ggaggggaatggcttctctctgtattactgaaatggaacagagggcagaatcagagtttctgaagaatgattttgctgttctcggttaagcaggttggggwaggggaaaggaagggctgggccagtggttctcagggaatgctttggaaatttgcaagagcattttttatcttctagtatggttgctcttgagccctcatg

SEQ ID NO: 355732 - DNA, 201 bp, Homo sapiens
cacttcggctgataagccctttgcctgcttgtccttgtagagacaacagcatcgtgatcgtggttggggagacggggagtggtaagaccactcagctgacrcagtacctgcatgaagatggttacacggactatgggatgattgggtgtacccagccccggcgtgtagctgccatgtcagtggccaagagagtcagtgaag

SEQ ID NO: 355733 - DNA, 201 bp, Homo sapiens
ctggtccctggagttaggccagacttgacaggtcgcaggcacaggcctccgtgagaacgccctcacttcagataccagctgcaggtgtagacaccatcctyactggtgtccccatggacccctgcaggttcagtatttgctagaatgactttcagaactccggagagtgccgtacttaccattatagctttattataccaa

SEQ ID NO: 355734 - DNA, 201 bp, Homo sapiens
tgcatcgttgccaccaatattgccgagacgtctctcactgttgacggcatcatgtttgttatcgattctggttattgcaaattaaaggtaagagaagacaygggaggcaaggcctgggtgttcaccagaagctaacttagctgcggggtgggaagccagggcctcgctcctggccctgggatgtggggagcgcgtggaagt

SEQ ID NO: 355735 - DNA, 201 bp, Homo sapiens
cccaggaatctagtgtcaagtcaggggtgcccttggtctcccatgtttacccaggagctctttttcttttgtgcattgcacccagtggagaagggaaatamttttttcctctgacctcatgcctggggtacactgcacaaagtaacgggatggcaccattttgttttagctcacctgtttaaacctcaccgtattccagat

SEQ ID NO: 355736 - DNA, 201 bp, Homo sapiens
aagcgagaggggatgtgactgtcctggcagggggtgggctaggaggtaggcttttccccctcgcggagcctttcctgtctcgagggactcatttttccctycctgtatgtcctgctctaggctccagatggcgttcggaagtgcatcgttgccaccaatattgccgagacgtctctcactgttgacggcatcatgtttgtt

SEQ ID NO: 355737 - DNA, 201 bp, Homo sapiens
cctcttctgctcactctgttttggttagagggtttgctaatatggtgatctgtaaatcctccgatccatgttcagctagctctgttggaccctgtggtgtygagtgtgttgtggatgatggattctcaagtagcagtttcagtcctgaggtcgatgagaaccatctcagattccctggctgctttggtgtctcagactctt

SEQ ID NO: 355738 - DNA, 201 bp, Homo sapiens
agcagagcatggggcggcacatcagacaggaagtctctggggagggggttggggaggggtgtgtggactgtgtggagcactgaactggtgtctttttgccrggcagccttgagaaagtgacagtgctctgcatctcgggtgtgtacatgtgtcagacattgagagctttcagtagaggttgcaggttactgtttagtgggg

SEQ ID NO: 355739 - DNA, 201 bp, Homo sapiens
agtgggagactcttaggatacctctctgcatcttccattctctctggtcccttcctcctggtctcttcactgtcctccacttttcctatatgtgattcctsctccctcacactgcttcctctggtgctggtgttgtgagaggaaggaggcccagggaggttaagtaacttgtctgaggtcacccagcttgtcagtgaggga

SEQ ID NO: 355740 - DNA, 201 bp, Homo sapiens
cccttatgttctactgaacggtcatctgagttaataattctctccactcctgtgtgaaatgtccatacgagaagttggtactattgatcagcccttattcwtctctagttaacttaattcctcaggtattagttattgggtgaccaggagggactgggtgaaattagaaataggaagctcagcagagcatggggcggcaca

SEQ ID NO: 355741 - DNA, 201 bp, Homo sapiens
agtgggaatcgccctccccgacgccttcctatcgggattctgagcggagccatcggctgtccactcgagatcgagacaggtgatgttctgggcagagcagyccagtttcgctgggtgggcggtaaggagcctcggcagggagagcagatggtggccaggaggacgtggcttagctcagtgacagttttgtgatgctggtgc

SEQ ID NO: 355742 - DNA, 201 bp, Homo sapiens
ctgatttagatgaaaggtgctgctgcttggaacaaactcctgcaggtgatttgggatcagcacctcttctgtctttggagctgtgggtagaggcctgtgayatctttgcagctaccagtggccttctgtcaggacttgatgtgtggacttacctcataacctttcaggacgacctttggggtggcaatttgagtgtggctc

SEQ ID NO: 355743 - DNA, 201 bp, Homo sapiens
caagcgcagaaaagaaactcctggccgtcggtcggcccccgctcaacagcccaataaacggaagagcttctagtcaccgcccaccttgctcggctctgacsggaagctaggcgtcacctccgcccgtattaaagatggtcgacctttttcccctccttttcctgcccccagactagaggcgggatgtagtctcttaggcta

SEQ ID NO: 355744 - DNA, 201 bp, Homo sapiens; identical to SEQ ID NO: 76098

SEQ ID NO: 355745 - DNA, 201 bp, Homo sapiens; identical to SEQ ID NO: 76100

SEQ ID NO: 355746 - DNA, 201 bp, Homo sapiens
aacatggtgtctatgcctcgtccaaagaagaaaaggattggaagaaggagaaatcgcgggatcgagactatgaccgcaagagggacagaggtaaactgtcyagcacagttcctattgtccattagcattcgaataaatgtgtcagcctttttcttgttgcaggagtttttgcaacacccatttgttagggagtcctatttg

SEQ ID NO: 355747 - DNA, 201 bp, Homo sapiens
aaaaaaggcctgatgtggagacagaaagaagagaagggagaaaatagccctgtaccatgagagggtagcagtccctttcacaagtagggatcttatgaacrtggccttcttgctgattttaacgggcatcgctctttctccccactgctgcagccggagccggtgattccagtgaaggatgctacttctgacctggccatc

SEQ ID NO: 355748 - DNA, 201 bp, Homo sapiens
atcctgctcatcgtttccatgctctcggtcccagccatcttctacaggcccaaggtggggcagcggctggctcccctctccccggagggctcgaggaagtrttggggaggggaatggcttctctctgtattactgaaatggaacagagggcagaatcagagtttctgaagaatgattttgctgttctcggttaagcaggtt

SEQ ID NO: 355749 - DNA, 201 bp, Homo sapiens
atgatttctttctttctttcttttttttttttttgagtagtactctcactctgttgccaggctggagtgcagtggtgcgatctcggctcaatgcaagctcygcttcccgggttcatgccattctcctgcctcagcctccctagtagctgggactacaggcgcccaccaccatgcccagctaattttttttcttttttttag

SEQ ID NO: 355750 - DNA, 201 bp, Homo sapiens
ctgtagatgggtgaccctctagcaggactgggctttgatgagggtacacctgagccctgttcagacccaatgccctggagtctctttgcagaggcatagayggcacggtgaaccctgtcactcactgcagtaggctgacctaactgttctgttatgtgttggtgccaccatgtggtaaatctaagaagtgctatcgtgatg

SEQ ID NO: 355751 - DNA, 201 bp, Homo sapiens
catgtggtaaatctaagaagtgctatcgtgatgggctgccctccagtcctgtgtagttgcccactgtggttctccagatggcatgtgtctgcagggaggcytctcctgcacccctcacaagggtagctccactgcagtagtgacttcctaccaagcgtcccttcttctgttggccatgtctcgtgcataaacttgatctgt

SEQ ID NO: 355752 - DNA, 201 bp, Homo sapiens
tttccctagtatttagtggtgttgagcatcttttcatgtgcttattattggtcatttgtttatcttctttggagaaatgtctcaagtcctcttcccccccscttttttttttttgcattagtaactttttaaaaatttttaaatttcaacttttattttagatactgagggtacatgtgcaggttcattatatgggtatac

SEQ ID NO: 355753 - DNA, 201 bp, Homo sapiens
catgagagggtagcagtccctttcacaagtagggatcttatgaacatggccttcttgctgattttaacgggcatcgctctttctccccactgctgcagccrgagccggtgattccagtgaaggatgctacttctgacctggccatcattgctcggaaaggcagccagacagtgcggaagcacagggagcagaaggagcgca

SEQ ID NO: 355754 - DNA, 201 bp, Homo sapiens
taggtacacatgcaggtaattacagcctgcctcccttcagagggtaggtctggacagatgatgccattggttctttttatttctattgttctctttccccrttttctttctttcttttttccaattagagacagggtcttgctctgtcaccccaggctggagtgtggtggtgcaatcacagctcactgcagccttgatctc

SEQ ID NO: 355755 - DNA, 201 bp, Homo sapiens
cttctctagtaccaaatggtttgccttccttccagagaaatcccagatcctgtgatgggggacaccagtgaggatgcctcgatccatcgattggaaggcastgatctggactgtcaggttggtggtcttatttgcaagtccaaaagtgcggccagcgagcagcatgtcttcaaggctcctgctccccgcccttcattactc

SEQ ID NO: 355756 - DNA, 201 bp, Homo sapiens
cagaatgcaaactggaccattggctaggtgcagtggctcatacctgtaatcccagtactttgggaggctgaggcaggcagattacttgaggtcaggagttygagaccagcctggccaacatggtgaaaccccatccctactaaaaatacaaaaattagcctggggtggtggtgggtacctataatcccagctattcggtag

SEQ ID NO: 355757 - DNA, 201 bp, Homo sapiens
cttgaggattggaatgtggctcggtgccaccagcactctgggggagtttaccacctgcggggtgaagtctgctctcccgtgggattgattttccattgctygcagtcatgtggcaggatggagcagactgacctttttccttttcaggctcagcacaaacactgggaactggcggggaccaaactgggagatataatgggc

SEQ ID NO: 355758 - DNA, 201 bp, Homo sapiens
ctcctctgtggccagggacaagacagctcagagagacctgatgtgggccaggtgcagtggctcatgcctgtcatcccggcactttgggaggctgaggaggktggatcattggataccaggagttcaaggcctgcctgggcaatatagtgaaaccctgtctcaaaagtacaaaaattagccgggtgtggtggcaggcacctg

SEQ ID NO: 355759 - DNA, 201 bp, Homo sapiens
actgttctgttatgtgttggtgccaccatgtggtaaatctaagaagtgctatcgtgatgggctgccctccagtcctgtgtagttgcccactgtggttctcyagatggcatgtgtctgcagggaggcctctcctgcacccctcacaagggtagctccactgcagtagtgacttcctaccaagcgtcccttcttctgttggcc

SEQ ID NO: 355760 - DNA, 201 bp, Homo sapiens
ttatatccaagaagggtgtgtttgtagagataaagtaaatatcccttaaaatgttgtcataaacacagaatgcaaactggaccattggctaggtgcagtgsctcatacctgtaatcccagtactttgggaggctgaggcaggcagattacttgaggtcaggagttcgagaccagcctggccaacatggtgaaaccccatcc

SEQ ID NO: 355761 - DNA, 201 bp, Homo sapiens
agctgcggggcctggtgttgggagagctggaggcttgaggattggaatgtggctcggtgccaccagcactctgggggagtttaccacctgcggggtgaagyctgctctcccgtgggattgattttccattgctcgcagtcatgtggcaggatggagcagactgacctttttccttttcaggctcagcacaaacactgggaa

SEQ ID NO: 355762 - DNA, 201 bp, Homo sapiens
cagccaggtcatttgtcctgtcgaatagtccatatgatgtatttgcctcattgcttgctcacagcggtgtttaacctgtgcctgtgtttcgtgcacttgcygtaagctggcgatgagtccaaccgctcaattagatcccggctgagctgcgtgtggcagagatgcctgcatgtggcactgtgaacctcctcttagatgcct

SEQ ID NO: 355763 - DNA, 201 bp, Homo sapiens
aataactgttactgtgggtttgaaattttctaggcagtaactatttttcccccttgggagaatggggataggtgagtttcaggagtccacggatcacattygagcagtgcaggttgcacctgtgagtgagtgggcagcctgtcctttctctagggtgaagatgtgtataccttaggatgggatgcatgtttttaagcttcg

SEQ ID NO: 355764 - DNA, 201 bp, Homo sapiens
gtgtatcacgagttggtcatgaccaccaaggtgagtcttttccaaggcacttgcataatgcaggccccctgtctggccaggctttgaaacccttcactgcsttctggcatgagcttttagcctgggagccttgaggccacatgcattgttttgcggggcatgtgaggttggttttcatttggggacttggggaagctctgc

SEQ ID NO: 355765 - DNA, 201 bp, Homo sapiens
gttttcctgttggagatttagagctttatgattttattatgattctgtaatactgaaggtaggtaggaatttgtggggaaaaacaaaggtgaataaagackagatggtagaggttagaaatgccttgggttgttgccatatgtgagcctgcgtcccagggagagaaagtggaaaaggacagatcacttgtttggacagcca

SEQ ID NO: 355766 - DNA, 201 bp, Homo sapiens
aaattattttaatttttctcaaattgtcagggcaacctattgacatgtttgaagttctatgtgtgggtaggtggtagtgttagaacctctgggatgtgctyagtgggcctggacccccctgtacttagagtgaaggttctttttcccttcctagggtcgagaggaggagagtgatcaaatccgggagaagttcgctgttcc

SEQ ID NO: 355767 - DNA, 201 bp, Homo sapiens
gtttctaattgaggtttctgattcaaatttagtggtgttttccctacatccctgttacagctgctgacatcaggctctagaaagtgtcccttagtgagacyttttattgcctcttggatctttgtgggggctggggaggaatgtatggggtgtgtgtgtgtgtgtgtgtgtgtgtgtatctattttggtgtttattggggg

SEQ ID NO: 355768 - DNA, 201 bp, Homo sapiens
ttgacatgtttgaagttctatgtgtgggtaggtggtagtgttagaacctctgggatgtgcttagtgggcctggacccccctgtacttagagtgaaggttckttttcccttcctagggtcgagaggaggagagtgatcaaatccgggagaagttcgctgttcctgagagcgatcatttgacctacctgaatgtttacctgca

SEQ ID NO: 355769 - DNA, 201 bp, Homo sapiens
tttccttttcaggctcagcacaaacactgggaactggcggggaccaaactgggagatataatgggcgtcaagaaggaggaagagccagataaagctgtgayggaggatgggaaggtggactacaggtgggcagcctcagccagcagcacatcagccttgctccaaagatgggggcccatgtgggcagttgcggcagaaccc

SEQ ID NO: 355770 - DNA, 201 bp, Homo sapiens; identical to SEQ ID NO: 76069

SEQ ID NO: 355771 - DNA, 201 bp, Homo sapiens
gaggagggcgaagaaggaatttcatttgacacggaggaggagcggcagcagtgggaagatgaccagagggtaaagttttatacctctgaggggctgatcgrggctggtggccgtctgtagatgggtgaccctctagcaggactgggctttgatgagggtacacctgagccctgttcagacccaatgccctggagtctcttt

SEQ ID NO: 355772 - DNA, 201 bp, Homo sapiens
caggagagttgcttgaacctgggaggcagaacctgcagtgagcagagatcacaccactgcactccagtctgggcgacagagcaagactctgtctcacacamaaaaaaggcctgatgtggagacagaaagaagagaagggagaaaatagccctgtaccatgagagggtagcagtccctttcacaagtagggatcttatgaac

SEQ ID NO: 355773 - DNA, 201 bp, Homo sapiens
gccttccttccagagaaatcccagatcctgtgatgggggacaccagtgaggatgcctcgatccatcgattggaaggcactgatctggactgtcaggttggyggtcttatttgcaagtccaaaagtgcggccagcgagcagcatgtcttcaaggctcctgctccccgcccttcattactcggactggacttgctggcttccc

SEQ ID NO: 355774 - DNA, 201 bp, Homo sapiens; identical to SEQ ID NO: 76071

SEQ ID NO: 355775 - DNA, 201 bp, Homo sapiens
cccgctggaccctgccctgtccaagatgctcatcgtgtcctgtgacatgggctgcagctccgagatcctgctcatcgtttccatgctctcggtcccagccrtcttctacaggcccaaggtggggcagcggctggctcccctctccccggagggctcgaggaagtgttggggaggggaatggcttctctctgtattactgaa

SEQ ID NO: 355776 - DNA, 201 bp, Homo sapiens
gatgctacttctgacctggccatcattgctcggaaaggcagccagacagtgcggaagcacagggagcagaaggagcgcaagaaggttggtttcttggtttygtggctgggaagtttatgtgtatttttttcttttttcttctcttcataagtcttactaggcccacagatagaagttaggagtcccctctatcaagtcctt

SEQ ID NO: 355777 - DNA, 201 bp, Homo sapiens; identical to SEQ ID NO: 76075

SEQ ID NO: 355778 - DNA, 201 bp, Homo sapiens
agtagggatcttatgaacatggccttcttgctgattttaacgggcatcgctctttctccccactgctgcagccggagccggtgattccagtgaaggatgcyacttctgacctggccatcattgctcggaaaggcagccagacagtgcggaagcacagggagcagaaggagcgcaagaaggttggtttcttggtttcgtggc

SEQ ID NO: 355779 - DNA, 201 bp, Homo sapiens
gccaagctcaaggtgaacccaggagcccagtgagcccctcccagcctgatacctgtataagggcaaagttcttcctttgtcctggtgtggttctgcagatmtgggcttccgccaaaggctgtgtcaagagtgttaagggatggggtcgctgcccaaatgggtgttgttttcctgatgtggctgcctgttgtgtctcctccc

SEQ ID NO: 355780 - DNA, 201 bp, Homo sapiens
gagtatatgcagtgtgtgaccgctgtggacggggagtggctggcggagctgggccccatgttctatagcgtgaaacaggcgggcaagtcacggcaggtgargattctgtgctcttcgcaggggtgctgtttgcctgtggggtcggtgttccctccgcttggtattgaagacttgcggtcatccaacccacttacttctctc

SEQ ID NO: 355781 - DNA, 201 bp, Homo sapiens
gctaaggggcggagacaagaggggccgccaccatctcctccaatggaagggagacaggggcgggcttaatgacggaaggagcatggcgtggagacacctgmaagtgagtcccgcgagtgagcagtgtggatgggggaccagggaccggggagggcgagaacggagagtcaggccgggcgaggcatggaccgaaggcggctc

SEQ ID NO: 355782 - DNA, 201 bp, Homo sapiens
cgaagcaaagcggctgggcaatgatcacacaggcaatgagggcaggagcaggacttgaatgtcatcctcccgtggcccactctgtcctcccttttttgtcrtccattgtgtaaataatgttcattaattatagaagacttagtaaatacagagaagcgtaaagaaagaatgttcaagaaacagatactcctccctactcaa

SEQ ID NO: 355783 - DNA, 201 bp, Homo sapiens
acctccctggggctccttccacgggccagatttcaagactctgacatgctggtagtgctcccagacaccctatacattaaatacaaaggcgaaggctgcaktcccctaaacttctcagctgggactgatctttttgaaaaccagaaccccaagtgagcagtggggatttggaattcagtctgagcattattattttatgtc

SEQ ID NO: 355784 - DNA, 201 bp, Homo sapiens
gcagaagtatagatacagcctctgactgtagagaccagtgtcagcggaaggctaagggcgtctgtttcatgtgacctgccgttatgccctctgtgtacctsggtgtgaagggctcaggaagggtgctgcagcctggcctgggggacccccctaatatgctcttttttgcagaagcgggcccaggatgctgtgatcatcctg

SEQ ID NO: 355785 - DNA, 201 bp, Homo sapiens
tgttcgcttcacctccctggggctccttccacgggccagatttcaagactctgacatgctggtagtgctcccagacaccctatacattaaatacaaaggcraaggctgcagtcccctaaacttctcagctgggactgatctttttgaaaaccagaaccccaagtgagcagtggggatttggaattcagtctgagcattatt

SEQ ID NO: 355786 - DNA, 201 bp, Homo sapiens
ttgaaaaagtcctaagtgtatgggaagtggctatggtgccctctcactctgcccctcccgtgtgcttgtgctctgcaggtatggatttaacagtcacgggmtttcagtggtggaacacaggttacgggccagacagcagaagcaggccaagctcacagaaggtaaagtggggttgtgtcagtgggcctttcttatttatta

SEQ ID NO: 355787 - DNA, 201 bp, Homo sapiens
ctcccagacaccctatacattaaatacaaaggcgaaggctgcagtcccctaaacttctcagctgggactgatctttttgaaaaccagaaccccaagtgagsagtggggatttggaattcagtctgagcattattattttatgtcatgtaattagcaacgatgattatctattacgtatatgggattgtgttaggcggtgtt

SEQ ID NO: 355788 - DNA, 201 bp, Homo sapiens
aaacacagtgttttgatgctcgcggactcttggattcgaggctgcggtagtacggacaaacaccgtgcagcggcatctcatctccgccaacagccggcgaycaagtgggcaggccgggagagggcgggcggaagaggcgtggccgccgctactgcgcacgtgcacccaaccagaacctgggggtggtgccgggccttcccc

SEQ ID NO: 355789 - DNA, 201 bp, Homo sapiens; identical to SEQ ID NO: 76122

SEQ ID NO: 355790 - DNA, 201 bp, Homo sapiens; identical to SEQ ID NO: 76123

SEQ ID NO: 355791 - DNA, 201 bp, Homo sapiens
ccctgtcccaccagcctgtcccacctgctccccttcattctccagggcgaaccttcagcatcaccctcagaagctgtccttagcacctagaccagtaggamccctggctataccttcccagagtcccctctgatcccctctcatgacactgattatatgcgacggtgacaaattatctgtccctgctgctataaatcacgg

SEQ ID NO: 355792 - DNA, 201 bp, Homo sapiens; identical to SEQ ID NO: 76125

SEQ ID NO: 355793 - DNA, 201 bp, Homo sapiens; identical to SEQ ID NO: 76126

SEQ ID NO: 355794 - DNA, 201 bp, Homo sapiens; identical to SEQ ID NO: 76117

SEQ ID NO: 355795 - DNA, 201 bp, Homo sapiens; identical to SEQ ID NO: 76118

SEQ ID NO: 355796 - DNA, 201 bp, Homo sapiens
tgctagtttgagagccctggaaccagtgtaaaatgggagtgaataatgagtggggtgcagagatggggtgaatttagaaggaagtgcggggtgcctgaggrtgcaagctgtgtctgtataaacacagatgacagagacaggcaaacctgacctctgaggtgttgtcctcaacacctctgcgtgggcccacacttgcagcag

SEQ ID NO: 355797 - DNA, 201 bp, Homo sapiens
gacaccacgtctctctcatttgtcactctgaccctagcgcccagagctctgagtgaactgaaggacttcatcacccagtacctgtggtaatatttcctggktatcttttaggaataaaagtctaaaaaacgttggacaccgtggctcatgcctgtaataccagcactatgggaggccaaggcaggtggatcacttatagcc

SEQ ID NO: 355798 - DNA, 201 bp, Homo sapiens
ccaaagtggtgggattacaggcgtgggctaccgcgcccagccaatgaatacttgatctacatgtctttagcagtttggaaggatccttaaaagcaaatctratcatgtcatttcctggcttagggaacaaaacccaaatctttattttggccaagactcctgctcctttctcctgcctcgtcttaagccttactttccctc

SEQ ID NO: 355799 - DNA, 201 bp, Homo sapiens
cacggggtctgtaagagcagacaccacgtctctctcatttgtcactctgaccctagcgcccagagctctgagtgaactgaaggacttcatcacccagtacmtgtggtaatatttcctggttatcttttaggaataaaagtctaaaaaacgttggacaccgtggctcatgcctgtaataccagcactatgggaggccaaggc

SEQ ID NO: 355800 - DNA, 201 bp, Homo sapiens
ctgtcagccggtgtcgggcaggtcaggtttggagggaaggcctgcgcggctgtccacaggtggtttggtcaagggcagcctcagaaggtggcacaggaaakggtgtgcggggtgcaggcctgaccagcgatgtttgcagatggactgcctctgggggtcaacttggggaagaacaagacctcagtggacgccgcggaggac

SEQ ID NO: 355801 - DNA, 201 bp, Homo sapiens
gtggaaagggctgaggcactcagcagtgtcagatttggggaataggaaattatcttttggaaacccctgggttgggtggaaccagaccccgctgtactgcrgagccgcccacctggggagctttggaggtcatcacaggacttgcatggtttgtgatgcttgcccgccttcgtgcttgctttttcttctcctcggtgtctg

SEQ ID NO: 355802 - DNA, 201 bp, Homo sapiens
ttgtttcagggaaattctccagcattagagatcaagttattgatctttctgctgcattgcaggtggggatcaatatcttcagaattggccaggcaaaatayatttgcttaacattcagctgctacagataactgcaggtgctgggatgatggtacttggtgaatcctataggtgagcaggggtgtgagatcctgctctgag

SEQ ID NO: 355803 - DNA, 201 bp, Homo sapiens
tttttttttttttttgagacggagtctcgctctgtcgccccaggctagagtgcagtggcgggatctcggctcactgcaagctctgcttcccgcgttctcastattctcctgcctcagcctcccgagtagctgggacttcaggcacccgccgccacacccagctaatttctttttgtatttttagtagagacggggtttcac

SEQ ID NO: 355804 - DNA, 201 bp, Homo sapiens
ggaccttaagcatatatgtatgtatctatcccaagccaggagaaaggtggggccaaagctctgtatgaaggccagggggatgagggatcctttgcagctgygagctctgtgcaggaggagagggagcgtttgctctgagctaggaagagaggtgattttcagacagaaagcctagagagatggagtggctgcaggggcttc

SEQ ID NO: 355805 - DNA, 201 bp, Homo sapiens
ggtgctgcagcctggcctgggggacccccctaatatgctcttttttgcagaagcgggcccaggatgctgtgatcatcctggggggaggaggacttctcttygcctcctacctgatggccacgggagatgagcgtttctatgctgaacacctgatgccgactctgcaggggctgctggacccggagtcagcccacagactgg

SEQ ID NO: 355806 - DNA, 201 bp, Homo sapiens
atggtacttggtgaatcctataggtgagcaggggtgtgagatcctgctctgagccctgtgtgtgcggcctcctggttgtgtggcatgtggtaagtgtgtagtaaacacttaatgaatgggtgaagttatgaagtcatcagatatgtgtgccagtgtgtctgttattatggatgcttttggctctaacaaagtggcttaaac

SEQ ID NO: 355807 - DNA, 201 bp, Homo sapiens
tttgaccttgggggtgggccctgggatctgaggtttcacaagcttcccaggtcattctgatgtagctgtgccaggaaccatgctttgagaaataccgggayagccttagcgtgcctctgactttgtcttcctcttcccaggaagtgagagttctgggccataaattccgaaatccagtaggaattgctgcaggatttgaca

SEQ ID NO: 355808 - DNA, 201 bp, Homo sapiens
gatgttcattttgtacatacactcagacatacatgtggctgtattttttgtataccgatttctggatggaatgcacactgttatctgtttagttactttaygttttcatacaaatgacatcatcccacaaatagaattctgccatttactttcttcactattcttatgtggcatggttcatgctgggcctcggtcttttga

SEQ ID NO: 355809 - DNA, 201 bp, Homo sapiens
  misc_feature (1)...(201): n = A,T,C or G
ggaagtgtaagaactgactgtgatttttttttttctcttgtttgaaaaagtcctaagtgtatgggaagtggctatggtgccctctcactctgcccctcccntgtgcttgtgctctgcaggtatggatttaacagtcacgggctttcagtggtggaacacaggttacgggccagacagcagaagcaggccaagctcacagaa

SEQ ID NO: 355810 - DNA, 201 bp, Homo sapiens
ggtgaagagtgtagaggaaaccagatgtgcctgggccgggatgatgcgtttctgggtgaacgtgggcttcctgtaagagcagggcctgttctccactgttkgctgaaattgctttgtttgctctttttccagagagcagggctttggcggagtcacagatgccattggagcagatcatcggaggtgaggacagcgtctgac

SEQ ID NO: 355811 - DNA, 201 bp, Homo sapiens
gcggagagtgcacaggccggcagtcctggtgaagatcgctcctgacctcaccagccaggataaggaggacattgccagtgtggtcaaagaggtttgagtcrgggcctgggcccagggtgtgcctcccatggtctgcagaggccgtttggccagctgggctagcccagaatggcgttctttgtgatttcctctccttggtat

SEQ ID NO: 355812 - DNA, 201 bp, Homo sapiens
tgctttgtttgctctttttccagagagcagggctttggcggagtcacagatgccattggagcagatcatcggaggtgaggacagcgtctgacgggaagccygatctggaaccttcccaaggactcaggcaagcctttgtggctggatcatgagaggagggactccatcttgagccatgtcccccagccatggcatggctgc

SEQ ID NO: 355813 - DNA, 201 bp, Homo sapiens
aattctttctctcactcctctctccagcctgtctggacagcgggtctctgtggcataggagagtagtggaaacagactgagcccggccatcgtgggttcaratcctggttccaccacttactacctgggggcctcagacaagacactgtaattgggttgttgtaaggactggaccctgtcctaggggaatgttgtgggtgg

SEQ ID NO: 355814 - DNA, 201 bp, Homo sapiens
gagcccagggaggtgcaggctacagtgagccgtgatcatgctactacactccagtgtgggtgacagagtgcgaccttgtctcaaaaaaaaaaaaaaaaaaagaaaagaaaagtctaaaacacccttgagctattagccaatgtccacgggatcccttggcctaaaagaatggaatcggatccatctcgactgtactcctca

SEQ ID NO: 355815 - DNA, 201 bp, Homo sapiens
ggttatcttttaggaataaaagtctaaaaaacgttggacaccgtggctcatgcctgtaataccagcactatgggaggccaaggcaggtggatcacttatarcccaggaatttgagaccagcctgggcaaaagagcaagaccctgtctctacaaaaatttaaaaattagccaggcacagtggctcaagcctatagccccagc

SEQ ID NO: 355816 - DNA, 201 bp, Homo sapiens
tcccaagtagctgagaccgcaggcgcaccaccatgcctggctaattttttatattttgtagagacggggtctcactatgttccccaggctggtctcaagckcctgagctcaagcagtcctcccacttcagcctcccaaagtgccgggattacaagcatgagccaccaagtccagctatgtgcaatttttaaaagccagcat

SEQ ID NO: 355817 - DNA, 201 bp, Homo sapiens
atctgattatatggtgttgagcagacgtgtcatttcccctgactggccatgctcacacactaacaggcactgtaggctcagaaagagcactccgttaagghgtcctcacctcagactgctagtttgagagccctggaaccagtgtaaaatgggagtgaataatgagtggggtgcagagatggggtgaatttagaaggaagt

SEQ ID NO: 355818 - DNA, 201 bp, Homo sapiens
aaatgcaggtacacaggtgtgttacatatcaggcaccccaggaaagcactgtaccattcccgatgagattttctgaaatggtgaacaattcttgggaatgytctatgtgaaactgtacagttgtccctcaatttacaagatatttgtactgtatgtgaaaaccatgtagaggctgggcacggtggctcatgcctgtaatcc

SEQ ID NO: 355819 - DNA, 201 bp, Homo sapiens
ttcccatgctacaggcatctaccttgctctgtcccacctaatagcttcaggactgaacaattcaggaaagggaagggaaggggtggaggagaagagggaaragtcggcccttggaaggttctccacggaagactgccttttttttttttgagatggagtctcgctgtgtcgcccagcctggagtgcagtggcatgatctca

SEQ ID NO: 355820 - DNA, 201 bp, Homo sapiens
cggaggcgtcctctcaacccttctgcccggcgactggtgggttggcggctaaggggcggagacaagaggggccgccaccatctcctccaatggaagggagrcaggggcgggcttaatgacggaaggagcatggcgtggagacacctgaaagtgagtcccgcgagtgagcagtgtggatgggggaccagggaccggggaggg

SEQ ID NO: 355821 - DNA, 201 bp, Homo sapiens
tgggctagcccagaatggcgttctttgtgatttcctctccttggtattcaaggctggtttggtgtgtgtcatggtgtaactcaccctgtggtcaaaagcgmatgttggaataagtgcttgaaggagtttttctaatgcctcttcctctcttttgtcaactgcatccagcaagtttaaggcttgagcttggctccttggcca

SEQ ID NO: 355822 - DNA, 201 bp, Homo sapiens
ttttgagcctggcacaggggtgcttagtgaacacatgaccgcctagcgttgtgtgccggatccaacggggaatgaaactagagtaggacatgctcccaacycttttaggtaaagttttgttaggggcgggggtctctgtgaaaagttcttagctgtatccccgtatgtaataggtgttcagaggccgggcgcggtggctca

SEQ ID NO: 355823 - DNA, 201 bp, Homo sapiens
accggggagggcgagaacggagagtcaggccgggcgaggcatggaccgaaggcggctccgggagtgtgggcccccctgggacgtgtgcgtgtttccggggkctcctgcaaatgctcgtgcgtgtgcatttgcacgtggactcggtcaggcgtgtgcagacagcgcctgcaggtctgggtgggtgctgatctgagtgtctgc

SEQ ID NO: 355824 - DNA, 201 bp, Homo sapiens
tgactccaaaacctcaggaaggaaaccctagacccagagtcttccgcctccctgaggaccaagctgtcattaacaggtaggtgagcggcccagagttaacrggggatgccctctttccagctgggggcgttcagagatataagatctgcctctgttttttttctctcatacaatgtggacattcttctgtcatttggaatg

SEQ ID NO: 355825 - DNA, 201 bp, Homo sapiens
ctcaaaccattcgggagatgtatgcactcacccaaggcaaggtttcccgtgtttgtgtcttcagatctgcgtgtggcttgggctcctgggtcgtgatgggratcatcattccctaatctgtcttgattgtgggggactctggggctgaagccacatccttctttatggtgtcgccatgtgcttctctgtaggccgagttcc

SEQ ID NO: 355826 - DNA, 201 bp, Homo sapiens
atctagggcctgacaccagcgagctactccctcccaccaaggctagttgataagaaggtatgaaccttaaccacaattggaaaagacagtgctcgtctcckcttcaacccacggtggaaacaccatttctccccccaggcttgctaataataaagccccgtggttttcaaactctagctggtgtcacagtcccctggagag

SEQ ID NO: 355827 - DNA, 201 bp, Homo sapiens
gagtcttccgcctccctgaggaccaagctgtcattaacaggtaggtgagcggcccagagttaacgggggatgccctctttccagctgggggcgttcagagrtataagatctgcctctgttttttttctctcatacaatgtggacattcttctgtcatttggaatgttcaggaaccctgttcagcatctactatgtgcccca

SEQ ID NO: 355828 - DNA, 201 bp, Homo sapiens
gtggtggaacacaggttacgggccagacagcagaagcaggccaagctcacagaaggtaaagtggggttgtgtcagtgggcctttcttatttattaggaggraacgtgggagaaatgctgggaacatttctagtgaaataaacatgattgagcaatagcaaaaaccactgaggacctcaggacacctctcctagagcgattt

SEQ ID NO: 355829 - DNA, 201 bp, Homo sapiens; identical to SEQ ID NO: 76124

SEQ ID NO: 355830 - DNA, 201 bp, Homo sapiens
ttctttactagcaattcaaacggtacagcactcttgaagtgtaaacattcctgttcctcctcaccccactctgcagacatgcctttctgtctgtcctcccrgacttttcccctgcataaagatgttcattttgtacatacactcagacatacatgtggctgtattttttgtataccgatttctggatggaatgcacactgt

SEQ ID NO: 355831 - DNA, 201 bp, Homo sapiens
tggggctgaagccacatccttctttatggtgtcgccatgtgcttctctgtaggccgagttcccataattggggttggtggtgtgagcagcgggcaggacgygctggagaagatccgggcaggggcctccctggtgcagctgtacacggccctcaccttctgggggccacccgttgtgggcaaagtcaagcgggaactggag

SEQ ID NO: 355832 - DNA, 201 bp, Homo sapiens
aaatgagatgtgaatgggaaagcattcaggaaatgccctccctactcccccaggcccctggtggtcacctctgggacaggggcaattctcaagatgacccrcagagggtaggtgtcagatttcagacaaggttatttttacccttgggggtggagggaggcaggtgacatttggactgacagttctagaatggggtgaggg

SEQ ID NO: 355833 - DNA, 201 bp, Homo sapiens
cctgtggtcccagcaactctggaggctgaggtgggaggatcactggagcctgggaggtggaggctgcagtgagctgaggtcacccccactgcactccagcytaggtgacagagcaagatctaaaaaaaaaaaaaaaaaaaaaagcaaagcagaattttgtaaatatctcaaaatagaaaccttgaggtttttttaatgtta

SEQ ID NO: 355834 - DNA, 201 bp, Homo sapiens
gggctgaggcaggaaaaccacttagatccaggaggccgaggctgcagtgagttgagattgcaccattgcactccagcctgggggacaagagtgaaaactcygtctcaaaaaaaatagttaacgggactttctgctggggaagtcaacgggactttctgctggggatgaagtcatgtagggttgggggatggaagagagaaa

SEQ ID NO: 355835 - DNA, 201 bp, Homo sapiens
actcctggcctcaagtgatcctcccgctgcagcctcccaaaattctagaattacaggccattgagcctggcctatcctttaaatttagccaacattctgcmtgtatgaagccctgttgtagacatagtctcattttaatcctctcaacaatcccacaagggtaggtctgatcactcccactttgtagatgaggaaactgag

SEQ ID NO: 355836 - DNA, 201 bp, Homo sapiens
ccctatgtcatcgcgctgaggtcggtcacgctgcccacacaccgagagacgccagagtacagacgcggagagaccctctgctcaggcttctgcctctggcrcgagggggaccagctgaccaaggtgaggccggtccccccaaccacgcccccagcctggctccaccccaacaccacacgtgtattgagctcagcactgctg

SEQ ID NO: 355837 - DNA, 201 bp, Homo sapiens
ccccaggtgcctgttcttgattttttattttatttttattattgttttgagatgaggtcttactctgtcacccaagctggagtgcagtggtgccatcatakctcactgtaacctcaaactcctgggctttagcaatattcctgcctcagcctcctgagtagctgggactacaggcatgtgccaccacacagctaatttttg

SEQ ID NO: 355838 - DNA, 201 bp, Homo sapiens
ctgcgccattcagggcggtgagcagctgccagctgtgcatggggagggtagctggcgtcctgcatggcccctctgccccgggctcccactgggcagaggcwggaagggaggctccggggacttccacccactggtggccctgggcctctcctagccctcttggctccgaggtctcctccagggaaggggagtgtttgggcc

SEQ ID NO: 355839 - DNA, 201 bp, Homo sapiens
ggccaggagccctgtgctcttgacatcactgtactccctctccctccccgcaaccctgccccaccttgcatccagggtatggtgtaaataaacctgtgttrccatggcaacagagaccggcggtacctgccccaagcaaaggacacccctgcagatgagctgggagcaccggggctgaagggtagaccttacctgggaggg

SEQ ID NO: 355840 - DNA, 201 bp, Homo sapiens
ggttatcaacgttagttgtggaattggacttgaacccaagctaggctgacccccaaggcctgtgcacagcctgtgtcagggtgggttactccagaggtcamccaggcgtgctcttccccttcagggcaggtaggtctcctttgcaccaggcctgttgctccagttggggtctgcaggcactgtgatctcagctggcttatc

SEQ ID NO: 355841 - DNA, 201 bp, Homo sapiens
tccacgttgctggaagaactgcaggagtgtatgtgagtgtgtgtgtgcatacatgtgtgtgtatgtgtgtgcatacatgtgtgtgtatgtgtgtgcatacrtgtgtgtgtgtgcatgcatgtgtgtgggcgcatgtgtgcatgtgtgtgtgtgagtgtgtgtgttggggaggaggcatggcccttgggaaggtctgtccag

SEQ ID NO: 355842 - DNA, 201 bp, Homo sapiens
taagcctcatagcaccctgccaagtagctctcatttccttgccttgtagactagaagaagtgacttgcccaaggtcttataagcagtaagcaaagttgccrggagtggaacctgatgggaccaggtctgcctggctccagagctggtatccttcccgctcgcttaggtggctcccatggcaggaatgctgagtctgatggg

SEQ ID NO: 355843 - DNA, 201 bp, Homo sapiens
caaggcctgtgcacagcctgtgtcagggtgggttactccagaggtcacccaggcgtgctcttccccttcagggcaggtaggtctcctttgcaccaggcctrttgctccagttggggtctgcaggcactgtgatctcagctggcttatcactttaggtcataccttctccagaagtcttccatcgtttctggggacttcttg

SEQ ID NO: 355844 - DNA, 201 bp, Homo sapiens
gcacctgccgcaccacccacccaccgcccaacccattcctggcccaggttcctctctggcacacccttggccttggctcaggggccctgaaggaagggggyggggtagtggtagcacctgtgtactctttcaggtgtacctgagctacaataacgtctcctccttgaagatgcttgtggccaaggacaactgggtgctgtc

SEQ ID NO: 355845 - DNA, 201 bp, Homo sapiens
gctcttccccttcagggcaggtaggtctcctttgcaccaggcctgttgctccagttggggtctgcaggcactgtgatctcagctggcttatcactttaggkcataccttctccagaagtcttccatcgtttctggggacttcttggcctggcccccaagcccctcttcctctgtctccacccatccaggtatgtagagcat

SEQ ID NO: 355846 - DNA, 201 bp, Homo sapiens
cttggcaagccctcacccttccttgtctcaggttcctcctctgtagaatggatacagcaccagccccagcctcagagggttgttgtaaggatttggtgcarttccacatggaaagcccttgagaagagtggctggtgtgtagtgagtgctcagtaaatgtggactctcattaccattgtgagtggcctgtaaggatcccca

SEQ ID NO: 355847 - DNA, 201 bp, Homo sapiens
ggggtctgcaggcactgtgatctcagctggcttatcactttaggtcataccttctccagaagtcttccatcgtttctggggacttcttggcctggcccccmagcccctcttcctctgtctccacccatccaggtatgtagagcattttcccacctgctctcatttgccccagtgttcacatcacctgaaccctttgccctg

SEQ ID NO: 355848 - DNA, 201 bp, Homo sapiens
gagtcagatgtgggttggaacctcgcctctactacattcaagtgatgccccctcgagctttcagtctccatttgtaaaatgggtgtatctgcagtccctayctcacaggactgtggggcgatagatgcagtactgactccatgcctggctgcgccctgggagcggtcaggaggatggtgaaagcaacgcaaggggcacggg

SEQ ID NO: 355849 - DNA, 201 bp, Homo sapiens
cagctctcagaccattagtcttttcctttctctcttccatgggcatttatttagccccaaatctgtgccaggcacgtgtccctgtcccgtggaagcatctrtctgatgggggtggcaactgtgaggacagtgactacccagcttggtcagtgccatgatggagatggtgaggctgcaggggcattctaactctccctgggg

SEQ ID NO: 355850 - DNA, 201 bp, Homo sapiens
ccccaaatctgtgccaggcacgtgtccctgtcccgtggaagcatctgtctgatgggggtggcaactgtgaggacagtgactacccagcttggtcagtgccrtgatggagatggtgaggctgcaggggcattctaactctccctggggaagagagatgcaggatgaggaagagctcacctagcagacaggcgcagataaacg

SEQ ID NO: 355851 - DNA, 201 bp, Homo sapiens
acacctggaagggtgtccgggagctccggggccctgaggaggctgggcagtggccctggggaaggatccggtttgggccagagctgtggggacagagggcmgtcaggaaggaggaggagcttagaaacccagatgggtgtctgcttggctttgggggaaggtagagagagaaggagggagaggaggaaaaatcacaaattc

SEQ ID NO: 355852 - DNA, 201 bp, Homo sapiens
gggcagggtgggagggattttggtcatggggcttgtcgtgggtcattcctgagtccattttcctgcctcggccttcccgaggagggaactggatatagagkctgtgggctcaggactgagatcagggccaaagacaagggcatgagcatcattttctggccaaagcaaagagagaaagggatggaggctgacttctgggga

SEQ ID NO: 355853 - DNA, 201 bp, Homo sapiens
tgacctcaggtgatccacccgcctcagtctcccaaagtgctgagattacaggtgtgagccactgcacctggcctgatttttttatacagtgagagataagsgattgatttcatttttctacatgtgggtttccagttttcccaacatcaattgttgaatagactgtcccttccccaatgtgtgttctggcacctttgttga

SEQ ID NO: 355854 - DNA, 201 bp, Homo sapiens
ggagttctgggggccctggtatgggaagcaagttagaggctgcccctattctgaggaccccagaatttaaacgagtccaggaatcacctgtaatgtgcacrgagacttcagcgtctacacattggggctcacagagagatccggaatgtgaggctgtgataggccacccgaggcagagccgggcagttggtggctttgatt

SEQ ID NO: 355855 - DNA, 201 bp, Homo sapiens
agtgctgagattacaggtgtgagccactgcacctggcctgatttttttatacagtgagagataagggattgatttcatttttctacatgtgggtttccagktttcccaacatcaattgttgaatagactgtcccttccccaatgtgtgttctggcacctttgttgaaaatcagttggctgtaaatgtgtagatttattttg

SEQ ID NO: 355856 - DNA, 201 bp, Homo sapiens
tgtgagccactgcacctggcctgatttttttatacagtgagagataagggattgatttcatttttctacatgtgggtttccagttttcccaacatcaattrttgaatagactgtcccttccccaatgtgtgttctggcacctttgttgaaaatcagttggctgtaaatgtgtagatttattttggagctctctattctgtt

SEQ ID NO: 355857 - DNA, 201 bp, Homo sapiens
gattagatctgcgtaaggggcaataatcttcctttcatctgagattatggttaacagattatctacctgggatagaaatggatagtcctggcatgctggcmtgggttactgcaggccggttctggggcagcgagtccatggggaaggggctgagtcaccacttcatgcagagggagttctgggggccctggtatgggaagc

SEQ ID NO: 355858 - DNA, 201 bp, Homo sapiens
gaaatcacctgcgacgggtatggagggtgggctggggcagcgggagggctctggaagctgggcacccagaaagagattgatgtttccattttaactcagaygctctgcatctcctcacactctccacgggccattttctagctctctttggaaggagaaattgcagaacccctgggctggtttattatcagcagcaatctc

SEQ ID NO: 355859 - DNA, 201 bp, Homo sapiens
ggctcaaatgatactcctgcctcagcctcccaagtagctgagactacaggcatgtgccaccacacctggcagattttttatttaaaaaaattaaaaaaaawttttatacttaggccaggcatggtggctcacgcttgtaatcccagcactttgggaggccaaggcaggcagatcacaaggtcaggagttcgagaccagcct

SEQ ID NO: 355860 - DNA, 201 bp, Homo sapiens
ctctggagataacccctgaagcccctcctccctccccgccccaatcctcttccccacaccctcccaggatcttaacaggctaaccagaatatctaccatayctaaaatgacctttgagcacagtaagaggcagcagagaatgttggaccgagccccgacccctggctgtctgcccctgcttgggagtcaggagaccaatcc

SEQ ID NO: 355861 - DNA, 201 bp, Homo sapiens
gggtatggagggtgggctggggcagcgggagggctctggaagctgggcacccagaaagagattgatgtttccattttaactcagatgctctgcatctcctyacactctccacgggccattttctagctctctttggaaggagaaattgcagaacccctgggctggtttattatcagcagcaatctccaaacaagccccagg

SEQ ID NO: 355862 - DNA, 201 bp, Homo sapiens
gagaccagcctggtcaacatggtgaaatcccatctctactaaaaatacaaaaattagtcaggtatggtggtgcgcacctgtaatcccagctactgaggagrctgaggcaggagaattgcttgaacccgggaggcggaggttgcagtgagccgagatcatgccactgcactccagcctgagtgacagagaaagattccatct

SEQ ID NO: 355863 - DNA, 201 bp, Homo sapiens
cctctggagataacccctgaagcccctcctccctccccgccccaatcctcttccccacaccctcccaggatcttaacaggctaaccagaatatctaccatmtctaaaatgacctttgagcacagtaagaggcagcagagaatgttggaccgagccccgacccctggctgtctgcccctgcttgggagtcaggagaccaatc

SEQ ID NO: 355864 - DNA, 201 bp, Homo sapiens
attcctgccttcaagaattcagtctagtagggagctcagacctttctaatgggaagctgtctctagataatcatgcaaggggcactcacacttgaagagtrtagtggaggggagaggggccgcttttggcccttgcagcatcacaaacgactgatgccagaaggggccttttctcctgctttctccctgactcctgaccat

SEQ ID NO: 355865 - DNA, 201 bp, Homo sapiens
ggcatctttgttttatcccacattttagatgaaaagctttcaacttttccctgttcagtggaggactctttttcatctttcaaaacccagctgggctatcrtttcccctttgaatcctcatcttgtctgtccctagagttaatgacgtctcctcaggatgttgtatatacttcactcgttccctccacgggtacttactgt

SEQ ID NO: 355866 - DNA, 201 bp, Homo sapiens
cctcccttttcttcccttcatgtctttctctcttttctttctatacgtggtctcgctgtgttgcccaggctggtctcaaactcctgagttcaagggatccrctcaccttggcctcccaaagtactgggattataggtgtgagccactgtgcccagcctaaaattttatttgaactttgccttgatgaaaatattttagttt

SEQ ID NO: 355867 - DNA, 201 bp, Homo sapiens
ctctgtcaacccatcttcttggatgatgtctgttctagttacagtggctgtgtaacaaactaccccgaaccttagtagcttaaagcaacaactggtttctwtcatcttgtgattctatgggtcaggaattctggcagggctgggctgggtggtttgtctgctctatgtggcattgatggaggctgcttagtggaacttagt

SEQ ID NO: 355868 - DNA, 201 bp, Homo sapiens
ccaccatccccacccctctgctgtccctgcttcagccatagtgagctgctctccgcggcttcggtgtcccacttttgttctctcctccaggctgttgtacytgctatgtcttctgccggagttacccccagccttcctgcatctccccaaacttgtgtccccagcaagttccttctgagccctcagatctcagctcaggtg

SEQ ID NO: 355869 - DNA, 201 bp, Homo sapiens; identical to SEQ ID NO: 76186

SEQ ID NO: 355870 - DNA, 201 bp, Homo sapiens
tgctctatgtggcattgatggaggctgcttagtggaacttagtggtggatgggctgaactgggggctccatgatgccttcactggcacctcggtggggagkgctggaaggttgggtttagctgggactgtcatttggagcacccacgtgtggcctcttcaatatgacagtcttgggatagttagattttctacctggcagc

SEQ ID NO: 355871 - DNA, 201 bp, Homo sapiens
cagatgaaggcgcagatgtgggattccaacccacacgtcctgactctgagcccagctggcattcagcttccttgcactacctttgttgagtctgggggtgraggtgggtattgggagtggaagttgggctcttgaggacacaggtagcctcctgtcagctaagaacactctggccttgattgccacctctgcaccattgtc

SEQ ID NO: 355872 - DNA, 201 bp, Homo sapiens
aggaaggccggggagagcaggatatgaatgacacgcctcatgattgctaccattagcaaagagctggcctgcgtccctgtttggtaggtggaagcggagamcctgagaggcagagtagcttgtctagggtcacacagtgggtctagccaagcccaagcctggacctcccttctcaacgcccaggactctttccacagcacc

SEQ ID NO: 355873 - DNA, 201 bp, Homo sapiens
gacagagtcagcattggagttcaagggctctggtccctactcgcccctgggtacccagcaagtgagtgggcgactgaatgaagtggtcagcctgctgccaygctcggggctgggagaactgctgagtgcagtgtggtggtgcgggaaaggtctccctgtcccgcttcaatccttgcctctccccgtggagagctcttcttt

SEQ ID NO: 355874 - DNA, 201 bp, Homo sapiens
tcttccccagcctcagcttcctcattcataacatagggatgtcggggttggggcggtggggggtgataatggtccctgcaactggagcctgcttcgtgccrggtagcttaatgccatggcaggtatttacagagaaggggtgttaagagatcagatgtacatgtgcctataggctttgagagcagggcgaacatgggagag

SEQ ID NO: 355875 - DNA, 201 bp, Homo sapiens
ttccttgttccctgtccatttcctttctcttatctgtaaaataaggaatgaggaggattcctgcttcagagtgagaattaaagggcccccaagaacgagamctggcatacagtaggtacatggtaagtagcagtcatagatttctgaaaagggatctttgagcttctgcaaaggcaattcttagcccccgtcctgtagaaa

SEQ ID NO: 355876 - DNA, 201 bp, Homo sapiens
tcctgtagaaagctctcttgtctcagtaggatccctcctactggatctgtcccaggaccagatgaaccaaccagctttagtatctcccagactctaggcaracaaagccccttccaactgctaccttgtttctttgctgccttttcccacacacattttggaaagagttttctctgttcccatggtattacctctcattct

SEQ ID NO: 355877 - DNA, 201 bp, Homo sapiens
gtgctgagtaaataaaagaacctgagtggggtagagtggtgggggtcccagggctgcctgtggggaggggctgcccttgggaatgttctcacctccctgcktccctcccttatcccatccctggtcagatctggagagcagagactgtagccgcatggtgccggctgagaagacccgtgtggagagtgtggagctggtcct

SEQ ID NO: 355878 - DNA, 201 bp, Homo sapiens
agtcaggcctggctgttgctcaggtgaccagcttgtgtctctgggagggcgctgctttccccggccacccggcgcgatgatccagaatgtcggaaatcacytgcgacgggtatggagggtgggctggggcagcgggagggctctggaagctgggcacccagaaagagattgatgtttccattttaactcagatgctctgca

SEQ ID NO: 355879 - DNA, 201 bp, Homo sapiens
gcctggctgttgctcaggtgaccagcttgtgtctctgggagggcgctgctttccccggccacccggcgcgatgatccagaatgtcggaaatcacctgcgaygggtatggagggtgggctggggcagcgggagggctctggaagctgggcacccagaaagagattgatgtttccattttaactcagatgctctgcatctcct

SEQ ID NO: 355880 - DNA, 201 bp, Homo sapiens
gtcggaaatcacctgcgacgggtatggagggtgggctggggcagcgggagggctctggaagctgggcacccagaaagagattgatgtttccattttaactyagatgctctgcatctcctcacactctccacgggccattttctagctctctttggaaggagaaattgcagaacccctgggctggtttattatcagcagcaa

SEQ ID NO: 355881 - DNA, 201 bp, Homo sapiens
aaatcacctgcgacgggtatggagggtgggctggggcagcgggagggctctggaagctgggcacccagaaagagattgatgtttccattttaactcagatrctctgcatctcctcacactctccacgggccattttctagctctctttggaaggagaaattgcagaacccctgggctggtttattatcagcagcaatctcc

SEQ ID NO: 355882 - DNA, 201 bp, Homo sapiens
atcacctgcgacgggtatggagggtgggctggggcagcgggagggctctggaagctgggcacccagaaagagattgatgtttccattttaactcagatgcyctgcatctcctcacactctccacgggccattttctagctctctttggaaggagaaattgcagaacccctgggctggtttattatcagcagcaatctccaa

SEQ ID NO: 355883 - DNA, 201 bp, Homo sapiens
ttggaaggagaaattgcagaacccctgggctggtttattatcagcagcaatctccaaacaagccccaggggctgtcagatcccccacgggctggctgtgtrgagtggaatcaccttcagcaagtgtcggcctctggaattctattcggtgggtgtatgtttctccctgcagagttctgtgtatgtttctgggggatgtctg

SEQ ID NO: 355884 - DNA, 201 bp, Homo sapiens
catctgcagaatggatggggttagacttaatcattgagtgcctttttgagcttggacattctctttgggtccttggtcattgggctgtagggaggcccccyagacaaggtgccttggcaaagtcggagccagaagcttgagccattcaacctctgctcacatccttccagggatgaggaactcgttacctcattactaaag

SEQ ID NO: 355885 - DNA, 201 bp, Homo sapiens
tcatctgcagaatggatggggttagacttaatcattgagtgcctttttgagcttggacattctctttgggtccttggtcattgggctgtagggaggccccytagacaaggtgccttggcaaagtcggagccagaagcttgagccattcaacctctgctcacatccttccagggatgaggaactcgttacctcattactaaa

SEQ ID NO: 355886 - DNA, 201 bp, Homo sapiens
gggcgggagctggggaggaggagcaggagaggcccacaggcttcatttggagtcaggcctggctgttgctcaggtgaccagcttgtgtctctgggagggcrctgctttccccggccacccggcgcgatgatccagaatgtcggaaatcacctgcgacgggtatggagggtgggctggggcagcgggagggctctggaagct

SEQ ID NO: 355887 - DNA, 201 bp, Homo sapiens
gggttgaatattctgccctcccagaaggccagcaaggctgactcaccaccagcctcgtgcccactgggctcccaccccttcccaggaccctcccctagctyggtccccctgagcttggcttcccaccctgcaggtatcctactacaaccaggccaccccaggtgttctcaactatgtgaccaccaacgtggccggcctctc

SEQ ID NO: 355888 - DNA, 201 bp, Homo sapiens
gtgagcggcggtaccgagaggccagtgccagaaagaagatccgcctggacaggtgagtaggggctgagtggtgggcagaatgtggattcggggctgttcaygctccgctgaccccagggcactcgcttttcttcagagctgcctgtgcgttgggccctgggccgggccctttacatcctctcgttttggtcttattacaca

SEQ ID NO: 355889 - DNA, 201 bp, Homo sapiens
atagtgctgctatgaacgtgtatgtgcatgtatttgtacttgttttagttcttttgggtatataactaggagtggaattgctgggtcatatggtatttctrtgtttaactttttgaagaactgctaaactgtttttcatggcgactcaaccattttacattcccaccagtaatgtacacaggtcccgtgaatttcctggca

SEQ ID NO: 355890 - DNA, 201 bp, Homo sapiens
atatatatctatatacatacatatatattacaatttattcatttattaatggatatatattcatttattaatggatatttgagctgtttctaccttttgcytgctgtgaatagtgctgctatgaacgtgtatgtgcatgtatttgtacttgttttagttcttttgggtatataactaggagtggaattgctgggtcatatg

SEQ ID NO: 355891 - DNA, 201 bp, Homo sapiens
gaggctgaggtgggaggatcactggagcctgggaggtggaggctgcagtgagctgaggtcacccccactgcactccagcctaggtgacagagcaagatctwaaaaaaaaaaaaaaaaaaaaagcaaagcagaattttgtaaatatctcaaaatagaaaccttgaggtttttttaatgttaaagatgttatctggaaaagtt

SEQ ID NO: 355892 - DNA, 201 bp, Homo sapiens
cgcctataatcccagcactttgggaggctgaggtgggcagatggcttgaggtcaggagctccagaccagccttggcaacaaaaaattagctgggtggcacrtgcctgtggtcccagcaactctggaggctgaggtgggaggatcactggagcctgggaggtggaggctgcagtgagctgaggtcacccccactgcactcca

SEQ ID NO: 355893 - DNA, 201 bp, Homo sapiens
acctacccgtaaaaaatttccacagtgttacattattcactgtcaactaaaaacattaaatgattttcaaaaattactaggggatattaattggatacgamctgctctaggcattcctacctatgccaggagtaatctgttttctatccttggaggaaatcctagtctcactagccctcggcaattagcaaaagaggctga

SEQ ID NO: 355894 - DNA, 201 bp, Homo sapiens
aggatttggggccgggtgcagtggctcacgcctataatcccagcactttgggaggctgaggtgggcagatggcttgaggtcaggagctccagaccagcctkggcaacaaaaaattagctgggtggcacatgcctgtggtcccagcaactctggaggctgaggtgggaggatcactggagcctgggaggtggaggctgcagt

SEQ ID NO: 355895 - DNA, 201 bp, Homo sapiens
gttggtggacccactgaaatgcaggatttggggccgggtgcagtggctcacgcctataatcccagcactttgggaggctgaggtgggcagatggcttgagstcaggagctccagaccagccttggcaacaaaaaattagctgggtggcacatgcctgtggtcccagcaactctggaggctgaggtgggaggatcactggag

SEQ ID NO: 355896 - DNA, 201 bp, Homo sapiens
ggctttagactgacaggtgttggtggacccactgaaatgcaggatttggggccgggtgcagtggctcacgcctataatcccagcactttgggaggctgagrtgggcagatggcttgaggtcaggagctccagaccagccttggcaacaaaaaattagctgggtggcacatgcctgtggtcccagcaactctggaggctgag

SEQ ID NO: 355897 - DNA, 201 bp, Homo sapiens
tcattccttcccgaaatgcacccccttcaccccccaacccctcaccacagggtgaagccttcaacagccacagggtgcccatttggttacagcaggaattkttattgttgagtgtgtggacagatgaaataataaggctgttttcccgtaaacaactattaagctggagccaccccagcatgcatacaacttaaaaaagtg

SEQ ID NO: 355898 - DNA, 201 bp, Homo sapiens
agtcacagctgagctttgtcacttacttgggctcctcatctgtaggataaggataataaggcatctgtctcataggtttgttgggaggataaaattggatdagtacaaataaagtacttgtaaaattatgtgacacctaagtgccatataaacattagtggcgactgtcatcaccaccacacaattggcattggccatgag

SEQ ID NO: 355899 - DNA, 201 bp, Homo sapiens
tgccagatgagagagaagcagttgtacaaagtggtcaagcagtcttagcttttgcggtaagcagacttgggttgatgtctcagctctgccctttcctggckgtgtgattttgtgtgcatatatgtgcaagttaccttttctgagactttgtttccccatctgtaaaatgggaataataacaacattcaggtattaaggctg

SEQ ID NO: 355900 - DNA, 201 bp, Homo sapiens
cagggtgaagccttcaacagccacagggtgcccatttggttacagcaggaattgttattgttgagtgtgtggacagatgaaataataaggctgttttcccrtaaacaactattaagctggagccaccccagcatgcatacaacttaaaaaagtgatagcaacagaaaagcttaaatgcaggttgatagaatgagtcttttt

SEQ ID NO: 355901 - DNA, 201 bp, Homo sapiens
tctgtaaacaatggtggagggagcggtcccaggtgtcctgtcactgggactctgatccacgttgctggaagaactgcaggagtgtatgtgagtgtgtgtgygcatacatgtgtgtgtatgtgtgtgcatacatgtgtgtgtatgtgtgtgcatacgtgtgtgtgtgtgcatgcatgtgtgtgggcgcatgtgtgcatgtgt

SEQ ID NO: 355902 - DNA, 201 bp, Homo sapiens
ttaggggagcaaggaatagagagggttaggggtacatgcatgatggctggacctgctgcagggctcagcagagtgaaggtgaatctgggcagaggaggctrtgggtggaagggaaagccagagaggatgccgggaaggaggacaagctggggaggggcctggagcatggttggtggccagggaaggcctggacacacctga

SEQ ID NO: 355903 - DNA, 201 bp, Homo sapiens
tcgatctcctgatcttaggtgatccacctgccctcgcctcccaaagtgctgggattacgggtgtgagccaccacacctggccttttcttttcttttctttyttttaatggctgtacagaatagaagaatattcatcacacgcactgggctttgcctccccatagctttgcccatagatcctgcttctgggatccaaggagc

SEQ ID NO: 355904 - DNA, 201 bp, Homo sapiens
tctactaaaaatacaaaaattagccaggtgtggtggtgcgtgcctgtagtctcagctacttgggaggctgaggcaggagagtcacttgaacccgggaggcrgaggttgcagtgagccgagattgcaccactgcattccagcctgggcaacagagtgaaaccctgtctcaaaaaaaaaaaaaaaaaagagaggccaggtgtg

SEQ ID NO: 355905 - DNA, 201 bp, Homo sapiens
ggaggttagactctacctttgaatgggaggagtagcaaaaattggtggccttctttcatttaccacaacgtctcaaaatcctgtggatcttaaatacccayatatgttagtgtctccaggtgtagcctcttctccagtgagctccaggcctgagttccttgattcctctctttaaatgtttaataggatctcacaaattct

SEQ ID NO: 355906 - DNA, 201 bp, Homo sapiens
tagcctcttctccagtgagctccaggcctgagttccttgattcctctctttaaatgtttaataggatctcacaaattcttgtcccctacttatttctacastgatctccccaactcagtaaccagtaccaccatctgccagtcactcattctaagcttggatcctcctttcttatttatttattttgacttttttcctttt

SEQ ID NO: 355907 - DNA, 201 bp, Homo sapiens
tccattttggtcagactggtctccagctcccaacctcaggtgatccactcacttcggcctctgaaagtgctgggattacaggcgtgagccaccatgcctcyggcccccagcacctttatcttttggcagaggctggggggcccagtgtggactgaacttcatgggagtttttagatttattttttatttttattttatttt

SEQ ID NO: 355908 - DNA, 201 bp, Homo sapiens
actaggcctctttctgtcctctaatccagccagcctttggatttgcagccagaggcctgacacccaggccacacgcagcctggccccctcactgtccctcmgacggcctggttgtcatcctgagccactccttgttccctctgttttccccttcacaggactgggcctcatgctgcctgccaaatgccagtcttgggctgt

SEQ ID NO: 355909 - DNA, 201 bp, Homo sapiens
ggcccaggagctgaagcaaggaggactgacttctctgcatggttttgtctccactggcccactcgggtgcaaggccgtgttcatgtgcagttcttggccaraaggaaactgggcagaagcagcaatcacagatatcctggggtccgagaccacgggctggagggtggtgaccactctcgggttggggtctggtgggaggtg

SEQ ID NO: 355910 - DNA, 201 bp, Homo sapiens
tccccaggatggtgagcggcggtaccgagaggccagtgccagaaagaagatccgcctggacaggtgagtaggggctgagtggtgggcagaatgtggattcrgggctgttcacgctccgctgaccccagggcactcgcttttcttcagagctgcctgtgcgttgggccctgggccgggccctttacatcctctcgttttggt

SEQ ID NO: 355911 - DNA, 201 bp, Homo sapiens
tcacacttgcagggccctgattagagcagcagagttctgtaatggttggcagagcaaggggaatcccaaggatcttcctgtcccaaatcccagaacacagrcaggaaaatcgaggcccaggaggggaagggacttgccccaggtcactgagctacatagattccagtgtgggacttgacttccaggcccctgagtctcaca

SEQ ID NO: 355912 - DNA, 201 bp, Homo sapiens
gcaaaaatccttgtcctcaagtaatttacaatctagtgggagggagagacagtagacagacgaaaagcagatatacagaagatggtcggggtggtgcccayggtgaggggtgtaaggaatggtggcagcagggtgtggtgggagttgtggccttggcttgggcggctggagaagcctcctgaggaggtgccatctgagcag

SEQ ID NO: 355913 - DNA, 201 bp, Homo sapiens
atcgtgtcctgtaagcagacagaggtgcccctctccgtcccctgggaccctagcaaccaggtaaggctctctgctccgagaggacagtcttcagacccacygggcccccacccttccctgcttgtcagaacgggtttggaggaaggccggggagagcaggatatgaatgacacgcctcatgattgctaccattagcaaaga

SEQ ID NO: 355914 - DNA, 201 bp, Homo sapiens
gggctccagaaggccgggaagcaggccagtgtggtgtgatcactcattcaacagctacttactgagtgtgtactatgtgccaggcactgttccaggactgrggtacagcaatgaacaagacaggcaaaaatccttgtcctcaagtaatttacaatctagtgggagggagagacagtagacagacgaaaagcagatatacag

SEQ ID NO: 355915 - DNA, 201 bp, Homo sapiens
acctgtccccacctgtaccccagggcttggcctctgtgttctccaaccgcacatcccggaagtcagccttacgtgcggggaacgacagtgccatggcagayggcgagggataccggaaccccacggaggtgcagatgagccagctggtgctgccctgccacaccaaccaacgtggtgagctgagcgtcgggcagctgctca

SEQ ID NO: 355916 - DNA, 201 bp, Homo sapiens
cagggctggacagacctgggagaccctgcagcaagcagacctctctgtccccacctgtccccacctgtaccccagggcttggcctctgtgttctccaaccrcacatcccggaagtcagccttacgtgcggggaacgacagtgccatggcagacggcgagggataccggaaccccacggaggtgcagatgagccagctggtg

SEQ ID NO: 355917 - DNA, 201 bp, Homo sapiens
tgagggggatgctgagtggggaggtgctgctgggggagctgggagaaggggccccactttctggggaggaagaggacatcatccccagcaggaagggcccrcaggaccctggagcagccgctggggccttgaaggggcccactgggctgctggtttcctggggcaggaagtcctggctgcagccagaatttggccagggga

SEQ ID NO: 355918 - DNA, 201 bp, Homo sapiens
gtggggatgcagctgagactcagagaggttgagctgcgtgttcacattcacacagcaagtcagctgtagccctgagcttccagtctcagcctccagcatcyccatcagtccactccaccacccagcaaatgaggctgccctctatcccatgcaggtccgcctgtacactctggaggatgacaagttcctctccttccacat

SEQ ID NO: 355919 - DNA, 201 bp, Homo sapiens
ggtagtggtagcacctgtgtactctttcaggtgtacctgagctacaataacgtctcctccttgaagatgcttgtggccaaggacaactgggtgctgtcctyggagatcagtcaggtagctgaccccacccacccaattttcctttctcatctgagccagaggtggctaatggcaagcaacaagaactctcccacaccactt

SEQ ID NO: 355920 - DNA, 201 bp, Homo sapiens
tcagtctctcagtaagtgctggcataaaaggaaggcaggaccatggcaacttacaaagctgttcatgtgttccctcctttgcacctcacaacaatctacaragtatttgggattcccattttacagatgaggaaaccggtctgtggggggtgctcacttgttgaatgaatgaatggagagaggggaagcaagttgcccaga

SEQ ID NO: 355921 - DNA, 201 bp, Homo sapiens
catggtggcacacacctgtaatcccagctacttgggaggcagaggcaggagaatagcttgaaccccggaggtggaggttgcagtgagccaagatcacaccrctgcattccagcctgggtgacagagtgaaactctctcaaaagaaataaaaaaatgtggctgggcggtgactcacacctgcaatcctagcactttgggagg

SEQ ID NO: 355922 - DNA, 201 bp, Homo sapiens
ctgatccacgttgctggaagaactgcaggagtgtatgtgagtgtgtgtgtgcatacatgtgtgtgtatgtgtgtgcatacatgtgtgtgtatgtgtgtgcrtacgtgtgtgtgtgtgcatgcatgtgtgtgggcgcatgtgtgcatgtgtgtgtgtgagtgtgtgtgttggggaggaggcatggcccttgggaaggtctgt

SEQ ID NO: 355923 - DNA, 201 bp, Homo sapiens
ggaacgcactgaaaaaaatctcatgcatttggtccacagcgagccaggctctgtcccctctgggccctggagataccagaagtagaaagagtttctgcatwgtagatcttcatggtctggtgtcaatcaaattctcccacaattaattgaaccttgtcacaatggagagcactgcagaagtgaggtacacgggtgcccggg

SEQ ID NO: 355924 - DNA, 201 bp, Homo sapiens
gctcactacaacctccacctcctgggttcaagcgattctcctgcctcagcctcccaaagtgctggctgggattacaggcatgagccaccgtgcctggcctyttttttttttgagacagagtctcgccctgttgcccaggttggatggagtacagcagcaagatcttggctcattgtgacctctacctcccaggttcaagcg

SEQ ID NO: 355925 - DNA, 201 bp, Homo sapiens
ctgggactctgatccacgttgctggaagaactgcaggagtgtatgtgagtgtgtgtgtgcatacatgtgtgtgtatgtgtgtgcatacatgtgtgtgtatrtgtgtgcatacgtgtgtgtgtgtgcatgcatgtgtgtgggcgcatgtgtgcatgtgtgtgtgtgagtgtgtgtgttggggaggaggcatggcccttggga

SEQ ID NO: 355926 - DNA, 201 bp, Homo sapiens
agtagaaagagtttctgcatagtagatcttcatggtctggtgtcaatcaaattctcccacaattaattgaaccttgtcacaatggagagcactgcagaagygaggtacacgggtgcccggggtgctgagggataaggagcattacagagatggcggagcaggacaagtgttccaggcagagggagtggcacgggcaaaggc

SEQ ID NO: 355927 - DNA, 201 bp, Homo sapiens
acttgagcctgggaggtcaaggctgcagtgagccaagattaagccactgcattccagcctgggcaatagacagagcaagactctctcgaaaaaaaaaaaawaattttttttttttttgtagagatgggatcttgctctcttgcccaagttggtctcaaacgcctggcttcaagcaatcctcctgcctcagcctcccaaagt

SEQ ID NO: 355928 - DNA, 201 bp, Homo sapiens
aagggaatttgaaggagctgggggttgctgattggccgaggagtgaggggtggagtcatgggacagggagaggaagaaactacattcttgtgttgagttgyctctttggaaggaggctttagactgacaggtgttggtggacccactgaaatgcaggatttggggccgggtgcagtggctcacgcctataatcccagcact

SEQ ID NO: 355929 - DNA, 201 bp, Homo sapiens
agcagccttggctgtctggcaggtagggcaggggtctgaggaggggaagaggccgggtctgtccttcacagccccagaatggcccaccccaccgtcagggsctgtggcatgggggtgactgcctgtgaacatgggttctgtactgggtgctgtcaaagcagctcccctgagggggggggtcacacggaaagggcgggtcat

SEQ ID NO: 355930 - DNA, 201 bp, Homo sapiens
tacttgagcctgggaggtcaaggctgcagtgagccaagattaagccactgcattccagcctgggcaatagacagagcaagactctctcgaaaaaaaaaaaataattttttttttttttgtagagatgggatcttgctctcttgcccaagttggtctcaaacgcctggcttcaagcaatcctcctgcctcagcctcccaaag

SEQ ID NO: 355931 - DNA, 201 bp, Homo sapiens
ctgattttcccttcttgggagccttccctggctcccagtcctgcccacccctggctgggtcagggacccctcctctgggatcccccagcccctgtctcccrctgtctcagatcagtgtctctgtctccctccttggctcctggctccatgcctggaccgctgtagatgctcagatcacagggccacttcttgccagtgttt

SEQ ID NO: 355932 - DNA, 201 bp, Homo sapiens
ggggtgtggctaaaaactttttcttttaccagactgggcaacatggcaagaccccatctgtgtaaaaaataaaaaattaaaattagctgggcatggtggcmcccgtctgtagtcccagcaacttgggatgctgaggtgggaggattacttgagcctgggaggtcaaggctgcagtgagccaagattaagccactgcattcc

SEQ ID NO: 355933 - DNA, 201 bp, Homo sapiens
tatatatatatatatataaaaatctggcccaaactagtggctgaagcaccaggggcattccttctgtctccccacccctgcctcctcagccggctctgccrtgcccaccctacgctgaaggccattgaaatgttccacttccgaggcccgtcccaggtcggcgaccgtctggtgctcaaagccatcgtgaacaatgccttc

SEQ ID NO: 355934 - DNA, 201 bp, Homo sapiens
gcaatggcgcgatctaggctcactgcaacctctgcctcccaggttcaagcgattctcctgcctcagcctccggagtagctgggattataggcacctaccascacacccagctaatttttgtatttttagtagagacggggtttcaccatgttggccaggctggtcttggactccggacctcaggtgatccacccgcctcag

SEQ ID NO: 355935 - DNA, 201 bp, Homo sapiens
ccaccatctgccagtcactcattctaagcttggatcctcctttcttatttatttattttgacttttttccttttttttttttttgagatgcagtctcactstgtctcccaggctggagtgcaatggcgcgatctaggctcactgcaacctctgcctcccaggttcaagcgattctcctgcctcagcctccggagtagctgg

SEQ ID NO: 355936 - DNA, 201 bp, Homo sapiens
tctctactaaaaatacaaaaattagctgggcatggtggcgcgttcctgtaatcccagctacttgggtggctgaggcacgagaatcgctagaacccgggagrtggagattgcagtgagccgagattgtgccactgcactccagcctgggtgacagagcaagactgtctcaaaaaaaaaaaaaaaaaaagccgagtgtgaatg

SEQ ID NO: 355937 - DNA, 201 bp, Homo sapiens
attcctctgagacagtgtaggaaaatatggggatgggagtggaattggaacaggtctgatagggctactttgcagccagagagcttgaggctgaaggcagyatctggagtgtggatggtgccgcgtagagagttgctggcacacctgctgagctcagctgcctctgccagagactagattgtgctcagctctggacctcct

SEQ ID NO: 355938 - DNA, 201 bp, Homo sapiens
cggtacctgccccaagcaaaggacacccctgcagatgagctgggagcaccggggctgaagggtagaccttacctgggagggtcattgttgctgttttaccrctgccctggacgtcaggaaccagccactccacattcagaccgtcatccccaggcagctggagaagagggatcaggctgcctcccgtgtagtacattggtt

SEQ ID NO: 355939 - DNA, 201 bp, Homo sapiens
tggagtcacagctgagctttgtcacttacttgggctcctcatctgtaggataaggataataaggcatctgtctcataggtttgttgggaggataaaattgrattagtacaaataaagtacttgtaaaattatgtgacacctaagtgccatataaacattagtggcgactgtcatcaccaccacacaattggcattggccat

SEQ ID NO: 355940 - DNA, 201 bp, Homo sapiens
ctgttttccccttcacaggactgggcctcatgctgcctgccaaatgccagtcttgggctgtctcctccctgccactgagtcattccttcccgaaatgcacycccttcaccccccaacccctcaccacagggtgaagccttcaacagccacagggtgcccatttggttacagcaggaattgttattgttgagtgtgtggaca

SEQ ID NO: 355941 - DNA, 201 bp, Homo sapiens
acagtgcataagcaatgctgttttgggcaggcctggctatgagtgcagtaagatcctggaggagcctgatggtcagggaaggctgcctgaaggaagagcasttcagctgggacttgaatgccaagtagctttgggtaaggggagggcttctggatagtgggaacagcagctaccaaggtgtaaaagttggaaggaaaatgg

SEQ ID NO: 355942 - DNA, 201 bp, Homo sapiens
ttgggaggccgaggtgggtggatcacctgagattaggagttcgagaccagcctggccaacatggtgaaaccatgtctctactacacatacaaaaattagckggatggacgtggtggcaggagcctgtaatcccagctactcgggaggctgaagcaggagaatcacctgaacccgagaggtggaggttgtagtgagccgaga

SEQ ID NO: 355943 - DNA, 201 bp, Homo sapiens
ctccaccgggcctggtctgctctgcagccctgtaatatcccctctggagataacccctgaagcccctcctccctccccgccccaatcctcttccccacacyctcccaggatcttaacaggctaaccagaatatctaccatatctaaaatgacctttgagcacagtaagaggcagcagagaatgttggaccgagccccgacc

SEQ ID NO: 355944 - DNA, 201 bp, Homo sapiens
cactgggactctgatccacgttgctggaagaactgcaggagtgtatgtgagtgtgtgtgtgcatacatgtgtgtgtatgtgtgtgcatacatgtgtgtgtrtgtgtgtgcatacgtgtgtgtgtgtgcatgcatgtgtgtgggcgcatgtgtgcatgtgtgtgtgtgagtgtgtgtgttggggaggaggcatggcccttgg

SEQ ID NO: 355945 - DNA, 201 bp, Homo sapiens
ctgtaaacaatggtggagggagcggtcccaggtgtcctgtcactgggactctgatccacgttgctggaagaactgcaggagtgtatgtgagtgtgtgtgtrcatacatgtgtgtgtatgtgtgtgcatacatgtgtgtgtatgtgtgtgcatacgtgtgtgtgtgtgcatgcatgtgtgtgggcgcatgtgtgcatgtgtg

SEQ ID NO: 355946 - DNA, 201 bp, Homo sapiens
atggtgataccccatctctactaaaaatacaaaaattagctgggcatggtggcgcgttcctgtaatcccagctacttgggtggctgaggcacgagaatcgstagaacccgggagatggagattgcagtgagccgagattgtgccactgcactccagcctgggtgacagagcaagactgtctcaaaaaaaaaaaaaaaaaaa

SEQ ID NO: 355947 - DNA, 201 bp, Homo sapiens
ttgaggtttttttaatgttaaagatgttatctggaaaagttaggaccctgtggcaggggctgtgtgacttttaagcaataagcagctataagaaagtgggmtatagggcaagccggttaatgcttagctatgcttttacttacagcttatgcttttgttaaaaacttagcaatttagcttgattaattttgtgaggatggc

SEQ ID NO: 355948 - DNA, 201 bp, Homo sapiens
atctcttcaaagaattgggtgagatcaagaaaccagtccagttatggaaacgtacccacccctgcagggcctggagtcgagaacccctagattcttctctsctgcctgccccccttcctgttctcaaccactcaggtctgctgctgtctgaccaggcacttcctccctctctgttcttctgcagtgatcactgcagggatc

SEQ ID NO: 355949 - DNA, 201 bp, Homo sapiens
actcctttgcagattcctcctccccacgtgacttctaaatagctgagtgtgagggcaggcatggtggctcacacctgtaatcccagcattttgggaggccraggcaggcggatcacttgaagtcaggagttcgagagcagcctgaccaacatggtgataccccatctctactaaaaatacaaaaattagctgggcatggtg

SEQ ID NO: 355950 - DNA, 201 bp, Homo sapiens
ctcatgcctgtaatcccagcactttgggaggctgagggagcggggggcggatcacttaagatcattagttcaagaccagcttggccaacatggtgaaaccycatctccactaaaaatataaaaattagctgggtgtggaggcttgtgcctgtaatcccagctactcgggaggctgaggcaggagaatcgcttgaacccaga

SEQ ID NO: 355951 - DNA, 201 bp, Homo sapiens
cagcagccttggctgtctggcaggtagggcaggggtctgaggaggggaagaggccgggtctgtccttcacagccccagaatggcccaccccaccgtcaggscctgtggcatgggggtgactgcctgtgaacatgggttctgtactgggtgctgtcaaagcagctcccctgagggggggggtcacacggaaagggcgggtca

SEQ ID NO: 355952 - DNA, 201 bp, Homo sapiens
atgccccatttgacagatgaggaaactaaggcccagacatctaataataaaactcacctttttataatcacttaccatgtgccagagatcaggctatacastctgctttctgctttcaccatatcttccccttaaaatatagctggcatttcacatcttatttaatttaaattagcagattgacttgatttttgccaaaga

SEQ ID NO: 355953 - DNA, 201 bp, Homo sapiens
cagacctcatcttactaaaaataacatttaaaaaattgggcttggtgccgtggctcatgcctgtaatcccagcactttgggaggctgagggagcggggggyggatcacttaagatcattagttcaagaccagcttggccaacatggtgaaaccccatctccactaaaaatataaaaattagctgggtgtggaggcttgtgc

SEQ ID NO: 355954 - DNA, 201 bp, Homo sapiens
tgccagagatcaggctatacactctgctttctgctttcaccatatcttccccttaaaatatagctggcatttcacatcttatttaatttaaattagcagaytgacttgatttttgccaaagatgttttctctcaataattaaaaaaaattaattattgaagtaaaattcacataatgtaaacttaaccattttaaagtgac

SEQ ID NO: 355955 - DNA, 201 bp, Homo sapiens
gcagaggctgcaatctcggcactttgggaggccaaggcaggcggctgctccttgccctcgggccccgcggggcccgtccgctcctccagccgctgcctccygggcggcgctcgctggcgcggcggcaaagactctgattttttaaaaatgtattctagagatggggtttcgccatgttgccaaggctggtcttgaactcct

SEQ ID NO: 355956 - DNA, 201 bp, Homo sapiens
ccccattccctctgcccccagccccggcaaccaccaatcagctttttgtttctatagatttatccgctaatatggatacatacaatatgtgactttttgtktctggtatgtttcacttagtatatctttttgaaattcatctatgttttagcatgtatcagtacttcatttatgtttatgtctgaataaccattcatttga

SEQ ID NO: 355957 - DNA, 201 bp, Homo sapiens
ggcagagacactcctcacttcccagacggggtggcggccgggcagaggctgcaatctcggcactttgggaggccaaggcaggcggctgctccttgccctcsggccccgcggggcccgtccgctcctccagccgctgcctcccgggcggcgctcgctggcgcggcggcaaagactctgattttttaaaaatgtattctagag

SEQ ID NO: 355958 - DNA, 201 bp, Homo sapiens
tttaatttatgatcttgaaaaaaaaaagaattgctagggtaatacgtatgagaactgctagcataggacctgagacttagtaggcattcaataactgttcmccaaatgaatacatataggagatgcttcataaaaatattggttcaattctctacctttccaactcccaaatcttgaagaatgtcaagtgtgaacacactt

SEQ ID NO: 355959 - DNA, 201 bp, Homo sapiens
gcacttggcacagctgctgtctgagagggcacatctccgacctctgggtgtcctcctacccttgcagtggttcagcccccgccaccctggtagctctcttrgctcggcctgcctggctgcccaggccctgactctatccagggcctctcctctccctatgactggccctgggaggagtggcccagctctggagccccattg

SEQ ID NO: 355960 - DNA, 201 bp, Homo sapiens
gcctttttgagcttggacattctctttgggtccttggtcattgggctgtagggaggccccctagacaaggtgccttggcaaagtcggagccagaagcttgrgccattcaacctctgctcacatccttccagggatgaggaactcgttacctcattactaaagtagacttttttttttttttctttttttttggagatggag

SEQ ID NO: 355961 - DNA, 201 bp, Homo sapiens
aacacctttgggggccagatcatggcctggatggagaatgtggccaccattgcagccaggtgagggcagggtgtgctgcctctgcctcccctcctttctcstcctcctccccttggctacctccctctggaggggaaaccccagcttggggttggcattcaaggcttcagaagcttggctgttctgaatcagagaaatgaa

SEQ ID NO: 355962 - DNA, 201 bp, Homo sapiens
acatcccagacgatgggcggccaggcagagacactcctcacttcccagacggggtggcggccgggcagaggctgcaatctcggcactttgggaggccaagrcaggcggctgctccttgccctcgggccccgcggggcccgtccgctcctccagccgctgcctcccgggcggcgctcgctggcgcggcggcaaagactctga

SEQ ID NO: 355963 - DNA, 201 bp, Homo sapiens
ttgggctgtagggaggccccctagacaaggtgccttggcaaagtcggagccagaagcttgagccattcaacctctgctcacatccttccagggatgaggarctcgttacctcattactaaagtagacttttttttttttttctttttttttggagatggagtctccctctgtcacccaggctggagtacaatgacacgatc

SEQ ID NO: 355964 - DNA, 201 bp, Homo sapiens
cctgtggggaggggctgcccttgggaatgttctcacctccctgcttccctcccttatcccatccctggtcagatctggagagcagagactgtagccgcatrgtgccggctgagaagacccgtgtggagagtgtggagctggtcctgcctccccacgccaatcaccagggcaacacctttgggggccagatcatggcctgga

SEQ ID NO: 355965 - DNA, 201 bp, Homo sapiens
gataaacaagtgaacaaaggtctctggttttcctaggcagaggaccctgcggccttccgcagtgtttgtgtccctgattacttgagattagggattggtgmtgactcttaacgagcatgctgccttcaagcatctgtttaacaaagcacatcttgcaccgcccttaatccatttaaccctgagtggacacagcacatgttt

SEQ ID NO: 355966 - DNA, 201 bp, Homo sapiens
atggtgctggggacaggcccttgtgctatttcaggagacttgccctgagtgtcccccaccctgtcccctggccgacaggtgaagctgaagcagatcacgcygcggacagaagaggagaagatggagcacagtgtggcggctgagcgccggcgcatgcgccttgtctatgcagacaccatcaaggacctcctggccaactgc

SEQ ID NO: 355967 - DNA, 201 bp, Homo sapiens
gatcttggctcactgcaacctccgcctcctgggttcaagcaattccccttcgtcagcctcctgagtagctgggattacaggcgcctgccaccatgcccggytaattgtttgtatttttagtagagacggggtttcaccatgttggccaggctggtctcgaactcctgaccttaggcaatctgcccacctcggcctcccaaa

SEQ ID NO: 355968 - DNA, 201 bp, Homo sapiens
gacctagcaaccaaaagaacaatgtgtcaactatgcttggctatttttttttttttgagacagagttttgctctgttgcccaggctggagtgcaatggcgygatcttggctcactgcaacctccgcctcctgggttcaagcaattccccttcgtcagcctcctgagtagctgggattacaggcgcctgccaccatgcccgg

SEQ ID NO: 355969 - DNA, 201 bp, Homo sapiens
ttggggtttttgcactgtctgttctcttgtccgcaaccctgcacagtcttgtgcaattgctccttctcatcattccttcagatcctagccaggaagcctcyttgattacacagcctaaagaagctcctccctgtccaccaccttctttctgttacatcccgttttttctttctcatagcacttttccctcttcttgttcct

SEQ ID NO: 355970 - DNA, 201 bp, Homo sapiens
ttggggatgaaatcagagcggcttcttgaaacactgtattaggaacagttccctgggcttgactgctatggagctctctaggcctccctgcatagagaggsactctttccagaatgaacgtaaatctaaggcaacactttaaacagttggcccaggagctgaagcaaggaggactgacttctctgcatggttttgtctcca

SEQ ID NO: 355971 - DNA, 201 bp, Homo sapiens
ggaggggtttgggaagagtgtggacgaatggagtcctgcctaccacctccctctacccactcccacaccccgaaagccagccacccgtatccatgcaggcycccagcgcacaaccaagcgggaagtgccttggcagtggttaccatggcgatgggtcctgctgcttggacaacatcggccttccagctacctgtgagagcc

SEQ ID NO: 355972 - DNA, 201 bp, Homo sapiens
tacccctggctatgggaggggtttgggaagagtgtggacgaatggagtcctgcctaccacctccctctacccactcccacaccccgaaagccagccacccrtatccatgcaggcccccagcgcacaaccaagcgggaagtgccttggcagtggttaccatggcgatgggtcctgctgcttggacaacatcggccttccagc

SEQ ID NO: 355973 - DNA, 201 bp, Homo sapiens
ctcgccggctgatctggcccaggctcagcaggtagtccagcatgtcggcatcagggctgcaggcctccagctcacagcctggaaggaatcccaaggggctkttagcgtctgtcctcgccccagcccaagactcatgttcgttcatcccatgaccctccctgggctcccactgtgtccagtaccccatctggcagagggacg

SEQ ID NO: 355974 - DNA, 201 bp, Homo sapiens
gaggactgctggtgatgcccagggttctgtgagctgtgggggagggctctatttcccacctatggacttcaggcccaggcaacttcaccagctgggccagkggttcctgagggagcactgaggctgggtgacatagccctgactatgcctctgggcaccccatgaatgctcaggtacccccaggtgcctgttcttgatttt

SEQ ID NO: 355975 - DNA, 201 bp, Homo sapiens
tgttggcaaggctcgtctcgaactcctgaccttgggtgatccgcccaccttggcctcccaaaatgctgggattacagacgtgagccatcgcatctggtctycactgtagagatctttcatctcctttatttattttttaagagacagtgtttccctctgttgcccaggttggagcgcagtggtctgatcatagctcactgt

SEQ ID NO: 355976 - DNA, 201 bp, Homo sapiens
acttgccctgagtgtcccccaccctgtcccctggccgacaggtgaagctgaagcagatcacgccgcggacagaagaggagaagatggagcacagtgtggcrgctgagcgccggcgcatgcgccttgtctatgcagacaccatcaaggacctcctggccaactgcgccattcagggcggtgagcagctgccagctgtgcatg

SEQ ID NO: 355977 - DNA, 201 bp, Homo sapiens
acaacgtcatgaagtgtttcccttatgttttcttctagtaattttgtagtttgggggtcgtacatttaagtctttaactcatttttattttttattttttatttttttttgagatggagtctcactctgtcgcctaggttggagtgcagtggcatgatctcggctcactgcaacctccgcctcccaggttcaagtgattct

SEQ ID NO: 355978 - DNA, 201 bp, Homo sapiens
ccaatttacattcccatgaacagtgtcaaaaggttgccttttccccaaatccttgccaacacatattgtcttctggttttgtttgtttgtttgtttgttttgagacggagtctcactctgtcgcccaggctggagtgtagtggcacgaccttggctcactgcaacctccgcctcccgggttcaagtgattctcctgcctca

SEQ ID NO: 355979 - DNA, 201 bp, Homo sapiens
accaatttacattcccatgaacagtgtcaaaaggttgccttttccccaaatccttgccaacacatattgtcttctggttttgtttgtttgtttgtttgttttgagacggagtctcactctgtcgcccaggctggagtgtagtggcacgaccttggctcactgcaacctccgcctcccgggttcaagtgattctcctgcctc

SEQ ID NO: 355980 - DNA, 201 bp, Homo sapiens
taccaatttacattcccatgaacagtgtcaaaaggttgccttttccccaaatccttgccaacacatattgtcttctggttttgtttgtttgtttgtttgttttgagacggagtctcactctgtcgcccaggctggagtgtagtggcacgaccttggctcactgcaacctccgcctcccgggttcaagtgattctcctgcct

SEQ ID NO: 355981 - DNA, 201 bp, Homo sapiens
tgtaccaatttacattcccatgaacagtgtcaaaaggttgccttttccccaaatccttgccaacacatattgtcttctggttttgtttgtttgtttgtttgttttgagacggagtctcactctgtcgcccaggctggagtgtagtggcacgaccttggctcactgcaacctccgcctcccgggttcaagtgattctcctgc

SEQ ID NO: 355982 - DNA, 201 bp, Homo sapiens
ccggccagtgttcttaatttatctggaggactctttttttgctctccaaaattttattttaatatgcatagcataagggaatgattacctcattaaaaaawttttttttaatgggccaggcatggtggctcatacctataatcccaacactttgggaggccgaggtcggtggattacttgaggtcaggagtttgagaccag

SEQ ID NO: 355983 - DNA, 201 bp, Homo sapiens
ctctgttggtgggtgggccactgcagggcagcgaggggtcccctgaggaggggaccattgagccgagagcaaaaagaagcacaggcattaattggacaacrgggatcagggaacgggggagcagatgagtgcaatcatgctacttctctcagcctcagcttaaccatctgtaaagtggggtgctgacactatcttgctagc

SEQ ID NO: 355984 - DNA, 201 bp, Homo sapiens
ttgcaccaggcctgttgctccagttggggtctgcaggcactgtgatctcagctggcttatcactttaggtcataccttctccagaagtcttccatcgtttytggggacttcttggcctggcccccaagcccctcttcctctgtctccacccatccaggtatgtagagcattttcccacctgctctcatttgccccagtgtt

SEQ ID NO: 355985 - DNA, 201 bp, Homo sapiens
gtgttccctcagccagggtgtggccgagatagcatagtggggtgctgcgtgactttggggaagtcagtctctctctctgagcctcagttttctcatctgcmgaatggatggggttagacttaatcattgagtgcctttttgagcttggacattctctttgggtccttggtcattgggctgtagggaggccccctagacaag

SEQ ID NO: 355986 - DNA, 201 bp, Homo sapiens
atgtgtgtaggctgcctcagagccttttttgggaagaaggcagggaataggccaaaagaggagctttggaatgttgacaggcaggaatactcctgccttgytggtggggaaagcaccaggaggctgcccttgggtttctctgagaggctgggggagagggaaggggctggggccacctttgtggggacagagcatggaatt

SEQ ID NO: 355987 - DNA, 201 bp, Homo sapiens
tgcatttcttaggtccttctgtcccaacacgtccctgttcttcctctgacagccggtccctgcgcttccttggggtttttgcactgtctgttctcttgtcygcaaccctgcacagtcttgtgcaattgctccttctcatcattccttcagatcctagccaggaagcctccttgattacacagcctaaagaagctcctccct

SEQ ID NO: 355988 - DNA, 201 bp, Homo sapiens
tctgcatttcttaggtccttctgtcccaacacgtccctgttcttcctctgacagccggtccctgcgcttccttggggtttttgcactgtctgttctcttgyccgcaaccctgcacagtcttgtgcaattgctccttctcatcattccttcagatcctagccaggaagcctccttgattacacagcctaaagaagctcctcc

SEQ ID NO: 355989 - DNA, 201 bp, Homo sapiens
gcagagtctgctctctgcatttcttaggtccttctgtcccaacacgtccctgttcttcctctgacagccggtccctgcgcttccttggggtttttgcactstctgttctcttgtccgcaaccctgcacagtcttgtgcaattgctccttctcatcattccttcagatcctagccaggaagcctccttgattacacagccta

SEQ ID NO: 355990 - DNA, 201 bp, Homo sapiens
gaaaaatagggattacagaacagcccatacacaattgaatctagcattatttggtgaagagatccaataacaaaaagttgggaaataggtaaaataataayttggggtagaggttatgcttgcgtttctccaggccaaaatcaacagccgatttggataccttcaagacacctgaaaccttatcatgagccagatgccaag

SEQ ID NO: 355991 - DNA, 201 bp, Homo sapiens
aaaaatacaaaaataagctggatgtgcccagttgaacctgggaggtggaggttgcagtgagccgagatcgcgccactgcactccagcctgggtgaccgaamaagactctgtctcaaaaaaacattaaaaaaaaaaaatggacaggtaatattctatgtttttatcatgtacaaatgatgttttgaagtacgtatacattat

SEQ ID NO: 355992 - DNA, 201 bp, Homo sapiens
tgactttgtgggtattctcgataatcattttcctaaaatgaagctatttcagtttttaaaattcactaattggattctccctaaaataactaaatttaaamcaattgaaggtgctgagaatgtttttacagatgggtctagtaatggtaaagcttcttattctggctcaaaaagtaaagtttttcagacgtcctgtactca

SEQ ID NO: 355993 - DNA, 201 bp, Homo sapiens
ccatgcagctctctttggcagcatctggattcctaacaatcctctcctctcttatttggttccttaactttatttgtttgtattttggttcctagtgcacrtgcatcctgtgtgtgtcccgggtatgtgtgtaggctgcctcagagccttttttgggaagaaggcagggaataggccaaaagaggagctttggaatgttga

SEQ ID NO: 355994 - DNA, 201 bp, Homo sapiens
ggggctagctttgaggacgtatgctccctattttacccatgagtttgctgcccaccactactaccctttttttttcttgtctgctgggaacctcaaggccyatgcagctctctttggcagcatctggattcctaacaatcctctcctctcttatttggttccttaactttatttgtttgtattttggttcctagtgcacgt

SEQ ID NO: 355995 - DNA, 201 bp, Homo sapiens
gaaagatgactgaaagcagaggcccaggagggagggggagcctgtgctgcctcctcacttgcagtgtctatttctgagtcctgtcttaggaaaggggcagracagatgggggagggtgtggaagggtaggtcaggcatcaagagggggagggggcagctttgggagtcctatggaaggtagggggtatagtgggggcaggg

SEQ ID NO: 355996 - DNA, 201 bp, Homo sapiens
gttaacagataagccaatttggatagcacattggccactaagtaaagaaaaactggaggttttagagaaattagttgctgaacaattagaaaatgggcacrtaactccaacattttctccttggaattctccagttttcataattaagaaaaaatcaggtaaatggagaatgttaactgacttaagagccatcagttcagt

SEQ ID NO: 355997 - DNA, 201 bp, Homo sapiens
gtttgaaagaaccacttcaagcggaaaaacaaagttcccagaaaaacaaagttcctgctaaagattaggaaaaaatttttggtggcagccattgttaagcstccagaacctatacctttaaaatggttaacagataagccaatttggatagcacattggccactaagtaaagaaaaactggaggttttagagaaattagtt

SEQ ID NO: 355998 - DNA, 201 bp, Homo sapiens
cagaacaatcatacagccctcaaagtcagcatacaatgcatgaaatggggtatgtccctggtatgggactagaaaaagatttgcaaggtttgaaagaaccrcttcaagcggaaaaacaaagttcccagaaaaacaaagttcctgctaaagattaggaaaaaatttttggtggcagccattgttaagcctccagaacctata

SEQ ID NO: 355999 - DNA, 201 bp, Homo sapiens
tctgtacctataaatttatggggaagagatgtattacaacaatggggagcacaagttctaattccagaacaatcatacagccctcaaagtcagcatacaaygcatgaaatggggtatgtccctggtatgggactagaaaaagatttgcaaggtttgaaagaaccacttcaagcggaaaaacaaagttcccagaaaaacaaa

SEQ ID NO: 356000 - DNA, 201 bp, Homo sapiens
gacactcctcacttcccagacggggtggcggccgggcagaggctgcaatctcggcactttgggaggccaaggcaggcggctgctccttgccctcgggcccygcggggcccgtccgctcctccagccgctgcctcccgggcggcgctcgctggcgcggcggcaaagactctgattttttaaaaatgtattctagagatgggg

SEQ ID NO: 356001 - DNA, 201 bp, Homo sapiens
aaacaaggcaaagcagcttattgggtaaatcaaattactgataaacgtcctacctgtgaaataactattcaagaaaagaaatttaaaggtttggtagatamaagaacggacatttcactcatttctgtacagcactggctgtctgcgtggccaattcaacccgctcaatttaacatagttggagttggtaaagctgctgaa

SEQ ID NO: 356002 - DNA, 201 bp, Homo sapiens
gtggcccgctgagcagtctgcctgctgcttctctccatcctaaagttcacctccacacagcagcagagtgatcttacaacgcaggccagaccaccaccctmccctacagcctccagttcttcccctcacacttggagtaaaatccaagctccactgggacatacaagaccttaggggatggggcagagtctgctctctgca

SEQ ID NO: 356003 - DNA, 201 bp, Homo sapiens
gaaaaagtgaaattaaacgaacaggagaatttggaagcacaaataaacaaggcaaagcagcttattgggtaaatcaaattactgataaacgtcctacctgygaaataactattcaagaaaagaaatttaaaggtttggtagatacaagaacggacatttcactcatttctgtacagcactggctgtctgcgtggccaattc

SEQ ID NO: 356004 - DNA, 201 bp, Homo sapiens
cagccctctcccctgactgcagtggcccgctgagcagtctgcctgctgcttctctccatcctaaagttcacctccacacagcagcagagtgatcttacaaygcaggccagaccaccaccctcccctacagcctccagttcttcccctcacacttggagtaaaatccaagctccactgggacatacaagaccttaggggatg

SEQ ID NO: 356005 - DNA, 201 bp, Homo sapiens
cccgtggtgagtaagaaggggagtccggaagcgtcagggtaacaatgggatgggtatggggtctggttcgtttcaccttagaactttttcacactgataaygaggaggaacaacagtatagcgaagtaacagaagaggttacagagcatgtttatttgccagctgaagctaaagcggcaaaggaaggagagtttcatccct

SEQ ID NO: 356006 - DNA, 201 bp, Homo sapiens
aaaaaaaaaaaaaaaaaagaagaagaacacagctttaatccaggcctcaaggaattgtgagacaaaatttcagggaaaataagcagttccctgtcaacaaycccaaaaatcataagaaaataaggcaccatgggtgaaaaccaagagatgatgtaaacagcagaatcagacccacaaagtattcagaatacaaacttatca

SEQ ID NO: 356007 - DNA, 201 bp, Homo sapiens
ggcttgaatctgggaggcggaggttgcggtgagccgagattgtgccattgcactccagcctgggcaacaagagtgaaactctgtctcaaaaaaaaaaaaaagaaagaaagaaaaaaagaaaagaaaaggccagcatggtggctcacacctgtaatcccagcactttgggaggctgaggcgggcggatcacttgaggtcagg

SEQ ID NO: 356008 - DNA, 201 bp, Homo sapiens
aaaaagaaaagaaaatgctgagccaggcgcggtggctcatgcctgtaatcccagcactttgggaggctgaggtgggcggatcacctgaggttgggagttcragaccagcctgaccaacatggagaaaccccatctctactaaaaaatacaaaaattagctgggcatagtggcgcgtgtttgtaatcccagctactcgggag

SEQ ID NO: 356009 - DNA, 201 bp, Homo sapiens
gcactgcttccctgcaagtctgttctctatagagccggcaaagtgagtgtcctaaatatgtacctgatcatgtcactttctgttaaaaaaaaaaaaaaaaaggccagaaaacctacccattgctctaaacttgaaacccaaactctttatcatagtcttcgtggtctgtacaatcagggcctgccagattttccaatttca

SEQ ID NO: 356010 - DNA, 201 bp, Homo sapiens; identical to SEQ ID NO: 76184

SEQ ID NO: 356011 - DNA, 201 bp, Homo sapiens; identical to SEQ ID NO: 76185

SEQ ID NO: 356012 - DNA, 201 bp, Homo sapiens
agggtctgggatgggtgcggccacgtccattcagggctgagggctcttcctgaccctagaaaggaccctacttcaaactgtccaggagccctttgccctgmagacagggtctaaatccctgcctggctgatgggttcctctgaaattcagctctgattttcccttcttgggagccttccctggctcccagtcctgcccacc

SEQ ID NO: 356013 - DNA, 201 bp, Homo sapiens
ccaggcctgagttccttgattcctctctttaaatgtttaataggatctcacaaattcttgtcccctacttatttctacactgatctccccaactcagtaaycagtaccaccatctgccagtcactcattctaagcttggatcctcctttcttatttatttattttgacttttttccttttttttttttttgagatgcagtc

SEQ ID NO: 356014 - DNA, 201 bp, Homo sapiens
cggggaagatgcatgatgacaatgtggtgtgtggtgtgggaagccagggttgtcagcgcccgaggaagggttgggggagatcagctggaggaggtcatgcygggcaactgtgtaatctaagaccctggggagttgggttgaatattctgccctcccagaaggccagcaaggctgactcaccaccagcctcgtgcccactgg

SEQ ID NO: 356015 - DNA, 201 bp, Homo sapiens
gggccctggagatgcagcccctgccctccagggcctctggctggcggggaagatgcatgatgacaatgtggtgtgtggtgtgggaagccagggttgtcagygcccgaggaagggttgggggagatcagctggaggaggtcatgccgggcaactgtgtaatctaagaccctggggagttgggttgaatattctgccctccca

SEQ ID NO: 356016 - DNA, 201 bp, Homo sapiens
ctctgccctggcatggtggagactgccagccccctacagacctagaggcgtgaggggcccaccctacccccgtgctggggcacagccagctgagtgtcctkgctgtgagccctgggatgccccttgtgcagggcgggcttgttctgcctgacagaactcggagtatgtgtgggtctggctcggagttgggggttaatgggc

SEQ ID NO: 356017 - DNA, 201 bp, Homo sapiens
gtgtcctgtcactgggactctgatccacgttgctggaagaactgcaggagtgtatgtgagtgtgtgtgtgcatacatgtgtgtgtatgtgtgtgcatacatgtgtgtgtatgtgtgtgcatacgtgtgtgtgtgtgcatgcatgtgtgtgggcgcatgtgtgcatgtgtgtgtgtgagtgtgtgtgttggggaggaggcat

SEQ ID NO: 356018 - DNA, 201 bp, Homo sapiens
ggtgtcctgtcactgggactctgatccacgttgctggaagaactgcaggagtgtatgtgagtgtgtgtgtgcatacatgtgtgtgtatgtgtgtgcatacatgtgtgtgtatgtgtgtgcatacgtgtgtgtgtgtgcatgcatgtgtgtgggcgcatgtgtgcatgtgtgtgtgtgagtgtgtgtgttggggaggaggca

SEQ ID NO: 356019 - DNA, 201 bp, Homo sapiens
gctgtgaagactcctccattgtctgtgacacttctcgtggggcataaattactaaacaagttactgagcatgcattctgtgccaggcactgtgctaggctytggggatccaccccgtggcatactgtgggagagaagaaagcaggggctgtcagggggctccagcatttcagatgtgaaacagccattttattaatagagc

SEQ ID NO: 356020 - DNA, 201 bp, Homo sapiens
tcactcatacattccttcattcttttgcagttaattactcattcattcattttctggacacttactgagcatctactgtgttcaaggccctgagtgtttgsgggaggggccaggatactctgattggccagtcccatccctgatgccagctagctcaaggtcaaaaagggggaattagcacaaatcagtccaatttatgag

SEQ ID NO: 356021 - DNA, 201 bp, Homo sapiens
aaatacaaaaattagctgggcatagtggcgcgtgtttgtaatcccagctactcgggaggctgaggtaggaggatggcttgaatctgggaggcggaggttgyggtgagccgagattgtgccattgcactccagcctgggcaacaagagtgaaactctgtctcaaaaaaaaaaaaaagaaagaaagaaaaaaagaaaagaaaa

SEQ ID NO: 356022 - DNA, 201 bp, Homo sapiens
gcacccagaaagagattgatgtttccattttaactcagatgctctgcatctcctcacactctccacgggccattttctagctctctttggaaggagaaatygcagaacccctgggctggtttattatcagcagcaatctccaaacaagccccaggggctgtcagatcccccacgggctggctgtgtagagtggaatcacct

SEQ ID NO: 356023 - DNA, 201 bp, Homo sapiens
aaagccacaaagctgatgggagtgacagggtgtgaggtatgggtgtgagtgagtatgtgtggtggggtgaggtcggcgttcttggggagcagaacctcttkgggagagcaagcacaggatcacatgacggctgcggaaagctgtcctgcaaggtgaccttgaagagaacttttccctgcgctttggagctgagattagttg

SEQ ID NO: 356024 - DNA, 201 bp, Homo sapiens
atggagccctgtaaggacagcaaggcccccgatgctggccaggacagtttccctggatcagtggggagggcagaggtcagagcagagcctgtttagagggrccaggaaagaccagagaggctgaaggtacaggagggagaggcactgggacaaagtgaggatgggagcaggaggacctggtgctcagggggtgctattctg

SEQ ID NO: 356025 - DNA, 201 bp, Homo sapiens
gagagcaagcacaggatcacatgacggctgcggaaagctgtcctgcaaggtgaccttgaagagaacttttccctgcgctttggagctgagattagttgctsaggcacacggcagacccaagtgcccagcagcgcctggcagtggatggagtgtatggagatgggctcaggacagactggcagaggttgtaagactggcaga

SEQ ID NO: 356026 - DNA, 201 bp, Homo sapiens
gcatcattttctggccaaagcaaagagagaaagggatggaggctgacttctggggaccactgacaggcggagagttggaggaagaggcattagtagaggaraggggacagcagagggcggtgaggggtgtcaatgggaaggtcaagaagaaaggagtggtcagccaggctgggagatggagccctgtaaggacagcaaggc

SEQ ID NO: 356027 - DNA, 201 bp, Homo sapiens
ttacttgagacgaagggatgttggcactctggctcctgcccatgcctccctttttcttccaccatccccacccctctgctgtccctgcttcagccatagtragctgctctccgcggcttcggtgtcccacttttgttctctcctccaggctgttgtacttgctatgtcttctgccggagttacccccagccttcctgcatc

SEQ ID NO: 356028 - DNA, 201 bp, Homo sapiens
atatagaggctgtgggctcaggactgagatcagggccaaagacaagggcatgagcatcattttctggccaaagcaaagagagaaagggatggaggctgacytctggggaccactgacaggcggagagttggaggaagaggcattagtagaggaaaggggacagcagagggcggtgaggggtgtcaatgggaaggtcaagaa

SEQ ID NO: 356029 - DNA, 201 bp, Homo sapiens
tgttagccccttttcacactggattgtgtgctagactggcacatacatccctcccaccagccagggagcaacacgaggctgctcttggtatacccagcacrgggacgggtgtggccagaggccagggaatgcttaatgaatgaatggggacaggcagcttttcagcagcgaggctaagggtgggatctgagtagcagggcc

SEQ ID NO: 356030 - DNA, 201 bp, Homo sapiens
tttggaggaaggccggggagagcaggatatgaatgacacgcctcatgattgctaccattagcaaagagctggcctgcgtccctgtttggtaggtggaagcrgagaacctgagaggcagagtagcttgtctagggtcacacagtgggtctagccaagcccaagcctggacctcccttctcaacgcccaggactctttccaca

SEQ ID NO: 356031 - DNA, 201 bp, Homo sapiens
cagtcctgcccacccctggctgggtcagggacccctcctctgggatcccccagcccctgtctcccgctgtctcagatcagtgtctctgtctccctccttggctcctggctccatgcctggaccgctgtagatgctcagatcacagggccacttcttgccagtgtttggttatttatcaaaccctttcccacacatttccta

SEQ ID NO: 356032 - DNA, 201 bp, Homo sapiens
ctgtgcctctgggcagaactgccactgggttgggtggcagtgggtgggtcagaatgtgtagttccaggctgcgtctggggatgggaccagggtagaaggcyggcccaagctggcctagcatggtggctcacacctgtaatcccagcgctttgggaggctgaggccacttaggccagaagttcaagaccagcctgggaacaa

SEQ ID NO: 356033 - DNA, 201 bp, Homo sapiens
agggcagcgaggggtcccctgaggaggggaccattgagccgagagcaaaaagaagcacaggcattaattggacaacggggatcagggaacgggggagcagatgagtgcaatcatgctacttctctcagcctcagcttaaccatctgtaaagtggggtgctgacactatcttgctagctggctttgaggacttggtggtatc

SEQ ID NO: 356034 - DNA, 201 bp, Homo sapiens
cagggcagcgaggggtcccctgaggaggggaccattgagccgagagcaaaaagaagcacaggcattaattggacaacggggatcagggaacgggggagcagatgagtgcaatcatgctacttctctcagcctcagcttaaccatctgtaaagtggggtgctgacactatcttgctagctggctttgaggacttggtggtat

SEQ ID NO: 356035 - DNA, 201 bp, Homo sapiens
gcagggcagcgaggggtcccctgaggaggggaccattgagccgagagcaaaaagaagcacaggcattaattggacaacggggatcagggaacgggggagcagatgagtgcaatcatgctacttctctcagcctcagcttaaccatctgtaaagtggggtgctgacactatcttgctagctggctttgaggacttggtggta

SEQ ID NO: 356036 - DNA, 201 bp, Homo sapiens
tgcagggcagcgaggggtcccctgaggaggggaccattgagccgagagcaaaaagaagcacaggcattaattggacaacggggatcagggaacgggggagcagatgagtgcaatcatgctacttctctcagcctcagcttaaccatctgtaaagtggggtgctgacactatcttgctagctggctttgaggacttggtggt

SEQ ID NO: 356037 - DNA, 201 bp, Homo sapiens
ctactccggaggctaaggcaggagaatggcatgaacccaggaggcagagcttgcagtgagccgagatagtgccatagcactccagcctgggcaatagagcragactctgtctcaaaaaaaaaaaaacaaaaaaacccaaaaactctgtagatacccaccaatcctccaccagctctctggcaccgtctctctctctcaaaa

SEQ ID NO: 356038 - DNA, 201 bp, Homo sapiens
aattcctgacctcaggtgatctgcttaccttggcctcccaaagtgatgggattacaggtgtgagccaccatgcctggcccttttttttttttttttttttkagagaaggattctttttaaacacaacatcattaccacatctaaaaaattaacaataatttttcactaacgtcactagtcagtgttcaaatgcccaaactg

SEQ ID NO: 356039 - DNA, 201 bp, Homo sapiens
tatttattgagatgatctgtctcccaggccggagtgcagtggtgcaattttggctcactgcaacctctgcctcccaggttcaagcaattctcctgtctaarcctcccgagtaggtgggattacaggtgccggcaaccaagctgggctaatttttgtatttttattagagatggggtttcaccatattgatcaggctggtct

SEQ ID NO: 356040 - DNA, 201 bp, Homo sapiens
tattgtgatgtccccatgaggcaggggtgactgctgatcccatttcacagatgaggacacagcagcaccagggtgaggtcactcagcaggggtatggggtrtgggaatcgagccttagacgccatacccttccttgctggctcgctcccacctctgagctttccctggtgtaggggccgagctggtgtgccctcagctgct

SEQ ID NO: 356041 - DNA, 201 bp, Homo sapiens
gtacaatgacacgatcttggttcactgcaatctctgcctcctgagtttaagcaattcttgtgcctcagcctcacgagtagctgggattacaggtgcctgcyacaaggcccggctaatttttttgtatttttagtagagacggggtttcgccatgttggccaggctggtctcgatctcctgatcttaggtgatccacctgcc

SEQ ID NO: 356042 - DNA, 201 bp, Homo sapiens
ttagaatcagaaaggcctgggtttgaatctttgctctgccacttaccagacttaggcaggtcttttaacttctataatatagttcctgcattaataaaatraaagtaatactacctacctcattctcataagagttaaacggtgttctgcaagtcaagtgcttaaaacagttctgggacacataataaacttcgaacaaat

SEQ ID NO: 356043 - DNA, 201 bp, Homo sapiens
gacagaatggcttgtttcaggtcccataaattgggcgtggactttggagtcagggaagtctgggttcagatcctgattctgatcttgggcaggtaactcarcctcatagacagcatcccttccagcagggcaggcttcttaaacatcctcatatagacaggaaactgactcagagccccagcgtgtgggaatctgagctct

SEQ ID NO: 356044 - DNA, 201 bp, Homo sapiens
aattacccaccaatgaaagggctctcttgggaggtagtgagtagcccgtcaccagaggtatgcaagcagaaagcagggactctgcagagggcatgagcacyggcaggggttggacgaaatgacctttaagacccttccagccatgagcttctgggatcttgctgggggcatcagtgcctccaggagggtgggggtgggttt

SEQ ID NO: 356045 - DNA, 201 bp, Homo sapiens; identical to SEQ ID NO: 76187

SEQ ID NO: 356046 - DNA, 201 bp, Homo sapiens
gacctgggtgggagctggaggatgaatatgtatcaggtcatcgtggaggcaggaagatggggcaaagagggaggaagccttggaactgagcagcagcccaygcctgctgtgtgctagcctcgggcatggcatggtgctggggacaggcccttgtgctatttcaggagacttgccctgagtgtcccccaccctgtcccctgg

SEQ ID NO: 356047 - DNA, 201 bp, Homo sapiens
agtagcttgtctagggtcacacagtgggtctagccaagcccaagcctggacctcccttctcaacgcccaggactctttccacagcacctgccgcaccaccyacccaccgcccaacccattcctggcccaggttcctctctggcacacccttggccttggctcaggggccctgaaggaagggggcggggtagtggtagcacc

SEQ ID NO: 356048 - DNA, 201 bp, Homo sapiens
agcagggcctctagcggagaaccttgtctgacctcaaggtccatattctccctgcctgtgtggggtgacactagggagaattcggaacgcactgaaaaaaatctcatgcatttggtccacagcgagccaggctctgtcccctctgggccctggagataccagaagtagaaagagtttctgcatagtagatcttcatggtct

SEQ ID NO: 356049 - DNA, 201 bp, Homo sapiens
cagatggtcgggactgaggggtggaggggcagggtgggagggattttggtcatggggcttgtcgtgggtcattcctgagtccattttcctgcctcggcctycccgaggagggaactggatatagaggctgtgggctcaggactgagatcagggccaaagacaagggcatgagcatcattttctggccaaagcaaagagaga

SEQ ID NO: 356050 - DNA, 201 bp, Homo sapiens
agcgggctcctattggaggaagctgtggggagacaaattgtgtcttggtataaatattttccagagggcagagaattacccaccaatgaaagggctctctygggaggtagtgagtagcccgtcaccagaggtatgcaagcagaaagcagggactctgcagagggcatgagcactggcaggggttggacgaaatgaccttta

SEQ ID NO: 356051 - DNA, 201 bp, Homo sapiens
atggaaggtagggggtatagtgggggcaggggagtctctaaattcctatagggctatcctagggcaggggttaaaggcacaatctgtgtagccccaggggyacagcgggctcctattggaggaagctgtggggagacaaattgtgtcttggtataaatattttccagagggcagagaattacccaccaatgaaagggctct

SEQ ID NO: 356052 - DNA, 201 bp, Homo sapiens
tctatataatgtccacactctgcaatcatagaacttccaaagtgagggggaatggtggtggctgctattttataattaataaggatggtaagtggctgagygcagtggctcacgcctgtaatcccagcactttgggaggccgaggcaggaagatcacttacggctcggagttcaagactatcctggccaacatggcgaaac

SEQ ID NO: 356053 - DNA, 201 bp, Homo sapiens
tggtcagtgccatgatggagatggtgaggctgcaggggcattctaactctccctggggaagagagatgcaggatgaggaagagctcacctagcagacaggygcagataaacggattctaggtggaagtggcaccttcatgttgggggaagacagcgggagtgagagtggtgctctaaggaaacgtatatggtctggagctg

SEQ ID NO: 356054 - DNA, 201 bp, Homo sapiens
tctaggtggaagtggcaccttcatgttgggggaagacagcgggagtgagagtggtgctctaaggaaacgtatatggtctggagctgagagtggctgctggrgtgagtggcaggagctacggtggctggttcttgatcctgagagcagtggggagccatcgaagagtcctgagcaggggaagtgcctggtgaggcttgctct

SEQ ID NO: 356055 - DNA, 201 bp, Homo sapiens
cctccaccctggctgagagctcctgggatggctgtcttcctgcctccccttggtgcccagcctcctacccaggggctcttgggaataagccgtgtttctgsgaacccataagccgttctgggtcagacaggcctggttcaaatcctggctgtaccacatgggggtcagtgactttgaacaagccacctcggagtgcttgaa

SEQ ID NO: 356056 - DNA, 201 bp, Homo sapiens
tggaaagaatcttggagactctctggttaaatgccccatttgacagatgaggaaactaaggcccagacatctaataataaaactcacctttttataatcayttaccatgtgccagagatcaggctatacactctgctttctgctttcaccatatcttccccttaaaatatagctggcatttcacatcttatttaatttaaa

SEQ ID NO: 356057 - DNA, 201 bp, Homo sapiens
gtgtttctgggaacccataagccgttctgggtcagacaggcctggttcaaatcctggctgtaccacatgggggtcagtgactttgaacaagccacctcggwgtgcttgaaattgaattagctatgggaggctcactggggggaattatctaaggagtatacaccaggtgcaagagctaccactgccagcatcctgcagccg

SEQ ID NO: 356058 - DNA, 201 bp, Homo sapiens
cagccaagcccaggtccctggactcctcatctcagccccaggaggccctgcaagcagtgtagtgtcgggggtaggagctcaggctgcagcagacctctggrgtcacagctgagctttgtcacttacttgggctcctcatctgtaggataaggataataaggcatctgtctcataggtttgttgggaggataaaattggatt

SEQ ID NO: 356059 - DNA, 201 bp, Homo sapiens
ctggagtcacagctgagctttgtcacttacttgggctcctcatctgtaggataaggataataaggcatctgtctcataggtttgttgggaggataaaattkgattagtacaaataaagtacttgtaaaattatgtgacacctaagtgccatataaacattagtggcgactgtcatcaccaccacacaattggcattggcca

SEQ ID NO: 356060 - DNA, 201 bp, Homo sapiens
gaggttccaatggcagtgcacagtgcctggcacctagcaggcattctttaaacatttccttttctcatcttgccctttgtttatagcatcttgcccttacyaggcattcaatacatgtagaatgcattaattcagtcagctaccctttatgggagacccaccctgtgccatgtgctaggccttggagagtcaatggggagc

SEQ ID NO: 356061 - DNA, 201 bp, Homo sapiens; identical to SEQ ID NO: 76168

SEQ ID NO: 356062 - DNA, 201 bp, Homo sapiens
cgacccctggctgtctgcccctgcttgggagtcaggagaccaatcccagcccctgttgcttttctggagtcctggagcaagtgtctgccggtctctgggcwtcatttccttccgtgtaaaaggaggcactagactgggtgatcccgaacattctgttctttccctttctaactccaggctttctgccctgccctcagggaa

SEQ ID NO: 356063 - DNA, 201 bp, Homo sapiens
tgtgtgtccatcttggctgggctttgctgccttcctgctggcccttgctgagcagtacagggggtgacatcccatcacagaagctgctcaggcactgcagygtggcagggcccgggcagacccgctgcttgcatgggagctggaagcttcctggggcactgagatcccggcctccccacaggagcgtggagctagtgcagc

SEQ ID NO: 356064 - DNA, 201 bp, Homo sapiens
atgcctgtggggaaaggaacaagggcttggggaaatggcgaaggaactaggaatacatgactccctgggcagaaagcagagcgggtgtgtgtgtgtgtgtrtgtgcgtgtgcatgcacagtggagtcaggggagggcggaaggaccagcaccacatccctgcagggtgtgaggaaggcctttcgaagagacagagctaact

SEQ ID NO: 356065 - DNA, 201 bp, Homo sapiens
agagtttgcaatttcctcactgacagtggcccagtgggacagtgttctggaaagtgccttgaccctggaccatgctggaaaagggtactgacaccatcackgcctcctgcagaggacataagggtagacagggaggggagcttcttggaagtcctggctccaggtatgggtcctggcctagcatgtctggttaaggaagag

SEQ ID NO: 356066 - DNA, 201 bp, Homo sapiens
ggtgcagaaactctggaggcctggcctgggctgggacttgctgtctggtggagctgcggggcttctaactggtgagtgcaatgttgttcctcattccttcrcccttactgttcctctccaggtgggcatccaggtggcctcggaggacctgtgctctgagaagcagtggaatgtgtgcaaggccttggccaccttcgtggc

SEQ ID NO: 356067 - DNA, 201 bp, Homo sapiens
ctcaccattctggtctcaccattctgtcacctacagtgacaccccccatcctctgagcctttggccaaggaagggacctgggtgggagctggaggatgaayatgtatcaggtcatcgtggaggcaggaagatggggcaaagagggaggaagccttggaactgagcagcagcccacgcctgctgtgtgctagcctcgggcat

SEQ ID NO: 356068 - DNA, 201 bp, Homo sapiens
cctagaagggagaccttggacttgtttacttatccccagaatgttcaaatttgagtcttccttgaaaccaaaaggaggcgatcttagaagaaaatctcccyggagtggggagagagcaggcagaactcgccaagcccagaggaagcctcaagctatgccctgagttccatgtgccctggttctactgggcttggaggccgg

SEQ ID NO: 356069 - DNA, 201 bp, Homo sapiens
gcccagaggaagcctcaagctatgccctgagttccatgtgccctggttctactgggcttggaggccggagctggggaggcccagctcttcctacagtcatyaaggcccctttgatccatccatccccttgcagccctcctaaatctcttctgtcctaacagcgctcccacctaagaatcagctcaagtgcctttgcctggc

SEQ ID NO: 356070 - DNA, 201 bp, Homo sapiens
catgtgtggtatgcctacagggatccaacgagacccaagctgtgggctgctagatggacaggaccccattcaacaccccctccccaccactgtgtatatcyggaaatgtgagactgtgatgggccacctgaggcagagccagccctggagcccaggctcaattctcagttcttggaacctctggagagagggagatctagt

SEQ ID NO: 356071 - DNA, 201 bp, Homo sapiens
ccagaacacagacaggaaaatcgaggcccaggaggggaagggacttgccccaggtcactgagctacatagattccagtgtgggacttgacttccaggcccytgagtctcacatccagcctcagcagccaggtttttgtgggaatggagggaaggcagcatgagcgcctgatcttggaggaggagctggggcagggagagtg

SEQ ID NO: 356072 - DNA, 201 bp, Homo sapiens
cttttctgtgcaggaggaataattgtccctcacagggttttggtgaggatgaatggtgttatggatataaagcaattttatataatgtatagaaaagcctraaacttagtaggtgcttagtaaggatgcaccaggattccagagacacatgagatgtggcccctgtcttcaaggagtttcttattaccacatgtgtgtatt

SEQ ID NO: 356073 - DNA, 201 bp, Homo sapiens; identical to SEQ ID NO: 76169

SEQ ID NO: 356074 - DNA, 201 bp, Homo sapiens
catgcttgtaatcccagcactttgggaggccgaggcgggtggatcacctgaggccaggagttcaagaccagcctggccaacatggtgaaaccccatctctrctaaaaatacaaaattagctgggtgtagtggcgtgcacctgtaatcctagctactctgggggctgaagcaggagaatcgcttggacctgggaggcggaga

SEQ ID NO: 356075 - DNA, 201 bp, Homo sapiens
gcctgatgagggagagagtgtctccttctgcgggtcatcctccatgatgctctgccctgctggggctgggggtgggttggagttccatgctgggtgggggktcagggtcatgggtattttgagcccttagggaagagactgagcacggaattagagctggaggcttgagttgaagtcctgcttctgtcccaaccagctgtg

SEQ ID NO: 356076 - DNA, 201 bp, Homo sapiens
atttttctacatgtgggtttccagttttcccaacatcaattgttgaatagactgtcccttccccaatgtgtgttctggcacctttgttgaaaatcagttgrctgtaaatgtgtagatttattttggagctctctattctgttccattggtctatatgtctgtctgtttttataccactaccatactgttttggttaatgta

SEQ ID NO: 356077 - DNA, 201 bp, Homo sapiens
ctgcagatcatgccaaattgttgtcaggaatagagatgttgaaaaaatggagaactcggcacataattggccatggtgaatagttttctttttttttttttccatctcatgtgaacctcagttttctcagtggttcaatggtagggtcagttggtcagatgagatggtgaaagcaaacttttctgttgaggacctactaag

SEQ ID NO: 356078 - DNA, 201 bp, Homo sapiens
ttcttctgatccatgaacatgggatcttttcatttatatcttcttcaatttctttcattaatgatttatagttttcattgtagagttttttttttttgagmcagagtctcactgtgtagcccaggctggagtgcagtggcatgatcttggctcactgcaacctctgcctcctgggttcaagtgattcttctccctcagtcc

SEQ ID NO: 356079 - DNA, 201 bp, Homo sapiens
gcagcctcgagctcctgggctcaagcaagcctcctgcctcagccacctgagtagctgggaattagaggtatgcaccactgtgcccagctaattttttttttaagtttttgtagagatgggttctctctatgttgaccaggctggtcttgaactcctggcctcaaactatcctctccccttggctgttgggattgcaggttt

SEQ ID NO: 356080 - DNA, 201 bp, Homo sapiens
tagcagggacccactggtgccctcgtaggaggtgggcaagggtcctgggaagcctgggaacctctgcccagcctcaggtctagcctggcccaggtcagctstcagtggggctcagaagctttttttactccagaaatggtgatggggctggctgtttttgttttgtttttgtttttgttttgttttgtttttgtttttgtt

SEQ ID NO: 356081 - DNA, 201 bp, Homo sapiens
agctagtgcagcaggtagacgaggacgacgccatctaccacgtcaccagccctgccctcggaggtcacacaaagccccaggacttcgtgatcctggcctcraggcggaagccttgtgacaatgggtgtgtgcctatctgctgtggggtgggggacacaactggacagggtggtagggtggccgcttctccctcccagggaa

SEQ ID NO: 356082 - DNA, 201 bp, Homo sapiens
tgagcacaccattaggtaagtggcccctcctgcctcaaggtcctctgggctccctcccatcagcctggggcctgtcctcctgactccctgcctggtcagcrtctgtgctgcctagagcctgactcaactgactgaaaatgaggtgggggcagcctctggggaagtgtgaacccctctgcagtgtttctgggggctaggagt

SEQ ID NO: 356083 - DNA, 201 bp, Homo sapiens
cctgcatagagagggactctttccagaatgaacgtaaatctaaggcaacactttaaacagttggcccaggagctgaagcaaggaggactgacttctctgcmtggttttgtctccactggcccactcgggtgcaaggccgtgttcatgtgcagttcttggccaaaaggaaactgggcagaagcagcaatcacagatatcctg

SEQ ID NO: 356084 - DNA, 201 bp, Homo sapiens
cttggagaggccgctccctcccttgggggaggtcccctggccttcctgctggccttccagagggtagcgtgggctgtggagttgggtggagcctcgggacygggagctgggggtcacagccatagccgcttcccaggcattttccttgtacttggggctggaggacgttagatgtggcggtaaagagggtgggcttgaggc

SEQ ID NO: 356085 - DNA, 201 bp, Homo sapiens
cctttacagatgaggcaaccgaggctcagagggattacttgatttgcccaaggccatacaggcagtctggagtggagctgaggctcagacctgctgtcttrtctcagagctggtgctgcatccactgcactggacaggctcatccctctcatccagggccaccctctgcctcatgtgcactctgtgctgagtaaataaaag

SEQ ID NO: 356086 - DNA, 201 bp, Homo sapiens
gaacccaggaggcagaggttgcagtgagctgagatcacaccactgcactccagcctgggcgacagtggtctcaaaaaaaaaaaaaaaaaaagaaaaaaaamcagcaacagcaacaacaaaaaactcaccaaattgtctttaatagggactaaactgggaacagaagagggggtctcagataatccacaagccccactttgc

SEQ ID NO: 356087 - DNA, 201 bp, Homo sapiens
tttcaccatgttggtcagcctggtctcgaactcataacctcatgatccacctgccttggcctcccaaagtgctgggattacaggcgtgagccaccacgtcyggctctggttttttgatagtagctattctgacaggtatgagatgctatttcattgtggttttgatttgcatttccatgatgattagtgatgttgagcatt

SEQ ID NO: 356088 - DNA, 201 bp, Homo sapiens
ggaccctccctgaagaagtctctccatgggagataggagacaaatgacaccaccttgggtttggtggggcatgccagcatctgctgccctgaagcccaggrccccatgcactgcctggcctctcctactaaggatattctaacactgttgctgccaaggataagggaatcaccagggcagaaggcagggaaaaaccatcct

SEQ ID NO: 356089 - DNA, 201 bp, Homo sapiens
cgagacccaagctgtgggctgctagatggacaggaccccattcaacaccccctccccaccactgtgtatatccggaaatgtgagactgtgatgggccaccygaggcagagccagccctggagcccaggctcaattctcagttcttggaacctctggagagagggagatctagtctgtctgggcttctggctcattctccaa

SEQ ID NO: 356090 - DNA, 201 bp, Homo sapiens
gggagcaaggaatagagagggttaggggtacatgcatgatggctggacctgctgcagggctcagcagagtgaaggtgaatctgggcagaggaggctgtggktggaagggaaagccagagaggatgccgggaaggaggacaagctggggaggggcctggagcatggttggtggccagggaaggcctggacacacctgaggaa

SEQ ID NO: 356091 - DNA, 201 bp, Homo sapiens
ctttgaactatgtttgggtccctcccagctgtatttctgtagaaagcaccaactttataatgctaatagtaagcactcaatacatgttagccacagggtayatgtgtgccaggagcttcatatacttggtgttgtttaatttcctccctatgatgattcttggaagtgagtataataatcccatttttatagacaggaaac

SEQ ID NO: 356092 - DNA, 201 bp, Homo sapiens
tatgtggtcatagctattagtatccttattttacagatgaggaaactgaggcacagagaaatgaagtaccttgttgaaggtggtacagctaatggaggacscaggatatactaccaggcaggcaatctgggcccagagcccttgctcttaaccaatgggctgtatttcctgtatgtctgggggtaggtgtcgtggcactga

SEQ ID NO: 356093 - DNA, 201 bp, Homo sapiens
acccaccgggcccccacccttccctgcttgtcagaacgggtttggaggaaggccggggagagcaggatatgaatgacacgcctcatgattgctaccattarcaaagagctggcctgcgtccctgtttggtaggtggaagcggagaacctgagaggcagagtagcttgtctagggtcacacagtgggtctagccaagcccaa

SEQ ID NO: 356094 - DNA, 201 bp, Homo sapiens
aggaggcatggcccttgggaaggtctgtccaggttggaagccacactccctcccctcagcatggaggtgggcgtgtgcgtggaggcctatcgccaggaggstgagacccaccggcgccacatcaacagtgcctttatgacctttgtggtcctggacgcagatgaccagccccagttgctgccctggattcggccccagccc

SEQ ID NO: 356095 - DNA, 201 bp, Homo sapiens
aggaagggaggctccggggacttccacccactggtggccctgggcctctcctagccctcttggctccgaggtctcctccagggaaggggagtgtttgggcytctctaccagctcccaggaaccatgaagctgccgttaggtcatgtggaaatccctttgttggccacaaaacgcatttgggtctccagaagccaaggtgtt

SEQ ID NO: 356096 - DNA, 201 bp, Homo sapiens; identical to SEQ ID NO: 76179

SEQ ID NO: 356097 - DNA, 201 bp, Homo sapiens
ctccgagaggacagtcttcagacccaccgggcccccacccttccctgcttgtcagaacgggtttggaggaaggccggggagagcaggatatgaatgacacrcctcatgattgctaccattagcaaagagctggcctgcgtccctgtttggtaggtggaagcggagaacctgagaggcagagtagcttgtctagggtcacac

SEQ ID NO: 356098 - DNA, 201 bp, Homo sapiens
aatagtgctgctatgaacgtgtatgtgcatgtatttgtacttgttttagttcttttgggtatataactaggagtggaattgctgggtcatatggtatttcygtgtttaactttttgaagaactgctaaactgtttttcatggcgactcaaccattttacattcccaccagtaatgtacacaggtcccgtgaatttcctggc

SEQ ID NO: 356099 - DNA, 201 bp, Homo sapiens
attacaatttattcatttattaatggatatatattcatttattaatggatatttgagctgtttctaccttttgcttgctgtgaatagtgctgctatgaacrtgtatgtgcatgtatttgtacttgttttagttcttttgggtatataactaggagtggaattgctgggtcatatggtatttctgtgtttaactttttgaag

SEQ ID NO: 356100 - DNA, 201 bp, Homo sapiens
gaggagaagatggagcacagtgtggcggctgagcgccggcgcatgcgccttgtctatgcagacaccatcaaggacctcctggccaactgcgccattcaggrcggtgagcagctgccagctgtgcatggggagggtagctggcgtcctgcatggcccctctgccccgggctcccactgggcagaggcaggaagggaggctcc

SEQ ID NO: 356101 - DNA, 201 bp, Homo sapiens
ctgctgtgtgctagcctcgggcatggcatggtgctggggacaggcccttgtgctatttcaggagacttgccctgagtgtcccccaccctgtcccctggccracaggtgaagctgaagcagatcacgccgcggacagaagaggagaagatggagcacagtgtggcggctgagcgccggcgcatgcgccttgtctatgcagac

SEQ ID NO: 356102 - DNA, 201 bp, Homo sapiens; identical to SEQ ID NO: 76176

SEQ ID NO: 356103 - DNA, 201 bp, Homo sapiens
gcccctattctgaggaccccagaatttaaacgagtccaggaatcacctgtaatgtgcacagagacttcagcgtctacacattggggctcacagagagatcyggaatgtgaggctgtgataggccacccgaggcagagccgggcagttggtggctttgattgtgtgtgtgaaagggtgtctagaatgatgcccaggtgggca

SEQ ID NO: 356104 - DNA, 201 bp, Homo sapiens
gggatgaagtcatgtagggttgggggatggaagagagaaagagctgtggatggggaatgaggcttggtggggacgagggctcaagaagagctggttggccrggcatgatgactcacacctgtaatcccagcactttgagaggctgaggcaggtggatcacctgaggtcaggagttcgagaccagcctggccaacatggtga

SEQ ID NO: 356105 - DNA, 201 bp, Homo sapiens
aaaggaacaagggcttggggaaatggcgaaggaactaggaatacatgactccctgggcagaaagcagagcgggtgtgtgtgtgtgtgtgtgtgcgtgtgcrtgcacagtggagtcaggggagggcggaaggaccagcaccacatccctgcagggtgtgaggaaggcctttcgaagagacagagctaactcagagaagaagg

SEQ ID NO: 356106 - DNA, 201 bp, Homo sapiens
cccagggggtggaggttgcagtgagccgatatcatgtcaccgcactctaggctgagtgacagagtgagactctgtctcaaaaaaaaaaaaaaaaaaaaaaaggccaggtatggtggctcatgcctgtaatcccagaactttgggaggccaagatgggcagatcaggaggtcaagagatcaagaccatcctggccaacatgg

SEQ ID NO: 356107 - DNA, 201 bp, Homo sapiens
atcagggacgggggctagggaagaccttccagacaaagggtgcagtgtgtgtgggagagggcacaggcatgagggagaagagcctgtttgggagcgtgagyggtgtggctggagcagcaggtgggaaatgtggggaggcggagggggagagaaatgagactggggagccccggaggcctgggtcaccctgataaagaattt

SEQ ID NO: 356108 - DNA, 201 bp, Homo sapiens
ccctgcccccactataccccctaccttccataggactcccaaagctgccccctccccctcttgatgcctgacctacccttccacaccctcccccatctgtyctgcccctttcctaagacaggactcagaaatagacactgcaagtgaggaggcagcacaggctccccctccctcctgggcctctgctttcagtcatctttc

SEQ ID NO: 356109 - DNA, 201 bp, Homo sapiens
tctctctttgctttggccagaaaatgatgctcatgcccttgtctttggccctgatctcagtcctgagcccacagcctctatatccagttccctcctcgggraggccgaggcaggaaaatggactcaggaatgacccacgacaagccccatgaccaaaatccctcccaccctgcccctccacccctcagtcccgaccatctg

SEQ ID NO: 356110 - DNA, 201 bp, Homo sapiens; identical to SEQ ID NO: 76214

SEQ ID NO: 356111 - DNA, 201 bp, Homo sapiens
taaaggtcatttcgtccaacccctgccagtgctcatgccctctgcagagtccctgctttctgcttgcatacctctggtgacgggctactcactacctcccragagagccctttcattggtgggtaattctctgccctctggaaaatatttataccaagacacaatttgtctccccacagcttcctccaataggagcccgct

SEQ ID NO: 356112 - DNA, 201 bp, Homo sapiens
agagccctttcattggtgggtaattctctgccctctggaaaatatttataccaagacacaatttgtctccccacagcttcctccaataggagcccgctgtrcccctggggctacacagattgtgcctttaacccctgccctaggatagccctataggaatttagagactcccctgcccccactataccccctaccttccat

SEQ ID NO: 356113 - DNA, 201 bp, Homo sapiens
tttctctcttccatcccccaaccctacatgacttcatccccagcagaaagtcccgttgacttccccagcagaaagtcccgttaactattttttttgagacrgagttttcactcttgtcccccaggctggagtgcaatggtgcaatctcaactcactgcagcctcggcctcctggatctaagtggttttcctgcctcagccc

SEQ ID NO: 356114 - DNA, 201 bp, Homo sapiens
cacagctggttgggacagaagcaggacttcaactcaagcctccagctctaattccgtgctcagtctcttccctaagggctcaaaatacccatgaccctgamcccccacccagcatggaactccaacccacccccagccccagcagggcagagcatcatggaggatgacccgcagaaggagacactctctccctcatcaggc

SEQ ID NO: 356115 - DNA, 201 bp, Homo sapiens
cagcagtgctgagctcaatacacgtgtggtgttggggtggagccaggctgggggcgtggttggggggaccggcctcaccttggtcagctggtccccctcgygccagaggcagaagcctgagcagagggtctctccgcgtctgtactctggcgtctctcggtgtgtgggcagcgtgaccgacctcagcgcgatgacataggg

SEQ ID NO: 356116 - DNA, 201 bp, Homo sapiens; identical to SEQ ID NO: 76210

SEQ ID NO: 356117 - DNA, 201 bp, Homo sapiens
ccctcccaggtaaggtctacccttcagccccggtgctcccagctcatctgcaggggtgtcctttgcttggggcaggtaccgccggtctctgttgccatggyaacacaggtttatttacaccataccctggatgcaaggtggggcagggttgcggggagggagagggagtacagtgatgtcaagagcacagggctcctggcc

SEQ ID NO: 356118 - DNA, 201 bp, Homo sapiens
cgtccctctgccagatggggtactggacacagtgggagcccagggagggtcatgggatgaacgaacatgagtcttgggctggggcgaggacagacgctaamagccccttgggattccttccaggctgtgagctggaggcctgcagccctgatgccgacatgctggactacctgctgagcctgggccagatcagccggcgag

SEQ ID NO: 356119 - DNA, 201 bp, Homo sapiens
ttccctgggagggagaagcggccaccctaccaccctgtccagttgtgtcccccaccccacagcagataggcacacacccattgtcacaaggcttccgcctygaggccaggatcacgaagtcctggggctttgtgtgacctccgagggcagggctggtgacgtggtagatggcgtcgtcctcgtctacctgctgcactagct

SEQ ID NO: 356120 - DNA, 201 bp, Homo sapiens
cccatcagactcagcattcctgccatgggagccacctaagcgagcgggaaggataccagctctggagccaggcagacctggtcccatcaggttccactccyggcaactttgcttactgcttataagaccttgggcaagtcacttcttctagtctacaaggcaaggaaatgagagctacttggcagggtgctatgaggctta

SEQ ID NO: 356121 - DNA, 201 bp, Homo sapiens
gacagcacccagttgtccttggccacaagcatcttcaaggaggagacgttattgtagctcaggtacacctgaaagagtacacaggtgctaccactaccccrcccccttccttcagggcccctgagccaaggccaagggtgtgccagagaggaacctgggccaggaatgggttgggcggtgggtgggtggtgcggcaggtgc

SEQ ID NO: 356122 - DNA, 201 bp, Homo sapiens
atttgttcgaagtttattatgtgtcccagaactgttttaagcacttgacttgcagaacaccgtttaactcttatgagaatgaggtaggtagtattactttyattttattaatgcaggaactatattatagaagttaaaagacctgcctaagtctggtaagtggcagagcaaagattcaaacccaggcctttctgattctaa

SEQ ID NO: 356123 - DNA, 201 bp, Homo sapiens
agagctcagattcccacacgctggggctctgagtcagtttcctgtctatatgaggatgtttaagaagcctgccctgctggaagggatgctgtctatgaggytgagttacctgcccaagatcagaatcaggatctgaacccagacttccctgactccaaagtccacgcccaatttatgggacctgaaacaagccattctgtc

SEQ ID NO: 356124 - DNA, 201 bp, Homo sapiens
aaacccacccccaccctcctggaggcactgatgcccccagcaagatcccagaagctcatggctggaagggtcttaaaggtcatttcgtccaacccctgccrgtgctcatgccctctgcagagtccctgctttctgcttgcatacctctggtgacgggctactcactacctcccaagagagccctttcattggtgggtaatt

SEQ ID NO: 356125 - DNA, 201 bp, Homo sapiens
tctttgctaatggtagcaatcatgaggcgtgtcattcatatcctgctctccccggccttcctccaaacccgttctgacaagcagggaagggtgggggcccrgtgggtctgaagactgtcctctcggagcagagagccttacctggttgctagggtcccaggggacggagaggggcacctctgtctgcttacaggacacgat

SEQ ID NO: 356126 - DNA, 201 bp, Homo sapiens
agttagctctgtctcttcgaaaggccttcctcacaccctgcagggatgtggtgctggtccttccgccctcccctgactccactgtgcatgcacacgcacayacacacacacacacacccgctctgctttctgcccagggagtcatgtattcctagttccttcgccatttccccaagcccttgttcctttccccacaggcat

SEQ ID NO: 356127 - DNA, 201 bp, Homo sapiens
atgtggaaggagaggaacttgtcatcctccagagtgtacaggcggacctgcatgggatagagggcagcctcatttgctgggtggtggagtggactgatggrgatgctggaggctgagactggaagctcagggctacagctgacttgctgtgtgaatgtgaacacgcagctcaacctctctgagtctcagctgcatccccac

SEQ ID NO: 356128 - DNA, 201 bp, Homo sapiens
aagtggtgtgggagagttcttgttgcttgccattagccacctctggctcagatgagaaaggaaaattgggtgggtggggtcagctacctgactgatctccraggacagcacccagttgtccttggccacaagcatcttcaaggaggagacgttattgtagctcaggtacacctgaaagagtacacaggtgctaccactacc

SEQ ID NO: 356129 - DNA, 201 bp, Homo sapiens; identical to SEQ ID NO: 76212

SEQ ID NO: 356130 - DNA, 201 bp, Homo sapiens
gcttcccataccagggcccccagaactccctctgcatgaagtggtgactcagccccttccccatggactcgctgccccagaaccggcctgcagtaacccakgccagcatgccaggactatccatttctatcccaggtagataatctgttaaccataatctcagatgaaaggaagattattgccccttacgcagatctaatc

SEQ ID NO: 356131 - DNA, 201 bp, Homo sapiens
tgaaattggaaaatctggcaggccctgattgtacagaccacgaagactatgataaagagtttgggtttcaagtttagagcaatgggtaggttttctggcctttttttttttttttttaacagaaagtgacatgatcaggtacatatttaggacactcactttgccggctctatagagaacagacttgcagggaagcagtgc

SEQ ID NO: 356132 - DNA, 201 bp, Homo sapiens
tcaccatgttggccaggctggtctcgaactcctgacctcaggtgatccacctgcctcagcctctcaaagtgctgggattacaggtgtgagtcatcatgccyggccaaccagctcttcttgagccctcgtccccaccaagcctcattccccatccacagctctttctctcttccatcccccaaccctacatgacttcatccc

SEQ ID NO: 356133 - DNA, 201 bp, Homo sapiens
aaccaatgtactacacgggaggcagcctgatccctcttctccagctgcctggggatgacggtctgaatgtggagtggctggttcctgacgtccagggcagyggtaaaacagcaacaatgaccctcccaggtaaggtctacccttcagccccggtgctcccagctcatctgcaggggtgtcctttgcttggggcaggtaccg

SEQ ID NO: 356134 - DNA, 201 bp, Homo sapiens
ccttcttctctgagttagctctgtctcttcgaaaggccttcctcacaccctgcagggatgtggtgctggtccttccgccctcccctgactccactgtgcaygcacacgcacacacacacacacacacacccgctctgctttctgcccagggagtcatgtattcctagttccttcgccatttccccaagcccttgttccttt

SEQ ID NO: 356135 - DNA, 201 bp, Homo sapiens
atggtcaggagtcagggagaaagcaggagaaaaggccccttctggcatcagtcgtttgtgatgctgcaagggccaaaagcggcccctctcccctccactayactcttcaagtgtgagtgccccttgcatgattatctagagacagcttcccattagaaaggtctgagctccctactagactgaattcttgaaggcaggaat

SEQ ID NO: 356136 - DNA, 201 bp, Homo sapiens
aaactaaaatattttcatcaaggcaaagttcaaataaaattttaggctgggcacagtggctcacacctataatcccagtactttgggaggccaaggtgagyggatcccttgaactcaggagtttgagaccagcctgggcaacacagcgagaccacgtatagaaagaaaagagagaaagacatgaagggaagaaaagggagg

SEQ ID NO: 356137 - DNA, 201 bp, Homo sapiens; identical to SEQ ID NO: 76209

SEQ ID NO: 356138 - DNA, 201 bp, Homo sapiens
ccatgttggccaggatggtcttgatctcttgacctcctgatctgcccatcttggcctcccaaagttctgggattacaggcatgagccaccatacctggcctttttttttttttttttttttttgagacagagtctcactctgtcactcagcctagagtgcggtgacatgatatcggctcactgcaacctccaccccctggg

SEQ ID NO: 356139 - DNA, 201 bp, Homo sapiens; identical to SEQ ID NO: 76216

SEQ ID NO: 356140 - DNA, 201 bp, Homo sapiens
ggctgtggacaggacccgagtctactacaggctaccccagggctaccacaaggacttgctggctcatgttggtagaaactgagcacccaggggtggtgggycagcggacctcagggcggaggcttcccacggggaggcaggaagaaataaaggtctttggctttctccaggcactgtatgtgagtccttggggacaggatg

SEQ ID NO: 356141 - DNA, 201 bp, Homo sapiens; identical to SEQ ID NO: 76207

SEQ ID NO: 356142 - DNA, 201 bp, Homo sapiens
tctcggctcactacaacctccacctctcgggttcaggtgattctcctgcttcagcctcccgagtagctgggattacaggctcctgccaccacgtccatccmgctaatttttgtatgtgtagtagagacatggtttcaccatgttggccaggctggtctcgaactcctaatctcaggtgatccacccacctcggcctcccaa

SEQ ID NO: 356143 - DNA, 201 bp, Homo sapiens
ggcgtatgctttcggtgtattcttgaaagatcccattaatgaggggagtcaaaggctatatttttatcttcttttctaatgctaatatgtgttgctatagraatagataataatgtttctctgttctctttgaatctaggctttcaatcctgataatgaataccattttaaaaacagaatgaaagtgtctcaaaggaattg

SEQ ID NO: 356144 - DNA, 201 bp, Homo sapiens
gacaccaaggatgtagccctttagttccagctttgcgttgcatttccttcttgagtcaccctgtcccacctggggttgatgtccttttctcctgcaaatgracacttacggtcaccagggctctgcagctgcctgtgggtgaatctggcttcagagccttcctgcctgtctcacaggattcctgctttctcttcgttttaa

SEQ ID NO: 356145 - DNA, 201 bp, Homo sapiens
atcagtgtttttaatgactgcaagtgatatatttctgcaaatggtataccatgatgcagacacttactaatgggcattggattatttctatgtttttgctrttatagagagtgttccttataaatatgtcttcatgtacgtgcaactatttctgaaagatcaatacctagagaatgagatttctgagttgaagattacagt

SEQ ID NO: 356146 - DNA, 201 bp, Homo sapiens
ttttaaaagccaatcatctacataaaaaagtattttcatcataatctctcacttatttgagatggacttgataaactgtagatttattttcttttttcaarttagactctagattgccctttatgtttttatagctcctgacatcaagtgctgttcacaagtggggtactgaaattcatgaaggaatttacaacatgttga

SEQ ID NO: 356147 - DNA, 201 bp, Homo sapiens
gcatttttcatacggtagagatcaagacaatgaatagatccgatgtttcacatcctgcagttcccatcaccggagagggactgactcactccttctgcatrtgaagtgtcttcctgacacttctgtatactttccacctataaaatttggagggagtgcctgattgaggtttgggttagatgttcatccctgagccaatta

SEQ ID NO: 356148 - DNA, 201 bp, Homo sapiens
gttcacaagtggggtactgaaattcatgaaggaatttacaacatgttgatgctattaatagaactggtcgcagagagaataaaacaagatccaattcccaytggtctcctgggtgtgcttacaatggtatagtatctctaaaattaagtactttgtgttttgattttgtttaaaatacttgctgttctctgacttgtaatt

SEQ ID NO: 356149 - DNA, 201 bp, Homo sapiens
agttcttagcccttttctcactgtattggttttcataagtcaattgcaggcattcctgtggctttgactacatttgtatgctgttgactctgaattaaatmtctaattcagatctcttcttggagctccaatgcagtatatctaaatatgtaacacacattcccatgcatagtgcattggcatcttaaattcattatatcc

SEQ ID NO: 356150 - DNA, 201 bp, Homo sapiens
atccgatgtttcacatcctgcagttcccatcaccggagagggactgactcactccttctgcatgtgaagtgtcttcctgacacttctgtatactttccacmtataaaatttggagggagtgcctgattgaggtttgggttagatgttcatccctgagccaattagcagtggtccagggaatgacagctgtaagaatgactc

SEQ ID NO: 356151 - DNA, 201 bp, Homo sapiens
aacagtagctgcatgaagaagggaccctcatattttcccctcctgacttctgccctcagtgcctctgttcctcatctcatccccggtagccctagcacacytggggcattggcatcacactgccttgagtcagacctcttatcctgttacctcctcctcttccttcacagtgaacactgaacaggacaggagaatagcaca

SEQ ID NO: 356152 - DNA, 201 bp, Homo sapiens
actgcagtcaataataacttaattgtatatttttaaataacttaaataatataattggattgtttgtaactcaaaggataaatgcttgaggggatggaaamcccattctccatgatgtgcttatttcacattgtatgcctgtatcaaaacatctcgtgtgccccataaacatatacacctactatgtaccaatagaaattt

SEQ ID NO: 356153 - DNA, 201 bp, Homo sapiens
agttgacacagaattatattgtttaggttgtattgaggggatagtaacactcaggcattggagagattccaaaggtgtggacttttgtaggagacaggtayaattagaattcacacgtgctgaatttctgaccagttaaggtggctgtgtcccaggataaatttaggccataatattaagtctgagtacaactttggaatt

SEQ ID NO: 356154 - DNA, 201 bp, Homo sapiens
ttttctctcagaatattaaagataccatttcactgtcttgtggctttgattattgctgtggagaagttggctattgatctgactgtggttcttctattagmagtctctctctcctccatggctgtattttgaaatcttttctttctctttaatgtttgtaaatttgattgtaatgtgattaaccatggtattctttttatt

SEQ ID NO: 356155 - DNA, 201 bp, Homo sapiens
ctagttaaaaacacctatacaaaacaagaaatgaaagttgttgctcatccttcttcctgatccccacacacatacctaggtaacggttaccagtttaacasatgcctttctggcttttccctgaatttatataaatctatgcatgttctttctctctctctctttttctcctaaacctaaattatcaagctatacctggtt

SEQ ID NO: 356156 - DNA, 201 bp, Homo sapiens
aaaaggtcaaagctgaatggatttttccctccctccagggaagtggcgtttgaaaccagaatatccctcctgaccattattccttccttgttacagctaarcattacttagcttttctagtcagttgcatcactgcatctttattgcttctctttgcagtcatttcatttatgtctgttgttttataacaaaactcaaaaa

SEQ ID NO: 356157 - DNA, 201 bp, Homo sapiens
gtatgcctgtatcaaaacatctcgtgtgccccataaacatatacacctactatgtaccaatagaaatttttcaaaataaaaaaattaaagagaaaaataamttaatgtgtgccttttttcttctcagtttggagaattaggtggatttgcagcaatccaagccaagctccattcagaagatatagaacttggggtaagtta

SEQ ID NO: 356158 - DNA, 201 bp, Homo sapiens
tccctgccaggctacacagaaactaagcaaagggtaagacaagatcacccacttcttactcccctcccaccctcagctacctctattcccccaactgattmcccttccctctgcttttgatactcttaaaattcccaagttccactgttgtgttcagaaattctggccttgatttcctaactttatttctgtagattctgc

SEQ ID NO: 356159 - DNA, 201 bp, Homo sapiens
actaggactgtcaagaggtgtgacagaatccaacatagtcttcaatttttttttcttcactttggtcatagtccattttactggttttcctaactttcctrgcattgctccttgagtcccctttactaacttattctcttctactttgactttatttgtttttttcaagccttagttcttagcccttttctcactgtattg

SEQ ID NO: 356160 - DNA, 201 bp, Homo sapiens
ggcattggagagattccaaaggtgtggacttttgtaggagacaggtacaattagaattcacacgtgctgaatttctgaccagttaaggtggctgtgtcccrggataaatttaggccataatattaagtctgagtacaactttggaatttaaaaatactaggaaaaaatatcactcacaagcccactagttaaaaacaccta

SEQ ID NO: 356161 - DNA, 201 bp, Homo sapiens
aggagaatagcacattaattcttagcacttttgcactagctaaggcgtatgctttcggtgtattcttgaaagatcccattaatgaggggagtcaaaggctrtatttttatcttcttttctaatgctaatatgtgttgctatagaaatagataataatgtttctctgttctctttgaatctaggctttcaatcctgataatg

SEQ ID NO: 356162 - DNA, 201 bp, Homo sapiens
aaataaaaattacctaacacataatttaaataatatatctttgtattaaaaagtatacaaaattgttgctttgactgtattagtctttaaatgatcttatrgtaagttattgttttgaatcaatagaattatatttagagagtcagtgttcactatatctgactttctctctcatgtttcttcaattaggcaacatagacc

SEQ ID NO: 356163 - DNA, 201 bp, Homo sapiens
agtgcagtggcacaatcttggaccactgcaacctccgcctcctaggttcaagcaattctcctgccttagcctcctgagtaactgggattacaggcgcccaygactacgcccagctaatcttttatatttttagtagagacagggtttctccatgttggccaggctggtctcaaactcctgacctaaagtgatccacccacc

SEQ ID NO: 356164 - DNA, 201 bp, Homo sapiens
tgaggtcctgaatacccctcctccccaccagttagcagtatttaaatgtacttttcttacgttgttaatgtttttagctcaagtttaaaatttttgcatattttgccagtttgatcgtgaagcaattcctgtgtcttttccgttctacagagctgggagactgagagtgatagagtaagacagaagcttttgagcctgatt

SEQ ID NO: 356165 - DNA, 201 bp, Homo sapiens
aagggtttatttggcagtattagctagttagtagctgctctgatatgaaaatttttatcttttcattgcaccttctcctttgtgaattgtagatgaagaartattctctctctacttttgggacagcttcgggagttcttaactgtagcattttatttctacagcccatgctagacccagtcattcttactacaatccagg

SEQ ID NO: 356166 - DNA, 201 bp, Homo sapiens
agcaatacagttaacaaagtaagatatgacctcaaactggccacctagaattaacttgggttagcatttggtgtatatcattccaggcatctgttctggtraaaggatggataggcataattttacttggatgtcacattttcccttagtcaacattgtttcattgttttctcacgatgaatattgtcttggagcagtata

SEQ ID NO: 356167 - DNA, 201 bp, Homo sapiens
aaaatcaaataataatgaatccaaagtctcaagtctacagagctatacttttgagcctatatttttaaaatgtccattttgctttcccaggagtcagttayaacatgttcactagactgactatccccattgcccaagttgacacaagaggaaaccagcttccatcttacctcatctgaataaatctgccacaagcccatg

SEQ ID NO: 356168 - DNA, 201 bp, Homo sapiens
tgcatatatgacccaaactgtacatacctagaggaggcaaggaaagcttcatggaggaggtggccccaggagcctgctgttaaatcaggagttggaatttrtgtggtcccaatggcaatatagacctaaggaatagcatgtatcaagaagtgaaagagtggcttatttataaaaattcaagtggtttgtttggtattgtgg

SEQ ID NO: 356169 - DNA, 201 bp, Homo sapiens
gggcctatcagctggatctcccgaagtaggcggacttacataactctggaggagggcagaacattgtcctctgaaggcagctggctcccaaaaggaagaaraccaaggagaactgttcatacccaacgatcctgtcaaaatttaccagtcatatcaactgtctctgcacagacagattgtacctcagtctgtgttgctata

SEQ ID NO: 356170 - DNA, 201 bp, Homo sapiens
gaaatcaggtggtggatatagagggacactggggaggtaaaaggcatggggcttatagacggatgggatgtatcaggtgaagaggagagggagtcaccaargtggggcagggcagggcaggtggtgggggtggggttaatggatgaatcttggccttgtagcttaaggatgcatttgaagaaatttcaaacaaacttcctg

SEQ ID NO: 356171 - DNA, 201 bp, Homo sapiens
tcctcagtggaggagaacgatataaacatgaaaaactataagaaattcaaaatttctccttttaagacctgaaatatgcatgaatattttgctgttgcttrgtacatttatcggagagaagccgtttcttccagtagtctcaaagatagcacttttctatgttaaaggtattttcagaaccagtaacactgaatctcctgt

SEQ ID NO: 356172 - DNA, 201 bp, Homo sapiens
cacttgcctcagagtaaaagcctaagtctccgtagtggctgactcagcctgcatggtccagtcccctttacctcactgacctcttctcctgcccctgtctscctccttccttcttctccagccacactggcttcctgactgttaccccatccataagcatgccccctgcttagggcctttgctcccaatcccttttgccta

SEQ ID NO: 356173 - DNA, 201 bp, Homo sapiens
cctgaaatatgcatgaatattttgctgttgcttggtacatttatcggagagaagccgtttcttccagtagtctcaaagatagcacttttctatgttaaagktattttcagaaccagtaacactgaatctcctgtagaactagccagaatctttactgatggtaaatagatcatcaaccacaagctgcattggttaagttaa

SEQ ID NO: 356174 - DNA, 201 bp, Homo sapiens
aggacatgtgaatgtcaatggatagaggcctggtggagaggaggacataagtacatagggaatgatgaaaactttgatgtcattagagatggggaaaggartaggaaatgattttgggaaggtgggttggagtgtaattgggagagttctcaataccaaaataaggagtttaatgttaattctgaaagaaataggaagtat

SEQ ID NO: 356175 - DNA, 201 bp, Homo sapiens
tctcattgttcagctcccacttatgagtaagaacatgcagtatttgattttctgttcctgtgttagtttgctgagaatgacagtttccagcttcatccacrtccctgcaaagtacatgaactcatcctttattatggctgcacagtattccatggtgtatatgtgccacattttctttatccagtctatcattgatgggca

SEQ ID NO: 356176 - DNA, 201 bp, Homo sapiens
tacatagggaatgatgaaaactttgatgtcattagagatggggaaaggaataggaaatgattttgggaaggtgggttggagtgtaattgggagagttctcrataccaaaataaggagtttaatgttaattctgaaagaaataggaagtatttttgtatagatttccattgaaggtggaacaaagaatgcgacttgattgga

SEQ ID NO: 356177 - DNA, 201 bp, Homo sapiens
caattaaaagacacagactggcaaattggataaagagtcaagacccatcagtgtgctgtatttaggagacccatctcacatgcagagacacacataggctbaaaataaaggcatggaggaaaccctaccaagcaaatggaaaacaaaaaaaaagcaggggttgcaatcctagtctctgataaaacagactttaaaccaaca

SEQ ID NO: 356178 - DNA, 201 bp, Homo sapiens
ttaacaaggatatccaggaattgaactcagctctgcaccaagcagacctaatagacatctacagaactctccacctcaaatcaacagaatatatattcttyttagcaccacatctcacttattccaaaattgaccacataggtggaagtaaagcactcctcagcaaatgtaaaagaacagaaattataacaaactgtctct

SEQ ID NO: 356179 - DNA, 201 bp, Homo sapiens
atgtaaaaaggacattaaattgacatcttttttgtgttaggtcaccaaggagcagtgggacaccatagaagaactcatcaggaagacaaaaggttcctaaraccactttggccttcatcttggttacagaaaagggaatagaaatgaaacaaattatctctcatcttttgactatttcaagtctaataaattcttaattaa

SEQ ID NO: 356180 - DNA, 201 bp, Homo sapiens
agacagaaaaccaaacaccgcatgttctcactcataagtgggaattgaacaatgaaaacacttggacacagggtggtgaacatcacacatgggggcccgtsgtggggtgggaggagcggggagggatagtattagcagatatacctaatgtaaatgacgagttaatgcgtgcagcacaccaacatggcacatgtatacata

SEQ ID NO: 356181 - DNA, 201 bp, Homo sapiens
ggtttaattgactcacagtttccacatggctagggaggcctcaggaaacttagaatcatggtggaaggcacctcttcacagggcagcaggaaagagaatgwgttccaagtgaaggggtaagccccttataaaactatcagatcttgtgagaactcactcactatcatgagaacagcatggggaaaactgtcttcaggattc

SEQ ID NO: 356182 - DNA, 201 bp, Homo sapiens
tatattctaaactacaaatggtaggtggtgtagcatagtggttaaggacactaaaatgtaaaggttaggttgtacagtagagtgactaagggtacagactraagctagacctcttgagattgacaaattggccatatgacatagagaaaatgatttaacctctctgtgccttagttacattatctgtaatatagggaacaa

SEQ ID NO: 356183 - DNA, 201 bp, Homo sapiens
tgtctgacatccttttttaaaaaaaatcaaggaaatgtaactatatttttagtttgagagatgctttggtaacttattatataggctttgtcttgttatargtaggtagcattttccttgactcatgcttgtgccctttcactctcagtcaattatgcatgtcatctaacgcccacatgtctctgattataagtccttctg

SEQ ID NO: 356184 - DNA, 201 bp, Homo sapiens
aatattgggtagatatttgaaattgtggagatgttagaaatagaattataaactgagtaaatcaatttaggtttaatcatgagttttatctttaaaatttkggcttgatttaaagtgccaaagagatattccatccaattagtatgggaaaatggctagtggttcagaaactttttaaaaggagttagtttcagagtttaa

SEQ ID NO: 356185 - DNA, 201 bp, Homo sapiens
ttatttcaggggaattcaacgacctgagaaaggtaatgcttttgtgtgtataatgtaatatcagcagctaggatactaagctttaaaaacatgtaaaaagsacattaaattgacatcttttttgtgttaggtcaccaaggagcagtgggacaccatagaagaactcatcaggaagacaaaaggttcctaagaccactttgg

SEQ ID NO: 356186 - DNA, 201 bp, Homo sapiens
aaattgggaagtagttatggaaggcttcctgtattcagggagtacataaggtgttttgggaatgcaaagatgtacacttttgaaactcatcctttgaaaamtatggttgtccagtgtttaccacgctgatagtttaatatggcagttagggcccagtctgcaaaactcttatgtgaattccagttggagtaaatttgatct

SEQ ID NO: 356187 - DNA, 201 bp, Homo sapiens
aggtgttttgggaatgcaaagatgtacacttttgaaactcatcctttgaaaaatatggttgtccagtgtttaccacgctgatagtttaatatggcagttarggcccagtctgcaaaactcttatgtgaattccagttggagtaaatttgatctaaaaaatattgattcaacctgaaccaacagatacgtagaagctccaag

SEQ ID NO: 356188 - DNA, 201 bp, Homo sapiens
atatttcctactgcagcttagatatctctacctgactattccagaagcatcccaagtgcagcatttctgatgcagaactcattatcctcaatgctccaacktggtcttctcatgtcaacccagtcatttcagtcagagcatcactctgcatgcagccacttaaaactagaactcagttaccttccacagctctcaccttac

SEQ ID NO: 356189 - DNA, 201 bp, Homo sapiens
caacagatacgtagaagctccaagaaaatagatgtggaaatatttcattatctttataaatatagctcacactttagtgtttaatatagagtagttatgcytcaagtaaggtatatgtccttatcatgaaattgattctaggccattttttttcttgctctgttttcctctacgtacttcttgtattgtgtgcttgcctat

SEQ ID NO: 356190 - DNA, 201 bp, Homo sapiens
atttagttgtggttccaaaataaaagccttgcctcttctttcgtttttttttttttttttttttttgtattggtttcttgtgtgttacttacaataggcayctaggagtcacatactcagaggcctaaagtccttgaaggccttgtttatgaaaggccacccagtgaaaagggctcacttttcctgtgtgagtcggggctg

SEQ ID NO: 356191 - DNA, 201 bp, Homo sapiens
ttgcaatgaccttgcaagtaagtgctcttttattcccatttatagacatgggtggaaactgacgtacaatctttttttaatgtaggaagtgaatttttaaygctcacatttacagatgagaaactatggcttattaattacctaagtgttaactattactattaaaatcgacaattgacataatttaaaaaattagttgtt

SEQ ID NO: 356192 - DNA, 201 bp, Homo sapiens
aaaaagacagtttttatattttccttcccaactgataagccttttattttctttcttgccttattttattggatgggaccttcactaaaatattgaatagrtaaaaacttagattctgctggttcctagtattaagaacaaatcaaatacatttcctcctgatgccaggaggaaagcaattagattttcattattaattat

SEQ ID NO: 356193 - DNA, 201 bp, Homo sapiens
ttacagatgagaaactatggcttattaattacctaagtgttaactattactattaaaatcgacaattgacataatttaaaaaattagttgttgtaagtggwctagtagagaaaaagaaggaactgtgactttttattgtagtcatagtcacttagtttacacctgatacttggacagttagtgagtgacgatattttactg

SEQ ID NO: 356194 - DNA, 201 bp, Homo sapiens
gtagagaaaaagaaggaactgtgactttttattgtagtcatagtcacttagtttacacctgatacttggacagttagtgagtgacgatattttactgttaktcagctttttcatctataaaatatacttgataataaattactactccaatatttagtaacagaacaaggcgttaggtgtagaagcctcatgaaaaatata

SEQ ID NO: 356195 - DNA, 201 bp, Homo sapiens
agcttgaaccatatggagcttgtgttggggaaagggaaagagtgaagtgaataatcttaccagcagccttgtgatagaggaagagaataaatgtaaatcascaactgaagaaagaataaaaacaaaggactgttttagttaatagagaagaagaaacagttttcaaggccagaggccttggaagcattgaactaagtaaag

SEQ ID NO: 356196 - DNA, 201 bp, Homo sapiens
tccattacaaattcttttatcagggtgcattacttctgccctacctgcaaagcctttccattccttccccaccatttcctaactcaacactgaacacaaakgtggtgctttgtttatgcagtgaaacattttggagacctgcaaaaggaaggtgagttgagtacatacttaacacttctttcaattatgtccttcaacttt

SEQ ID NO: 356197 - DNA, 201 bp, Homo sapiens
agccaggtagaaaaattaatatgtcaactgtgaaaaaacttcttttgatttgatagaatagacagccatggtgttgtttttcaaaaaatatgggcagcagkagttccaaataggaatacaaagaattagtatggtggttccctcaagtaaggtatctttcttttaaaaagtgagatttgttcagggttagggttttgctga

SEQ ID NO: 356198 - DNA, 201 bp, Homo sapiens
caacctaattgttttcttaatttctaagggtgcctttagccgtctggacccaactggaacatttgagaaagaaatgattggcagaattccctgtggtcgcmtggggactgtagaagaactcgcaaatcttgctgctttcctttgtagtgattatgcttcttggattaatggagcagtaagcgttgtttatttctcttcact

SEQ ID NO: 356199 - DNA, 201 bp, Homo sapiens
aagtaaggtatctttcttttaaaaagtgagatttgttcagggttagggttttgctgattttttttctctccctgtgaaaactgggttatagatcattatamaggaagcccatattttctgatacttttcagagacatttctcatttgaaatctacaacagctctgtgatgtcttcagagatttcattttttaacacacatc

SEQ ID NO: 356200 - DNA, 201 bp, Homo sapiens
tgagcagaaatacgatatcatcaggtaagactggaagtagggagaccaaacatccaaacaccagtgatgagggtctgaactgaggatagcattagagctaytggggactaaaacgaactgggcttggtttgaatgtatggggtaagatgaagcccagatttctgtctttggcccctgagctaaggacagtgccactctctt

SEQ ID NO: 356201 - DNA, 201 bp, Homo sapiens
tagtgtttaatatagagtagttatgcttcaagtaaggtatatgtccttatcatgaaattgattctaggccattttttttcttgctctgttttcctctacgyacttcttgtattgtgtgcttgcctatatgattcagttttctgttagctattgttaaagaaaaaaaatttatgaacatgttgaacattcaagcaatataaa

SEQ ID NO: 356202 - DNA, 201 bp, Homo sapiens
ctttaaaaacatgtaaaaaggacattaaattgacatcttttttgtgttaggtcaccaaggagcagtgggacaccatagaagaactcatcaggaagacaaawggttcctaagaccactttggccttcatcttggttacagaaaagggaatagaaatgaaacaaattatctctcatcttttgactatttcaagtctaataaat

SEQ ID NO: 356203 - DNA, 201 bp, Homo sapiens
cagaaatacgatatcatcaggtaagactggaagtagggagaccaaacatccaaacaccagtgatgagggtctgaactgaggatagcattagagctactggrgactaaaacgaactgggcttggtttgaatgtatggggtaagatgaagcccagatttctgtctttggcccctgagctaaggacagtgccactctcttgagt

SEQ ID NO: 356204 - DNA, 201 bp, Homo sapiens
caatttggaagccttccatttgcctgtttttaatagggtacaatttaaagtgttgacagagatattgacaatgttgtctggttttgaaggccaattctgcygggttgagaaagacagtgggtggttcaggccaatgagaaagcaggagcaaaggccagaaggtgaaagtagttggcaagtttttggaattgtgagggcttg

SEQ ID NO: 356205 - DNA, 201 bp, Homo sapiens
ttaatagggtacaatttaaagtgttgacagagatattgacaatgttgtctggttttgaaggccaattctgctgggttgagaaagacagtgggtggttcagrccaatgagaaagcaggagcaaaggccagaaggtgaaagtagttggcaagtttttggaattgtgagggcttggtaagtgtagagtttacttctacatggca

SEQ ID NO: 356206 - DNA, 201 bp, Homo sapiens
ttcagtgtcttaatcgtttgggatcttttataccatcaatgttggcactttgtctgatttgtttcagtggtctgttattgtcctgtatttgttaactttcrtgacattttaaaggctcctacattgtctgacatccttttttaaaaaaaatcaaggaaatgtaactatatttttagtttgagagatgctttggtaacttat

SEQ ID NO: 356207 - DNA, 201 bp, Homo sapiens
actcagactaccaaatctcatggtattgtttcgtaggtagctgtggacttcaactttattgtattatttctattaatacatttcagaaaaaaaaccctgcrgggaaaatgtttttcctcatctaaagtttctgtaacttgccttgttcatttattagattgtgataaacaatgcagcagggaattttatttctcctactga

SEQ ID NO: 356208 - DNA, 201 bp, Homo sapiens
aaaatgttaagtttcctccaagataaatgtatttttaccacgtcttttacaaggggactatcaactatctgaaacttaggttttgactcataattaaaatragttagaaaaaccagagccctgatatcccttcttactataattaaacttaaaaatagcagcctacatgagggacatatttatattaaatgtttaaatgag

SEQ ID NO: 356209 - DNA, 201 bp, Homo sapiens
tactataattaaacttaaaaatagcagcctacatgagggacatatttatattaaatgtttaaatgagaaaagtgtttccttagtagataatattatttatrtagggttattctagtttttaaatgttatagtcctattttgagtagcttttagagaattaaggatttttagattttcatatgggctctcattgaaaaatgg

SEQ ID NO: 356210 - DNA, 201 bp, Homo sapiens
tagaaacttgacttttataaagcttttccatgagcagttattctaactgaaataatgggcctctgtacaagaaggaaaatatatgtgactaaccctggggmtctaggaattctttactttgcactttagcaccactgttcatttttttgaagccgataattgtttcaccttgcagcattaatgctattggaacagtgcagt

SEQ ID NO: 356211 - DNA, 201 bp, Homo sapiens
cctgcccaaactacaaagcaaactttatattattacaaaaaataatctagatctcagatatctcccaaaggtcatgataatgacatcaaaagaggggggarttttaaagttatccagagtttcttacagcccatggtagaaagcatgcaatagatgtttagcaacttttagtttttgcagaaaattctaggtagaaaatga

SEQ ID NO: 356212 - DNA, 201 bp, Homo sapiens
cgcaagagaaagggcaggaagtcttggggcacaaagagaggacccggcgtccctggggctcagggagctaggacagggcgttttggggcgcagagagagargaccaccaggtcccggagcgaagggcaacgccgggagtgagcaccggggcccgggtcgtattccactgtcagatgaagccctgatgtgtgtaggggaata

SEQ ID NO: 356213 - DNA, 201 bp, Homo sapiens
gtaaagatgagagaggtagaaaaatctctctcagttcttttcagtaaacaggagacctgtttatatgctgttaatgaaacaggcaaaaatgtgatgaaatmgatcaagaacaaaagtccaagctcatgttgttgggcaagaggcaagaagaaatcatggatctagtggatatcttaaatatcctgacttgatcattacaca

SEQ ID NO: 356214 - DNA, 201 bp, Homo sapiens
taagagagcacagagcaacccggggagcgagagagaggacaggacgtctcggggcgcaagagaaagggcaggaagtcttggggcacaaagagaggacccgkcgtccctggggctcagggagctaggacagggcgttttggggcgcagagagagaggaccaccaggtcccggagcgaagggcaacgccgggagtgagcaccg

SEQ ID NO: 356215 - DNA, 201 bp, Homo sapiens
acactacatatcaacttttaatatactacatatttaacttaatttctttatccctcattcccccaaggataatcttgctgagaatagaatattgtgtctgttttttttttttactgccgtactgccatgcctagaacagtgcctggggcttaatatatgctcaataaacacttgcttaaaatgaataaatgaataaactct

SEQ ID NO: 356216 - DNA, 201 bp, Homo sapiens
ggtatctttcttttaaaaagtgagatttgttcagggttagggttttgctgattttttttctctccctgtgaaaactgggttatagatcattataaaggaarcccatattttctgatacttttcagagacatttctcatttgaaatctacaacagctctgtgatgtcttcagagatttcattttttaacacacatcattagg

SEQ ID NO: 356217 - DNA, 201 bp, Homo sapiens
ggatagtttatattgctgtgtcttcagattcatggatcttttcttctacagctaagcttatttgttcaatttttcctttcagatgctgtatttttctgctktagaagccatattggtttctattttgtattttccatttttctcatcatataaatattttcagtgaaatcttttaaaatatttgtaatagcatttaaaagg

SEQ ID NO: 356218 - DNA, 201 bp, Homo sapiens
ttttatgattaaatgcgagagaatggcagtgatgttcgcatgtaatgtgagtacaagctgttaacatataaaatagggcaatacaaatattttttactccraaatggattgattttcctcccatttaaaataaataacagaaatattctgttttatgttttgtggccagaagctagcatgggaagaggcatttgatttaat

SEQ ID NO: 356219 - DNA, 201 bp, Homo sapiens
ttgcagtgagccaagatcacgccattgcactccagcctgggcaacaaagtgagattctatctcaaaaagaaaaaaaaaaaaaagaatagtaactatcaagrgtaaaatcactatttttagaaaaatgattcctggccaatattcagcaatacagttaacaaagtaagatatgacctcaaactggccacctagaattaactt

SEQ ID NO: 356220 - DNA, 201 bp, Homo sapiens
tagaatggtgttcattaaagattcaggaaacaacaggtgctggagaggatgtggaaaaataggaacacttttacgctgttggtgggactgtaaactagttmaaccattgtggaagacagtgtggtgattcctcaagggtctagaactagaaataccatttgacccagccatcccattactgggtatataccgaaagaatta

SEQ ID NO: 356221 - DNA, 201 bp, Homo sapiens
gatatcatcaggtaagactggaagtagggagaccaaacatccaaacaccagtgatgagggtctgaactgaggatagcattagagctactggggactaaaaygaactgggcttggtttgaatgtatggggtaagatgaagcccagatttctgtctttggcccctgagctaaggacagtgccactctcttgagtgaggacatt

SEQ ID NO: 356222 - DNA, 201 bp, Homo sapiens
atgtgagggatcctgatatggttcaaaacactgtgtcagaactgatcaaagttgcaggacatcctaatgtaagtgtagcaatgatgaagccaaagtgcaaracacttgatgttgataacacccaccaacatgtacaaaggaaataaaatattgatactgatgtaggacaggcaagcccgaatctggggcttagcctgggaa

SEQ ID NO: 356223 - DNA, 201 bp, Homo sapiens
agaatccatttatgattgatcagaaaacaaacttgatttcactttatttaataagattatgaaataacaagagcagttatccaagagtacagcattgagtktaaatgattgatgctttttgcttctcctagtaacttttgattgtcttcctcagtggaggagaacgatataaacatgaaaaactataagaaattcaaaatt

SEQ ID NO: 356224 - DNA, 201 bp, Homo sapiens
gtcttcctcagtggaggagaacgatataaacatgaaaaactataagaaattcaaaatttctccttttaagacctgaaatatgcatgaatattttgctgttscttggtacatttatcggagagaagccgtttcttccagtagtctcaaagatagcacttttctatgttaaaggtattttcagaaccagtaacactgaatctc

SEQ ID NO: 356225 - DNA, 201 bp, Homo sapiens
gatccatataactgtattttgtaatatagatgtgctctaattcattggctatgtcccctaaggaaacacacatagattgttttgtagtctttctattacaracaattctttaatgaatctctttggctattttgagtctcttgcattttcaaaacaattttaggataagcttgtcgacgttcacaaaaagctgattaggat

SEQ ID NO: 356226 - DNA, 201 bp, Homo sapiens
gtggtctgttattgtcctgtatttgttaactttcatgacattttaaaggctcctacattgtctgacatccttttttaaaaaaaatcaaggaaatgtaactwtatttttagtttgagagatgctttggtaacttattatataggctttgtcttgttataggtaggtagcattttccttgactcatgcttgtgccctttcact

SEQ ID NO: 356227 - DNA, 201 bp, Homo sapiens
aacgccggaagctgcccttagtgtttttcagcctcttggtcttagggaaagtgaggccgtgttttacatccaacatattattattctgataatatgtgacytggcgccacgcgcactctgcacttaaacacgcacttaagggataaacacatacgactgaaaaagagtttcgcccttgataggcagtgtatggggtgcgca

SEQ ID NO: 356228 - DNA, 201 bp, Homo sapiens
catttagcccatttacatttaagatttatattgttatgtgtgagtttgatcctgtgattatagttttttttttaaaaaaaaatcgtgaataagtattgaatttgttaatataagccttctttctacatttattgagatgggtatatttttaagcctgttaatatggtgaattacattaattaatttttgaatattgaacac

SEQ ID NO: 356229 - DNA, 201 bp, Homo sapiens
agagtctggatgataataccaatgagattaagaacactggagggaaaatagatttagaaagaacttactaggagaacatttttgttagtattatgaatgamttactttataaaagttcatatgtacatggatagcaaacatgtctaatgtatatatgtgtgtatattcatatatatctagaaccagcgtacatttattcac

SEQ ID NO: 356230 - DNA, 201 bp, Homo sapiens
tttgccagtctgtgtcttttaattggagcatttagcccatttacatttaagatttatattgttatgtgtgagtttgatcctgtgattatagtttttttttwaaaaaaaaatcgtgaataagtattgaatttgttaatataagccttctttctacatttattgagatgggtatatttttaagcctgttaatatggtgaatta

SEQ ID NO: 356231 - DNA, 201 bp, Homo sapiens
ctggatgataataccaatgagattaagaacactggagggaaaatagatttagaaagaacttactaggagaacatttttgttagtattatgaatgaattacyttataaaagttcatatgtacatggatagcaaacatgtctaatgtatatatgtgtgtatattcatatatatctagaaccagcgtacatttattcacctgac

SEQ ID NO: 356232 - DNA, 201 bp, Homo sapiens
tgaaactgtttcacctcagatcatcaggcattagagtatcataaggaatgtgcaagctagattccttgcatgtgtagtttgcaatagggtttgcgctcctrtgataacctaatgtcaccgctgatctgacattaggtggagctcaggcagtaatgctggctcacctactgctcacttcttgctgtgtggcctggtttctaa

SEQ ID NO: 356233 - DNA, 201 bp, Homo sapiens
gaaaagtctttacatctgtgatgtgggaggttgttccagggaacatcatgtttttgtgggcaaatacaagttgttataattaaaacccctaatttgaatakttttgttaccaagaaccaaggcaaatgtttaatttgttataaaacctgtttgtgaagtgctgtgttaaattgtgctgctggctaataggcctcatttcaa

SEQ ID NO: 356234 - DNA, 201 bp, Homo sapiens
atcccaaataaatagcatccgttttttccagtctgaaaaatgagtaaagatggaagccaaagtatcacttttattgtggtttgtgagaggaagctgggccyatcagctggatctcccgaagtaggcggacttacataactctggaggagggcagaacattgtcctctgaaggcagctggctcccaaaaggaagaagaccaa

SEQ ID NO: 356235 - DNA, 201 bp, Homo sapiens
tatctaacatttaaaaaaatgttgccagattggcctcctaagaagttgccagaattcttatcaacagattgtaagggtggctttaatcaactgtttcttgkattatagatgataaaattttgaaccttgctggtctggtaagagaaaaattatgtctccttttgtttaaatatgcttatttagttataaatatggtcgtat

SEQ ID NO: 356236 - DNA, 201 bp, Homo sapiens
aataaacaggtatttcaaaatatctgttattgtgatgaatataggaagggtaagaccatgtggaaggaatttcttcttattaggcatattctggtaccctrtaaactctgttccaaagtctgaggctttagagactggtttaaaaatccaccccttcaccattttgaatggtgtaaaattttaggtaagccaagtagtcat

SEQ ID NO: 356237 - DNA, 201 bp, Homo sapiens
ccaaacaacagttactgtgtcatttgcaattgcagattgtccggaatattttttgtttttacattgtaatgtttttaagagtttaaatatattattttcattttaataataatttctattcatagttttttttgtagaatgtgagactgcatgaataaatgtagtctctttgaacccataaatttagtacaaaacctacta

SEQ ID NO: 356238 - DNA, 201 bp, Homo sapiens
tgtcatttgcaattgcagattgtccggaatattttttgtttttacattgtaatgtttttaagagtttaaatatattattttcattttaataataatttctrttcatagttttttttgtagaatgtgagactgcatgaataaatgtagtctctttgaacccataaatttagtacaaaacctactaacattataccatgaata

SEQ ID NO: 356239 - DNA, 201 bp, Homo sapiens
acccataaatttagtacaaaacctactaacattataccatgaatatattttctttgtaaacctggcttatcaaggaaataatttaaatctgtgagtagatratgttaaagtaaactggtttaaaagtgactaattcaataagttagtatcaaatatataaaaatgatctaaatttgacttttagaaaaaattcacattgat

SEQ ID NO: 356240 - DNA, 201 bp, Homo sapiens
ctttggccttcatcttggttacagaaaagggaatagaaatgaaacaaattatctctcatcttttgactatttcaagtctaataaattcttaattaacaaamattcattgaatatgtattatgtgccaggccagtgatagccattgtatattcaaagataaataaaatgaaatatagtccttcaaaacattaaaaaaaaaaa

SEQ ID NO: 356241 - DNA, 201 bp, Homo sapiens
gttggaacccatcgccagaaagctaaaaaccttgataaaagattagatgatggctaactagaataaacagcatagagaagaccctaaatgacctgatggasctgaaaaccatgacatgagaaatacgtgatgcatgaacaagcttcagtagctgattcgatcaagtggaggaaagggtatcagtgattgaagatcaaatga

SEQ ID NO: 356242 - DNA, 201 bp, Homo sapiens
gatctaaatttgacttttagaaaaaattcacattgatttttgtatataaataacatctatactttctcagaaatgcttttctttaagctatggattctctrtattcttcaatttatgaaattgaaaaatataatatgaagtcatacaaggtgtttatttctaggaagatggatgttttgaaagctaccgcagaacaaattt

SEQ ID NO: 356243 - DNA, 201 bp, Homo sapiens
atgaggaaaaaatgctaagggcagacagagagaaaggtcaggttacccacaaagggaagcccatcagactaacagtggatctctcagcagaaactacaagycagaagaaagtgggggccaatattcaacattcttaaagaaaataatttttaacctagaatttcatatccagccaaactaagcttcataagtgaaggagaa

SEQ ID NO: 356244 - DNA, 201 bp, Homo sapiens
attctgaaatttggtaactaacgtaggaggttttcacagactcagactaccaaatctcatggtattgtttcgtaggtagctgtggacttcaactttattgkattatttctattaatacatttcagaaaaaaaaccctgcagggaaaatgtttttcctcatctaaagtttctgtaacttgccttgttcatttattagattgt

SEQ ID NO: 356245 - DNA, 201 bp, Homo sapiens
ccccttgctgatatctccatttcattctctactgctctgcctctgtcagctcctcatttttggttctctgtttctctcttcatctgtctctttcgtttctwtgtccttctttgcctctttgtctcttatttcttccctcgctcatctctgtgaccctcaatttctgtctgactctcccttcttccctcattattgtctttc

SEQ ID NO: 356246 - DNA, 201 bp, Homo sapiens
tcctgaaaatcaaataataatgaatccaaagtctcaagtctacagagctatacttttgagcctatatttttaaaatgtccattttgctttcccaggagtcrgttacaacatgttcactagactgactatccccattgcccaagttgacacaagaggaaaccagcttccatcttacctcatctgaataaatctgccacaagc

SEQ ID NO: 356247 - DNA, 201 bp, Homo sapiens
ctagacctcttcctatctcacatcttctatatccaactggccactaaagcttatcattactacccttctcaaatccacctcaccatgccgtatttccatcrgcttttacttgattcacgtcctgagacctagtctccctcatagtacgtgaactacatagtacatagtacatggagtgaggagggtaacatgccttagcgg

SEQ ID NO: 356248 - DNA, 201 bp, Homo sapiens
ttccggcattgattatgttgtggagtccactggtgtcttcactgccatggggaaggctaggactcattttcagggggtggggggagccaaaagggtcatcwtctctgccccctctgctgatggccccaagtttgtgatggacataaaccatgagaagtacccaaacagcctcaagatcatcagcaatgcctcctgcaccac

SEQ ID NO: 356249 - DNA, 201 bp, Homo sapiens
ccgaagagtggctgggctgatgctaaatacgtaagactcgtagcagcttctatctgcagcaattgccccaggttggacaccaactgtgcttgcatgcttcrtatcacctagtccttacaacagcccagtgagggagctcctactatccttactttacagatgagacagcgaaagcttagaagtcagactaggcaagactgt

SEQ ID NO: 356250 - DNA, 201 bp, Homo sapiens
caccagcaacatcagcatcacctggaaacttgttaggaaggcagactctcaggcctccttgcaggctggctaattcagaaactccaggaggagagcggagyaatctgtgtttaacgaaccctccaggtgattctgatcttcactaaagattaagaaccagggaaccatgcagaactaagctggtcctttggctggcttttt

SEQ ID NO: 356251 - DNA, 201 bp, Homo sapiens
cttgcatgtgagttggtattgaaaacccaggctggctggtttctcccattgccttccttctgtccctccaaggatttgaccatgattcccttcattttccyagctgagggaacattttctcactgcaatgtatctaagagggtttttacctttctgttgcagggagcttcaggtcaacttagtacgctcacattcttcagg

SEQ ID NO: 356252 - DNA, 201 bp, Homo sapiens
caataatcacagtaggaaactttgctctctcccccgacagggcctggcactcatcaatgggacgcagatgatcacatccctgggctgtgaagctgtagagygagccagtgctattgcacggcaggctgacattgtggcagccctgacccttgaggtgctgaagggcaccaccaaagcctttgacactggtcagcagggttc

SEQ ID NO: 356253 - DNA, 201 bp, Homo sapiens
tggttctcaagtgggatctcccaccagcaacatcagcatcacctggaaacttgttaggaaggcagactctcaggcctccttgcaggctggctaattcagamactccaggaggagagcggagcaatctgtgtttaacgaaccctccaggtgattctgatcttcactaaagattaagaaccagggaaccatgcagaactaagc

SEQ ID NO: 356254 - DNA, 201 bp, Homo sapiens
cattgatggtcatttgttctaatatcagaattactcgacctggcatggtggctcatgcctgtaatcccagcactttgggaggccaaggtaggaggatcgcyagagcccaggagtttgaaaccagcctggggaacgtagtgagacccccatctttaaaaaaaataaataaatggaattattcagactttttctccttcatca

SEQ ID NO: 356255 - DNA, 201 bp, Homo sapiens
tataccttacttgcattttatgggcaatataaattattttaaatgaatttgtgatgcttaactttaaattaaaaatgcagatgacctgggttggcattagrcatctgtattacagatgtgtaatttacatatgacagttagagagccagtcatctcaataaaccatattttggtctgtgccaaatttcagtctatggtgta

SEQ ID NO: 356256 - DNA, 201 bp, Homo sapiens
ttttaaatgaatttgtgatgcttaactttaaattaaaaatgcagatgacctgggttggcattaggcatctgtattacagatgtgtaatttacatatgacarttagagagccagtcatctcaataaaccatattttggtctgtgccaaatttcagtctatggtgtaatagagagtcctccctagaataaataccctcatttc

SEQ ID NO: 356257 - DNA, 201 bp, Homo sapiens
aagccttaacctcttttgaaagatggtctttgccaataggggagagacaatttctggaggaaacttccatggtgaatacccagccaaagtaagctttttaraactgctcttgacccagaaggcacatttcaatataggctgactaaatggagaccctctttcaggccctagactacttggccattggcatccatgaacttg

SEQ ID NO: 356258 - DNA, 201 bp, Homo sapiens
ggtgcaagggcctgggcctgctggacaacgaggaccggctcgaggtggccctagagaacaacgagttcgtggaagtgggtgagtggctgcaggagagggcygcgaacgggtgcggtttggcctggcttagtctttgcagcattgaacccccacctcagggaaaatgatgagcagaggtcaggcttgccgaggctggccctg

SEQ ID NO: 356259 - DNA, 201 bp, Homo sapiens
gctaaacttggtcaaatgaatgtcctttaatttcatatttagataatttctaactatttttcctataataaacaatgaactgtaaaacaaaaacaaaaacaaaaaaaacagctagttcctgatcacttcttcaagatatattgctaaaatttctacaagtggaagtactaggttgaattagagcacacagattttgagggc

SEQ ID NO: 356260 - DNA, 201 bp, Homo sapiens
tcgtagcagcttctatctgcagcaattgccccaggttggacaccaactgtgcttgcatgcttcgtatcacctagtccttacaacagcccagtgagggagcycctactatccttactttacagatgagacagcgaaagcttagaagtcagactaggcaagactgttgttagcttctatactcggctgtcagccttctgggtt

SEQ ID NO: 356261 - DNA, 201 bp, Homo sapiens
gtgctgggattacaggcttgagccactgcgcctggcccttctttccttcttgctgactttccctccagccctcctttcctccctgtctcctctttaccttyctctcttcttcctctccacccccactcctctttttctttctataacaattcatccaggtcccttacatattagctgggtttgaagaattgtctttcccca

SEQ ID NO: 356262 - DNA, 201 bp, Homo sapiens
cattccttaaatgcaacttgcatgtttgcttaaagttcatccctgaagaaggggcaactccgtaagaatttaaaagattctttatgccaggcatggtggckgatgcctgtaatcctagcactttgggaagccgagacaggtggattgcctgagctcaggagtttgagaccagcctgggcaacatggtgaaacccatctcta

SEQ ID NO: 356263 - DNA, 201 bp, Homo sapiens
tcctagcactttgggaagccgagacaggtggattgcctgagctcaggagtttgagaccagcctgggcaacatggtgaaacccatctctacccgcccccccsgccccgccaaaaaagacaaaaattagccaggcatggtggcgcacacttgtaatcccagctaccctggaggctaaggtgggaggatcacttgagccctgga

SEQ ID NO: 356264 - DNA, 201 bp, Homo sapiens
tgggaagccgagacaggtggattgcctgagctcaggagtttgagaccagcctgggcaacatggtgaaacccatctctacccgccccccccgccccgccaawaaagacaaaaattagccaggcatggtggcgcacacttgtaatcccagctaccctggaggctaaggtgggaggatcacttgagccctggaggtcaaggctg

SEQ ID NO: 356265 - DNA, 201 bp, Homo sapiens
cagtactcttgaactaattgctgcctacttctctcccagcctcctgcctgccctatgtcccagagaaaggaaccgttggtgccagtggagaccttgccccrctctctcatcttgctcttgggctagttggagaagggaagatgtggtctccgaagagtggctgggctgatgctaaatacgtaagactcgtagcagcttcta

SEQ ID NO: 356266 - DNA, 201 bp, Homo sapiens
atcacttgagccctggaggtcaaggctgcagggagccatgatcgcaccactgcacaccagcctgagcaacacagtaagaccctgtctcaaaaaagaaaaaragattcttcatgccacaatgcatagggggtctcttaggaacttaaaacttcaaatcgagttctgttaggatctctgagagatagatgttctcagcccaaa

SEQ ID NO: 356267 - DNA, 201 bp, Homo sapiens
ctgcttgcctgctgccaactttggtgctaggagggaggtatacgagaggttagcctttaagagtattcatttgctaaggtcataaaaaataataggaaagsctccttggctgtcagtggcaatcagttaaaaagcagatataaaccaaaaacagggccttaatttcattcaatttaaaaaaaaatttttttagagatgcgg

SEQ ID NO: 356268 - DNA, 201 bp, Homo sapiens
aaggtcataaaaaataataggaaaggctccttggctgtcagtggcaatcagttaaaaagcagatataaaccaaaaacagggccttaatttcattcaatttaaaaaaaaatttttttagagatgcgggtcttgctatgttgccaaggctggactcaaactcctgggctcaagtgatcctcccactttggcttcttgagtagc

SEQ ID NO: 356269 - DNA, 201 bp, Homo sapiens
caagtgatcctcccactttggcttcttgagtagctgggactacaggcacatgccaccatgcccgtccagggccttactttgagatgatgttatgcttaagaaaaaaaaaaaaaaagaaaaaagaggttggtgggtgggaggcaaaagctaaccaaggatctgaggcagtgcctctccaacattaaagtggctatgaatctg

SEQ ID NO: 356270 - DNA, 201 bp, Homo sapiens
gtggaggttgcagtgagctgagatcatgctactgcactccagcctgggcgacagagtgagactctgtctcacaaaaaaagaaaaaaaacaaaaaaacaagaaaaaaaccacataggtactgttaagaccctggagcaactatccttcactctatccacactgaattctctgggttttgttatttgcttgcttgttttgctt

SEQ ID NO: 356271 - DNA, 201 bp, Homo sapiens
ttgctagtgcagatgaatgggcagcttcctgggtaggtgtgcaggtctggtaattattcaggtaaatgtctcaattctccccttctcagcattaaagatayagtcaaggggttagaaaacaggttaaaatggcaactaaataccaaagcaacttcattctaccaatagacagagaacaaaccatctgttagttgggtggtg

SEQ ID NO: 356272 - DNA, 201 bp, Homo sapiens
tctgctgggcatcttgttaaaatgcaggtgtggattcagtaggtctgggtgaaggccaagattctgacttgtcccaggtgatgctgatactgcaggggcayaggccacgctttgagtagcagggtcaaaggaacagagcacctgtggcatggaaataaggcaatagggaaatacaattcactgccttttaccatttaaggc

SEQ ID NO: 356273 - DNA, 201 bp, Homo sapiens; identical to SEQ ID NO: 76234

SEQ ID NO: 356274 - DNA, 201 bp, Homo sapiens
tcataaaagagaaaacaggtatctttttatctttatgttataaatatttttataaacaaacaaaaatccctgcatttaattgcataatgtctctttttatyctagttgtttacggtattactacaggttttgggaaatttgccagaactgtaattcctatcaataagctacagtaagtttaaaacacacatatgttcacgt

SEQ ID NO: 356275 - DNA, 201 bp, Homo sapiens
aatcccagatagtagcactccaaccttaaacccacctgtactttatgggggagtctaaggcacctctgagaattccccagcgtgaactatcagccagaagytggtctgtggatggcactgccatacccgactgacattatttaacagttggaaaaaatgctgctgtcaggaatctgattttatttcagaaaaatgaagcct

SEQ ID NO: 356276 - DNA, 201 bp, Homo sapiens
ggatgggcagcaaggaaagccctcagggtcatcgagcatgtggagcaaggtaatgctgatgagttcggggtggcgggcctgcctgatagaccactgtgccygtggttctcaagtgggatctcccaccagcaacatcagcatcacctggaaacttgttaggaaggcagactctcaggcctccttgcaggctggctaattcag

SEQ ID NO: 356277 - DNA, 201 bp, Homo sapiens
agctcactgcacggcagcagcccttggtaaggacactgcccctttcccagaacacacgcccgtccatctaagggtctttccatttcacctagaagtatcawatgtggtctgtgagtgagatctaacttttcaccacttttatctgcatcctagttctctcagtgcaaaggtaacaggttaactctaatatttttcagaaaa

SEQ ID NO: 356278 - DNA, 201 bp, Homo sapiens
cttgctcttgggctagttggagaagggaagatgtggtctccgaagagtggctgggctgatgctaaatacgtaagactcgtagcagcttctatctgcagcarttgccccaggttggacaccaactgtgcttgcatgcttcgtatcacctagtccttacaacagcccagtgagggagctcctactatccttactttacagatg

SEQ ID NO: 356279 - DNA, 201 bp, Homo sapiens
ggagagtagtccaactacctgagccgagaggagaaggtaatagcaggctgggctacatatgggaaagattggagggagggagggcaattgtcaggagacaraaaggagtttgcttttcttggagaaaacatcaattctgttttgcaggtgttgggaaaccactaagtcctgagaggtgtcggatgctcttggctttaagga

SEQ ID NO: 356280 - DNA, 201 bp, Homo sapiens
aaagaaggcaggaaggggttgtacttgaagtaaccagcaaacgttatcttcaagccttaacctcttttgaaagatggtctttgccaataggggagagacartttctggaggaaacttccatggtgaatacccagccaaagtaagctttttagaactgctcttgacccagaaggcacatttcaatataggctgactaaatgg

SEQ ID NO: 356281 - DNA, 201 bp, Homo sapiens
tcgagcatgtggagcaaggtaatgctgatgagttcggggtggcgggcctgcctgatagaccactgtgcctgtggttctcaagtgggatctcccaccagcarcatcagcatcacctggaaacttgttaggaaggcagactctcaggcctccttgcaggctggctaattcagaaactccaggaggagagcggagcaatctgtg

SEQ ID NO: 356282 - DNA, 201 bp, Homo sapiens
ggcacgagaattgcttgaacccaggaggcagaggttgcagtgagccatgtttgtaccactgcactccagcctgggctggagactctgcctcaaaacaaacmaaccaaccaaccacagggctttatccagctctgtagtggggaaagggggcttggaaaggcattatgcttttgcaccaataagcctcctcttatgcaagat

SEQ ID NO: 356283 - DNA, 201 bp, Homo sapiens; identical to SEQ ID NO: 76228

SEQ ID NO: 356284 - DNA, 201 bp, Homo sapiens; identical to SEQ ID NO: 76229

SEQ ID NO: 356285 - DNA, 201 bp, Homo sapiens
ccatctgaagcagttttaaagcagccatttctatagaattcatgggccaatgatgggccgttccttggtttaacagggggaacatggctgtacaatgtgayctgtaacgagtctcccgtgcattgttttagttatagagggtgatgccatgtctcctgacttcattccatctcaaccagaaggagtttatctgtatccttt

SEQ ID NO: 356286 - DNA, 201 bp, Homo sapiens
aagttggtctgtggatggcactgccatacccgactgacattatttaacagttggaaaaaatgctgctgtcaggaatctgattttatttcagaaaaatgaarcctcttttttggtaactttttgggaatttcttagaaaatggcacgtgttcattgataaggggcagtggagtgtagactgggtgactggcaaaatgaaaag

SEQ ID NO: 356287 - DNA, 201 bp, Homo sapiens
atggggagggaggggaaagatgtcctctggccatttttgttgcccgtggaagtctttaacgtgctcagttctgatcaacattttcctagctcaccccaacwgctgagaagagggtgcagaaatccagggaggtcatagatagcatcataaaagagaaaacaggtatctttttatctttatgttataaatatttttataaac

SEQ ID NO: 356288 - DNA, 201 bp, Homo sapiens
ccctttccctagcatttgtcatcttcaagactagaacaggactcttaagtctgcccttacattcaagcctgcctagaagaaacttggattaagtggtacaygaatatggttagaaaaattgcatgatatcaatgtccatcccaaaggccaattcagtagttctggttggtgcctgggaatctgaaatcgtaatgtccccca

SEQ ID NO: 356289 - DNA, 201 bp, Homo sapiens
cccaggtatctatgccataaagtgatagatattggaggcagggtgtttgcgggggcagtgggggcactcactggcaaagcaaggagagtcagaatgcagtrctcttgaactaattgctgcctacttctctcccagcctcctgcctgccctatgtcccagagaaaggaaccgttggtgccagtggagaccttgccccactct

SEQ ID NO: 356290 - DNA, 201 bp, Homo sapiens
gagaccttgccccactctctcatcttgctcttgggctagttggagaagggaagatgtggtctccgaagagtggctgggctgatgctaaatacgtaagactygtagcagcttctatctgcagcaattgccccaggttggacaccaactgtgcttgcatgcttcgtatcacctagtccttacaacagcccagtgagggagctc

SEQ ID NO: 356291 - DNA, 201 bp, Homo sapiens
cctcttttgaaagatggtctttgccaataggggagagacaatttctggaggaaacttccatggtgaatacccagccaaagtaagctttttagaactgctcytgacccagaaggcacatttcaatataggctgactaaatggagaccctctttcaggccctagactacttggccattggcatccatgaacttgctgcaatca

SEQ ID NO: 356292 - DNA, 201 bp, Homo sapiens
ccctgagcttgcctgtcttcattttgcctactcctagaccgaccccaacacccagaacagaatccagcctctagctgatacttgaatctgtgaaattgacrtagtaaatgggaccagctctgtccttctcttaccttaacttccccttccttctttcctagagagaccttaacttaatgactctctacttcttttctttca

SEQ ID NO: 356293 - DNA, 201 bp, Homo sapiens
tgcctgcatgtcaggaggcagtggtaaaaaaggtgaactgctaaggtagaaactgaacacgaaggacgtagaaaccaaaatttagggttgattctatagamaatggagcccctgatttcagtacaaaaattaattgaaagataagtctgctttcatgactaaagaacagaactagagaatagaccagagaacatgaataca

SEQ ID NO: 356294 - DNA, 201 bp, Homo sapiens
catctataacagtaagaatttaaggaagaaatgcaacctaatgcactaaagattttatgtgcagtctacactccagagctgcattgctgctttgggaatgkggatacttaatgagtgtttcatttgccagatttgtgcttacgagttcacatatgatagcacttattcttcaagggcttaaataaacattactgtcccgca

SEQ ID NO: 356295 - DNA, 201 bp, Homo sapiens
tgaaagcaaaagatacaaaatccacgggtatgtaggttcgttacaataatcacagtaggaaactttgctctctcccccgacagggcctggcactcatcaaygggacgcagatgatcacatccctgggctgtgaagctgtagagcgagccagtgctattgcacggcaggctgacattgtggcagccctgacccttgaggtgc

SEQ ID NO: 356296 - DNA, 201 bp, Homo sapiens
gaaaccagagccaggtgctgctttatagcattgtggctatttctggggtttgtacagcgtagctgccttatgtgtgagcatcttctaatgtgatgccttcrtgcttaatgaactttaccgccttggataatagctaccatttgagtaatctctgcgagtcacatctaagaatttgtttgcattattttatgtacttctcaa

SEQ ID NO: 356297 - DNA, 201 bp, Homo sapiens; identical to SEQ ID NO: 76230

SEQ ID NO: 356298 - DNA, 201 bp, Homo sapiens
gactttgtatatttacagtctttaatgcaaccaaagactaattgacacaggtcatgtgtcaaatggcttaaaataaaagcaagcaaacagcagctgtgtcyggtcatgtatagagtatgttttgacttcggatgaagttgatgtttaatagcatgtggaaacaatgtcgtcaatatttcaactttgttttgtccttgcttt

SEQ ID NO: 356299 - DNA, 201 bp, Homo sapiens
tggagaagggaagatgtggtctccgaagagtggctgggctgatgctaaatacgtaagactcgtagcagcttctatctgcagcaattgccccaggttggacrccaactgtgcttgcatgcttcgtatcacctagtccttacaacagcccagtgagggagctcctactatccttactttacagatgagacagcgaaagcttag

SEQ ID NO: 356300 - DNA, 201 bp, Homo sapiens
cggagttaagtttctaattctgagtggtggctaaggacccctgggacttttgagggctgtgtcagcaccgtagatggtcctgaaccattgatggtcatttrttctaatatcagaattactcgacctggcatggtggctcatgcctgtaatcccagcactttgggaggccaaggtaggaggatcgctagagcccaggagttt

SEQ ID NO: 356301 - DNA, 201 bp, Homo sapiens
aggttggacaccaactgtgcttgcatgcttcgtatcacctagtccttacaacagcccagtgagggagctcctactatccttactttacagatgagacagcraaagcttagaagtcagactaggcaagactgttgttagcttctatactcggctgtcagccttctgggtttggtcatcaccttggtgaaaaggcataactgc

SEQ ID NO: 356302 - DNA, 201 bp, Homo sapiens
aatagtttaaaaacttcgatactgttatgctgaaatataataatacaataataaggctgtaatggacaatttctctgtggaaagcaatttgacattgcatrtgaacttcatctctatagcttttttccaaatctatttgaagactattggaaaaagactaagatggttatagttaatggtgaaacttgaaccaacctataa

SEQ ID NO: 356303 - DNA, 201 bp, Homo sapiens
gagagtgtatcccatgctgtggagcactctgtggaagccacgggtcctttagacagctcatcctatgaggagcacttcttaactggcactggtctcttgcrgtttctgagaacaaggctctgtgccatccctcgtctgttgactccctctccaccagcgcagccacggaggaccacgtctccatgggaggatgggcagcaa

SEQ ID NO: 356304 - DNA, 201 bp, Homo sapiens
tccctgtgattttcacacccattatttctaagcatgccctgcactctggatggggaagctgcttgcctgctgccaactttggtgctaggagggaggtatamgagaggttagcctttaagagtattcatttgctaaggtcataaaaaataataggaaaggctccttggctgtcagtggcaatcagttaaaaagcagatataa

SEQ ID NO: 356305 - DNA, 201 bp, Homo sapiens
accatcaggtgcttggataatgtccaagatcttctggagagtgtatcccatgctgtggagcactctgtggaagccacgggtcctttagacagctcatcctrtgaggagcacttcttaactggcactggtctcttgcagtttctgagaacaaggctctgtgccatccctcgtctgttgactccctctccaccagcgcagcca

SEQ ID NO: 356306 - DNA, 201 bp, Homo sapiens
gactccagcagctagtaagtaacaaagactagactggtactcaaggctgcaggtctgaatccctttgcagtgactgaatcattttgaggttattttgcctktcgaaagaatccacccccacccccagactggaggccggcagcatagcatcagttcagattttgaagaaaataaagctgggaatggggatggaagtggaat

SEQ ID NO: 356307 - DNA, 201 bp, Homo sapiens
gaagggatgcagaaagaatcagctgagcctcagaaaaagaaatgggccaggtggagggatggggttggtatgagaacacatgtcccatgccatggagacastgttgcattcagggaaggaaataaagcctggaactcaaagaatgagttaggatgggcatagtgagatgggaaagactgtcaccaatcagcacccatcaga

SEQ ID NO: 356308 - DNA, 201 bp, Homo sapiens
tcttgcaggaagacttgtctctttccctccacctcacatttgtacacagactgccacctccacgttaaaaaagaaggcaggaaggggttgtacttgaagtraccagcaaacgttatcttcaagccttaacctcttttgaaagatggtctttgccaataggggagagacaatttctggaggaaacttccatggtgaataccc

SEQ ID NO: 356309 - DNA, 201 bp, Homo sapiens
tgcaggctggctaattcagaaactccaggaggagagcggagcaatctgtgtttaacgaaccctccaggtgattctgatcttcactaaagattaagaaccarggaaccatgcagaactaagctggtcctttggctggctttttttttctcttttttttttttttttttttgaggcaggatctctatctgccacccaggctgg

SEQ ID NO: 356310 - DNA, 201 bp, Homo sapiens
acctctcgagttccttgtgaccctcctgtatgctctcctagcaaatgattgttttccactgcaccccacccacttcccacatcctcaagcactgaatgtastattactcagattgccctgagcttgcctgtcttcattttgcctactcctagaccgaccccaacacccagaacagaatccagcctctagctgatacttgaa

SEQ ID NO: 356311 - DNA, 201 bp, Homo sapiens
attgaagttgcttttcggtttcggtcactcttggactcagatcaccacccatcagaaatagcaggtctgaccatgtttatgggagtgacctatttggttaygtgttttgtgaaaagaattggtaacatgatccctgtctcatcccctccacctcttccacagagagtcacaggttctgtgatcgcgtccaggatgcataca

SEQ ID NO: 356312 - DNA, 201 bp, Homo sapiens; identical to SEQ ID NO: 76245

SEQ ID NO: 356313 - DNA, 201 bp, Homo sapiens
ccatgtgtggtggctcacgcctgtaatcccagcactttgggaagctgtggtgggtggatcacttgaggccagaaattcgagaccagcctggccaacatggygaaaccccatctctgctaaaaatacaaaaattagctgggcctggtggcatgcacctgtaatcccagctactcaggaggctgaggcacaagaattgcttga

SEQ ID NO: 356314 - DNA, 201 bp, Homo sapiens
ccaccttgattcaacagcacattcaatttatgaagtacactatgaactctagtgagtgcagacaggtcacagtgggagaggatgaagttgtggaattcackgtggacctggaagcaatttctcatcttctagtccagtatccccaccccgcaattcatatggaattggaaaccacgagatgtaaagcatcttgatgaaatg

SEQ ID NO: 356315 - DNA, 201 bp, Homo sapiens
tcaaaacaaacaaaccaaccaaccacagggctttatccagctctgtagtggggaaagggggcttggaaaggcattatgcttttgcaccaataagcctcctyttatgcaagatgcatttttatttagcatattcatgtttcacgcaatgatcagatctctgaaatgtcagtttggttctgttggaggtgtccctactctggt

SEQ ID NO: 356316 - DNA, 201 bp, Homo sapiens; identical to SEQ ID NO: 171206

SEQ ID NO: 356317 - DNA, 201 bp, Homo sapiens
agcacagtgtgagttatccagttatagtcacaaaaagctagtttctcaaaacagcatttcaagaactaggtgccgaggtgagaagggatgcagaaagaatyagctgagcctcagaaaaagaaatgggccaggtggagggatggggttggtatgagaacacatgtcccatgccatggagacactgttgcattcagggaagga

SEQ ID NO: 356318 - DNA, 201 bp, Homo sapiens
aaacaggtatctttttatctttatgttataaatatttttataaacaaacaaaaatccctgcatttaattgcataatgtctctttttattctagttgtttayggtattactacaggttttgggaaatttgccagaactgtaattcctatcaataagctacagtaagtttaaaacacacatatgttcacgttccacctaccct

SEQ ID NO: 356319 - DNA, 201 bp, Homo sapiens
agtaaatgggaccagctctgtccttctcttaccttaacttccccttccttctttcctagagagaccttaacttaatgactctctacttcttttctttcaasggaagattgttctgcccatcgccccctcgggattctgtctccatctagtagagggaattttataatcccctcttcattggtgctcacacatgtgccacaa

SEQ ID NO: 356320 - DNA, 201 bp, Homo sapiens
atggagaccgtctgaccacggaggatctggtcaacttgggaaagggacgctacaaaataaaggtatggggagggaggggaaagatgtcctctggccatttytgttgcccgtggaagtctttaacgtgctcagttctgatcaacattttcctagctcaccccaacagctgagaagagggtgcagaaatccagggaggtcata

SEQ ID NO: 356321 - DNA, 201 bp, Homo sapiens
aactgggaggagtccagcctgagcacaacacagatgcatgtatgtgtgtcagatgcctgcatgtcaggaggcagtggtaaaaaaggtgaactgctaaggtrgaaactgaacacgaaggacgtagaaaccaaaatttagggttgattctatagaaaatggagcccctgatttcagtacaaaaattaattgaaagataagtct

SEQ ID NO: 356322 - DNA, 201 bp, Homo sapiens
gacttgtctctttccctccacctcacatttgtacacagactgccacctccacgttaaaaaagaaggcaggaaggggttgtacttgaagtaaccagcaaacrttatcttcaagccttaacctcttttgaaagatggtctttgccaataggggagagacaatttctggaggaaacttccatggtgaatacccagccaaagtaa

SEQ ID NO: 356323 - DNA, 201 bp, Homo sapiens
ttgagtgagagcagtttgcattatgcagaggtcagccttttaacacttaccaaagtattgattaaagagttatggcttcctcatcctgaggtttttggcatttttttttttgtttatttttagacggagtctcactctgtctcctaggctggagtgcagtggtgccatctcggctctctgcaacctctgcctcacgggttc

SEQ ID NO: 356324 - DNA, 201 bp, Homo sapiens
aggctggccctgtgcaggcacatgccacgcctctggggatcttaagtcctcacacaaccctgtgagatgggtaggattctcctccacctctgatggaggaraaatcagagaggaggtaacttacccagactccagcagctagtaagtaacaaagactagactggtactcaaggctgcaggtctgaatccctttgcagtgac

SEQ ID NO: 356325 - DNA, 201 bp, Homo sapiens
aatttttaaattttttgtaaagatggggtcttgctgtgttgccttggctggtctcaaactcttggcctcaagcgatcctcccacctcacccccaaagtggtttttttttttaatgagacttttaaaacatattcaaagtggagagaagagtaccatgaactctcacaccccaccttgattcaacagcacattcaatttatg

SEQ ID NO: 356326 - DNA, 201 bp, Homo sapiens
tccaaattgggtgtacatgatccacctttaaggctttttgttttttgcttttgtgcccctttatatctcttgcaggaagacttgtctctttccctccaccycacatttgtacacagactgccacctccacgttaaaaaagaaggcaggaaggggttgtacttgaagtaaccagcaaacgttatcttcaagccttaacctct

SEQ ID NO: 356327 - DNA, 201 bp, Homo sapiens
ggtgctcttcgctccagtttggggaatgctggattctttcagcccctgcagccctccaggtcaaaatgacactttgtcactgagttttctacacagctctrttagtaactgacagcacacgccttcaagggaacttcaagggaaacatggaataaactaagtctcaattgccttatggtgtcgctttattcttaggtattt

SEQ ID NO: 356328 - DNA, 201 bp, Homo sapiens
cagaaaaccttactggtgacaggaagtagttgctcaatacatgtttgtggaataaacaaatgagtgacgattgccacactcccagtgtcacagttggcccrcagaacacgttttacagttgagtaatctcagataaagacaggaacatggtgtttataagctgcccttaatggcagagaacacagacagaaacgagggaag

SEQ ID NO: 356329 - DNA, 201 bp, Homo sapiens; identical to SEQ ID NO: 76235

SEQ ID NO: 356330 - DNA, 201 bp, Homo sapiens
cccagcactttgggaggccgaggtgggttgatcacgaggtcaggagtttgagaccagcctggctaacacggtgaaaccccatatctactaaaaatataaamaattagcgtggtggcacgcgcctgtaatcccagctactcgggaggctgaggcaggagaattgcttgaactgggaggcacaggttgcagtgagccgagatc

SEQ ID NO: 356331 - DNA, 201 bp, Homo sapiens
gcgggagaattgcttgaacccaggaggcggaggttgcagtgagctgagattgcactactgcacccagcctggctacagagcaagactccgtctcaaaaataacaaacaaacaaaacaatttaatggaacttcatggattcgttgttgctatttgttaaatctttccctctctgcccattctccttagcttggggctgaact

SEQ ID NO: 356332 - DNA, 201 bp, Homo sapiens
gggagaattgcttgaacccaggaggcggaggttgcagtgagctgagattgcactactgcacccagcctggctacagagcaagactccgtctcaaaaataacaaacaaacaaaacaatttaatggaacttcatggattcgttgttgctatttgttaaatctttccctctctgcccattctccttagcttggggctgaactgg

SEQ ID NO: 356333 - DNA, 201 bp, Homo sapiens
gtcccctctatcttgatccctttccaaagagcaaatctactgacagaccctaaacaacagggtagaccaagttttcaagatctcttcatctgtctggtatytttcgtagatttccagatttctgctctgtttacctggactttggccgggttgtgccctctggcatgtgtttgtgtttttctgctcggcttctgattttca

SEQ ID NO: 356334 - DNA, 201 bp, Homo sapiens
catctgtctggtatctttcgtagatttccagatttctgctctgtttacctggactttggccgggttgtgccctctggcatgtgtttgtgtttttctgctcsgcttctgattttcaacttgctcccaactctggcttctcactttggttctgattcattccctctctgatttctcatgccgactggctcccaaaagcttaaa

SEQ ID NO: 356335 - DNA, 201 bp, Homo sapiens
tcctggccaacatggtgaaaccccatctctactaaaaatacaaaagttagctgggcatggtggcacacgcctgtggccctagctgctcgggaggctgaggygggagaattgcttgaacccaggaggcggaggttgcagtgagctgagattgcactactgcacccagcctggctacagagcaagactccgtctcaaaaataa

SEQ ID NO: 356336 - DNA, 201 bp, Homo sapiens
gcattttatttgtccagagttccttttggtcctggaatttctaaataggaaggctcatggttccaacagccaactgaactatctaaaagaaatccaggacytgaacatgcataaggtgcctccaaagtcttagtgtggtcttaaacattgataacttaaatagataaatataatactacagacttacaatcattatttaaa

SEQ ID NO: 356337 - DNA, 201 bp, Homo sapiens
ttggttggcaagaaatcttaataataaaacgctgtttctctttatgggaaaaacaatttaggccatgctcggtggctcacgcctgtaatcctagcactttkggagtccgaggcaggcggatcacgaggtcaagagatccagactatcctggccaacatggtgaaaccccatctctactaaaaatacaaaagttagctgggc

SEQ ID NO: 356338 - DNA, 201 bp, Homo sapiens
ttcaacttgctcccaactctggcttctcactttggttctgattcattccctctctgatttctcatgccgactggctcccaaaagcttaaacttagttttcytgttcctggtgacttatcactcacccacccatagtctgttgccacctgggcctccagtgtaatattagtctgttatcacactgctaataaagacataccg

SEQ ID NO: 356339 - DNA, 201 bp, Homo sapiens
gttttctgtttcagaaaatgtctgaaggatttgtgtttaagaatagtttttgaagtagcccactagctaattttcaaatgagtgcccattacaaacccttyacccatttgggggattgggcttacaacggttggttggcaagaaatcttaataataaaacgctgtttctctttatgggaaaaacaatttaggccatgctcg

SEQ ID NO: 356340 - DNA, 201 bp, Homo sapiens
gcttaagcccgggaggcggaggttgcagtgagccgagattgtgccactgtaccccagcctgggcgacagagcaaaactctatctcaaaaaatatatatatwtttttttaattgacaaataatatatttatcatgtagagcatgttgttttaaaatatgtataccttgtgaaatggctaaatcgaactaattaatatatgca

SEQ ID NO: 356341 - DNA, 201 bp, Homo sapiens
actgtgttgcccaggctggtcttgaactcctgggctcaagccatccacctggtttggcctcccagtgctgagattacaggcgtgaaccaccacgcccagcytgactggtttatttttaattaagggatgaaaacattcccaatttactatgaaaatattatttaaaattttgcttagaaagttgaaaaatatgtacctggg

SEQ ID NO: 356342 - DNA, 201 bp, Homo sapiens; identical to SEQ ID NO: 76254

SEQ ID NO: 356343 - DNA, 201 bp, Homo sapiens
tgcccactaatgtctccctctctttccttccccacattcccattccaaatcgctatctctagtagcttttgaaagggctccaaggaatagtttgaaaattrccattcattggagtaaagcttggaaaaatatgttactaatcacaaaaataaaataccttaatttttctgttataaactgagacttattaagaatcacaaa

SEQ ID NO: 356344 - DNA, 201 bp, Homo sapiens
tgactgggtgtaaataaatgtgtagggaatgcattttaaaattagcatttattgataaagtaataatttttacttgcacacattgaagtaatatttgttgttttttttttttttttctagatgggagcatttgatttaccagttcggaggccatcatgaattaattgaatatgttatagctaaaggaaaactcatctataa

SEQ ID NO: 356345 - DNA, 201 bp, Homo sapiens
aggggctgcgtgcggcgcttgcgggccacctggagttccgggtgggcgtgggcttagcaggccccgcactcggagcagccggccagccctgctggccccgsgcaatgggggacttagcacgcgggccagtggctgcggagggtgtactgagtcccccagcagtgctggcccaccagcgctgtgctcgatttctcgccgggc

SEQ ID NO: 356346 - DNA, 201 bp, Homo sapiens
catgggctcctgtgcggcccgagcctccctgacgagcatcacccctgctccacggcgcccagtcccatcgaccacccaagggctgaggaatgcgagcccayggcgcaggactggcaggcagctccacctgcagccccggtgcgggatccactaggtgaagccagctgggctcctgagtctggtggggacttggagagtctt

SEQ ID NO: 356347 - DNA, 201 bp, Homo sapiens
gactgggtgtaaataaatgtgtagggaatgcattttaaaattagcatttattgataaagtaataatttttacttgcacacattgaagtaatatttgttgttttttttttttttttctagatgggagcatttgatttaccagttcggaggccatcatgaattaattgaatatgttatagctaaaggaaaactcatctataaa

SEQ ID NO: 356348 - DNA, 201 bp, Homo sapiens
tgccggtggcccgagcccggtggcctcccggcgaccctcggcgcgaggcgacatggcaggcggccacagcctcctgctggagaacgcgcagcaagtggtgytggtgtgcgcccgcggcgagcgcttcctggcgcgggatgcgctgcgcagcctggcggtgctggaaggcgccagcctggtggtgggcaagtaagtggccgg

SEQ ID NO: 356349 - DNA, 201 bp, Homo sapiens
attggaacgcatcagggtcctgcctctgctggtaaaatatcactgtccaaccatcagaaggggttgaggtcctccccagtgcttcttaaagggaggccagragaccacctttgtcagggtggcctgtggttattttattcttacggcagatttctgattccacctgcgtcccccactccctatccctagaattttagaatc

SEQ ID NO: 356350 - DNA, 201 bp, Homo sapiens
gaggcaggtggatcacctgaggttgggagctcgagatcagcctggccaacatgatgaaaccccatctctactaaaaatacaaacattagccgggcatggcrgcgcacgtctgtaatcccagctactcgggaggctgacgcaggagaatcgcttgaacccgggaggcggaggttgcagtgagctgagatctcgccactgcac

SEQ ID NO: 356351 - DNA, 201 bp, Homo sapiens
taatcccagcactttgggaggctgagtcaggcagatcattggaggctgaggcaggcagatcgtttaagcccaggagttcaagaccaacctgggcaacatgrcaaattttagcttgtgtggtggtgcatgactatagtcccagctactagggaggctgaggtgggaggattgcttgagcctgggaggtcaaggctgtaggga

SEQ ID NO: 356352 - DNA, 201 bp, Homo sapiens
ttgggaggccaaggcaggtggatcgcttgagctcaggagtttgagaccaacctggccaacatggtgaaaccccatctctactaaaaatacaaaaattagcsaggcgtggtggcccatgcctgtaatcccagctactcaggaggctgaggcacgagaatcgcttaagcccgggaggcggaggttgcagtgagccgagattgt

SEQ ID NO: 356353 - DNA, 201 bp, Homo sapiens
tctactataaaacaagaccaatttttaggttttagaaactgagacagtgtatgtgccaattctaaattttcacaaagcaccctgagagccactcaaagaarcatcatcctccttaaatcatcatcattactgttttcattataattatactttagctcctaaagtagggtcttgcttgctaatttgctttactttcagaag

SEQ ID NO: 356354 - DNA, 201 bp, Homo sapiens
gtaggtcgtttaaaattacacatattaatttgaataatttcccatgataattaattagcatttctaaaagcactttagaagttaatagtaatgctctttargaggtagctcaaaccttgtggtctaggtgactcaaacgggttcgtttttgttcatctgcttgctttcttaacagcaaacatttttgttttgttgttgtaa

SEQ ID NO: 356355 - DNA, 201 bp, Homo sapiens
taagcctttgttcaaacataggtacatccacagatgaatgagagaaccacactgttgaaaggtagataagcatgggattagtggggtcaggaagaggaccyagtgccctcaaaattcacctcctgcacagacggagaatgttagagatttatttcttaggtttgactttgttaaaacaacctctcttaaagcagtgtcagt

SEQ ID NO: 356356 - DNA, 201 bp, Homo sapiens
gggattacaggcgtgagccaccgcgccaggcctcactgccctaagatcccaacaggccacccaccacatctcccatctctaccactccagtctcttcccargaccccttcggagctccccacaatccagtgtctggcagactaggggcttccaggactgtgtatcccagcacctttctaatctgatgggttggtgcccatg

SEQ ID NO: 356357 - DNA, 201 bp, Homo sapiens
agattaacttccatggggatgaactccacccgatgaaggctgctgaggtgtggttgacttttagtttttccctcgtcaacattcattcttgcacattcatsctatgggaaacttaattagtttcttcaaagccctctgaaaagatattgaatggggaaatttgtttgaacaatgtacagattggtctggttgagacttgaa

SEQ ID NO: 356358 - DNA, 201 bp, Homo sapiens
gcacacgatcaatgagtctcacaaactgaccacggcttatctgaggcagtttagggttgtgcaagagcccagcttttaagggactgtgggttggtttaattttatttatttatttatttatttatttatttatttatttatttatttatttttgagacgcatgagccactgcgcccagcctattttttgtttttttgagac

SEQ ID NO: 356359 - DNA, 201 bp, Homo sapiens
gagacctaaataaacaagcccttggggcataaatacagacatagataccccacctgcatgcctcttaactggcttatatccagcttgatctcttcgtattkcttccaagtcttgtcccattttctgcttcagtaaatgacgccatcacctgtctgttgcttaagtcaaaatcttggatatcattttgactgctgcctctcc

SEQ ID NO: 356360 - DNA, 201 bp, Homo sapiens
ataaaagctgttagtgatgaagaattgtcttaatcaggatactaaattctatttcaagacttaatttcttattccaccctaagtttatcctccccaaatcycccacaatcattatttcttttcctatcataacatcttctctttccatccagtttcttctgctcttccactcttacattttgttaggttaccccaaccact

SEQ ID NO: 356361 - DNA, 201 bp, Homo sapiens
acatcttctctttccatccagtttcttctgctcttccactcttacattttgttaggttaccccaaccacttctgtcccagttcggaatcccttatcctaaytgcttttcacaacacattccagctctcaggtttatagccctcaatctccatgttggaaatacaaatttgttgtaagtgaccaagacctaaattaatagtg

SEQ ID NO: 356362 - DNA, 201 bp, Homo sapiens
cacacgatcaatgagtctcacaaactgaccacggcttatctgaggcagtttagggttgtgcaagagcccagcttttaagggactgtgggttggtttaattttatttatttatttatttatttatttatttatttatttatttatttatttttgagacgcatgagccactgcgcccagcctattttttgtttttttgagaca

SEQ ID NO: 356363 - DNA, 201 bp, Homo sapiens
tagatttcagtctttaacccatttagatttgatttcattcttttgcatatggatagccagtttccctagcaccatttattgaagagactgtcttttccccratgtacgttcttggcatctttgctgaaaatgagttcactgtagatgtatggacttatttctgggttcactattctgttccactggtctatgtgtctgttt

SEQ ID NO: 356364 - DNA, 201 bp, Homo sapiens
acacgatcaatgagtctcacaaactgaccacggcttatctgaggcagtttagggttgtgcaagagcccagcttttaagggactgtgggttggtttaattttatttatttatttatttatttatttatttatttatttatttatttatttttgagacgcatgagccactgcgcccagcctattttttgtttttttgagacag

SEQ ID NO: 356365 - DNA, 201 bp, Homo sapiens; identical to SEQ ID NO: 76251

SEQ ID NO: 356366 - DNA, 201 bp, Homo sapiens
cacgatcaatgagtctcacaaactgaccacggcttatctgaggcagtttagggttgtgcaagagcccagcttttaagggactgtgggttggtttaattttatttatttatttatttatttatttatttatttatttatttatttatttttgagacgcatgagccactgcgcccagcctattttttgtttttttgagacagg

SEQ ID NO: 356367 - DNA, 201 bp, Homo sapiens
gtgagtgtgtatagggagaggggtactgattaaaagcacagagaagtggaagaaagttccatttcaaagcccagaattggatggattttaacagtgtgtgttttttttttcccaacaagtatatacataccatggtgtgtcctgattagaatgaatctcagtaagatcaactaatagttaatcccctatatgctatagata

SEQ ID NO: 356368 - DNA, 201 bp, Homo sapiens
ctgcaacctccgcctccctggctcaagcaattctcttgcctcagcctcctgagtaactgggattacagatgcatgccaccatgccccgataatttttgtayttttagtagagacggggttttgccattttggccaggctggtctcaaactcctgacctcaagtgatctgcccatctcggcctcccaaagtgctgggattac

SEQ ID NO: 356369 - DNA, 201 bp, Homo sapiens
ccaaaaccatttgtaagttatattttcctccctttgcaagaatgccttaatatgtaaaaagatggatgagataaacaatcattaattaaatgttagtcatrtctaagtaactgcaaaagcagaatgataaaaatcaggagtcctgggattatatatgtaactctaccactaatcatttaatcttgagtttctgcttcttct

SEQ ID NO: 356370 - DNA, 201 bp, Homo sapiens
tattaaaaacttacttttttgctgatgatttactttcattatcatccactggtgatattagtattaatagcaaaagaattggctgggcgcggtagctcacrcctgtaatcccagcactttgggaggccgaggtgggttgatcacgaggtcaggagtttgagaccagcctggctaacacggtgaaaccccatatctactaaa

SEQ ID NO: 356371 - DNA, 201 bp, Homo sapiens
tgaacccaggaggcggaggttgcagtgagctgagattgcactactgcacccagcctggctacagagcaagactccgtctcaaaaataacaaacaaacaaarcaatttaatggaacttcatggattcgttgttgctatttgttaaatctttccctctctgcccattctccttagcttggggctgaactgggagcgcaggcaa

SEQ ID NO: 356372 - DNA, 201 bp, Homo sapiens
gcctccccagttgctgggattataggcatgaggtaccatgcccaactccaccagaattttagagagaatttcacagcctcctactatcctcctcccccatwcccccagatagtgagacagaaagctaaggcaggtgcttcaggaaacattgtggaggaagaaaaaggcagggtgatagctggactcaggtaaggggaccac

SEQ ID NO: 356373 - DNA, 201 bp, Homo sapiens
ctgaattgcctaagctttgttttctcaaacaagctgagggatggagggagggctgatacttagcaagtacacattgcgggttgattgacttgttaaaataytgcaatactcctgtgccagttttgttttgttttgttttgtttgtttgtttgttttttgagatagagtctcgctctgtcacccaggctggagtgcagtggt

SEQ ID NO: 356374 - DNA, 201 bp, Homo sapiens
gcaaacagggagatctcattatcatcaattcatcccggtgagtgtgcttcaacttagctcttttatattatgcccactgaagtatgcagatgaggcctaawtcccttttccactaattattagtgtcagactctgtctggactcagacactatccagtcccctctatcttgatccctttccaaagagcaaatctactgaca

SEQ ID NO: 356375 - DNA, 201 bp, Homo sapiens
aaccacttctgtcccagttcggaatcccttatcctaactgcttttcacaacacattccagctctcaggtttatagccctcaatctccatgttggaaatacraatttgttgtaagtgaccaagacctaaattaatagtggctgaaacaagatggaagtatatttctctcctatgtgaaaatccagacatacgaatgcagggc

SEQ ID NO: 356376 - DNA, 201 bp, Homo sapiens
gtgtgtgtgtgtgtgtgtgtgtgtgtgtgtgtgtgtagattgcagttaatcttgaagaggctcccaggtgtggaaaagaagcacaaactgtcatccagttkacaattgtcccatccaaaggctaaaacctagatgaaaatgtctaaatgaacaaaacaaacaggaattaaaatatagattcatacacaaggaccatttgtt

SEQ ID NO: 356377 - DNA, 201 bp, Homo sapiens
ccgccccaccctcccagccccggacagcgcaggctgcggcttttcgtcctccactgagtcctgccggtggcccgagcccggtggcctcccggcgaccctcrgcgcgaggcgacatggcaggcggccacagcctcctgctggagaacgcgcagcaagtggtgctggtgtgcgcccgcggcgagcgcttcctggcgcgggatg

SEQ ID NO: 356378 - DNA, 201 bp, Homo sapiens
tctcattcttaaattaagttctctctctctttctctgtgtgtgtgtgtgtgtgtgtgtgtgtgtgtgtgtgtagattgcagttaatcttgaagaggctccyaggtgtggaaaagaagcacaaactgtcatccagttgacaattgtcccatccaaaggctaaaacctagatgaaaatgtctaaatgaacaaaacaaacagga

SEQ ID NO: 356379 - DNA, 201 bp, Homo sapiens; identical to SEQ ID NO: 76255

SEQ ID NO: 356380 - DNA, 201 bp, Homo sapiens
gtggtagagctctgtgtctaccagactctaaaagcccaggcttttctaacatataactactgcagaactttattttatctactcttcttattgttaatttwtttttagagacagggtcttgctctgctgcccatgctggagtgcagtggtgcaatcatagctcactgcagcctcaaactcctgggctcaagcaatcctctt

SEQ ID NO: 356381 - DNA, 201 bp, Homo sapiens
agtgattgtctgccatagggtgtaaattccaccattgtgttcattcatttaggtctctaaaggtatctcattcttaaattaagttctctctctctttctctgtgtgtgtgtgtgtgtgtgtgtgtgtgtgtgtgtgtagattgcagttaatcttgaagaggctcccaggtgtggaaaagaagcacaaactgtcatccagtt

SEQ ID NO: 356382 - DNA, 201 bp, Homo sapiens
cagcctggccaacatgatgaaaccccatctctactaaaaatacaaacattagccgggcatggcagcgcacgtctgtaatcccagctactcgggaggctgasgcaggagaatcgcttgaacccgggaggcggaggttgcagtgagctgagatctcgccactgcactccagcctgggtgacagagcgagactctgtctcaaaa

SEQ ID NO: 356383 - DNA, 201 bp, Homo sapiens
tgaggcaggagaattgcttgaacccagaaggtagaagttggagtgagccgagatcgtgccactgcactccagcctgggcaagagacagagattccatctcaaaaaaaaaaaaaaaaaaagcatagtgtaacctcatttattatttaatttgggagtcaccaaaaagcttattaaattccaaaaccatttgtaagttatatt

SEQ ID NO: 356384 - DNA, 201 bp, Homo sapiens
tggtgttgtttttattttcacttactatcatcactgtcttatatattaggttggtgcaaaaatcaagtatagaattggaataattatctggttatttgagrtgctttgaaatatatctcccacctcattatctgaatgttttaaggtaaaagtgttttcagggtgaattatttaggtgattgtcttaaattttcacatcac

SEQ ID NO: 356385 - DNA, 201 bp, Homo sapiens
ccacctgggcctccagtgtaatattagtctgttatcacactgctaataaagacataccgagactgggtaatttataaaggaaagaggtttaatcgactcayagttctacatggctggggaggcctcacaatcatggcggaaagcaaaggaggagcaatgtcatgtcttaaatggcagcaggcaagagagcgtgtgcagggg

SEQ ID NO: 356386 - DNA, 201 bp, Homo sapiens
aaagaggtttaatcgactcatagttctacatggctggggaggcctcacaatcatggcggaaagcaaaggaggagcaatgtcatgtcttaaatggcagcagkcaagagagcgtgtgcaggggaactcccattcataaaaacatcaaatcttgtgagatttattcactatcatgagaacagcatgggaaagacccactcccat

SEQ ID NO: 356387 - DNA, 201 bp, Homo sapiens
tctcaaaaaatatatatatttttttttaattgacaaataatatatttatcatgtagagcatgttgttttaaaatatgtataccttgtgaaatggctaaatygaactaattaatatatgcattactttacatacttatcactttttgtggtgagaacacttaaaatctattttttaacaatttttaggaaaacaatacatta

SEQ ID NO: 356388 - DNA, 201 bp, Homo sapiens
aaaattaacttcatgttatcttcaatcagaggaactaaaaaagtaacattaaaatttattattcaaaattaacaaaactagttgtgtagaaaagacataawtatttaatatttccagtgatctttgttgtaagtttttagcatttatatttctgaaattattaaagctcaaaatttcactgagactcttgagacattctct

SEQ ID NO: 356389 - DNA, 201 bp, Homo sapiens
ctcagtgattgtctgccatagggtgtaaattccaccattgtgttcattcatttaggtctctaaaggtatctcattcttaaattaagttctctctctctttytctgtgtgtgtgtgtgtgtgtgtgtgtgtgtgtgtgtgtagattgcagttaatcttgaagaggctcccaggtgtggaaaagaagcacaaactgtcatcca

SEQ ID NO: 356390 - DNA, 201 bp, Homo sapiens
gtgattgtctgccatagggtgtaaattccaccattgtgttcattcatttaggtctctaaaggtatctcattcttaaattaagttctctctctctttctctgtgtgtgtgtgtgtgtgtgtgtgtgtgtgtgtgtgtagattgcagttaatcttgaagaggctcccaggtgtggaaaagaagcacaaactgtcatccagttg

SEQ ID NO: 356391 - DNA, 201 bp, Homo sapiens
tgagaatatgccaagtttgtctttctgtgcctggcttatttcacttaacataatgtcctccagttctatccatgttgttgcaattgacagaatctcactcttttttatggctgaatagtactccattgtgtgtatgtattacattttctttatccattcatttgtgggtgggcacttagtgtacttccaaatcttggctat

SEQ ID NO: 356392 - DNA, 201 bp, Homo sapiens
gagatggatttataaaagctattggtcctgctgatgttattcaaagacagttttctggagaaacttttgaagaaataattgactgctctgggaaatgtatyctaccaggtatttacctctttttcagtaaaggtctacaagtagctttaacagttgctcctgaaatgtaaagaggaagagtaacagcttattttaaagtct

SEQ ID NO: 356393 - DNA, 201 bp, Homo sapiens
  misc_feature (1)...(201): n = A,T,C or G
cccacaatatctccgaggtatgcctgtataatcatcatcatgattttatgaatatttatatatagatgcatatttgcctttgtatatgtaggaataatttncagactacctaaaacacatgaatgaggatgatggctattaccttaaatttttaaacaaagaagctgagtgaggcatgtattttggcaggcttattcaaga

SEQ ID NO: 356394 - DNA, 201 bp, Homo sapiens
tagcaatgaggaacaatttcaataatgagctatgtagcactctgatagcatgacagaattatttttatgttcttaaaagggaaaggagaataaaataaaascagattagcaagagtgattcaagttgtaacaatcaaagaaccaaaaaaagaagctacagttaacttgctgaggaatagaaagggtcagacaatggaagac

SEQ ID NO: 356395 - DNA, 201 bp, Homo sapiens
cagcacaaaaactaagcttttattttagcaaacccaagctactttttgtcacatgccatttgcttaataccgagagttaaaaaaataattcttcccagtcrtaatttcattatagcagttgacacacaggcacagccgccacccaccagctttcttggacaccgatatgtttcactgagaggaaatttctggcctgtgtga

SEQ ID NO: 356396 - DNA, 201 bp, Homo sapiens
aaaggggctctgtttgcttcactttaccatccacagggcctagaacaggccctgactgtcagtcactcagtaagtcattatgggctcgataaaaatgagtwgtcataaacagagctgcttccctccattcactaatttgtttcgccctctgcctctgtatgtgtgtaggcatatgtattagtggcaaagccttccaaaaaa

SEQ ID NO: 356397 - DNA, 201 bp, Homo sapiens
agagactgagggattatttgtcctgaaattagtatcttaagtccccttgtgaacaggagctgtccaacaaatatgtgggcccagtttttgaaagaagaggycttattctcagcatcttttactcttacaaataattaatattataaagtcctgcctaaacatgaagagaatagacaagatgtttagctttgagataaactt

SEQ ID NO: 356398 - DNA, 201 bp, Homo sapiens
ctttcaatttaacacaggataccacagaggggcccttcttttctgggatcttcaaagttactcgaagcttcttaaatgcttatttttaaagaagctggggraaatgaatgacagcccgagtttcaagaactggaagtgatatttcagagctcactgtaggatatatacctgtgggagaacaagactgctcaaaatcagttt

SEQ ID NO: 356399 - DNA, 201 bp, Homo sapiens
agcctcagtcttcttggctccacctccctgattaatttaggggaggatgctgggaacctaggagagagcatggtgctgaaagtaggtagaaaaaaagaatytaagaaaaaacgacatggagggagaaaaataaataagtaaagccacaaccacttcattaatcttatcattgtcttggcttctggctggccttgcctcctg

SEQ ID NO: 356400 - DNA, 201 bp, Homo sapiens
ctgtgtctaaatttgagaatgtgtgtaaaaagtataattttgtagacttctaggagacacacatctgttcctgtaaaaaaaaaaaaaaaaaaagaaaaaargactaatgttcagccaagagagggtgatccaggaaggaggtttctcttccaggtcctaaagcatcacctggttacttctatgcagcctgcaatgagtgag

SEQ ID NO: 356401 - DNA, 201 bp, Homo sapiens
ggcctttgggttcttaacctaatataataaacagataattcaaataaaaagacagcacgggccagtgggaacaagggaaagaggccaaaaaagacaaaaamtccatactctactaaaatatattaataaaacaaaggagggcctgctctcttttctagtgaatgaaaaatgcatttaatttaatctgtttactttgagaaa

SEQ ID NO: 356402 - DNA, 201 bp, Homo sapiens
cacactggagctctgactactcctggaactgatcatctctactaatcaccaagattcctgccatcagttggcctctttaggaggggccattcatgcttctsctaaagaaatgtatgcttcttgtctttcctcggagggcctcaaaaggcctcagtaccccatcagccctcaccattgctctgtgcggaagtgaccagtatt

SEQ ID NO: 356403 - DNA, 201 bp, Homo sapiens
ccatcagttggcctctttaggaggggccattcatgcttctgctaaagaaatgtatgcttcttgtctttcctcggagggcctcaaaaggcctcagtaccccrtcagccctcaccattgctctgtgcggaagtgaccagtattaatatgtttaatatcttggtttattaaccacagattgcgtgactacagtcttcttgcaaa

SEQ ID NO: 356404 - DNA, 201 bp, Homo sapiens
taggaacgctaaatagcttgaagtattactctagttaaaagactaaaacttgttagaaaacattcagtagatgtatttaatttccccttatagaatcatgyaaagttgttttccgattgagctcatttttaattatttttaaagtcaagtagtttgtttttgcataatgtatgagtgtttctctaaatcaaatgaagtctt

SEQ ID NO: 356405 - DNA, 201 bp, Homo sapiens
ctggttagggacatctgcagcaactcatgagcaactgagtaattaggacacagagaaaagtaatgtcgtaggctgctacaaattaactgggagataggttaaaaaaaaaaaaaaagctggccagcacaattatcatctgcggttctgaaaaaagaaggtgttgtacaaaatataattatgtgatgaatcatttggaggcat

SEQ ID NO: 356406 - DNA, 201 bp, Homo sapiens
ggcacccgccaccacgcccagctaatttttgttatttttagtagagacggggtttcactgtgttagccaggatggtcttgatcgcctgacctcgtgatccrcccacctcggcctcccaaagtgctgggattacaggcgtgagccaccgcgctcggcttgagctaccttttcttagctgacagctattggaagcaaaaattt

SEQ ID NO: 356407 - DNA, 201 bp, Homo sapiens
ccctccattcttatccaggccatctctttaagtgaccatttccccatgcagccttatttaaagaacaaaaactcaaaatctggttttgggacacttgttcmatgtcatgtcccctaattagcctaagataattttcaatatcaggccattgatcaggtttagttgagctaccttttcttttattttttatttttatttatt

SEQ ID NO: 356408 - DNA, 201 bp, Homo sapiens
ggggactactgtatactaaaatgtggaaaggaataaacagaaaatagagtggctgaaagagaacaaaaacaatatctctcctggtatctatcatttacatyatatacatacatatcagcatgtataatgtacagtattctagaataatgctttccgatttcttaagaagttatatatacttgtttcttttagaattatttc

SEQ ID NO: 356409 - DNA, 201 bp, Homo sapiens
acttttacacattaggtaggcttatcattaagaagaaatatttcttcttttatttcttcttatttgctattgtattaatccaggattcccttaacaaaaayaaaataaaaaccaggacaataagagtgatcatttattgaggaggtaatatattttctaaacaccagtctttatcttttcacagagagaaattctcctttt

SEQ ID NO: 356410 - DNA, 201 bp, Homo sapiens
ctaagtaaaatgcaggagcacaaccaataaggcgcctgccacttcctcagtgggaagcgtcataagtagtactttccatttgaagctgatgtcttaaaatmtctttgtttctaagtacttttgttttgaaagatctgggagggggcggggagtggaaggggagggggaagaatgggcaggaggggatttcccaagaaggcc

SEQ ID NO: 356411 - DNA, 201 bp, Homo sapiens
tttggaaagagcagcatcagacacagaatcctcaggccagacgatgctgggttcttaagcttgttctcttcatttagaatttagacaccaccaagtcccasaattagaaagctccatttacttcttaagaatatacagaaggtacatttagttccataaataatggcttatttcaatccaccagaaataacacatgcaaat

SEQ ID NO: 356412 - DNA, 201 bp, Homo sapiens
tatagtacataccaccacctggcatgttaaatatttatatttgcttgattgtttactgtctatctctccacactagaatggaagctctatgagaaaagggsctctgtttgcttcactttaccatccacagggcctagaacaggccctgactgtcagtcactcagtaagtcattatgggctcgataaaaatgagttgtcata

SEQ ID NO: 356413 - DNA, 201 bp, Homo sapiens
gcaatgaattctcatttcacacacgaatctgatcccaatggcagttatcaactggccacccagcgggagtttcatttgcaggaaaagcatcggtatgttgktgtctagctgtgactgctggcttcccaacagatttggaaagagcagcatcagacacagaatcctcaggccagacgatgctgggttcttaagcttgttctc

SEQ ID NO: 356414 - DNA, 201 bp, Homo sapiens
ctcacaacctgtatagactttatgatagtcataggccctgctacttctcactgtgggtgcagaagaaaagaagatatcaactgggaaattatctatacccygggcaatgaattctcatttcacacacgaatctgatcccaatggcagttatcaactggccacccagcgggagtttcatttgcaggaaaagcatcggtatgt

SEQ ID NO: 356415 - DNA, 201 bp, Homo sapiens
agtaatatctgagaaatgctatggtcatactatcatttgtgctggtgaaattgaagaatgtgtgatagaagtcaacttttgaagtgagttgtaaggcatgmgtagaaaattttgcaaatcagaaaagggagtgatagcaggaactcaggtgacaaagaaaagaggttgcatagaagatagcatttctaaataaatctgctc

SEQ ID NO: 356416 - DNA, 201 bp, Homo sapiens
gacccaagtcgtattggatataagggcccataccactccagcatgacctcatcttagctttattcattatgtctgcaaccctatttctaaataaggtcacrtcctaagtactgaggttaggactttaacatatcaatgggggacacactcaacccacagcatcactctattcagaaaagtctgggctcacgcctgttatcc

SEQ ID NO: 356417 - DNA, 201 bp, Homo sapiens
ggccaaggagggcagattgcctgagctcaggagtttgagaccagcctgggcagcatgatgaaaccccatctctactaaaaattagctgggcatggtggcgygtgcctgtaatcccagctacttagaggctgaggcagaagaattgcttgaacccgagaggcagagtttgcagttagctgagatcgcgccattgcactctgg

SEQ ID NO: 356418 - DNA, 201 bp, Homo sapiens
ttctatcacagtctgagttttttttattgtatttgtaaagtcaggtcttcataacaaggatgctatgtttctgtgtcctcttcttataaagacccaagtcrtattggatataagggcccataccactccagcatgacctcatcttagctttattcattatgtctgcaaccctatttctaaataaggtcacgtcctaagtac

SEQ ID NO: 356419 - DNA, 201 bp, Homo sapiens
cagcactttgggaggccaaggagggcagattgcctgagctcaggagtttgagaccagcctgggcagcatgatgaaaccccatctctactaaaaattagctkggcatggtggcgtgtgcctgtaatcccagctacttagaggctgaggcagaagaattgcttgaacccgagaggcagagtttgcagttagctgagatcgcgc

SEQ ID NO: 356420 - DNA, 201 bp, Homo sapiens
gccattttgtcagcactctgctgctagctgctacaagtacatagccccaacgttctacttatctctgtgaataaagccaaagtgtttaagagcttggaggraactaaataataattttctccagctagttcccattttacaaaacaggacgttatgaacataataaatctcaagatgtgcctagtggcacagagtgagggg

SEQ ID NO: 356421 - DNA, 201 bp, Homo sapiens
ttccaggggctccaggcacaacacaggtaacgacactggctacttcctcccggagcaaaggatatactaagattgagatggagtcggggattaatagcttrtattctcctacctgaaccatggaaagaaaaataatccattacattttatcaacgtggaaaatatcagagatcgtgtctgatttgacatcaccaaaatgaa

SEQ ID NO: 356422 - DNA, 201 bp, Homo sapiens
gggagctaacagcagatgggatatgtaaattacacctgaaacaagctgatctaaaattttcaacacctttgatggaatgaaaggtgtttctttattatttygaggacaaaggcaaacaactctctcactctcacataggtggtaagccacccctctggagtcctggaacttcacatgaaaaagcgtggctttaaaatggcg

SEQ ID NO: 356423 - DNA, 201 bp, Homo sapiens
caaatttttaatttgccatttttattgcagaactgtctgtaatttagaggctcatcttctgttctaataattgcttgtatcctgagcatcttttagtgtgrctaattttgctgaagacagggatcagggctccagacggcacacagaattctgataaaggtttattgtacagcactggaatgatctgctttgtctttattt

SEQ ID NO: 356424 - DNA, 201 bp, Homo sapiens
tctttttctgcctgaaacacttctactgagcctatccatttttcctccatagcctcttacaccaaagctgcccagtgtcacttacaagtcaattacggagrgaaaaacacacaaagccattacgaggaagcaaaaagtataaaaggcttgacaaaccctaaggacgctgacatgcagctaggccacgagaaagtaaggaag

SEQ ID NO: 356425 - DNA, 201 bp, Homo sapiens
tgggtatagcgcatactggtggggttacccattacccaaacagtggatatcatacccagtaggttctttgtcaaccctcactcccttctcaccctcccccmcttttggagcccccagtgcctgttattcccatctttatgtccatgtgtgcccattgttgagctgctgcttgtaagtgagaatatagagtatttcgttttt

SEQ ID NO: 356426 - DNA, 201 bp, Homo sapiens
ttccatgattttgctattgtgagtactgctgtgatgaacatatgagtcttttttatataattggcctggatttctgagatctaacctaccattgtctcctracctgttgggacacttccactattttcagctgaacctccctagattcaactacttttttagactggagagaaggtcagccaggaaagtcaggcttacagt

SEQ ID NO: 356427 - DNA, 201 bp, Homo sapiens
caggctcctgactctctgaattcactctgggctttttcaaacacattgtgaattttttcaaaagaaatcacagtgtgactgtttgttcactgacacacacaaaaaaaagcatgttattttgcagaagtgcccatttgggctcaaataatttaatggagataaagtagtctgtgattatcagcacatatgaaaagagaatag

SEQ ID NO: 356428 - DNA, 201 bp, Homo sapiens
aaaaaaaagcatgttattttgcagaagtgcccatttgggctcaaataatttaatggagataaagtagtctgtgattatcagcacatatgaaaagagaataratccgttcacttgccttctctcttgacaggtgtatttctactggatttgccgggatgcaagagcttttgagtggtttgctgatctcttactctccctgga

SEQ ID NO: 356429 - DNA, 201 bp, Homo sapiens
tctggcaactgcgcttttgggaggaaaaaaaatgctaagccttggtttcatgcaaacacctctgcttttcacattttcttcttctggtagattcacttggragcagctgaaaatgtccctgcgcttattttattagcatcgcccattatgctgcatttcaaatagcctgctggcttaatagaggtgtgtaaccttggaaaa

SEQ ID NO: 356430 - DNA, 201 bp, Homo sapiens
actctgtctcaaaaaaaaaaaaatttttcaatgagatgtgcagattattgtcaggatcagagttagttggaagtttgcagaatacagggttattcacttgytgctattgcaaataaaatcaaatccaaagcccttagcctgaccaagggctccaatgaccatgcatgtgccccctgcctgtgccccctgccacagtcttat

SEQ ID NO: 356431 - DNA, 201 bp, Homo sapiens
  misc_feature (1)...(201): n = A,T,C or G
caatccagtctcaaaagatgcctggtcgtcctaggccggagaagcactttatgtcatttaaccacagcatcaactcatcgtaaccataaggctgacacttngtaattactagggaaagctgttagtggtaaaggagaaagccctgatggaggtagagtcaattcagcgaacttcaccgagtgcctaagtgcattgcttggc

SEQ ID NO: 356432 - DNA, 201 bp, Homo sapiens
tgggaggccggggcgggtggattacctgagatcaggagttggagaccagcctgaccaacatggtgaaaccctgtctctactaaaaatgcaaaaattagccrggtatggtggttcatgcctgtaatcccaactacttgggaggctgaggaaggagaatcatctgaacccgggaggtggaggttgtagtgagccgagaatgcc

SEQ ID NO: 356433 - DNA, 201 bp, Homo sapiens
attattttatacccctgctactgattggtagtgtgatatctgagaagttcctcatgctctttcttctgtggagttaaaagaatactaatacaggccgggcrtggtggctcacgcctgtaatcccagcactttgggaggccggggcgggtggattacctgagatcaggagttggagaccagcctgaccaacatggtgaaacc

SEQ ID NO: 356434 - DNA, 201 bp, Homo sapiens
cctctcttaactcagggcgttttcacggtgctctgatcaatagaatatgtatcatttctccttcagcggttcactgttcccagtgttaggacagataacgytttgtacctcacctcgtgtaaatggaactgattaaagaaaccaactatacccggcagtccctcctcccctacttgtcttacgtggaaaatatcagagacc

SEQ ID NO: 356435 - DNA, 201 bp, Homo sapiens
ccaaattattttatacccctgctactgattggtagtgtgatatctgagaagttcctcatgctctttcttctgtggagttaaaagaatactaatacaggccrggcgtggtggctcacgcctgtaatcccagcactttgggaggccggggcgggtggattacctgagatcaggagttggagaccagcctgaccaacatggtga

SEQ ID NO: 356436 - DNA, 201 bp, Homo sapiens
atcttcaaagttactcgaagcttcttaaatgcttatttttaaagaagctgggggaaatgaatgacagcccgagtttcaagaactggaagtgatatttcagwgctcactgtaggatatatacctgtgggagaacaagactgctcaaaatcagtttgacgttttttgctttttgttttgttttgcttttcttaaataacaagt

SEQ ID NO: 356437 - DNA, 201 bp, Homo sapiens
aaaaaatacaacagaaaagaaagcaaagaataagaaaaatgtgttatgaaatagttttctccttaaacttttgggcatgtacatttctttatatgtaatcrtgtatcaataataccaatgcattagaaacgtataatgaatatcccccgtgttaaagataccctgaaagcagctataactttctgaaactagtgtggtcag

SEQ ID NO: 356438 - DNA, 201 bp, Homo sapiens
cattcacagtcgtaggaaaatgactgtcaaatagtattgtgggcaataaaaaagaaaaaagaaaagaaagatcatgtgagccaagttctgaatcatagtgkggtaatggacataaaagggtcttgaaaagacatgaagctttatcggcatataaagtgttattgctattattatatttctaatttaagaggaaggcactag

SEQ ID NO: 356439 - DNA, 201 bp, Homo sapiens
tcaaaagacatcagaaaagaggccgggcatggtggtttacgcctataatcccagcactttgggaggctgaggcaggtgaattgcttgagctcagaagttcragaccagcctgggcaacatagtgaaagcccgtctctaccaaaaatccaaaaaatattagctgggcgtggtggtgcatgcctatagtcccagctacttggg

SEQ ID NO: 356440 - DNA, 201 bp, Homo sapiens
ggctcatcacagaagcaattcaaggaatctccaggcttcctttaaaatcttaaatagcttgatttctgcataacacagtaaaatggcaagaatattatcayaatacaatagctttaagacagacttgaactctaagagaaagttttaaagatattacagagagaagggggaaaaaaacagccagcatcaaaagacatcaga

SEQ ID NO: 356441 - DNA, 201 bp, Homo sapiens
agcatatatataatatatatatatagcatatatatatatatgtatatgtcagcagagaaaacactactccaacaaggttgtatttatagattgattttcckaccctttcattaccccttctacctttctttaatctcattgtcactaagcaaataattgtcaaatacaaactggtgctgaggtttcaaggatgaataaagt

SEQ ID NO: 356442 - DNA, 201 bp, Homo sapiens
aataaaagtagatgcactgcacagcacccccaccctcaccaacccccccagcacacacacacacacacacacacacacacatacacacacacacacacacrcacacgccacagtgtctaactgctttctcggtccctgctctccccttggcatcgccaaggcaaaagttttcatcctttttgctaactggcttctgccctg

SEQ ID NO: 356443 - DNA, 201 bp, Homo sapiens; identical to SEQ ID NO: 76263

SEQ ID NO: 356444 - DNA, 201 bp, Homo sapiens
tgagtttgagactgtgtctaaatttgagaatgtgtgtaaaaagtataattttgtagacttctaggagacacacatctgttcctgtaaaaaaaaaaaaaaaraaagaaaaaaagactaatgttcagccaagagagggtgatccaggaaggaggtttctcttccaggtcctaaagcatcacctggttacttctatgcagcctg

SEQ ID NO: 356445 - DNA, 201 bp, Homo sapiens
ttattcccatctttatgtccatgtgtgcccattgttgagctgctgcttgtaagtgagaatatagagtatttcgttttttgtttctgagttagttcacttargataatggcctccagctccacccatgttgctgcaaagaacatgatttcattctttttatggctgcatagtattccacagtatgtatataacacgttttct

SEQ ID NO: 356446 - DNA, 201 bp, Homo sapiens
tttgtccagtcaactgttgatggacactcaggttagttccatgattttgctattgtgagtactgctgtgatgaacatatgagtcttttttatataattggyctggatttctgagatctaacctaccattgtctcctgacctgttgggacacttccactattttcagctgaacctccctagattcaactacttttttagact

SEQ ID NO: 356447 - DNA, 201 bp, Homo sapiens
agatgagaacacatgactattttcttttttataatggaaaggaagcaatgtaataaaattttaaggttcagagtgcagagcaaatgcctaaaatcaaaaakaaaagtagatgcactgcacagcacccccaccctcaccaacccccccagcacacacacacacacacacacacacacacatacacacacacacacacacaca

SEQ ID NO: 356448 - DNA, 201 bp, Homo sapiens
aacctccctagattcaactacttttttagactggagagaaggtcagccaggaaagtcaggcttacagtgggaacctggggcatgagttgcacccagcaagkttgttagccaaactggtcagggtcaggatgagtcagagggtgagaatgaatagagcaccacataggggtctaagggatgagcactgggaacacagatccc

SEQ ID NO: 356449 - DNA, 201 bp, Homo sapiens
aaataaaatcaaatccaaagcccttagcctgaccaagggctccaatgaccatgcatgtgccccctgcctgtgccccctgccacagtcttatctcctgccayatccccctggcttttccccttgggcacacccagctcctaggagttcctaagcattctgtgcctttgatccagggatcccctttgcctgaaatgctctgtc

SEQ ID NO: 356450 - DNA, 201 bp, Homo sapiens
agcagaccttgaagacccttccaattgaaaagtagtactttgagctccagcttccatcaaggggtgtctaaatagtgacccaggcagctctccctggcagrgtcggcagcttgcttctgccaggttccaggagtgaacaattagccgagtgcagctcctgatgagttgctaaaattagtctacaaacatcaataaacataa

SEQ ID NO: 356451 - DNA, 201 bp, Homo sapiens
cctgatatatttgccccatgaagatggaagcattataatagctggaaccatcattgtttctgactgaaagaagacagataagcttttgagacaaacgccamcaggaaacatctctctgggttctcacccacaaaagcataatcacagtacatagattttattatgtagattttaacctctaccaaacataatgggatattt

SEQ ID NO: 356452 - DNA, 201 bp, Homo sapiens
gcccagaaaataaagatttggagacccaggcttgagaatagccctaaaggcacaaactcttcagtcctgacccctcaaggattgctcctaaccagttcccyctgaggctctgggagcttcagggaagctgcatccccagccctgcctgacaggatttaatgtgatttacaaatgcgtggcacacacagggtgccagagtca

SEQ ID NO: 356453 - DNA, 201 bp, Homo sapiens
tttttatgtctttacatgtggacagtcaacactggcttgggcacgagcatccgcactgtgcctgaattttaactgcatgctaattctaatacctgtcagtmgaaaccttatttcattcataagaggaacaagtattgtaagtactaaaatatctgaaataatctcaactgttacgacttcctcatataagtgccattgaaa

SEQ ID NO: 356454 - DNA, 201 bp, Homo sapiens
gccgaagagcaacaagtatcatgatggggtgctggattttgaatgagggtctctccaccatattagtagtaagtatcatttttgttattcaactttaaatmtatagattgaatagtctttgatttttaggaaaacttgtataggaacgctaaatagcttgaagtattactctagttaaaagactaaaacttgttagaaaac

SEQ ID NO: 356455 - DNA, 201 bp, Homo sapiens
acatgggaaactcacaatgaaaataaactgctgtgtgatgctattctaaaaggctattttactgtcccttgcactcacaggtcagaattctggccgtttasccgtgtccaccagataagaatagctgtacctttattgatcacctaggatttaccaagccttattccaggcccccggagatggcgtgaaagaaatgcaagt

SEQ ID NO: 356456 - DNA, 201 bp, Homo sapiens
atgggaaactcacaatgaaaataaactgctgtgtgatgctattctaaaaggctattttactgtcccttgcactcacaggtcagaattctggccgtttagcmgtgtccaccagataagaatagctgtacctttattgatcacctaggatttaccaagccttattccaggcccccggagatggcgtgaaagaaatgcaagtca

SEQ ID NO: 356457 - DNA, 201 bp, Homo sapiens
caagtcatggtctttccaattaaaaagcaagagcaaggaacaactaccaagggaactgagtgtgcagctgctttattaggaacgccccaagggacctctcaaaaaaatgtgtttattaatgttaaaatgcaattaagcatggtgatccacatagttattttgaagattaaaaacttaaaactcagatttattttgcaatat

SEQ ID NO: 356458 - DNA, 201 bp, Homo sapiens
tttctttttctgcctgaaacacttctactgagcctatccatttttcctccatagcctcttacaccaaagctgcccagtgtcacttacaagtcaattacggrgggaaaaacacacaaagccattacgaggaagcaaaaagtataaaaggcttgacaaaccctaaggacgctgacatgcagctaggccacgagaaagtaagga

SEQ ID NO: 356459 - DNA, 201 bp, Homo sapiens
aaagaatgggaaagagagaaaataaatcaatgatatttgctctatgcccaatgccaactctgagatgaaacaggctaccaaggccagggaggagggggtcrtgcataggtgagcactgcattaattcagccagtagatttttcatttccacccagagcaaagcaaggcaaaatgaaagctaaggttttcaaagagtaattt

SEQ ID NO: 356460 - DNA, 201 bp, Homo sapiens
tgcataggtgagcactgcattaattcagccagtagatttttcatttccacccagagcaaagcaaggcaaaatgaaagctaaggttttcaaagagtaatttrgattaggcacaatacaaagcgaaaagaaagcagatagtggtattcatcaccaacctcgaatataaaatccacccctaactggtctcctttcctcctccct

SEQ ID NO: 356461 - DNA, 201 bp, Homo sapiens
  misc_feature (1)...(201): n = A,T,C or G
gccgtgaaactggatgagatgaccagacaggcagatatagatggacaagagttccaagaactgcactgttggatggtcagggaacagacactgtattgacnggtcacagagtttaatacgtgacactcatatctgccttaataatcatgccccttgggtcttctataccctgaccttctttccatccactttctctgtatt

SEQ ID NO: 356462 - DNA, 201 bp, Homo sapiens
  misc_feature (1)...(201): n = A,T,C or G
tttctccttttgggaaaaaaaaaatatatatatatatatattcactgataaatgttttacgttcggttttcagtcatcatggaataaatgttctcacttcncaggcttttgacatggacatctatatcttggttttcagttcttctagatagtctcagtctttattaggattgtccctttttgacatctcatatggtgttt

SEQ ID NO: 356463 - DNA, 201 bp, Homo sapiens
attgcatgaatgtattttagaccacctattgttttcagaaacgtgaaaatacctttatactaaattgagtaaatgtgtccatctggacccacatttgcttrtgtatgcacccttcaattctcatttgtatgtgcatatgtgcaaaatgttttaaaatgatatttttaagaaattagcattctgattatagcatacagggcc

SEQ ID NO: 356464 - DNA, 201 bp, Homo sapiens
ttaacattgtccccgatccagctcccccatgcgtgtgcaagctctgtggcttgcaggctgtaaactgaagaatagcaccttgcgtttttatacttcttttkcggagaatctctatttaattccaagcgattgtgggtaattaaattttatagaagaattttttctttaccaaccccattagggttctgttgcacttgtccg

SEQ ID NO: 356465 - DNA, 201 bp, Homo sapiens
ttcctcagtgggaagcgtcataagtagtactttccatttgaagctgatgtcttaaaatctctttgtttctaagtacttttgttttgaaagatctgggaggrggcggggagtggaaggggagggggaagaatgggcaggaggggatttcccaagaaggccaaataacaagaagtataatgatggcttgctgtgatgaaaatg

SEQ ID NO: 356466 - DNA, 201 bp, Homo sapiens
tgaaatggagtcttaaaggcagagcatcaaagggcaccatcaggtctgcagttactgttgctgcaaacgaaagagcagtcttagcccattggagtgggccrgtgggcaatctctttggtgacatctacactaatggaaaaatatcaccacccataacagcatctttgaaaatagatgcaaggacacctctgggcatcagac

SEQ ID NO: 356467 - DNA, 201 bp, Homo sapiens
aaatatcaccacccataacagcatctttgaaaatagatgcaaggacacctctgggcatcagacacaaagcaaagctgtgactcctcactgggaagggtctygcctgatccatctaccattcaaaatgtttcagtccagagctcaaaaatctagtgctgatctcagtaagtctacataatcacctctgtgttaacaccccgc

SEQ ID NO: 356468 - DNA, 201 bp, Homo sapiens
ttctactgtggatgtgatggtcctggaacacacagttaaaatgtggctatgacacatggcagagaaccatgttaacatatgagctaagaagaactaggctmtataggcacttcccagcaagatccatgtctgaagaaacagagatggtatagtgagctggtcctgaagcccaaagaatgtcttgatgacagtgtttctcaa

SEQ ID NO: 356469 - DNA, 201 bp, Homo sapiens
ctgatgcaccccaacttccagaaacaactttgaaaccctgtgcagatgtggtgtttatatgtaggctaagttgcaaggcatttgagcagctctgggatagycactatatgcaaaaagtatctctctgacatagttttctgaaatgtcaagattagagatgacaacgtttgggtgactatattttcagcaatgtctttttct

SEQ ID NO: 356470 - DNA, 201 bp, Homo sapiens
  misc_feature (1)...(201): n = A,T,C or G
aatgtattatctcatcttgcttttgataaaacatacaacgtagtccttatcatcttttccacatgcagaaactgaggtctagtgacttgcccaagaccacncagatactactcaggaaagccatttagtcattcattcagcaaatgtgtgttgattgtccactgtatgccaggcactgttccaggtgctggaataaaacag

SEQ ID NO: 356471 - DNA, 201 bp, Homo sapiens
ttgctcctaaccagttccccctgaggctctgggagcttcagggaagctgcatccccagccctgcctgacaggatttaatgtgatttacaaatgcgtggcamacacagggtgccagagtcaacgatccttctacagaaatcagaccacaggtttaaaagtttgcagccaaattctggctgcagaagcagagccagaatctgt

SEQ ID NO: 356472 - DNA, 201 bp, Homo sapiens
aacttctgccccacaaaataactgagattttttttaattcccattgcgccagtctttctatactatgcagctattttactcccaagatgtttacaaagtaktcctcacatcttataattcttgctactaatattgattaattttttagaatttttctaatatttcaagattgttttgaagtttagccccagacactactac

SEQ ID NO: 356473 - DNA, 201 bp, Homo sapiens
aataaacagcagagtcagatccaggacgccagtctttagactatcaatcagacctttactctggtttgcaagcccctgaagaacaagtcttccattttagraattaaaccttcctcaacaccagcaagaatgtggccagcaatgttgctaatgccctttttggcttgccagcagcaactcctctgttcccgcaccacagaa

SEQ ID NO: 356474 - DNA, 201 bp, Homo sapiens
cccccaattatgctcactttgatctcctgaaaaataaaatgaaagaaggaaggtaaaagaactttctcagggcaactggctctaatagtagcctttatgatttttttttttttttttttttggttcactcttcaatggaaagctccttatttgaactcagaagtccacataccaattaaatgcgcatgtgtagtgtttcca

SEQ ID NO: 356475 - DNA, 201 bp, Homo sapiens
ccccaattatgctcactttgatctcctgaaaaataaaatgaaagaaggaaggtaaaagaactttctcagggcaactggctctaatagtagcctttatgatttttttttttttttttttttggttcactcttcaatggaaagctccttatttgaactcagaagtccacataccaattaaatgcgcatgtgtagtgtttccaa

SEQ ID NO: 356476 - DNA, 201 bp, Homo sapiens
ctattcataaacacacacataaaataaaatcaaagccagcatgttcttattttctggtaggaatgaaaaaccaggagtgaaagtgaaggaaacaagtttcwttattgctgcttttgaatcaacatcgttttatttctatcataaaatactcactgtagcgtgactttttgagcattttttgaagaagaagaaaagaaagcc

SEQ ID NO: 356477 - DNA, 201 bp, Homo sapiens
ttttcaaagagtaatttggattaggcacaatacaaagcgaaaagaaagcagatagtggtattcatcaccaacctcgaatataaaatccacccctaactggyctcctttcctcctccctcaccctccataccctgggtctattctcaatacagcagccagagagatcctgccacctgctgcgggccatggaactccctgctc

SEQ ID NO: 356478 - DNA, 201 bp, Homo sapiens
ggattaggcacaatacaaagcgaaaagaaagcagatagtggtattcatcaccaacctcgaatataaaatccacccctaactggtctcctttcctcctcccycaccctccataccctgggtctattctcaatacagcagccagagagatcctgccacctgctgcgggccatggaactccctgctcgccaactccctgtgctt

SEQ ID NO: 356479 - DNA, 201 bp, Homo sapiens
caatacagcagccagagagatcctgccacctgctgcgggccatggaactccctgctcgccaactccctgtgctttcctgtctctcggagggaaagtctacracggccccaaagccctacaacgccatggctcccccagccctcccctcgcccatctccttgctctccccaccctctctgggctccagccacacaggcctcc

SEQ ID NO: 356480 - DNA, 201 bp, Homo sapiens
catcggtttcctctggcaccagagccaccaaaggatgcgtgttcacccatcacactgtgcacagtcacacgtccatggctttgctcgttctctccccacayctggcgtgtcacttaacaccctctgccactgttccccaccttctttttgctcggagtcctataccccaactcttttccagcagtagctctgccacctggt

SEQ ID NO: 356481 - DNA, 201 bp, Homo sapiens
tataccaaaatattgactatggtagtatttcaatgttgatactattgaatgataactactacattgtaatccattttaactcctcaaacaggggaattaamaacgaagtgattactaggttacacaatatatattctaatcagcagctattattgatatatacttttaaggaaagtgtatttgagcctgggagattgacat

SEQ ID NO: 356482 - DNA, 201 bp, Homo sapiens
gcagaagaccttctatgggaggcccaactggaacaatgagttcaagcagattgcctacaatcaccccaggtaaggcaagctcttgctcctctccctgccargctcttctctggagaaatgcaagggctgctggagtgaaaagttaatctgcagtaccgtatatctccattagagacaaaacatctaccttagaaaaggtga

SEQ ID NO: 356483 - DNA, 201 bp, Homo sapiens
gtaacaatcaaagaaccaaaaaaagaagctacagttaacttgctgaggaatagaaagggtcagacaatggaagacaatccagaggctggaaatcccaaacraatttgcatttgtccctttaaaagtgacatcaaatgaatattactgattggctgtatcatcttgttgagttcctgactggttctgtttctgtgccttgag

SEQ ID NO: 356484 - DNA, 201 bp, Homo sapiens
cagaaaagtactatgaaacaaaaacattaaaaattattctcccaattaaaatatagtaggctaattaaatacattcattgccatctatgtcttactaatcyagagaaaggtatctttttcaaaaatggaaactgtattgcattttttgtaaacattgtcaatacgttcacaagctttaggtaaatgttcagaaaatcagga

SEQ ID NO: 356485 - DNA, 201 bp, Homo sapiens
aacaaatatgtgggcccagtttttgaaagaagaggccttattctcagcatcttttactcttacaaataattaatattataaagtcctgcctaaacatgaaragaatagacaagatgtttagctttgagataaacttttttatttttgtctcatgaatttgatctattcattaaatctcatttatatctctgattatatgat

SEQ ID NO: 356486 - DNA, 201 bp, Homo sapiens
ttagaacagtttaacccaacctaacgatgaagaaaggtgtcaacttaccatatgattgggggcttctaatccatattgcatgaatgtattttagaccaccyattgttttcagaaacgtgaaaatacctttatactaaattgagtaaatgtgtccatctggacccacatttgcttgtgtatgcacccttcaattctcatttg

SEQ ID NO: 356487 - DNA, 201 bp, Homo sapiens
ggtaggggggattggagagatgggtgagtacagggtggatttatcattatactgcaaaatttcttcaatggcattacctatctatcaaattattagtttgrcaaaatatttggttacttatgcatgaaggcatatatatgttactgttttattggggtggggaagggttggcaaaaatggctctaccattccctgggatcg

SEQ ID NO: 356488 - DNA, 201 bp, Homo sapiens
gctctgcctggagaggctgtgcagagatcatccctaggaagaaataagtgtcaggaaaggaaaggcaaccctctctcttcctgagaaaagcaggtcattgygcttagagactgagggattatttgtcctgaaattagtatcttaagtccccttgtgaacaggagctgtccaacaaatatgtgggcccagtttttgaaagaa

SEQ ID NO: 356489 - DNA, 201 bp, Homo sapiens
acttgacccccacaacagtcctgtcatgtagagaaggtgctgctgtccccatttcataaagaggaaaaaggtgttctgagggttaagtgatgccctcaagrtcccatgatgaataaacagcagagtcagatccaggacgccagtctttagactatcaatcagacctttactctggtttgcaagcccctgaagaacaagtct

SEQ ID NO: 356490 - DNA, 201 bp, Homo sapiens
acttatgcatgaaggcatatatatgttactgttttattggggtggggaagggttggcaaaaatggctctaccattccctgggatcggatgctacaagtcakctgctttcatttttcttccccatttgaccataagcttctcaagggcttatagctataagcaactttatctatgcacctcagagcctagcaaaatggccag

SEQ ID NO: 356491 - DNA, 201 bp, Homo sapiens
taaataagttctgcgggggtggggcgcagtagctcatgcctgtaaccccagcactttgggagattgaagtgggaggatcacttgaggccaggagtttgacrctagaccagcccgggccgcatagagagacatcatctctgcaagaaaattaaatattagggagttcaaagcagtgagccgtgatcgcaccactgcactcca

SEQ ID NO: 356492 - DNA, 201 bp, Homo sapiens
tccacgggaagcttctgtttatcgattttatttgcagaatgcactcagggtataaagtaatttgcttttttttaaatagggtttagggtctgcccctacarggttataacttaccaagcataaaagccaacacataaaaacaaacatacaatttaaggagagaagggctcacggcagcagaacctgggaattcagcgaggt

SEQ ID NO: 356493 - DNA, 201 bp, Homo sapiens
cccactgaagctgagcaaggtacggaaaaatcattagttcacccttccatggattaaaaggttcaatgtccttatatctatcatctgccgattcttggggrggattttaattaactatgagggataaactcaaggatccttaactatacttatgttcttaaaaatctccactcagtattacatttatgagtagggttatgt

SEQ ID NO: 356494 - DNA, 201 bp, Homo sapiens
agcctgattcctactctcttaactttcatgagattgttttcactgcaatttttccataaatcaggcatatttttttgttactctagtgctgcagaggaccrtggaggaggcaattagacaaaaacctcagatttcacaaactggtcgcctatgggatagctgttaatgcaagtaagtacttattaattgctcaatggattt

SEQ ID NO: 356495 - DNA, 201 bp, Homo sapiens
caagactgaagagccccaattaagccagagttggctttggaaacatgaaaacatgagctttgtgtttgcattacttccatattggtctacaaatccctttyagatgataaatatgctcccagttaacttcagagaaagacacaggagccacacagctggaagggggcttagataaccttgtttagtacaatctacccattt

SEQ ID NO: 356496 - DNA, 201 bp, Homo sapiens
actatcgagtgctttgccttcttgggtgagcctcaacctgaagtatatttgacttgattttcaacttaaaggctaaagaaaaatgtgcaatatatatatattatatatatatatatatatagcatatatatattatatatatatagcatatatatattatatatctatagcatatatattatatatctatagcatatatat

SEQ ID NO: 356497 - DNA, 201 bp, Homo sapiens
tatcgagtgctttgccttcttgggtgagcctcaacctgaagtatatttgacttgattttcaacttaaaggctaaagaaaaatgtgcaatatatatatattatatatatatatatatatagcatatatatattatatatatatagcatatatatattatatatctatagcatatatattatatatctatagcatatatataa

SEQ ID NO: 356498 - DNA, 201 bp, Homo sapiens
aagtatatttgacttgattttcaacttaaaggctaaagaaaaatgtgcaatatatatatattatatatatatatatatatagcatatatatattatatatmtatagcatatatatattatatatctatagcatatatattatatatctatagcatatatataatatatatatatagcatatatatatatatgtatatgtca

SEQ ID NO: 356499 - DNA, 201 bp, Homo sapiens
atatatatatatatatatagcatatatatattatatatatatagcatatatatattatatatctatagcatatatattatatatctatagcatatatataatatatatatatagcatatatatatatatgtatatgtcagcagagaaaacactactccaacaaggttgtatttatagattgattttccgaccctttcatta

SEQ ID NO: 356500 - DNA, 201 bp, Homo sapiens
tatatatatatatatatagcatatatatattatatatatatagcatatatatattatatatctatagcatatatattatatatctatagcatatatataatatatatatatagcatatatatatatatgtatatgtcagcagagaaaacactactccaacaaggttgtatttatagattgattttccgaccctttcattac

SEQ ID NO: 356501 - DNA, 201 bp, Homo sapiens
tatagcatatatatattatatatatatagcatatatatattatatatctatagcatatatattatatatctatagcatatatataatatatatatatagcwtatatatatatatgtatatgtcagcagagaaaacactactccaacaaggttgtatttatagattgattttccgaccctttcattaccccttctacctttc

SEQ ID NO: 356502 - DNA, 201 bp, Homo sapiens
attgcagcctcacactcctgggatcaagtgatcctcccatctcagcctactgagtagctgagactataggctcaaaccaccatgcccagcttttttttttwaatttatttatgtgggttttttttccagtataataactttgatgtgaaatgatatatacaaaaataaaaaaatgtgattgatgaaatggtattttacgaa

SEQ ID NO: 356503 - DNA, 201 bp, Homo sapiens
cagcctcacactcctgggatcaagtgatcctcccatctcagcctactgagtagctgagactataggctcaaaccaccatgcccagctttttttttttaatktatttatgtgggttttttttccagtataataactttgatgtgaaatgatatatacaaaaataaaaaaatgtgattgatgaaatggtattttacgaaattt

SEQ ID NO: 356504 - DNA, 201 bp, Homo sapiens
agcccctaactctgtggccatgaactttctcctccattcacagcattcactctaagtctctggcttccataaccgccattttgtcagcactctgctgctagctgctacaagtacatagccccaacgttctacttatctctgtgaataaagccaaagtgtttaagagcttggagggaactaaataataattttctccagcta

SEQ ID NO: 356505 - DNA, 201 bp, Homo sapiens
agaactcagggaccagtctgcataggaccatgctaaggaccctcttatttattcaatgaatatactttatccttattaagaaaaatttgctaagcaaagaraaataccagtgctacccaaggcctaattaccacagattttgagtcagtataatctaaaataatgggttttagaagttccacataactgacaaatgacttc

SEQ ID NO: 356506 - DNA, 201 bp, Homo sapiens
ttctaaaatgcctgaaggtacttgagaagaaaatattttaaatgtttgagacatacccctttcaattttatttccactctttgctctatgaagaaaaaatmatgaagaagtccctgtccgaattacctccagatctcaaagccgcccaaattaatgagattttactgacaaaagatatagtgagtttattgagctcatggc

SEQ ID NO: 356507 - DNA, 201 bp, Homo sapiens
taaaaacactggttggcataaggcatacatttttacacacaaaactcaagttgcaagtctataggaaaaaatgtgcaccaaagttttctcaattgtcaccrttgcaaactagaacttctttacccttctcctctgttgcattattctagaaaacttctaagtaaaatgcaggagcacaaccaataaggcgcctgccacttc

SEQ ID NO: 356508 - DNA, 201 bp, Homo sapiens
aataaggaaggaaaggacaactcgcataggcgttgagagccagaattttaagcttaaatggttaactgcgattaggtgggatttttttttcctccatgtgyaaaaacactggttggcataaggcatacatttttacacacaaaactcaagttgcaagtctataggaaaaaatgtgcaccaaagttttctcaattgtcaccg

SEQ ID NO: 356509 - DNA, 201 bp, Homo sapiens
aggcatgagaacaggtttaggaagtttctctcttttaaagcaactttgtgttggtttgagtatagctactattaggcttatgtaactaatatttgtcaggkctacctacatgcttttgagatataaagactactccttccactaaactgtcagagtctatataatttttgaagtgccacagagcaaagcagtacatattta

SEQ ID NO: 356510 - DNA, 201 bp, Homo sapiens
gaagaagtgaggttttcatgctattgaaagtttgggctgaaaattacagttcagatccaattccttaagcgtctgcaggcatgagaacaggtttaggaagyttctctcttttaaagcaactttgtgttggtttgagtatagctactattaggcttatgtaactaatatttgtcagggctacctacatgcttttgagatata

SEQ ID NO: 356511 - DNA, 201 bp, Homo sapiens
atcataaaataacttaaaggtcctaatctcctagctttgcataggaccatgaaagtcagtatctgcacctcgagcggagatgatttgtccaaagtcacccmgcttgttcaccactgagtcaggacctgagcatgtgtttctgatttctgcttcaaagttctttcatggaagaagtgaggttttcatgctattgaaagtttg

SEQ ID NO: 356512 - DNA, 201 bp, Homo sapiens
aaaaccataaaatagggacattgatctctattccaagaaacagaaacagtagagtaaaaaatataaaagcaatgttttcatcgcttataaaaatgtgaggkactatttggacacgactcaggtgaaaataagggcagaaataatgtcatatgggagaaaggaagctaaagtgtggaatcataaaataacttaaaggtccta

SEQ ID NO: 356513 - DNA, 201 bp, Homo sapiens
gcccctaactctgtggccatgaactttctcctccattcacagcattcactctaagtctctggcttccataaccgccattttgtcagcactctgctgctagctgctacaagtacatagccccaacgttctacttatctctgtgaataaagccaaagtgtttaagagcttggagggaactaaataataattttctccagctag

SEQ ID NO: 356514 - DNA, 201 bp, Homo sapiens
ctctgcaagaaaattaaatattagggagttcaaagcagtgagccgtgatcgcaccactgcactccagcctgggcaacagagcgagactctgtctctaaaaraagttccgcagaaaagatcctcattcagttttgtttcatctatctttcccaagcttatttagctacagaacctttcctcacctaacacctatcaagaatt

SEQ ID NO: 356515 - DNA, 201 bp, Homo sapiens
tcccagagtggtctcccaaaacatctaggcatccactatatctacaagaatgtggctgggcacgatggctcatgctggtaatcccagcgctttgggaggcygaggtgggtggatcacttgaggtcaggagttcgagaccagcatggccaacatggtgaaatcccatctctactaaaaaataaaaacttcgtcgtgcatggt

SEQ ID NO: 356516 - DNA, 201 bp, Homo sapiens
gaggcaggagaatcacttgaacccgggaggtggaggttgcagtgagccaagatcccaccattgcactccagcctgggcaacagagagagactccctctcaaaaaaaaaaaaaaaaaaaaaagaaagaaaagaaaagaaaaaaaagtgttggatgagtcctgtaaaaaaaaataattttattactatgaaagttcagaactt

SEQ ID NO: 356517 - DNA, 201 bp, Homo sapiens
aacccgggaggtggaggttgcagtgagccaagatcccaccattgcactccagcctgggcaacagagagagactccctctcaaaaaaaaaaaaaaaaaaaaragaaagaaaagaaaagaaaaaaaagtgttggatgagtcctgtaaaaaaaaataattttattactatgaaagttcagaacttttgttattttactgagaat

SEQ ID NO: 356518 - DNA, 201 bp, Homo sapiens
agaaaaaaaagtgttggatgagtcctgtaaaaaaaaataattttattactatgaaagttcagaacttttgttattttactgagaatgactttctatttaakaaaatcttttaaagtaaactcaggtatttttggtctctgagatcagctatgaaattctgaaaaggcatgctttctacaggtagctgatttcagggttgtt

SEQ ID NO: 356519 - DNA, 201 bp, Homo sapiens
tttaaggaaagtgtatttgagcctgggagattgacattaatcactacatttacaaatgaatgctctgtgtatgtacatcacacatacacacacatgcgtgmgcacacacacacacacacacacactggccttatagaacatcactgtaatttgactctgcttctgcaaatgaataagactctgctagaaattcagtagctt

SEQ ID NO: 356520 - DNA, 201 bp, Homo sapiens
ttaaggaaagtgtatttgagcctgggagattgacattaatcactacatttacaaatgaatgctctgtgtatgtacatcacacatacacacacatgcgtgcrcacacacacacacacacacacactggccttatagaacatcactgtaatttgactctgcttctgcaaatgaataagactctgctagaaattcagtagctta

SEQ ID NO: 356521 - DNA, 201 bp, Homo sapiens
ctgatgaggaccctgacacacagagagctaaataatactagaactagagtttgaatctagatccttctggcaccaaagctcatcttctttcctctacgccrtaatatatttaacaaagcaagcaaaacagtgactgggatatttggacctcacagcaatgctttgttttggttcgtgatgatttttcagccaccctaagtt

SEQ ID NO: 356522 - DNA, 201 bp, Homo sapiens
taaggaaagtgtatttgagcctgggagattgacattaatcactacatttacaaatgaatgctctgtgtatgtacatcacacatacacacacatgcgtgcgcacacacacacacacacacacactggccttatagaacatcactgtaatttgactctgcttctgcaaatgaataagactctgctagaaattcagtagcttaa

SEQ ID NO: 356523 - DNA, 201 bp, Homo sapiens
cccctaactctgtggccatgaactttctcctccattcacagcattcactctaagtctctggcttccataaccgccattttgtcagcactctgctgctagctgctacaagtacatagccccaacgttctacttatctctgtgaataaagccaaagtgtttaagagcttggagggaactaaataataattttctccagctagt

SEQ ID NO: 356524 - DNA, 201 bp, Homo sapiens
aaggaaagtgtatttgagcctgggagattgacattaatcactacatttacaaatgaatgctctgtgtatgtacatcacacatacacacacatgcgtgcgcacacacacacacacacacacactggccttatagaacatcactgtaatttgactctgcttctgcaaatgaataagactctgctagaaattcagtagcttaat

SEQ ID NO: 356525 - DNA, 201 bp, Homo sapiens
aggtcattgtgcttagagactgagggattatttgtcctgaaattagtatcttaagtccccttgtgaacaggagctgtccaacaaatatgtgggcccagttyttgaaagaagaggccttattctcagcatcttttactcttacaaataattaatattataaagtcctgcctaaacatgaagagaatagacaagatgtttagc

SEQ ID NO: 356526 - DNA, 201 bp, Homo sapiens
gcaagcaaaacagtgactgggatatttggacctcacagcaatgctttgttttggttcgtgatgatttttcagccaccctaagttcttccttccctcttgcygcctaccaagtaaatcccactcagagaggtggctcactgcttcatggtttccacgacactaaaagtcacttcatgcttcacaggaagatggtggtggata

SEQ ID NO: 356527 - DNA, 201 bp, Homo sapiens
acctgaattttgctgtcatcaaagaacatgcctgattccaccctgactgaaatactgcctgcagttcacctctctgagctgagtttcctgatccacataayggagaaataagaatccatatccaacagggagttttaatgctaaataagacaaataatatggaaatattaccatagaaatgtgtatacagaaatatagatg

SEQ ID NO: 356528 - DNA, 201 bp, Homo sapiens
cagcctgggcaacagagcgagactctgtctctaaaaaaagttccgcagaaaagatcctcattcagttttgtttcatctatctttcccaagcttatttagcyacagaacctttcctcacctaacacctatcaagaattcgtattctgtgaagcatcccaggcaatgagggctagaagatctctaaactcgggtctctgccaa

SEQ ID NO: 356529 - DNA, 201 bp, Homo sapiens
aaaaatctccactcagtattacatttatgagtagggttatgtctaatcttgttaaagatgacaagacataaattttattgcttcattgccattacaggacwtgtaattgctcatctcagtaaaatatggacaggctgcaaatggctatgtgactgggtggcagttcgcaatattaagaggcaacctctccttagtctcttt

SEQ ID NO: 356530 - DNA, 201 bp, Homo sapiens
cagagtcaacctctgcatgcactggcaaacacgtcctgtaaaaagcaccagctccggatggttctgggttcacgagcaaggtgttctgaaggtcaaatagsctgcattcctctatgattccaggctggcagtggacgggccctttggaactgccctgacagatgtatttcactacccagtgtgtgtgtgcgttgccgcggg

SEQ ID NO: 356531 - DNA, 201 bp, Homo sapiens
aggctatctgagcgataaggagttatgattcaggactgtttctctcaaactaatttaactataaaatgttttcctcatttgtttttatcctctcatgcataaaaaaaaaaagcagagtaaaaggaacactcaaaacaaatgtgaatttaattaagcaacaagacatgacagacggtgcccgagtgccaattaacacaactt

SEQ ID NO: 356532 - DNA, 201 bp, Homo sapiens
acctaatctgaggggttcaagaaggcttccacaggaaaggaatgattgggataagacctaccagagaaataactattaaccaactaaggagagagggaagraactggagaagatgccaggtgcagtggctcacgcctgtaatcccagcactttgggaggccgaggtgagcggatcatgaggtcaagagatcaagaccatcc

SEQ ID NO: 356533 - DNA, 201 bp, Homo sapiens
taagtcattatgggctcgataaaaatgagttgtcataaacagagctgcttccctccattcactaatttgtttcgccctctgcctctgtatgtgtgtaggcrtatgtattagtggcaaagccttccaaaaaactagaatttgtttaaatcttcaacatacaaagaatcaggatgttattggacttccttggatgattttaca

SEQ ID NO: 356534 - DNA, 201 bp, Homo sapiens; identical to SEQ ID NO: 76264

SEQ ID NO: 356535 - DNA, 201 bp, Homo sapiens
gctggagtgcagtggtgcgatcacggctcactgcaagctccgcctcccggattcacgctattctcctgcctcagcctcctgagtagctgggactataggcrcccgccaccacgcccagctaatttttgttatttttagtagagacggggtttcactgtgttagccaggatggtcttgatcgcctgacctcgtgatccgccc

SEQ ID NO: 356536 - DNA, 201 bp, Homo sapiens
ggagtttgaggccagcctggccaacatggcaaaaccccatctctactaaaaatacaaaaattagccgggtgtggtggcacatgcctgtaatcccagctatytgggtggctgaggcaggagaattgcttgaacctgggaggcagaggttgcagtgagccgagatcgcgccactgcactccagcctgggtgacagagtgagac

SEQ ID NO: 356537 - DNA, 201 bp, Homo sapiens
acctctctaaaattttcagctacagcatctccataaaaaaatcaatactcccccacacctcatgaatacagaccagggcctgctcccagcagcgtttgccrgcattaattatcattaagagggggccttgctcatctctctctaactctcccctgctccacttccttgcacacccaaactcagggtgtcactctctcccat

SEQ ID NO: 356538 - DNA, 201 bp, Homo sapiens
tagttttctacttttgacctatctgttaataacttcaccacgccttttaggtgtaaatttgatgtaattaattaccataaaaactttaaagtttggtcatttttttttttttttttgtaatttcagtagacgtatttcttttaactttgaagaaaaaaaaatagaagagtactaccatttgttagaacagtttaacccaac

SEQ ID NO: 356539 - DNA, 201 bp, Homo sapiens
caggtgaaaataagggcagaaataatgtcatatgggagaaaggaagctaaagtgtggaatcataaaataacttaaaggtcctaatctcctagctttgcatwggaccatgaaagtcagtatctgcacctcgagcggagatgatttgtccaaagtcacccagcttgttcaccactgagtcaggacctgagcatgtgtttctga

SEQ ID NO: 356540 - DNA, 201 bp, Homo sapiens
ctaggcatccactatatctacaagaatgtggctgggcacgatggctcatgctggtaatcccagcgctttgggaggccgaggtgggtggatcacttgaggtsaggagttcgagaccagcatggccaacatggtgaaatcccatctctactaaaaaataaaaacttcgtcgtgcatggtggcacatgcctgtaatcccagcta

SEQ ID NO: 356541 - DNA, 201 bp, Homo sapiens
agttttctacttttgacctatctgttaataacttcaccacgccttttaggtgtaaatttgatgtaattaattaccataaaaactttaaagtttggtcatttttttttttttttttgtaatttcagtagacgtatttcttttaactttgaagaaaaaaaaatagaagagtactaccatttgttagaacagtttaacccaacc

SEQ ID NO: 356542 - DNA, 201 bp, Homo sapiens
ccttcatcagctccataatatataaccatgataatgggtatttatagtgtgtcccatgcaaaatggcctttgggttcttaacctaatataataaacagatmattcaaataaaaagacagcacgggccagtgggaacaagggaaagaggccaaaaaagacaaaaaatccatactctactaaaatatattaataaaacaaagg

SEQ ID NO: 356543 - DNA, 201 bp, Homo sapiens
ccgggaggtggaggttgcagtgagccaagatcccaccattgcactccagcctgggcaacagagagagactccctctcaaaaaaaaaaaaaaaaaaaaaagraagaaaagaaaagaaaaaaaagtgttggatgagtcctgtaaaaaaaaataattttattactatgaaagttcagaacttttgttattttactgagaatgac

SEQ ID NO: 356544 - DNA, 201 bp, Homo sapiens
caacaatttgggaggccaaggcgggtggatcatgaggtcaggagatcgagaccatcccggctaacacagtgaaaccctgtctccaataaaaatacacacamaaaaaaaattagccaagcatggtggtacacacctgtagtcccagctactcgagaggctgaggcaggagaatcgcttgaactcaggaggtggagattgcag

SEQ ID NO: 356545 - DNA, 201 bp, Homo sapiens
attgtccactgtatgccaggcactgttccaggtgctggaataaaacagaccaggtttatgttctcaggaagttaacatctggtcacgtatccaagaagacrtgaatcaaggtcacctggccaaaaaggaggtcaagtccaggcattgtgtaagtggctgcaatcatataggtcagggattgggaaactcttcccataaggg

SEQ ID NO: 356546 - DNA, 201 bp, Homo sapiens
ggtggtggatttagaaaacctaggaggaagtgtagggacatatgaaaaggcttgagttctggccctggctatctctggtccacctcagactctccaggcarctcagacccattcccagaatgtcaggattttccttcttttaattctaaaagaattagaggatattgaatgttcccaatacaaagaaataatcagtgtttg

SEQ ID NO: 356547 - DNA, 201 bp, Homo sapiens
aaaaaaaaaccctcaaatatattaaattaagcactggattttaagggtgaaagtactaggaggaatgattaaaaccgagagaaccggaatagatatgcccrttagactgtggttcttttaatggccggtatagattgtctctgtcttaaactcaactctcagtagccactatccaacctgcatattaatgaggaacatgaa

SEQ ID NO: 356548 - DNA, 201 bp, Homo sapiens
actcatggcaaatataatatagcaggattataggactcttcgtccagtgctccggtcattaggactgccttctctttccattcctaaatgtatcaataccrtcttgaagacacactccattgtgacctgttttgactgagtcaaacactggcttgctggtggtcactaggaggaaaaataccattcttccggtattttgac

SEQ ID NO: 356549 - DNA, 201 bp, Homo sapiens
ctcagagggatgttatcaagtttggatggcttccataaaacagactgggacaaaagccaagatgtcagttctagctgacaccaggctgttttccaagggcrtattactgctccttcctcccatgccctgtgatataacaggggccacaccactccacaggctgtccaggacataagtctgtgtgatgctaaggtttctcag

SEQ ID NO: 356550 - DNA, 201 bp, Homo sapiens
ttttgccatgacatgttgaaaattatttcgactcctaaatttcaggcagaaaaatcactaatttccacatttaaaggaaaaataattggtgcattctgtcrggaaagaatcaagaggctgttttagaaatacccaattgttaaactgaattcaacaacctcaaagtggcaaaatgacaagaacagaagggacagatggaag

SEQ ID NO: 356551 - DNA, 201 bp, Homo sapiens
tgtaaagaacacagaaggcaagaacatttcaactcttcctcacactcattgaatctaaaatagaagagatagtataaaattctagatgtattctctctgarttaatttttataacccaactgaataagacctctaagatatgtaaatcctaaacacttcagaaataacaaatcattttatcatggaagattattggcttaa

SEQ ID NO: 356552 - DNA, 201 bp, Homo sapiens
cactgtaatttgactctgcttctgcaaatgaataagactctgctagaaattcagtagcttaatgaatttttatggtcttatttgcagtccttcttaaatayttaatcctttgggataatttgaaatgtagctttcttgggaactaggcttgaaacatcttaatgaattatatagtgttaattatgttttccaaacaaacac

SEQ ID NO: 356553 - DNA, 201 bp, Homo sapiens
ccacttcttatacttccattaaaagtagtttaatacttggtcatatgttagaaacctgtcattcagattgttgcatttcaaaatgtagacaaagctgtcaytctgacttgtttggcttttgagtttcataccacacttagtccaatcaaaatataaaaaagaaaaattatgttgctaattttcaaatttcaaacttttgct

SEQ ID NO: 356554 - DNA, 201 bp, Homo sapiens
ttacaacctcagtgatcagccatattctgataaccctgaagtctctatcgtcagctcagatttttttttctttcttttttttgagtcggagtttcactctrttgcccaggctggagtgcagtggcatgatctcggtgacctccgcctcctgggttcaagcgattctcctgcctcccaagtagctgggactacaggcgccca

SEQ ID NO: 356555 - DNA, 201 bp, Homo sapiens
gaagccatgacaaaagtgagacattggacatttttcaacattgcttttgtattacttacatggaacaagcaaaggacacaattatgcctgtagaagaaatrcatggaaagaatgggcaaaagatttcaagaacttgggggttttgacaagagtaagaagcaatgatatgctttatggaaagtgtaaggaaattttcaaggg

SEQ ID NO: 356556 - DNA, 201 bp, Homo sapiens
ccgagtaatgtaatggtgtttctctagaaaaaggttggaaatgagatcagtcatgtagaaaataactcctcacagtgcatttgtgtgtgctgcactctgtycctcagttgacaggaaagtgggactttctgttttttaatagaatgtctgcaacatagttggcgctcagtacacatatgcgtgcataaacaaaataacagt

SEQ ID NO: 356557 - DNA, 201 bp, Homo sapiens
gaaatacagagctgattttaactatttgtaaaagtctagtttgcctgttatgcaaaaatgttagacttataaaaatctcccctcacatttcaagaaaagawgcacttcatgtttaaacataaattttttatttttatttttgagacggagtctcgcattgtcacccaggctggaatacagtggcatggtcttggctcactg

SEQ ID NO: 356558 - DNA, 201 bp, Homo sapiens
ggattacaggcacacaccaccatgcccagctaatttatttatttatatattttttgagacagagttttgcccttgttgcccgggctggagtgcaatggcgygatcttggctcaccacaacctctgcctcctgggttcaatcagtttttctgcctcagcctcccaagtaactgggattacaggcatgtgccactacgcccag

SEQ ID NO: 356559 - DNA, 201 bp, Homo sapiens
ccctcatgtagtcactagagggcgctccactctcttttcagtctatgtgattgataactggtaccgttcaaggattactttgagactcctatagttgccasaagtcttaattcagtcatactcatatttatatagcattacatttttatttttattaatgagtctttccagtgcagtagtccctaaggcctttctatgaaa

SEQ ID NO: 356560 - DNA, 201 bp, Homo sapiens
tgtgggagctgataacgacatatacaacactgttcattgcacttgctgcctggaaagaaaatccaaatttgtctgtaaagaaaactttcccaagtccaatraaagggaacatggcaacacaatagcagacacagatgataaatatgagccacaggggtaaggagaaatcctttacatcagttaatgtaaaaacttcccccc

SEQ ID NO: 356561 - DNA, 201 bp, Homo sapiens
ctacctcagcttcctgagtagctgggattatgggcacctgtcaccatgcctggctaatttttgtagtttttagtagagatgggatttcaccatctcggccmtgctggtcttgaactcctgacctcatgatctacccgcctcagcctcccaaagtgctgggattacaggtgtgagccaccgtgcccggcctacatacctctt

SEQ ID NO: 356562 - DNA, 201 bp, Homo sapiens
actcctgacctcatgatctacccgcctcagcctcccaaagtgctgggattacaggtgtgagccaccgtgcccggcctacatacctctttttaatatcatgrtagtacttatactatagtatctgtgatgaagataatatgtaatgaaagatattttgaattaattggtgcctttttaaattttattttatttatttattta

SEQ ID NO: 356563 - DNA, 201 bp, Homo sapiens
tctcaaatttctaggttcaagcgatcctcctgcctcggcctcccaaagtgttcggattagaggccaccgagcctggccttgattttttttttttttttttwttcaagagacatggtcttgctccaagctggagtgcattggcaccttcttaggttactgcagcctcaaacttccgggcccaaacagtcctcctgactcagc

SEQ ID NO: 356564 - DNA, 201 bp, Homo sapiens
tacatttaacaaatatttgagtgcctacttttgtaaacatagcagtacattaaagaacaggacatgaaagttttgctggtacaaagttttgcagttattgygggaagacagatggtaaactagataattaaattaaaaatgtggtgtattaggtagtgataagtgccctggagagaaaataaagcggggaaagggaatgaa

SEQ ID NO: 356565 - DNA, 201 bp, Homo sapiens
gaccccttcttccctgagctgtatgtgtttatcatcattggatagtttctcctttaaatgcatctcctttagctttaataaaatgttttcttggcttttgtttttttttttttttttttgagatggagtcttgctctatcgcccaggctggagtgcagtggcgcgatctcggctcattgcaagctccgcctcccaggttca

SEQ ID NO: 356566 - DNA, 201 bp, Homo sapiens
taaaagctgctgtgattatctctctgtgccatcattagccctcatgtagtcactagagggcgctccactctcttttcagtctatgtgattgataactggtvccgttcaaggattactttgagactcctatagttgccacaagtcttaattcagtcatactcatatttatatagcattacatttttatttttattaatgagt

SEQ ID NO: 356567 - DNA, 201 bp, Homo sapiens
cctcccaagtagctgggattacaggtgcacgccaccatgtttggctgttttctgtaattgtggctttcaaacccataattagaaatactttacatcatgaygcagtgcatacatatgtatatatagattagtgaataaaacacatacatagattatataactgaaactacttgtgataaactctgttttctatttttgtta

SEQ ID NO: 356568 - DNA, 201 bp, Homo sapiens
tttttagttctgtaatttgttgattgtatttaactatgtgagttctgttgtgatgtttactgtattgtaaagcacctcattcatgtgatgagtgctctatraatcaataaatgatgacttagaggctgtatcacgagctattttggttttaggatgcaggtctcaaaagcaagttgtgggactctttctgtataaacagca

SEQ ID NO: 356569 - DNA, 201 bp, Homo sapiens
ttccaacaattctcctacctcagcctcccaagtagctgggattacaggtgcacgccaccatgtttggctgttttctgtaattgtggctttcaaacccatarttagaaatactttacatcatgacgcagtgcatacatatgtatatatagattagtgaataaaacacatacatagattatataactgaaactacttgtgata

SEQ ID NO: 356570 - DNA, 201 bp, Homo sapiens; identical to SEQ ID NO: 76266

SEQ ID NO: 356571 - DNA, 201 bp, Homo sapiens
tcaagtggcaagtggctgccagtagaatcaagtgcaggggctttgtggcagtggctttgatgtccttttacattgactctttttttgttgttgttgagacrgagtctcactctggcacccacgctggagtgcagtggcacaatcttggctcactgcaccctccacctcccaggttccaacaattctcctacctcagcctcc

SEQ ID NO: 356572 - DNA, 201 bp, Homo sapiens
aagcaggtaggccaggtgcggtggctcagaaggtcaggagttcaagaccagcctggccaacatagtgaaaccccgtctctactaaagatacaaaaattagygggacgtggtggtgtgcgcttgtaatcctaggtacttgggaggctgaggcaggagaatctcttcaacccgggaggcagagcttgcagtgagccgagatca

SEQ ID NO: 356573 - DNA, 201 bp, Homo sapiens
acaggatcagtagataaagacttaactctttttggtgtaatgcactcttcacaacagctattccagtctctattccctcaagccctcatgcttcttccttwcaatagataacctcatcagttgtgaaaagtaaggcgctatggtgggccttacttcatttctacatttcttcgaatatctcttttaaagcgcttgttttgt

SEQ ID NO: 356574 - DNA, 201 bp, Homo sapiens
acacagaaattatgaaacctggttctgtaacttatagtttttcatattatttttataccatggataactcttctatgtgtattcataggtgtaagattacyggcagtgtcatatgaaacaacatattacattttttaagcctggaaagcatctagtatggctgtgcacgtagtgatgacattgactttttttacttaaaga

SEQ ID NO: 356575 - DNA, 201 bp, Homo sapiens
atagaagccaaggcttgaaaaccagatgggcattaggagagactggaactggcaaatggagaactactgggagccaagggacttagcgtattttattgcayctaaggcagcagtgatcgtaaaagatagtgatttttcctaccagtaagaagaggaaaatatctctaacagttgatggcagaatgcattaaccgtattcct

SEQ ID NO: 356576 - DNA, 201 bp, Homo sapiens
aaacctttttagaagagtttcagatacacagaagaactgtgagaatagtacagtgagttcttacataccctgcattcagtttctcttatttttaacctttyccccaccccccagcccccgtgagacagtctccctctgtcagccaggctcactgcaacctctgcctcctgggcagaggtgattctcctgtctcagagtccc

SEQ ID NO: 356577 - DNA, 201 bp, Homo sapiens
acattgtaaaatagtaatactctatgaaatttttatgctgaattttgtagtgttacaagttttgatgttattcctttttttttttttttttttgagatggmgtttcgcccgttgcccaggctagactgcagtggtgtgatgttggctcatggcaacctctgcctcccggcttcaagcaattctcctgccccagcctcccaa

SEQ ID NO: 356578 - DNA, 201 bp, Homo sapiens
tgatctggtgtgaatgtctttttagcagatgatttcattttaccagctctcttgaaagtttaatcaatgtgatagccatgacagtttattaaactacttakttgagaaagtaactgcctgtgggaatccagattatttgtttacttcatttttgatgttagtgctagcacccttgttttatatttgttttaacacttctat

SEQ ID NO: 356579 - DNA, 201 bp, Homo sapiens
aatagtaatactctatgaaatttttatgctgaattttgtagtgttacaagttttgatgttattcctttttttttttttttttttgagatggagtttcgccygttgcccaggctagactgcagtggtgtgatgttggctcatggcaacctctgcctcccggcttcaagcaattctcctgccccagcctcccaagtagctggg

SEQ ID NO: 356580 - DNA, 201 bp, Homo sapiens
agcctcattttaaccacggagcaaagtcctacagtagttaacacaaaagataaaaagtaaggaatcggggctgggcacggtggctcacaactgtaatcccrgcactttgggaggccgaggcgggtggatcacgaggtcaggagattgagaccatcctggctaacacggtgaaaccccgtctccattaaaaatacgaaaaat

SEQ ID NO: 356581 - DNA, 201 bp, Homo sapiens
gcactggagtgatatgacctgatttacattttaatgagatcattcttggcttgctatgctgagaatatagactgcacggagagtcagatgagacatgatgytagcttggacctgtattggagccgagaacaaagtggtttaattcttgggtgtatttcctaaatagagctgttggaatttgctggtggaatagaattcttt

SEQ ID NO: 356582 - DNA, 201 bp, Homo sapiens
ttgtactcttttgtttcttttttttggtagagacaggggtttgccatgttgcccaggctggcatcaaactcctgggctcaaacgatctgcccacctcagcytcccaaagttttgggattacagcggtgagccaccatgcccagctcatgtcatttttgacttactactttaagccccacttctttaacatcaccaggttag

SEQ ID NO: 356583 - DNA, 201 bp, Homo sapiens
ctgtgtggacagatgttagggtatatacctagaagtggaattgctgggtcatatggtaactctgctcaactttttaatcatatgtcattttactttttttwaaaaaaattattttttaaactgagacaaggtctggctctgttgcccaggctggagtgccctggtgtcatctgaggtcactgcaacctccgcctcctgggc

SEQ ID NO: 356584 - DNA, 201 bp, Homo sapiens
cccagatactactctcacttcctgctccaaaagacagagagagagagagagagaaatactatcgtcctgatttgtaatactgttggttagttttgcctccwttagaactataaacttttgtgttttagcagtcatgacttttgtgagaaagagaggtctttctagccctttccaactcttaattttatctctagatagcat

SEQ ID NO: 356585 - DNA, 201 bp, Homo sapiens
ttctgtaatgaagttctggagggaatgaacctagtgcctacattgcttggaaatggaatgatcagtggtaatgccatgcggtttatcacgtagtgttcaagaacatggactttggggactgcctttggttagctctctaactctaccactcttcttagttgagtgactttgaacaattacttaaatttggtcttagcagtt

SEQ ID NO: 356586 - DNA, 201 bp, Homo sapiens
ccacaggggtaaggagaaatcctttacatcagttaatgtaaaaacttcccccccctttttttgttgttgttgttctttatgaaggattctctctgctctcrcatctaagtaagcaagagccaaggaaggcacagattagtgaaagaatacattttatacccccaatcttaagtgtgaccccaggggttgtgtgaccagcag

SEQ ID NO: 356587 - DNA, 201 bp, Homo sapiens
tttgtgacagtctcgctctgttgcccaggctggggtgcagtggtgtgatcttggctcagtacaacctctgcttcccggttccaagcgaatctcctgcctcrgcctcccaagtagctggattaggggtgcccgccactacgccactacggctatttttgtatttttgtattttttttgagacagagtcttgctctgtcaccc

SEQ ID NO: 356588 - DNA, 201 bp, Homo sapiens
tgcagccttgacctcctgggctcaagtgatcctcccaagtagctgggatgacagggacacgccaccacacccagctaatttttgtttttttttgtaaagasggggtttcaccatgttgttggccaggcaggtcctgaactcctgggcacaagtgatctgcccactttgtcctcccaaagtactgggattacaggcattagc

SEQ ID NO: 356589 - DNA, 201 bp, Homo sapiens
atggcaacacaatagcagacacagatgataaatatgagccacaggggtaaggagaaatcctttacatcagttaatgtaaaaacttcccccccctttttttkttgttgttgttctttatgaaggattctctctgctctcacatctaagtaagcaagagccaaggaaggcacagattagtgaaagaatacattttataccccc

SEQ ID NO: 356590 - DNA, 201 bp, Homo sapiens
ggtaaaaagaaagagagcaatcacctaggtagtttaagaggacagctgataaaatggtggtgtgttttgttttaaggttgaagagacttttttttcttttyttttcttttcgtttctttctttttttttttttttttttttttttgagacggagtctcactgtctcgcccaggctggaatgcagtgggactatcttggctc

SEQ ID NO: 356591 - DNA, 201 bp, Homo sapiens
gttttgcccttgttgcccgggctggagtgcaatggcgcgatcttggctcaccacaacctctgcctcctgggttcaatcagtttttctgcctcagcctcccragtaactgggattacaggcatgtgccactacgcccagctaattttgtatttttaatagagacggcgtttctccatgttggtcaggctggtctcaaactct

SEQ ID NO: 356592 - DNA, 201 bp, Homo sapiens
aaagaaagagagcaatcacctaggtagtttaagaggacagctgataaaatggtggtgtgttttgttttaaggttgaagagacttttttttcttttcttttyttttcgtttctttctttttttttttttttttttttttttgagacggagtctcactgtctcgcccaggctggaatgcagtgggactatcttggctcactgc

SEQ ID NO: 356593 - DNA, 201 bp, Homo sapiens
aaaatgctgggattacgggcgtgagccaccgcgcccggccttaaactagttgttaaatagagtatcctattcaacattgtggatttttctaattattttckcaagaaatcatttaactggctggacatggtggctcatgcctgtgatcccagcattttgggaggctgagttgggaggatcacttgaatccagcagtttgag

SEQ ID NO: 356594 - DNA, 201 bp, Homo sapiens
agagagcaatcacctaggtagtttaagaggacagctgataaaatggtggtgtgttttgttttaaggttgaagagacttttttttcttttcttttcttttcktttctttctttttttttttttttttttttttttgagacggagtctcactgtctcgcccaggctggaatgcagtgggactatcttggctcactgcaacctc

SEQ ID NO: 356595 - DNA, 201 bp, Homo sapiens
tcacctaggtagtttaagaggacagctgataaaatggtggtgtgttttgttttaaggttgaagagacttttttttcttttcttttcttttcgtttctttcyttttttttttttttttttttttttgagacggagtctcactgtctcgcccaggctggaatgcagtgggactatcttggctcactgcaacctctgcctcctg

SEQ ID NO: 356596 - DNA, 201 bp, Homo sapiens
taggtagtttaagaggacagctgataaaatggtggtgtgttttgttttaaggttgaagagacttttttttcttttcttttcttttcgtttctttctttttytttttttttttttttttttgagacggagtctcactgtctcgcccaggctggaatgcagtgggactatcttggctcactgcaacctctgcctcctgggttc

SEQ ID NO: 356597 - DNA, 201 bp, Homo sapiens
ggtatgctataagtaacaggcctttgaaactcattttgggtattgtgaagatgttatattacagtgtccttttatttatttaatttgaggttaaatgtaatttttttttttttttgagacggaatctcgctctgtcgccgagactggagtgtagtggcgcaatctcggctcactgcaagctccgcctcccgggttcatgcc

SEQ ID NO: 356598 - DNA, 201 bp, Homo sapiens
tagtttaagaggacagctgataaaatggtggtgtgttttgttttaaggttgaagagacttttttttcttttcttttcttttcgtttctttctttttttttytttttttttttttttgagacggagtctcactgtctcgcccaggctggaatgcagtgggactatcttggctcactgcaacctctgcctcctgggttcaaac

SEQ ID NO: 356599 - DNA, 201 bp, Homo sapiens
agtttaagaggacagctgataaaatggtggtgtgttttgttttaaggttgaagagacttttttttcttttcttttcttttcgtttctttcttttttttttkttttttttttttttgagacggagtctcactgtctcgcccaggctggaatgcagtgggactatcttggctcactgcaacctctgcctcctgggttcaaacg

SEQ ID NO: 356600 - DNA, 201 bp, Homo sapiens
agtagttgggactacaggtgcacgccattgcgcctggctaacttttaaaatttcttggccaggtgtccactaatcttaatcgtttctagcgtttgatttaragtgagaccacttgaacatttagaggccattctagggttattatttgacttaatttcagtattgttgtgtctcaggataattgggagtcctgagaatcag

SEQ ID NO: 356601 - DNA, 201 bp, Homo sapiens
ccagttgtagaaattttgcaactttttttcctaaacagtttgagagtagtttatagataccataacccttcaccccaaaatgtttcaggatctgttccctragaacaaggctgtctttccatatacacagtacaagtctgtcgttaatgtagtactattattgtttatgcatatataatctatattcacattggattggat

SEQ ID NO: 356602 - DNA, 201 bp, Homo sapiens
cttgaaagattacactcatagaagattggaaggggaagtcagagagatagcagggaggtagagcattttagcaataatttgagtaaaaaacaataaaaacktgaactaagaatagtgttgcaggaagggtaatttagtttctttgacttgactgccagaggtgaatggtaaaggagaagtaagagtttaggattgactggc

SEQ ID NO: 356603 - DNA, 201 bp, Homo sapiens
tggcagctctcaggcctttatggcacagcttcccaactctgaaaaaccactccctcctgtggccttggggtaccgggggccttgtttggcagtcctactaraaacatagttgggcgtgaggtttgaagctgggtagtattttccaaaagaaataattcaggtatgggcttgttctcaggattctgaagaatacagacgtat

SEQ ID NO: 356604 - DNA, 201 bp, Homo sapiens
atcctcccaccttgacctcccaaagcactgagattacaggtatgagccactgtgcctggccaaaaatgtttttgattaggaaatcagctagccggtagccygtgtcgtggtacaaataaaaaattctaattttaagcaaatttttaaagtttaccagaaatttgtaaaatttattaacttgatgcatcttgaaatctaaag

SEQ ID NO: 356605 - DNA, 201 bp, Homo sapiens
cggggtttcaccatgttggacaggctggtcttgaactcctgacctcatgtgatctgtctgcctcagcctcccaaagtgctgggattataggcgtgagccaygcgcctggtcttagatggaattttgaatgaagatgatgcttggcttgaacttcattctttaggctgtgaggactcatttaattcatgacatttaaagctg

SEQ ID NO: 356606 - DNA, 201 bp, Homo sapiens
tttcagaattttaggtgcatggcctcaagaaaaaggaggtagctagaagtatatgcattgtttaggcagcttagttttgtttgtttggttttggtttgggttttttttttttttttttgagacagagtctcactctgtcgcccaggctggagtgcagtggctcactgcaacctccgcctcccaggttcaagcaattcacct

SEQ ID NO: 356607 - DNA, 201 bp, Homo sapiens
cctatggtcccaactacttgggaggctgaggtgggaggatcactagagcccaggagtttgagaccagcctgggcaacatagtgagacccccatctctaccaaaaaaaaaaaaaaagtcaggttagccaggcatcatgccatgtgcccatggtcccagctacttggagggctgaggcaggaggatcgtttgagcctgggagg

SEQ ID NO: 356608 - DNA, 201 bp, Homo sapiens
ggtaaggtggtcacacgtcttcccttcccttcactttcccttgtaataaaacctgaactatagttagtatgtatgtaagtatgcatgaatgtatgcatgcktgtgtgtgtgtgtgtgtgtgtgtatctcttcccatagttcttatttttgacaaaataaatatatttatttacgtatttattttattttttttgagacagg

SEQ ID NO: 356609 - DNA, 201 bp, Homo sapiens
cttttttttcttgaatcccactggttcttccttctgatttaactagttagttgtctcatattaaaaccaaaaaccatgacttataaacagtttaccattctttttttttttttttttgagacagagtctcactctgttactcaggctggggtgcagtggcacaatctcagctcactgcaacctccacctcccgggttcaag

SEQ ID NO: 356610 - DNA, 201 bp, Homo sapiens
tgcatgagcccaggtgttcaagcctgcagtgagctatgatcaccactgcacttcagcccaggcaacagagtgagaccctatctccaaaaaaaaaaaaaaaraaaaaaaagaaaagaaaagaaaagaaaagaaaaagaaatgacagtctcggggggaaaaaaacaaatggtatttatgtcactcaaagctatatggctattt

SEQ ID NO: 356611 - DNA, 201 bp, Homo sapiens
aaattagccgggtgtggtggcacgtgcctgtagtgccagctactcgggaggctgaggcaagagaatcgcttgaacccaggtgttcaagaacctcttgaacygaggttgcagtgagccaagatcgccactacactccagcctggtgacagaacaagactctgtctaaaaaaaaaaaaatgctggggtgtgacattatatgtg

SEQ ID NO: 356612 - DNA, 201 bp, Homo sapiens
cacactagcagttcttttatttattttttgttttttttttgagacagattctcgctctgtcgcccaggctggaatgcagtggcatgatctcggctcactgsaacctttgcctcccgagttcaagtgattctctcacctcagcctcctgagtaacagggattataggcgcgtgccaccatgcctggctaaattttttgtatt

SEQ ID NO: 356613 - DNA, 201 bp, Homo sapiens
tcccgagtagctgggactacaggcgcctgccaccatgcccggctagtttttttgtatttttagtagaggcggggtttcaccatgttagccaggatggtctygacctcctgacctcgtgatctgccctcctcggcctcccaaagtgctgggattacagacgtgagccaacacgtccagcctcatactatttttaaatgagct

SEQ ID NO: 356614 - DNA, 201 bp, Homo sapiens
ctttcaattaatctctattttcaggccctcttttttttttttttttgagagacggagtctcgctctgtcgctcaggctggagtgcagtgtcacgatattgsctcactgcaacgtctgcctctcaggttcaagcgattctcccacctcagcttcccaagtagctgggactacaggcatgcaccaccacgtccagctaatttt

SEQ ID NO: 356615 - DNA, 201 bp, Homo sapiens
gcctttgaaactcattttgggtattgtgaagatgttatattacagtgtccttttatttatttaatttgaggttaaatgtaatttttttttttttttgagayggaatctcgctctgtcgccgagactggagtgtagtggcgcaatctcggctcactgcaagctccgcctcccgggttcatgccattcttctgcctcagcctc

SEQ ID NO: 356616 - DNA, 201 bp, Homo sapiens
gctggagtgcagtgtcacgatattgcctcactgcaacgtctgcctctcaggttcaagcgattctcccacctcagcttcccaagtagctgggactacaggcrtgcaccaccacgtccagctaatttttgtatcttttagttgagatggggtttcatcatgttggccaggctggtcttgaagtcctgacctcaggtgatcctg

SEQ ID NO: 356617 - DNA, 201 bp, Homo sapiens
tcaaaataaatgaagagttcaagatgacatcagttccatttgttttaagttctggtgttgtgtgaatgacaagcagcagccagttatgacggcaggtgatycaaagtaattgccaaatttgttaacatttttccatctctaaaccatccttaaagaaaaacatatatggtgtcacaccattctcatggtagtcctaggctg

SEQ ID NO: 356618 - DNA, 201 bp, Homo sapiens
tctgcctctcaggttcaagcgattctcccacctcagcttcccaagtagctgggactacaggcatgcaccaccacgtccagctaatttttgtatcttttagwtgagatggggtttcatcatgttggccaggctggtcttgaagtcctgacctcaggtgatcctgaggtcctgcctcggcctcccaaagtgctgagattatag

SEQ ID NO: 356619 - DNA, 201 bp, Homo sapiens
ttgaacccaggaggcagaggttgcagtgagccgagatcgcgccactgcactccagcctgggcaacagcgcgagactctgtctcaaaaaaaaaaaaaaaaaraagaagaagaaaatgtaagctgtatagatgagactgcagtaactcatctactgtgaaggaccatacaaaacaagtgtattagctatctaatacatattta

SEQ ID NO: 356620 - DNA, 201 bp, Homo sapiens
gttagacacttccatgaatgtacttcatacatgtaaaacttcgtagatgcatgactcatggctctgggtggtctagctaaactagtcttttacgtcatacrtgtaaaactttgtagatgcaataactcatggctctgggtagtctagctaagctagtctttccactcaaagagcacgatacttaagctttctcctggtgag

SEQ ID NO: 356621 - DNA, 201 bp, Homo sapiens
agaggtaacgtttaagctgagtaccgaatgataatcagaagacaaagggagaaaagtatttccaacagaggaaatatttagtaccaaggccgcaagacagraatttagtatttttgccctttaaggctgacttgatctctgtggttttagttaatgtatacaactcattgtattgttcttttgatgattccttaagaatga

SEQ ID NO: 356622 - DNA, 201 bp, Homo sapiens
ctttggacaaactgaggttcatatatatatatatatatatatatatatatatatatatataacttttttttgggggcagagtttcgctgtgtcgctcgggytggattgcagtggtgcaatctcggctcactgcaatctccgtctcctgggttcaagcagttctagtgcctcagcgtcccagagtgctgggattacgggcat

SEQ ID NO: 356623 - DNA, 201 bp, Homo sapiens
agactgtttgcctagccaggtagaccaagcataaaacaaagtaaggttaaaccacattaaaaacttcagtggaggccaggggcagtggctcacgcctgtartcccagcactttgggaggcgaagatcggtgggtgggagtttgagaccaacatggcaaaaccgcttcctactaaaaatacaaaaaaaaaaattagccagta

SEQ ID NO: 356624 - DNA, 201 bp, Homo sapiens
tccagagtagagatgaagatctgtttggtgtagagagcagtacttaccagggcaaggacaacttggagactgcacaattagggtacagaaggaagagacaragactggcttggtaacatgcaggagagttaggagagtgagttctcacagagagctcagaaaggaagttggtgttagagctactcaccaatctcatggtag

SEQ ID NO: 356625 - DNA, 201 bp, Homo sapiens
gaggccgaggtaggcagatcacgaggtcagaagatcgagaccatcctggctaacacagtgaaaccccgtctctactaaaaatacaaaaaattagccgggcrtggtggcaggcgcctgtattcccagctactcgggaggctgaggcaggagaatggcgcgaacccgggaggtggagcttgcagtgagccgagatcgcgccac

SEQ ID NO: 356626 - DNA, 201 bp, Homo sapiens
gggtgtggtggcgggtgcctgtagatccagctactcgggaggctgaggcaggagaatggcgtgaaccagggaggcggagcttgcagtgagccgagatcgcrccactgcagcctgggtgacagagcaagactccgtctcaaaaaaaaaaattggtaagttcatattgggctttagaaggcatgctgaattttgaacatgtct

SEQ ID NO: 356627 - DNA, 201 bp, Homo sapiens; identical to SEQ ID NO: 76273

SEQ ID NO: 356628 - DNA, 201 bp, Homo sapiens; identical to SEQ ID NO: 76274

SEQ ID NO: 356629 - DNA, 201 bp, Homo sapiens; identical to SEQ ID NO: 76267

SEQ ID NO: 356630 - DNA, 201 bp, Homo sapiens; identical to SEQ ID NO: 76268

SEQ ID NO: 356631 - DNA, 201 bp, Homo sapiens; identical to SEQ ID NO: 76270

SEQ ID NO: 356632 - DNA, 201 bp, Homo sapiens
ctgcctcagcctcccaagtaactgggattacaggcatgtgccactacgcccagctaattttgtatttttaatagagacggcgtttctccatgttggtcagkctggtctcaaactctcgacctcaggtggtccacctgcctcggcctcccaaagtgctgggattacaggtgtgagccaccacgcccggccaaattgtataat

SEQ ID NO: 356633 - DNA, 201 bp, Homo sapiens
gagaggcaaaaggggtgacaactccaggacctggcagaaaagcagtgcccacggagcacagccaagtcagtgatcacatgactatgtgattctgactatcrtagaataatagtgaactgtggcggatagaatgaatggacaagagacagctacaacaggactatagattaatagaacaatgttgagcaaattgcagacggc

SEQ ID NO: 356634 - DNA, 201 bp, Homo sapiens
atttttcctaccagtaagaagaggaaaatatctctaacagttgatggcagaatgcattaaccgtattcctgcatgatgcgggcatgcatgaatgggtgacrcttgcctcttgtgctttggcttttcttttatctcttcctaggctttcgacagtttcttctaccttcacttgcattacttgattataataggcaatcgttt

SEQ ID NO: 356635 - DNA, 201 bp, Homo sapiens
gcctcttgagtgtcgtatatgttgatgagttttcattggcagtatggcatgtttgttttgtgaatttgaatatactcctttctcagaaaatacaattttgsctttatatgattgtaaaaatatatttcttaggaatagtctctgggcctttgactattaccaatttaagtcggtaagttagtggggaaactaggaggccat

SEQ ID NO: 356636 - DNA, 201 bp, Homo sapiens; identical to SEQ ID NO: 76271

SEQ ID NO: 356637 - DNA, 201 bp, Homo sapiens
caacattgtggatttttctaattattttctcaagaaatcatttaactggctggacatggtggctcatgcctgtgatcccagcattttgggaggctgagttgggaggatcacttgaatccagcagtttgagaccagcctggacaatatagtgagacccctatctcactttataaataaagcaattgtttcacttatttccac

SEQ ID NO: 356638 - DNA, 201 bp, Homo sapiens
aacattgtggatttttctaattattttctcaagaaatcatttaactggctggacatggtggctcatgcctgtgatcccagcattttgggaggctgagttgggaggatcacttgaatccagcagtttgagaccagcctggacaatatagtgagacccctatctcactttataaataaagcaattgtttcacttatttccaca

SEQ ID NO: 356639 - DNA, 201 bp, Homo sapiens
tcgtagaggcatatagatttcagtctgtgcttgtatgggatagatgatctgagtggctttctggcctcttttttgagtttaaaatccatatgaggttgacktgtcatactaaggtaacatgtttgtgaggttattccactagtactgtgatcacgtgggtgtcagtatctttaacggccttcattcttggttgtgagattt

SEQ ID NO: 356640 - DNA, 201 bp, Homo sapiens
acattgtggatttttctaattattttctcaagaaatcatttaactggctggacatggtggctcatgcctgtgatcccagcattttgggaggctgagttgggaggatcacttgaatccagcagtttgagaccagcctggacaatatagtgagacccctatctcactttataaataaagcaattgtttcacttatttccacat

SEQ ID NO: 356641 - DNA, 201 bp, Homo sapiens
cattgtggatttttctaattattttctcaagaaatcatttaactggctggacatggtggctcatgcctgtgatcccagcattttgggaggctgagttgggaggatcacttgaatccagcagtttgagaccagcctggacaatatagtgagacccctatctcactttataaataaagcaattgtttcacttatttccacatc

SEQ ID NO: 356642 - DNA, 201 bp, Homo sapiens
ataccatggataactcttctatgtgtattcataggtgtaagattactggcagtgtcatatgaaacaacatattacattttttaagcctggaaagcatctastatggctgtgcacgtagtgatgacattgactttttttacttaaagaagagctaccacttcaaatccacacggtggcagttctcctgcctagccagctgcc

SEQ ID NO: 356643 - DNA, 201 bp, Homo sapiens
aactacacacagtgaaataaaagccttgttttattttatttttgagacagagttttactttgttgcccaaactggggtgcagtggcgagatcttggctgaygacaacttctgcctctgggttcaagtgattctcctgcctcggcctcagagttgctgggattacagaagccctccactgtgtctggccaatttttgtattt

SEQ ID NO: 356644 - DNA, 201 bp, Homo sapiens
cttttcaccctggccataagttctttttgtggaagcaacccatcattgacaaatatgtcttttttttttttttttttttttgagacagtcttgctctgtcrcccaggctggattgcagtggcccaggctggaatgcagtggcacgatctccgctaagtgcaacctccgcctcgcgggttcaagcgtttcttgtgcctcagc

SEQ ID NO: 356645 - DNA, 201 bp, Homo sapiens
accacacctggctaattttttgtatttttagtagagacggggtttcactgtgttggccaggatggtctcgatctcctgacctcgtgatccgtccgtctcascctcctaaagtgctgggattacaggcgtgagccagtgtacccggccacacccggctgatttttgtattttagtagagacggggtttctccgtgttgccca

SEQ ID NO: 356646 - DNA, 201 bp, Homo sapiens
gacggggtttcactgtgttggccaggatggtctcgatctcctgacctcgtgatccgtccgtctcaccctcctaaagtgctgggattacaggcgtgagccartgtacccggccacacccggctgatttttgtattttagtagagacggggtttctccgtgttgcccaggctgatcttgaactcctgagctcaggcagtctgc

SEQ ID NO: 356647 - DNA, 201 bp, Homo sapiens
agctagctagcttgccttcctccctccctccgtctctccttcccccactctgcccctccttttccccttctctccctctctcgctccctccctccctcacktacgtttctcccattccgtcctttttttctaagacagggtctcactctgccacccaggctgcagtgcaatggcatgatcacagctcactgcagccttgac

SEQ ID NO: 356648 - DNA, 201 bp, Homo sapiens
ctcttcttctgccctgagcatttgccaaatggatacaacaaaattctcgttatccagtttggtttatatttaactcttgcaggtgcagcagtggcacagaygagggtattgtgttgcctgctaccctcttcagcctctaagccatatggcatggctattggggaagcaatatgactgtgataggatttttgtttttaaata

SEQ ID NO: 356649 - DNA, 201 bp, Homo sapiens
ccttgacctcctgggctcaagtgatcctcccaagtagctgggatgacagggacacgccaccacacccagctaatttttgtttttttttgtaaagacggggyttcaccatgttgttggccaggcaggtcctgaactcctgggcacaagtgatctgcccactttgtcctcccaaagtactgggattacaggcattagctacca

SEQ ID NO: 356650 - DNA, 201 bp, Homo sapiens
cagcctgggccacagagtgaaactctgtctccaaaaaaagaaagaaggccacaatgcttaaaaagcccatccaaataatcagaaaaaagagaatcactcartgtaaaaaaaacggggtgggggaataaaaatatgtaaatgcaccaaagataaattgccagtggcagaaggatgcccagtgttagcaaggctgtagggaaa

SEQ ID NO: 356651 - DNA, 201 bp, Homo sapiens
tgctgggattataggcgtgagccacgcgcctggtcttagatggaattttgaatgaagatgatgcttggcttgaacttcattctttaggctgtgaggactcrtttaattcatgacatttaaagctgtacatattgtcatgacaaaaagagaaaatgacaaaaaataaaaaagctatgtaataggtttctcttatattttcct

SEQ ID NO: 356652 - DNA, 201 bp, Homo sapiens
tggtttgtgcctgtggtcccagctactcaggaggctgaggtgggaggattgcttgagcccaggaggcggaggttgcagtgagccatgaacacactactgcrctccagcctgggccacagagtgaaactctgtctccaaaaaaagaaagaaggccacaatgcttaaaaagcccatccaaataatcagaaaaaagagaatcac

SEQ ID NO: 356653 - DNA, 201 bp, Homo sapiens
gggacgccgggggaagtaagccttctccttaggaaatcgaaactgctgtcctggcacgttctgcatccggaaggggtccatccctcgcttgcggaagagcrtgggtctcctcgggctgggttggggtgaggtggggtggggtgggggcgaggcagcagcgagctggcccacgcttcaggcgggcgcactggcggctccggc

SEQ ID NO: 356654 - DNA, 201 bp, Homo sapiens
agatagaaacaaagtgagctcagaatgaaattaaggatttgttgtcaaataaatctaatatggataaaacctacttacagttaattcttttgtaattgatraattgactatataatgttgtttttgttgttgtaggtctccaattgagaaacatggcactgtttttcctgcactctacccacctattgctggacttctgtt

SEQ ID NO: 356655 - DNA, 201 bp, Homo sapiens
gccgaggtgggcggatcacgagatcaggagatcgagaccacggtgaaaccccgtctctactaaaaacatatatatataaaaaattagccgggcgtggtggygggcgcctgtagtcccagctactcggagaggctgaggcaggagaatggcgtgaacccaggaggtggagcttgtagtgagctgagatcgcgccactgcact

SEQ ID NO: 356656 - DNA, 201 bp, Homo sapiens; identical to SEQ ID NO: 76269

SEQ ID NO: 356657 - DNA, 201 bp, Homo sapiens
acagacaagggtctcctgttgcccaggctggtctcgaactcctggtgtctaacaatcttcccaccttggcctcccaaagtgctgggactacaggcaggagycactgtgcctggccatctcttgggtttcagtgtatgtcttttgattttctaataaaaatatgtatgtgcatacgtgtatctggtgaaggtgatatatttg

SEQ ID NO: 356658 - DNA, 201 bp, Homo sapiens
tagtaatacataatatcatatgctgtgcccaaattttccattgtgaagtgacattcagaaatcctcaggaatcatctttatcaaatttatttctataaaayaggcgagatcaaagtaagctgtttgtgtgacactataaactagtgttagggcataatttcggtattgtgaggagttcctgctgcgacaaatcttggcaga

SEQ ID NO: 356659 - DNA, 201 bp, Homo sapiens
ttcaagtccatgacccacacatattttctcaaaatgcacggattactgtgggtgccacttggcccaggctttatctcacattttgttagtgtttatacctygtcctatatagagattattagtacccttatgttctaattcagctgtggggtaggaagaatagagaggaaaaggaaacaaattctccccttgccacagatg

SEQ ID NO: 356660 - DNA, 201 bp, Homo sapiens
catgtctcactgcagccttgaactcctagcttcaagttgtcctcccacctcagcctctcgagtagctgggactacaggctgtgccaccgtggctggctaaytatattatttattgtacagacaagggtctcctgttgcccaggctggtctcgaactcctggtgtctaacaatcttcccaccttggcctcccaaagtgctgg

SEQ ID NO: 356661 - DNA, 201 bp, Homo sapiens
ttctgtaacttatagtttttcatattatttttataccatggataactcttctatgtgtattcataggtgtaagattactggcagtgtcatatgaaacaacrtattacattttttaagcctggaaagcatctagtatggctgtgcacgtagtgatgacattgactttttttacttaaagaagagctaccacttcaaatccac

SEQ ID NO: 356662 - DNA, 201 bp, Homo sapiens
ggaatgtctgtcacaattttttttttttctgctgtaagataaagaaaaggctgtatcccttagacacatacttaatgaagacaatctcaaaagaagctccygtgtttttctgttttcactgttcttttctgaagttcacctggatgttccagagcagttttctaaacctttcattgttggttggccttttgtagaattctt

SEQ ID NO: 356663 - DNA, 201 bp, Homo sapiens
tcaaggtattagatgattcactggctattacaaagaacacagaaattatgaaacctggttctgtaacttatagtttttcatattatttttataccatggayaactcttctatgtgtattcataggtgtaagattactggcagtgtcatatgaaacaacatattacattttttaagcctggaaagcatctagtatggctgtg

SEQ ID NO: 356664 - DNA, 201 bp, Homo sapiens
cctcagccccactttttattcaggctcttctcagatttgccatttccaaattttagcttctctaggcctctgtttaatagacccttttccctttgtttccyctctcctccaactcctctctctcctgctcttccctttccctcccctcccttcattaccccactgttctgttccatttttgtatgtcaggcagtgacagtg

SEQ ID NO: 356665 - DNA, 201 bp, Homo sapiens
tggctgaaaccccatctctaccaaaaaatataaaaattaccaaggtgtagtggtgcactcctgtagtcccagctactcaggaggctgagatgggagaatcmcttgaacccaggaggcggaggttgcagtgagctgagattgcatcattgcactccagcctgggcaacagagcgagactccatctcaaaaaaaaaaaaaaaa

SEQ ID NO: 356666 - DNA, 201 bp, Homo sapiens
tcatttctagggtaaaaactctatgcttaggaaatgtttcaaacgttccatgttctattgcttataatagcaaaaaaaaaattattttttccccttttgcrgttttattatttatttttgtaaatgtcaattataattcgaaggacactttgtagttactaattagactatatgaaaaactgtacagactgtttgtactat

SEQ ID NO: 356667 - DNA, 201 bp, Homo sapiens
accactcttcttagttgagtgactttgaacaattacttaaatttggtcttagcagtttcatttctagggtaaaaactctatgcttaggaaatgtttcaaaygttccatgttctattgcttataatagcaaaaaaaaaattattttttccccttttgcggttttattatttatttttgtaaatgtcaattataattcgaagg

SEQ ID NO: 356668 - DNA, 201 bp, Homo sapiens
attttaaccacggagcaaagtcctacagtagttaacacaaaagataaaaagtaaggaatcggggctgggcacggtggctcacaactgtaatcccagcactktgggaggccgaggcgggtggatcacgaggtcaggagattgagaccatcctggctaacacggtgaaaccccgtctccattaaaaatacgaaaaattagccg

SEQ ID NO: 356669 - DNA, 201 bp, Homo sapiens
tagactatttctactttcctgaaatttttgaggtgttaatggcctaaattgatgatcagtttttataactgttgcatagagacttgatctcattctttcayatgttcagccattttgtcgtttatgtatttgatctttcaggaaatgatactcttatattcttacttctgcctaaaagtttttcttagatttctttgaaat

SEQ ID NO: 356670 - DNA, 201 bp, Homo sapiens
gcctcagcctcctgagtagctgggactacaggcgtccgccaccacgcctggctaattttttgtatccttggctaattctttgtatttttagtagagacggrgtttcaccatgttagccaggatggtcttgatctcctgacctcgtgatctgcccgccccggcctcccaaagtgcggggattacaggcgtgagccaccgcgc

SEQ ID NO: 356671 - DNA, 201 bp, Homo sapiens
aacttcatcaggatataactcggtcttggtgtgattctcttacattttcctgttaaatggtaagccattcaaactgcagattcaggaatattttcttatayaccttttaatatgcattcatttttatttttctttactcaagaaacatcagttttatgattgtttatcttcatttcctgtcttccatttcattacttttct

SEQ ID NO: 356672 - DNA, 201 bp, Homo sapiens
agcctgggcgacaaagctgttctctcagcccagtctccttagtaagatctaataatttttcctttgggagatgactttctctaaactttggaggtcagcartaaattgaaagggactagtttcttatctgattaattcattttcattttgatgaattcgtatgccttcttaggttcttccttaaaatccttaattaaagga

SEQ ID NO: 356673 - DNA, 201 bp, Homo sapiens
ctatttttgtcagttataaatttgctttccaatatttctcctttattaatagttttctgcaattcattgggggaaagtttgttgcagtctcgctatcagcrgaagctaatttatttatcagtgatatttaatgttatgcatttatgtactgttcttaaacctctcaaacaattcagggcttgctttgcaactgagctgctc

SEQ ID NO: 356674 - DNA, 201 bp, Homo sapiens
tacaataaaacattctaaactttttccccctagtgcaagatagtattgggctaatttgagttaatcagcagtttttttttttttgttttttttttttttttgagatggagccttgttctgtcgcccaggctggagtatagtggcgagatcttggctcactgcagcctctgcctcccgggttcaagtgattctcctgcctca

SEQ ID NO: 356675 - DNA, 201 bp, Homo sapiens
aaaaaaaaaatgtaaaagatacctgtttccccaaggccggctttgtagactgaatagtcagcagcctcacctgtctcttcttgaaggctggcttttctcayggctttatcaccatgcactttctgagtattttttgtgttttcagtcatgtgataggacatagacgtgaacgaaaactcactataaacacttgaaaaatgt

SEQ ID NO: 356676 - DNA, 201 bp, Homo sapiens
aaagttttagctcttacgtttaagttttcagttcatttagagttattttttgcatatcatgtaaggaaagaatccaccttcattcttttgcttatggatayccagtttccctagtgttgtttattgaaagattttctttcctcattgagcggtctagtcaaccttgttgaaaatcagttggccatatatgcaagggtttta

SEQ ID NO: 356677 - DNA, 201 bp, Homo sapiens
ttgttgctaaatccaatgtcttgaagattttctcttattttttcgcctgagagttttaaagttttagctcttacgtttaagttttcagttcatttagagtwattttttgcatatcatgtaaggaaagaatccaccttcattcttttgcttatggatacccagtttccctagtgttgtttattgaaagattttctttcctca

SEQ ID NO: 356678 - DNA, 201 bp, Homo sapiens
atcacttgaggtcaggagtttgagaccagcctggtccacgtggtgaaaacctgtatctactaaaagaatacaaaaattagccagacatggtggcatttgcytgtagttgcagctatttgggaggctgaggcatgagaatctctcaaacctaggaggtggaggttgcagtgagctgagattgtgccactgcactccagtctg

SEQ ID NO: 356679 - DNA, 201 bp, Homo sapiens
tgtcctgtagcctaattaatgagcaattttaaaggaagaaaatggacaactaacatttattgtaccttaagctgggtcagactttcgcatatacaatatcytctccgtgttgcaacgttaccaagggctttaccatcctttactgataaggaaaatgagactcaaaaaatagaaatgatctgtttaagttgcccaggctag

SEQ ID NO: 356680 - DNA, 201 bp, Homo sapiens
ttatcttctgtcccctacactccgctgctttcttctgtccctttctcatattcctaactctgggtttactattgcttttcttcataattttaccaaatttkcatgtttaaacaatgtatttcatgattttgaactgtttatatgtggaatgataatgaatgcattcttctgttacttttattgctcaatattcttcaaatt

SEQ ID NO: 356681 - DNA, 201 bp, Homo sapiens
gcaacagttaaaaacatagcagaaaattgttattgaatatctatgtctctgaaaacggaatagttctgcaagttggtgaataaagtctaagagttgtccagctacagaaacaagatgccagatgattcgtaagacctattcgtgatatttaaattactcaataaaagacctattgatttgtgggggttgagggagaaaccg

SEQ ID NO: 356682 - DNA, 201 bp, Homo sapiens
acagcctggacaacagagcaagactctatctcagaaaaaaacaaaaaacaaacaaacaaaaagttggtcttctatctccttggtctttacagatagggccrgtagttaaaaacttcccttttattgtataacatctgtccacagttttatgttaggtctagaaaggagtcaaagatggaaggcacccatccaccttagaag

SEQ ID NO: 356683 - DNA, 201 bp, Homo sapiens
tggcaccatctcaggtcacagcaagctccacttccccagttcaagcgattttcctgcctcagcctcctgagtagctgggattacaggcatgtgccaccacrcctggctaatttttgtacttttattctcaccatattggtcaggctggtctcaaactcccgacctcgtgatccgcccacctcggcctcccagcttgctggg

SEQ ID NO: 356684 - DNA, 201 bp, Homo sapiens
atttggatgacaaagctactaaactgaaggtaagggtaagggttggaggaagaggtgtcttttaaattccaaaatgaaggagtaattgtttttggcaccartacccacactagcagttcttttatttattttttgttttttttttgagacagattctcgctctgtcgcccaggctggaatgcagtggcatgatctcggctc

SEQ ID NO: 356685 - DNA, 201 bp, Homo sapiens
atgcgatagatacactatactgacctgtaaagactgtttgcctagccaggtagaccaagcataaaacaaagtaaggttaaaccacattaaaaacttcagtsgaggccaggggcagtggctcacgcctgtaatcccagcactttgggaggcgaagatcggtgggtgggagtttgagaccaacatggcaaaaccgcttcctac

SEQ ID NO: 356686 - DNA, 201 bp, Homo sapiens
gggaaccttgtctgctgtaaagcacagctgagttcccctgtaggaatcgctggtgcttacctgcattcagtgactagtggattagacgggtggagttgggktggtacaaaggcttggtcaactggctcttttgtcttgtttgggaattctcgggaaggtcattctaacatagtattgactgaggcctttgtttcaactgcc

SEQ ID NO: 356687 - DNA, 201 bp, Homo sapiens
tgaaaatacatatttatctacattcaagtccatgacccacacatattttctcaaaatgcacggattactgtgggtgccacttggcccaggctttatctcamattttgttagtgtttatacctcgtcctatatagagattattagtacccttatgttctaattcagctgtggggtaggaagaatagagaggaaaaggaaaca

SEQ ID NO: 356688 - DNA, 201 bp, Homo sapiens
ctccctaatgactgtgaagtacattctaaacatgatcatttgtctgtaaatatttcagtatgtatctctaaaaatggtaagaaaacccccagcacaacacyactgccaaactcaaaaaggaaacaacaatttctggatattgtctaatgtctcattactcttcacattttcatttgtgtcataatcgtcataaatttaaaa

SEQ ID NO: 356689 - DNA, 201 bp, Homo sapiens
aaatgttacaataaaacattctaaactttttccccctagtgcaagatagtattgggctaatttgagttaatcagcagtttttttttttttgtttttttttwttttttgagatggagccttgttctgtcgcccaggctggagtatagtggcgagatcttggctcactgcagcctctgcctcccgggttcaagtgattctcct

SEQ ID NO: 356690 - DNA, 201 bp, Homo sapiens
cctggcagtcctcaaaaggttaagcatagttaccataggaccctgcacttccatcctaggaacctaaccaagaaaactgaaacacatgtccagaaaaactsgaacacgagtgttcacagcagcatttattattcataacagccaaaaagtagaaacagcccaaatgtctatcagctgataaatagaaaaacaaaatgtgga

SEQ ID NO: 356691 - DNA, 201 bp, Homo sapiens
ttagttttgcctcctttagaactataaacttttgtgttttagcagtcatgacttttgtgagaaagagaggtctttctagccctttccaactcttaattttrtctctagatagcattcagaaaagatgttatcttcatctttggcattctcaaaactcctaataccttaggaatataagtagaaggtcaagcatggtcactt

SEQ ID NO: 356692 - DNA, 201 bp, Homo sapiens
gaaataagatatttaaatgttacaataaaacattctaaactttttccccctagtgcaagatagtattgggctaatttgagttaatcagcagtttttttttktttgttttttttttttttttgagatggagccttgttctgtcgcccaggctggagtatagtggcgagatcttggctcactgcagcctctgcctcccgggtt

SEQ ID NO: 356693 - DNA, 201 bp, Homo sapiens
tgcctgggcctcccaaagtattgggattacaggcgtgagccaccgtgcccgtctgcatctttttttttttttttttttttgagacggagtcttactctgtygcccagctggagtgcagtggcgcaatctcggctcactgcaagctccgcctcccgggttcacgccattcccctgcctgagcttcccgagtagctgggacta

SEQ ID NO: 356694 - DNA, 201 bp, Homo sapiens
gcctttggttagctctctaactctaccactcttcttagttgagtgactttgaacaattacttaaatttggtcttagcagtttcatttctagggtaaaaacyctatgcttaggaaatgtttcaaacgttccatgttctattgcttataatagcaaaaaaaaaattattttttccccttttgcggttttattatttatttttg

SEQ ID NO: 356695 - DNA, 201 bp, Homo sapiens
atgctgctggtggttatacatttttgtatgaagtattaccgtaactgttagacatcaacattgccttccatttgtatttctgttgcatagaaacagtcttmtgtgtgatacaggggatatacttaaagtcaggggctcagcttttggttcccttgcctttaaataaatgcattacttccaattttttctttcagtgtttgt

SEQ ID NO: 356696 - DNA, 201 bp, Homo sapiens
cagggtgagcggaaggcgcctgagctggtgttctccatttgagggaggggctgccttgctgtgggggtggcagagactcaacaggactctgcggccatctraggaagggctatgcagggagccgtgagaacagcccactctccgtgtgacctgggtgggggaagtgtctgttttctaggcctcagtttcccttctgtgaag

SEQ ID NO: 356697 - DNA, 201 bp, Homo sapiens
ttgggtccccggctcccacctgacccctccaatccatcttatcctctggctctcagcgagctccccaactcacatctgccccccgccccgccctgctgtascctagggtttctctgcctcagcactactgatagtttagaccagatcattctttgtcggggtgggggtgggggctttccactgtaggatgttcagcagcat

SEQ ID NO: 356698 - DNA, 201 bp, Homo sapiens
ggcctggttcgaggagggcgaggagaccacgaccgccttcgtggagcccctggtcatcatgctgatcctcgtggccaacgccattgtgggcgtgtggcagrtgggaggcactgggggtgggaccgggcggggggcggtctcccagccactaggagtgccctccacctggtgctggcgtcctgcagactctcctgcttccac

SEQ ID NO: 356699 - DNA, 201 bp, Homo sapiens
tgaggcaggagaatcgcttgaacctgggaggcggaggttgcagtaagccaagatcccgccactgcgctccagcctgggcgagagagcaagactccatctcaaaaaaaaaaaataaaataaaataaaataagagaaaggagaacttgagagaccagccggggcaggcaggaggcatcatggggacctttgtggggaagtcca

SEQ ID NO: 356700 - DNA, 201 bp, Homo sapiens
gctagagaagtggtgaggctcctcccatgggggtgggtgcctggcagggcctccctgcaccccggcctaaggggagcaccctgtgccctggcagcgtctcrgagaaccagtcgctgctgcggatgccgccctggatgaacccctggctgctggtggctgtggccatgtccatggccctgcacttcctcatcctgctcgtgc

SEQ ID NO: 356701 - DNA, 201 bp, Homo sapiens
tcatgaagagtccatcagagcccaggtggataaggccagcagatggctggggcacgggacagccagtccttcctttaaccaaacctcccttcccctccccrccagctcattttccaggtgaccccactgagcgggcgccagtgggtggtggtgctccagatatctctgcctgtcatcctgctggatgaggccctcaagtac

SEQ ID NO: 356702 - DNA, 201 bp, Homo sapiens
tggcctggttcgaggagggcgaggagaccacgaccgccttcgtggagcccctggtcatcatgctgatcctcgtggccaacgccattgtgggcgtgtggcadgtgggaggcactgggggtgggaccgggcggggggcggtctcccagccactaggagtgccctccacctggtgctggcgtcctgcagactctcctgcttcca

SEQ ID NO: 356703 - DNA, 201 bp, Homo sapiens
aggctggtcttgaactcctgacctcaggtcatccacccacctcggcctcccaaagtgctgggattacaggcgtgagccaccgctcctggcctggccttcartttgaccttgattgcaactccagacttcatgtcacttgacttcactcctcatgtggaccttgacttggcctctgcctttgccttgatcttcaacttgact

SEQ ID NO: 356704 - DNA, 201 bp, Homo sapiens
gtggtggtgctccagatatctctgcctgtcatcctgctggatgaggccctcaagtacctgtcccggaaccacatgcacggtgagtgggaggccccgtcccrcctccagcctgcctccccgcccgcctctgctcctgggctgcagtggacgctgtgggtgtggagcgcagagcctctctgtctgcacatcggggaggcgttc

SEQ ID NO: 356705 - DNA, 201 bp, Homo sapiens
atgggtggtgattccccaaaatgaaaaccaggagagtatgtactggagggtttgggggtgctgatggaacagtggagtgaaggaggcgtgggggacgttgyggggatggatcctggatgcagcttggggggtccggtggggctggggtagactgaggtctggactaagggaggccttgggagcctggggctgtcctgggag

SEQ ID NO: 356706 - DNA, 201 bp, Homo sapiens
ggaacatcccctaagattgggggtgggctgagttgagaagagatggggaggtggaagggaagtttctcaggcacagccctacctgacctggcccacagacyggcgatggagtgaacgacgcaccagccctgaagaaagcagagatcggcatcgccatgggctcaggcacggccgtggccaagtcggcggcagagatggtgc

SEQ ID NO: 356707 - DNA, 201 bp, Homo sapiens
tgggaggccgaggcgggcagatcacctgaggttgggggtttgaaaccaggctcaccgacatggagaaaccccgtctctactaaaaatacaaaaattagccyggtgtggtggcgggcacctgtaatcctagctactcgggaggctgagggaggagaatcgcttgaacccaggaggcggagcttgcagtgagccgagatcacg

SEQ ID NO: 356708 - DNA, 201 bp, Homo sapiens
tgcggtggaggagggccgggccatctacagcaacatgaagcaattcatccgctacctcatctcctccaatgttggcgaggtcgtctggtgaggccgggccttccctcctctcagccctctcaatccgctctgtgcccctgagatggggaaaacgcctgttcctcggatgcgctgcagggatggaggggcctgtgccctgcc

SEQ ID NO: 356709 - DNA, 201 bp, Homo sapiens
gagggccgggccatctacagcaacatgaagcaattcatccgctacctcatctcctccaatgttggcgaggtcgtctggtgaggccgggccttccctcctckcagccctctcaatccgctctgtgcccctgagatggggaaaacgcctgttcctcggatgcgctgcagggatggaggggcctgtgccctgccctggctgggg

SEQ ID NO: 356710 - DNA, 201 bp, Homo sapiens
tccaatgttggcgaggtcgtctggtgaggccgggccttccctcctctcagccctctcaatccgctctgtgcccctgagatggggaaaacgcctgttcctcrgatgcgctgcagggatggaggggcctgtgccctgccctggctggggctttccagggtcccaccttggagtggacaggggagagcacctcttgtcattctc

SEQ ID NO: 356711 - DNA, 201 bp, Homo sapiens
tggggaaaacgcctgttcctcggatgcgctgcagggatggaggggcctgtgccctgccctggctggggctttccagggtcccaccttggagtggacagggragagcacctcttgtcattctccagaggccctggtgacctatggatcatggtcaccccagcacccacggaggtgcctgaagagtcgcctgtcagccctcca

SEQ ID NO: 356712 - DNA, 201 bp, Homo sapiens
tgttcctcggatgcgctgcagggatggaggggcctgtgccctgccctggctggggctttccagggtcccaccttggagtggacaggggagagcacctcttrtcattctccagaggccctggtgacctatggatcatggtcaccccagcacccacggaggtgcctgaagagtcgcctgtcagccctccagccatgaacttcc

SEQ ID NO: 356713 - DNA, 201 bp, Homo sapiens
ggtgtgtgtaatgtgtatattttgcatgtgtgctctggtgcattttgagcgtgagtacaagcagaaggatttgtgccggcgtgtgactgtgcacacactcrtattcacatgtgaggatgcctgtggggaatggtgagcgtgtgtgttgctggacatggatggattctgcatctctgcacctcagggcagatatgtaggtgt

SEQ ID NO: 356714 - DNA, 201 bp, Homo sapiens
tccagagctgggactggggaaggcaggactggccaggcccgaggcagagctgtgtacacacacccttcacatcacagctggcggagggaggaggggctgcygtggagacagtgggtgggtgagctcccagccttgggtctgagcaggagctggagcctgcatctgccgggggctaggcctaccggggctagagctcatgac

SEQ ID NO: 356715 - DNA, 201 bp, Homo sapiens
agagctgtgtacacacacccttcacatcacagctggcggagggaggaggggctgctgtggagacagtgggtgggtgagctcccagccttgggtctgagcargagctggagcctgcatctgccgggggctaggcctaccggggctagagctcatgactctgttccagcatcttcctcacggcaattctgggcctgcccgaag

SEQ ID NO: 356716 - DNA, 201 bp, Homo sapiens; identical to SEQ ID NO: 76299

SEQ ID NO: 356717 - DNA, 201 bp, Homo sapiens
ctggttcgaggagggcgaggagaccacgaccgccttcgtggagcccctggtcatcatgctgatcctcgtggccaacgccattgtgggcgtgtggcaggtgdgaggcactgggggtgggaccgggcggggggcggtctcccagccactaggagtgccctccacctggtgctggcgtcctgcagactctcctgcttccacctc

SEQ ID NO: 356718 - DNA, 201 bp, Homo sapiens
cccggctccgcaggcggcagggggatcagcctgtgcgctgcggccagttcgacgggctggtggagctggcgaccatctgcgccctgtgcaacgactcggckctggactacaacgaggtgggcctcaccccctttcatgacctccctagtatccaggcgaccaggacagacccttttcccagcctcaaagctcccagggttg

SEQ ID NO: 356719 - DNA, 201 bp, Homo sapiens
gccctgcacttcctcatcctgctcgtgccgcccctgcctgtgagtcaccccgcctgccccactgccctggtccctggacatcacaggccctgggctggtcrctggacctctctggcccccctgcaatggaaactacctggaggagagggaggtgagaggtctggccagccaccacctccagctgtggccccaccttcagga

SEQ ID NO: 356720 - DNA, 201 bp, Homo sapiens
tactgtccagatgtggcctggcaccttggaggtcccatgagggtggaaaatacagaggtgccctccccacatcccttccaggcaggacctgccaccccctwgctcatgcccgcagcatcgggcagagtgtgagggatcccaggagaaataccctcaccatctacagagggcagcctgggtctgcatcctttggggacttgg

SEQ ID NO: 356721 - DNA, 201 bp, Homo sapiens
gtccagatgtggcctggcaccttggaggtcccatgagggtggaaaatacagaggtgccctccccacatcccttccaggcaggacctgccacccccttgctsatgcccgcagcatcgggcagagtgtgagggatcccaggagaaataccctcaccatctacagagggcagcctgggtctgcatcctttggggacttggagcc

SEQ ID NO: 356722 - DNA, 201 bp, Homo sapiens
caccatctcacaggctgctggctgctgtaggagagagtgtcaaagagctccagccgcttggctatttacatttaaatgcatgaaaattaaagtaaaattcsaaattagtcacagtccaggggctcgccagctgcatgtggctagtggctgcggtcctggccagcacagacggaggatacttctgctctcacagaacattct

SEQ ID NO: 356723 - DNA, 201 bp, Homo sapiens
gagggttacaggcatcccccgggaagagcccagcacaagcccacccatgcgcaccatgaggttagtgctgtcctgattcgaggctggggcatggctggggwgacctcgaaagcacactgctccattggagaattggcccagaaaccagtcctggccctccccccgcctttcctgttcgcctcagctaaatagatcagaagg

SEQ ID NO: 356724 - DNA, 201 bp, Homo sapiens
gctccccagtgctatctccccaaagcagggaagcaagcaggagatccggggtgccaaggaaaaggagagcagatctcggcccgcagcagggcctgagctcrccagctgtgatcctgcaggtcctggcctggttcgaggagggcgaggagaccacgaccgccttcgtggagcccctggtcatcatgctgatcctcgtggcca

SEQ ID NO: 356725 - DNA, 201 bp, Homo sapiens
accactggcatcgaggggaggtgcctgcaaaccacagggctgagagaggaaaagggtggctccctgcagggaattcagggaattattaggcaggggaaacrgacgccagaaaaccaccgccattctctacagccggtctcctcccttccccgcagtgtacgtaggcctggccacagtggctgccgccacctggtggtttgt

SEQ ID NO: 356726 - DNA, 201 bp, Homo sapiens
ggagaatcgcttgaacctgggaggcggaggttgcagtaagccaagatcccgccactgcgctccagcctgggcgagagagcaagactccatctcaaaaaaawaaaataaaataaaataaaataagagaaaggagaacttgagagaccagccggggcaggcaggaggcatcatggggacctttgtggggaagtccaggactgg

SEQ ID NO: 356727 - DNA, 201 bp, Homo sapiens
cctacagtccagtgggctgcttgatactccccagggttcagctgccaggtgcagaccccaaagcttccaaacaggtggtccggggagagggctcccgtagraaaaaaaaatgcctgtaggccaaaaacaggtggaccaatgcaaggacctgtttccagtgtcaggaagaaggaggtggaagagagccagccatggccgggg

SEQ ID NO: 356728 - DNA, 201 bp, Homo sapiens
ctacagtccagtgggctgcttgatactccccagggttcagctgccaggtgcagaccccaaagcttccaaacaggtggtccggggagagggctcccgtaggraaaaaaaatgcctgtaggccaaaaacaggtggaccaatgcaaggacctgtttccagtgtcaggaagaaggaggtggaagagagccagccatggccggggc

SEQ ID NO: 356729 - DNA, 201 bp, Homo sapiens
aggatccgtgcccgggacatcgtcccaggggacattgtagaagtggcaggtatgccggggcctcctccttttattttattttattttatttatttatttawtttatttatttatttatttattttttgagatggagtcgtgctctgttgcccagactggagtgcagtggcgcaatctcggctcactgcaacctcctgcctc

SEQ ID NO: 356730 - DNA, 201 bp, Homo sapiens; identical to SEQ ID NO: 76313

SEQ ID NO: 356731 - DNA, 201 bp, Homo sapiens
aggaatgattcaaccacttcaggggcccgaggcacctctgcctgatacaaaaggtgcttcgggaaatgttggagataaaaatcagcacctaggcctgggcrgtggctcacgcctgtaatcccagcactttgggaggccgaggcgggcagatcacaaggtcaggagttcgagaccaccctggccaacatagtgaaaccccat

SEQ ID NO: 356732 - DNA, 201 bp, Homo sapiens
ggctcacacttgtaaccccagcattgtgggaggccgaggtgggcagatcacttgaggtctggagtttgaccagcctggccaacatgtggctcacacctgtraccccagcactttgggaggccgaggcaggcagatcacctgaggtcaggagtttgagaccagcctggccaacgtggtgaaaccccatctctactaaaaata

SEQ ID NO: 356733 - DNA, 201 bp, Homo sapiens
ccccatttctactaaaaatacaaaaatcagccgggcgtggtgccgcgtgcctgtaatcccagctactcaggaggctaaggcaggagaatcgcttgaacccrggaggtggaggttgcagtgagccaagattgcgccactgcactctggcctgggcgacagagcgagactctcttaaaaaaaaaaaaaaaaaaatcagcacct

SEQ ID NO: 356734 - DNA, 201 bp, Homo sapiens
cgggcgtggtgccgcgtgcctgtaatcccagctactcaggaggctaaggcaggagaatcgcttgaacccgggaggtggaggttgcagtgagccaagattgygccactgcactctggcctgggcgacagagcgagactctcttaaaaaaaaaaaaaaaaaaatcagcacctcaattgaggtgggtgctgttagagtttggaa

SEQ ID NO: 356735 - DNA, 201 bp, Homo sapiens
gcagcctggacaacatggcgaaaccccgtctctacaaaaaagacaaaacttagccaacagtgacggctcaggcctggagtctcagctacttgggaggctgyggtgggacaatcacctgagcccaggaagtcgaggctacagtgagctgagatcgtgccactgcactccagcctgggtgatgggagtgagaccttgtctcaa

SEQ ID NO: 356736 - DNA, 201 bp, Homo sapiens
ctgtgccagtcaggtggaagagtcctctcgtaggtttgcttggcatctttctgtttaaagtcacattgggtgtcttttcatatgttaaggagccaccaaaygggctgcccatctcctctgctggactggagccaaggcaagagacctggctgtgttgggcatgtcctttctgtagctaaagtccctggagaccccagtgac

SEQ ID NO: 356737 - DNA, 201 bp, Homo sapiens
tctctgcctgtcatcctgctggatgaggccctcaagtacctgtcccggaaccacatgcacggtgagtgggaggccccgtcccgcctccagcctgcctcccsgcccgcctctgctcctgggctgcagtggacgctgtgggtgtggagcgcagagcctctctgtctgcacatcggggaggcgttctcggatcaccaagtggag

SEQ ID NO: 356738 - DNA, 201 bp, Homo sapiens
gctaaggcaggagaatcgcttgaacccgggaggtggaggttgcagtgagccaagattgcgccactgcactctggcctgggcgacagagcgagactctcttaaaaaaaaaaaaaaaaaaatcagcacctcaattgaggtgggtgctgttagagtttggaaacagtgttcttcaccatgttgtgtggggggcgactgggtatg

SEQ ID NO: 356739 - DNA, 201 bp, Homo sapiens
ccagccactctggaggctgaggcaggagaattgcttgggcccaggaggatggagctgcagtgagccgtgatcacaccactgcattccagcctgggcaacaragcaagaccctgtctcaaaaaaattaaaaatgtcttcggacattgccaaatgcccctggggggcaccttgtccctggctgagtgctgctgccggagcccc

SEQ ID NO: 356740 - DNA, 201 bp, Homo sapiens
gagggggtgagactaacgggccgggcgcagtggctcacacctgtcatcccagcactttgggaggccgaggtgggcagatcacctgagtcaggagttagagrccagcctggccaacatggtgaaaccccatctctactaaagatacaaaaattagctgggcgtggtggcaggtgcctataatcccagctactcgggaggctg

SEQ ID NO: 356741 - DNA, 201 bp, Homo sapiens
gtaatcctagcactttggcaggccgaggcgggtgagctcaggagttcagcctgggcaacgtggtaaaaccccgtctctactaaaatacgaaaaattagccwggcgtggtggtgcacgcctgtaatcccatctacccgggaggctgaggcatgagaattgcttgaacctgggaggcaaaggttgcagtgagccaagatccag

SEQ ID NO: 356742 - DNA, 201 bp, Homo sapiens
agaaaaaagatctccatgttcagattagactcccaagagcaggatctatatttttggtgaactaagctggttaacggttggaaacattcaccctcatcccyataatatggaagagaacaagacaagttcccccaataccctccgttcagcctcttagcacgattctgtgaacaaggtttttgagcagtaagaaaactcccc

SEQ ID NO: 356743 - DNA, 201 bp, Homo sapiens
gacaagttcccccaataccctccgttcagcctcttagcacgattctgtgaacaaggtttttgagcagtaagaaaactcccctgaggctataggggttatcrgccctgagcgcttcatgttaattacagagaagctacctgttacagctgcaccttggcaattcattagtctctgtcagaagcacacatcagatctgataga

SEQ ID NO: 356744 - DNA, 201 bp, Homo sapiens
acgaccgccttcgtggagcccctggtcatcatgctgatcctcgtggccaacgccattgtgggcgtgtggcaggtgggaggcactgggggtgggaccgggcggggggcggtctcccagccactaggagtgccctccacctggtgctggcgtcctgcagactctcctgcttccacctccatcccaggccccagaggagtcact

SEQ ID NO: 356745 - DNA, 201 bp, Homo sapiens
tatttttagtagagacggggtttcaccatgttagccaggctggtcccaaactcctgacctcaggtgatccacccgcctccgcctccctgggatgacaggcrtgagccaccacgcccagctgtaaatggaatcttaataacagtgaacagggcctgcgtagccttcatcttctataccgcaaaggtgaattccactcccgca

SEQ ID NO: 356746 - DNA, 201 bp, Homo sapiens
gctgggggtggtggcgtgtgcctgtaatcccagcaacttgggaggctgaggcaggagagtcacttgagcccgggaggcggaggttgcagtgagccaagatygtgccactgcactccagcctgggtgacgagagcaaaactctgtctcaaaaaaaaaaaaaaaatatttttttttctggccctgttgcccatgctggagtgc

SEQ ID NO: 356747 - DNA, 201 bp, Homo sapiens
ccctgctgtgcggtggggcccagcaggccggcccagctgcagaccttgtccagctggtcccaggggagcagggatgttagaggcagggtgagcggaaggcrcctgagctggtgttctccatttgagggaggggctgccttgctgtgggggtggcagagactcaacaggactctgcggccatctaaggaagggctatgcagg

SEQ ID NO: 356748 - DNA, 201 bp, Homo sapiens
tcactccctatcccctgggtccttgccaggccaagggtgtgtatgagaaggtgggagaggccacggagacagctctgacttgcctggtggagaagatgaaygtgttcgacaccgacctgcaggctctgtcccgggtggagcgagctggcgcctgtaacacggtgagcagggctgggggctcaggcctccggctgcatggct

SEQ ID NO: 356749 - DNA, 201 bp, Homo sapiens
ttattgttggaaaccacaaggaagtcatttgcttaagtcctgaagcttgcaaattctgccaggggagggaggcagcggctgggcatcccacccccaccttyccaccctcctccctcactgcacacagacacttcagagctggggagcctcggcagcgcagtcagtgagcacgctagccagggaccccctccactcacacat

SEQ ID NO: 356750 - DNA, 201 bp, Homo sapiens
taaatattaatggactgtttattgggttcgtagtcagctatgctcctgtgtggctatagtgattgtttacgaaatcacattttgtggggttgatgcttgtrctgcgctggttgattatatcatcaatatcagcccccgtgcctcctctgtgcccggccccgtgctaggcactggggatacggcgatgaacccaaaccctgc

SEQ ID NO: 356751 - DNA, 201 bp, Homo sapiens
ccctgacccccacctccagggagcagatcctggcaaagatccgggattggggctcaggctcagacacgctgcgctgcctggcactggccacccgggacgcscccccaaggaaggaggacatggagctggacgactgcagcaagtttgtgcagtacgaggtgggtgcaggagccgattctccctgcagtacgaggtgggtgc

SEQ ID NO: 356752 - DNA, 201 bp, Homo sapiens
agagctcatgactctgttccagcatcttcctcacggcaattctgggcctgcccgaagccctgatccctgtgcagctgctctgggtgaacctggtgacagayggcctacctgccacggctctgggcttcaacccgccagacctggacatcatggagaagctgccccggagcccccgagaagccctcatcagtggctggctct

SEQ ID NO: 356753 - DNA, 201 bp, Homo sapiens
cctgggtccttgccaggccaagggtgtgtatgagaaggtgggagaggccacggagacagctctgacttgcctggtggagaagatgaacgtgttcgacaccracctgcaggctctgtcccgggtggagcgagctggcgcctgtaacacggtgagcagggctgggggctcaggcctccggctgcatggctggggcttctggga

SEQ ID NO: 356754 - DNA, 201 bp, Homo sapiens; identical to SEQ ID NO: 76338

SEQ ID NO: 356755 - DNA, 201 bp, Homo sapiens
tgggggtggtggcgtgtgcctgtaatcccagcaacttgggaggctgaggcaggagagtcacttgagcccgggaggcggaggttgcagtgagccaagattgygccactgcactccagcctgggtgacgagagcaaaactctgtctcaaaaaaaaaaaaaaaatatttttttttctggccctgttgcccatgctggagtgcag

SEQ ID NO: 356756 - DNA, 201 bp, Homo sapiens; identical to SEQ ID NO: 76341

SEQ ID NO: 356757 - DNA, 201 bp, Homo sapiens
cactgcactccagcctgggtgacgagagcaaaactctgtctcaaaaaaaaaaaaaaaatatttttttttctggccctgttgcccatgctggagtgcagtgstacgatctcgggtcactgcaacccccgccccccaggttcaagctactcttgtgcctcagcttcccaagtagctgggactacaggcacctgccaccacacc

SEQ ID NO: 356758 - DNA, 201 bp, Homo sapiens
ttttttttttttttttttttttttgagacagagtctcactctgtcacccatgctggagtgcagtggcacaatctcagctcactgcaacttccgcctcccgrgttcaagcgattctcctgcctcagcctcccaagcaggtgggattacaagcacacaccaccgtgcccagctaatttttgtattttactagagacggggttt

SEQ ID NO: 356759 - DNA, 201 bp, Homo sapiens
acacaccaccgtgcccagctaatttttgtattttactagagacggggtttcaccatgttggccaggctggtcccaaactcctgacctcaggtgatctgccygccttggcctcccaaagttctgagattacaggtgtgagccactgcacctggcccagaactcttcttgagaggggcctacctagctgcatagaagccttgg

SEQ ID NO: 356760 - DNA, 201 bp, Homo sapiens
cttctgggttcaggcgattctcttgcttcagccacccgagtagctaggactacaggcgcgtgccaccacacccagctagtttttgtagttttagtagagayggggtttcaccatgttagccaggatggtctcaatcaagcttgacctcgtgatccacccgcctcggcctcccaaagtgctgggattacaggcgtgagccac

SEQ ID NO: 356761 - DNA, 201 bp, Homo sapiens
gggtctgggggtcagtgggggtccaagattgggatccaaagatttggggatctggattggggcctaagggtcaaaggggcccagagaggattctgagagtycatggggaccggaattggggcccaggagacaaagaaggctgaaactggggtccaaagaaatcggccaagattaggtctgaggggcagagaaaggggtccc

SEQ ID NO: 356762 - DNA, 201 bp, Homo sapiens
aatcctggctcactgcaacctctgcctcccgggttcaagtgattctcgtgcctcgacctcccggcgcgtgccaccacacccggctaatttttgcatttttkagtagagacagggtttcaccatgttgtccgggctagtctgaaactcctgacctcaggtaatctgcctgccttggcctcccagagtgctgggattacaggc

SEQ ID NO: 356763 - DNA, 201 bp, Homo sapiens
aaaccccgtctctactaaaagtacaaaaattagcggggcgtggtggtgcattcctgtaaccccagctactcaggaggctgaggcaggagaatcacttgaayccgggaggcagaggttgcagtgagccgagatcacgccactgcactccagcctgggtgacagagtgagacttcgtctcaaaataataataataacaatact

SEQ ID NO: 356764 - DNA, 201 bp, Homo sapiens
tgagcggacaaagattggggggtgcagctgaacagacaaagatcggggggtgcagctgagtggacaaagatcgggggtgcatccagggggttcttaggagygctcatgaagagtccatcagagcccaggtggataaggccagcagatggctggggcacgggacagccagtccttcctttaaccaaacctcccttcccctcc

SEQ ID NO: 356765 - DNA, 201 bp, Homo sapiens
cttccaagggccagggacacagcatcgtctcgctgtcagagctgctcagagagggaggaagcaggggtgagctccggttcctgggaatttgcgcagaggcrgtggccgtatggctggactgctgtgcaggggcctaggttgggctgggcagtggctgaggcctgcactggggcagctgggtcgttgggggccacctctggc

SEQ ID NO: 356766 - DNA, 201 bp, Homo sapiens
acacacctgtgtaactcacagccttatcaagataggaaaatgccaggcatggtggctcacgcttgtaattccagcactttgggaggccaaggcaggaggaytgcttgagcccaggagtttgagaccccatctctccaaaaaaaaaaaaaacaaaaaacaaaaaaaaaaagatatgacacattaccatcaacccatgaagtt

SEQ ID NO: 356767 - DNA, 201 bp, Homo sapiens; identical to SEQ ID NO: 76323

SEQ ID NO: 356768 - DNA, 201 bp, Homo sapiens
ttctggccaatgctctgtgacagccctggggagacactggaaactcccatccatgggggcccaaggcatccctgcactggccggagcaccgggccggtccrccaggaaatcctccagccgcccttgaccacactcactcacctgcacagccaggcctctgggccgtccttgaccacactcactcacctgcagagccaggcc

SEQ ID NO: 356769 - DNA, 201 bp, Homo sapiens
ccacctccacctccttgagatgttgacggtggtccctgtgaagtttggcttggaaaggtggtgcctggctgctggaggacagacacaggctgggtacctgyggctccatctgaggggtggggtggaggcaccccgaggaatgtgctcactggaagcccagacagccctgcccagcgctactgcagtccctggggcctccta

SEQ ID NO: 356770 - DNA, 201 bp, Homo sapiens
aactttgatctggccttcaatttttttagatggagtctcactctgttgcccaggctggagtgcagcagtgcagtctcggctcactgcaacctccgcctccygggctcaagcgactcccctgcctcagcctcccatgtagctgagatcataggcacgcgccactgcgcccagctaatttttgtattttcagtagagatgggg

SEQ ID NO: 356771 - DNA, 201 bp, Homo sapiens
agctgggattacaggcacccgccatcatgcctggctaatttttgtatttttgtagagatggagtttcaccatgttggccaggctggtctcgaactcctgayctcaggtgatctgcccgccttggcctcccaaagtgctgggaatacaggcgtgagccaccgtgcccggccgaaacatcctgacatgatcttgttggtattt

SEQ ID NO: 356772 - DNA, 201 bp, Homo sapiens
gtcctcagggcagtggggaagcacgggaggagtgtaagcacggtgcggactgtgtcaaccatggaggacaggcaagagggggtgagactaacgggccgggygcagtggctcacacctgtcatcccagcactttgggaggccgaggtgggcagatcacctgagtcaggagttagagaccagcctggccaacatggtgaaacc

SEQ ID NO: 356773 - DNA, 201 bp, Homo sapiens
tcgagtgggcccggggccaagccctcagactttggggagcctccttctcagccaccagcagacatgggaactactcactgtgtgaccatgggccagggackcaatccccacagcctcagtctcctgatctgtcagatgtgggctctaggacctgcctcatgggcctgttgtgaggaaaaccctgccagactccagagggtg

SEQ ID NO: 356774 - DNA, 201 bp, Homo sapiens; identical to SEQ ID NO: 76298

SEQ ID NO: 356775 - DNA, 201 bp, Homo sapiens
tcctcagggcagtggggaagcacgggaggagtgtaagcacggtgcggactgtgtcaaccatggaggacaggcaagagggggtgagactaacgggccgggcrcagtggctcacacctgtcatcccagcactttgggaggccgaggtgggcagatcacctgagtcaggagttagagaccagcctggccaacatggtgaaaccc

SEQ ID NO: 356776 - DNA, 201 bp, Homo sapiens
tgggccaggagtgagggggagtttctccaggctttgaggttaaagcagtggttggaaagaacaggattgaacctggtggaacagggctgggtgagcacagrtgttgacactcagcatgcagggcagaggggtgaggcccggcaggggcaagggccttgagtgccaaggtagagaccctggacattgtcctcagggcagtgg

SEQ ID NO: 356777 - DNA, 201 bp, Homo sapiens
caggccctggcaggccgagcgggcaacagcaatgcaccgctagagaagtggtgaggctcctcccatgggggtgggtgcctggcagggcctccctgcacccyggcctaaggggagcaccctgtgccctggcagcgtctcggagaaccagtcgctgctgcggatgccgccctggatgaacccctggctgctggtggctgtggc

SEQ ID NO: 356778 - DNA, 201 bp, Homo sapiens
tcagggcagtggggaagcacgggaggagtgtaagcacggtgcggactgtgtcaaccatggaggacaggcaagagggggtgagactaacgggccgggcgcartggctcacacctgtcatcccagcactttgggaggccgaggtgggcagatcacctgagtcaggagttagagaccagcctggccaacatggtgaaaccccat

SEQ ID NO: 356779 - DNA, 201 bp, Homo sapiens
acgggaggagtgtaagcacggtgcggactgtgtcaaccatggaggacaggcaagagggggtgagactaacgggccgggcgcagtggctcacacctgtcatmccagcactttgggaggccgaggtgggcagatcacctgagtcaggagttagagaccagcctggccaacatggtgaaaccccatctctactaaagatacaaa

SEQ ID NO: 356780 - DNA, 201 bp, Homo sapiens
tgtgaaccaggacaagaagaacatgctgttttctgtaagtcaaatgtctggggcctttgcccagacaatgataaaaataacaacattaggattatgatcaygcctgtaatcccagcactttgggaggctgaggtgggtggatcacctgaggtcaggagttcgagaccagcctggccaacatggtgaaaccccgtctctact

SEQ ID NO: 356781 - DNA, 201 bp, Homo sapiens; identical to SEQ ID NO: 76331

SEQ ID NO: 356782 - DNA, 201 bp, Homo sapiens
ccaagggttttcagatgagcttgggtgagcggtaaagagagtggaggagggaaggcaggacagcctaagagttagcatcggaggcccacagcagggggtcragaaccagactgcctgagctcaaaacccttccctgtctcccccgctgtgtgacggtgaactagtcactcaacctctctgttgtgtactctgtaaaatggg

SEQ ID NO: 356783 - DNA, 201 bp, Homo sapiens
acaccatctcacaggctgctggctgctgtaggagagagtgtcaaagagctccagccgcttggctatttacatttaaatgcatgaaaattaaagtaaaattsgaaattagtcacagtccaggggctcgccagctgcatgtggctagtggctgcggtcctggccagcacagacggaggatacttctgctctcacagaacattc

SEQ ID NO: 356784 - DNA, 201 bp, Homo sapiens
caggagatcgagaccagcctagccaatatgatgaaaccccgtctctactacaaacacaaaaattagccacgggtggtggcgggtgcctgtagtcccagctrctcaggaggctgaggcagaagaatcgctcgaacttgggagatggaggttgcagtgagccaagatcacgccactgcactccagcctcggtgacagagtgag

SEQ ID NO: 356785 - DNA, 201 bp, Homo sapiens
aatccgtaggcttgccgacacacaggtgactgggccccaccccagaatttacgactcaggaggtctgggagggaccccaagatcaacatttcttacaagtwcccagctgctgctgctgctggtctggggaccacactgagatgctctgctccaggcagacagtaaggcctcggtgggcagccatccaactgccccacagcc

SEQ ID NO: 356786 - DNA, 201 bp, Homo sapiens
agctccccagtgctatctccccaaagcagggaagcaagcaggagatccggggtgccaaggaaaaggagagcagatctcggcccgcagcagggcctgagctsaccagctgtgatcctgcaggtcctggcctggttcgaggagggcgaggagaccacgaccgccttcgtggagcccctggtcatcatgctgatcctcgtggcc

SEQ ID NO: 356787 - DNA, 201 bp, Homo sapiens
aggcactgggggtgggaccgggcggggggcggtctcccagccactaggagtgccctccacctggtgctggcgtcctgcagactctcctgcttccacctccwtcccaggccccagaggagtcactccaagggggtggtctgcggggggcagcagggacagactgcctgccggccttctattctgcaggaacgcaacgccgag

SEQ ID NO: 356788 - DNA, 201 bp, Homo sapiens
cagggcagatatgtaggtgtttgcttgtgtttgccggatggtgtggcatgtgctaggtttttgcacatgtctgattcttgggcatgccctcttcgtgtgcgtgtgtgtgtgtgtgtgtgtgtgtgtgtgtgtgtacttggcctctgctaggcctaaagagcaggtatgtccaggatccagagctgggactggggaaggcag

SEQ ID NO: 356789 - DNA, 201 bp, Homo sapiens
agggcagatatgtaggtgtttgcttgtgtttgccggatggtgtggcatgtgctaggtttttgcacatgtctgattcttgggcatgccctcttcgtgtgcgtgtgtgtgtgtgtgtgtgtgtgtgtgtgtgtgtacttggcctctgctaggcctaaagagcaggtatgtccaggatccagagctgggactggggaaggcagg

SEQ ID NO: 356790 - DNA, 201 bp, Homo sapiens
gtaatcccacctactcgggagactgaggcaggagaatcgcttgaacccaggaggcagaggttgctgtgagccgagatggcaccattgcactccagcctggkcgacagagtgagactccgtctcaaaaaaaaaaaaaaaaaaaagtctcaacaggcctgttctcattggcccacatagggttcacctgctcatctccaagca

SEQ ID NO: 356791 - DNA, 201 bp, Homo sapiens
actgaggcaggagaatcgcttgaacccaggaggcagaggttgctgtgagccgagatggcaccattgcactccagcctgggcgacagagtgagactccgtcmcaaaaaaaaaaaaaaaaaaaagtctcaacaggcctgttctcattggcccacatagggttcacctgctcatctccaagcactggggccaagggtatggcag

SEQ ID NO: 356792 - DNA, 201 bp, Homo sapiens
tggtgaaacccagaaggtctgcactgggcagggcatttacagcaagagcaacagacccattgaaacatatttatttatttatttatttgagacagagtctygctctgtcacccaggctggagtgcagtggcgcgatctcagctcactgcaacctccgcctcccgggttcaagcgattctcctgcctcagcctcccgagtag

SEQ ID NO: 356793 - DNA, 201 bp, Homo sapiens
tttagggaagtttttctgaagcctgatgcttgtggcttccccgtgatttatgtcatttacgagggatgtgtcctggggagaattctggatcctgggtcagycctgggggctgggggcggtcctctcaccccacctcctggctctgcccaggtgtggctgagcagttgtcaggggaggcgtgggggctgggctgtggtggtt

SEQ ID NO: 356794 - DNA, 201 bp, Homo sapiens
gctaggggcagaagtatgatgggacggtaagactggggctgggggcagggcggcaggccttgaggccttgaggcctggttggggaaggcagtgggagagaygagctctcgcaatttgggtgaaatcaggcctgggtgtgtgtgatgggcaagagaagcaaggatgagcctggtgtctgaaccttacgataatgggtggtga

SEQ ID NO: 356795 - DNA, 201 bp, Homo sapiens
tgaggcaggagaatcgcttgaacccaggaggcagaggttgctgtgagccgagatggcaccattgcactccagcctgggcgacagagtgagactccgtctcaaaaaaaaaaaaaaaaaaaagtctcaacaggcctgttctcattggcccacatagggttcacctgctcatctccaagcactggggccaagggtatggcagat

SEQ ID NO: 356796 - DNA, 201 bp, Homo sapiens
ggatggatcctggatgcagcttggggggtccggtggggctggggtagactgaggtctggactaagggaggccttgggagcctggggctgtcctgggagaartggaggatggaaggggctggaaggaagctgtctggatgtgtgcccttacacatacatcttaacgcgctcttgggtttttcttccagaagaaatgagccag

SEQ ID NO: 356797 - DNA, 201 bp, Homo sapiens
cactgcacttcagccttggtgacagagtaagaccctgtctctagaaaaaaaaagaacacatcctgccgcggtggctcacgcctgtaatcccagcactttgrgaagccgaggtgggcggatcacttgaggtcaggagttcaagaccagcctgaccaacatggtgaaaccctgtctctactaaaaatacaaaaattacccagg

SEQ ID NO: 356798 - DNA, 201 bp, Homo sapiens
gaaggaagctgtctggatgtgtgcccttacacatacatcttaacgcgctcttgggtttttcttccagaagaaatgagccagaagtgagcgctgggaacagrgtggagtctccggtgtgtacctcagactgatggtgcccatgtgttcgcctccgccccccacccttgccaccacactcgcccacttgcccaccgggtcccg

SEQ ID NO: 356799 - DNA, 201 bp, Homo sapiens
tgtgcctgtgaggcagaagctccagcccgacgcactgtctttttttgtttgtttgtttgagatggagtctcgctctgtcacccaggctggagtgcagtggkgcaatcttggctcactgcaacctccacctcccgggttcaagtgattcccctgcctcagcctccccattagctgggactacaggcgcccaccaccatgccc

SEQ ID NO: 356800 - DNA, 201 bp, Homo sapiens
tgaggcagaagctccagcccgacgcactgtctttttttgtttgtttgtttgagatggagtctcgctctgtcacccaggctggagtgcagtggtgcaatctyggctcactgcaacctccacctcccgggttcaagtgattcccctgcctcagcctccccattagctgggactacaggcgcccaccaccatgcccggctaatt

SEQ ID NO: 356801 - DNA, 201 bp, Homo sapiens
aagctccagcccgacgcactgtctttttttgtttgtttgtttgagatggagtctcgctctgtcacccaggctggagtgcagtggtgcaatcttggctcackgcaacctccacctcccgggttcaagtgattcccctgcctcagcctccccattagctgggactacaggcgcccaccaccatgcccggctaattttttgtat

SEQ ID NO: 356802 - DNA, 201 bp, Homo sapiens
aacccagaaggtctgcactgggcagggcatttacagcaagagcaacagacccattgaaacatatttatttatttatttatttgagacagagtctcgctctrtcacccaggctggagtgcagtggcgcgatctcagctcactgcaacctccgcctcccgggttcaagcgattctcctgcctcagcctcccgagtagctggga

SEQ ID NO: 356803 - DNA, 201 bp, Homo sapiens
attcaaggggttcaaaaggtatacagtaaattctccgccccgtccccagccacccattcccagtcctcccaatatcttgtgtcttcttcccaagacagtcygtgcatatacacatctggagctgtgatcttgtgatcttttcccacacggaagcaggaggaggataagtgctctttgtccctgctttgaccttgacagtca

SEQ ID NO: 356804 - DNA, 201 bp, Homo sapiens
agacaccaccccgaccccagggcggccaggctgggaagggctcacgggccggtgcaaaggaggttacacggaactccagcaaaggcagctgcaggggcaargagtgagtgaggctggggatgcgggctggaggctgcctgcccctcactccctatcccctgggtccttgccaggccaagggtgtgtatgagaaggtgggag

SEQ ID NO: 356805 - DNA, 201 bp, Homo sapiens; identical to SEQ ID NO: 76308

SEQ ID NO: 356806 - DNA, 201 bp, Homo sapiens
cagtctcagtttcccctcctgcctccccacccggctctgggcgggcaggaagcgagggctccggaaacctcttcggatgctcctggggcacccggcggggytgcgcggccaccttcgccggcgccggggctgggggctgggggctgggagcgggttccagctggggagaccggacgcctggcaccctctgcgcggtcctcc

SEQ ID NO: 356807 - DNA, 201 bp, Homo sapiens
acaagacagtcacaagttctgcaggatgcagaaccctggtgtgggcgtctgtgctaggagtttgggtcagccggcagcagctttttcagctttgcctccarccttcttgggtccctagagggctcttctctcagatcactgattggggctgggggcattccagggctctagaagtctttaggtgagcagaggggagccagc

SEQ ID NO: 356808 - DNA, 201 bp, Homo sapiens
ttatatgaggagataggatgctgctgtgcacagaaggaatggcacaagcaaaatgttggaggaggaaggccgggcgcggtggctagcaccttggcatctcrgcaccttgggaggccgaggtgggtggatcacttgagatcaggagttcgaaaccagcctggccaacatggtgaaacctcatctttactaaaaaataaaaat

SEQ ID NO: 356809 - DNA, 201 bp, Homo sapiens
ttagcagggtgtctggcgcacaccaccagctgctgctgctatgacctccgctaagcacctcacgtgctcggtccccagcgtcttcccatttgttctctggwgataatgcggtaaggcacctggtacattgcttggcaggtgcttggtaaatgtgactcttaacagtaatgatgatgatgatcaccacagcaggccttcaaa

SEQ ID NO: 356810 - DNA, 201 bp, Homo sapiens
ggcactgggggtgggaccgggcggggggcggtctcccagccactaggagtgccctccacctggtgctggcgtcctgcagactctcctgcttccacctccawcccaggccccagaggagtcactccaagggggtggtctgcggggggcagcagggacagactgcctgccggccttctattctgcaggaacgcaacgccgaga

SEQ ID NO: 356811 - DNA, 201 bp, Homo sapiens
agaccctgtctcaaaaaaattaaaaatgtcttcggacattgccaaatgcccctggggggcaccttgtccctggctgagtgctgctgccggagccccttccrtggatcccagtgtcccccacatggattttggggtctgaacctcttgcagcctcctcttggctgccgcatctccttgctgttcctccattcccactgatgc

SEQ ID NO: 356812 - DNA, 201 bp, Homo sapiens
aaacatatttatttatttatttatttgagacagagtctcgctctgtcacccaggctggagtgcagtggcgcgatctcagctcactgcaacctccgcctccygggttcaagcgattctcctgcctcagcctcccgagtagctgggattacaggcacccgccatcatgcctggctaatttttgtatttttgtagagatggagt

SEQ ID NO: 356813 - DNA, 201 bp, Homo sapiens
ctacaaaaaagacaaaacttagccaacagtgacggctcaggcctggagtctcagctacttgggaggctgcggtgggacaatcacctgagcccaggaagtcraggctacagtgagctgagatcgtgccactgcactccagcctgggtgatgggagtgagaccttgtctcaaaaacaaaacaaggccaggcacagtggctcac

SEQ ID NO: 356814 - DNA, 201 bp, Homo sapiens
ggtcaggagatcgagaccagcctagccaatatgatgaaaccccgtctctactacaaacacaaaaattagccacgggtggtggcgggtgcctgtagtcccarctactcaggaggctgaggcagaagaatcgctcgaacttgggagatggaggttgcagtgagccaagatcacgccactgcactccagcctcggtgacagagt

SEQ ID NO: 356815 - DNA, 201 bp, Homo sapiens
cagaagaatcgctcgaacttgggagatggaggttgcagtgagccaagatcacgccactgcactccagcctcggtgacagagtgagactcagtctcgaaaamaaaaacaaaacaaaacaaaacaaaacaaaataaaaagaaaacaagacatatccacttgcctcaaatgctggagcttgagttttggagaaaacgtccacta

SEQ ID NO: 356816 - DNA, 201 bp, Homo sapiens
cggccatctaaggaagggctatgcagggagccgtgagaacagcccactctccgtgtgacctgggtgggggaagtgtctgttttctaggcctcagtttcccwtctgtgaagtggggcagggaggggctggactggaggggctggaaggaccctcttggctccgtactcatcccacgatgagccaagtcaccctagatcttcc

SEQ ID NO: 356817 - DNA, 201 bp, Homo sapiens
ttgggaggccaaggcgggcggatcacgaggtcaggagttctagaccatcctggctaacacggtgaaaccccgtctccactaaaaatacaaaaaattagccrggcgtggtggcgggcgcctgtagtcccagctacttgggaggctgaggcaggagaatggcgtgaacccgggaggcggagcttgcagtgagccgagatcatg

SEQ ID NO: 356818 - DNA, 201 bp, Homo sapiens
ccactaaaaatacaaaaaattagccgggcgtggtggcgggcgcctgtagtcccagctacttgggaggctgaggcaggagaatggcgtgaacccgggaggcrgagcttgcagtgagccgagatcatgccactgcactccagctcgggtgacagagcgagactctgtttcaaaaaaaaaaaaaaaagaaaaaagatctccatg

SEQ ID NO: 356819 - DNA, 201 bp, Homo sapiens
ctaaaaatacaaaaaattagccgggcgtggtggcgggcgcctgtagtcccagctacttgggaggctgaggcaggagaatggcgtgaacccgggaggcggascttgcagtgagccgagatcatgccactgcactccagctcgggtgacagagcgagactctgtttcaaaaaaaaaaaaaaaagaaaaaagatctccatgttc

SEQ ID NO: 356820 - DNA, 201 bp, Homo sapiens
tagtcccagctacttgggaggctgaggcaggagaatggcgtgaacccgggaggcggagcttgcagtgagccgagatcatgccactgcactccagctcgggygacagagcgagactctgtttcaaaaaaaaaaaaaaaagaaaaaagatctccatgttcagattagactcccaagagcaggatctatatttttggtgaacta

SEQ ID NO: 356821 - DNA, 201 bp, Homo sapiens
gctggggccgaggagtgggggctgagggctgggggttccagtatcagtgtctgagggtcaggggtccaggtgggctgggcgcagggcctggagctggggcygaggagtgggggctgagggctgggggttccagtatcagtgtctgagggtcaggggtccaggattggggtctgtgggtcaagagggtccaagattggggtc

SEQ ID NO: 356822 - DNA, 201 bp, Homo sapiens
tcttccccaaaacaactccataagggaaggactgttgtcatccccattttatacagcaggaaacggaggcacccagaggttaaaccacttgcccgaggtcmcatagtaggtggtggagctggcactggttacctgctcctctctgggcctcagtttccccatctgtacaagacagtcacaagttctgcaggatgcagaacc

SEQ ID NO: 356823 - DNA, 201 bp, Homo sapiens
gccttcgtggagcccctggtcatcatgctgatcctcgtggccaacgccattgtgggcgtgtggcaggtgggaggcactgggggtgggaccgggcggggggsggtctcccagccactaggagtgccctccacctggtgctggcgtcctgcagactctcctgcttccacctccatcccaggccccagaggagtcactccaagg

SEQ ID NO: 356824 - DNA, 201 bp, Homo sapiens
cggaggcacccagaggttaaaccacttgcccgaggtcacatagtaggtggtggagctggcactggttacctgctcctctctgggcctcagtttccccatcwgtacaagacagtcacaagttctgcaggatgcagaaccctggtgtgggcgtctgtgctaggagtttgggtcagccggcagcagctttttcagctttgcctc

SEQ ID NO: 356825 - DNA, 201 bp, Homo sapiens
aggaggtgcagatgtccctagcacagctgctggggtggagctgatgaggctttgaaccctagccctgccccttcatagctgtgcaatgctggaccagcctstttgcctctctgtgcctcggtttcttcaccataagcgaggctgccatagaacccatctcccagggttgtttgtgagtctttagtgaggtcacagacacca

SEQ ID NO: 356826 - DNA, 201 bp, Homo sapiens
actggcatcgaggggaggtgcctgcaaaccacagggctgagagaggaaaagggtggctccctgcagggaattcagggaattattaggcaggggaaacagaygccagaaaaccaccgccattctctacagccggtctcctcccttccccgcagtgtacgtaggcctggccacagtggctgccgccacctggtggtttgtgta

SEQ ID NO: 356827 - DNA, 201 bp, Homo sapiens
ctttagtgaggtcacagacaccaagtcatccttccttgtcgcagaagaggctggggcgggctcctggccacaagctgggtggcagggtgggtcaggcctgwgggcagaagggacaccccagagacatgtgttctccccaccccaggagtctgtgcacctgcaaggtcgttattgttggaaaccacaaggaagtcatttgct

SEQ ID NO: 356828 - DNA, 201 bp, Homo sapiens
cgggatctgagagggtgtggtttgcccacagccctttggaagctcaacgtctttcatgcttcaccctagttttcactcccactggcccctgctgggcagcygaagccccccaggagcagcatcaggcctgcccagctgggccccctcaccctcttacaccctaaggcagggcctgtattttcccatagcacagtcggacga

SEQ ID NO: 356829 - DNA, 201 bp, Homo sapiens
tcttgcccagccagggcctcttcctgactctgcaagtgacgatttaattgctctgtaaatttacctttgaggaagacctgggtgagtgcttgcctctcccrgctggaactgacatttagaagctgaaataccagtttccaatgaaggaaggagtagaggggggatgaggggagcaggtggtgtggagcctgggggcagccc

SEQ ID NO: 356830 - DNA, 201 bp, Homo sapiens
ccccacccccaatgtaatgctttatgttgacctcaactttgatctggccttcaatttttttagatggagtctcactctgttgcccaggctggagtgcagcrgtgcagtctcggctcactgcaacctccgcctcccgggctcaagcgactcccctgcctcagcctcccatgtagctgagatcataggcacgcgccactgcgc

SEQ ID NO: 356831 - DNA, 201 bp, Homo sapiens
cccagcggatggcactgagagtgggcagagccagggcactctctcatttaacagataggacatctggcactgccagaggcccaaggccgccatttcaaggsgaactatctcagcctccaacacgcagcctgggagagagcaaggaaggaggcagcatcttccaggaatgcctggggtaggggatctcccagccctgggctc

SEQ ID NO: 356832 - DNA, 201 bp, Homo sapiens
aatgtaatgctttatgttgacctcaactttgatctggccttcaatttttttagatggagtctcactctgttgcccaggctggagtgcagcagtgcagtctyggctcactgcaacctccgcctcccgggctcaagcgactcccctgcctcagcctcccatgtagctgagatcataggcacgcgccactgcgcccagctaatt

SEQ ID NO: 356833 - DNA, 201 bp, Homo sapiens
aagagttagcatcggaggcccacagcagggggtcgagaaccagactgcctgagctcaaaacccttccctgtctcccccgctgtgtgacggtgaactagtcrctcaacctctctgttgtgtactctgtaaaatgggcataacaatggcatcctccttcccagcttgtttgcggatcatgagaataaggcacgcaaggagtta

SEQ ID NO: 356834 - DNA, 201 bp, Homo sapiens
tgaactagtcactcaacctctctgttgtgtactctgtaaaatgggcataacaatggcatcctccttcccagcttgtttgcggatcatgagaataaggcacrcaaggagttagcagggtgtctggcgcacaccaccagctgctgctgctatgacctccgctaagcacctcacgtgctcggtccccagcgtcttcccatttgt

SEQ ID NO: 356835 - DNA, 201 bp, Homo sapiens
gcacctcagggcagatatgtaggtgtttgcttgtgtttgccggatggtgtggcatgtgctaggtttttgcacatgtctgattcttgggcatgccctcttcrtgtgcgtgtgtgtgtgtgtgtgtgtgtgtgtgtgtgtgtacttggcctctgctaggcctaaagagcaggtatgtccaggatccagagctgggactgggga

SEQ ID NO: 356836 - DNA, 201 bp, Homo sapiens
agtccgtggtgggggtctgggcgggcacggtggggaggcactgccagactcccccgaggcccctgcgtgacccactcctctcttgtctcctcatggctccygtggctgcctggatcctgcagagctcccgagtgaggaaggtgaggctggcaccgggatggacctctaggccgcgggcagcatccctgggtcgttctctgt

SEQ ID NO: 356837 - DNA, 201 bp, Homo sapiens
catctttggggacacggaagacgtggcgggcaaggcctacacgggccgcgagtttgatgacctcagccccgagcagcagcgccaggcctgccgcaccgccygctgcttcgcccgcgtggagcccgcacacaagtcccgcatcgtggagaacctgcagtcctttaacgagatcactgctatggtgaggccacagcctggagc

SEQ ID NO: 356838 - DNA, 201 bp, Homo sapiens
caggtgcctataatcccagctactcgggaggctgaggcaggagaatcacttgaacctgggaggtggaggttgcagtgagctgagattgagctactgcactscagcctgggtgacagagcaaaactctgttcccccactctcccccaaaaagagagggtgagactaacaccaggaggtgggcgagcggcattgaacagatct

SEQ ID NO: 356839 - DNA, 201 bp, Homo sapiens
catgggctcaggcacggccgtggccaagtcggcggcagagatggtgctgtcagatgacaactttgcctccatcgtggctgcggtggaggagggccgggccmtctacagcaacatgaagcaattcatccgctacctcatctcctccaatgttggcgaggtcgtctggtgaggccgggccttccctcctctcagccctctcaa

SEQ ID NO: 356840 - DNA, 201 bp, Homo sapiens
cgggcggatcacgaggtcaggagttcgagaccagcttggccaacatggtgaaacctggtctctactaaaaatacaaaaattagccaggtgtggtggcgggygcctgtaatcccagctactcgggaggctgaggcaggagaatcacttgaacccaggaggcagaggttgcagtgagccaagatcatgccactgcattccagc

SEQ ID NO: 356841 - DNA, 201 bp, Homo sapiens
catttacagcaagagcaacagacccattgaaacatatttatttatttatttatttgagacagagtctcgctctgtcacccaggctggagtgcagtggcgcdatctcagctcactgcaacctccgcctcccgggttcaagcgattctcctgcctcagcctcccgagtagctgggattacaggcacccgccatcatgcctggc

SEQ ID NO: 356842 - DNA, 201 bp, Homo sapiens
agagcagaaggggagatgatccaggtagacaggtagagaaaggtgaactgagccgggcgcggtggctcacacttctaatcccagcactttgggaggccgargtgggtggatcacctgaggtcaggagttcgagaccagcctggccaacatggtgaaaccccgcctctactgaaaatacaaaaattagctgggcgtggtggc

SEQ ID NO: 356843 - DNA, 201 bp, Homo sapiens
ggtggctcacacttctaatcccagcactttgggaggccgaggtgggtggatcacctgaggtcaggagttcgagaccagcctggccaacatggtgaaacccygcctctactgaaaatacaaaaattagctgggcgtggtggcaggcaccggtaattccagctacccgggaggctgaggcaggagaatcgcttgaacctggga

SEQ ID NO: 356844 - DNA, 201 bp, Homo sapiens
gcacaagcccacccatgcgcaccatgaggttagtgctgtcctgattcgaggctggggcatggctggggtgacctcgaaagcacactgctccattggagaaytggcccagaaaccagtcctggccctccccccgcctttcctgttcgcctcagctaaatagatcagaaggaaaaagtctgtttgattttaatctcgacgcag

SEQ ID NO: 356845 - DNA, 201 bp, Homo sapiens
tgttggttgattttcacatgcatttccctattcagtgatctccaggctcccgctagcctccccaggctaatgccagctgttctccttctgagccgctgcaytcctgctccagaacgtctgcctttcccacgctgtgcccttgcttctccctggcacggtgcagctctccccaccgccgccccgaccccgcacccctcccgg

SEQ ID NO: 356846 - DNA, 201 bp, Homo sapiens
tccccacacagacccactcactcactgtgtggccttgcccaagccacaccgccaccctgatcctccgtgcccgggtctgtgaagcagggcaggaactcccygccacctgcctgccctttaggctgtaggaatgattcaaccacttcaggggcccgaggcacctctgcctgatacaaaaggtgcttcgggaaatgttggaga

SEQ ID NO: 356847 - DNA, 201 bp, Homo sapiens
tgggcggtggctcacgcctgtaatcccagcactttgggaggccgaggcgggcagatcacaaggtcaggagttcgagaccaccctggccaacatagtgaaaycccatttctactaaaaatacaaaaatcagccgggcgtggtgccgcgtgcctgtaatcccagctactcaggaggctaaggcaggagaatcgcttgaacccg

SEQ ID NO: 356848 - DNA, 201 bp, Homo sapiens
ctccttctgagccgctgcactcctgctccagaacgtctgcctttcccacgctgtgcccttgcttctccctggcacggtgcagctctccccaccgccgcccygaccccgcacccctcccgggatccccagcccaccccacggcagtgttttgtgtgctggttgtgcccaggcgtgggccaagggcaggatgaggcttccctc

SEQ ID NO: 356849 - DNA, 201 bp, Homo sapiens
agttcgagaccaccctggccaacatagtgaaaccccatttctactaaaaatacaaaaatcagccgggcgtggtgccgcgtgcctgtaatcccagctactcrggaggctaaggcaggagaatcgcttgaacccgggaggtggaggttgcagtgagccaagattgcgccactgcactctggcctgggcgacagagcgagactc

SEQ ID NO: 356850 - DNA, 201 bp, Homo sapiens
ctgtgggagctggtgctggaacagtttgaggacctcctggtgcgcatcctgctgctggctgcccttgtctcctttgtaagtagggccctgccagccatccygtggtagtcggtagccctggagggagagccaggctgggcagtgctccgaggtcctggagcctgggcctgtcctccacaccctgggcctgcgccctggcct

SEQ ID NO: 356851 - DNA, 201 bp, Homo sapiens
tcgccactgcactccgcctgggcgacagagtgacactacgactcaaagaaattaaaaaaaaaaaaaaggaaaataataataataataataataataataawatcaataaataaaataccaggccggaggagccacaaccagaaaaccagcattcctctagctccacagcaccaggctgagacgcagctgatatcagggaat

SEQ ID NO: 356852 - DNA, 201 bp, Homo sapiens
aggccagagagatgcgggctgagccctggctggagccttggggagaggggagaaggtatgggtcagagacatttaggagccaaaaatcctgggacttggtractggttaggtgaaagagacagggaggaagccaggggggctcctggttcttgtgctgtctggggctgtcgccggagtggcaaatacagagagtgggagag

SEQ ID NO: 356853 - DNA, 201 bp, Homo sapiens
ggttaggtgaaagagacagggaggaagccaggggggctcctggttcttgtgctgtctggggctgtcgccggagtggcaaatacagagagtgggagaggtgkcctgaggggtccccggggaacaaggttcagcaggcagctggacatctgggcttggggctcagcaaagggccccagggagagcaggtgggagggtggaagc

SEQ ID NO: 356854 - DNA, 201 bp, Homo sapiens
tacacgggccgcgagtttgatgacctcagccccgagcagcagcgccaggcctgccgcaccgcccgctgcttcgcccgcgtggagcccgcacacaagtcccrcatcgtggagaacctgcagtcctttaacgagatcactgctatggtgaggccacagcctggagccccaggagggggtgatgagtggggccacggggtgtga

SEQ ID NO: 356855 - DNA, 201 bp, Homo sapiens
attccgcatggctaacgagcttcggggagatgccacagatgtccggagactgtcctttgagtggcaagagacaagaggaggcagggctcagttagactgcsgcctgggaagggggagcttctccaagcccaccctgcagagcctggctcccgcccctctcatccccacacagacccactcactcactgtgtggccttgccc

SEQ ID NO: 356856 - DNA, 201 bp, Homo sapiens
caggggagccctgctgtgcggtggggcccagcaggccggcccagctgcagaccttgtccagctggtcccaggggagcagggatgttagaggcagggtgagyggaaggcgcctgagctggtgttctccatttgagggaggggctgccttgctgtgggggtggcagagactcaacaggactctgcggccatctaaggaagggc

SEQ ID NO: 356857 - DNA, 201 bp, Homo sapiens
gacatggagctggacgactgcagcaagtttgtgcagtacgaggtgggtgcaggagccgattctccctgcagtacgaggtgggtgcaggagccaagtctccytgcagcagctgagcaggtggtaggtcagggatgggctcaggccccgcttgaatctgccccctccctacagacggacctgaccttcgtgggctgcgtaggc

SEQ ID NO: 356858 - DNA, 201 bp, Homo sapiens
ttctgctccctgccttgcgtgtgtacccttgggtggcctttgcccgtatcttagtctcagtttcctgagtttgggcaggaaggagaggaggggttctgackgatgagttacctcttctccctctccccacctcgcagggggctcctgagagtgtgatcgagcgctgtagctcagtccgcgtggggagccgcacagcacccc

SEQ ID NO: 356859 - DNA, 201 bp, Homo sapiens
gaacccgtgtctgctccctcgagggctccagccggcctccagcctccacgctgcacagagccgctaaatttagccaggccggggaggctgtcccggggccragtgcttggcagcagggctgtctccctacaaggcccggcccagtacccgagtcggccacccggtctttgggcttataaggcaggactggcggctctcaag

SEQ ID NO: 356860 - DNA, 201 bp, Homo sapiens; identical to SEQ ID NO: 76307

SEQ ID NO: 356861 - DNA, 201 bp, Homo sapiens
ccgaagccctgatccctgtgcagctgctctgggtgaacctggtgacagacggcctacctgccacggctctgggcttcaacccgccagacctggacatcatrgagaagctgccccggagcccccgagaagccctcatcagtggctggctcttcttccgatacctggctatcggaggtgagtggggcctgagccctccgtgga

SEQ ID NO: 356862 - DNA, 201 bp, Homo sapiens
gtggcctgaggggtccccggggaacaaggttcagcaggcagctggacatctgggcttggggctcagcaaagggccccagggagagcaggtgggagggtggragcgggcccagacagcagaaaccggtgaaggaggctgacaggaagtggacagagatgcaggcggagggcagggacggtgtgtggcgatcaatgccagtgt

SEQ ID NO: 356863 - DNA, 201 bp, Homo sapiens
tgtcagtgtcagacaccaccccgaccccagggcggccaggctgggaagggctcacgggccggtgcaaaggaggttacacggaactccagcaaaggcagctkcaggggcaaggagtgagtgaggctggggatgcgggctggaggctgcctgcccctcactccctatcccctgggtccttgccaggccaagggtgtgtatgag

SEQ ID NO: 356864 - DNA, 201 bp, Homo sapiens
gtcagacaccaccccgaccccagggcggccaggctgggaagggctcacgggccggtgcaaaggaggttacacggaactccagcaaaggcagctgcaggggsaaggagtgagtgaggctggggatgcgggctggaggctgcctgcccctcactccctatcccctgggtccttgccaggccaagggtgtgtatgagaaggtgg

SEQ ID NO: 356865 - DNA, 201 bp, Homo sapiens
gagtctcgctctgtcacccaggctggagtgcagtggcgcgatctcagctcactgcaacctccgcctcccgggttcaagcgattctcctgcctcagcctccsgagtagctgggattacaggcacccgccatcatgcctggctaatttttgtatttttgtagagatggagtttcaccatgttggccaggctggtctcgaactc

SEQ ID NO: 356866 - DNA, 201 bp, Homo sapiens
acaacattaggattatgatcacgcctgtaatcccagcactttgggaggctgaggtgggtggatcacctgaggtcaggagttcgagaccagcctggccaacrtggtgaaaccccgtctctactaaaaatacaaaaagattagctgggggtggtggcgtgtgcctgtaatcccagcaacttgggaggctgaggcaggagagtc

SEQ ID NO: 356867 - DNA, 201 bp, Homo sapiens
gctgcaggggcaaggagtgagtgaggctggggatgcgggctggaggctgcctgcccctcactccctatcccctgggtccttgccaggccaagggtgtgtaygagaaggtgggagaggccacggagacagctctgacttgcctggtggagaagatgaacgtgttcgacaccgacctgcaggctctgtcccgggtggagcgag

SEQ ID NO: 356868 - DNA, 201 bp, Homo sapiens
agctctgacttgcctggtggagaagatgaacgtgttcgacaccgacctgcaggctctgtcccgggtggagcgagctggcgcctgtaacacggtgagcaggrctgggggctcaggcctccggctgcatggctggggcttctgggacatctggagaaggcagacaggacactgaagtttttgttttgtttcgttttgtttttt

SEQ ID NO: 356869 - DNA, 201 bp, Homo sapiens
gtgccaccacacccggctaatttttgcattttttagtagagacagggtttcaccatgttgtccgggctagtctgaaactcctgacctcaggtaatctgccygccttggcctcccagagtgctgggattacaggcgtgagccaccgctcctggctgacggtgaagtaagacttggagaaaagaggggagaaggctgcgtgtg

SEQ ID NO: 356870 - DNA, 201 bp, Homo sapiens
aggtcatcaagcagctgatgcggaaggagttcaccctggagttctcccgagaccggaaatccatgtccgtgtactgcacgcccacccgccctcaccctacyggccagggcagcaagatgtttgtgaaggtgggggcctgcctggctggcctgggcccctgcgcgccctggggaacctggtcatccacgctcctctgtgagc

SEQ ID NO: 356871 - DNA, 201 bp, Homo sapiens
ggtgtaggggtggttggtgccacccttggtgctctgtgttttggaaactgagtcccagggagggaaaggaatcgactcccttgcagaccactgtctacagygtctccgttgctgctcccaaaaccgaagagagaaatacagctctagcttcaccctgcaagggaagtttaaaccccttttgaaatgaaaaggcttctgtac

SEQ ID NO: 356872 - DNA, 201 bp, Homo sapiens
agccttgatctgcacaccaagcttgactatcactgcagcctggttcttgatcttatctttgacctctgtgctgactttgtccctgaccttgatgttgaccytcatcttaatctaattctttttttgtttgtgtgatgaggtctcactctgttgcccaggctggaatgcagtggcacagtcatggctcactgaagcctcatc

SEQ ID NO: 356873 - DNA, 201 bp, Homo sapiens
acttaccactaacattctagcactatttacaatgtgcctaggttaacttctatatatggtactgttagattgaaaggatttataacttaaacttttatggyttttcctatttcttaagggcagggacttaagccttgtatttttgtatatcccataagtatggaaagtgggtgctgtatagaagtgtggagtgaactagtt

SEQ ID NO: 356874 - DNA, 201 bp, Homo sapiens
tcaatttgctgataacatttcctgagccatcccagactgggcatttttcttcgagttgttgcaccatttaaataaactatcatgtagttttctgctactartagctccaaagtgccaataacatatctgtaaaaaacaaattaagtttaagccttaaaaatcactgtgcataactgaactaggttctctaaattgtaccat

SEQ ID NO: 356875 - DNA, 201 bp, Homo sapiens
tcgtccatcttctttttcctctgctgctgtgtattcagtaattgagcctttcctaattacttcagtagtcttgggttttggaagatcatctgtcaaaatamaaagtttttgaatcacaaattgttacacaacaaaaatcaaattatacgttaaccactttactacctagattttacagagaattttcattataccatctgc

SEQ ID NO: 356876 - DNA, 201 bp, Homo sapiens; identical to SEQ ID NO: 76395

SEQ ID NO: 356877 - DNA, 201 bp, Homo sapiens; identical to SEQ ID NO: 76396

SEQ ID NO: 356878 - DNA, 201 bp, Homo sapiens
ggctcaagggatcttcccacctcatagcctccagaggagctggggatacagcgcacacaaacatgcctggttaacctttataaaattttttttgtagagayagggtttcactgtgttgctcagactggtcgtgaactcctggccttaagcaatcctcctcctttggcctcccaaagcactgggcatgagccacatcgccag

SEQ ID NO: 356879 - DNA, 201 bp, Homo sapiens; identical to SEQ ID NO: 76397

SEQ ID NO: 356880 - DNA, 201 bp, Homo sapiens; identical to SEQ ID NO: 76398

SEQ ID NO: 356881 - DNA, 201 bp, Homo sapiens; identical to SEQ ID NO: 76399

SEQ ID NO: 356882 - DNA, 201 bp, Homo sapiens; identical to SEQ ID NO: 76400

SEQ ID NO: 356883 - DNA, 201 bp, Homo sapiens
tagagacggggtttctccatggtggtcaggctggtctcgaactcctgacttcaggtgatccacccatcttggcctcccaaagtgctgggattacaggcatsagccaccgcgcctggctgacttcctcttttattacttatcttcttgaccctgccttggctgttgggctctaagagcatacaaattctaccacctccagct

SEQ ID NO: 356884 - DNA, 201 bp, Homo sapiens
taccccatgacgcggcatagctttgctgttgggggaaggaccctcaccctacatgccatcaggagggcagcacaggacctcaccatggaggggacaggacmtgggtttcatggagctgggactacctgtgtccgttacctctttcagtcctttcaacaagccagaggggggtgtttggacctatattagactcagaaaatt

SEQ ID NO: 356885 - DNA, 201 bp, Homo sapiens
ttaaagacgttttaacgccataggtccaaattttggaagtttgtgttttggtttgttttggtgtgtaagactcccagtaccaaagtatctatgttgtagaktgggacaacactaagtgtgtgaagacctaaaatagccctgtggggacatctagtaactattcctgacctccggaaaaaggcattgtatcctcaggccgtg

SEQ ID NO: 356886 - DNA, 201 bp, Homo sapiens
ttttagccacaagtaaggaatcttgaaagtcttttgtccagcaagcagtcttaaaaatgtttttcctaactccttttgcaggtgactaagtacaaaaaaawagttttctcattgtattcaaaatagtgagtaggttccctggataatacacagtggtagttgacatattttctcaaaacacaaccagaaaacccacttccg

SEQ ID NO: 356887 - DNA, 201 bp, Homo sapiens
ccacccatcttggcctcccaaagtgctgggattacaggcatgagccaccgcgcctggctgacttcctcttttattacttatcttcttgaccctgccttggstgttgggctctaagagcatacaaattctaccacctccagctaccaatgcgagccaagttctgagccttgagtgggaatgtggcacaactgggcactgggt

SEQ ID NO: 356888 - DNA, 201 bp, Homo sapiens
tccacccatcttggcctcccaaagtgctgggattacaggcatgagccaccgcgcctggctgacttcctcttttattacttatcttcttgaccctgccttgsctgttgggctctaagagcatacaaattctaccacctccagctaccaatgcgagccaagttctgagccttgagtgggaatgtggcacaactgggcactggg

SEQ ID NO: 356889 - DNA, 201 bp, Homo sapiens
ttttgtgtgctgttgatcacttgtgggtcttagccctcctgagccatacgctggggcctttctcctgagcggtggacctcctgatccaccatgccctcctrcttccacctttcttttccaggaggtggtgcggaaggtggagagcaccaagacagacagccgggataaacccctgaaggatgtgatcatcgcagactgcgg

SEQ ID NO: 356890 - DNA, 201 bp, Homo sapiens
atgtccttgtagtccactccagcctagcctggcacagaggacaggttaagccccctcagtcctggccccgaatgtctgcttggtttggcgcaatccagcgyccctgacctgctctgtcttttttcccaggaaagagcatctacggtgagcgcttccccgatgagaacttcaaactgaagcactacgggcctggctgggtga

SEQ ID NO: 356891 - DNA, 201 bp, Homo sapiens
gcccattgtactcttaaaaagatgttgggatgttgattgcgatttttaaacaactagataatgtataaatcagcagtggaaatcagttttaatgtgtggawgtgtctgattattgttaaatgcctctttttttactttttttttttttagatgtataatgtttcataaaccctggcactggtcacaaagctcagctgtgaa

SEQ ID NO: 356892 - DNA, 201 bp, Homo sapiens
tgtaggccgggtgatctttggtctcttcggaaagactgttccaaaaacagtggataattttgtggccttagctacaggagaggtaagtggctggagcaggbgtagtcaactcacatgaagtgaaattggcactggggatggcagcaaactgacctgcagagttcagccgatctgtagcgtggacctcactgagcaccgact

SEQ ID NO: 356893 - DNA, 201 bp, Homo sapiens
gccatcaccagggacccatgaaggaaaaggtgagtgggaaatgggctcaggaggcaccaaagggaaaacagacttcagggcccaggccagacaggcccagscagcaggcctgcctcctagcatatggccactagggggcagcaggggccaagcgcgggctagggctttgacttgcctgctgtcgccaggcaggaactccct

SEQ ID NO: 356894 - DNA, 201 bp, Homo sapiens
cttttccaggaggtggtgcggaaggtggagagcaccaagacagacagccgggataaacccctgaaggatgtgatcatcgcagactgcggcaagatcgaggyggagaagccctttgccatcgccaaggagtagggcacagggacatctttctttgagtgaccgtctgtgcaggccctgtagtccgccacagggctctgagct

SEQ ID NO: 356895 - DNA, 201 bp, Homo sapiens; identical to SEQ ID NO: 76408

SEQ ID NO: 356896 - DNA, 201 bp, Homo sapiens
gccccattcctgcgcacgggtaggctggcccacagaccctgccttagctcaggccctggcttccattgcagtcacacaaagccccctttcaccggcaaggsttctgctgcgccacaaaggctgctcaggaggtttggtcaacctcgttaagaaaacaaacagcccctgggccacgagcttgtgggcgccacggggcacaga

SEQ ID NO: 356897 - DNA, 201 bp, Homo sapiens
ttggccacgtaagtgacaggcacttatctctcgggttcttgcttttgcagactccagggaagtcctgtctagaggtcgatggcagagactcctagtctttsccatgaggggttgataggaatcaaattgggattcctttggctttgggttttgtttttttgttgttgtttttggttttcagtttgttttttggtgtatggg

SEQ ID NO: 356898 - DNA, 201 bp, Homo sapiens; identical to SEQ ID NO: 76402

SEQ ID NO: 356899 - DNA, 201 bp, Homo sapiens; identical to SEQ ID NO: 76403

SEQ ID NO: 356900 - DNA, 201 bp, Homo sapiens; identical to SEQ ID NO: 76405

SEQ ID NO: 356901 - DNA, 201 bp, Homo sapiens
ccattagctgtttagagcaaatattgttatcctgtagtccaaggagggtatagataagcatgttttccaagaaaagggtctggagctttcattagattctyataggatttttaccgtcaccaaaatcagattcagaaccacttctctaaaaatatggctctattctctctcccatcctcaggttagcttcttgtaccttcc

SEQ ID NO: 356902 - DNA, 201 bp, Homo sapiens
tcttacttcaaaggaacaaaattcctgtaccccctcgtcaaatctgcattctccctgctctggccaggagtctgttagaattttggtgcctccagttttgwgtgctgttgatcacttgtgggtcttagccctcctgagccatacgctggggcctttctcctgagcggtggacctcctgatccaccatgccctcctacttcc

SEQ ID NO: 356903 - DNA, 201 bp, Homo sapiens
aagcacagtatgtatacttcaaacttaagtggtgaacttaggctccgctccttatgggttttctaatgttaatttttagaatctgggtccattagctgttyagagcaaatattgttatcctgtagtccaaggagggtatagataagcatgttttccaagaaaagggtctggagctttcattagattctcataggattttta

SEQ ID NO: 356904 - DNA, 201 bp, Homo sapiens
tgaggccagaagataggaaggacgctgcttttatgtccttgtagtccactccagcctagcctggcacagaggacaggttaagccccctcagtcctggcccygaatgtctgcttggtttggcgcaatccagcgcccctgacctgctctgtcttttttcccaggaaagagcatctacggtgagcgcttccccgatgagaactt

SEQ ID NO: 356905 - DNA, 201 bp, Homo sapiens
gagatggcacaggaggtaaccacaggtcctctgggccaaggagtatgtcagtgtagcctccacagtgggagggccaggttctgctggggagaccaggcctytttcttccccagctctagaggcaggcctacttattacttacctactttgagaccagcggcacccttctttgaagagggaacccagtacaaaggagagaga

SEQ ID NO: 356906 - DNA, 201 bp, Homo sapiens
ccttaccttctcttccctttttctagaaaggatttggctacaaaaacagcaaattccatcgtgtaatcaaggacttcatgatccagggcggagacttcacyaggggagatggcacaggaggtaaccacaggtcctctgggccaaggagtatgtcagtgtagcctccacagtgggagggccaggttctgctggggagaccag

SEQ ID NO: 356907 - DNA, 201 bp, Homo sapiens; identical to SEQ ID NO: 76404

SEQ ID NO: 356908 - DNA, 201 bp, Homo sapiens
aatgtccctgagaagccacatgccctggtcaccctcttcctcctcctcacccttggcccaacctgggtcttacttcaaaggaacaaaattcctgtaccccmtcgtcaaatctgcattctccctgctctggccaggagtctgttagaattttggtgcctccagttttgtgtgctgttgatcacttgtgggtcttagccctcc

SEQ ID NO: 356909 - DNA, 201 bp, Homo sapiens; identical to SEQ ID NO: 76406

SEQ ID NO: 356910 - DNA, 201 bp, Homo sapiens
gtgagaaggaaaaaagagttttgcatgcaaatatgtttgaaaggtgttagataaaacaaaatgaaaatgaccccatttttggctgagtttcttggggcctmatgcacagtgtcagtctccaaggggtgatagggaaaaagaagggtttcggtgttcctcgtggaagcagctttggaactaggatctctgaaatggcataga

SEQ ID NO: 356911 - DNA, 201 bp, Homo sapiens
gcctcagctgtccgggctgctttcgcctccgcctgtggatgctgcgcctctccgaacgcaacatgaaggtgctccttgccgccgccctcatcgcggggtcmgtcttcttcctgctgctgccgggaccttctgcggccgatgagaagaagaaggggcccaaagtcaccgtcaaggtccggtggagtccgcggcatttacggt

SEQ ID NO: 356912 - DNA, 201 bp, Homo sapiens
ctcccctccttcactcagtgacgtgctggtcccacccctgaggtatacagagtgcagctgaacgcaatgtccctgagaagccacatgccctggtcaccctyttcctcctcctcacccttggcccaacctgggtcttacttcaaaggaacaaaattcctgtaccccctcgtcaaatctgcattctccctgctctggccagga

SEQ ID NO: 356913 - DNA, 201 bp, Homo sapiens
agcccacagatttgctgttgattgttggcaacaatggatttgtgtagattttctgctcagctcgaggtgattatcttttttcttttttttcttttgctggygtgtctcttattttgactggctgaggttgggctggacgatgaggccctgatttgaaagcagtgccaggttgttgctggagatctgcactgacagattgtt

SEQ ID NO: 356914 - DNA, 201 bp, Homo sapiens
cttaataactaaaaaaataaaaataaaaattactcttgggctgaaagcaggttttccaagttttggttcataataagtagtttttaaacatttaaaaatargggtatgtaataaaatgctgagagactctctggagaccgctgctgctggcactgctctaatagaaagcatacgccattgagctaacattctgttctttga

SEQ ID NO: 356915 - DNA, 201 bp, Homo sapiens
gaaatagcattgcaaacttctgacatttttgaactgtgtatcaagatttgtggcatatgtatttgagtctgctacaggaaaattcccagagcacataccasaattattcccaaagtaccttgaactgagatgcctagtcagttcctataactgggtgcaccagagatcgcactgtactccatgccataagccttcacaggt

SEQ ID NO: 356916 - DNA, 201 bp, Homo sapiens
gtctctccactctccagttctcctggttatctgaatcccattcccttctagccattcttcatttccttcatttcctcaattgcctttagagttttgcatcmacagtttctcattcttagagcaaacaccctcccagcttatcttgcacctccaaccttcactgaagacttgtttaatactagtttctctctcccctactta

SEQ ID NO: 356917 - DNA, 201 bp, Homo sapiens
ctgtccatgtggaaatggtcaatacaatttgaccagtaatagttttttgattgtctatgggaacatctggatctttgacctcacaagtagttaaacaacawgcccttctccctatgcaaaagtgtttgttcgtttgtggctcagaggctctgcgtttgcatgttgggcttcatgttctggaagtcattttctctagcagtg

SEQ ID NO: 356918 - DNA, 201 bp, Homo sapiens
tttccattgattgccagtagaatttaaggaaatttcctttctgaggccaaatgcatgtctcagcgctgtccatgtggaaatggtcaatacaatttgaccartaatagttttttgattgtctatgggaacatctggatctttgacctcacaagtagttaaacaacatgcccttctccctatgcaaaagtgtttgttcgtttg

SEQ ID NO: 356919 - DNA, 201 bp, Homo sapiens
atctcacaaaagtgacaaagaaaagatctaaacacagctttcaaaagatcagcactggaggtttaatcaacatccttttgaatggctgagtccaaattaayactttaatcatgactaatctactagctaattatctattgagaacttatgaaacctaggatcgaagctttgttataggcccttaactaacttgtattattt

SEQ ID NO: 356920 - DNA, 201 bp, Homo sapiens
tcctcaggaaataaggacaaaataaatctagctataaagatttcaatggaatatacaactattaaaataggtatgttcgattattgagcatttttttttttcaaattgtccttaatattgttatgtagttttcacaatcaaaccaattcctccaccccaaagctgggagctggggatggtggcatagaaaaaatacaaccc

SEQ ID NO: 356921 - DNA, 201 bp, Homo sapiens
gacattttttctgatacagaatccagttaagggtcatgcattgcatttagtgcactgtctctggtattcattattatgaaacaatacctaaggctgtctttgtctttcatgatattgacattttttaagagagcacaggctgattgttttgtgaagtgtccttcaacaattttttctaatgtttcctctttattagaatca

SEQ ID NO: 356922 - DNA, 201 bp, Homo sapiens
atccttcgatccttgagaggccaatagtaggtggcatgtttgtatttctcctggcttgttaatctcccatatcaatgtgcaatgtctgttttttttagcastttcagggacacagagacttggagtaattctttccacactagagataaccttccctacccagaccctcaaaaatgctttttggaagaccgaattgagcca

SEQ ID NO: 356923 - DNA, 201 bp, Homo sapiens
cttaagtagagaaggttaagaaaatgaatacttatactcctttaaatactaattaagaggccctggtaaccatttatcagtaatattaatggcatgaaaawtgaaaaagtatgactcaaaggtgaattcagggcaatttaaattatatataaaaaataaaaacttaggtggaagaatttaaaaattttaaaattctgccca

SEQ ID NO: 356924 - DNA, 201 bp, Homo sapiens
atgatctttaaggtaggtgtttacaaatgctagcagagttaagcaggctccagagtctctttatgacagagcagggactctgcattctcagaaagttgtcyactgacaacattagtggtgccattgacctaggctagaatgagtagcgctccctagggttgcgatgtggcagccctgggcatgagagattggttcatcaca

SEQ ID NO: 356925 - DNA, 201 bp, Homo sapiens
gaattctttggaaaaaacacaaactttttctttattttttataaaagtacctgtgaaaattttggaaaataaattataaaatataagaaaatagtgacctrtaatcatgtcccccagagacagaatattttgtttgaatgaagaatgcagttatatatgtcattatagaatatttagaaattactcagcacatataattaa

SEQ ID NO: 356926 - DNA, 201 bp, Homo sapiens
tttgctaaaagcacgtgaaagtgaatcgaagtgtttaatacattgaagggagcactggtctcatccagagaatgacatccttagcacctcgtcaaagtccrtactgtaagttctggaaatgactcaatattgttttctacacacaacctctttaaatttttttaatttcttaaagtagtctatataaaaattatttttaca

SEQ ID NO: 356927 - DNA, 201 bp, Homo sapiens
tttgggttggttccaagtctttgctattgtgaatagtgcctcagtaaacatacgtgtgcatgtgtctttagagcagcatgatttataatcctttgggtatrtacccggtaatgggatggctgggtcaaatggtatttctagttctagatccttgaggaatcgccacactgacttccacaatggttgaactagtttacagtc

SEQ ID NO: 356928 - DNA, 201 bp, Homo sapiens
ctataagatcctaaagacagtcttctctttatccctaaatagactatcagatcctaaagacaatcaattgctattgatcatttactaactatagttaactkaccaattattaaagggtctcctcgaaaacattatattaaataactatgaatgtaaatcatcccctgtgtttaactgaacaacacgggtaggaatgaaggc

SEQ ID NO: 356929 - DNA, 201 bp, Homo sapiens
gagccattatacccagcaaactaatgcaggaacagaaaaccaaacactgaatgttctcacttataaatggcagctgaacaatgagaatacatggacacatygaggggaacaacacacattggggcctgtggtggatggtgtggagtgggggtgttgggtggaagggagatcatcaggataaacagctaatgtatgctggac

SEQ ID NO: 356930 - DNA, 201 bp, Homo sapiens
gattccctatttattaatggtgctgggagaactggctagccatatacagaaaactgaaactggaccccttccttacaacttatacaaaaattaactcaagrtgggttaaggacttaaatgtaaatcccaaaactataaaaaccctagaagagaatctaggcaataccattcaggacataggtacaggcaaagatttcatga

SEQ ID NO: 356931 - DNA, 201 bp, Homo sapiens
ttatttgttggccatttttatatgttttagagtttaatctatttcatattgtcctcttttctgtaataaattatgttttgttagaagatgcccatttgaayggtaacactttagttggccagtagagagttatttccagactgagtcaccatcagctgcatgtgctgccttgctattcatgcccccactcataagagcagg

SEQ ID NO: 356932 - DNA, 201 bp, Homo sapiens
tcaactctttgtcctttttagctacattcctaaagatttcccaatgttttctctaggtctttgatccagttttctatagtattaattctgaccttcattayttccaatgataattcagataagtctattgcacttacagttttctttcaattctaccctattttacccaattcttgcttggttttcatcctgatttttttt

SEQ ID NO: 356933 - DNA, 201 bp, Homo sapiens
actccagacttcaggtgatccacctgcctcggcctcccaaagtgctgggattacaggcgtgagccaccgcgcttggccgactccatcttttttatgtttgkggttctggtttgtattcttttttgttaatcttatgaaaaattaatagccttctatttccctaagcccctcccctttggccctatcattaggcatacttct

SEQ ID NO: 356934 - DNA, 201 bp, Homo sapiens
aactttactgctaatggtggttatgtttgcaggtgggacagtggaatatttaattatctacatcataggattctgcaacatttttttttttttttttttttacaatttgcctcttttacttttgtaatctgaaaaacaactgcaaaaataaataacatttaaagagaaactcattgcagataataattcagtgtcatattg

SEQ ID NO: 356935 - DNA, 201 bp, Homo sapiens
tagctgggattacaggcacctgccaccacacccagctaatttttgtatttttagtagagacggggttttgccatgttggccaggctggtctcaaactccaracttcaggtgatccacctgcctcggcctcccaaagtgctgggattacaggcgtgagccaccgcgcttggccgactccatcttttttatgtttgtggttct

SEQ ID NO: 356936 - DNA, 201 bp, Homo sapiens
tgctatctaaaagggagcactgcttcttaatttttctctttccattttaaaggttataatggtagatatgcccatgatggaattagcagaacatgttttaygtgtggggagtgagaagggcagggagatgatgtactctaacttctgtgctgtaaaacatgtggatttgcctttccagtagtaaaccttgaaagtattctt

SEQ ID NO: 356937 - DNA, 201 bp, Homo sapiens
aacacactttaacactgacctagatttttataacagtatcaataatatgatttatatgatatataaagtataatatgcaatatcaaatttatgtaatacakatgttctatatttatatggtaatatcaataagaatactcttaaaaataaaattttattacaaagtgattggcaaagcagttttatccagttttacccatg

SEQ ID NO: 356938 - DNA, 201 bp, Homo sapiens
ctccagaagtggatcctcttcctcaggttcccatccccagcctgtatgcctttcccccgccaaaaaaaaaaagaaacacggggaactatcagatattcttkctcacctagaaaccgcaaaacacaagaaaaactcttcagagaacttcagtacctcattttctattacatttgaagcccacttaaatgtgagacatgataa

SEQ ID NO: 356939 - DNA, 201 bp, Homo sapiens
catcccatcggcagtataccagtgctacaagactaaagttcaatgtcactctgagtgtttcttttaccagggacatctttaaacctagtaagtagactgcrgctaaggagcattcctgaaacattgcacaggatggagctaggagcagatggagattgatgtcatcagaactcagcacaggaaataaagatctgagttgta

SEQ ID NO: 356940 - DNA, 201 bp, Homo sapiens
ggaaatttaaataaataaaataaataagcaaaaaaatatatattatccatggtttcaacaagtcaataccagtgggagaaagcctttttctctaaatcacrtaaggaagagtggacaatcagtggcaaatctgtgggaccatccatcccatcggcagtataccagtgctacaagactaaagttcaatgtcactctgagtgt

SEQ ID NO: 356941 - DNA, 201 bp, Homo sapiens
ataagtgcaaaactaatatgagacagctctctcttcctatagagaacttgtaatctactgataattacaaaattttagagcaaatgcatgcatttatagasttttaaaataattactctgttcatgcattttggaacactttacataaactaaaatttcaaaagtggcttcttctacagataacagtctgtagactcctga

SEQ ID NO: 356942 - DNA, 201 bp, Homo sapiens
tgtgcctggctgacttttggttgatggaatcagttaacatccacaggcagatatggaaatcttgactttcatcagtaggttgctggctatctggggatgcrgcactgaaggcaaagagtggaggcaaagtagtggaaagaaaagtcaatactgaaaagtgcaaggaatttacgaagctctcacccattgtccaggacagct

SEQ ID NO: 356943 - DNA, 201 bp, Homo sapiens
tcaatgcatactgtttcatggccatctcttctcccttgtttccccttcccttttattctttccttcttcttggagtccctcttatttgagtgatccctgaraagggtactcactgctaagaagaacgacctgggttacataacaagtccttacagaacaatgcctcaagaggaggtacggctagtcaaggcacagaaagca

SEQ ID NO: 356944 - DNA, 201 bp, Homo sapiens
aatagttaaatacttgttgtccaccatcccccatctcttcagtgtgtttatttatgctctttcctctgcctgaaataccactctccaatcaagcttagcayctcctcctctttccagatgtggtttcctcaagaaagactctctgatacctctctcatacacaagcaccctaagccatcttcatcagatcactttcagtag

SEQ ID NO: 356945 - DNA, 201 bp, Homo sapiens
gtgtgataaattttgttgactgaagtcaccctattgtgctatcaaatactagatcttattcactctatctaattatatttttgtaccaattaaccattccyccttcccactacacttcccagcatttggtaaccatcattctactccctatctccatgagctcaattgcttcatttttagcactgacaaataggtgagaat

SEQ ID NO: 356946 - DNA, 201 bp, Homo sapiens
tatccacccaacagcactgttgccaaccagcaatgccatcacaacaacaaaacaaaacagagtggaataggaagaaggggataccagaataatctacacartttgagtttacccaatattttccacacagtcctttcctttttgcctgtgatttcatgtgactatcacctcatttaatgcttcaaagggtaaaggtctggc

SEQ ID NO: 356947 - DNA, 201 bp, Homo sapiens
aggaagtgacatacaaagaaaacgtgctcagggactgtggagcttgaggaaaagaaacagcttcagcctgaggttttagggcaccaagtatccactgctasagagaacccagagctccagaccagcccctgggctttgcagtagtaggttaattggctatttggcttttcctgactgttaatttgctaatcttgatcttta

SEQ ID NO: 356948 - DNA, 201 bp, Homo sapiens
catgacttcccttctgagatagaaccccaagctttagactgttccttctgcccccttccatcagaacttatccatccagcattgcctacctaattgcaaaytaattcaagctaaggcattcattgattcattaactctttctgagtgatatttgcattctgactggagctgtccttacacactctaccaatctgtattggg

SEQ ID NO: 356949 - DNA, 201 bp, Homo sapiens
aggtctccaccttctgcttctctctgtcccctccttcagacacagcaattaaactcttcattctgagcaatccagtgttaacctaggatgagagaaggcargagaaacctcagtgccaacagtgcacatccttttttgtgcatttctatgccccctcactttcatcccctgccagttgcatctccacaggtcccacctgag

SEQ ID NO: 356950 - DNA, 201 bp, Homo sapiens
caccccagctgcaaaccctagcctcgtatggattgaatacatggaataggagacccagtgtgtttgttctagatgaaatacatgagatatgtctttgggawccattcagacatgcaggtggacactgcagtagtcatctaaaacaattctttcttctctctgaactagttcaatgtgaaaatatatagctttccatgccct

SEQ ID NO: 356951 - DNA, 201 bp, Homo sapiens
caataattatcaaagtagggcttaataacacattattaagaggttcagttggactgatgctcgaaagtgctaatattaggtttatgtagttggatctccaygggtgcttaacagtcagctctgctcacttaaacacaaaggctttctttgttctcagtatcaccctagctacttctgcaccagttagtcactactcgactt

SEQ ID NO: 356952 - DNA, 201 bp, Homo sapiens
ttccaaatgagaatttggaaaccataaaacaataaaatccaaacaaaggtgcattaggataactgtaaatgcctttaagtaatgatttgtaaaattgtatragggtcttaaataaacctagcattttattaccaggcacactgttaacattccccagatttttacaagaggaatttagcgagctatctgtaagatttagct

SEQ ID NO: 356953 - DNA, 201 bp, Homo sapiens
aatttggaaaccataaaacaataaaatccaaacaaaggtgcattaggataactgtaaatgcctttaagtaatgatttgtaaaattgtataagggtcttaartaaacctagcattttattaccaggcacactgttaacattccccagatttttacaagaggaatttagcgagctatctgtaagatttagcttagctaatcat

SEQ ID NO: 356954 - DNA, 201 bp, Homo sapiens
ctcactggtacacatcaaggaaatacaataaaacctaagtaaggccgggcacagtggctcaggcccgtaatcccagcactttgggaggccgaggcgggcgratcacttgaggtcgggagttcaaggccaacctggccaacatggggaaaccccatctctactaaagatacaaaaattagccgggcgtggtgggtccccagt

SEQ ID NO: 356955 - DNA, 201 bp, Homo sapiens
tttttccactaaaaactacccatttttttcttctccaattaataagtcttctgtgggtaaatgctttgatattgggtaattaccccattgctttttaaacwttcatttaataattttagtatccattaatgattctggcctgaatcagtcattaccatatcggctgcaaaatggtaattttccagctctattatttcttct

SEQ ID NO: 356956 - DNA, 201 bp, Homo sapiens
tcacttaagaaaatgaggcttttctttttttcgagttggattttaaaatgttggatatttaacttttttatactgagataaacttgataaatattcacacyttgaacttcagaatagtataattttgcaaagcgtctttttagatatctaatatctcatctctttgaaggtgaatgatattagaaattaaatatggagatt

SEQ ID NO: 356957 - DNA, 201 bp, Homo sapiens
cagtgacagttcgaagtgaggggatagagggattacaaagactaagatagtgcaagtggagattgagaatgcaactctatacccagtgctgaatcttgatstggctcttgctacatatgtgatttttggcaaactaacctctcagacctcagtcctctcatttttaagttagtacaattcctggtacattgccagaactca

SEQ ID NO: 356958 - DNA, 201 bp, Homo sapiens
aggccgaggcgggcggatcacttgaggtcgggagttcaaggccaacctggccaacatggggaaaccccatctctactaaagatacaaaaattagccgggcrtggtgggtccccagtcatgctcgggagggagtaaggagcgggtttcaccacgctgtgatgctgagccttgacttgcctgttctaggtttcatgagctaca

SEQ ID NO: 356959 - DNA, 201 bp, Homo sapiens
gatatgtctttgggaaccattcagacatgcaggtggacactgcagtagtcatctaaaacaattctttcttctctctgaactagttcaatgtgaaaatatayagctttccatgccctgttaatgtcttaatgaaacctgcttccttaagagtgtcctgcaccaagaatacagacatgattagtcctaaggtgccactacaat

SEQ ID NO: 356960 - DNA, 201 bp, Homo sapiens
gcccaggaggcagaggttgaagtgagccaagattgcaccactgcactccagactggatgacagtgtgagacccagtctcaaaaaataaataagtaaaaatwaaaaaaaaaacaaatatcaggtatgttcatgaaacatttcaaatgtagagttcaatagaccatatttttaaaagtatagaaagcatcttttaaatttctc

SEQ ID NO: 356961 - DNA, 201 bp, Homo sapiens
gatgaagcccacttgatcatggtggataagctttttgatgtgctgctggattgggtttgccagtattttattgaggatacttgcattgatgttcatcaggdatattggtctaaaattctccttttttgttgtgtctctgccaggctttggtatcaggatgatgctggcctcataaaatgagttagggaggattccctcttt

SEQ ID NO: 356962 - DNA, 201 bp, Homo sapiens
gctcattgattttgtatcctgagactttgctgaagttgcctatcagcttaaggagactttgggctgagacaatggggttttctagatatacaatcatgtcrtctgcaaacagggacaatttgacttcctcttttcctgattgaataccctttatttccttctcctgcctgattgtcctggccagaacttccaacactatgt

SEQ ID NO: 356963 - DNA, 201 bp, Homo sapiens
tttaaagtagttttttccaattctatgaagaaagtcattggtagcttgatggcaatggcattgaatctataaattaccttggcagtatggccattttcacratattgattcctcctacccttgagcatggaatgttcttccattgtttgtatcctcttttatttcattgagcagtggtttgtagttctccttgaagaggtc

SEQ ID NO: 356964 - DNA, 201 bp, Homo sapiens
ctccatataggtcacattctgaggtgcttgggttaggattttaacatacgaatttggcaggggacacactgtagcccataacagcatttttacagccacayatagtaaaaatctggaaatacaccaccacatgtatcagagtataagtggcaaaggttgatcatgatacgtatctctcagttgagaatttcagcgtgattt

SEQ ID NO: 356965 - DNA, 201 bp, Homo sapiens
ctaacttaactgccttttaaaagaccccatctccatataggtcacattctgaggtgcttgggttaggattttaacatacgaatttggcaggggacacactstagcccataacagcatttttacagccacatatagtaaaaatctggaaatacaccaccacatgtatcagagtataagtggcaaaggttgatcatgatacgt

SEQ ID NO: 356966 - DNA, 201 bp, Homo sapiens
aggaacatagggtccttttctgggtcaaatctccctctgaaggtgagagtcaagtcaaggaatgattttcttgaagtgcagcatgctcttccagcagtttstgagagggagatgtccctaaaagggtgaagagagggcatttgttccaggaccctggttcctccaccttccaggatccagaggcctgactgttcatcacca

SEQ ID NO: 356967 - DNA, 201 bp, Homo sapiens
atgtaaaatcctcagcacagtataagtattcaatgaatgttatctaccatattattttcacataccttataatttccttacaacaactctgtgatgtagayaaaattgctatgatttatgcaatttaaatattagacaactggacttcagagtgattactgattcatccagggttacccaagatggcaaaatgttcgtcct

SEQ ID NO: 356968 - DNA, 201 bp, Homo sapiens
tgtggagttggtttcttctgaggcctctcccctcggcttgtagatgtcacttctatggtcttccctctgggcctgtgtcctaattttctcttcatacaagkgcactagtcataatggattagggcctactccagtggcctcatctaacttaactgccttttaaaagaccccatctccatataggtcacattctgaggtgct

SEQ ID NO: 356969 - DNA, 201 bp, Homo sapiens
taggaggcttacctagggaaccagtcttccagatgttaccaacgtgactctgtggcttattatgacttcttgaagaactttgctaagaaaaaagaaatatytaagatactgccacccaataaaatgttatgaaaaatttctacacttaatcatgtcctcactgtgaatcgctctattagtccctacaaccacatatagatt

SEQ ID NO: 356970 - DNA, 201 bp, Homo sapiens
agaacaggcgtcatgaagtcaaccaactacttttgttcaggggcccctgtatttttagtttataataagcttgattttgaaaagcattacaagactgtccrtgagaaatcccacaaagaaattagtttcctttagtgagaaactctaaatttttctctgtgagaaactatttagacataagagttcaggcaccacctcact

SEQ ID NO: 356971 - DNA, 201 bp, Homo sapiens
tcttacgtgataataacagcaaagatttgaatcaaaaaaatctaaagtcagtataaaacaaactacttgggcttacgtaggaaccaaacccaaactcttgyccaaatgaacaattgaaattcctgttgaggttttgaaaaatctccaccaccccatcaagtgccctacttttcatgcagctcaacacttccaaacagagcc

SEQ ID NO: 356972 - DNA, 201 bp, Homo sapiens
tgcctcagcctcaagagtagctgggactacaggcgcccgccaccacgcccggctaatttttttgtgtttttagtagagacggggtttcactgtgttagccrgaatggtctcaatctcttgaccttgtgatccacccgcctcggcctcccaaagtgctgggattacaggcgtgagccaccgtgcccggccttcaagattctt

SEQ ID NO: 356973 - DNA, 201 bp, Homo sapiens
ttgttttaagttttatccaggcatgtctatatgtggctctttccttatttttagccagtctgacttaatagcagttcagaaggaaagactcttctacctgygaggcaatacagcaattcctgtttccattgcacaacagcacaaaggccttgcccataatattatacttaatgctgggaaatgtgactgactcccccagga

SEQ ID NO: 356974 - DNA, 201 bp, Homo sapiens
cagttcatttgacaactaccaaaaaatattatatattatagccattcctaattaaaacattatgcaaaattatcaatgtaggtagagatatttagaaaacmcataaaagacatatgtgttttctagagggaaggtaagaagaaaacaatgcccatgggccatgttaagcagcaaggaaaggttttggattatgccctgaca

SEQ ID NO: 356975 - DNA, 201 bp, Homo sapiens
aaaatattatatattatagccattcctaattaaaacattatgcaaaattatcaatgtaggtagagatatttagaaaacacataaaagacatatgtgttttytagagggaaggtaagaagaaaacaatgcccatgggccatgttaagcagcaaggaaaggttttggattatgccctgacaccatgactctatcaacagatgt

SEQ ID NO: 356976 - DNA, 201 bp, Homo sapiens
aaaacaagccaaattacttacgattattttctctctgtgcacaaggagccaaaaattaccaaacagtaggcaaaaataaaaacttcagttttttaatctcwtaaatgcaaaagctacccacctgcttctctgttggtggcaagttcattgaatgccaggctaggaacaagctgctcaaaagaaggaatccgtaggagacca

SEQ ID NO: 356977 - DNA, 201 bp, Homo sapiens
tcaacagatgtcccttcaggtaaaatttcaggagactataaggcttggctccaaagggttaaacacaaggcctgtatgcatccctgtgcatcctggcaggkttttttttttttttttttttttttgagccgcctgtttgcccaagtaactcccactctttcccttccccacaagctgctgctccactctatgtacacaaca

SEQ ID NO: 356978 - DNA, 201 bp, Homo sapiens
ttaatagaaagtaagccttttaggttctgctatggaaatagcagaaataggattagagagtcagcaacttaaatacacataatccatgattatgtcttttyagatgcatgaattatgaatgagtcagtctgaacagttgtttggcatgaagtgtgttgacaggtcaagttgacctgtgctttgggccaggggtggtctaac

SEQ ID NO: 356979 - DNA, 201 bp, Homo sapiens
ggttaaacacaaggcctgtatgcatccctgtgcatcctggcaggtttttttttttttttttttttttttgagccgcctgtttgcccaagtaactcccactytttcccttccccacaagctgctgctccactctatgtacacaacaaaaatatttgtcttttccaaagctgggggcactaaccaatgtctgtgaatttcttt

SEQ ID NO: 356980 - DNA, 201 bp, Homo sapiens
aaccaatgtctgtgaatttctttgtataataacataataatcaaatcacattaagtcagtgtcaagtgagacatgtgttttcaattttaaaacccacaagkgattatttattccttaatacttcatttgtacatttagtgagagaaataggaaagtcacacatacatagaatcgcttccaacctttgctatgaagttattt

SEQ ID NO: 356981 - DNA, 201 bp, Homo sapiens
ctcagggtggccaaggcagaaagaatctgagtacaagtggactcacgtggtttaaacccatgttctcaagggtcaagtgtagttatgtttataataaattrtatataaagaaaaccatcaggaacataccgttttcaaagaagatactggtctgctgacatattaacaaacctccagcagcatgcgcctcaaataatttta

SEQ ID NO: 356982 - DNA, 201 bp, Homo sapiens
atcaaggcaataccctgaatctctgccctaagaggcccggatttgctttcattggtatttgttattcaagtgttaaaccagtctttggatatcagtattcwgatgctacttgggctctttgaaggaaacctcatttgtggcatattatttataaacagcagaaactcaattaaactatagtgtgagataaagttgtgcttt

SEQ ID NO: 356983 - DNA, 201 bp, Homo sapiens
cctttggttgatacgagtcactgagcctctgtgaaagatgagtctgtaggagtagagctgctttttgctagggaggatacagcattcttatctctggcaaktcactaagaaaccccagtgtatgcaagcctgctcgccaccctttgcctctcccctaggttcagggcacaccagcatcatcctctcatccacctactctca

SEQ ID NO: 356984 - DNA, 201 bp, Homo sapiens
tgtgtcatgggggggaacagtgggaggtaactgaatcatgggggcaggtctttcccatgcccttcttgtgataataagtctcacaagatctgatggtttcrtaaaggggaggtttcctgcacaagctctctctcttcacctgctaccatccatgtaagatgtgacttgctcctccttgccttccaccatgattgtaaggct

SEQ ID NO: 356985 - DNA, 201 bp, Homo sapiens
aattagaacaaaacacaattgagtataagaaatattcatcatttaaatggttaattgttcagataaaaagcatattcaaaataacaggtcaagggagagaytgaatataacacaggttccctcaaggacaggaatgttaagataattgagcaaggaagcaattgtagattccaactcacagatttaatcagctaaatgcca

SEQ ID NO: 356986 - DNA, 201 bp, Homo sapiens
ccatgcctggctaatttttatatttttagtagagatggggtttcaccatgttacccaggctggtcttgaactcctgacctcaggtgatccagctgcctcakcctcccaaagtgctgggattacaagtgtgagccaccacgcccagcctgtcatttttaataacaaaaactaatttggatatattgcatctatatttatatt

SEQ ID NO: 356987 - DNA, 201 bp, Homo sapiens
gaaaggaaaggggatgtgatgagacaggcaacatgacctctggggtactggcaggcagtgttcttgacctgagtggtggttacaaggtgttcattttctayttattcattaaattatgtatgtattccctatgcattctacttaaatatatttcatttttaaaggtaaattttacaaatatttatggattgttcctttatt

SEQ ID NO: 356988 - DNA, 201 bp, Homo sapiens
atggtgcaatctcggctcactgcaccctccgcctcctgggttcaagtgattctcctgcctcagcctcccgagtagctgggaatacaggtgaccgccaccaygcctggctaatttttgtatttttagtagagatggggtttcaccatgttggccaggatggtctcgatctcttgatcccatgatccacctgcctcagcctcc

SEQ ID NO: 356989 - DNA, 201 bp, Homo sapiens
acctgttgtttcctgactttttaactatcgccattctaactggtgtgagatggtatctcattgtggttttgatttgcatttctctgatggccagtgatgaygagcattttttcacgtgtcttttggctgcataaatgtcttcttttgagaagtgtctgttcatatccttcgcccacttgttgatggggttgtttgtttttt

SEQ ID NO: 356990 - DNA, 201 bp, Homo sapiens
ggttttgatttgcatttctctgatgaccagtgatgatgagcattttttcatatgtctgttggctgcataaatgtcttcttttgagaagtgtctgttcataycctttgtccactttttgatggggttgttttttttcttgtaaatttgtttaagttctttgtagattctggatattagccctttgttagatggatagattgc

SEQ ID NO: 356991 - DNA, 201 bp, Homo sapiens
actgtcctccacaatggttgaactagtttacattcccaccaacagtgtaaaagcattcctatttctccacatcctctccagcatctgttgtttcctgactytttaatgattgccattctaactggcatgagatggtatctcattgtggttttgatttgcatttctctgatgaccagtgatgatgagcattttttcatatgt

SEQ ID NO: 356992 - DNA, 201 bp, Homo sapiens
aagttgacaaatttttttaaatgtaaaaacaattagtgataggaaggtgcacaggcaatctcattcaattccggccaaaatttgaataaattttctagacmtgtgttttacagaaagtatttagaaaaaaactaaagttattattctttcattcaataattcttattccagaaaaatttcctaacctaaaaaacatgtaaa

SEQ ID NO: 356993 - DNA, 201 bp, Homo sapiens
attctgtgaagaaagtcattggtagcttgatggggatggcattgaatctataaattaccttgggcagtatggccattttcacgatattgattcttcctacycatgagcatggaatgttcttccatttgtctgtatcctcttttatttccttgagcagtggtttgtagttctccttgaagaggtccttcacatcccttgtaa

SEQ ID NO: 356994 - DNA, 201 bp, Homo sapiens
ttaaatagggaatcctttccccagttcttgtttttttcaggtttgtcaaagatcagatggttgtagatatgtggcattatttctgagggctctgttctgtyccattggtctatatctctgttttggtaccagtaccatgctgttttggttactgtagccttgtagtatagtttgaagtcaggtagcatgatgcctccagct

SEQ ID NO: 356995 - DNA, 201 bp, Homo sapiens
ttctacatatggctagccagttttcccagcaccatttattaaatagggaatcctttccccagttcttgtttttttcaggtttgtcaaagatcagatggttrtagatatgtggcattatttctgagggctctgttctgttccattggtctatatctctgttttggtaccagtaccatgctgttttggttactgtagccttgt

SEQ ID NO: 356996 - DNA, 201 bp, Homo sapiens
ggagaaggaaataaagggtattcaattaggaaaagaggaagtcaaattgtccctgtttgcagatgacatgattgtatatctagaaaaccccattgtctcarctcgaaatctccttaagctgataagcaacttcagcaaagtctcaggatacaaaatcaatgtacaaaaatcacaagcattcttatacaccaataacagaca

SEQ ID NO: 356997 - DNA, 201 bp, Homo sapiens
taggcaggagaaggaaataaagggtattcaattaggaaaagaggaagtcaaattgtccctgtttgcagatgacatgattgtatatctagaaaaccccattvtctcagctcgaaatctccttaagctgataagcaacttcagcaaagtctcaggatacaaaatcaatgtacaaaaatcacaagcattcttatacaccaataa

SEQ ID NO: 356998 - DNA, 201 bp, Homo sapiens
aatcaaatcacattaagtcagtgtcaagtgagacatgtgttttcaattttaaaacccacaagtgattatttattccttaatacttcatttgtacatttagkgagagaaataggaaagtcacacatacatagaatcgcttccaacctttgctatgaagttatttctctaggtgttttctagttattttacaagttgtctttc

SEQ ID NO: 356999 - DNA, 201 bp, Homo sapiens
tattccttaatacttcatttgtacatttagtgagagaaataggaaagtcacacatacatagaatcgcttccaacctttgctatgaagttatttctctaggkgttttctagttattttacaagttgtctttcactattagcattacagtatttctcactctcttgttcactgataccaagtttaattttcagcctttacaac

SEQ ID NO: 357000 - DNA, 201 bp, Homo sapiens
cacctgtaatcccaatgctttgggaggctgaagcaggaggattgcttgaagccaggagtttgagaccagcctaggcaacgtagagatcctatctctatttwaaaaaaaaatgaacaaaacaatattagccaagagtggtggtacatgcctgtagtcccagctactcaggaggctgaagcaggaggatcccttgagctcaag

SEQ ID NO: 357001 - DNA, 201 bp, Homo sapiens
taaaaactaagcctagcaaatgccctaaatgttaagaaatttgtttttatcttaaattgctcagaatttcaaagtcatttataatgactttgtcttaaaartatgtccacccatgtgaggaaatctccacacttgatgatgttaagggccaaataatatatttggttgtcatcagtttctacccatcattttctgaccact

SEQ ID NO: 357002 - DNA, 201 bp, Homo sapiens
ggctggggaggcctcaggaagcttacaatcatagcagaaggggaagcaaacacgtccttcttcacatggtgacaggaaggagaagtgctgagcaaaagggraaaaaaacccttataaaaccatcagatgtaatgagaactcatgcactatcatgagaacagcatgggggaccacccccatgattcagttacctcccatcag

SEQ ID NO: 357003 - DNA, 201 bp, Homo sapiens
aatttactttctgttccttcaccctccaaccccacacatacaaatttaatggtgggcttagcaactgtgcaaagtaagcattaagttacatacaacgttggtgattataaattgtaaaggaataactttcagttcaattttaaattcaactcctttcaatagagtccaacaacatggactctatcatttactcatgacaca

SEQ ID NO: 357004 - DNA, 201 bp, Homo sapiens
gtggttcacacctgtaatctcagcactttgggaggctgaggcaggcggatcacttgaggtcagtagttggacagcctggccaacacggtgaaaccccgtcyctactaaaaatacaaaaattagctgggcatcgtggcacatgcttgtaatcccagctacttgggaggctgagacaggagaatcacttgaaccctggaggca

SEQ ID NO: 357005 - DNA, 201 bp, Homo sapiens
tgtccaaggacgcaactggtgggtgggagacttgctctcaggcagtgaaggactggcacattgtgtaataaacagaatcaaaggcagaaattagattacargccacctgatgatgataaaatcaatcaccctcatcaaagggatttgctttgtgtgtgtttttctctttcattcttgtggatgcagacaggatattgaaca

SEQ ID NO: 357006 - DNA, 201 bp, Homo sapiens
aacatatctagtgtgtgaacttttagccctgttgaaaatagcttgcaagctgtaagctggttatatttcaaagagctagaggctcctgtagttctctattmattagttttaaagcacctctatgacatgacataggtggcagtattattatccctatattgcagagggggcagccaaagcagacagcagttgcataaccaa

SEQ ID NO: 357007 - DNA, 201 bp, Homo sapiens
gtggttaaaagagaatctgcttctctgggaattcaaggtaaccctcatagggtcatcattactgacaaaaagctggcatctcagatccagaccagtgtgargcaagtcaagaaggccctaatttagctgtgcaaacaaagcattcctgggtttgatacgacttcattccctgactggcagtctgagcttacacatgcagac

SEQ ID NO: 357008 - DNA, 201 bp, Homo sapiens
ggaggctatagatccatgtcttttaagatttagggacaaagttgaaggcaaagcaatatcacatagtaccatacagatatcttcagtgtcctatagctggytagaaaaaaagctgaaacttttcttagccaaattggtgcttgtcaatactgaaaataaaaattgtttaaaaggacttgaaaataataggaaacttcaatt

SEQ ID NO: 357009 - DNA, 201 bp, Homo sapiens
aacctactgaacaaagaagaaaaatcagcagtagtgatactctcaaaatgttgactcataaagattccgcataatctttatgaattctttgaattaatgtrgctgcttgaattaatgaagtatgttgaattcatgttcttattaaatattcttaggttatagcaccataattctaattgtttcttcaatagcagcctattc

SEQ ID NO: 357010 - DNA, 201 bp, Homo sapiens
aggaggaggatgtgggggaggcagaaacaacagatggcaactatggggatttttccagagtgggaagtgtaacccagggataagctggggtccctggtaarggaagtatccctaaataactggaccttcatactctttgggaaagaacaagctgaggccccaggcacacctgcatggcatcaccatagccttgcttcttga

SEQ ID NO: 357011 - DNA, 201 bp, Homo sapiens
ttaaacatttttatctggtcttatttttaggcagcaaaaaataaaattgaactgaattgaattacattggatcaagtccattcctttctgttttactccayggcaagaagccatttgtgacatgacaaattacatcagggcagagtggatgtcacaaataaaaatgtgacctggtatccaaaccagaaccttctttcttga

SEQ ID NO: 357012 - DNA, 201 bp, Homo sapiens
gcttctctgacacttacctctacttcaacatgtactggtacccccactaaccaggaaataaatataaacaactaaatttgcaagttgatatgatccaaggstcttccagaccccaacattgctatctgttctgtgatgccaaggaattgggtcaaaccaatggacactgctggtctcttggtagcaggtggtggttaaaag

SEQ ID NO: 357013 - DNA, 201 bp, Homo sapiens
cttgatgttgggtggggtatcaacctttaaatacagccttgtttcttcaggctgggtttcaatgtgcaggatgtttgttcaggcatcaacagtgccctcaygctagtgacagaatcaggtttgagaggctgagaacaaataaagcttgaagtgtcccacataccagctctgtggggaggtcaaatagcaacagtgagcctt

SEQ ID NO: 357014 - DNA, 201 bp, Homo sapiens
aactgtcctggacaaagtacctttaatgtgattcatgatgttaagcaaaggaaaacccttaaaatcaaggttgaggacacagggggaaaggaaaacaagamcccatgaattagaaaaactgtttcattctcagaacagagattaggactccaaataccatatatctccctcctctccccgaaaaaaccttaaaaaattaga

SEQ ID NO: 357015 - DNA, 201 bp, Homo sapiens
acgcttccctctctctaccaaattctacattttaaaaggaagatattagccaggcggggtgactcatgcctataatcccagcactttgggaggttgaggcrggcaaatcccttgaggccaggaattcaagaccagcctggacaacaaggcaaaaccccatctccacaaaaaatacaaaaaaataaaattagctgggtgtgg

SEQ ID NO: 357016 - DNA, 201 bp, Homo sapiens
ggttctcaaaatcgaaacatgtaacacagccacactagtacacatgcatgcacgtgcacatatacacatggagacacagcctgcctctgcctcagagacaycctcaagatgttatcaatacatgtttcaattatgccaggggaatttgcagttttcattaagctaagagacaaacaaaaggcaattgcacatttccaagtt

SEQ ID NO: 357017 - DNA, 201 bp, Homo sapiens
aacactgtggaactttctgaggttctcaaaatcgaaacatgtaacacagccacactagtacacatgcatgcacgtgcacatatacacatggagacacagcytgcctctgcctcagagacatcctcaagatgttatcaatacatgtttcaattatgccaggggaatttgcagttttcattaagctaagagacaaacaaaagg

SEQ ID NO: 357018 - DNA, 201 bp, Homo sapiens
ccaagactaaaccaggaagaggttgaatctctgaatagaccaataacaggctctgaaattgtggcaataatcaatagcttaccaacaaaaaatagtccagraccagatggattcacagccgaattctaccagaggtacaaggaggaactggtaccattccttctgaaactattccaatcaatagaaaaagagggaatcttc

SEQ ID NO: 357019 - DNA, 201 bp, Homo sapiens
cctttgaaaccaacgagaacaaagacacaacataccagaatctctgggatgcattcaaagcagtgtgtagagggaaatttatagcactaaatgcccacaasagaaagcatgaaagatccaaaattgacaccctaacatcacaattaaaagaactagaaaagcaagagcaaacacattcaaaagctagcagaaggcaagaaa

SEQ ID NO: 357020 - DNA, 201 bp, Homo sapiens
ccacaaattaataatgggagactttaacaccccactgtcaacattagacagatcaacgagacagaaagtcaacaaggatacccaggaattgaactcagctstgcaccaagtggacctaatagacatctacagaactctccaccccaaatcaacacaatatacatttttttcagcaccacaccacacctattccaaaattga

SEQ ID NO: 357021 - DNA, 201 bp, Homo sapiens
ttcataaagcaagtccctagtgacctacaaagagacttagactcccacaaattaataatgggagactttaacaccccactgtcaacattagacagatcaaygagacagaaagtcaacaaggatacccaggaattgaactcagctctgcaccaagtggacctaatagacatctacagaactctccaccccaaatcaacacaa

SEQ ID NO: 357022 - DNA, 201 bp, Homo sapiens
actatgtgaaaagaccaaatctacatctgactggtgtacctgaaagtgatggggagaatggaaccaagttggaaaacactctgcaggatattatccaggakaacttccccaatctagcaaggcaggccaacattcagattcaggaaatacagagaacgccacaaagatactcctcgagaagagcaactccaagacacataa

SEQ ID NO: 357023 - DNA, 201 bp, Homo sapiens
gaaaatccgctgttctgcagccaccgctgctgatatccaggcaaacagagtctggagtggacctctagcaaactccaacagacctgcagctgagggtcctrtctgttagaaggaaaactaacaaacagaaaggacatccacaccaaaaacccatctgtacatcaccatcatcaaagaccaaaagtagataaaaccacaaag

SEQ ID NO: 357024 - DNA, 201 bp, Homo sapiens
ctgagcagcctaactgggaggcaccccccagtaggggcagactgacacctcacacagccgggtactcctctgagacaaaacttccagaggaacaatcagayagcagcatttgcagttcatgaaaatccgctgttctgcagccaccgctgctgatatccaggcaaacagagtctggagtggacctctagcaaactccaacag

SEQ ID NO: 357025 - DNA, 201 bp, Homo sapiens
ttttacctcattgtggtaagaccacttaacaggagatctgcccttttaacaaatgtttgagtgtatatacagcattattgactactggtgcaatgttttayagcagatatctagagctcattcatcttgcataactgaaactttaagccagttgatgagtgattcctgattttcccttccccgtacaccatggaaaccacc

SEQ ID NO: 357026 - DNA, 201 bp, Homo sapiens
ccagtgtctgttgttcccttctttgagttcatgagttctatttacctccctcttataagtaagaacatgtggtatttggttttctgttcctgtgttagttygctaaggataatggcctccagttccacccatgtttccacaaaagacatgaactcattcttttttatggctgcatagtattccattatgtatatatacaac

SEQ ID NO: 357027 - DNA, 201 bp, Homo sapiens
ggaggccgaggcgggcagatcacgaggtcaggagatcgagaccatcctggctaacacggtgaaaccctgtctctactaaaaatacaaaaaattagccagghgtggtggtgggtgcctgtagtctcagctactcaggaggctgaggcaggagaatggcgtgaacccgggaggcagagcttgcagtgagccgagatggcgcca

SEQ ID NO: 357028 - DNA, 201 bp, Homo sapiens
tccaggctgatcatttcttggcagcatgcctgattatatctaggcagttacaccccagaaggtatattctcatagtcaggaatatgtgacagacacctctygtactttaagtcaagatattatagctatctttacagctacacaatcatcatgatcttgcaaatctggagtcctcctggtgtcaccttttctgatccaaag

SEQ ID NO: 357029 - DNA, 201 bp, Homo sapiens
atagattcaatgccatccccatcaagctaccaatgactttcttcacagaatttgaaaaaactactttaaagttcatatggaaccaaaaaagagcccacatygccaagtcaatcctaagccaaaagaacaaagctgaaggcatcatgctacctaacttcaaactatactacaaggctacagtaaccaaaacagcatggtact

SEQ ID NO: 357030 - DNA, 201 bp, Homo sapiens
tttttctattgattggaatagtttcagaaggaatggtaccagctcctccttgtacctgtggtagaatttggctgtgaatccatctggtcctggactttttktggtttgtaagctattaattattgcctcaatttcagatcctgttattggtctattcagagattcaacttcttcctggtttagtcttgagagggtgtatgt

SEQ ID NO: 357031 - DNA, 201 bp, Homo sapiens
gtttgtatcctcttttatttcattgagcagtggtttgtagttctccttgaagaggtccttcacatcccttgtaagttggattcctaggtattttgttctckttgaagcaattgtgaatgggagttcactcatgatttggctgtttgtctgttattggtgtataagaatgcttgtgatttttgctcattgattttgtatcct

SEQ ID NO: 357032 - DNA, 201 bp, Homo sapiens
tttttccaattctatgaagaaagtcattggtagcttgatggcaatggcattgaatctataaattaccttggcagtatggccattttcacgatattgattcytcctacccttgagcatggaatgttcttccattgtttgtatcctcttttatttcattgagcagtggtttgtagttctccttgaagaggtccttcacatccc

SEQ ID NO: 357033 - DNA, 201 bp, Homo sapiens
ctgtaaatgaagagaatttattccaatttaatcaacaaattttttactgtttccattacatgtaagattattatacactagataccaggggtcagaaaggytgattaaatggtttctgactttggggtgtaatagttgttcaccaataactgtagtacaagacatatgaaaaatcctgtaacagttgggtgtagtggtaca

SEQ ID NO: 357034 - DNA, 201 bp, Homo sapiens
ataactttgacaacttttccataaccataaatgtaggtccactttactttgtaaaatgtatttctccaaattaatatagatatttgtctacagatgtcgcwattacaaagaatgcaataaacattattttacctattctttcatacgtatgcttgtatatctttggtataaattcctagtactagatggcagggatcaaaa

SEQ ID NO: 357035 - DNA, 201 bp, Homo sapiens
tattgatcacctaccgtgtaccagaaactaacagctctcctacaatgctcctattgtagtaaggcagacaagagggttctagaaagtgatcgaggcctggygcagtggttcacacctgtaatctcagcactttgggaggctgaggcaggcggatcacttgaggtcagtagttggacagcctggccaacacggtgaaacccc

SEQ ID NO: 357036 - DNA, 201 bp, Homo sapiens
ctttgtaaaatgtatttctccaaattaatatagatatttgtctacagatgtcgctattacaaagaatgcaataaacattattttacctattctttcatacktatgcttgtatatctttggtataaattcctagtactagatggcagggatcaaaacttttagcacatttaaactttaactgatatttgtgaaatctgccta

SEQ ID NO: 357037 - DNA, 201 bp, Homo sapiens
tgggatattgctatgcccatttgtttatatgacatctatgactgctgtcactgaaacagtggcaaagtagttgcacagaaaccgtgtggtctacaaaccgmcccccacaaaccccaaaatactcaccctatggccctttacagaacaaggttgccaatccttaacttagatttttttaaacagatttaagagagctttttg

SEQ ID NO: 357038 - DNA, 201 bp, Homo sapiens
tatggcctgcctctccctctattactagttcctacaagtgcaagagctacgtctttctgatctatttttccttggcacctactgtacctagtttcctaagkgttgatttagggtggatgagataagattgatctggcacaatgttttgttttcttatgtttaaataccttctgtatgccagtaattttccaaattcataac

SEQ ID NO: 357039 - DNA, 201 bp, Homo sapiens
ttaatcccagtgttaataagcaactttactgctaatggtggttatgtttgcaggtgggacagtggaatatttaattatctacatcataggattctgcaacwtttttttttttttttttttttacaatttgcctcttttacttttgtaatctgaaaaacaactgcaaaaataaataacatttaaagagaaactcattgcaga

SEQ ID NO: 357040 - DNA, 201 bp, Homo sapiens
gatattgggatctacttggtattttatcttactagttatatttattctcatcaatgtgcccatcttttccttcccaatgaatgctttttttttttttttttggcagtgtttttcattgtactttttttcttggagtatatttaaagataggaagtggttagacaggttatcactgtattttgcaaaaatttacaggtattt

SEQ ID NO: 357041 - DNA, 201 bp, Homo sapiens
aggtacaggcaaagatttcatgatgaaaacatcaaaagccaaaattgacaaatgggacctaattaaagagcttctgcacagcaaaagaaactatcatcagygtctgagtcatttttaatgtactgtataatggaaaaggaccccatggctattcagagatgaaggaaggaaatgagatgataggaaagagaaaataaccca

SEQ ID NO: 357042 - DNA, 201 bp, Homo sapiens
agagttttaattaagctgatactggttattaaccttgtagatttcattagtttgttagatttccctttttttcgtaattcagaactaaataataaaaggamctgtgagaatggaagtttttattagtttcaggacacataggaataacaagtatacattttacctttaagatagacagtaaataattaatgactattcaaa

SEQ ID NO: 357043 - DNA, 201 bp, Homo sapiens
agtaaatagaaaggaagtgagggtgggggtgaaagcagcctgtgcttaagctatgcctactccagattccctttgccactcttgggacggacaagatgtaytttactttccactaaacttcaaaaacttccccatagactgatcatggttagcactttttcagctcaagaaacttaggtttgatttttttttccccaaaaa

SEQ ID NO: 357044 - DNA, 201 bp, Homo sapiens
aacagcccacttactagatcccagataatcaaactagttacaaatgagtttggcaaactcttagaaggcagggaactatgtaatcccttagaaaaattctkatcaaatgtttcagatgaatcccttctgaacttttacactctattcctcaagcagcattctccacagttcaacttttgctttcctgggccacttgaggaa

SEQ ID NO: 357045 - DNA, 201 bp, Homo sapiens
aaatctccctctgaaggtgagagtcaagtcaaggaatgattttcttgaagtgcagcatgctcttccagcagtttctgagagggagatgtccctaaaagggkgaagagagggcatttgttccaggaccctggttcctccaccttccaggatccagaggcctgactgttcatcaccactttcagtgcattctcaacgctcact

SEQ ID NO: 357046 - DNA, 201 bp, Homo sapiens
atgtctcagaggccctgtgatatccctttgcttagagctattttcattattattgttatttgccttggcagtcaaattctttacaagcagtctgatctgcraatagtatgataataactttggggatgtcagccttgacattttattggtttgggcttcctgctggttcacctaggctatttcactttctaaaaccacaca

SEQ ID NO: 357047 - DNA, 201 bp, Homo sapiens
aaaattttctttccaagttttcagttttaaaagtgacttgtttctaatttcagagtcttgttacatcatattttttttttacaaaaatgattcaagaatayttaaaacttacaatgagcgtacgggacatgcaaaataaaacaaacaagcgcttattatttcctgtaagagttttatctataactatgctgtctaaacatg

SEQ ID NO: 357048 - DNA, 201 bp, Homo sapiens
gggaaatagaaatccatcctctgaattctgtgtattctgagagagcttgaagtcagtttgtctgactagcaatatcctggtcaacacagggagggaggaartgagatgagaccagccaagcagaagcattggccctttatagcaagaagccaacaatctatatcatctggtccaaagaggtagaatcctcccgcttcaggt

SEQ ID NO: 357049 - DNA, 201 bp, Homo sapiens
ccgccaccacgcccagctaatttttttgtatttttggtagagacagggtttcaccgtgttagccaggatggtctcaatctcctgacctcgtgatctgcccwccttggcctcccaaagtgctgggattacaggcgtgagccaccatgcccggcaaacctctgtattttttatgaaaggcttgaggaagagtgggcggtcaca

SEQ ID NO: 357050 - DNA, 201 bp, Homo sapiens
ttatgcacaatttccaataaatgaaagagatcaaagtattatagtactatatagtttttaatgtaaaagtatatttacttacaaagtcaatcagtgagtarcataggaaaatacaaggaaaatttattaagtgtttgtcatatagtagaagtggttaggttgagtgggtaggttggtttttaaaataccaacaacaaaaaa

SEQ ID NO: 357051 - DNA, 201 bp, Homo sapiens
aatatttgtcttttccaaagctgggggcactaaccaatgtctgtgaatttctttgtataataacataataatcaaatcacattaagtcagtgtcaagtgaracatgtgttttcaattttaaaacccacaagtgattatttattccttaatacttcatttgtacatttagtgagagaaataggaaagtcacacatacataga

SEQ ID NO: 357052 - DNA, 201 bp, Homo sapiens
aattgttctaccacataatgcttgcttagaacagtgaatttcaaactctgagtagtggaatctctctctctctctttttttttttttttttttttttttgkgggatgtcacctctaagtatttttgtttttctttttttttttttgagtggcagaatcttatgcacaatttccaataaatgaaagagatcaaagtattata

SEQ ID NO: 357053 - DNA, 201 bp, Homo sapiens
tctctgttccagctccatcctagcttcctcaatttccccagaatgccataacctgccctgtgtataggtgagcagtctgagagcctgaaaagcaaggtgaygtgtccgaagtcataccatctacttggtgtatctgaaaccaaactcaggtcttctggtagcaggaccagaaattgttctaccacataatgcttgcttaga

SEQ ID NO: 357054 - DNA, 201 bp, Homo sapiens
gagacacgaaaatcacttgagcccaggagacagaggttgcagtgagcctagatcgcgccactgcactccagcctgggtgacagagcaagactctgtctcartaagagttaagaaaactgcctcttcctcatcctctctaattctggttcattttccgcttctataaattggattcaaaacttcttgctttcaagatgagtc

SEQ ID NO: 357055 - DNA, 201 bp, Homo sapiens
gtttattatgtgattctatctcaaacatagcattttatattatttttcttttaattgacactgttttgtaaatgttaagaactatagagtgaatttaaatrtatatttaaaaacctacgtgaaagatactttaactcccgccttcaagtgaattcaaataaggagaattccaaggagtggggaaattagccaaacactttt

SEQ ID NO: 357056 - DNA, 201 bp, Homo sapiens
tgagatcaacagtcagaaaagttagaggatgagttaggggaaagatggtaagctccactgggacaggttgagtttgcaggagaatcgagtggaaatgtccrgaagaaagctagaaataatggactaaagtgcagaggagaggtctattttgggaattccacttgggaatcataatcattcatgagccatctggccagaaca

SEQ ID NO: 357057 - DNA, 201 bp, Homo sapiens
aagaagtagctagctgatggtatagaaagctcagttttcataaacccaacattttcccctctcactgaataatgcatgtttttgtgactctagcatgaacrctatcaagcttactgattatttcttactataaaaaccttaaaggcaaatctaaggatatttacaaatgaaaaccaaatgtgtagaatttttttgcctact

SEQ ID NO: 357058 - DNA, 201 bp, Homo sapiens
gctccagaaagtcttccttattctcttctacccataatcttgcctctttttgaatccacatggcattgattttagagctcatttgtgcacttttcttgttstgtcttcttttagatttctaccaaattgtaaatacctatagggataggagcctcttttttttaattatactttaagttctagggtacatgtgcacaacgt

SEQ ID NO: 357059 - DNA, 201 bp, Homo sapiens
gtcttaagcaaatctctgaatatctgaaggggcttagttctttcaaatattgctttcatgggactttaaggttgcagttcaagtaagaggtagatgataayttcttctcccagactggtctacttcctaggattctagaattttgacggacaggtctccaacatgtgaccatacaaatttgtgtaaatttctaggacataa

SEQ ID NO: 357060 - DNA, 201 bp, Homo sapiens
aaatgttagcatctttaagagagaaaattttcaattactgtatttaacattagtaagtatgaaccaacaatgtgcatacacatgtgtaagcttatatttaycagtagcctgatgtgcctcaacaattgaaatggtagtttatatacttactggcacctctaattctcctgctattcatttatttagctattggtttatttt

SEQ ID NO: 357061 - DNA, 201 bp, Homo sapiens
attgaaatggtagtttatatacttactggcacctctaattctcctgctattcatttatttagctattggtttattttgatttaaagtggggtttttaactwtttaattgaaatacagcttaaattctgagaaatgtctagtttttaagtgcagctcaatgaatttttacaaagttaacgtatctgtacaaaaccacatgga

SEQ ID NO: 357062 - DNA, 201 bp, Homo sapiens
ttaattgaaatacagcttaaattctgagaaatgtctagtttttaagtgcagctcaatgaatttttacaaagttaacgtatctgtacaaaaccacatggatsaaaacagatagtttccctcgtaccgcctcctagacattacctcccaaagattccattctgatgcactgaattctatcaccattccctaattttgaaattt

SEQ ID NO: 357063 - DNA, 201 bp, Homo sapiens
ccaacattctatagggctaaatcccaactttagcagccggaagtcgcaactgaagagaccagccatttggattaggaagacaaaaaaaaaaaaaaaaaaaagactttcccactgtttccagtgacttctcaaagggtatggcttccagctattctggtgaccagaatgacactccccttaaccctgagcttccttgggaca

SEQ ID NO: 357064 - DNA, 201 bp, Homo sapiens
gaatcatttgaacccaggaggtggatgttgcagtgagccaagatcgcaccactgcactctatcctgggtgacagagagaccttgtctcaaaaaaaaaaaaaggcgggggggatttggggtttttttgttgtttaagggttttttaatttttaatttttgtgggcacatagtaagggtatatatttatgggtacatgagata

SEQ ID NO: 357065 - DNA, 201 bp, Homo sapiens
atgcctatctcgttcctatgacaaaaaggaatttggccagcctggccaacatggtgaaaccctgtctgtactaaaaatacaaaaaaatgaactgggcacggtggcacacacctgtaatcccagctacttgggtaaaagaattacctgaggtaaaagaatcatttgaacccaggaggtggatgttgcagtgagccaagatcg

SEQ ID NO: 357066 - DNA, 201 bp, Homo sapiens
gtttacaacaaggtcaccaattttacacaccactgccaatggcttcctcaaagttcacaatccagtgatttccataaaggctttttttgtttgtttgttttaagttttatccaggcatgtctatatgtggctctttccttatttttagccagtctgacttaatagcagttcagaaggaaagactcttctacctgcgaggca

SEQ ID NO: 357067 - DNA, 201 bp, Homo sapiens
ggtttacaacaaggtcaccaattttacacaccactgccaatggcttcctcaaagttcacaatccagtgatttccataaaggctttttttgtttgtttgttttaagttttatccaggcatgtctatatgtggctctttccttatttttagccagtctgacttaatagcagttcagaaggaaagactcttctacctgcgaggc

SEQ ID NO: 357068 - DNA, 201 bp, Homo sapiens
tggtttacaacaaggtcaccaattttacacaccactgccaatggcttcctcaaagttcacaatccagtgatttccataaaggctttttttgtttgtttgttttaagttttatccaggcatgtctatatgtggctctttccttatttttagccagtctgacttaatagcagttcagaaggaaagactcttctacctgcgagg

SEQ ID NO: 357069 - DNA, 201 bp, Homo sapiens
gtggtttacaacaaggtcaccaattttacacaccactgccaatggcttcctcaaagttcacaatccagtgatttccataaaggctttttttgtttgtttgttttaagttttatccaggcatgtctatatgtggctctttccttatttttagccagtctgacttaatagcagttcagaaggaaagactcttctacctgcgag

SEQ ID NO: 357070 - DNA, 201 bp, Homo sapiens
ggtggtttacaacaaggtcaccaattttacacaccactgccaatggcttcctcaaagttcacaatccagtgatttccataaaggctttttttgtttgtttgttttaagttttatccaggcatgtctatatgtggctctttccttatttttagccagtctgacttaatagcagttcagaaggaaagactcttctacctgcga

SEQ ID NO: 357071 - DNA, 201 bp, Homo sapiens
caatcatggtagaaggcaagaaggagcaagtcacctcttacatggatggcagcaggcaaagagagagcttgtgtggggaaactctgccttataaagccatyagatctcatgagacttactatcatgagaacagcacaggaaagacctggccccatgattcagttatctcccactgggtccttcccacaacagaagggaatt

SEQ ID NO: 357072 - DNA, 201 bp, Homo sapiens
cacaggccaagtcctagggctgtctttaatattgtgtgagttaggtaaaagtctcacgcaatctaaacctcaaaaataacctaatatcccttcatttttckgacgtgttgtgacggtctttttgtgtcacgctgaggcatttggattttattgtaggacatagggaaaccattcatttgcactagatggtagtatgctagg

SEQ ID NO: 357073 - DNA, 201 bp, Homo sapiens
ttctttccccattttcataaacctacagctactgaagaaggaccggggtaagggaaaatcaactcagatgaaaaataaggactgaatttgaccttagaatsttaggacagtttccttgtgaccttgatcatcccagaggaatttagaaaccacagattagattcttttcttgcagaatattttggccacatccagaagtaa

SEQ ID NO: 357074 - DNA, 201 bp, Homo sapiens
ttacaaattgccatcagatgcatgaatgaacatctttttagggacagattactcaagaaacatgaattctagctcttgtttttaatggaatcctatttaamcatattccagcagaagatcaggattagtcattatagcttttaaaataaaagaatacacaagagtgaagttcagaactattaaaaaaggtataagtgcaaa

SEQ ID NO: 357075 - DNA, 201 bp, Homo sapiens
aacagttcttcccacactagatgccactggatggatgagaaaacatataagaaaaatatggttttttatgtatcttataatgtagtgtgttaaagttacakcctcaaaaacaaaccaagtgtgatcagtactccatgaggattgggcattaactgactctttgttggttgacccaggaaggttctgtgatggactgatcat

SEQ ID NO: 357076 - DNA, 201 bp, Homo sapiens
aatgaggtggcgggagtggggagcaagatttttaaaacttttttgttaccgcgcacacacacacgcgcgcgcacacacacacacacacacacacacacacataggtatatacactattccaaaagcagagccgaatatattaatataaataaagtagacctggattcaggccctaaggacctcgtggcttaatagacaaag

SEQ ID NO: 357077 - DNA, 201 bp, Homo sapiens
caatgaggtggcgggagtggggagcaagatttttaaaacttttttgttaccgcgcacacacacacgcgcgcgcacacacacacacacacacacacacacacataggtatatacactattccaaaagcagagccgaatatattaatataaataaagtagacctggattcaggccctaaggacctcgtggcttaatagacaaa

SEQ ID NO: 357078 - DNA, 201 bp, Homo sapiens
aatgtacattgaactaaaaatctttgtacaatgaggtggcgggagtggggagcaagatttttaaaacttttttgttaccgcgcacacacacacgcgcgcgcacacacacacacacacacacacacacacataggtatatacactattccaaaagcagagccgaatatattaatataaataaagtagacctggattcaggcc

SEQ ID NO: 357079 - DNA, 201 bp, Homo sapiens
cttaaaactgcaagtaggaagggtttgagccactagaacacattgtcatcaggataatgtgaaattactgaaccgatacttcttaaagatagacagacatrgtacctgatgtggtattctagaaccggttagggtttcaaaggatattaaatggtatcctctcaccacatgtttagatctccatgaccatttctgatgctt

SEQ ID NO: 357080 - DNA, 201 bp, Homo sapiens
ccaagcttggagagggataggaagacataccaattacagcccttccctttgagaattttcaacccagtttggaattgaggaaccaggcatgaagaactaastaaaattcaaacccatgtattctaatgtggaatgttaatcttgaaaaattggaagacacatatatcagaatgaaaatggataattattttaaatctagtt

SEQ ID NO: 357081 - DNA, 201 bp, Homo sapiens
aaatgtacattgaactaaaaatctttgtacaatgaggtggcgggagtggggagcaagatttttaaaacttttttgttaccgcgcacacacacacgcgcgcgcacacacacacacacacacacacacacacataggtatatacactattccaaaagcagagccgaatatattaatataaataaagtagacctggattcaggc

SEQ ID NO: 357082 - DNA, 201 bp, Homo sapiens
tcaccatgttttccaggctggtctcgaactcctgacctcaggtaatccttctgcctcgacctttaaaagtgctgggattacaggcatgaggcactgcgccygcctctgctcacaatttaataatgcaaaaagacaatctataacacattgccattagaattccaaccactgctttttaggaatcaagactgatcactcttg

SEQ ID NO: 357083 - DNA, 201 bp, Homo sapiens
attttttatgaaaggcttgaggaagagtgggcggtcacaaggaaatatgattagaggacaaagggtgtggtctaatggtactgaactgcgggtggggggggcttagcaaaacctgtgtgttcacattcttcttggtatctctgtgtctttggctcctataccccgggtatagggagagcacttttcaaagagggtcatatg

SEQ ID NO: 357084 - DNA, 201 bp, Homo sapiens
tggctccccatggaagagtgcagccatgtgggaaaagtgcaagtctccacccagagctcagttcttgtgggtgtataaagttagggtacagccccccccccacccacagcatgccgaacacatgctgctaatcccatcatgggcatacctgccattatagtctttaaaatggaaagagaaaaattaagaagcaatgcttcc

SEQ ID NO: 357085 - DNA, 201 bp, Homo sapiens
tttttggtagagacagggtttcaccgtgttagccaggatggtctcaatctcctgacctcgtgatctgcccaccttggcctcccaaagtgctgggattacakgcgtgagccaccatgcccggcaaacctctgtattttttatgaaaggcttgaggaagagtgggcggtcacaaggaaatatgattagaggacaaagggtgtg

SEQ ID NO: 357086 - DNA, 201 bp, Homo sapiens
gaagggacaggcagacaggcaggcctagagcacccaggaaaaggaagtcaggtaaggtcactacaaagaaacattcaaatataagaagtgtaataaaaaaatacatacagaagtgagaaggaaacagtcactgtttaaaacatttgtaacagagatttcaagtttgcgcactcaaatatgtgatgaaacgtagcctgagtc

SEQ ID NO: 357087 - DNA, 201 bp, Homo sapiens
agcatgaaaaaaaaattctgaaatgaatactgcgcatattgtttaaataattcttaaaagacaacaaaaaagcaaaagccctggttgaataacatttacarttagaatgatcttaacgccttgcttgaaagatcttaacagcttatgctctcctatgccacccaaatagcttttcaaaaatagtgtttctgaaaggcacta

SEQ ID NO: 357088 - DNA, 201 bp, Homo sapiens
gttgcatgaatgtggtagtagaaattgaaaggtacaggagccagaaaattgtaaaataaaatcacagctagagctatgatgggaatgaacgtaaatcttcygtaaaggtatcgaaaaggaaaattaaataactaagggtaataagacacatatcatgcaataattagaattttaatgcttcttaacctctggaattaaagc

SEQ ID NO: 357089 - DNA, 201 bp, Homo sapiens
gatgccaaggaattgggtcaaaccaatggacactgctggtctcttggtagcaggtggtggttaaaagagaatctgcttctctgggaattcaaggtaacccycatagggtcatcattactgacaaaaagctggcatctcagatccagaccagtgtgaggcaagtcaagaaggccctaatttagctgtgcaaacaaagcattc

SEQ ID NO: 357090 - DNA, 201 bp, Homo sapiens
tagaatatgtgcagctatgaagcagagtgaaagtatttgcaaaagacagcgtatcccctcctgtaagatgaaagtccattaaataaattaaataaataaattttaaataaattaaaaaatatttggaatttcaattttatttaaagcaagtttacttttttattataaaagatagctcctgtgggtgacttatgccacaca

SEQ ID NO: 357091 - DNA, 201 bp, Homo sapiens
ctggacagaaaagcattgacttttgcatcagaccaattccaaaaaaaaaaattagtagctttattgtgaaaagcccgaaagtttcaagtttttttttttttaactcacgaaagtaactgaaactgtgtactgtcttctatctgattttttccactctttaattttcagtactcttgataatacatactaggtacatctcat

SEQ ID NO: 357092 - DNA, 201 bp, Homo sapiens
ctagaatatgtgcagctatgaagcagagtgaaagtatttgcaaaagacagcgtatcccctcctgtaagatgaaagtccattaaataaattaaataaataaattttaaataaattaaaaaatatttggaatttcaattttatttaaagcaagtttacttttttattataaaagatagctcctgtgggtgacttatgccacac

SEQ ID NO: 357093 - DNA, 201 bp, Homo sapiens
ttacccagccctacgaatgagcttttgaggggctggctctcaatggaggatggtattcccaagatctctgctcgttctctgcaaacagtttcttttttcttctttccctttaaaaaaaaaaattaaacaaggctggttcaactggacagaaaagcattgacttttgcatcagaccaattccaaaaaaaaaaattagtagct

SEQ ID NO: 357094 - DNA, 201 bp, Homo sapiens
actagaatatgtgcagctatgaagcagagtgaaagtatttgcaaaagacagcgtatcccctcctgtaagatgaaagtccattaaataaattaaataaataaattttaaataaattaaaaaatatttggaatttcaattttatttaaagcaagtttacttttttattataaaagatagctcctgtgggtgacttatgccaca

SEQ ID NO: 357095 - DNA, 201 bp, Homo sapiens
agcaaatgcatgcatttatagacttttaaaataattactctgttcatgcattttggaacactttacataaactaaaatttcaaaagtggcttcttctacarataacagtctgtagactcctgaacataatttcaaaaatagagtgcaaaaggtgtgtgtttacccagccctacgaatgagcttttgaggggctggctctca

SEQ ID NO: 357096 - DNA, 201 bp, Homo sapiens
tacttcacctctcggtgcctcagtttcttcttatgtaaaaagagaattaataatagcacctttgcttaaggttgttgtcgggattaaatgacataatagcaaaaaaaaaaaaaaaaaaaaaaagtgcctagaatagaacctaagttccaccacactctcagtaaatgtatactctcataattactggtgttggtgttattt

SEQ ID NO: 357097 - DNA, 201 bp, Homo sapiens
ttccttggctcagtcaactgaaaattttctattcaaacaacaaagcccaggtcaagcatctctctctttaaaatgcctttcctgatctccagcggcctccygtctcccccagtggtaatctattccctcctctttgctatctttacctgtagttacttaacattttacatttatagcacacatatttttgctgtgctagta

SEQ ID NO: 357098 - DNA, 201 bp, Homo sapiens
tctctggtcacgatgagagatgaagacttttttcagcatttttttgataaaggttgtggcaaagatctaaaatccaccctgctggtcacagtcatgacccwggtggcagtgaagatgtgactttggcttgagaaatatgagatgtaatcctgccatgaagaacagctatagaaaaaggtgctggggtgtggtaattattct

SEQ ID NO: 357099 - DNA, 201 bp, Homo sapiens
aaaagcacttttggtgtcagtccagcctgaaatattatctaaaaatcaagtcaatgatacagagaaggacatttcaaacactgacactttattttcagccwaaggacatcttaaatgcaaaagtaaaatgaccaagtttcctcaaagtgggaatgtaccacctggaaaatgcctcagcctagtaattattcgtctgaagtc

SEQ ID NO: 357100 - DNA, 201 bp, Homo sapiens
gtacataattgattggaaactctctatctacagaaattcttatctgaataatccactatcttatggattcagctctgtatcccctcaaaaatctacagctwagtaggtatctatgttctagggggtacatttgactgaggaagaaaggacttggcatttggaaatgtgaggtctctctcacagcacaaagaccatctctaa

SEQ ID NO: 357101 - DNA, 201 bp, Homo sapiens
aatagacataatgtggaaaataaagcaaaatctcctttttacacatcaaataaaagagtccatagttatctgaaacacagaatatttgagattttgagcastctctaagcaatatttcctcttgctgtggcctctgcttaatttcaatatagaaggttgatcaatgatcatcagatggacaactggaaaaatatatctact

SEQ ID NO: 357102 - DNA, 201 bp, Homo sapiens
ttaacccttggaagtattttaaaggacttacctgacaagcagatataactggtgttttgttagctcagcttttcacaaataagtcaaatagttctgttacyatgactagaagaagaaaaatagctaatagaaatgtagctgttagtatataatcggcacatcctggctcaattatcacagcaaccctggaaagttgatgtt

SEQ ID NO: 357103 - DNA, 201 bp, Homo sapiens
ttgcagttttcattaagctaagagacaaacaaaaggcaattgcacatttccaagttcaagatctctattttcttcctttcttctcaaattggacccaaaargcatagttttgtctgagggaataaaggtacagttattttgtgcaaccagttagtttactttcactgttcagagaagaaacggagagaaatgctatataac

SEQ ID NO: 357104 - DNA, 201 bp, Homo sapiens
gtaagtcttaaattcatttagtgttgatttttgtatatggtgagagatgagggtctaatttaattcttctgcatgtggatatcccactttcccagcaccayttattgaagagactatcctttccccaatgtgtttttggtgcctttgtcaaacattagttggctgcagaagcatgaatttatttctgggttctctattctg

SEQ ID NO: 357105 - DNA, 201 bp, Homo sapiens
ttcaaacttcttcttcacattttttctcttcttaaattttttatcataaaataacttcaatttatcaaaaatctgcaagaatactcatatactctttctcyatatgcaccatttgttatattttgcaatctttgccttactgcacacatttttgcttaacactttattgtacatatgctactttatcactaaatatttcag

SEQ ID NO: 357106 - DNA, 201 bp, Homo sapiens
taaatatttacatacgcatatgttataccacttaatacattgaaatatgcatgataatataatatagcctttaaatatattgaaaaatatattcttatggmtctcctttcttaccataccatctctctgagacaggagactgctgattaaattcaagcctctcttttcacagaggagcatgccatgtcccagagcagttat

SEQ ID NO: 357107 - DNA, 201 bp, Homo sapiens
gagtagaagaaaagtaacaggaatcaactattcatactctctgcagggcttgaaggtgggaatcagcagaatctgcctttaggacccttccaatctgggtygctacccctcatccctaatgctcgctcccaagaacccaatctctaggcctagagcttgtgagccatgctatcccgccgcatcctgggattcccagtttca

SEQ ID NO: 357108 - DNA, 201 bp, Homo sapiens
aactatgtgccaggcacagggatctccgctctcaagtgactttcaggccagaggtggtggacaagataagcatgctgttaggaatgaatgtggggtggccrcagtagcacatgggaggccgttgaacttggccttggggaccaagatgtgatttctggaacataagagcaaactcatacctaagatacgtgtaggaattag

SEQ ID NO: 357109 - DNA, 201 bp, Homo sapiens
ttttctgggttttttttttcttttattttttttgagacggagtcttgctctgttgcccaagctggagtcagtggtgcaatctcggctcattgcgacctccrccacgagggttcaagtgagtctcctgcctcagcctcctgagtagctgggactacaggtgcacaccaccacacccggctaatttttatattttcagtagag

SEQ ID NO: 357110 - DNA, 201 bp, Homo sapiens
aagcagaagtatctgtgagaaatggagtaacagtggtagaggcggaggtgagggtgctgatttgagaaggtgaacaaggatctgcttgttcaggagcagcaggatctgctcaggatctgcagcaactgtcctaggtagaaggcacagcacctgccaaaggcctggagcaggagtgagcctggagaacccaaggaacagaaa

SEQ ID NO: 357111 - DNA, 201 bp, Homo sapiens
gatcttatgagacttattcactattatgagaacagcatgggaaccgaacctcatgattcggttacctcccactgggtccctcccatgacacatgggaattktgggagctacagttcaaaatgagatttgagtgaagacacagccaaaccatatcaccaaggaatgaggattaggagacaagaggtcatgggaggcagaatt

SEQ ID NO: 357112 - DNA, 201 bp, Homo sapiens
tactagaatatgtgcagctatgaagcagagtgaaagtatttgcaaaagacagcgtatcccctcctgtaagatgaaagtccattaaataaattaaataaataaattttaaataaattaaaaaatatttggaatttcaattttatttaaagcaagtttacttttttattataaaagatagctcctgtgggtgacttatgccac

SEQ ID NO: 357113 - DNA, 201 bp, Homo sapiens
caatttctgcccacacaacttccaagtgacgtcaatggaagcagagcacacagatctctaggcaagttttggctcattatgtgaaggttttttttttttttctttttttaaagaacaactgcaaaaatgattgctctcaactcaaattacacaatttgttcttctttgtgccctgagtcagcaatagacataatgtggaaa

SEQ ID NO: 357114 - DNA, 201 bp, Homo sapiens
tcaattaaacctctttcctttataaattacccagtctcaggtaagtctttattagcagcatgagaacagactaatacatcatgtcagaagagttctacaaygttcatcttaataataataagacggccatttttcctgaaacctgggtaatgtctatacatatgtatctgtgtgtatttatgtatacttacatgtatctta

SEQ ID NO: 357115 - DNA, 201 bp, Homo sapiens
cagaggttgaagtgagccaagattgcaccactgcactccagactggatgacagtgtgagacccagtctcaaaaaataaataagtaaaaattaaaaaaaaaacaaatatcaggtatgttcatgaaacatttcaaatgtagagttcaatagaccatatttttaaaagtatagaaagcatcttttaaatttctcttcttttaat

SEQ ID NO: 357116 - DNA, 201 bp, Homo sapiens
gttaatactctgggaaaagaaaagatttaaaagggagaaaaaaacagggttggtctccagtaaacaatgagtccttgagtacataggaaagtgagggaaaygaataaaactgaggtttatgtggcaattgggagaaggatgcccagggagatgggtcttggtcagatgaaatgaggtaacgctaaaccagtgttgcatgtg

SEQ ID NO: 357117 - DNA, 201 bp, Homo sapiens
gctctcgtcggcagtgtttgtggagggcctgaagagacagggaggttgtgccaggctggaggaggcttgtctttccgaagctggagaggatcttacgggggttcgcttttccctgcctgggaagaatttcccctgtggtagcagcagcagcagcagcagaagcagaaacagcagcagcagcaacagcagcagcagcagcag

SEQ ID NO: 357118 - DNA, 201 bp, Homo sapiens
tgttacaatgttctccaagaaaacaggggctattcacttgaatgtgcaagttcaaattgttcctacaaacccaatttgctggcaaaagtgccaaatacaawactaccctactttcgtttctgtccaaggcctttcacataagctacagggggcatcgccttttgttgaattggttcttactttcagggttagcgcctccat

SEQ ID NO: 357119 - DNA, 201 bp, Homo sapiens
tggcagtgaagatgtgactttggcttgagaaatatgagatgtaatcctgccatgaagaacagctatagaaaaaggtgctggggtgtggtaattattcttcyttttcttcaattcatcggacttaaatgtttagcagccagatatgatgataagctgtaaatcaagcagagtttctactgctttatacaatatcccaaccac

SEQ ID NO: 357120 - DNA, 201 bp, Homo sapiens
tcaggttatccgcccacctcagcctcccaaagtgctgggattacaaacgtgagccaccgcacccagacggtgctaccatttttttttttttttttttttttgagatggagtctcactctgtcacccgggagtgcaaatgacgcgatctcagctcactgcaacctctgcctcctgggttcaagcgattctcctgcctcagac

SEQ ID NO: 357121 - DNA, 201 bp, Homo sapiens
aaaataacaatattaaatttttatagcacattacagtttaaaaataactgacattctagtcttatttaatcctttcaagatcccagtgtgatggataaaawgttgccatcatacccatttatagataaggccccaaatttggggcaaagctcagtggtgagtatagatcaaaacccagtttttgtaactctcagataagta

SEQ ID NO: 357122 - DNA, 201 bp, Homo sapiens
ctcaggttatccgcccacctcagcctcccaaagtgctgggattacaaacgtgagccaccgcacccagacggtgctaccatttttttttttttttttttttttgagatggagtctcactctgtcacccgggagtgcaaatgacgcgatctcagctcactgcaacctctgcctcctgggttcaagcgattctcctgcctcaga

SEQ ID NO: 357123 - DNA, 201 bp, Homo sapiens
gtgaacccgggaggcggagcttgcagtgagccgagatcccgccactgcactccagcctgggcgacagagcgagactccgtctcaaaaaaaaaaaaaaaaaagaaggcttgattcctcatcattttctcactttccttttgttatgtcatttatataaaaaatctttctatatcttattagtggtctagtttatttttatta

SEQ ID NO: 357124 - DNA, 201 bp, Homo sapiens
gtagtgatttctaagattttagtgcacctgtcacctgagcagcatacactgtactcaatatatagtcttttatccctcactcccctctcaacctaccctctgagtccccaaagttcaaacatcacacttatgtctttgtgtcctcatagcttagctcgcacttataagtgagattatatgatatttgcttttccattcctg

SEQ ID NO: 357125 - DNA, 201 bp, Homo sapiens
atactgcagaaatgcaaagtacttattaaaattgatcttcctctgagattaataaatgattctttgggaataaattgttcaaccaagcaagattaataaasttaagggccgttagccagttttcttgtagtaaattacagggtgctttgcaagaattgcattatttcatataagttaattcattgaaattaattcattgaa

SEQ ID NO: 357126 - DNA, 201 bp, Homo sapiens
agtagtgatttctaagattttagtgcacctgtcacctgagcagcatacactgtactcaatatatagtcttttatccctcactcccctctcaacctaccctctgagtccccaaagttcaaacatcacacttatgtctttgtgtcctcatagcttagctcgcacttataagtgagattatatgatatttgcttttccattcct

SEQ ID NO: 357127 - DNA, 201 bp, Homo sapiens
gtttcaaagaacttcttgattctctcttacttatccaaaagtcattcaagagcatgttgtttaatttccatgtaattgcatggttttgagcaatttttttwattgtattctattcttattgcgctgtggtctgagactatgtttggtgtttgctgtttaaagccaatacttcgaaacaatctataccaggttttaggaatt

SEQ ID NO: 357128 - DNA, 201 bp, Homo sapiens
aggctgaagtgggcggatcacaaggtcaagagatcgagaccatcctggccaacatggcaaaatcccgtctctactaaaaatacaaaaaaaaaaaaaaaaaatagctgggtgtggtggtgcatgcctgtagtcccagctactcaggaggctgaggcaggagaatcacttgaacctgggaggcagacgttgcaatgagctgag

SEQ ID NO: 357129 - DNA, 201 bp, Homo sapiens
ttccttgactactttcagctcagctctgatttcgattacttgtcttctgctagctttggggttgatttgttcttgcttctctaattctttcagttgtggtrttaggttgttaatttgagatctttctaacttttctatgtgggcatttagtggtatgaatttccctctgaaacattgccatgtcatatctttgttctcatt

SEQ ID NO: 357130 - DNA, 201 bp, Homo sapiens
gtgctgtacaaaattgtacatgctatactttcatatgcctggcagagaagtaggtttgtttacaccagcatcaccataaacagtgcgatgcactgtgctayaatggttacaatgactatgaagtcactagacgataggaacttttcagctctattataatcctatgggaccatcattgtacatgcagtttgtcattgaccc

SEQ ID NO: 357131 - DNA, 201 bp, Homo sapiens
ttggcttccctgggccgctctgaaagaagaagaattgtcttgggccacacataaaatacactaatactaatgatacctgatgagctaaaaaaaaaaaaaaatcgcaaaaatctcataatgttttaagaaaatttactaataagtattgggccacattcaaagctgtcctgggctgcatgcagcccttgggccacggatggg

SEQ ID NO: 357132 - DNA, 201 bp, Homo sapiens
atacatagcgtagcatttactttttattaggtattataagtaatctaaagatgatttaaagtatccaggaggatgtgcatagattatatgcaaatactatrccattttatattagggacttgagcatctgcagattatggtatctgcaggggttctggaacaaatcctccatggataccaagggactatatttctaaatgt

SEQ ID NO: 357133 - DNA, 201 bp, Homo sapiens
tactaggtaatgtggaataatgacatgggaacaaagggcaaagataagggagggaattcagattttctttgcacctaaactggcccaaacactgtactcamcacctcacatctatttcgtctttgcaaaaactgtataagcaaaggttgtatcagtggcattttatggatgaagaaactgaattgtaaggaggttatcact

SEQ ID NO: 357134 - DNA, 201 bp, Homo sapiens
tctttgcacctaaactggcccaaacactgtactcaacacctcacatctatttcgtctttgcaaaaactgtataagcaaaggttgtatcagtggcattttayggatgaagaaactgaattgtaaggaggttatcacttgctaaagattgcacagctggtaaggcttggtaaaggcttgagttctaacccatctgtgtgtttc

SEQ ID NO: 357135 - DNA, 201 bp, Homo sapiens
aaaaattcttggaatgatcttctcattgcatcttggaattgacaaatgcaagctgatacatgttatttcttgagtcctttacctaatcttggttgtctgcraatgagtagtgggagggaacccattgcagtaataattttaaaatttctttggattttacctaagtctaaggatttcactacacaagatcctaaatctggc

SEQ ID NO: 357136 - DNA, 201 bp, Homo sapiens
tttctcataactgttaagacaagatgctctggcggactcctgttaattcacaggcatgcaggcacattttgatcatgtgtaaaaacttagtctataatagwggatccttactgctgtggagatttctgtcagctttgagcaaaacgtacaacttgactcaatttagtttgctgctagtttcttgcctaacctaatatcaac

SEQ ID NO: 357137 - DNA, 201 bp, Homo sapiens
caggggagcaccctagggtcctggagttatttccttgtaggactcagaatgtgaattgatagagcttcctagcactttgttttgcctagaagtttagaacrtttaggaaacctctgatccttcatttaaaaatattaacactttcaggtcaaaaaatatcactttaaaatacaggtaatgcagaaaatgcatcccagtaat

SEQ ID NO: 357138 - DNA, 201 bp, Homo sapiens
aaacaagcaatggggaaaggattccctatttaataaatggtgctgggaaaactggctagccgtatgtagaaagctgtcactgcttcactttctttcttacrtttagcgtggcctgactgagctattggaagaggggcagaggcaggagtgaatgatgctggaaatagatcctcattcaaccctgcagcagagggtgagccg

SEQ ID NO: 357139 - DNA, 201 bp, Homo sapiens
acatatctacaactatctgatctttgacaaacctgagaaaaacaagcaatggggaaaggattccctatttaataaatggtgctgggaaaactggctagccrtatgtagaaagctgtcactgcttcactttctttcttacatttagcgtggcctgactgagctattggaagaggggcagaggcaggagtgaatgatgctgga

SEQ ID NO: 357140 - DNA, 201 bp, Homo sapiens
agataagaaggcagatttgcaaaactaaatgcccatgatagtacagtgataagaagaggcagcgacaggatttgaattttgatcagtctgatccaaagccygtgctctactagatggcaattcttgcaaacagccagtggttagtgggtgagagaaggggataaaagtaaagatagtctatttggccaaggcaatgagcag

SEQ ID NO: 357141 - DNA, 201 bp, Homo sapiens
gaggctgaagtgggcggatcacaaggtcaagagatcgagaccatcctggccaacatggcaaaatcccgtctctactaaaaatacaaaaaaaaaaaaaaaaaatagctgggtgtggtggtgcatgcctgtagtcccagctactcaggaggctgaggcaggagaatcacttgaacctgggaggcagacgttgcaatgagctga

SEQ ID NO: 357142 - DNA, 201 bp, Homo sapiens
ttcttgcaaacagccagtggttagtgggtgagagaaggggataaaagtaaagatagtctatttggccaaggcaatgagcaggtcaaaagtagccaatattygagaatctatatatctcagtcaaacatccagtaagctgtcaacatttattctatccatcattggagaagagtattccatagtgagtggtactgcctgtgc

SEQ ID NO: 357143 - DNA, 201 bp, Homo sapiens
ttccgtgcctcagttttctttcattttatattggctacaataatcactttcaatgttgtcgtaaggataggtgtatacacacacacacacacacacacacatataatatacacattcatgtgtgaccatgtggatggtggaaagatctaagtaactattaactattgtttattattattgtcttgtagcctcatatcatct

SEQ ID NO: 357144 - DNA, 201 bp, Homo sapiens
aaaagaagaaactttttagcacattttgagtaacttagtgcaggggctcagtgggcccactggtggggcagcttgtaatagtttccagtcagggcatcacyggggctcacctttgtccagccaaaaccagatgatggcactattctcttcacagatgctgcccactgctggtgaaggaggggggctaaattaaggtcctct

SEQ ID NO: 357145 - DNA, 201 bp, Homo sapiens
gttccgtgcctcagttttctttcattttatattggctacaataatcactttcaatgttgtcgtaaggataggtgtatacacacacacacacacacacacacatataatatacacattcatgtgtgaccatgtggatggtggaaagatctaagtaactattaactattgtttattattattgtcttgtagcctcatatcatc

SEQ ID NO: 357146 - DNA, 201 bp, Homo sapiens
ctttctgcccttcctccctcctctcttcctttcttccctccttcccttccttctttccttctgccctcttactccttttctcctccctccctccctccctyccttcctcccttccttccttccttttcattctccctcctttcctctctctctttctctttctttcttgaatctgttaaggaaagaagggaaaaatagatt

SEQ ID NO: 357147 - DNA, 201 bp, Homo sapiens
tcaggaaagacaatggaaaaaataacacagtgaactgtgtttccaattaccagcagatgctttcatttattctaagcgttcttgtttagttaactgtacawatttttaatcatagaaatctggtaatgttctagacccatgctcttagttaccctggtcttccagctgatttcacatgtctcttgcttctggcatcatttt

SEQ ID NO: 357148 - DNA, 201 bp, Homo sapiens
atgcatttgaagttccttcctttctgcccttcctccctcctctcttcctttcttccctccttcccttccttctttccttctgccctcttactccttttctcctccctccctccctcccttccttcctcccttccttccttccttttcattctccctcctttcctctctctctttctctttctttcttgaatctgttaagga

SEQ ID NO: 357149 - DNA, 201 bp, Homo sapiens
cgtttgtctgttattgatgtataagaatgcttgtgatttttgcacattgattttgtatcctgagactttgctgaagttgcctatcagcttaaggagatttkgggctaagacgatggggttttctagatatacaatcatgtcatctgcaaacagggacaatttgacttcttcttttcctaactgaataaattgtgtttattt

SEQ ID NO: 357150 - DNA, 201 bp, Homo sapiens
acggctgcatagtattccatggtgtatatgtgccacattttcttaatccagtctatcattgttggacatttgggttggttccaagtctttgctattgtgartagtgccgcaataaacatacatgtgcatgtgtctttatagcagcatgtcttataatcctttgggtatatacccagtaatgggattgctgggtcaaatggt

SEQ ID NO: 357151 - DNA, 201 bp, Homo sapiens
catgcatttgaagttccttcctttctgcccttcctccctcctctcttcctttcttccctccttcccttccttctttccttctgccctcttactccttttcycctccctccctccctcccttccttcctcccttccttccttccttttcattctccctcctttcctctctctctttctctttctttcttgaatctgttaagg

SEQ ID NO: 357152 - DNA, 201 bp, Homo sapiens
tcatgcatttgaagttccttcctttctgcccttcctccctcctctcttcctttcttccctccttcccttccttctttccttctgccctcttactccttttctcctccctccctccctcccttccttcctcccttccttccttccttttcattctccctcctttcctctctctctttctctttctttcttgaatctgttaag

SEQ ID NO: 357153 - DNA, 201 bp, Homo sapiens
gtgcagtgtttggttttttgtcgttgcaatagtttgctgagaatgatggtttccagcttcatccatgtccctacaaaggacatgaactcatcattttttayggctgcatagtattccatggtgtatatgtgccacattttcttaatccagtctatcattgttggacatttgggttggttccaagtctttgctattgtgaat

SEQ ID NO: 357154 - DNA, 201 bp, Homo sapiens
atgtaatgcatcacatttatggatttgtatatgttgaacaaactttgcatcctggagatgaagcctacttgattatgatggattagccttttgatgtgctkctggattcagtttgaactattttgttgaggatttttacgtcagtgttcatcaaggatattggcctgacgttttctttttttgttgtgcctttgtcaggtt

SEQ ID NO: 357155 - DNA, 201 bp, Homo sapiens
gctctttgtggccctggcatcttcatttcactcacagctccccaatagagctacattgttgtaccttgtagtttttccctggacatgaacgaggaggttartatttgtccaagtcttaaaagaacctttatgcagatttctggtctttcttctctatgcagtttctagttctcttctctctgggtggctggttcaaaattc

SEQ ID NO: 357156 - DNA, 201 bp, Homo sapiens
gacttcctcttttccaatttagatgccttatttctttctcttgcctgattgctatggccaggactttcaatactatgttgaatagaagtagagaaagaggkcattcttgtcttctgtcagttttcaagaggaatgattccagcttttccctattcagtgtaatattggctgacggtctgtcatagatggttctaattatat

SEQ ID NO: 357157 - DNA, 201 bp, Homo sapiens
gagaagttatgcaacctcaacccatcaacccctgcccctagaggccctgcaaggaaagtagaaaagctcttccttcacaacacatgtctggactttttccrtagcaaatggcaggggagcaccctagggtcctggagttatttccttgtaggactcagaatgtgaattgatagagcttcctagcactttgttttgcctaga

SEQ ID NO: 357158 - DNA, 201 bp, Homo sapiens
tgctaaaaactctcaataaattaggtattgatgggacatatctcaaaatagtaagagctatctatgacaaacccacagctaatatcatactgaatgggcaraaactggaagcattccctttgaaaacgggcacaagacagggatgccctctcttaccactcctatttaacatagtgttggaagttctggccagggcaatta

SEQ ID NO: 357159 - DNA, 201 bp, Homo sapiens
ataaaatactggcaaaccgaatccagcagcacatcaaaaagcttatccaccatgatcaagtgggcttcatccctgggatgcaaggctggttcaatatacayaaatcaataaatgtaatccagcatataaacagaaccaaagacaaaaatcacatgattatctcaatagatgcagaaaaggcctttgacaaaattcaacaac

SEQ ID NO: 357160 - DNA, 201 bp, Homo sapiens
tccaaaggaacgcagttcctcaccagcaacggaacaaagctggacggagaatgactttgacgagttgagagaagaatgcttcagacgatcaaactactccrggctacaggatgaaattcaaaccaaaggcaaagaagctgaaaactttgaaaaaaatttagacaaatgtataactagaataaccaatacagagaagtgctt

SEQ ID NO: 357161 - DNA, 201 bp, Homo sapiens
tagtaccatgctgttttggttactgtagccctgtaatatagtttgaagtcaagtaacatgatgcctgtagctttgttctttttgcttaagattgccttggmtaaggaggcctgcctgcctctgtaggctccacctctgggggcagggcacagacaaacaaaaagacagcagtaacctctgcagacttaaatgtccctgtct

SEQ ID NO: 357162 - DNA, 201 bp, Homo sapiens
tttctcattatttagttactcccctggattatatatatcaggaaatattggtgttcataaccatagcaaagcacttagccttagaaagaatcaggaaagamaatggaaaaaataacacagtgaactgtgtttccaattaccagcagatgctttcatttattctaagcgttcttgtttagttaactgtacatatttttaatc

SEQ ID NO: 357163 - DNA, 201 bp, Homo sapiens
aacaagaatgtctttcaaactggtttttctagatttctagatttgtttattcaaacaaatcaagcaaggatacttgctgttatatagatcacaaatatgtytgagctaaaaattaacttcagtcagaaattcactgattcaccaaatgattcaactactaatatgtgatagatttagattccctttaacttacatattgta

SEQ ID NO: 357164 - DNA, 201 bp, Homo sapiens
ccagctccatctctgaccctccttgtggaggcaatagttaaatacttgttgtccaccatcccccatctcttcagtgtgtttatttatgctctttcctctgsctgaaataccactctccaatcaagcttagcacctcctcctctttccagatgtggtttcctcaagaaagactctctgatacctctctcatacacaagcacc

SEQ ID NO: 357165 - DNA, 201 bp, Homo sapiens
tctcatgtgtcaaagttggtttagttttggcaagtgcgcaccccttatgtaacacacaccacgtccaggtatagacccatgccaggcccccggaaatcgcyctatgctctgtccagtcaatttcctccatcacaaccaaccactgtcaacgattttttccaccatagattagtttcacctgttgaagaacttcatccatgt

SEQ ID NO: 357166 - DNA, 201 bp, Homo sapiens
aaatcgctctatgctctgtccagtcaatttcctccatcacaaccaaccactgtcaacgattttttccaccatagattagtttcacctgttgaagaacttcrtccatgtagaattatacggaatgtgcgtctgtctgtgggctggctccttttctcagcctgatatagtctgatggtcatctgagctgcagtctggtactgc

SEQ ID NO: 357167 - DNA, 201 bp, Homo sapiens
ttatcaacccacagaaaaataaccacagcatatgaagttctcttggaatctttttaagaatcaacttagcctgagtctgtgatttaggttcctttccacgwcttttaagagctaagcacaacctaagtagaggaaaagtctttgaagtacaagctggttgaccatttcctgcgcagagtatccaatcccattgaaaatgtc

SEQ ID NO: 357168 - DNA, 201 bp, Homo sapiens
acaataacgatgaaagaacccaacaggcagttttgtaagctttaccctgaacaaaagccaagagaacattgcttgtaaccaaacaaggaataaaaataatrctagagtttctacagaaatcagtgcatggaaattccctgcttattaagctgtttccattatgagatgttcccctatattaaaattttcatagcataatat

SEQ ID NO: 357169 - DNA, 201 bp, Homo sapiens
tgtctacacgatcatagatctagggatccagacctgatcatggaggatgggtggagatatggttcacctccagagaaatgggattgaaaacatttgatgakgggccaggatcattttgccatcagcttggattcagattcggtcccagctccacccatgaaacttgaatagactccagggccgaaagcagaaaactactca

SEQ ID NO: 357170 - DNA, 201 bp, Homo sapiens
tagaatatttctcttgaaaaaggctcatacaattccgtagctatatactgagtgcctactgtgtggcaaactctgcactaggcatggagacaccaagaagwtgcatgacttgccttagagctattacacagacgcagtattactttgtaaaaatatctgataactaaaattaatctgtaaggtatatagagatctttgtat

SEQ ID NO: 357171 - DNA, 201 bp, Homo sapiens
tcattcacaaaagtgtagaaagcattcttgtaaaaggagatgctgcagtaatacagaggtctaaagaatgccttgatttagaaaaggtcattaaatctaakaaaaaagttattttctatgtgacagaaatatagtgtgtttccatgttcttaagatgagtgttcatgcttttccaattaaataaaaacctaatttcaattg

SEQ ID NO: 357172 - DNA, 201 bp, Homo sapiens
ccttggtcactgagtctctgtcactgccttcctttgtttgtcactggccttctttgtttctttagacatagcagctagttcttgcttttgggtcttcccawgggttgctttttctgcctcaagtcctcttccgccaaatctctgcctggttgccttcttgttgtccttaattttcagctgaaacgtcacttacttcaagag

SEQ ID NO: 357173 - DNA, 201 bp, Homo sapiens
actacatttcttttaagcacacttacaaattaaacagagatcagttaggagcaatcaaagttataaaaatgtttgagaaataaagactccaaacaaaacaytgaggccctcatcagtttgtctagggaaatgaggccagtagggggcctgaagatacatgttcactaccacagcatatgacacaaagctgcacagctcatg

SEQ ID NO: 357174 - DNA, 201 bp, Homo sapiens
cagtgaaaacgaatttttgccagtaccttgccacaaaacacccaagggacttcagcatgaaaaaaaaattctgaaatgaatactgcgcatattgtttaaayaattcttaaaagacaacaaaaaagcaaaagccctggttgaataacatttacaattagaatgatcttaacgccttgcttgaaagatcttaacagcttatgc

SEQ ID NO: 357175 - DNA, 201 bp, Homo sapiens
aacataaggaaaagaaatggcagcagatcaatagtgaggtaaagggcccagcagccgatcgcctccaggggctagaattcacctttagcatcattgctagyggaaatctgcacttttttttcctctttagtttttatgttacctttatcatctttttctttcatctcctgaccacttcccaccaaacatatatcctttatt

SEQ ID NO: 357176 - DNA, 201 bp, Homo sapiens
tcccagctacttgggaggctgagacaggagaatcacttgaaccctggaggcagaggttgaagtgagccaagatggcgccactgcactccagcctgggcaamagagggagactccgtctcaaagaaaaagcaaaggaaagaaaagataagtgatctaaagtgtgagaggcttgatagatactttaaagtatttagctacaaa

SEQ ID NO: 357177 - DNA, 201 bp, Homo sapiens
tcagatgtgcatttggggcaggaacacaatatgtgtgaggttgtatcctcagtgcattacattaggaagagcatgatgtcagtttctggtggcattaactwgggttacttagggaagatgatgccccctccacatttttccactaaaaactacccatttttttcttctccaattaataagtcttctgtgggtaaatgcttt

SEQ ID NO: 357178 - DNA, 201 bp, Homo sapiens
ctgcacacatttttgcttaacactttattgtacatatgctactttatcactaaatatttcagcatgtattttctaagaatgaaggcattcttttgtaaccmcacttcaattatcagacattcaaataatgtgtttggggtatttctggacaatcactgtgatgtcaacattcaagttttgaaaggcacatgtgaaatgagt

SEQ ID NO: 357179 - DNA, 201 bp, Homo sapiens
gtcatgaaaactttgcccattcctgtgtccagaatggtattgcttcggttgtcttccatggtttttatagttctgggttttatgtttaagtctttcatccrtattgagttgatttttgtatatagcataagaaagtagtccagttttaatcttctgcacatggctagccagctatcccagcaccatttattgaatagtgag

SEQ ID NO: 357180 - DNA, 201 bp, Homo sapiens
ttaaggcagaggctggaggaggcttctctgacacttacctctacttcaacatgtactggtacccccactaaccaggaaataaatataaacaactaaatttrcaagttgatatgatccaagggtcttccagaccccaacattgctatctgttctgtgatgccaaggaattgggtcaaaccaatggacactgctggtctcttg

SEQ ID NO: 357181 - DNA, 201 bp, Homo sapiens
ttttgttgcaattgcttttggtgtctttgtcatgaaaactttgcccattcctgtgtccagaatggtattgcttcggttgtcttccatggtttttatagttytgggttttatgtttaagtctttcatccgtattgagttgatttttgtatatagcataagaaagtagtccagttttaatcttctgcacatggctagccagct

SEQ ID NO: 357182 - DNA, 201 bp, Homo sapiens
tttacctttttttcttgtaacttttattttaggttctggggtacatgtgctggtttgtaacacagataaacttgtgtcacaagggtttactgtacagattwttttgtcactcaggtactaaacctaatacccaatagatacttttttttcttctctccctcctctcaccttccaccctcaagtaggccccagtgtctgttg

SEQ ID NO: 357183 - DNA, 201 bp, Homo sapiens
agaagtaaactcatagaaattatactaagaactaaagttgcctgttcttgtattggatctgtgtgtgtgtgtgtgtgtgtgtgtgtgtgtgtgtgtgtgtgtgttttatgtatattaagaagggaggtgggaaggagaggacattggcctaattaccactgagattgtgtcttgtgaattccattgaggaaacacttcaga

SEQ ID NO: 357184 - DNA, 201 bp, Homo sapiens
gaggcatgttaggaacactaacaatggacatagtttgactctttatggtctctgagggcaacaatggacattacacacatgaattcatatcctctgtgctrtggaaggagatcatgtgccagcaggatccctctgttgctagcagagatccagccccttggatgagttcttcaataactatgccctattatctgaaggcag

SEQ ID NO: 357185 - DNA, 201 bp, Homo sapiens
aatgcatgtgttgactaattaggttgattggtccttccacaattaatacatatttcagaacatcacgttgtacaccacaaatgtatacaatttttgtttgtcaattaaaataaaatttttaaaaaaagaaagaaaaagatagttctcttactcttcttcatttctcctccctacaactcacattcgccaataccagcaaat

SEQ ID NO: 357186 - DNA, 201 bp, Homo sapiens
gagatccagccccttggatgagttcttcaataactatgccctattatctgaaggcagtgttggctgggagagatgggcacaaacaaggcaagttggtctcratatttcaggcacagaagacaagacaaagatagaatccctaaggagagattggatcctgagaattaggcagaatcctggtgagcagcaccaggtacaaag

SEQ ID NO: 357187 - DNA, 201 bp, Homo sapiens
taatgcatgtgttgactaattaggttgattggtccttccacaattaatacatatttcagaacatcacgttgtacaccacaaatgtatacaatttttgtttgtcaattaaaataaaatttttaaaaaaagaaagaaaaagatagttctcttactcttcttcatttctcctccctacaactcacattcgccaataccagcaaa

SEQ ID NO: 357188 - DNA, 201 bp, Homo sapiens
acaaagatagaatccctaaggagagattggatcctgagaattaggcagaatcctggtgagcagcaccaggtacaaagtcagggtcacctggcagcagggtrcttgcatggggactcccagcaagcttgactagagcatagaaggaggagggttgcagcacccgataatccagcagggcacaagacgttcccccaggacaga

SEQ ID NO: 357189 - DNA, 201 bp, Homo sapiens
gtaatgcatgtgttgactaattaggttgattggtccttccacaattaatacatatttcagaacatcacgttgtacaccacaaatgtatacaatttttgtttgtcaattaaaataaaatttttaaaaaaagaaagaaaaagatagttctcttactcttcttcatttctcctccctacaactcacattcgccaataccagcaa

SEQ ID NO: 357190 - DNA, 201 bp, Homo sapiens
agtaatgcatgtgttgactaattaggttgattggtccttccacaattaatacatatttcagaacatcacgttgtacaccacaaatgtatacaatttttgtttgtcaattaaaataaaatttttaaaaaaagaaagaaaaagatagttctcttactcttcttcatttctcctccctacaactcacattcgccaataccagca

SEQ ID NO: 357191 - DNA, 201 bp, Homo sapiens
tattgtgcaacatggtgactatggttaatgacgacatatggtatgtttgaaaattgctttaaaaagcagatttaaaatgttctcaccacaaataagtgatmagtatgtgaggtaatgttaccagaaaggggtcccaatccagaccccaagagagggttcttggatcttatgcaagaatgaatttggggcaagtccatagag

SEQ ID NO: 357192 - DNA, 201 bp, Homo sapiens
atgcctttgcaagcataatgcagcctaaataacaaactgattttggtcactcactgccatcagggagcacccattgtttcctctgcctctgccatctgttrtgatttttgagttccacagaggaaagggggagatgggagaaggtaggacagaagcccaaattactttacatatgagccgtacatttcctactagactgtt

SEQ ID NO: 357193 - DNA, 201 bp, Homo sapiens
gtcttctttttctctaaaaatccatcttacaagcccctcctatgagattttccagtactctcttacttcccttatcacagtatgtgtcactcgaatcgctrttgcctgattagatgtccacttcccagacagatagtacatttttggtcacctaactcattcactgtgatatcctcaataccgagaacagttctgatgtcc

SEQ ID NO: 357194 - DNA, 201 bp, Homo sapiens
gtacaaccttaccaaaattccaaatacagacatcaagtcactggtttaactttccccctccagttcaggttctctactatgatctcacaatctttaaatcrtatttcacataagatgagacaatgcagaaatgtacaataacagtgtgtattgctgcatccctcttccatctctatggcattctcaaaggccaagtgtctg

SEQ ID NO: 357195 - DNA, 201 bp, Homo sapiens
agaaacaatatatcaaaaatttaaataaagatccaaagaggtctgcattctgtcatgttgctgaactaatgttactattattcatttgactctaggtgaaraaaaataggtaaggaatcatgctgttttcttctttgttgtaaagataaaaacagatctaaacttaatatctccagctcatggcatcattagtttagtaat

SEQ ID NO: 357196 - DNA, 201 bp, Homo sapiens
gatcacttaagcccaggatcatcagccctggcaacacagtgatacccccatgtctattatattttttttatttaaaaaaaaaatgcaagacaggctagagkcaggggaatgaggcactagccttacttaaaatttaggggaataccaaataacttggtgatcacagtgtatcatatcttaatgtaatatttttaaaaatca

SEQ ID NO: 357197 - DNA, 201 bp, Homo sapiens
gaaagtgtgaaatgaaaatgtctccaaagttctaatatttcaggtactagatagatagatagatagatagatagatagatagatagatagaatagatagayagacagacagacagacagacagacagacaaaacaggtacagatggaagcagaaaaaaaatcctttgttaagccatgtgtcccagttttggatttgggaaa

SEQ ID NO: 357198 - DNA, 201 bp, Homo sapiens
cacttgagcccaagaattcaaaaccagcctgggaaacatagcaagactccatctctacaaaaaatacaaaacttagccttgaggtgatggcaggtgcctayagtctcagctactcaggaggctgaggtgggaagatccattgagcccaggaggtcaaggctgcagtgaaccatgatggcaccactgcacactccagtctgg

SEQ ID NO: 357199 - DNA, 201 bp, Homo sapiens
tcccatcttcttttcccattctttcatttcatgttctaccacattagctttattttctgttttggagagaattcttggaaaagaccagaaagctaaaaatrtatttttagaaagtcctccttggaagacctaagatcatccctttttaaaaaaaggagaaagggtaaactagattacactattcacatttattgagcaact

SEQ ID NO: 357200 - DNA, 201 bp, Homo sapiens
gtgatattttgctgagaatgatggtttccagcttcatccatgtccctgcaaagtacatgaacttatccttttttatggctacatagtattccatggcatawatgtgccacattttctttatccagtctgttattgatggacatttgggttggttccaagtctttgctattgtgaatagtgctgcaattaacatacctgtgc

SEQ ID NO: 357201 - DNA, 201 bp, Homo sapiens
acatgcagtgtatggttttctgtccttgtgatattttgctgagaatgatggtttccagcttcatccatgtccctgcaaagtacatgaacttatccttttttatggctacatagtattccatggcataaatgtgccacattttctttatccagtctgttattgatggacatttgggttggttccaagtctttgctattgtga

SEQ ID NO: 357202 - DNA, 201 bp, Homo sapiens
ataaaaatgccatatggctaaagaaatgaatctctaatgagggaatttcaatcattgtggtaggtagacaaaaaatttaagacacacacagtgctacccarttgtgctttggggtctggagaaaccgtggatactggttgccacactgactgacttgttgttgactcagcagtgggctgagttcacccctaccatgggctg

SEQ ID NO: 357203 - DNA, 201 bp, Homo sapiens
ttcttcaagaataaattaaccgtagcttacaataatttttttactttatgaacttattactcttttataatttttttactcttataatacttttttactcmtttataataacacttagctgaaaacacaaacatacgactgtacaaaaaaattctttatacccttattttataagcttttttctattttcaatttttttaa

SEQ ID NO: 357204 - DNA, 201 bp, Homo sapiens
caaaactcctctctggagcttcttctggagatcacacactcaaatgcctccaggagccaaaagggtgaggtgcaagagtgagtgaagccaactgggttcartacaagagacagtgatggtgctgaggcccctggagagtatgtgcccccaactagagcagcagctgctgctctgccactgccacaaaatgtcatgagggaa

SEQ ID NO: 357205 - DNA, 201 bp, Homo sapiens; identical to SEQ ID NO: 76423

SEQ ID NO: 357206 - DNA, 201 bp, Homo sapiens
taacacagaaacagaaaaccaaataccacatgttctcaattataagtgggagctaaacatttaatatgcatggacacaaagatgggaacaataataaacastggggactgcttgaagtgggagggtgggagaggcagtgtgggttgaaaaacaacctatcaggtactatgctcactacctgggtaacaggatcattagtac

SEQ ID NO: 357207 - DNA, 201 bp, Homo sapiens
tcaatatcctctcattccaattaaccaaatctctctgtgtgtctatatacatatatatatatcttataaatgtgtgtatgtgtgtgtgtatatatatatawgtacatatataaaattcaatcctctctacaaaatactacacttttcttattttcatcatatgggtgttatgttccctgaaacactgaccttgagaaataa

SEQ ID NO: 357208 - DNA, 201 bp, Homo sapiens
ctagccttctaatctttcttaaattctttactgatttttaaatctctctttgcagttctatgtttttattttaattaagatggtggctatatagtaatacrttcattgaaaaatgaacgttttactagaagcacatgaacgaagaatatagcattgcatccatacacccatttcaaatatccaatattccttccccttgaa

SEQ ID NO: 357209 - DNA, 201 bp, Homo sapiens
aagaatgacatgaatcaatgaacaagactaaaccattcctaacatcttggtaatgcagtgttcaaaagatgttcttttcagatgcctagagcaaggctaaycaactgttatacactaactagtaactgatcatctataacaatagataacatagactggacactgttatgtgattcccatacattattttgttaaatctca

SEQ ID NO: 357210 - DNA, 201 bp, Homo sapiens
agatagaatagatagacagacagacagacagacagacagacagacaaaacaggtacagatggaagcagaaaaaaaatcctttgttaagccatgtgtcccarttttggatttgggaaactgttttaccatcacatcaaataatctattcaacaattaactcatttaattttccacaataacaagatgaggttggtgctattg

SEQ ID NO: 357211 - DNA, 201 bp, Homo sapiens
ggaggcagaggttgcagtgagccaagattgcaccattacactccagcctgggcaactagagctaaactgttctcaaaaaaaaaaaaaaaaaaaaaaaaaamcccaaaaaacagggatgtgtctgctccagacatgcaactcatgggtcatgagctttgatgttacaagaatgcttgagagtctgttttggctactgtcaag

SEQ ID NO: 357212 - DNA, 201 bp, Homo sapiens
acttaaagtaagatcaattatctttccatctcttctagattatgtggtatggtttatatagctgccagaaaacaatcctgaccgccaaatatgtctctaaygaatctgccagattgcacaaaattctaaaattagaaatgcatttatataaatcagttttatgttgctaccactgtcataataattacagttaattgagca

SEQ ID NO: 357213 - DNA, 201 bp, Homo sapiens
ttttgtcctgcattttacagcttttctaccatcaacatgtattactttcataatagaaaaaataaacatgagaaagaaataacctgttggtaactttttttaaaaaaacatggaaaggaaaggtgattggcaatctcatccttagaacacttccctcctcggggaattctttttatacttgatttgtctttagagtgactt

SEQ ID NO: 357214 - DNA, 201 bp, Homo sapiens
gccaaatatgtctctaatgaatctgccagattgcacaaaattctaaaattagaaatgcatttatataaatcagttttatgttgctaccactgtcataatarttacagttaattgagcacttaatatgtggcaggtgaaatccatcccaaacaccttacataattagatcatttattctaagtaaattaagagaagctctat

SEQ ID NO: 357215 - DNA, 201 bp, Homo sapiens
atgtggaacaaaacactgtggaactttctgaggttctcaaaatcgaaacatgtaacacagccacactagtacacatgcatgcacgtgcacatatacacatrgagacacagcctgcctctgcctcagagacatcctcaagatgttatcaatacatgtttcaattatgccaggggaatttgcagttttcattaagctaagaga

SEQ ID NO: 357216 - DNA, 201 bp, Homo sapiens
ttcagacacttatgaagtcctttgaaatcttagatggaagaataccaaaataaaatcattatggatatcaatacacatggatcaaccccaccattaacatrcatccacctgaagcccaaggactgccacttcacagcaaaatgatcctagatgataaaagaaagaagtaaagtttaatggtttattcacttaaaataaaca

SEQ ID NO: 357217 - DNA, 201 bp, Homo sapiens
caagaggactctgggtaacagtatatgaatgactatgatcatgttttgtataatttaacagacatttggaatatcacagagtcttttcttaaaaaaaaaaagtttacatttttggaggcagagtctcagtttgttacccaggctgaagtgcagtggtgtgatcagagctcgctgcctcctggaattcctgggcttaagcaa

SEQ ID NO: 357218 - DNA, 201 bp, Homo sapiens
cttatgatttcctaaagcattttttgagaaaactttacatctcacacaagaaagtataaggagtctctgatattgtaaaggactattgtgttttataagcmctgccaaccataaatgtagtttttatttttgtaggtaattttataacatttttatgaataaatcaaaatttctaaatgagaaaaccaaatatatggggcc

SEQ ID NO: 357219 - DNA, 201 bp, Homo sapiens
ttaatctgtatccaacctccttcctccatggtccagcctcttgactcacaaaagcagctttctttcttttcatatcactgaaccaactgtccatctcctccacataatgtaggccatcttaaaaaaaaatggattgatttgaatgtaacagcatcatcctttctcctctcaacttgcccctctttgtaccagaggatgtca

SEQ ID NO: 357220 - DNA, 201 bp, Homo sapiens
tccaaccatctcatggtaatagtatgatattaactatattatatcaaacactgtgatgtaaaataactttgacatgtgtagggacatagtcttacttttartcatagcatcgacaaaattttaatgcatttcttaacttgactctccttcatggggatatacagggtctctgaagagatctgtgtatacctgatcagagac

SEQ ID NO: 357221 - DNA, 201 bp, Homo sapiens
cctacctattcttcccagctcatgaaaatctctgaaatgacatggcaaggtcagaggaaagcaactgatgaatgctggtccttggtgaactgcaaactctrttcctacatccaggaaatctctgctgaaatctctgctcagctctcatttggcctcctagctacagctttctgctgctgctttttataaaattcctggaga

SEQ ID NO: 357222 - DNA, 201 bp, Homo sapiens
tatatcggctttcagaaacgtgagaatcaactaatccagactaacaaaacaagcagatacagttgatcctgtgacttcaagtaccttcccaagtggcattrttaataaatcttgactcacagtactagcataatgcattatttttatagctaatgcatcaaaaagttatttgatccatatgaccatatgatttctaaggtc

SEQ ID NO: 357223 - DNA, 201 bp, Homo sapiens
ttgttcagcaagagattgaggtcctgaagcccaatgtatgcaacaccaactcgactgataaaggctacagaagaaataaagataaactacactggacttcmaaacatggatagagtgcatatagcagggatgtgaagactcatctatctagatatgaaagttgagaacgtggcagcactctagatggatgcaagaccactc

SEQ ID NO: 357224 - DNA, 201 bp, Homo sapiens
gaaataaaaacatctgtccttcctagcccaggggtttttctggtgagagaatgagatgttctatgaggagaagcctgttatgatgtctgccctaaatattrtgtatgcatcaataagttgatgcataaatgataaataattgaaaatgtaaaaattgataataagcaaatataaataagctaataaaaattattactgatg

SEQ ID NO: 357225 - DNA, 201 bp, Homo sapiens
catggactcattcaccatttcaagttagatatggtgaccttacaccgatttttaggtaagtcctttttttcacatttctagccccattctcttgaataatrgcaatgcataatactctttaatataaagtggtaagatccataggatgatagatgcagacctccaattaatcttaaatggtctcatcttacttttaaaata

SEQ ID NO: 357226 - DNA, 201 bp, Homo sapiens
caatgttcacgaaaaaggatgagactcatctgaggttttctttcatattttgtatatttttgaggctgtatttggacaaaaaaaaaaaaaaaaacttcctytctatggcaatctacatcttagataccttcaacagtccatagaactagctccgtgccttagatctttgccacaaacagcaccagcattgaactttgttgg

SEQ ID NO: 357227 - DNA, 201 bp, Homo sapiens
agcatttaaccctccctgtgtctcagtttcttcatctgtaaaatggggattataataaggttgttatttggattaaattaattaacatatgcctgggaggrgggctcacacctgtaatcccaatgctttgggaggctgaagcaggaggattgcttgaagccaggagtttgagaccagcctaggcaacgtagagatcctatc

SEQ ID NO: 357228 - DNA, 201 bp, Homo sapiens
ccttctccttgctttcttaaaaaaaaaaaaataatgaaattggacacagctgaccaaaaagtgagttcttcctttcaaatatagtttcaacagtgaggtaraaggattttgctgtgaaaagacaaatggccctgaattagggtataatttttaaaagattaacctcattcagaaataaagcaatgaattagcaagcaggat

SEQ ID NO: 357229 - DNA, 201 bp, Homo sapiens
gtttgattttgactttgaccttcattttaatgagctgagtgcagcctaaaggctaaatgtcatttgaggtcaatgttttccactctgacagaaggacttaractccttttgtattccttctccttgctttcttaaaaaaaaaaaaataatgaaattggacacagctgaccaaaaagtgagttcttcctttcaaatatagtt

SEQ ID NO: 357230 - DNA, 201 bp, Homo sapiens
ccctatgcattctacttaaatatatttcatttttaaaggtaaattttacaaatatttatggattgttcctttattactttttatatgtgagggaaagctcyaacttgctttacctttctaagatatcccattttctctataccatttgttgactaatatatctcttgcccactggtttgtaacagtgccttaattagtttt

SEQ ID NO: 357231 - DNA, 201 bp, Homo sapiens
gctgtgtactggtttcagcacagttggggtggaatctggagaagggtcactagccagggactccatttgcatttccttctcttccattggcgagtccccakatcattctgaaaagtactgtttttatgctttgtgttgtctacctcacgacttccatgaatatgccattcttatggaaaattacacttctgactcattccg

SEQ ID NO: 357232 - DNA, 201 bp, Homo sapiens
cttaatctgtatccaacctccttcctccatggtccagcctcttgactcacaaaagcagctttctttcttttcatatcactgaaccaactgtccatctcctccacataatgtaggccatcttaaaaaaaaatggattgatttgaatgtaacagcatcatcctttctcctctcaacttgcccctctttgtaccagaggatgtc

SEQ ID NO: 357233 - DNA, 201 bp, Homo sapiens
tatcaatggatatacaactgtatagcaacacttttaccttcttcaggtctcatgaacagatactaaaagaaagaggaagtggaagagacattatctctcaytgtataattaatgcatgaagtatggcaagttacaaaacagagtttacttttcaaaagcataatgaaaactgttgggcaaaaagagcccagaatatttaaa

SEQ ID NO: 357234 - DNA, 201 bp, Homo sapiens
ccttaatctgtatccaacctccttcctccatggtccagcctcttgactcacaaaagcagctttctttcttttcatatcactgaaccaactgtccatctcctccacataatgtaggccatcttaaaaaaaaatggattgatttgaatgtaacagcatcatcctttctcctctcaacttgcccctctttgtaccagaggatgt

SEQ ID NO: 357235 - DNA, 201 bp, Homo sapiens
tttttattaatactcaattttttctaagtccttgcacttcattttatattagtagtatttttatagcaaactgacagtattgtagattttaaatattaaaygatctcaatttggttcaagtgaatagatattttcaagtgcatgttggcaatttagtaatgaacatccttataggttatgaaagaaatattattgtaaaga

SEQ ID NO: 357236 - DNA, 201 bp, Homo sapiens
ttgatagagcttcctagcactttgttttgcctagaagtttagaacatttaggaaacctctgatccttcatttaaaaatattaacactttcaggtcaaaaamtatcactttaaaatacaggtaatgcagaaaatgcatcccagtaatttgaaaaggtttaatgtcttccaaaacaacgaaataggaacaaatagtatgatca

SEQ ID NO: 357237 - DNA, 201 bp, Homo sapiens
ctttctgtggaaggttgcagcatttccacagcaacagaacacctcatttttgaatgcagctggaagccagggctcagatgagagctacctgcagaataacracacaagcgaagtccaaactatcagaactgaagttgtcaagcccaaaagtgatagaagtgtcagtcttgtattgagttagcttcattttctgtctaaagc

SEQ ID NO: 357238 - DNA, 201 bp, Homo sapiens
tgtgaattgatagagcttcctagcactttgttttgcctagaagtttagaacatttaggaaacctctgatccttcatttaaaaatattaacactttcaggtyaaaaaatatcactttaaaatacaggtaatgcagaaaatgcatcccagtaatttgaaaaggtttaatgtcttccaaaacaacgaaataggaacaaatagta

SEQ ID NO: 357239 - DNA, 201 bp, Homo sapiens
tagattccctttaacttacatattgtatagactccctaccactaagaagtaacataataccgtattagttttctatccttacaaaaggcgagaaaataacrgaggcaaaagcacagatttttatcaatatagaacaaggaggactgttttgtaagtttttctcacattaacccatttagacaatctagctttgttgctgag

SEQ ID NO: 357240 - DNA, 201 bp, Homo sapiens
aaatactgtagaggtcaaatgagataaagcctaaaaagtgttgcttggacttagcaacctgaaggtaacaacagcaagagcatcagcagcagaaggtgggrtgaggtgggtagtgtggagccaggccacagggagctgagggcactcctctgtcaagaaattggtctgagagggctgagtgcagtggctcatgcctgtaat

SEQ ID NO: 357241 - DNA, 201 bp, Homo sapiens
aatgtgaattgatagagcttcctagcactttgttttgcctagaagtttagaacatttaggaaacctctgatccttcatttaaaaatattaacactttcagktcaaaaaatatcactttaaaatacaggtaatgcagaaaatgcatcccagtaatttgaaaaggtttaatgtcttccaaaacaacgaaataggaacaaatag

SEQ ID NO: 357242 - DNA, 201 bp, Homo sapiens
gaatgtgaattgatagagcttcctagcactttgttttgcctagaagtttagaacatttaggaaacctctgatccttcatttaaaaatattaacactttcasgtcaaaaaatatcactttaaaatacaggtaatgcagaaaatgcatcccagtaatttgaaaaggtttaatgtcttccaaaacaacgaaataggaacaaata

SEQ ID NO: 357243 - DNA, 201 bp, Homo sapiens
gtgcacattttgctagaacatattatttagttcatggaaattatattattttaatttaaaaattgtcttaatgtaaggataggtgcagtaatttttattatgtttaaatggcaaattaaaattatatatatctattgtgtacagcatgatgctttgagatatgtgtacattgtggaatggctaaatcaagctaatcaacat

SEQ ID NO: 357244 - DNA, 201 bp, Homo sapiens
tcttttagaaaatcaagtatttaaaaaagaaattgaacatcttggaagtatatattgaactcaaaaatacattttccttgtttctgaggaaaaaaattagsatcatattcctgaattactgcattgtttatagaatgggtttgttaataattaattacaccaggcagtctacggaaaggtaccttattttgtctgctattt

SEQ ID NO: 357245 - DNA, 201 bp, Homo sapiens
tgtgcacattttgctagaacatattatttagttcatggaaattatattattttaatttaaaaattgtcttaatgtaaggataggtgcagtaatttttattatgtttaaatggcaaattaaaattatatatatctattgtgtacagcatgatgctttgagatatgtgtacattgtggaatggctaaatcaagctaatcaaca

SEQ ID NO: 357246 - DNA, 201 bp, Homo sapiens
ttgtgcacattttgctagaacatattatttagttcatggaaattatattattttaatttaaaaattgtcttaatgtaaggataggtgcagtaatttttattatgtttaaatggcaaattaaaattatatatatctattgtgtacagcatgatgctttgagatatgtgtacattgtggaatggctaaatcaagctaatcaac

SEQ ID NO: 357247 - DNA, 201 bp, Homo sapiens
tgatcatgttttgtataatttaacagacatttggaatatcacagagtcttttcttaaaaaaaaaaagtttacatttttggaggcagagtctcagtttgttrcccaggctgaagtgcagtggtgtgatcagagctcgctgcctcctggaattcctgggcttaagcaatcctttcacctgaccctctcaagtacctgggacta

SEQ ID NO: 357248 - DNA, 201 bp, Homo sapiens
caagatgtactttactttccactaaacttcaaaaacttccccatagactgatcatggttagcactttttcagctcaagaaacttaggtttgatttttttttccccaaaaaatgactctagtcatatgtcaggggttctttttgttctggttgattttgttttaacatgctatctagcacagtcatggagtgggtgagtttt

SEQ ID NO: 357249 - DNA, 201 bp, Homo sapiens
gctttattttctgttttggagagaattcttggaaaagaccagaaagctaaaaatatatttttagaaagtcctccttggaagacctaagatcatcccttttwaaaaaaaggagaaagggtaaactagattacactattcacatttattgagcaactactgtgtaccaggccataagtgctaaaagaaataaaggatgaacaa

SEQ ID NO: 357250 - DNA, 201 bp, Homo sapiens
aggtattaattagtttgttgctatcttcaaaaggaatctcagataatgttcttatgatttcctaaagcattttttgagaaaactttacatctcacacaagraagtataaggagtctctgatattgtaaaggactattgtgttttataagccctgccaaccataaatgtagtttttatttttgtaggtaattttataacatt

SEQ ID NO: 357251 - DNA, 201 bp, Homo sapiens
ctacttcacttagaatagtggcctccagttccatccaagttgctgcagaagacattatttcatcctttatggcctagtagtattccatagtgtatatataytacattttctttatccactcattggttgatgggtacttaggttggttccatatgtttgcaattgcaaattgtgctgctgtaaacatgctcgtgcatgtgt

SEQ ID NO: 357252 - DNA, 201 bp, Homo sapiens
gtcaaaaaatatcactttaaaatacaggtaatgcagaaaatgcatcccagtaatttgaaaaggtttaatgtcttccaaaacaacgaaataggaacaaatastatgatcagactccatgggtcgttaatcctcacatttgcttctctgacctgacttggtggcatacattggcatccccatgttacttatgaagaaatgaag

SEQ ID NO: 357253 - DNA, 201 bp, Homo sapiens
aggtgtgcaagaagccaaggacctctgcaggatgataacaacatgttacagcaatatttccttccctttatcatctttttcctaccttttttcccttaagraatatttgcaaatttttttatttcagtagttttttgggtataagtggtttttggttacatggataagttctttagtagtgatttctaagattttagtgca

SEQ ID NO: 357254 - DNA, 201 bp, Homo sapiens
aggaaagccataataacaagaattataacctgttcctatttttcttaataggtgatttggggtaaggactccaaggaaacaagagcgttctgttctaagasagaaacatgaggcaaatggagacaaaaggagagaggagaccccaaggacaatagcctcccacattctctccatccaaggcacacatgccaaattgcatta

SEQ ID NO: 357255 - DNA, 201 bp, Homo sapiens; identical to SEQ ID NO: 76425

SEQ ID NO: 357256 - DNA, 201 bp, Homo sapiens
cagttaattgagcacttaatatgtggcaggtgaaatccatcccaaacaccttacataattagatcatttattctaagtaaattaagagaagctctatcttycaaaatatagatatctctagcaatagaagagttttaattaagctgatactggttattaaccttgtagatttcattagtttgttagatttccctttttttc

SEQ ID NO: 357257 - DNA, 201 bp, Homo sapiens
gggagaccttaggaaatttacagtcatggcagatggcaaagagagtaggcacctcacacggctagagcaggagcaagagagagagtgagggcaaggtgctwcacacttttaaacaagcagatctcataagaactcactaccacaagaacagcatcaaggggatggtgccaaatcattcatgagaaaccacactcataatcc

SEQ ID NO: 357258 - DNA, 201 bp, Homo sapiens
ccttcctgtttctactgctttctcaaatgtcacgatgtaccacattttggggtggcatgtcctgaaccccatccaaaccaatctaacgacttctactgtgyggcaagtgcttaataaattttccttatcttttcctgcataaacctactgaacaaagaagaaaaatcagcagtagtgatactctcaaaatgttgactcata

SEQ ID NO: 357259 - DNA, 201 bp, Homo sapiens
accagcatacctatatgttctgtgcaaaacaggttatcttcctctgctctgcttagctgattagtctgagagacgttcttaccagcccagggataccagcrcaaagccttgcccatatccattaactaaagacatttcacaacaagacaatttgagtgaattataaatagtctaaacttatttgtaaatggaataattgga

SEQ ID NO: 357260 - DNA, 201 bp, Homo sapiens
tatagggagagcacttttcaaagagggtcatatgacctgcttccggtgaagatcagaaaatccctcctaggttttatgacctccttcaggagagaagagcrggggtagagggtggtggtcagaaaggccttcctgtttctactgctttctcaaatgtcacgatgtaccacattttggggtggcatgtcctgaaccccatcc

SEQ ID NO: 357261 - DNA, 201 bp, Homo sapiens
tacgctctcttttgtagtaacttcagattagttgtacaggacatgacctggatcaagaaatctttactctgcattaagttatagatgaggaactggcagaratcttcaagttttcagtatcaaaggaaaaaatcacgttacataatatataagctgagcaaacccattaacgacacatggtatttaaaaatctttggaaat

SEQ ID NO: 357262 - DNA, 201 bp, Homo sapiens
tggggggggcttagcaaaacctgtgtgttcacattcttcttggtatctctgtgtctttggctcctataccccgggtatagggagagcacttttcaaagagsgtcatatgacctgcttccggtgaagatcagaaaatccctcctaggttttatgacctccttcaggagagaagagcaggggtagagggtggtggtcagaaag

SEQ ID NO: 357263 - DNA, 201 bp, Homo sapiens
agctccgtgccttagatctttgccacaaacagcaccagcattgaactttgttgggaaaagtctcctactgcatgagttttgatcaacaaatggaatcaaakctcctcaagtctgatgttctatttcctactgaaccaactggatatcccgattcagggcccaagaaaacttgtgaatgtcaaagacctcttagcaagcatg

SEQ ID NO: 357264 - DNA, 201 bp, Homo sapiens
ttggccatgaattaaagagcatttactgggcacctgctttaagccaaacattctgtagacagcaggattcaaagctaagatataactcttgcccttaaatragctggtaggtttaataaaattggtctatatgtgttgcattattttgaaagttatttgctattattgtgttcaatttattttttggtttgctaagaatac

SEQ ID NO: 357265 - DNA, 201 bp, Homo sapiens
agtgtcataaaagattgccatttcagatataaaaaaatagaaagaatgaatcagccctactatttgatagcacaacagggtgactataatcaataattacycaactatacatttttaaataacttaaagagtgtaattggattgtttgcaactcaatagataaatgcttgaggggatgaatacccctttctcatgatgtgc

SEQ ID NO: 357266 - DNA, 201 bp, Homo sapiens
aacctgaaaacttttttttattattatactttaagttctagggtacatgtgcacaacgtgcaggtttgttacatatgtatacatatgccatgttgctgtgytgcatccattaactcgtcatttacattaggtatatctcctaatgctatccctccccctccccccaccccacgacaggccccggtgtgtgatgttcccctt

SEQ ID NO: 357267 - DNA, 201 bp, Homo sapiens
attatgtccaccaatctgttttcttttcttttttgttctatattgcctcctgttttctccaacacaaagtgtctatggacttcaccttttaaaaatgactrtatataagtgaaatgtgtttggctttagttgtttgccttcacagctatctttttgaaaacaaagtgtggctaggtgtaaacccttgggattctgagacaa

SEQ ID NO: 357268 - DNA, 201 bp, Homo sapiens
cagcaaacctgaaaacttttttttattattatactttaagttctagggtacatgtgcacaacgtgcaggtttgttacatatgtatacatatgccatgttgstgtgttgcatccattaactcgtcatttacattaggtatatctcctaatgctatccctccccctccccccaccccacgacaggccccggtgtgtgatgttc

SEQ ID NO: 357269 - DNA, 201 bp, Homo sapiens
tccttgttctacttgccctggctcaaactatgctgcttccctcctgtctctcagcacccctccccagacagagcacccactcccttcccagcccctgcctrcaagctcccttcccaccctttgaatgctcaggaggaaccactcacagcaaaattaggcctccaggctcccttcttcctaggctccctttcttgaggtgtc

SEQ ID NO: 357270 - DNA, 201 bp, Homo sapiens
atatatatatatattttttaaatatatatatatatttattatatatatattttaaatatatatatttattatatatatatttaataaataaatatatatatttatttaaataaatatatataaaaatatatataaatatttatttaaatatatatttaaatatatataaatatttatttaaatatatatttaaatatataa

SEQ ID NO: 357271 - DNA, 201 bp, Homo sapiens
agatattcagcttccgtatatcttaatggtacatgggtgaccaagactacaatatactttcatgatttgccataagatttctgaggctacttggagttctmtgtgtcattgaaagtttgcataatagttcatttttcaaaagtatcttttgccagagccctttgactttattattctgataatcaaaatagtttccttatg

SEQ ID NO: 357272 - DNA, 201 bp, Homo sapiens
attctaagtcaagaacacatttgtggcaatgtaattacaagtgaaatatacaaaaaggctcctgaacaacccctttaacttccttgttctacttgccctgrctcaaactatgctgcttccctcctgtctctcagcacccctccccagacagagcacccactcccttcccagcccctgcctacaagctcccttcccaccctt

SEQ ID NO: 357273 - DNA, 201 bp, Homo sapiens
tatatatatatatattttttaaatatatatatatatttattatatatatattttaaatatatatatttattatatatatatttaataaataaatatatatatttatttaaataaatatatataaaaatatatataaatatttatttaaatatatatttaaatatatataaatatttatttaaatatatatttaaatatata

SEQ ID NO: 357274 - DNA, 201 bp, Homo sapiens
attggatttggggacttggagttcttggaaaatgataatgatttagaatatagtttgtacatctcccctgggtgaaacttgaggatctttgttttgtttaygtctttctcacgaggtagaagatcgattctaagtcaagaacacatttgtggcaatgtaattacaagtgaaatatacaaaaaggctcctgaacaacccctt

SEQ ID NO: 357275 - DNA, 201 bp, Homo sapiens
aaaaaaaatatatatatatatattttttaaatatatatatatatttattatatatatattttaaatatatatatttattatatatatatttaataaataaatatatatatttatttaaataaatatatataaaaatatatataaatatttatttaaatatatatttaaatatatataaatatttatttaaatatatattta

SEQ ID NO: 357276 - DNA, 201 bp, Homo sapiens
tttattggatttggggacttggagttcttggaaaatgataatgatttagaatatagtttgtacatctcccctgggtgaaacttgaggatctttgttttgtktatgtctttctcacgaggtagaagatcgattctaagtcaagaacacatttgtggcaatgtaattacaagtgaaatatacaaaaaggctcctgaacaaccc

SEQ ID NO: 357277 - DNA, 201 bp, Homo sapiens
aaaaaaaaatatatatatatatattttttaaatatatatatatatttattatatatatattttaaatatatatatttattatatatatatttaataaataaatatatatatttatttaaataaatatatataaaaatatatataaatatttatttaaatatatatttaaatatatataaatatttatttaaatatatattt

SEQ ID NO: 357278 - DNA, 201 bp, Homo sapiens
ctcccttctcaagtgaatataaaacgtggagcatctttctttgcagagtaagactgactttaggtcatcttgagcccatttatcattatttgaaacattayagaatctattggatcatatagccaaagttatagaaaatataattttcatttttaaacagatctcttattatgaatggttacttgggctgcctggccttgg

SEQ ID NO: 357279 - DNA, 201 bp, Homo sapiens
aattgcttgaacccaggaggtggaggttgcagttagctgagattgcaccattgcactccagcctggagacaagagtgaaactctgtctcaaaaaaaaaaatatatatatatatattttttaaatatatatatatatttattatatatatattttaaatatatatatttattatatatatatttaataaataaatatatata

SEQ ID NO: 357280 - DNA, 201 bp, Homo sapiens
tttaattttggtaatatttgtcagtgaaaaaagctgctgtttaaaatatatatatattcgggcccagtgcagtggctcacgcctgtaatcccagcactttkggaggccaaggcaggcggatcacctgaggtcaggagttcgagaccagtctggccaacgtggtgaaactctgtctctactaaaaaaaatacaaatattagc

SEQ ID NO: 357281 - DNA, 201 bp, Homo sapiens
aacagttataaattacaaggttaaaaaattcgaataagcaaaaatctcctagtttgctaactatcagttaaatgataatcattgttaaatgatgaatatatgtcatattgcaatgtcagtttcacaggcagatttactaggaagctaatgaagtatgatcttcaagatttctcaatttcattgacacattctaagactcca

SEQ ID NO: 357282 - DNA, 201 bp, Homo sapiens
taacagttataaattacaaggttaaaaaattcgaataagcaaaaatctcctagtttgctaactatcagttaaatgataatcattgttaaatgatgaatatatgtcatattgcaatgtcagtttcacaggcagatttactaggaagctaatgaagtatgatcttcaagatttctcaatttcattgacacattctaagactcc

SEQ ID NO: 357283 - DNA, 201 bp, Homo sapiens
cagaataacttcttccgacgaggtcattaaaattattaatactcattttataagttctagattaccaatgtgtttttttctttctttctttcttcttaggkgaacttgaacagaaatttgaactggaaatcagtcctctttgtaatcaacagaaagattccatccctagtatacaaattggtgagttgaattcagtgttaa

SEQ ID NO: 357284 - DNA, 201 bp, Homo sapiens
gcgagttcttgagtgccagtccaaatacccacagtgcatcttcaacccttttgaactctcgcattgtttagcccctgcgaggaggctctcctctcttcccygcaagaagcatatcctgaaattgtgaattatggattttatgtcaacattaaggtgttcaaagacattacacagagcttctaaattggtcccgtaaccaat

SEQ ID NO: 357285 - DNA, 201 bp, Homo sapiens
gaaatgccataaaataaccctctctcgaagtatatttggcctcacaggaaacaggaaataccagaaaagatcacaagaaaagctgtaatcataagatttcyagcctaattcttttgacgtcagcagtttagataagtcagataagcaatcgcgagcatccgcgagttcttgagtgccagtccaaatacccacagtgcatct

SEQ ID NO: 357286 - DNA, 201 bp, Homo sapiens
acaaagtctgtgccaattgccaacacataagacagtgattaattctgcctgtatgatggtggtaaaggaggtgtcaagaaaggagatgatgggctgggcgyggtggctcacggctataacatcagcactttgggaggccgaggcaggtggatcacctgaggtcaggagttcaagaccagcctggccaacatggtgaaactc

SEQ ID NO: 357287 - DNA, 201 bp, Homo sapiens
tcaaatactcattggttctaatgatttcattcaaagcaggacaaattgctttgagcaaggaatcaattagtctcaatggcagataagtattaattcataayatttttctaaaactactgcttttagcagcctgttttcactctgtagtgatgctggataataatcattaataatttaaagcatctcttaaatgtgaatgca

SEQ ID NO: 357288 - DNA, 201 bp, Homo sapiens
attttggaattcaaccaaataaccgcaaactctgcaactgggaaacttacctttcatttcggtgtctctggtctaaattttgcattatagtttacttatttattaagctcgttcccatttcaataagctttggttctaggaaaatataaatacacacaaatcgctcaaagaaagaaactcatcttccccatagccattgta

SEQ ID NO: 357289 - DNA, 201 bp, Homo sapiens
tacatgtagatggggcaaaatgagaactcatgatgtgatataaaccttggtcaaaccagaaaaatagtattaccatgcagaacaagtcaaaggattgtgtctcgtatacattttctacttattctgtgggctttagtcttatatccaagcttcaaatactgcaaatatccaaggaaagatccccaactgttatcaatagaa

SEQ ID NO: 357290 - DNA, 201 bp, Homo sapiens; identical to SEQ ID NO: 76424

SEQ ID NO: 357291 - DNA, 201 bp, Homo sapiens
ctttccccaatgtgtttttggtgcctttgtcaaacattagttggctgcagaagcatgaatttatttctgggttctctattctgttccattggcctcattgyctgtgcttttaaaattcaaaatcattattcctaaataaacagtatttcttgaatgcttacaagtcattacagcttcaattttgcatctctgccgacttga

SEQ ID NO: 357292 - DNA, 201 bp, Homo sapiens
ctgaatgttttccaacatctgaaacagttgcttcaaacattttgttcagttttgtaatagtttatggctggatgaattcatcattactgattattttgtcrtggctgggaatggcagctacccatatcattatttatgaatctaaaaaaaataagtatactaggcctaagacattttctttatctttcacatctggtgtca

SEQ ID NO: 357293 - DNA, 201 bp, Homo sapiens
taatgggttttcacttctaactccccctttctccccatcaaaaaaacaaaacaaaacaaaacaaacctcaaaagactttattttcctttccctttctttayagcagagatcagggtatcagggtatcaagagagcagggtatcaggctgctctcttatccaaatggcaatactcaaaggttcccaagatttagtcacctcc

SEQ ID NO: 357294 - DNA, 201 bp, Homo sapiens
aattaaatcacagaatccactccagtgaaatataattcaagcagcctttgtaacctataaagaaaaaggaattagcttccagtgctttccctttctaaagmataaagcataaagcagcatggcacatgtatacatatgtaactaacctgcacattgtgcacatgtaccctaaaacttaaagtataataataataatattaa

SEQ ID NO: 357295 - DNA, 201 bp, Homo sapiens
aagcagtggagtgaaagggtctgtgaagaattctacaggcaaggttagtagtgatccaacagctgagatttcattgccctgtcttcttttaggcatttatyctaataaaacaggaaatggctgatctatcatgacatttgttctctcatcaactcttgttatcctaacctttctcttttactctcttggaactcatccaac

SEQ ID NO: 357296 - DNA, 201 bp, Homo sapiens
ggatactaaatggtttggcttatctgctttctccaaaatacatgctgaaactgtaggaaagctcatggccgaatgaatactcgtataaggagaagactaargaggtcatgggcaagagcacataatagatatccacaaggggccagcgccacttgggcaggacctgaaggccaaccaagactgtgaatccccaagccaagg

SEQ ID NO: 357297 - DNA, 201 bp, Homo sapiens
actaagtgatttgtattatatatgaaatgtttagtatatgattagtaaagcttcataaacaatgggaaactgatgggtcattcaaaaaatggtataggcaraactgactttttagaaaaaagtaggttataccaatctcagataaaacataaaaaagtagatgaatagctgtttgtattaagaacaatataaaatagaaag

SEQ ID NO: 357298 - DNA, 201 bp, Homo sapiens
tacatttctaaccaactgtcaatcaagggggtctcaataaattctctttccaaccatctcatggtaatagtatgatattaactatattatatcaaacactrtgatgtaaaataactttgacatgtgtagggacatagtcttacttttagtcatagcatcgacaaaattttaatgcatttcttaacttgactctccttcatg

SEQ ID NO: 357299 - DNA, 201 bp, Homo sapiens
tgtttaagattttcataattttatcaatgacttaccaacattgctcaggcttttcttgtagagtatcatccacaatacactaacattgcaattgtcttttwaaaaatattttcaatttcacataagacactgcaaaaaaaatcatacagaaaagatatatttgagctttgcagtttgtatagcttctccaaagaatgcagt

SEQ ID NO: 357300 - DNA, 201 bp, Homo sapiens
aacttttaaggtcaggggtacatgtgcaggatgtgcaggtttgttatgtagggaaacgtgtgtcatggggatttgctgtacagattatttcatcacccaartattaagcctactacccattagttattttcctgatccctctccttcctcccaccctctaccgtccagtaggccccagtgtgcactgttcccctcttaaat

SEQ ID NO: 357301 - DNA, 201 bp, Homo sapiens
ccagtcttctccctcaagctctggattttatatccatttatttctacttagcaccttcacctgaatctctgatagatgtctaaatacaacatgtgtaaaaytgaaccactccagacctggtccacctatagcctgcccttgaattatgcctttgcaagcataatgcagcctaaataacaaactgattttggtcactcactg

SEQ ID NO: 357302 - DNA, 201 bp, Homo sapiens
caaaatgatggcagccggtatcactggtgagagacatctggagccaattaagagctctaatacagagatagctatattgtaattatttgatacaatgctaragtaattcattaagcatcctggttcttcgaaagcaaaccaagcctctccagtccagtccataaagatttttttttaaatcactattgaccccaatttttc

SEQ ID NO: 357303 - DNA, 201 bp, Homo sapiens
agagctaggcaggaggtggacaggcccagaaggtgtgctgccctcctccccgggaagccggccggggtgccagcaggggccgctgccctgggacttgccaragatgatcaggatggtaaagctggtttggaaatccaaaagtgagctgcaggcgaccaaacagagaggcattctggacaatgaagatgctctccgcagctt

SEQ ID NO: 357304 - DNA, 201 bp, Homo sapiens
gcagaaacagcagcagcagcaacagcagcagcagcagcagcaccaccaccaccactacctcctcttctggggcacaagacagaatgcctgtgctagagcgmtatttccacccagcagagctaggcaggaggtggacaggcccagaaggtgtgctgccctcctccccgggaagccggccggggtgccagcaggggccgctgc

SEQ ID NO: 357305 - DNA, 201 bp, Homo sapiens
aagctttgcagagctccatgaccctctgaagagaccgtggccaccttgaaggttagagtatttcggacagatggctgtactactgagagcttttctggacrtggccgttctggctaactttcatcttgtcattacatttccttttctgagaaaggttgcaagggtggttttgacagagtgatgctgttggtatttagaatc

SEQ ID NO: 357306 - DNA, 201 bp, Homo sapiens
gaaagaaaaagatgtcttctaataactattttaccttaatcagttttaagacaagctttgcagagctccatgaccctctgaagagaccgtggccaccttgwaggttagagtatttcggacagatggctgtactactgagagcttttctggacgtggccgttctggctaactttcatcttgtcattacatttccttttctga

SEQ ID NO: 357307 - DNA, 201 bp, Homo sapiens
cattaactagagagaaaggcttggaatgccaagataaagaattcaaacttgtctcattaagaagaggatctctagagaattttgcaaaaaaggtgaaccgkataaaacactgtttgagaaaattaactaacatccatatgtaggagacacagtttcaatgaatccaaagaaatgtaatcaggctgcagactgtgatggctg

SEQ ID NO: 357308 - DNA, 201 bp, Homo sapiens
atttcctgaacttatccctcctgtgtaaaattttgtaatattttaccaatatttcttcaatttcaccctctaacctcacaacatcccaagctcctggtaamtattgttctaccctctgcttctacaaattcaatttttttgaattcaacatagaagtgagatcatacagtatttgtctttctgtacctggcttatttcatt

SEQ ID NO: 357309 - DNA, 201 bp, Homo sapiens
atcacatcaaatgtcttatttatattcaaataccacagggaatgggcaagaaattgtatgtttaaactggactttttcaaggcttttaaggccagaatatyttctttgccaaagactaaattattgcaaagtggggcaagcacctgaccttgtggcaagtcagaataagtaaatatctccacctggaattggaaaccaatg

SEQ ID NO: 357310 - DNA, 201 bp, Homo sapiens
gctgcttccaggagtatgtgcaagtgaaatactcagtttagtgtctgagctagaatgaggggcacacaaagtttctcctaatattggggaagctctaaaarttgtttaggggtaatgtcaaccaaaccaaatttctacatttcagagcttctcctatagtattctactttagtctgcattgcccaaactgtgctggaagga

SEQ ID NO: 357311 - DNA, 201 bp, Homo sapiens
gaaaaataatctcttctcatgctaccccagaaaacttcagaatagcccacagaattacggtaaggaattattcattcattcatttaattaacattgggagygcccattatgcattagtcattgtcctagacatttagggattcagtggtaagcaaataaaatagatgcaatcccaatagatatatcagcatacaggcattt

SEQ ID NO: 357312 - DNA, 201 bp, Homo sapiens
gatctgtctttgattagtaccattcagttcttggttggggaaaagtgtgagatgagaagtgacccagatgtttggaaatgtcatctcaatgtcaggtttcrcccttcatcagcccattgcagctgcacatcatgcagctgcatctatggcagtgcttactggtgtatatgcagaaatgtcctggaaaaataatctcttctc

SEQ ID NO: 357313 - DNA, 201 bp, Homo sapiens
agcctctcagcgattggaagagcacattgagctgagaaagctctaggtggacaagtcaagctccaaattgacccggcagcacaccccagggagcagctgtrtgcagaagcactttatgagtttccaattgtgtccacaatctattcaattccagcgcactatgcttatttactgtacttacagcaattggtagttttactg

SEQ ID NO: 357314 - DNA, 201 bp, Homo sapiens
tgtatatgggatcttggtgggggaaattgtaattactcatattttaataaagacagtggtactttattaaaatatttgaatttgaaaatgttttcaatagrcggaaagccacagcccagctcatagcagatgactgaatgagtacagacctttttttgcaagaataaacctgaaaggggtgggagctgagatggaattggg

SEQ ID NO: 357315 - DNA, 201 bp, Homo sapiens
accatatcggctgcaaaatggtaattttccagctctattatttcttctacatttatcagttggcacattctacaaggaagagatttcacttttccttattyatttacttatttaccttatcacctgtatgaactcattggttcttacttcagccaatggtttataatccattctttcgttattcattttgagactcaaatt

SEQ ID NO: 357316 - DNA, 201 bp, Homo sapiens
aagctacagggggcatcgccttttgttgaattggttcttactttcagggttagcgcctccatctctgagactaggaacaagaggcatggcccacagttgakgttgccctcgattcaaccactctcaggtcggggacacagtagtcagtggcccacataataaatcaacagtgctctccctccagaaggtgaattgttaaca

SEQ ID NO: 357317 - DNA, 201 bp, Homo sapiens
agggctgcccatgtggcatgggcaagggggcggggtctaaaggaaccagattaacagcagaaacgaaacaaggttcttgctcctttgtacaaagaacaagsttctttctttgtattagtaagacactggacaatgatcctgcaagataaggaaggagaagaggggaagactaaaagattccagaaagtataatttccaaag

SEQ ID NO: 357318 - DNA, 201 bp, Homo sapiens
aagtggcctggtgatagggtggggcccagagcccagtgctggtggagacaaaagtgcaaggtacagcattgcaaggtcagcagccgtagactcggatcctsggcaaacgcaggtgtgatcttgggactagctctaggctgaagagctcacatctaattctccagcactatgagccagctagtcttgtaatggcgccctcta

SEQ ID NO: 357319 - DNA, 201 bp, Homo sapiens
gtgcagtttcctgaagaggcatgtcagggaggtactctgtaaatatgggcctggtactgtgagcagactgaacagcttgatagcctctttggcttggggtrcttttgcaactgaaagaacatcctctcacaatttctccccgccctgtcatttctcagatcgccttgaagtgtgctgacatttgcaatccttgtagaatct

SEQ ID NO: 357320 - DNA, 201 bp, Homo sapiens
aaacagagccagcatgaggagccctgagatccctgtggtcggccctttcccaagtattccaaacccacgcctggaccaagaagctccaggaatctcatcakaagccttgactccaggaggtttcgagttagatttccaaaccagagaggtttggaaaagagcatgttgaaccttcgacccactcttgacttgcccatctgt

SEQ ID NO: 357321 - DNA, 201 bp, Homo sapiens
cattgtgtttgatttagccaaaatgattatgagcctatttgtgaaaatacaccaatcaatctcccaatttgtttttttaacagcttgccagcttcctcacrcctctggacatcatgcttggactgctggctgcagcagcacacgatgtggaccacccaggggtgaaccagccatttttgataaaaactaaccaccatcttg

SEQ ID NO: 357322 - DNA, 201 bp, Homo sapiens
taggggagaaaaatgcagttgttcaaactaagggtagaattaaatcagggccaatacagtgttagcacaggtgttatcattgtgaccagaaaacaggaatycttggggcagcttctgcttccccattttgaatctattattgttatttaaaataattatatttgtattttacttaaagatttagttgttattttacttaaa

SEQ ID NO: 357323 - DNA, 201 bp, Homo sapiens
ggcttttaaactgctttatgtatcatgtttcagttttcctaaatgactgatacatttcagtattttgcatatcagtgttaattttgagttggtagaggcarcctaacaaactctgattgttttgctattaggggatatttccttcaataaaaccaatgaattgaaagagaaaatacacctcactttactgtccatgtgttt

SEQ ID NO: 357324 - DNA, 201 bp, Homo sapiens; identical to SEQ ID NO: 76433

SEQ ID NO: 357325 - DNA, 201 bp, Homo sapiens
agggtttcgccatgttgcccaggctggtcttgaactcctggactcgagcaatctgcctgcctcggcctcccaaagtgctgggattacaggtgtgaaccacsgtgcccagcttcactccagaaatttttaagtaggacttttttaaatcaaattgccattgtctctaatctagaattttgtttaaaaggaagaaggtaaact

SEQ ID NO: 357326 - DNA, 201 bp, Homo sapiens; identical to SEQ ID NO: 76434

SEQ ID NO: 357327 - DNA, 201 bp, Homo sapiens; identical to SEQ ID NO: 76435

SEQ ID NO: 357328 - DNA, 201 bp, Homo sapiens
ctcctttaacctaacttccagccagctatcctgagtcctcttctccctgaaaaatgccagacctgcatatttccagcgccgctgtaatccctcgactatgktgtctcctgaagtactttaatgactgcctcacattcctacccggaatatgggtaggctgattcctaatacatcatggttaccattccttaacttctccca

SEQ ID NO: 357329 - DNA, 201 bp, Homo sapiens
cagtcactcatgactcctctagtgaacccgtttccgcccccaagcccctaccatggaggctgccacagcccctaatctggaagtcttgggacttttcacartctcctagcacaggaacctcagaaccctcaaattctcttccagaacccctcgatgctatctcagattctccatcttgaacgcttctcagattccctctcc

SEQ ID NO: 357330 - DNA, 201 bp, Homo sapiens
cagaatgatgtggtttggctctgtgtctccaaccaaatctgatcttgaattgtaataatccccaagtgtcaagggagggacctagtgggaggtgattggaycatggggtagtttcccccatgcttttcttgtgatagtgagttctcatgagatctgatggtttaaaagtgtttggcagttcctactccttgcttgttctct

SEQ ID NO: 357331 - DNA, 201 bp, Homo sapiens; identical to SEQ ID NO: 76437

SEQ ID NO: 357332 - DNA, 201 bp, Homo sapiens; identical to SEQ ID NO: 76438

SEQ ID NO: 357333 - DNA, 201 bp, Homo sapiens
ccagggagagtgaaaagacagcctggctagaggaaatgggtcctgaaggagagaaatgagagatcactctggaaaggaagtctggggctggttcctgaggraagtcccctgagatccaacatcttcttctgttctttctacccacaggtcaggaattacacagatattgtttgctctgcagacctgagctgcctcttaagg

SEQ ID NO: 357334 - DNA, 201 bp, Homo sapiens
gtgctctttcaccatcagctggggcatctgtcatctctctctcatgttgggactcgtgtttcttgtctttcatattttcttatttcttggctttttctttytctttttttttttttttaaatcagagcacatattccctgtactatctggaaacagaatatgggaagcaaaaattttaaaatggcccttatacttcattga

SEQ ID NO: 357335 - DNA, 201 bp, Homo sapiens
aggaaacagaagaggaagaaaaagcaattaataaacattaggaaaatgcaaaccaaatctgcaatgctatactactttacacctaccagaatatctccacrccacaagacatgtaacaagtgctgctgaggatgtggaaaaattggaaccctcacagacagctcgtgggaatggtgcagccactttggaaaacatcctggc

SEQ ID NO: 357336 - DNA, 201 bp, Homo sapiens
aatctaggcctctgttttcaaatatttgttattagtcatttaaagtttctcttgatatggtaatagctaccagttattgagtattatgttttaggatattytaaatccttagctttataaatatttttaatcttgtaaagtggtattattatccattttacacatcaagaaaccgagactcagatcaagtaacttatccaa

SEQ ID NO: 357337 - DNA, 201 bp, Homo sapiens
ttgagcccagggttcaaggctgcagtgagccatgatcataccactgcaatccagcctggatgatagaaatcctgtgtctcttaaaaaaaaaaaaggcaatrtaattcataataaagagtggaaacagttcaaatgtccattacctgatgagtggataaacaaaatatagtatatccatataatggaacattgttcagcgct

SEQ ID NO: 357338 - DNA, 201 bp, Homo sapiens
gagcgagcctccgtcccaaaaaaacaaaacaaaaacattattgtaagtgatagaagctaaatgcaaaacaccatatattgtatgaccccatttgtatgtcytgaattattgcagagcaaaaacattcagggaattcttctctctggaggttgatgccatttcctttgtctatgcttgaattttttttcttcttcaaatttt

SEQ ID NO: 357339 - DNA, 201 bp, Homo sapiens
gtatgatttctcccagagccctccataatgaaaagtaaggcatattctctcctgttttggtctcagagatatttttggtgagaccagcaaatgaagtaacrtctcatcctcccttcctgaggtaaattaaggctgagtgtgttcctcctctactgaggtgttgacttgagcccatgctcaagaatgatggccagccttctc

SEQ ID NO: 357340 - DNA, 201 bp, Homo sapiens; identical to SEQ ID NO: 76443

SEQ ID NO: 357341 - DNA, 201 bp, Homo sapiens
gttttgccattttggccaggctggtcttgaactcctgacctcaggtgatccatccctctcagcctcccaaagttctaggaatacaggcgtgagccaccgcrcctggcctttttttttttggagacacggtctcattctgtcacccaggctggagtacagtggtgcaatcatggctcactgcaacctcaacttccttggctc

SEQ ID NO: 357342 - DNA, 201 bp, Homo sapiens; identical to SEQ ID NO: 76446

SEQ ID NO: 357343 - DNA, 201 bp, Homo sapiens; identical to SEQ ID NO: 76448

SEQ ID NO: 357344 - DNA, 201 bp, Homo sapiens; identical to SEQ ID NO: 76447

SEQ ID NO: 357345 - DNA, 201 bp, Homo sapiens; identical to SEQ ID NO: 76449

SEQ ID NO: 357346 - DNA, 201 bp, Homo sapiens; identical to SEQ ID NO: 76452

SEQ ID NO: 357347 - DNA, 201 bp, Homo sapiens
ccaaaatttatgccctttttcatgaaatttagtatatgatcttatttggaattagggttgtggcagatgtaattagttaagatgaggtcctactggagtaktgtgggtccttaattaaatatgactggtgtccttgtaagaagacacagagacagcggtgtgaggacacaggcagagattgtgtcctctgcctgtgtcaac

SEQ ID NO: 357348 - DNA, 201 bp, Homo sapiens
gagaaaaccaagccactggccccgttacacagcaagttagtagtaagactgagattcgaaccctggtcaaacagactttccattttgttccactgactcartcttctcttttacacttgaatcagacttttagttttattgtagtttttgagtccatagctgtcttcctgtactgtcttgactctttgactaaactgattt

SEQ ID NO: 357349 - DNA, 201 bp, Homo sapiens
aggccaggagcttgaaaccagcctgagcaacataataagaccccatctctaccaaaaataaaaaaattagccaggctggtggtgtgcatctgtagtcctakctacttgggaggctgaggtgggaggatcgcttgagcccagggttcaaggctgcagtgagccatgatcataccactgcaatccagcctggatgatagaaat

SEQ ID NO: 357350 - DNA, 201 bp, Homo sapiens; identical to SEQ ID NO: 76436

SEQ ID NO: 357351 - DNA, 201 bp, Homo sapiens
gtcttgactctttgactaaactgatttcacatctttaaaattatgctttccttttaggctcatttttagctcagctgttgacagctatttttaaatgtaayatgacataatatatttcctaaataatttaaaataatctagcttgagctgctctgaaggttagtcagttggtggtgtgcatagaggtagagccttccccca

SEQ ID NO: 357352 - DNA, 201 bp, Homo sapiens; identical to SEQ ID NO: 76439

SEQ ID NO: 357353 - DNA, 201 bp, Homo sapiens; identical to SEQ ID NO: 76440

SEQ ID NO: 357354 - DNA, 201 bp, Homo sapiens
gagtgctccaagtaccatggccagctgaccaaagaagcagcaatgggtgaggcaggggtggggagcatgcccttgggtcttgtcctcagtgcttgggtaarcaagcctaaatcattctactccaaatctgatttctacccgttcactaggtttaatccatcgccaactccccaaatttttcttttctaccctagcagtctg

SEQ ID NO: 357355 - DNA, 201 bp, Homo sapiens
ggtgccccgcctgctgctgcgcgcctggccccggggccccgcggttggtccgggagcccccagtcggcccctcagcgccggctccgggcccggccagtacytgcagcgcagcatcgtgcccaccatgcactaccaggacagcctgcccaggtgagcctggcctccgggtccccgccgcccgccgccgtcccaggatcggcc

SEQ ID NO: 357356 - DNA, 201 bp, Homo sapiens
ggtatgatttctcccagagccctccataatgaaaagtaaggcatattctctcctgttttggtctcagagatatttttggtgagaccagcaaatgaagtaaygtctcatcctcccttcctgaggtaaattaaggctgagtgtgttcctcctctactgaggtgttgacttgagcccatgctcaagaatgatggccagccttct

SEQ ID NO: 357357 - DNA, 201 bp, Homo sapiens; identical to SEQ ID NO: 76442

SEQ ID NO: 357358 - DNA, 201 bp, Homo sapiens; identical to SEQ ID NO: 76444

SEQ ID NO: 357359 - DNA, 201 bp, Homo sapiens; identical to SEQ ID NO: 76445

SEQ ID NO: 357360 - DNA, 201 bp, Homo sapiens; identical to SEQ ID NO: 76450

SEQ ID NO: 357361 - DNA, 201 bp, Homo sapiens
ggtccgggagcccccagtcggcccctcagcgccggctccgggcccggccagtacctgcagcgcagcatcgtgcccaccatgcactaccaggacagcctgcmcaggtgagcctggcctccgggtccccgccgcccgccgccgtcccaggatcggccccaacctgactgcagtcactcatgactcctctagtgaacccgtttc

SEQ ID NO: 357362 - DNA, 201 bp, Homo sapiens
ggatgctgtgaggggtattcctaccatgtggtgagttgggaggttttcctgaggtccttttccatcctgagactctggttttccattttgtttctcacagrccagggctttgaccgacacttgtttgctctgcggcatctggcagcagccaaagggatcatcttgcctgagctctacctggaccctgcatacgggcagata

SEQ ID NO: 357363 - DNA, 201 bp, Homo sapiens
tgctgtgaggggtattcctaccatgtggtgagttgggaggttttcctgaggtccttttccatcctgagactctggttttccattttgtttctcacaggccrgggctttgaccgacacttgtttgctctgcggcatctggcagcagccaaagggatcatcttgcctgagctctacctggaccctgcatacgggcagataaac

SEQ ID NO: 357364 - DNA, 201 bp, Homo sapiens; identical to SEQ ID NO: 76454

SEQ ID NO: 357365 - DNA, 201 bp, Homo sapiens
ggggtattcctaccatgtggtgagttgggaggttttcctgaggtccttttccatcctgagactctggttttccattttgtttctcacaggccagggctttraccgacacttgtttgctctgcggcatctggcagcagccaaagggatcatcttgcctgagctctacctggaccctgcatacgggcagataaaccacaatgt

SEQ ID NO: 357366 - DNA, 201 bp, Homo sapiens; identical to SEQ ID NO: 76457

SEQ ID NO: 357367 - DNA, 201 bp, Homo sapiens; identical to SEQ ID NO: 76456

SEQ ID NO: 357368 - DNA, 201 bp, Homo sapiens
atcttgatccaggacatcaaagatataaaaatttcctttccttaggaccaggaggtgtctggccttgtcatcagtgaagagttcatcccgactgggtttgrgtaaacgagttgagttgaaaagccgaaaatactgggacatatccaggggatacgcattgaccaggtaggccccataccaggacagagaggaaggcacaaa

SEQ ID NO: 357369 - DNA, 201 bp, Homo sapiens
gcacctctttgtatagacggaggccgggcggatggtctcagtgcggccgtgcttgaatgcggcagtgctacaggactcgtaggtggccactgtctgcccgwactgccgcaggaaggccatctggaatgccagctgggcaactgcgtcagggctcagcttttgcttcttcaggaattctttgcctcctctctgaaactggac

SEQ ID NO: 357370 - DNA, 201 bp, Homo sapiens
gagcactcaaccatcatctgctgaagctcaccagcactgtgcctggagggctccctgacaaaggcctcagagcacctctttgtatagacggaggccgggcrgatggtctcagtgcggccgtgcttgaatgcggcagtgctacaggactcgtaggtggccactgtctgcccgtactgccgcaggaaggccatctggaatgcc

SEQ ID NO: 357371 - DNA, 201 bp, Homo sapiens; identical to SEQ ID NO: 76461

SEQ ID NO: 357372 - DNA, 201 bp, Homo sapiens
ccctgctgccttctggtccaaggctgtaattcagagaaaccaccactctagttctgaggcagctgccgggtcctggaagctcagcagttattccaagacasgtactcatactgcatctctgtcctccatcccagaagtgtgagaagagccagcagcctggccggcccttacttatagcccaatgccttcttttgccaagac

SEQ ID NO: 357373 - DNA, 201 bp, Homo sapiens
gccgggtcctggaagctcagcagttattccaagacaggtactcatactgcatctctgtcctccatcccagaagtgtgagaagagccagcagcctggccggyccttacttatagcccaatgccttcttttgccaagactaactggtaccttcttgtgccctgcaggctgggtttgctgctgaaggtgtggagtcagggacag

SEQ ID NO: 357374 - DNA, 201 bp, Homo sapiens
gagtttctgcaccgtgacagtagagtcagtggtagctggctggctctgtggagtgacggcaggggtctgagtgctgtctttaaatacttcattaaaaaatytgagcactgccacaccatcaccccaagagtgctcaaagtggacggcagtagagccatccttggcgataatgaggttaaaggatttatcaaaccagcggtt

SEQ ID NO: 357375 - DNA, 201 bp, Homo sapiens; identical to SEQ ID NO: 76465

SEQ ID NO: 357376 - DNA, 201 bp, Homo sapiens
ctttactaacattctttttccccaaagatgaaatgtggcaactgtggtgagatttcggacaagtggcagtacatccggctgatggtaactgttccccgccyaacccccaacataaacactcacaaacacacatacacttctgggcagggatttggggaaactggccttcatctctccagttctttgctccctgctttttgt

SEQ ID NO: 357377 - DNA, 201 bp, Homo sapiens
ctctgtggagtgacggcaggggtctgagtgctgtctttaaatacttcattaaaaaatctgagcactgccacaccatcaccccaagagtgctcaaagtggayggcagtagagccatccttggcgataatgaggttaaaggatttatcaaaccagcggtttgtgccatccccatgcagcatattgtgggacaagtggacaagg

SEQ ID NO: 357378 - DNA, 201 bp, Homo sapiens
gagccaaggaagttgaggttgcagtgagccatgattgcaccactgtactccagcctgggtgacagaatgagaccgtgtctccaaaaaaaaaaaggccaggygcggtggctcacgcctgtattcctagaactttgggaggctgagagggatggatcacctgaggtcaggagttcaagaccagcctggccaaaatggcaaaac

SEQ ID NO: 357379 - DNA, 201 bp, Homo sapiens
catctgcccagaagttaacttttgatggatttgccttctaaggcatcaaacatgtcttctaaggccttctccacacattggagaaactcccgggcattgcrgcctgggtaggaagagacattgcagcctatccagttgtcatgaacagcatacccaacaccaaagccatcagagaccacaggggcaaagcccccaaggttc

SEQ ID NO: 357380 - DNA, 201 bp, Homo sapiens; identical to SEQ ID NO: 76463

SEQ ID NO: 357381 - DNA, 201 bp, Homo sapiens
tggccggcccttacttatagcccaatgccttcttttgccaagactaactggtaccttcttgtgccctgcaggctgggtttgctgctgaaggtgtggagtcmgggacagccttcagtgacattaatctgcaggagaaggtatgagacttgggggctttgggaggtactgtagggcacctggtgggaattatttttttggtgg

SEQ ID NO: 357382 - DNA, 201 bp, Homo sapiens
attaaaaaatctgagcactgccacaccatcaccccaagagtgctcaaagtggacggcagtagagccatccttggcgataatgaggttaaaggatttatcamaccagcggtttgtgccatccccatgcagcatattgtgggacaagtggacaaggtccttaatggggaagtcatctaggcagagacagaacactgccgagtc

SEQ ID NO: 357383 - DNA, 201 bp, Homo sapiens
agaaactcccgggcattgcggcctgggtaggaagagacattgcagcctatccagttgtcatgaacagcatacccaacaccaaagccatcagagaccacagrggcaaagcccccaaggttcactgctgggctgctcagtgtgctcgtggacaggacattgtggtttatctgcccgtatgcagggtccaggtagagctcaggc

SEQ ID NO: 357384 - DNA, 201 bp, Homo sapiens; identical to SEQ ID NO: 76464

SEQ ID NO: 357385 - DNA, 201 bp, Homo sapiens
gaagagattttgcaacttgctcagggtcacacagtaagcagtggagctatagtttcaacccagatctatctgacttgagctggtgctcatccccctttatktgtgcatgtttcacctcacaacaaatctgtgaggtaggcagaagagcaaatacttcatccccgttttatcaataactaaggtccaacctgggaaatgaca

SEQ ID NO: 357386 - DNA, 201 bp, Homo sapiens
gccccataccaggacagagaggaaggcacaaagcgtatgagtctcttgaaggtgatagtgtcactttttgcagggttcaagtggaacacttctggctccaraaggccagcccggagtgtcttcagaaaccggatggcagaaacagtcatgttggttgcccgggtgagctggtcattatactcagattttgggtcaggattg

SEQ ID NO: 357387 - DNA, 201 bp, Homo sapiens
ccagcactgtgcctggagggctccctgacaaaggcctcagagcacctctttgtatagacggaggccgggcggatggtctcagtgcggccgtgcttgaatgyggcagtgctacaggactcgtaggtggccactgtctgcccgtactgccgcaggaaggccatctggaatgccagctgggcaactgcgtcagggctcagcttt

SEQ ID NO: 357388 - DNA, 201 bp, Homo sapiens; identical to SEQ ID NO: 76466

SEQ ID NO: 357389 - DNA, 201 bp, Homo sapiens
cattctgcgttgtgaggctaacaatgccattttgtttcccaggactggactgactatgatgaaaaggcccaggagtctgtgggaatctatgaggtcacccmccagtttgtgaagtgctgatccctcttccttcccagttgcccttaagaactgagaaaggacaaagtactctaagcagcagagcccacagaggctcgttcc

SEQ ID NO: 357390 - DNA, 201 bp, Homo sapiens; identical to SEQ ID NO: 76460

SEQ ID NO: 357391 - DNA, 201 bp, Homo sapiens
tcaggtaggcatgaatttcctggccacctgccccccaagaggtgccccctccacatacataaccatttcaaaggctataagacagccctctgcccttactrcatggcagatggtcagcaaaaggctatggttaagtgtactgggtctgtttggatgatctagagactttggagcttaacattcttgttcatatttttggtg

SEQ ID NO: 357392 - DNA, 201 bp, Homo sapiens
catgcccggcctcccagttttcatgatgaggaagtgatggtagcttttcatctgcccagaagttaacttttgatggatttgccttctaaggcatcaaacaygtcttctaaggccttctccacacattggagaaactcccgggcattgcggcctgggtaggaagagacattgcagcctatccagttgtcatgaacagcatac

SEQ ID NO: 357393 - DNA, 201 bp, Homo sapiens
ggctccctgacaaaggcctcagagcacctctttgtatagacggaggccgggcggatggtctcagtgcggccgtgcttgaatgcggcagtgctacaggactygtaggtggccactgtctgcccgtactgccgcaggaaggccatctggaatgccagctgggcaactgcgtcagggctcagcttttgcttcttcaggaattct

SEQ ID NO: 357394 - DNA, 201 bp, Homo sapiens
accaggtaggccccataccaggacagagaggaaggcacaaagcgtatgagtctcttgaaggtgatagtgtcactttttgcagggttcaagtggaacacttytggctccagaaggccagcccggagtgtcttcagaaaccggatggcagaaacagtcatgttggttgcccgggtgagctggtcattatactcagattttggg

SEQ ID NO: 357395 - DNA, 201 bp, Homo sapiens
aagtagactcatgttacctgagggtggagtcaggcctaagatgccgacacctgtacagcgtgatctttttcagggccacatgtgggcacctggctggggcsagggtatggactcaagtcaactttgtgttctcttttctatttcagagattttaagcagcaccatcaagccttacaatgtaagtttgctgctgtagtggca

SEQ ID NO: 357396 - DNA, 201 bp, Homo sapiens
tgtggtttgggagggtaggtgtcagtgtgatcagcactggattcaataggcatctttgaggtatgaggcagagttcaaaatcaaggggaagcccttttttyattttcctcaggaagccttcccaggagtcttgtcctagtaagttaccctttctgggtcttggtctctttaagtggacaataaatggtgggctcgatctcc

SEQ ID NO: 357397 - DNA, 201 bp, Homo sapiens
ccttaggaccaggaggtgtctggccttgtcatcagtgaagagttcatcccgactgggtttgggtaaacgagttgagttgaaaagccgaaaatactgggacrtatccaggggatacgcattgaccaggtaggccccataccaggacagagaggaaggcacaaagcgtatgagtctcttgaaggtgatagtgtcactttttgc

SEQ ID NO: 357398 - DNA, 201 bp, Homo sapiens
ctgctttactaacattctttttccccaaagatgaaatgtggcaactgtggtgagatttcggacaagtggcagtacatccggctgatggtaactgttccccscccaacccccaacataaacactcacaaacacacatacacttctgggcagggatttggggaaactggccttcatctctccagttctttgctccctgctttt

SEQ ID NO: 357399 - DNA, 201 bp, Homo sapiens
ggagcatttaatatcctagctatttgaaactatatattattgtcagctatagtcatcctacagtgctatagaacactagaacttattcctcccatatagcygtaattttgtatcttctaacaaatctctccatattcccccccctcacctccgctgaaaccatttctgcaccacaggtgccttgaatccccggccacactg

SEQ ID NO: 357400 - DNA, 201 bp, Homo sapiens
gtcactttttgcagggttcaagtggaacacttctggctccagaaggccagcccggagtgtcttcagaaaccggatggcagaaacagtcatgttggttgccygggtgagctggtcattatactcagattttgggtcaggattgaaagccataaatggattaaagttcagaacaacggagtctcgagcagataggtacatatc

SEQ ID NO: 357401 - DNA, 201 bp, Homo sapiens
ggcttccgctggcctgagcacaggttgctcgcggacctggctgacctccactggccccagatccccagatgcgaaaagcccagtgggccaggcgagcagcsgcgcgcagaagtccctgccccgcggcccggccccggccccgccctactgagggtgcgcagacggcacccgccttttacgacgcgccggaaagcaacggca

SEQ ID NO: 357402 - DNA, 201 bp, Homo sapiens
tgcccgtactgccgcaggaaggccatctggaatgccagctgggcaactgcgtcagggctcagcttttgcttcttcaggaattctttgcctcctctctgaarctggacgcagtcaatagtgagggttttcatggtggcatcaaacttttccttagcagctgtgatgccagtctttaaggcatcagtcagctcgaagttgagt

SEQ ID NO: 357403 - DNA, 201 bp, Homo sapiens
tatccagttgtcatgaacagcatacccaacaccaaagccatcagagaccacaggggcaaagcccccaaggttcactgctgggctgctcagtgtgctcgtgsacaggacattgtggtttatctgcccgtatgcagggtccaggtagagctcaggcaagatgatccctttggctgctgccagatgccgcagagcaaacaagtg

SEQ ID NO: 357404 - DNA, 201 bp, Homo sapiens
tatctgcccgtatgcagggtccaggtagagctcaggcaagatgatccctttggctgctgccagatgccgcagagcaaacaagtgtcggtcaaagccctggyctgtgagaaacaaaatggaaaaccagagtctcaggatggaaaaggacctcaggaaaacctcccaactcaccacatggtaggaatacccctcacagcatcc

SEQ ID NO: 357405 - DNA, 201 bp, Homo sapiens
gtttatctgcccgtatgcagggtccaggtagagctcaggcaagatgatccctttggctgctgccagatgccgcagagcaaacaagtgtcggtcaaagcccyggcctgtgagaaacaaaatggaaaaccagagtctcaggatggaaaaggacctcaggaaaacctcccaactcaccacatggtaggaatacccctcacagca

SEQ ID NO: 357406 - DNA, 201 bp, Homo sapiens
gtgtgtatctttctggggaatctttgtctttggggaggggatgtatgaagtgacagccagaactgtgctacctacagataccatggactagacattctccyttctagcggtagtaataattgtcccttaagtggctgctgtatgcttgggcacccatgccatcatttttacatgttaccacatttaattcttatggtaacc

SEQ ID NO: 357407 - DNA, 201 bp, Homo sapiens
gttgagtttctgcaccgtgacagtagagtcagtggtagctggctggctctgtggagtgacggcaggggtctgagtgctgtctttaaatacttcattaaaawatctgagcactgccacaccatcaccccaagagtgctcaaagtggacggcagtagagccatccttggcgataatgaggttaaaggatttatcaaaccagcg

SEQ ID NO: 357408 - DNA, 201 bp, Homo sapiens
acattgtggtttatctgcccgtatgcagggtccaggtagagctcaggcaagatgatccctttggctgctgccagatgccgcagagcaaacaagtgtcggtyaaagccctggcctgtgagaaacaaaatggaaaaccagagtctcaggatggaaaaggacctcaggaaaacctcccaactcaccacatggtaggaatacccc

SEQ ID NO: 357409 - DNA, 201 bp, Homo sapiens
cagaagttaacttttgatggatttgccttctaaggcatcaaacatgtcttctaaggccttctccacacattggagaaactcccgggcattgcggcctgggkaggaagagacattgcagcctatccagttgtcatgaacagcatacccaacaccaaagccatcagagaccacaggggcaaagcccccaaggttcactgctgg

SEQ ID NO: 357410 - DNA, 201 bp, Homo sapiens
cttacatccaggcaggttgaccccagcatccacgctcttctgcagcctccatgtctgctgtctacagaaagcttcatagggagcaggtgcccaaggcaggyttcctctaagaaggggatgagttcttcctgggtctcatactaggcctccaggggcagtaagtgcccatttggcaggaaggagaggggccatggggtcatc

SEQ ID NO: 357411 - DNA, 201 bp, Homo sapiens
gcactcaaccatcatctgctgaagctcaccagcactgtgcctggagggctccctgacaaaggcctcagagcacctctttgtatagacggaggccgggcggrtggtctcagtgcggccgtgcttgaatgcggcagtgctacaggactcgtaggtggccactgtctgcccgtactgccgcaggaaggccatctggaatgccag

SEQ ID NO: 357412 - DNA, 201 bp, Homo sapiens
atcatcatcttgtcaggaaaacagatgctgtgtatgatcctgcagagtatgacaaacatccggagcgctacataagtcgttttaatactgatgtgagtatyatattcaccttttaagttggttgcttatgatacagtgtaggtaggctattttcaaggagagaaattatgaattgtacaatggctttcagttttcctgttg

SEQ ID NO: 357413 - DNA, 201 bp, Homo sapiens
gtaaacactggttatctcttgatttatttcagcatgacaaacattttctgagtacctactatgtgctggactttgggcaagttacccaagactgtcacagrgaatgaaattcatgacctcagaaagctcacagctggactggggatggggctcttggaatggagggtttggtgtgctggggaaagaaactataatttcttc

SEQ ID NO: 357414 - DNA, 201 bp, Homo sapiens
aaatgatgtgggcaggcattttgtgggtatttcaaatggactggagattctattttaggcacttttcttaccaatgtatttttctcatagtgaaaagtagtaatgatctaaatatgtgtgtatgtgtgtatgtgtatgtgtgtgtatatatatgtgtgtgtgtatgtgtaagtgtatatgtgtgtgtatatctatacacat

SEQ ID NO: 357415 - DNA, 201 bp, Homo sapiens
atttgaatacaaaagttagtaggaactgactaagcagaattgaactaagagttggatttttaactgaacaaaatgttagtcactatttttacagttttttwaaaaaaacatatatataaaattaactgttatttaatcaaatggtacatgctttgaagatgtatttttgaatgccttagtaactttaagaatgaaaaactg

SEQ ID NO: 357416 - DNA, 201 bp, Homo sapiens
caaatgatgtgggcaggcattttgtgggtatttcaaatggactggagattctattttaggcacttttcttaccaatgtatttttctcatagtgaaaagtagtaatgatctaaatatgtgtgtatgtgtgtatgtgtatgtgtgtgtatatatatgtgtgtgtgtatgtgtaagtgtatatgtgtgtgtatatctatacaca

SEQ ID NO: 357417 - DNA, 201 bp, Homo sapiens
atccatgttgctgcaaagaacactatttcattcttttttatggctatgtagtattcaatggtgtatatgtactacattttttaatccaattcacggttttkgtttttttatttttgtttcattttgttttgttttattgagacagggtctcactctattgcccaggctagtgtgcagtgctgtgatctcaactcactgcag

SEQ ID NO: 357418 - DNA, 201 bp, Homo sapiens
cagccaatggaaaccggacacagcagtagggtggacgtgtcaggttataaatgaccctgtctcttttgttcggtgtattcttgtggcaaaactgctggtgrgtgtaccctttctgcaggaagtaaaaatggccttactaaataaattaaatttatgttcatgtgctgtttctttacggcaccagggaacaagcatttcaaa

SEQ ID NO: 357419 - DNA, 201 bp, Homo sapiens
gaataaatgcctgaaaagtggttttattgtttttttttttatgaagtagagaaaatctgaactatgcagaatgaatttgacaagtacaatgatatagtgtratattgtttctgttggtttttatttttttttgttggtactgtagacagctttaccaaataggcattaaaaaacaaattaaatattatcatgtaattaaca

SEQ ID NO: 357420 - DNA, 201 bp, Homo sapiens
ctctaggaagcagagtgatttaactctgcttcttaatcttctaacacctctggttaaagaataggtttgtttggtcgattggttttcttttttttttttttaatactttaagttctagggtacatgtgcacgacgtgcaggtttgttacagatgtatacatgtgccatgttggtgtgctgcacccgttaactcgtcattta

SEQ ID NO: 357421 - DNA, 201 bp, Homo sapiens
tttctattaatatttggttctaatagttttgcgagtattttgctcagtggtttccaaaagtctactaaatttgttagcagtaattatttttggtttaaggwaacaaaaacacagagaccaggagcttttgatactgataaaagacatacacaattttattctgcattataataaatttaaatagcaatactctattctgtt

SEQ ID NO: 357422 - DNA, 201 bp, Homo sapiens
acattttctattaatatttggttctaatagttttgcgagtattttgctcagtggtttccaaaagtctactaaatttgttagcagtaattatttttggtttwaggaaacaaaaacacagagaccaggagcttttgatactgataaaagacatacacaattttattctgcattataataaatttaaatagcaatactctattc

SEQ ID NO: 357423 - DNA, 201 bp, Homo sapiens
gtcctttgggtatcatgatttggcctttggagctatcatcttttatggtatttggagtagtctcgcttagtgcttttggtggtttctgtggatacactctktgtttcactgtctccatttctgcttcaggtctacatgtgcccaatagcgctaagccatttcctgtgcgttactgttttctgtatttatcctggactagtt

SEQ ID NO: 357424 - DNA, 201 bp, Homo sapiens
ttagttttaaaattgggacttgtgctgaaacaccatagtcttgtgggcagagttgattgcttgtagaagacttctattagcaatcacttatactcggtgakcctcagaaaactgtttcttaaattatttttttcccttgattaatattttaatatggatacaaacaccaagaggccttctttgcagtgtcatttatctctt

SEQ ID NO: 357425 - DNA, 201 bp, Homo sapiens
gtgcagcatatagtgagagcttattttttttttctctttgcaacttttattttaggttcgggggtacatgtgcagttttattacatgagtaaattgcatgycactggggtttggagcacaaatgaattcgtcactaaagtagtgagcatagtacctgataggtagtttttcagtcttcaccctcctcccatcctccaccct

SEQ ID NO: 357426 - DNA, 201 bp, Homo sapiens
ttattaatttctttctggttgatctttccatctttgaaagaggggtattgaagtctcctactattattgttttggtatctattttttaccttcatgttgaytaattaatatttgctttatatgtttaggtgttccaatgttgagtgcacatgtatttacaattgctatgacttcttaatgacttgagctctttaataatga

SEQ ID NO: 357427 - DNA, 201 bp, Homo sapiens
aattttattcatttgagtcttttctccttaggcagacacagggtttgttgattttgtttaccttttcaaacaaactctttgtttcattgatcttttatatkttttaagtctctattttgtttatgtcttctctaaccatcattatttctttgtgtctactaattttgggttcagtttgttcctgtttttcttggtccttga

SEQ ID NO: 357428 - DNA, 201 bp, Homo sapiens
tcagaacttacaaataatgttttgtgcttctgaataaaccacattgctgcttttagtgttgaaggctcggggatcctgatgtgttccattgacaatttgcyggcacagctcccaattgaagctacagaatgctttggagacatgctttacccttatgttgaagaaatggtaagcagactggtaatatcagtaacaactctg

SEQ ID NO: 357429 - DNA, 201 bp, Homo sapiens
ggcctctagtgggagtgcccaggttctgtgtttcagtcatactaacaggtgcctgtgcccatataatcaaacctgttacaactcattctgttggtgtcttrccttttttaaaaaaaaatgacattagcaagttaagctgaccagtcagatttactttacttcttactttactttgttctctgattgtcctggcagaaatta

SEQ ID NO: 357430 - DNA, 201 bp, Homo sapiens
ccgaatagatgtttgataaaatgtgtatttaaaaagctattttagcttagcagttattggatggtgtcacacacgttgctctatactttttaaaattttgyagttaaataatcttgtttttgaaaacttggctttaaaggaacacttgacatcccagttttcccttccctcttctctaccttgtgtctgttttcataagag

SEQ ID NO: 357431 - DNA, 201 bp, Homo sapiens
gagatatcaacttgctttataaccttgagcagggcactcacttcctttctgagtctcagatatttcatctgtaacatgaagtggttgtaatgaatacatartcttattttattttattttatttttttgagacagattctcgccctgttgcccaggctggagtgcagtgatgcaattgcggctcactgcaacctccacctc

SEQ ID NO: 357432 - DNA, 201 bp, Homo sapiens
tacaaatgccaggctttgctggagatatcaacttgctttataaccttgagcagggcactcacttcctttctgagtctcagatatttcatctgtaacatgargtggttgtaatgaatacataatcttattttattttattttatttttttgagacagattctcgccctgttgcccaggctggagtgcagtgatgcaattgcg

SEQ ID NO: 357433 - DNA, 201 bp, Homo sapiens
gcattaaagaagcaggagaaggagagtacaaatgccaggctttgctggagatatcaacttgctttataaccttgagcagggcactcacttcctttctgagyctcagatatttcatctgtaacatgaagtggttgtaatgaatacataatcttattttattttattttatttttttgagacagattctcgccctgttgccca

SEQ ID NO: 357434 - DNA, 201 bp, Homo sapiens
tagggaaggcaagtggagctatgtaattgttgggaaaatgatcagatctttgcagaaaaccatgttggttctttttctattgatttttggatttttactcrtgtgttatttgtagggagcccaagcaatctttaatgagctaccttgtgaatatgtggagccccatgaattaaaagaagtttcccaaactggaggtaaggg

SEQ ID NO: 357435 - DNA, 201 bp, Homo sapiens
gtgttcacaggaactggtaatgtttctaaggtaacttttacctgacttccttttgtaaaacaatccaaaactttgaaactaacccaaatgatgtgggcagscattttgtgggtatttcaaatggactggagattctattttaggcacttttcttaccaatgtatttttctcatagtgaaaagtagtaatgatctaaatatg

SEQ ID NO: 357436 - DNA, 201 bp, Homo sapiens
gttgagaggatggatacaatctactgaggcctcttctaaatctgagatgcatgatctgtgcttctgcagggcaccatgcagattggagaacgagcagagaraacagcttaaattcttcccaactaatagtctttctattggtctgattctgtaacaggaatgatcaacattttacatggaatgggtttaaggctccttgct

SEQ ID NO: 357437 - DNA, 201 bp, Homo sapiens
ataaaggtggaatatgagaaaaggagaggagtcaggaatcactccaggttttatcttgagctactcgaaggaatcctgtactacttttaataggaaggttrcctgtaaaaggaaggagagggaaaaagaaaaagagaggagaaggaggaggagagagaaaaatatctgtgcttggacttgagagagagtgttatttcccag

SEQ ID NO: 357438 - DNA, 201 bp, Homo sapiens
aagagttgagtttagggtctgccaagtttaatattctattagacattcaaagggataatctaagagggctgttggatatgagtctgaagctcaggagggcrgcttctcctgacatacattttgtagttgtgagagaccaggtggtgtctagagccacgagactggatgagcctaggaagggagtatagaaaaagaagtcta

SEQ ID NO: 357439 - DNA, 201 bp, Homo sapiens
tgattaatattttaatatggatacaaacaccaagaggccttctttgcagtgtcatttatctcttacaaatctcattttcctttcagatattatcagacgcracacagcctcttgaaagtcagaatttttctcctgtggtgagagatgtaagttatgagcagaatattttttcataaatgtatttttttactaccatttttg

SEQ ID NO: 357440 - DNA, 201 bp, Homo sapiens
gcgaggaagggagggagagcggtcagcgcagctccagcatttctaagtagaaaggcgagggattgcaattcggatttcttttctttcttttttggcggacrgtggtggtgctgtggctggggaataaagaactgatgaagctgaggaaacaacggcttgttaatttgtggacggcgtgcttagaggggacggctggctgag

SEQ ID NO: 357441 - DNA, 201 bp, Homo sapiens
cattcttcttttgtcttctgtgatgccccatgcagctctgaagctatttgctcagagaagtcttctcttgtttctccattctcatctctatctctagtctrttactctgttttttgttttgaaattcctcatttattttctcgtgtttatgatttttctccctcttcctagaacttaatctccttgaggatagggggtctc

SEQ ID NO: 357442 - DNA, 201 bp, Homo sapiens; identical to SEQ ID NO: 76485

SEQ ID NO: 357443 - DNA, 201 bp, Homo sapiens
cttctgctcacactttgttgcgggggacactgagatataaggtaagcagctggactttagattcaacatgttgccagttgtgatgtaagtgatgtgtacayttaatttttcttagtagtcaaaataattaagatgataaaccaagttggagtctattttttcaggaatcttatgattgattgaatattttaggagactcac

SEQ ID NO: 357444 - DNA, 201 bp, Homo sapiens; identical to SEQ ID NO: 76487

SEQ ID NO: 357445 - DNA, 201 bp, Homo sapiens
atagggtaattctatactgaaatctgggtggctatttaatatctttgcctcaaaagatggacactgacatggacaataagaaaatcaattagaagttacawttaattatttctcatagaatttactgatagctttctttcagtatactgtattaaaataggctattttctattttcttgaacctggaacttgcattacaga

SEQ ID NO: 357446 - DNA, 201 bp, Homo sapiens
tagtactcaataaatattttagactaaatgaataaaaatttcattcctccactctccctagaagatcacatagacattcaataagcattgcctctgtttgrccctcaagaaagaatgaggggagtagaaaatatcaaagcatataaatgtgaaataatgaaaaaaaaatgtatagtagcatatcagctaatgtcaaattaa

SEQ ID NO: 357447 - DNA, 201 bp, Homo sapiens
aggaggagacaatacccagttggaggctgctgaatggtaggcacccaccactcaacttagagcaaaatatactggatcaatgattgctaatttctactcaraaaaagttaaatattttacatttgtctttgattaattcgttgctctaatgtgggtagagagattaccatgtgccatgttcatgtgggcataaagagtaga

SEQ ID NO: 357448 - DNA, 201 bp, Homo sapiens
tatcaagtgttggtgaggatgcagagaaattggaaccctcatgcactgttggtggatacccacgtgatataaaaacaaatgtctacacaaaaacttgtgcrcagatgttctttgcagcattatttataatagcccaaaattgaaacagccctaatttctatcaactaacaagtgaataaacaaaacgtggcatatccatac

SEQ ID NO: 357449 - DNA, 201 bp, Homo sapiens
tattttaccattggtagacatttggggttgtggagatatatatatatatatatctccacattattttgttgagtttgcacatagatttatcttgtttaggrttattaacatctatgttcattagagagcttaatctataactttattttattataaggtctttgtcaggtttggatattaagtttatgttggcttgaaaac

SEQ ID NO: 357450 - DNA, 201 bp, Homo sapiens
ctattttaccattggtagacatttggggttgtggagatatatatatatatatatctccacattattttgttgagtttgcacatagatttatcttgtttagkattattaacatctatgttcattagagagcttaatctataactttattttattataaggtctttgtcaggtttggatattaagtttatgttggcttgaaaa

SEQ ID NO: 357451 - DNA, 201 bp, Homo sapiens
ttgtgtcatatacatttaggcagtgattacatccaacggtacattacctgataaatataaatatatccagacactccgggagagcaggtaagtattgttcmaatcctcttgttttatacatttattcttatcttggaattcatgagtattttttaatgcttcaatgggagttcttaatattaggtttgtacactatataaa

SEQ ID NO: 357452 - DNA, 201 bp, Homo sapiens
ataatcttaacagtttctctacttctaaaattttataatggtaaatgtttaagtggccaaactgtatgtatataaaaaatacaataatatatttaccaagrtgtttaccatttttgatgttcttcattcatttccctttggcatcatttccctgcagactgaataacttaatttatcacttcttacagtacaggtttgctg

SEQ ID NO: 357453 - DNA, 201 bp, Homo sapiens
agcacctgctacaaacattttttcatttctaattacaagcctaccattggtttgctacctggcgttttctaaatatttcatggtatacctgatggtagctwctgttagcaagttaaggtgtatttcagaggaaaaaatgtgaaatatttacttgctcatatatgtctttacttgttaaaattaagcttaatgggtccagtt

SEQ ID NO: 357454 - DNA, 201 bp, Homo sapiens
catgttggccaggctggtcttgaactcctgacctcgtgatccacccgcctcggcctcccaaagtgctggtattacaggcgtgagccaccgcgcccagccaygaatacataatcttaacagtttctctacttctaaaattttataatggtaaatgtttaagtggccaaactgtatgtatataaaaaatacaataatatattt

SEQ ID NO: 357455 - DNA, 201 bp, Homo sapiens
tctctgtcctttggatgtgaatccatttacctttgagctttcttgtttcttaggataacaaattgtcctagtctcaccttgtacctttcctgccccacatmaggaaattaataatttcaccaagaagacttgttttcttttattatatagagaccaagatctggtatctgatgttaagcatgtttattgttactgagatac

SEQ ID NO: 357456 - DNA, 201 bp, Homo sapiens
cttagttacattgatatactactctaaaattctcagtattttacatctttatgaagttatgaaaatttggagagatatactcaaacatactaaaatttggkgaaaaaaacatgcacatttgaacacacacacatacacaaatatatttaaatgtgagatgggttgctgaagaaggaaaacgttttgtttgaaaagttttgt

SEQ ID NO: 357457 - DNA, 201 bp, Homo sapiens
ttgaaagtgacctcacgataaccattttttaagactacttggagttttgcaaacaagatgttaggaagattcatttaagactggaattcatgctttcttcyttctctggtggttttaagaatgtgtttgtaatctcctatagaaacttgtcattgtaaaataattcctgcttcaaagaaaatattttacaaataggatatc

SEQ ID NO: 357458 - DNA, 201 bp, Homo sapiens
cttcccccagataaactaacaaaccaaaaaatacataaaacaaaaaatgcatgcatttattgtgaaaaagaatgctttaaataattttaaatatgtttgaycaacataacattttcagattctggtatgaagtttagcccttatatcgtgcagggcatgttagggaaaagaattcttaccttcagcttgagatgtttgaag

SEQ ID NO: 357459 - DNA, 201 bp, Homo sapiens
ttttacctccatcaccaaaatgtccacgagtttgaaagtgacctcacgataaccattttttaagactacttggagttttgcaaacaagatgttaggaagaktcatttaagactggaattcatgctttcttccttctctggtggttttaagaatgtgtttgtaatctcctatagaaacttgtcattgtaaaataattcctgc

SEQ ID NO: 357460 - DNA, 201 bp, Homo sapiens
ttacagcatttaattcttttattagagaagacagtttttaaattaataatttgtgcttccactataagaagctagaaaatcaaagagaaattaaatcaaaygcaagtagaaagaaataaataataaagatacagagaaaattaatcaaactaaaacaggaaaagaatagagaaaatcaatgaaaccaaaacctggttctct

SEQ ID NO: 357461 - DNA, 201 bp, Homo sapiens
attttacctcagatttctcaggagaccagaactgatctgccagccttgctgccttttgttgctctgctctttacattgtctttacagtcaccaggtgtcargatgctgcaagtacataggactggactgggcaggctgggggtcagcctctccaagggtcttcaccacaaagctgtgttggccgtccggagggaggatgtg

SEQ ID NO: 357462 - DNA, 201 bp, Homo sapiens
gcttggaaaatgctttctataaaacagaaaaaaatcccctatttctatgggcctcactattctcatttgtaatactagattttagattacattctatcagkcccactttgactctaatatttggatataatcaataattaataattcactatcagatattgatcagcaccatttaatttgataaaactaatcctgaacatg

SEQ ID NO: 357463 - DNA, 201 bp, Homo sapiens
ttaatccagtaaagtattttatagagggtttaacatggaagcattaaaagaatgtacccacgcacaggaagtcaaagtatgaccagtgttaatgcaagccsaagcctagttctagcaagccttgaaattgggagggatttggattagttctaggccatcatctggtgctgtgttaattctggaactcttttgaacctctcc

SEQ ID NO: 357464 - DNA, 201 bp, Homo sapiens
tggtggaggaggacaattatttaaagcaatttttttcctaactagctgccttatccattatctccatgttcctgggatttgtgatacaaagaacaatgtawggccaatcaatagcaataatgtaaattattggtaaataacttaggaactgccttttcctttcctttaaaaatttacttgtactttacagcaggtacactg

SEQ ID NO: 357465 - DNA, 201 bp, Homo sapiens
acctaagttttgcaaggtcttttatgtaaaccagtagaattgttatgacactattgatctcagtttgagcttgaaattggttgtatctatatcctcaatayttttttggtgggttgtggggaggggtttctagtaaagacaggaaaacctgctaggcaaattctagaagagctgtagtactcatatcatcaatataaacag

SEQ ID NO: 357466 - DNA, 201 bp, Homo sapiens
tgtgtgtgtatgtgttacaatttcctatttccaattatttttaattttaaaatttgaggtgtatttgaagttcagtgttttagtaggataatttttcagtyaattaaaaaaaaatttgttagggacttagaaatattgtatttctttttctaaccagaaacaactcctctgtgacctagttgggatttcaccctcctctga

SEQ ID NO: 357467 - DNA, 201 bp, Homo sapiens
tgggagtgcccaggttctgtgtttcagtcatactaacaggtgcctgtgcccatataatcaaacctgttacaactcattctgttggtgtcttgccttttttwaaaaaaaatgacattagcaagttaagctgaccagtcagatttactttacttcttactttactttgttctctgattgtcctggcagaaattaatgcagtta

SEQ ID NO: 357468 - DNA, 201 bp, Homo sapiens
tttaattctatgaatcatgaaggtttggaccagaatcttagtctgatgttttaccaagcacacatccttttacatgctacagcctatctcctattgcattscaacagctccttttaccttctgcaatcttaagagactggcctatgtttggtataaattaacatgtgaaggcaggacaaattcttgcctcagttgagtaaa

SEQ ID NO: 357469 - DNA, 201 bp, Homo sapiens
tatggcagcagtttgctaaatgcttattgatgaatgaatacataaaataaattcatttctaggggtcagcataaaaatatatttctgagattaataaatasctcagaaatcagtattttagatgttggataaagggatctctagcacctatcaggtcccagaagcgagctaaacaagctagtgatattacttttctgtttc

SEQ ID NO: 357470 - DNA, 201 bp, Homo sapiens
catctatgtgagttccccttcttttgtgctcccacagctatgttttcctctaacctagcacctattaatataatactgtactacaatttagtcatcagtgktgatgcatttttgcttaccatggactaggcattatttgcttgacttatctgacccttctgttgactgcagtttctgcatggatgagactgcaattttttc

SEQ ID NO: 357471 - DNA, 201 bp, Homo sapiens
tgagatttcctggctaaggccagagaggggatttgtctcatgtgtgttatctagtattctctaattatctttttatctggaagatgtaaggcacatggacytgtcagtgatgacccttcaatcttgtgcctgcttttctgtcgttctcttatctttttttgctggctgttccttttgcctggaacttttcctccaggtatt

SEQ ID NO: 357472 - DNA, 201 bp, Homo sapiens
tttctgttgtcattcaaattattaataaaataataaacaagaaagaacttattgttgaactacattatataccactagaaatacaactatgaatgaatatmaaatgacaatgattacccagtaatttttgggtcaggttgcttagccacctgccattctcactaaatgaatcattgccattcagctgacatttctccatct

SEQ ID NO: 357473 - DNA, 201 bp, Homo sapiens
gaatgctcctttgagaatgtaccttgcctgccactctgagagaagcctgtcatgttcatcattccacttgctcttcaaaataatattatggtataggtttsactcattcctattttagcaatatacatatatatgtatacttttcctttcctgagccattttaaagtagatcacagacatcataactcattactattaaat

SEQ ID NO: 357474 - DNA, 201 bp, Homo sapiens
agacaaatatgtttctgttgtcattcaaattattaataaaataataaacaagaaagaacttattgttgaactacattatataccactagaaatacaactaygaatgaatatcaaatgacaatgattacccagtaatttttgggtcaggttgcttagccacctgccattctcactaaatgaatcattgccattcagctgaca

SEQ ID NO: 357475 - DNA, 201 bp, Homo sapiens
tttatattctgaaatggaaagaatgataaaagctcttaccctaaacaatttaccaatttataaggtcaattggccatatactatcaaatagaattttagarctgaaaataacctcagggatcatataatctactaccttgtttttcagatgggatttttttttgagatggagtcttgctctgtcatccaggctggagtgca

SEQ ID NO: 357476 - DNA, 201 bp, Homo sapiens
taaaattcatactaagaaatacacagttcaagcaaaaatacaagaaaaagggcattaaaaaaacaaagtacaaatgaaataagaacacaaacagcaacatrgtagctttaaatttagctatatcaatagttacattaatggcctaaaaactcccagataggctatagaatgagtcacaaaacaatttttgataaatttgaa

SEQ ID NO: 357477 - DNA, 201 bp, Homo sapiens
gtgatattcataacacaggtagaaataaaacttatgtcaccaataatgatggacaggtgaaaaggaatagaaccatacttttgtaacaagtttattttatyataccggaagtagtataatattacttgatagttgactataataagataaagatgcatatggtaacctagaacaatgattaaaaataaaacaaggctctaa

SEQ ID NO: 357478 - DNA, 201 bp, Homo sapiens
gtatgaaatttaaatgagataattcatgcaaagagcttagcaaggtacatgtaatttattaatacatatcaatgattgttacttattacccaataagtctygtattagccatgatgacattcaacctacatttccaaatcggtttactcgtatgttgtaaatgtctctttacttctctctttgtatttttatatatgcctt

SEQ ID NO: 357479 - DNA, 201 bp, Homo sapiens
cctcaggtttcccattgattgaatgaggattataattgtacttacctcatgagagttgtatgaaatttaaatgagataattcatgcaaagagcttagcaargtacatgtaatttattaatacatatcaatgattgttacttattacccaataagtctcgtattagccatgatgacattcaacctacatttccaaatcggtt

SEQ ID NO: 357480 - DNA, 201 bp, Homo sapiens
atggtattttaagatctgtgatgttcctattcctcaaataactttacaactaatcatgtcagcctccattgataatctttgcctggatcagtttttacatrgagacttgtgaagtgatgcttttctaattttatcactcccctaagtttgtttgctgacattcttctttagaaaagaggttttcttttctttctcttccac

SEQ ID NO: 357481 - DNA, 201 bp, Homo sapiens
aagactgttacaattcatcagaggaagggtcttgtaccccacccttgcctgtgtgacacttctctttctctattttcctcctctttgttctttctagctcyttttttccccctctctgcctcctgcttttctacatcctccttgcttgtgttacaagctgttatcagcacccgacattgtcgggtaacctcactagagctg

SEQ ID NO: 357482 - DNA, 201 bp, Homo sapiens
ctggaaggtgaaatgggagatggtagtagttaaatgagacctcttcacatcagtaatatgtgtgttgggatacagaaggacaggaattttttatacttatwtttatttgttaaaaattaatgaaaagttttttgggttaatgttcaagagacattatggcctaaagattctaaataacagagcctacttcagtccctggca

SEQ ID NO: 357483 - DNA, 201 bp, Homo sapiens
ttttgataatgtttgaaaatgtaggaaatccaaactaagtggctggctgaaaccactgtgactgtttcccacttaacagtagtatagggtcattttggcttctaatagcctgtgtagacgtatgggtaagcaagcaaaaatccaaaaggattgtccttcaggtagcttcttgtttttctctagcttttgatacatgatcat

SEQ ID NO: 357484 - DNA, 201 bp, Homo sapiens
tttcatcctctcatctaagtattgatgttattttcagactcgtggcaatatgtgacatttcagctgacacaggagggtctatagagtttatgactgagtgyacaacaatagagcatcccttttgcatgtatgatgcagaccagcatattattcatgacaggtgagtttgctaaagttgttagatgatattcctcacttagt

SEQ ID NO: 357485 - DNA, 201 bp, Homo sapiens
cccacttataactgagaacatgtggtatttggttttctgttcctacattaatttgcttaggataatggccttcatctgcatccagattgctgcaaaggacrtagtttcattgtttgtttatttttgaggcagtcttgctctgtcacctaggctggtgtagtggcaccatctcatttcacaaacctctgcctcctgggttca

SEQ ID NO: 357486 - DNA, 201 bp, Homo sapiens
catagtattggaagtcctggccagaacaatcaggcaagagaaagaaataaaaagcattcaaataggaagagaggaagtcaaattatccctttttgcagatracatgattctatatctagacaaccccctagtcttagcccaaaaattaagctgataaacaatttcagcaaagtttcaggatacaaaatcaacatacaaaaa

SEQ ID NO: 357487 - DNA, 201 bp, Homo sapiens; identical to SEQ ID NO: 76483

SEQ ID NO: 357488 - DNA, 201 bp, Homo sapiens
atatctttacatttgtttttgttttcttcaatgtctttcatcaatgttttacagtttttagtatagagatctttcatttccttggttaaatttattcttaygcatcttatttttgctgtggctattggaaatgggattttttttcagattgttcacagttggcatatagaaatgctactaatttttgtatgttgattttgc

SEQ ID NO: 357489 - DNA, 201 bp, Homo sapiens
gtagcatatcagctaatgtcaaattaaatgaccaacttagttattgaggaatcaatgaagaagtaagtgataaaagttggggtcattgtggcctctagtgrgagtgcccaggttctgtgtttcagtcatactaacaggtgcctgtgcccatataatcaaacctgttacaactcattctgttggtgtcttgccttttttaaa

SEQ ID NO: 357490 - DNA, 201 bp, Homo sapiens
gctaaatattgtgtgacgatttggggtcttttgtgatttcatactagttttaggattgtcttttctatttctgtgaagattatcattttttttttttttttggtaaggattgccctgaattggtagattgctttgggtagtatgggcattttaacaatataaattcttccattccatgaacatgggaatatctttacattt

SEQ ID NO: 357491 - DNA, 201 bp, Homo sapiens
cctggctaatttttgtagtttttagtagagatggggtttcaccatgttggccaggctggtcttgaactcctgacctcgtgatccacccgcctcggcctccmaaagtgctggtattacaggcgtgagccaccgcgcccagccacgaatacataatcttaacagtttctctacttctaaaattttataatggtaaatgtttaa

SEQ ID NO: 357492 - DNA, 201 bp, Homo sapiens
tttattttatttttttgagacagattctcgccctgttgcccaggctggagtgcagtgatgcaattgcggctcactgcaacctccacctcccaggttcaagygattcttcctgcctcagcctcccgagtagccaggaccacaggtgtgtgccaccacgcctggctaatttttgtagtttttagtagagatggggtttcacca

SEQ ID NO: 357493 - DNA, 201 bp, Homo sapiens
ctgcagtgtggaagatgctggcatcacaatcattggtgaattgggattggaccctggtctggatcacatgttagcaatggaaacaatagataaagccaagraagtgggagccacggtgagcccaatttgtacccaaaggcaacattaaaatgtctaaattcttgtgtacagaatcaaagtatgagttataatatagcaaca

SEQ ID NO: 357494 - DNA, 201 bp, Homo sapiens
agttaggctagatgagcatgttgtgatgggttttatataatataccaaggacctcaggtttgctttgtagacaatgaaggacatatgaggaatttttatcrgagtgatgatatcatcatatcttagaaaaatctctgattcctacctctttttctgctctccatatatcttgggggtggtggctctaattagtagattgga

SEQ ID NO: 357495 - DNA, 201 bp, Homo sapiens
gcagctggactttagattcaacatgttgccagttgtgatgtaagtgatgtgtacacttaatttttcttagtagtcaaaataattaagatgataaaccaagytggagtctattttttcaggaatcttatgattgattgaatattttaggagactcacctcaaaataaaaagataattaattgactcattaggagttggggac

SEQ ID NO: 357496 - DNA, 201 bp, Homo sapiens
aatgatgtgggcaggcattttgtgggtatttcaaatggactggagattctattttaggcacttttcttaccaatgtatttttctcatagtgaaaagtagtaatgatctaaatatgtgtgtatgtgtgtatgtgtatgtgtgtgtatatatatgtgtgtgtgtatgtgtaagtgtatatgtgtgtgtatatctatacacata

SEQ ID NO: 357497 - DNA, 201 bp, Homo sapiens
aaatgctaaagatggtaacaacgaaagggtcagcagagtgcaaccatgtaaaagaaagagcaaggaacttggtatctgtgggcctggctttgtgctctagytctgccattactggttgtgagctttgggttccttgtctgaagataaagacaatcatgccagccttccagtgttcttagtcagtgaggtcacatagattgc

SEQ ID NO: 357498 - DNA, 201 bp, Homo sapiens
ataatttggattggggttttctgtcgtgggctttccactaaaatagggctgctgttctttttaccttcacatcttccaaatggctatcaggaagtgtcaarctaggtcaagatggcccatgtattacattattgagtagactccaagaagggcccaaggaggagataggctttcatggtgttgatcggtgtaaaggtatca

SEQ ID NO: 357499 - DNA, 201 bp, Homo sapiens
cacaagtgacattttcgaccttttggagtaattgggttggagtcaacttaaataatttaagagtatgtcccattgagtgcttactgtatcatattcgagaygaattatgaactctaatcccttcgtctaaaaaagtaccacaggcaaagtcctatcattctacttctcagcctattataaggccaaagttttaaaatatta

SEQ ID NO: 357500 - DNA, 201 bp, Homo sapiens
tattttcaggtagcagaagttgtatttgttgaattcgaagttctcctctttcatcctaaatgtcttttgtaaaaatgagtgctttttgcatctctctgacrctggaggataccaagagaaaatatgacacttttctttgctaaaatgatacttttttcaaggtcccacctgcgtttcctcttgtggatgaagctttttgtg

SEQ ID NO: 357501 - DNA, 201 bp, Homo sapiens
agtgggattgcaggtcataaggtattaatgttttatatacttaagtgtctattttatcctttggagttataaagcttaaatggaataagtagattatttarccttatgaccattttaagtctcatcatagcaacagatcctgaaatagagtattactaacaaaaatgcagatctaacatctagacacagaattacatgaga

SEQ ID NO: 357502 - DNA, 201 bp, Homo sapiens
aatagccaaaaatacgatttttgtctcattagctccctaaggtcagtgggataaaatgtgcccatctactttggcctatgttatatgtcctagaactggaratggagtcaatgtcattaaaaaaacatggactggggcgggaggaaacggacgggatgaaaggggcttccccagagcaaatccaaaatgtttttaaaccac

SEQ ID NO: 357503 - DNA, 201 bp, Homo sapiens
ttgtaaaaatgagtgctttttgcatctctctgacactggaggataccaagagaaaatatgacacttttctttgctaaaatgatacttttttcaaggtcccrcctgcgtttcctcttgtggatgaagctttttgtgaccactccagcctctgttcactattattttgcctgaactgaatcaaagaatcagacactttgtttg

SEQ ID NO: 357504 - DNA, 201 bp, Homo sapiens
ctgaaatttgaaaatttatttttggagatgttaaaatatattttactctgacatatctaaaaatgtgacttttaattactgaaataggatctgacatgaaraatcaaattgaacagttaggcaagaaatataatattaatcctgttagcatggacatttgtaaacaagaagagaagctgggcttcttggtggcaaaacagg

SEQ ID NO: 357505 - DNA, 201 bp, Homo sapiens
caagggtaaaggttaggagaaattcacctaaattcagttaggatgaagtaatttaaatctaggtttcagtcctttggagaactgacctttttcaaattacyatttattttagatacatgaaaaccattttctatttattttaatacagtaaataaattctctgttaccagcaccttctaggaacatttttcttgttcttag

SEQ ID NO: 357506 - DNA, 201 bp, Homo sapiens
gggaaggaggatggggaaaagaaaaactagtggagaagaggatgtgcttggccttgaaggatatgagggtgccagctaggcagggatgttagcactcatgktatgacagttttataaggggaaaaatcaggtttagggagttaagataacagctacacttaaagagatggcaagtgacagagccagtatccaaatcatgtc

SEQ ID NO: 357507 - DNA, 201 bp, Homo sapiens
tacactatataaattttgataatgtttgaaaatgtaggaaatccaaactaagtggctggctgaaaccactgtgactgtttcccacttaacagtagtatagsgtcattttggcttctaatagcctgtgtagacgtatgggtaagcaagcaaaaatccaaaaggattgtccttcaggtagcttcttgtttttctctagctttt

SEQ ID NO: 357508 - DNA, 201 bp, Homo sapiens
caattggttttcaaatatcaaactaacttcacagtcttaggataaatccaacttggttgtatgttaaccttttatttatgactaagttctggttgctaagraatataccaacatttattaatctattttaccattggtagacatttggggttgtggagatatatatatatatatatctccacattattttgttgagtttgc

SEQ ID NO: 357509 - DNA, 201 bp, Homo sapiens
acacagccaaaccatatcaaacaccgactatgtgctagtcttttttttttctgaagtactgggatgtagaaacaatgaataagcataattaatatgttaaragaagaaaaatgaagcagggagagggcaaggagagttaccaagggaggaagtatactatttaacagggtggttcagcgaaagtctctcctgtagatgctt

SEQ ID NO: 357510 - DNA, 201 bp, Homo sapiens
actaacttcctagaggctgctgaaatcttatgtatcaagaaagatcttattaactgataacattagtatgtagttttcaagctgaattacaagtccacaawccatagaacaacaacatttaaaatttatacttcagaaaatttatggataaaaacttttaaatctcatgtttgcctttgtgcacaatagtaaacaatgcaa

SEQ ID NO: 357511 - DNA, 201 bp, Homo sapiens
tctgttgtgttagtatttgacaaatgtatttattgcatgatcatagttttccattgtaaacctaatatgaacgcttttttttctcatttgtcgtgtgctgwggaatttgatttctttacttttttggcattcattccctcattagacactgaaagagttttaccaggtaaggcattatttcactgcattttcttttagcca

SEQ ID NO: 357512 - DNA, 201 bp, Homo sapiens; identical to SEQ ID NO: 76512

SEQ ID NO: 357513 - DNA, 201 bp, Homo sapiens
ttttttacaaggcatggaggagtgacggcaggaactttctgtgctctgacaacccttatgcaccaactagaaaaagaaaattccgtggatgtttaccaggkagccaagatgatcaatctgatgaggccaggagtctttgctgacattgtaagtaacaaggcagtgaacgaaatttttcactgatagagtacaactaacttc

SEQ ID NO: 357514 - DNA, 201 bp, Homo sapiens
tgcagacctacaaagtttggcttccaaaatggcgacttcatattttgtaaatttatcaaataaatgatttttcttaatgtaccttaagtagatggaaattkagttgaaatttaaaattttgattttcagaagcttaggtgcaattgtatttctttttttagtggaaattaatctcactaatgactaccgtgtcagcggagg

SEQ ID NO: 357515 - DNA, 201 bp, Homo sapiens
aaattattacttttacccatttatttttacactgtttcctattttattcgctatgccaaagctttaaactttctgaatttttttgttcttttttattttgsagaaacttattgcatatgaaagaaacagattaaatatgtattttctccataagtgatttctgagtgatcctgttagactgactctatattggcacaaagt

SEQ ID NO: 357516 - DNA, 201 bp, Homo sapiens
taacttttaaagactatcacaagcttatgtaatgctactgaatgtaagcttgcattggaactccaagtgagttttgttgagactggaaggtgactactttwgtattcctcaccattttaacaaagttggccttttacacagttgccaacaggctgacctggaggcattggcaacatcaagtaacataaatatcttgatctt

SEQ ID NO: 357517 - DNA, 201 bp, Homo sapiens
gaagagtgtactagtttctgctcttaaagtaatccataggcagaagagagacatacaggtgtatgttcattgaaatatgacagctaccatttgaaaaatgyatggaaatatagatgcttagtgcatttggtaaagaagcgggtgagactaagggaaggggaatttttagggtagcagtgcttaagtatgttacaggggctt

SEQ ID NO: 357518 - DNA, 201 bp, Homo sapiens
gtgaataagtgaatgaattaaaacattggccaaagcttactcatgtctaagcctctggggttaaaaagagcatatgtgttattggcaacaaacacagaagraatgactggctttagatttccagacaggttggagccaagttcttcttgctgaacatcctttaaataatttaaaatttgcaaagccttcagaagaatacag

SEQ ID NO: 357519 - DNA, 201 bp, Homo sapiens
gcagaagagagacatacaggtgtatgttcattgaaatatgacagctaccatttgaaaaatgcatggaaatatagatgcttagtgcatttggtaaagaagcrggtgagactaagggaaggggaatttttagggtagcagtgcttaagtatgttacaggggcttaaaagaacagttcagtgaaggagagattgaagtccagaa

SEQ ID NO: 357520 - DNA, 201 bp, Homo sapiens
atctccttcggaactgaatttgagaataagaattgaggattgtatttatattcagttttgatttttattaaattcaatctgaaaatttttattacatgaamttataaagcgtagaaaatatagataagcacacagaagaaaataaaaataccctgtaattacactacccagagataactattatgaagattttggtaaata

SEQ ID NO: 357521 - DNA, 201 bp, Homo sapiens
gagctttgtgtgagatgagaaagctgtgtcaggctgatggtattatcatgattccttggaatggatcaccatcccaaatcaccagacactccctgatcagsagggaacagcacattctccagctactgtattatttgggaggttcaggtaggaagtgagtgcatagcctcaaggggtctggtggaggtcctcttgggaaat

SEQ ID NO: 357522 - DNA, 201 bp, Homo sapiens
tttccaaaaagtgacaccttttcttttttgatattctagtttttttaaaaattgtattttgggaaattatgtaaaggcaaatatacacgtaagacaaagaytagaaaaatattcaaaattataatagtagctctatggggataagctttatcattggtgaattttttttatattttctatatttaggtaatgtaattattt

SEQ ID NO: 357523 - DNA, 201 bp, Homo sapiens
tgaacaggaatgctttttaaatgttgttcctctgagtgcaataaacctgtgtaatctaggctacctaatgagcatctttgagcatctgccactgcagagtrcattcaaatttcaggcaaaatttgggaaatgctgttgcagcagtggcccagtaagacccagtgctgtcattggtcaagataggtcaccaattacaagact

SEQ ID NO: 357524 - DNA, 201 bp, Homo sapiens
ccaagcttaagtagttttaatgagcaatagcaagtggcttataaaagatactggcaaattgaaaatgtcttaaatcattgaagatccattgaaaaattatsaatttattatagtaaatatgcttcttgggaataaaggtttcttatttctagaccggctaaaaaaaacaaaaaaaggaattcatgccaaaaatgaattttc

SEQ ID NO: 357525 - DNA, 201 bp, Homo sapiens
agactgcagcaacaaaggaaagaaatctcactccatttctctcataattccataaatagtttgcctgcctttcattgagggcagttagttaacattgaggrcagctagttaacagcaagagctacagaaaagtcctgtaattaatcaacctgcattgccttcagtctgaatctgagtattaaaattcagtaggtgcaatta

SEQ ID NO: 357526 - DNA, 201 bp, Homo sapiens
aaagagcagaggcacatgctaatataatgaactattgcaatgagtctatttgcaatgtaagctgatgatcagcttgttttagctgatttataaattgccaygtaccagaattacttatactaaaacacataatttaaacatcatccttaagaaatgagatagaaaaaaggaaaagggtcagtattcaggcttctgccctgc

SEQ ID NO: 357527 - DNA, 201 bp, Homo sapiens
atttatttgaagaaatgtcctaatatgactctgatgtgaacacctttcagaagtgtggtgtttattatttggtagtggcaaatgtgaaaacataggcattgcattcactaaactatagcgaacagagaatttgctgacctgtaagtgcattgttgacttttaccttgtccttaactttgacccttcctcagtattaatgag

SEQ ID NO: 357528 - DNA, 201 bp, Homo sapiens
acatttttctactattgcatctatttttatgtaatgtattaactataatgtaaagtttaatttttgcatggtaatttaagaaactaaatttcttactcctycttttccctaggagcactgaatcaaaaaaattggggaaagaaatatccaacatgtaatagcccaaaacaatctcctatcaatattgatgaagatcttaca

SEQ ID NO: 357529 - DNA, 201 bp, Homo sapiens; identical to SEQ ID NO: 76518

SEQ ID NO: 357530 - DNA, 201 bp, Homo sapiens; identical to SEQ ID NO: 76520

SEQ ID NO: 357531 - DNA, 201 bp, Homo sapiens
gttcaatatcatgtagctgctaagtaggtgagcttggattagtgtgtctgaattcaaagaaaaagaattttagtagtatatgtcctgatctatgtaccccrttttctgtttctgatatttaacaccatgaatgcccttagattctgagtgattctttgttgagaatgaaagtagtaacagagagcaatgttataaaaagcc

SEQ ID NO: 357532 - DNA, 201 bp, Homo sapiens
ttgttttaatatgccaggacaaaatgtaattgttataatttaagaaatacataattaagagaaaacaacacatctgaggaaagtaattacagtgctcagaygttaattaagagacactaaaaaacagactacttgttgaaatagtgatgtttgatagaatattagctatgttattaaaagcttaaaatccattattttatt

SEQ ID NO: 357533 - DNA, 201 bp, Homo sapiens
aattttatgtgcaggaagttttctttaaaatttttaaagctagaatactatttttgagacaagaacaggacacaagagtatacactgtacagatacctacwtcaaattgttactaagaatacatgggataattccacaacttggctttctgtgccttagatgggactcctaaaaggctctaaagtgggtctcatatacgaa

SEQ ID NO: 357534 - DNA, 201 bp, Homo sapiens
aaaaaacatttccttcgctccccctccctctccactctgagaagcagaggagccgcacggcgaggggccgcagaccgtctggaaatgcgaatcctaaagcktttcctcgcttgcattcagctcctctgtgtttgccgcctgggtgagtgagaagagctcggtggggtttcagctccgggatcggtgggatgagggtgggag

SEQ ID NO: 357535 - DNA, 201 bp, Homo sapiens
aatagcaaataatttacattcttcattttgactctgttgatcctctgtaaaattattgtacttaacaataatgaacacctagcatatcaagatttattatrtaataatttttatagatgtccattgtataacagtctgcatttactgaaatcattataaagaagtgagctacttgcttttatttttgcagttaaaaaagag

SEQ ID NO: 357536 - DNA, 201 bp, Homo sapiens
tttttgcagcaagatggatggagctgcaggtcataatcctaagtgaactaatgcagggacagaaaaccaagtacctcatgttctcacttataagtgggagstaaacattaattacacatagacataaacatgggaacagtagacactgtggtgtacgagagagtggagaggtgggtgagttaaaaagtctccctatcaaat

SEQ ID NO: 357537 - DNA, 201 bp, Homo sapiens
ctaggtattcctgtatgtggtaataaccacagacatgggaacagcttttgaatcctaagacctgtaccccagtgaatataatgagagagaatataagtcaragagggaattcaaattgttcctctgggagcctgagaaatgtaaaaaactggtttactccctatactaatcctaaaaacagttgtcatcactcttaattca

SEQ ID NO: 357538 - DNA, 201 bp, Homo sapiens; identical to SEQ ID NO: 76502

SEQ ID NO: 357539 - DNA, 201 bp, Homo sapiens
tcattcctggaccagcaggcaaaacaaagctagagaaacaattccaggtgagtcctcttggaagcctcttggatgtcactacagaactgaatgtccctgcrtcttctcatttgagttgacagggtcacgttgagtgggcagtgtgggtacaatgactttgtatttgagccatcgttgttccttactgtgggctacagtgcc

SEQ ID NO: 357540 - DNA, 201 bp, Homo sapiens
gaaaatttcaattgattgccaggttaaatcacgtatatagtcaattctttataatttatttgtccaagtaattcctgctaatgaatctgtagcccgctctrttgttttgcactattttgtgtctcttgaaggcaagcatgctatagaggctcctgctgaggcggagcaccttaggagagtaaccagtagctcaggattctt

SEQ ID NO: 357541 - DNA, 201 bp, Homo sapiens
gaatgtttaggatgcatatgatttttggccactctggagaattttgaacgtagatggcaatgctgtctgaaaaatggatccctgtgaaagaagcataaagygtgaaatcacatttaattagccaagagtggctagtgtatgttgccattaaatcctttaaattacagcacatctgggcaccgtccatcccacaagaatgta

SEQ ID NO: 357542 - DNA, 201 bp, Homo sapiens
taagcaaacttacacaggaacagaaaaccaaataccacatgttctcacttataagtgggagctaaatgatgagaacacatggagacatagaggggaacaayacacactggggcctttcagagggtggaggatggcaggagggagagaatcaggaaaaataactaatggactaatgggtatgagccttaatacctgggtgat

SEQ ID NO: 357543 - DNA, 201 bp, Homo sapiens
ccggacccagagcggcagccgcgcccctccgccccccgcgcgaccccgggtccgaggcacgctcccagcggagcggtcctgcgcccccgccccctccaggmgccgcggcgcgcacagccgggctggagcgcgcacccggcactgaggcttcgctgctctcggagcgctcagaccgcggccgccgcagccggcgaaagaggc

SEQ ID NO: 357544 - DNA, 201 bp, Homo sapiens
ctttgtttgtttgtttgtttgtttgtttgtttgttttgttctgcatttgccgtctcattggtaataacaagactgcagcaacaaaggaaagaaatctcacyccatttctctcataattccataaatagtttgcctgcctttcattgagggcagttagttaacattgagggcagctagttaacagcaagagctacagaaaag

SEQ ID NO: 357545 - DNA, 201 bp, Homo sapiens
gaggcaggagcttcacttctcactgtatactattcatactggaggaaaaaataatttttgacaaatatgttgacacaaaatattttcaacttaacgtgaaytaattttagcaagaagggcaaaggtagttggacaagaaccgtagcttcgtgtagtcacctgtcaaaatgtagggcctctgcttggctgaatctcagtgag

SEQ ID NO: 357546 - DNA, 201 bp, Homo sapiens
aggcattatcctatccatggagtggagagagagagagcatgatgttgcagcaatactgagataatgaattaatattttccaagcagagcccacaaaagacrttagttgcaatctttcgagttgcagggaagagacacatcccaggtaacatcatcagtgattatctgatggaaattctcatcagactgatttatagtgctt

SEQ ID NO: 357547 - DNA, 201 bp, Homo sapiens; identical to SEQ ID NO: 76507

SEQ ID NO: 357548 - DNA, 201 bp, Homo sapiens
cataaggaggtgggaagaggtgttactagtaagcatgttctgggtggtcttctggtgcacatgtgcagtaactgtacatgcttgttcatatgttgcatgtytcattagcatcttaaaactccacccaggggtgtggtttttactattataatgagcatagggtcagtttggggacaggtaaaatcaaaatatgcatgctct

SEQ ID NO: 357549 - DNA, 201 bp, Homo sapiens
aacaaacaaaaaaaacatttccttcgctccccctccctctccactctgagaagcagaggagccgcacggcgaggggccgcagaccgtctggaaatgcgaakcctaaagcgtttcctcgcttgcattcagctcctctgtgtttgccgcctgggtgagtgagaagagctcggtggggtttcagctccgggatcggtgggatga

SEQ ID NO: 357550 - DNA, 201 bp, Homo sapiens
gaattcaggatctttgaattaagtgaattatagtgctgcaaggtacactaagttcaaatgtttaagtattattattaaatatgtaatgaatcagattctgwacttctcagtcacatcttactgctttaagagccacattaacaataaattatacccaactcctctggaagaattaacttcttaatttatgctggttataga

SEQ ID NO: 357551 - DNA, 201 bp, Homo sapiens
tgtgaaattcaatatgttgtgactctcagtttgatctatttatcctctgaaaacaaattgtaaccacatataaaaaatattcatgcctttttcccaaatartaactagcctctattcagaaaattaattccttttcattgcagagttgcaattttctttatttcatttctctctcctttttacgtatactgtggttgcttc

SEQ ID NO: 357552 - DNA, 201 bp, Homo sapiens
tcagatattaggcagttctcaaagaaataaaagtttggcttagcatcttccctcttccttgatgtattcttctcctatcctccccagatacatattatttygttgcacttggaaggttagaatccccctttctgccccttgtctgggtcctccttctcgccaagtgttaccaggctccctagtcattctgcctattttccc

SEQ ID NO: 357553 - DNA, 201 bp, Homo sapiens
atatttaattcttttcagaggctcccaatttttcaattttagatggttcatagtagagtagatattaagcgtacattttcatccaatagatggtgctgctyttggcacagtaacctttacaaacagaaactatttttaagttctaataaatgaaaattacattgcaaatacggtgataattgcccatagacccccacacac

SEQ ID NO: 357554 - DNA, 201 bp, Homo sapiens
atgggatttttgtcagcacgtctgaaaaatactgaaatggcaattttaggttttctttggttttctctggttgggaattttaaattagttcaaggattgtytaataacaaaatgttccgataatagtatgtctttcataattgaaattatcctcatcctgaactgaatatattttcaggtaccaaacaagagaaattaagt

SEQ ID NO: 357555 - DNA, 201 bp, Homo sapiens
aacaaaatgggatttttgtcagcacgtctgaaaaatactgaaatggcaattttaggttttctttggttttctctggttgggaattttaaattagttcaagkattgtctaataacaaaatgttccgataatagtatgtctttcataattgaaattatcctcatcctgaactgaatatattttcaggtaccaaacaagagaaa

SEQ ID NO: 357556 - DNA, 201 bp, Homo sapiens
atatatgcattttttttcctgctgctaaaaactgatactgctttattttgaatgttaaaagattacatcctttggaaacatcattatgtttaattgtagcmtatattctgggtattttgagcctgacattttcctgcctccaacataaaggacagaaagaatgccgcttcttcctgtgacctgaatacactgtcagccctc

SEQ ID NO: 357557 - DNA, 201 bp, Homo sapiens
actatgaagtttcagtgagaaaatattaatatgtgcacatataatcctacctgggatctgtagactggagtttaaattcctactgattaatcctcacaggktctttatctggtattcagtaataaagaatggaaagttttttatatatcatatatgttcttgttcattcacttaaaaatcccaaacacatacgttagttca

SEQ ID NO: 357558 - DNA, 201 bp, Homo sapiens
ttagataacttgttttctgtgtaagacatatatgttatgtcttttttctcttcacatgtgcaagacaacctggatgcaaataaaattatttggttacaacsttttttcttacaaaacatatggtccctgcttttttatgttatggcatttagtgttactgagaaaagaacggaaagttccacctcaaggtcacttctttta

SEQ ID NO: 357559 - DNA, 201 bp, Homo sapiens
tttcaaaggctttatgaaagtgcttggggtggtgtgatgcatagttgacacataagacatgcaagggaatctctggtctccattgattctaaaaccttatrgtcagttctggagaggggaagacagctttaaaaagtacgtggtcatcaaacatctgttgaattcacatttctattgtagatctattttaacaaagaaggc

SEQ ID NO: 357560 - DNA, 201 bp, Homo sapiens
acgaaagttgtttagttaaagatattgtaaatgaactataattatgtagatttacgtctgcttttaaaacacttgtgctctttcactgatttgaaccttcrtatatgctttcatatttattttgccaaagaaactatagataatttgattccatagcaggatgttgaggaagactttttctcttgccttggaatcactgct

SEQ ID NO: 357561 - DNA, 201 bp, Homo sapiens
caaatgttaaacgttgctaccacctcaactaattctgtacccccatttggcagagtaagcaactcgagatcacatttgcagcatttggaattagaattcarttcaccctcaaattcactcaatctctcttaatttttttattttaaaaaaaggtaaacagaaagtaggtcaatcaaatcacattctcattttaacaggtcc

SEQ ID NO: 357562 - DNA, 201 bp, Homo sapiens
aaaatagattgtgaaaaataaaagtctatcaagatggggcaaacgtttaggggaatactatcaaaggtagtgttatgttcaataaaagatggctgaaatasttatgagactaatagacaaatggaaattatttacacaaacttctgtaactgcccagttctgtgaaaaacaataggaaaatcgaattcagaaaacacttat

SEQ ID NO: 357563 - DNA, 201 bp, Homo sapiens
atggagccccagaccctagcataatgcctggtatatgataggtgcttagtaaatatttgttgaataaaacaacctcttttttttttttttttttttttttktttttagtttgattttgcttgaatcctattttggctgatatcactgcttctttttttagcttgtattgccatatataacttgcattgtcattttattttt

SEQ ID NO: 357564 - DNA, 201 bp, Homo sapiens
ctcaagtgtctactaggtgcagtttcagcactgagcattttatgtacattttctcatttcattctcctcaaaaccctttgatattggtgttttcatcttayaccttttacaaatgagggaacccggcacagagaactcagataagttgcctaacatcacaaatcctgattcagcctgtgtattccttcccaatccagagcc

SEQ ID NO: 357565 - DNA, 201 bp, Homo sapiens
gtgctcctgtcagcagtatacggaaggacccctttgccaaaacccttcccagcattaaatgcttaacataccaaaagaacagaaacaccactctaatacaycactaactaatacattagttgacatttatttgatgaataatatggttgaacatttacattggtatttattattgtttccatttcttttgtgaactgcttt

SEQ ID NO: 357566 - DNA, 201 bp, Homo sapiens
aaacgtcagcaaaaattacctttacagagatcctgtaccactgactaagatacagtgagaagaaaagagcatattttttgtgacgtttctaataaaaatgsataacctgaagagacatcagacaaactcaaattgagggacattctataaaataactgtagtcttcaaaaggattgagattacgaaagtcgagaagagatg

SEQ ID NO: 357567 - DNA, 201 bp, Homo sapiens
tggcttataaaacaatacaaaagtctaagaaatatatcatttaatatgggcttccctttattcatgtctgccagcggttctaactaaaataaatggaagcrggatgttgcactgaggatttgctttgtagctctttaccagtttattagcctctatttgaagattttttttttatgaggccaaatccagactaaattaaat

SEQ ID NO: 357568 - DNA, 201 bp, Homo sapiens
ctaaataagtgattccttttaatgtgcatactgaaattttctcacatgacaaactgggacacatgaaatggaatttcacgcactattgaactgaattctcrgtagctgctgtgaaatgtttggggagttttagtggatttatccattttagtgaccatatttcccctcacatttgtgaaatgcattttgctgttattttag

SEQ ID NO: 357569 - DNA, 201 bp, Homo sapiens
atatatatgtgtttgtgtatatatatataaaatatatacatttaaattgtatttcaacttttagtgtcttattgagattaattcctagaagtaacttcagrttacaaaaggaaaccaatttttctctgtgtttaaagaaattaaagaaattaaagaaagaaaaaatatcatatagcacaatcttaaaacacttgtatttta

SEQ ID NO: 357570 - DNA, 201 bp, Homo sapiens
tctgcatttttaaaatcatcatattatgacatcactatctccttttaaaagtgttatgttttcttttacataattttaaagttccaaattattagacattytgatttgcatgcaactgtttgaaacattctgttgtgttagtatttgacaaatgtatttattgcatgatcatagttttccattgtaaacctaatatgaacg

SEQ ID NO: 357571 - DNA, 201 bp, Homo sapiens
taggaggactttggggttctgacggtttgatagctttttaaaaattacctttctttccccataccagattagagatgggggtggtggggagagagcttcascatcctctcgccagaacttccggttctctagctttttatacatcctactcacactcgtcctactgatttccacttaggactgcaactacccgtcctctct

SEQ ID NO: 357572 - DNA, 201 bp, Homo sapiens
actgagcagggaaagttttgagtgagggttgacatttcacatttagcatgtttttaacaacttttcacaaccgaccctgactttcagaaatgaaatgaaartggcagaatttatttgaagattcacaatctagaaacataaccactgctcttttgaggcacgccatctcagtggcaccactggaaagtccagattgcctga

SEQ ID NO: 357573 - DNA, 201 bp, Homo sapiens
taacttttctcttgtacagaatcatcaggctaaatttttggcattatttcagtccttggagacatctgagagattccgggatgccagtggtgcctctctgkccacactgacaacaaataattcacctaaggaatagttcacttcagctattttttgctactcattggttgtcagtgccattgaggagagctcagtgtagat

SEQ ID NO: 357574 - DNA, 201 bp, Homo sapiens
gaaactctagcaatagtatttatgcttaggaactagttctctaatagcagtgaccactgtttccagtggctaaacctaggggcctgcaaagctattggaayggacacagatcagttttctgaagaaaattctggcccagtcaatagatactctcatggctgaagcctgagcagatgtgagagggtcaattactgagacaga

SEQ ID NO: 357575 - DNA, 201 bp, Homo sapiens
gaaggctcccccatattggcaatcagacattgctgctggcaaccttgaggatcaaaggtgggacttgtctttaggcagtgattctggaaccacagctaaayccccaaatttggctctgtattcaccatataatgtaagttattaaaaaaaaaacaccttttcaaccattattcagattataagatctatcttactatgctg

SEQ ID NO: 357576 - DNA, 201 bp, Homo sapiens
cagagtgcagaggtcaagtttgggagctggaagaaggaagaaacatgaccagggagaaggtaagcagaaggggtgaactgaaactagatgctgaagacacraggtcataaacgtgaacaaggatcaaagccctggcaactcaagaaaactgctcaacccaggagaggccgctcaccctttacaacagaatacaaactttgc

SEQ ID NO: 357577 - DNA, 201 bp, Homo sapiens
gaaatttttcatcaaatgttataaattttgtttgattgtatcaatttgagatacggttcagtattttagaaccaatgtcttaaggtaggcttccatagttscaattaagcttcataagaaatataattaagttgaagcttggcattgtttggtaggtgtctggctggcaccacgttttccaaaaataagatttgtttgaag

SEQ ID NO: 357578 - DNA, 201 bp, Homo sapiens
agtctagaaaataaactgattggcacatttgttaaaatccatgttagttttcctgaagaactacacaccctaataaataacttacttatgttcaaaatgarttaaatgtggcaaataattccaagacatttattttacctaattatatgtggttgaacaactaggaacaaatattttacaagtgaaaaccataagacacat

SEQ ID NO: 357579 - DNA, 201 bp, Homo sapiens
ttttgtgaaataaacttgagttgtattcagtacacatatggaatagtaagttattacattttaaagatgacagtgatgtaatggtatacttatatattatrtttgcagatagatttttcacagaacaagattcctcggttttaattctacaatgtgatattggaattaaaaacaagtctcttatgtgtgaatattttatct

SEQ ID NO: 357580 - DNA, 201 bp, Homo sapiens
gagtatatgctccagtgctcaccaaaataagggaataaaccaataaaggggattcatgggattcaggaaaccagagttgcagccagtgaaacagcaatcaraatgacctgagcacacaagctaggcagagcctgctgccctcagtccaactggaacgagttccagtccaactggaatgagaggatttcggggaggaaagtg

SEQ ID NO: 357581 - DNA, 201 bp, Homo sapiens
gtcaatagttttatcattaatcctagagaggatgtgctacacaagtttaactctgcacatagcaaatatttgaactgagttgaattcaaatggaatgggayatgggatcagttaaaaatcttcataggagtcaaaagcagaaaaaaaggagatgatcttttgttaggatatttgctttattttcttctcaactaccttcct

SEQ ID NO: 357582 - DNA, 201 bp, Homo sapiens
ttatatttatacgttaaaatctttggaaaggcctaaactcagggtgttttgaaattatgtaaattaatatatttaggatctaatttattttatatctacaktagcttttccatgtataagtttcacaaataaataaacttcacaaataaaattaataaaagctaattaaaaatatcaaacacctttctttttcaaatgtgt

SEQ ID NO: 357583 - DNA, 201 bp, Homo sapiens
aacataatgtaatcaatcacagcagtaatccaccatcctctttgccaacaaatttaacctaatcaaggaagcgactctctcttcatattcataagtcctgytcatgcccaattggagggaattgtacaggatgattacatcatagggtggaaattttgggagccaagtcataattccacttactacataggtggtactact

SEQ ID NO: 357584 - DNA, 201 bp, Homo sapiens
atgttaaaagattacatcctttggaaacatcattatgtttaattgtagcatatattctgggtattttgagcctgacattttcctgcctccaacataaaggrcagaaagaatgccgcttcttcctgtgacctgaatacactgtcagccctctccaaagggtttgggcccagttagagcagtgaaactcagttcagcacatgt

SEQ ID NO: 357585 - DNA, 201 bp, Homo sapiens
acgttaaaatctttggaaaggcctaaactcagggtgttttgaaattatgtaaattaatatatttaggatctaatttattttatatctacattagcttttcmatgtataagtttcacaaataaataaacttcacaaataaaattaataaaagctaattaaaaatatcaaacacctttctttttcaaatgtgtaatttaatga

SEQ ID NO: 357586 - DNA, 201 bp, Homo sapiens
atactctaggtttggagagaatagaactatttaagttagcataaatacttatacatgaaagtaaaaaggtaatatatagtatctaaaatttagaagtcaaraattacaataagagtatgttatctgaaaatatggagttaaattacagaagagatagctgaaagaattgaaaatgtgacctgtgggacactggactggaga

SEQ ID NO: 357587 - DNA, 201 bp, Homo sapiens
tttagatttaaggaggcatgtgggtgtgtattgctcactctctgatatacaacatggttattttatgtttggtagtagtagttaaaataaaactatattarttgccttcttactaatgtactaaaggctaaatgaaagaaatttttcatcaaatgttataaattttgtttgattgtatcaatttgagatacggttcagtat

SEQ ID NO: 357588 - DNA, 201 bp, Homo sapiens
gagaaattttgtacaatttcctgaaaaaacgtcataatgaattatacattagtagacttaccttcttgaaggtcagtgggttgttactagcatttgttaargtcacatgtatgtaaacactgtactgcacctatgttttaaaaagtgaaatgaatattatttacttcttggaagattatatactacaaattgaactgttga

SEQ ID NO: 357589 - DNA, 201 bp, Homo sapiens
taattatttacacttgcatatttcagaagaatttcttagatctacatattcctccaattcacctgaaattgcatttttttttttttgtagaataaaacaaygggtaagaagaacattcaaaataacatttaaaaccaatctatatttaaaattgaaatcgattactggattgaaaggttatcctaatataagaagagttat

SEQ ID NO: 357590 - DNA, 201 bp, Homo sapiens
gtctctgaaaaggttttggtgactcgcccaaagcaggagccactgctatcctctgttgcacaccctctgtttctcccatcagagcactgactatgctttaygctctcagaggcttcctactcttaccttaagtctacttctatctagcctgagacacctgatttccaaacccagacaggagaagcaccaaattatatagag

SEQ ID NO: 357591 - DNA, 201 bp, Homo sapiens
ttttgacaatttgtacaaaaaaaaaatgaccaatgtcatcatgtcatgttttcctacaaggtaacaataatgatgctgcctctagaagatgtgataatgtratttacagctaatataatttagtcaattacttagtcaatcaggatttctttttcttgagcattatagtttgatcttttctgcctagcctcatgttatagt

SEQ ID NO: 357592 - DNA, 201 bp, Homo sapiens
aagatgagatttgggtggggacacagccaaaccatatcaaacaccgactatgtgctagtcttttttttttctgaagtactgggatgtagaaacaatgaatragcataattaatatgttaaaagaagaaaaatgaagcagggagagggcaaggagagttaccaagggaggaagtatactatttaacagggtggttcagcgaa

SEQ ID NO: 357593 - DNA, 201 bp, Homo sapiens; identical to SEQ ID NO: 76503

SEQ ID NO: 357594 - DNA, 201 bp, Homo sapiens; identical to SEQ ID NO: 76504

SEQ ID NO: 357595 - DNA, 201 bp, Homo sapiens
agaaaagctctttgagcaagtacattatgaatccaagtaattattattgaacagtgtcttaacttgatcccaaacagattgaacaagcctgggcccatccrataatctcacaagaggatttagaagtggttgatttgcttgaatggatattatagacagatatttcctatcatctgtagattttttttaaagtttagctaa

SEQ ID NO: 357596 - DNA, 201 bp, Homo sapiens
ccaggtagtgacattgatacgttcttgctagactatgctattatagaaggatatatataatgagatgctaaacctaaaattattgactaaagcttagcaartttctcttcagtgcactaattagttttatttaattatcaagagtgtgttctcccactaattaggataaaacaatatgaatatgacatccaacattatcaa

SEQ ID NO: 357597 - DNA, 201 bp, Homo sapiens
ataattatttgtccctcagtcaaaatagaaacttaaggaagaggttgctaaataagaaaataaattctaccaattctccagaaaatccctggcatttcccyaaccatgcttttatcagccctgctaaggatgaaataactctgtactgatgaaaaattatttgcgtttctttacactcagttttatcagtttcactgacct

SEQ ID NO: 357598 - DNA, 201 bp, Homo sapiens
ggaagaggctgtcttcatcttttgaagctcatttcctggtaatctcccctgcctgctctcagcttcagccattctggcctttttgctgtttttccaacacrtggggcttggtcttgtcttaggaactctgcgcctgtgccagcactgctcttccctcaggtgtctgcagacttcttcgctgatctctttcaaggctttgct

SEQ ID NO: 357599 - DNA, 201 bp, Homo sapiens
ttcatctgttttataagcaggaaatacctgaaaataaggaatgtcaagattctagtatatgttattagaagtgaatggcattcatagtcatggaaaataawgttaaattattaaatgctatttaaagccacagaagttctagacatcgaataaaaataagaatgatacaataacttagctaatgacaacaataaaagcttt

SEQ ID NO: 357600 - DNA, 201 bp, Homo sapiens
aatgtttctagattgcgtacatttaaaataacttttcatgtctaattctgatgcacatctttagcaaatatgaacagcaaccttgccactgtctctgattsttaacttcttccttctcttatcctttccttatcttatcttctttccttttcttatcctttcagagcctcttccttttctgaaacttagatgggagatagg

SEQ ID NO: 357601 - DNA, 201 bp, Homo sapiens
gatggttatgaagttgataacgtgtttagcactggtttgtactcattctgtatccaggaatctctttttattcattgtgttaaatattcatgagcacttaytctgtgtctgatactatgatgtagaggatcgaagagtgtactagtttctgctcttaaagtaatccataggcagaagagagacatacaggtgtatgttcat

SEQ ID NO: 357602 - DNA, 201 bp, Homo sapiens
gatcccagcacttttggaggccgaggcgagcagatcccttgaacccaggagttcaagagcagcctgggcaacatggtgaaaccctgtctctaaataaataygtaaaagaaagaaacagaaaccagacatttctgtttttagctgtgggttgctacacctctgtgaaatcataggtgtttaccactgtcttaaatcactggt

SEQ ID NO: 357603 - DNA, 201 bp, Homo sapiens
attatcaatatagtgtccctatccactgttctttgatagcagtcaagtatgggaaacaatataagagatggttatgaagttgataacgtgtttagcactgstttgtactcattctgtatccaggaatctctttttattcattgtgttaaatattcatgagcacttactctgtgtctgatactatgatgtagaggatcgaag

SEQ ID NO: 357604 - DNA, 201 bp, Homo sapiens
tgtcctgtatgtgactctttgaaactcatcccattgagaagcagggtctatggtccctcctcttggatctatggtgaaagtgatgctatgtgacttccaakcccaagtcacaaaagaatcagtttctgcctgattctcttggaatgtttgctcctggagcagccccaccatgctgtgtcaaagctgcatagccatggaaag

SEQ ID NO: 357605 - DNA, 201 bp, Homo sapiens
gacttctcaggggttttcacttcttagtgcctgcttcacttcctttgccccagcttcctgataaaccttctctgtccagttaaacaaaggcaaggaacctsctcatccaaaaagagaaactacttaaatatactgttactgaatagactgttagagaatcttcccctgggctgaaaaagtagacacaagtttagatacctt

SEQ ID NO: 357606 - DNA, 201 bp, Homo sapiens
agttgggggactgaggaagaaatatggcagcagagactgagggcagagtggagcctggcaccaggaggagcaggttcccagttcattgtgatgcacctggyggctcccctggggccttccccacccagagtgttcctctttctcaaatgcctacatgctttgtcctggaaacaacagagccccagcaactccatagtgggg

SEQ ID NO: 357607 - DNA, 201 bp, Homo sapiens
taaaaaatcattatcaaggagcaaaaagatagaaaaatcatttctattattcagacaaatttttattaagtgaagcatattttaatgactgaggcacagamtcacaaaaattattttgaaatatagtgagacacattttgacttagggattttatttcctttatcccttaggaggaatgtgtatatggctgtttatcctgt

SEQ ID NO: 357608 - DNA, 201 bp, Homo sapiens
gttgtatttatgcatataacatactcatatatcattcagatttttatgttcagtcaacttgtgttagaatatgaaggagtaaacttctcatcaactccctrgcttgccttctaccttaatgatattttaaacttactgacaaaggaaaatttaaagtgtggatattattagtttaatcaatactcattggattgtacagcg

SEQ ID NO: 357609 - DNA, 201 bp, Homo sapiens
tgacatccacccaaactgtatttgaagctcaggcccaagctgtctatataccttcaagaaataacataacctggggctctgtttttttcaacggtgaaatrgggggctgttctgagcattaaatgagataaataaagtgtgaagcacttgtcacagagcctgcttctaaacagaaagctctcaacaaatgttagctgctgg

SEQ ID NO: 357610 - DNA, 201 bp, Homo sapiens
gtgcagatcaaatagatgcttcacattgttgcagaaaagctctttgagcaagtacattatgaatccaagtaattattattgaacagtgtcttaacttgatsccaaacagattgaacaagcctgggcccatccgataatctcacaagaggatttagaagtggttgatttgcttgaatggatattatagacagatatttccta

SEQ ID NO: 357611 - DNA, 201 bp, Homo sapiens
tgggtgggaaaacagccaatccatattatgcccataaaacatcttgtacaaaatgggacacagtgacgaattgctaataatgattagcacttctcagcacrttgaagtagagtaaggaggttacactccagatgcttttttaagctgttgtagacatctgagcccagtgcctaaaatacatttcaaagcagtgctattaaa

SEQ ID NO: 357612 - DNA, 201 bp, Homo sapiens
gcctcccaagtagctgagattactggcatgcgccaccacacccagctaattttgtatttttagtagagacagggtttcgccatgttagtcaggctggtctygaactcccgaactcaggtgatccgcccacctcggcctcccaaagtgctgggactacaggcatgagccaccacgctccaccgaaagttttttcttaatgga

SEQ ID NO: 357613 - DNA, 201 bp, Homo sapiens
agcctctacctcctgggttcaagcgattctcctgcgtcagcctccctagtagctgggactacaggcgcatgctaccacgcccgactaatttttgtattttyagcagagacggggtttcaccatgttggccagactggtctcgaactcctgacctcaggtgatccgcctgccctcacctcccaaagtgctgagattacaggc

SEQ ID NO: 357614 - DNA, 201 bp, Homo sapiens
ctcatctctactaaaaatacaaaaaaaaaacagccgggcatggtggtggacacctgtaatcccagctgctcgggaggctgaggcaggagaatggtgtgaamccaggaggcggagtttgcagtaaggcgagattgtggcactgcactccaacctggatgacagagcgagactgtctcaaaaaaaaaaaaaaaaaaaaaacac

SEQ ID NO: 357615 - DNA, 201 bp, Homo sapiens
aatcaaatgctgaccatcataatttgacaatttacaagtttacataattaagttagttttcctcttgttagtgtaagcagttttaaataatagaatagacrtgcatatatgtatatatacatatgtataatcacatacatctgcataaatacatacgtaaatatatatattctttggtcatccatattaggagcctactca

SEQ ID NO: 357616 - DNA, 201 bp, Homo sapiens; identical to SEQ ID NO: 76506

SEQ ID NO: 357617 - DNA, 201 bp, Homo sapiens
gggcaagtgtaaactaaaatgtaggactcaagctctgtgggagtcagaaaggaaaggaaaagggcattccaggcagggacacagcaggtgcaaagatcggsaagtagaaatgagctgtcttttgagtaaaagctattggatgtttcggacacagtgaggtctggagcatgtattaatagttgcatgtagttggacattggt

SEQ ID NO: 357618 - DNA, 201 bp, Homo sapiens
catgggtcaggagtctattttgttataataagaaacaaacaaacctggtttctttagtctgtatcccggtgattccaataattgccaaagattctttttcyttttttgctaaagggttcatgcttagcagagtgctttgaacataatccataatccataaatgtgtgttcaacaaaaataaatattgcttttctccccgtt

SEQ ID NO: 357619 - DNA, 201 bp, Homo sapiens
gaattccatttttcctagtaaatgcatttatagttataagaccaaacatcttgggaagtgtgtgtgccatttatattcctgtgatacattacatttatttatttatttatttatttatttatttatttatttatttatttattttgagatagagtctcactctgttgcccaggctgtagtgcagtggcgtgatctcagctc

SEQ ID NO: 357620 - DNA, 201 bp, Homo sapiens
acctggtttctttagtctgtatcccggtgattccaataattgccaaagattctttttctttttttgctaaagggttcatgcttagcagagtgctttgaacmtaatccataatccataaatgtgtgttcaacaaaaataaatattgcttttctccccgttccccactgaacttgttgaccaaattttttaccacattgatat

SEQ ID NO: 357621 - DNA, 201 bp, Homo sapiens
aattccatttttcctagtaaatgcatttatagttataagaccaaacatcttgggaagtgtgtgtgccatttatattcctgtgatacattacatttatttatttatttatttatttatttatttatttatttatttatttattttgagatagagtctcactctgttgcccaggctgtagtgcagtggcgtgatctcagctca

SEQ ID NO: 357622 - DNA, 201 bp, Homo sapiens
attccatttttcctagtaaatgcatttatagttataagaccaaacatcttgggaagtgtgtgtgccatttatattcctgtgatacattacatttatttatttatttatttatttatttatttatttatttatttatttattttgagatagagtctcactctgttgcccaggctgtagtgcagtggcgtgatctcagctcac

SEQ ID NO: 357623 - DNA, 201 bp, Homo sapiens
ttccatttttcctagtaaatgcatttatagttataagaccaaacatcttgggaagtgtgtgtgccatttatattcctgtgatacattacatttatttatttatttatttatttatttatttatttatttatttatttattttgagatagagtctcactctgttgcccaggctgtagtgcagtggcgtgatctcagctcact

SEQ ID NO: 357624 - DNA, 201 bp, Homo sapiens
tcagattaccattgattgataggacctatgtctacaagtttaagacagtcatcacttttttcatcatgcctgatggataattagcaggtgacgtagttatsaacacttagcacatagacgtgaagacattcactgcttatactgaacagatggactacagatactgaatcttgtcatacattaaataatatgccttgaaat

SEQ ID NO: 357625 - DNA, 201 bp, Homo sapiens
tatttatttatttatttatttattttgagatagagtctcactctgttgcccaggctgtagtgcagtggcgtgatctcagctcactgcaacctctacttccygggttcaggccattctcctgactcagcttcccaagtagctgggattacaagtgtgcaccaccacgcctggctaatttttttattttttattttttttagt

SEQ ID NO: 357626 - DNA, 201 bp, Homo sapiens
acactactgtgaacactagcaacatattcaacctcaatgccaacatgttttaatttaccattttatattctatgagatgctgccttcttcccattcagtcrtagttattggtacatcctctatcgatccatctgcccatccagccacccattcatccatccttctctacctatatatcttatctctccttccaaaatgttt

SEQ ID NO: 357627 - DNA, 201 bp, Homo sapiens
aagaatgcattcgattcaaataagaaagtatggctgttctggtcacacacaagtctgttatacctcgctggatatgctagaatgagagagtctttaaataycgaattgattctatttctgtaaatagaatatcctgtctaaatagtctttccattttgataactgtatgtagaaaatgctacttatagaaaacaaaaaggc

SEQ ID NO: 357628 - DNA, 201 bp, Homo sapiens
tgttaaaagaagaaaaatgaagcagggagagggcaaggagagttaccaagggaggaagtatactatttaacagggtggttcagcgaaagtctctcctgtaratgcttttgaggagagatttgattgaagttagaaagcaagtcatttgagccttacagacatctgtggagagtattgcgggaataggtgatagccagtgtc

SEQ ID NO: 357629 - DNA, 201 bp, Homo sapiens
tgtgttattccaaggcacaaagaacattatcactttctaactgagccataatatgaaatagtttgagaagctttgcattaggggaagtgacctcagaaagktttcatctgtagcaccagcaaggtgcatggaataaataaaatatctggatgttttattaatttggcccttcttgtgtgtttatagtcattgaattaattg

SEQ ID NO: 357630 - DNA, 201 bp, Homo sapiens
actgtgcatatttaaaacacaatgtattcaaacactctttgggtacagacctagactttaagatgattttcagtacctattgattctggttgatgcctcaytatgagatgtattaccagattttccatgactgtatagacggcttcatggtgtgactaattattatttattttcagggcaaaattatgcaatgttattttc

SEQ ID NO: 357631 - DNA, 201 bp, Homo sapiens
tagagacaggtctccctctgtcacccaggctggagtgcagtggtatgatcagagctcactgtagccctgaccttctaagctgaagcaatcctcctacctcrgcctcctgagtaactgggactacaggcatgtgctaccatgcctggctattttttttttcttcaaatttattgtagagacggaatttatctatgttgtctg

SEQ ID NO: 357632 - DNA, 201 bp, Homo sapiens
cttgctctgagaccggagaggcttctgggaattttatcctcacaagaaacattcatttcatttaaatagtatgtgaagcaagacatttaagttagttagargtgcatatcatttaaaatggcaggagatgacagtttctgcaagccatttctgaagttaaaaaacaaggtagtttaaaataaattgtatttcagcagtcac

SEQ ID NO: 357633 - DNA, 201 bp, Homo sapiens
tacttataatcccctaaacctcaatcatgtaaaatcttggccttacccgttctcattttcagaaagaaaagcattcagaagaatataaaatgaaaactacrctgccactcctttcttccttgtgatggccatggaaatgctagcgtttaaccagagacttggactctcaatatttcaaatgttttaaaagaactttaagta

SEQ ID NO: 357634 - DNA, 201 bp, Homo sapiens
aaatggcaggagatgacagtttctgcaagccatttctgaagttaaaaaacaaggtagtttaaaataaattgtatttcagcagtcactattttcttaatttrccaatgaacttgaatgacatattaaagaactttaggcattatactctggtttgtgatccgcttgaacacaaaatgcatattatgtgatcttatttccaag

SEQ ID NO: 357635 - DNA, 201 bp, Homo sapiens
cttgcaggtgtaggataatcatacttatttctcttttttgggagctagattattgaattgtaggcttttaagaaataaggggacttccaggaagttgatastgttgggtagaattgatctcataagctaattagaatttttgcagcccatttgcaacaaaaatagcaatgccctttttcttagatttttattaagagagat

SEQ ID NO: 357636 - DNA, 201 bp, Homo sapiens
catggtaaatttcaaggagaaacataattctgagcagcaagaggaaaagttctcagaaaccttaaactaacttttataaatgcaaacttggtcgagaaaaraagggcacagagcataacagaatgaacagaaagaacttgtaaaacatactatataagtgctctttttactttgaaaaaaaaaaacagaccacttaaacat

SEQ ID NO: 357637 - DNA, 201 bp, Homo sapiens
ccacaaatttcctattttgaaagttctatatatttgtttaatatggaacatttacatgtcatgcactgggctgactgctgggaatatagaggagaacaagrctgtccagtccgttgcttgcatagaatactgctgttgcacttagtactagagcaataccaattatgatagcatcacttaattaaggttgggcaactgtgt

SEQ ID NO: 357638 - DNA, 201 bp, Homo sapiens
attgatggtttagaacccattctatggtaattgtttatacatttctcttcccattctactccatgaagtcctcagcaccagagactaacttaccacatgayatgtaaatgatgtacaattggcaaagagatcttgagagtctctgtatctgtttgtagggggaacccaccaacaaacagctttgatatagtggttcatctc

SEQ ID NO: 357639 - DNA, 201 bp, Homo sapiens
cgtaatttatgctggactttgaatttccaaccttcataaggacatatgtacatttttaaaaaggaacacattaacagcaatgattctgtaattgatatagwgtagatgttttaaaattttattgtgataaaaacacataacttgaaatctaccttcttaaatttttaagtgtacagtatagaattgttaattatatgcacg

SEQ ID NO: 357640 - DNA, 201 bp, Homo sapiens
tgggtaggttcactagatcatctttaagattgtagccagcgaggcatggtggctcatgcctgtaatcccaaaactttgggatttatatatatatataattwtatatataattatatatatgtataattttatatataattatatatatataattttatatataattatatatattatatgtataattttatatataattat

SEQ ID NO: 357641 - DNA, 201 bp, Homo sapiens
tcactgcaacctctacttcccgggttcaggccattctcctgactcagcttcccaagtagctgggattacaagtgtgcaccaccacgcctggctaatttttktattttttattttttttagtagagatggggtttcaccatgttggccaggctggtcttgaactcctgacctcaagtgatccgcctgcctcagcctctcaaa

SEQ ID NO: 357642 - DNA, 201 bp, Homo sapiens
tttaccattttatattctatgagatgctgccttcttcccattcagtcatagttattggtacatcctctatcgatccatctgcccatccagccacccattcrtccatccttctctacctatatatcttatctctccttccaaaatgttttgagatttcaagttatcccaattgaggctaaggtaggtaagggaatccaggat

SEQ ID NO: 357643 - DNA, 201 bp, Homo sapiens
acatgggtcaggagtctattttgttataataagaaacaaacaaacctggtttctttagtctgtatcccggtgattccaataattgccaaagattctttttctttttttgctaaagggttcatgcttagcagagtgctttgaacataatccataatccataaatgtgtgttcaacaaaaataaatattgcttttctccccgt

SEQ ID NO: 357644 - DNA, 201 bp, Homo sapiens
gctactcgggaggctgaggcaggagaatggcgtgaacccgggaggcagagtttgcagtgagccgagatcgcacttctgcactccagcctgggcaacagagygagactccgtctcagaaaaaaaaaaaatgtgaagggcagggccaaggcttattttaagtttcccatagctcctggcacaaggatgtgcatttagctgatg

SEQ ID NO: 357645 - DNA, 201 bp, Homo sapiens
tctgtatagtttctgccacaatctggtttcatttctgctcatgtgggccttctgtaggatagtttctgtggccctcatgtctctcattcctcatcagtctrccatactctccattttccaggatattaacctagttaggagggtccctttgacacttgtttctgtatccactcacctttctcttattcgacctgctctctc

SEQ ID NO: 357646 - DNA, 201 bp, Homo sapiens
taactgaatgtaattctaattgcagcgagaagccattcaagaattttatctaaaggaactaatttactagaaaaaaataaagatttaggtgtgtcactatrtaagaacaaatgttacattaaaactcattaggataaatgccttgtagcttgaaggtttagatggaaagtgagattgtcgttttcagtcaaacagaattca

SEQ ID NO: 357647 - DNA, 201 bp, Homo sapiens
tttcttttcttctctggctctatccaagatggcaggacattttgggtattatagccacagtggaagaatatgtagggcattgaggtttcctatattaacamagtatcactttgaacccagctacaacttcaaattctgtctgtgcttttagcatgcctgatatctacttgctcttctgcatctgctacaggtaaaactgag

SEQ ID NO: 357648 - DNA, 201 bp, Homo sapiens
cagattaagtcaatgcagaaaatgtggatgggaaaaaaatgacaaaaataaggataaagtcttgttcctttctgattacttgagtttatgtgagaaaaggkttttttttttttaacctacattagaagaaaagatctataaaattgtggtggtaatagcaggaaaagccatgaacacaaacaatatatggttgcttgaaat

SEQ ID NO: 357649 - DNA, 201 bp, Homo sapiens
tgcaggataacatcaaggggtttgaaggacatttactaggactaatgacttacatgtgacaaatcatttctgttttcttatctaattataaaagcttctamgcaagatccttctataagtgtgaaggtagaattacacctttgtctagtgtttcttaagcttgactgactaattcaattttagtattcagatccactcatc

SEQ ID NO: 357650 - DNA, 201 bp, Homo sapiens
tccttttgtggcctgagcatgtcagtattaaactttgctctggtagggaagtgttggccatagattagggtgtagttgacaaaccttcatctggatgtagrtccagaaagtccccactgcaggttaaaggacactggactctgcactcaggcacctagagtcctgcaagtcctgggaacctgcatttaaataaaaatgcac

SEQ ID NO: 357651 - DNA, 201 bp, Homo sapiens
tatccttaatgaaattctccatataaatgttttctattatttacagagagaaggaaaaaatgttttcaaatgtaaacatctatttgactgtaagacattamattgtacagttttacaaaaccgaaattacactatttattatgcgtggtccacactaaaattgaaactatattatttctacattttttctcagaatttaca

SEQ ID NO: 357652 - DNA, 201 bp, Homo sapiens
taagtatattaattaatattcagcctgagagatctttctctccctctgctttgcaaatctggcccatgaagagatatttattactctgcttcgttagtaawatatcataaaatgttatagtttttcttttccaaattagtccaaactatcacattataagtgcattttggaaagtaccagggcactctctgatgggactaa

SEQ ID NO: 357653 - DNA, 201 bp, Homo sapiens
agagagaaggaaaaaatgttttcaaatgtaaacatctatttgactgtaagacattaaattgtacagttttacaaaaccgaaattacactatttattatgcktggtccacactaaaattgaaactatattatttctacattttttctcagaatttacatgcaacatccaggcatgttaaagaaagttgtccatcaaaagatg

SEQ ID NO: 357654 - DNA, 201 bp, Homo sapiens
catggtacatcgtaagtgatatgtaaatgttggctgtcgttgttattgtgcttgttattattattattagctggagtttgtatccctagctggctggccartatgttgtattcagtccctgatgccaaagtgatttatccctaatggaacagagactatttaaactttattgagggacatccaaatctttcactgggctct

SEQ ID NO: 357655 - DNA, 201 bp, Homo sapiens
gtagaagtctcactcagtagagtaacatcatgtagtatacacctaaattaaaatatattttcttattctgaattcatgttttttgacaatgaaataatttytcttttatttctaaaggaacaccccaacctaagccctccctaaacaaaaaataacatcaaaggtttgaagtgaaaaataatttctaactgatataaagct

SEQ ID NO: 357656 - DNA, 201 bp, Homo sapiens
gaacaaatcagatttctgaaatacaggttttgattgataataaatgtagagaaaattggtaattgttgcttaacaattgaatgctgagatttagttagaaktatacaaataattgaagttgtttcagaagctactttataagtgataggtacgtttatttctgttaaattatgctctctaacacaatttttttattcacgt

SEQ ID NO: 357657 - DNA, 201 bp, Homo sapiens
taaattactgacaacatatacaaattcatggttttcataactataaaatcattttgaatattattaagcagtccaaaataattaaattaataaaataactycatgttttcacttttaaagttttttcttaattctatctcttttaactcactgcctgattcaagaaaattttacattaactgaataattagcttagtaact

SEQ ID NO: 357658 - DNA, 201 bp, Homo sapiens
atcgcaattagataatcattgtttattttctctgctagtaaaactaaatgctaatgtgtctcccctattaaaaaaaaagttaaaattgcatagattctttmctgagtccagcttcacaagtatcattgctggtagcatctagtagaagcttcaatgggatgggcaagtcctagcagctcagaatgaggaaacttggcccct

SEQ ID NO: 357659 - DNA, 201 bp, Homo sapiens
agtagaagcttcaatgggatgggcaagtcctagcagctcagaatgaggaaacttggccccttcttcttctgtctgagctggaactgtctgggctttgtgtrggacgcattgtgcttcttccccttgctgggcctcctttacttcaatctctgtggtttttgtttgttcgtttgttcgtttgtttttgtttttgttttttgg

SEQ ID NO: 357660 - DNA, 201 bp, Homo sapiens
gctaaataatactattatggtaagataagttagtagcatataataacataatacataaatataataacacattatttttgtcatttgatgaattgtgtttkctactcccttttatatactttttcttacacagattgggttttcttctcacttctaatattatttttagctcgttcctttaattgttatttgtatatacgt

SEQ ID NO: 357661 - DNA, 201 bp, Homo sapiens
tcctcacttttaaaagaaatctaggtaagaagagagagtaggatgaaagttaaaagtgtgaagatggatagtgatctgtcaccaaaaataagttcctagtsatctatgaagatcctacatgagcgctccctggactgtcaaatcttgagttctgtgatttctcacctcttgatcctcatgccttttcttctacctggaaca

SEQ ID NO: 357662 - DNA, 201 bp, Homo sapiens
atttatagatatattcactgattatctgatcaacgtaatttatgctggactttgaatttccaaccttcataaggacatatgtacatttttaaaaaggaacrcattaacagcaatgattctgtaattgatatagagtagatgttttaaaattttattgtgataaaaacacataacttgaaatctaccttcttaaatttttaa

SEQ ID NO: 357663 - DNA, 201 bp, Homo sapiens
tgtgtgtgtattttgtcagagcactgctgctagaatttttagtagaatgcagttgataaattgttaatcaatatgaaacagagactttctttagggtaagrccacaatcagaagcatttttagaattcaaaatatttataatgattttttttagtagaaaatcagcaccctgattttaacttggtgggggggtggtaaaaa

SEQ ID NO: 357664 - DNA, 201 bp, Homo sapiens
attactattatttttactgctgagttgtttgagttcctgaactttcttttacctattacaatccagtgtcaagaagatagtgtattaatttctttgtttastttattgatcaatgtttattgataatatctgccttcatgcctacaatgaagcaaaaccttataatactgctttctgtatttcttcaagattccatagcca

SEQ ID NO: 357665 - DNA, 201 bp, Homo sapiens
tacattttttcatgatctccatccactgctaccacctatccacacttgcatcatgtcttcttgggttatttcactggcttcccagctggtctccctacttyaccatacaaatcagccagggtgattttgttcaaatgtaagtcagattatgtcactctccaatttcttgtttaactcagaataaaagccaaaatctctact

SEQ ID NO: 357666 - DNA, 201 bp, Homo sapiens
ccacttttaattcttccatctctcttacagcctacacataatcttccattgcaaatgtcagtattgctcctgggttacattttttcatgatctccatccaytgctaccacctatccacacttgcatcatgtcttcttgggttatttcactggcttcccagctggtctccctacttcaccatacaaatcagccagggtgatt

SEQ ID NO: 357667 - DNA, 201 bp, Homo sapiens
atgattgggtcagaactttggggatgtaagaaaacatttcttacaaaaagatccacccctgcctccctccaccagcgcatgcgaataaagtacagattccytttgtggcctgagcatgtcagtattaaactttgctctggtagggaagtgttggccatagattagggtgtagttgacaaaccttcatctggatgtagatcc

SEQ ID NO: 357668 - DNA, 201 bp, Homo sapiens
cctgccatctcactagccacatacattgtactccactgtcttcctcaatctctttttctagttccttctcatccccccaacttctaaacattgtagtcctkagagttcttccttgggctacttctgttttgcatctacactatttgcatgactatctcatccctgtattctctacattgataactcccaaatttgtctttc

SEQ ID NO: 357669 - DNA, 201 bp, Homo sapiens
aaaagattcagctctatcttatagaaaggaaaccctttggcaagatcataaactacatatagaaatataggcttttctgttaataacattctaaagtatgyatgtttttttcaccataagagcctgtgtctccacatctaaaataaaagatttacctgaagcttgatagcatacaactatattgttgattaacaataaaca

SEQ ID NO: 357670 - DNA, 201 bp, Homo sapiens
tcctttggagacggtattagtcataaaactatgtatggtctttgtattaggataaatttactttggcttctgaagtttttgataaggatatatcttctgtrcaaaagcagaaagggctgtaaaatactagagaatgtagacaaaggtaccataaattactttggaaggacttcttgccatcctgaagcaaggttttgtgtg

SEQ ID NO: 357671 - DNA, 201 bp, Homo sapiens
tacagccattggttacctgttgctgtcaatagctgtattgtcagcattttatcatggattgaatgctttaaaatttttgagcagcataaaagatttgtagrggaaaacctattttccttagaaacgagagacagtgttttttgatgcttcaaagtcttaaaaaatgtaggaatattagagttatgccttgccctgcttggt

SEQ ID NO: 357672 - DNA, 201 bp, Homo sapiens
ctacagtatcatttattcacttaaaaagctgttgtcatgttcattatttgtacaatgaaaaaatgggagagatgcattttattgcaggcttctactgttgktaaagcactagatttttccactttgaattgttcaaaattattagtttatcaaacaaattgaaagaaaagccagggttctgttgctaacttttgaatgaaa

SEQ ID NO: 357673 - DNA, 201 bp, Homo sapiens
tgattaaggtgttcttaaataattgttgaatagaattatggatgcacttcaaatctcatttgctagcattgtaatatatttaatacaaacttaaaaaaacmaaaacaataaaagataaaatagttgtcaggacagagtagcataaagggagtgtctttgtagcataatattttgacctatgagaaattttgtacaatttcc

SEQ ID NO: 357674 - DNA, 201 bp, Homo sapiens
ttcatctcctaaaattcatcttcgtgctccctccccactccaaaaacaaacaaacaaacaaataaacattctacttataccctttctatatattcagtggygtggcccttcctggcttcataggaccatggtattaccaacgaggttatttaaattctggtttcattctagttctgaaagccaatggagctgcactcttct

SEQ ID NO: 357675 - DNA, 201 bp, Homo sapiens
agaagctctccactgttcacagcccttgtaaccaaccttaaaattccatttaaaagaccaacttcagatgtcaacctctatagaaacttttatctcaaacyaaaacaatttctgttttcatatccctccactacattgcacctctcacttgacacctgtgtatataccctagtttcacctattaccttagaaatgttcctg

SEQ ID NO: 357676 - DNA, 201 bp, Homo sapiens
tgcttaatgtcatgttattcgatagagaataaaaatggtaaagtaacagtaaataatttttaagagagcctatgactaaaaattttcatattaaatgacaytcaagctattttacttggtttatctcctgagtgaggaaaggaattcatgatgggagtgtaccttcagggtggaataggtagattcagataggtttctaac

SEQ ID NO: 357677 - DNA, 201 bp, Homo sapiens
taaaaattttcatattaaatgacactcaagctattttacttggtttatctcctgagtgaggaaaggaattcatgatgggagtgtaccttcagggtggaatrggtagattcagataggtttctaactctttagatgtgaagggcagggctgggcgcggtggctcacgcctgtaatcccagaactttgggaggctgaggcagg

SEQ ID NO: 357678 - DNA, 201 bp, Homo sapiens
gggacaccattcaacccatgacaccagtaactgcagctatgtcatgaatgagccagataaattttatctgttttgtgaccccaaatagggaatatcctttraaatgacactggtcacagagaagatacagcaaaagtctaagtagagtggtccacacacatccttgctagcaaaaatctcaagttcttcatatacatagtg

SEQ ID NO: 357679 - DNA, 201 bp, Homo sapiens
tccaggtgagtcctcttggaagcctcttggatgtcactacagaactgaatgtccctgcatcttctcatttgagttgacagggtcacgttgagtgggcagtrtgggtacaatgactttgtatttgagccatcgttgttccttactgtgggctacagtgccacatggtaaatttcaaggagaaacataattctgagcagcaag

SEQ ID NO: 357680 - DNA, 201 bp, Homo sapiens
taaaaccttgaaaaggcttcactttacttgggattttctacactagcctactaccctgcatgtttgcatcacctggggatgctttttaaaaatctagatgmccaggcctgaccactagagatcttaatgcaaatggtctagcgtggggcctgaggcattggtatttttctaaaactccctggattattcacataaggatta

SEQ ID NO: 357681 - DNA, 201 bp, Homo sapiens
ccatgatcgagaattcaggaagaggaggtggtacatgcttgagaggtgtggtgagggagaagacgtgagatatttccaaatctaccttatttttaggttaytgggagatgtcccaataaacatgtatatttggcagttggatactggttctgaagcataagagaggtctggcctgaagaaatggatttgggagtgatcagc

SEQ ID NO: 357682 - DNA, 201 bp, Homo sapiens
tgcggggctgtgtactgtactgtcttttttgctgttcatttttatgctataggtatgatgggcttaaatggaaagtacacgtgtctggtgtgaattgcagmcacacacacacacacacacacacacctgaaaggtagtaacaggcacaagcaccaacctgacttttcagggttttttttattactttcaatttagtcatat

SEQ ID NO: 357683 - DNA, 201 bp, Homo sapiens
gaggaattaaagacaattatataactcttaaaaattgtttactctggatagaatgattaagataactataagaaaactttgagttagtaagatttgggggktgtttatttggggtttctttgcttatgttttaatatgagacatgagagcttctttaaaaactaatgggaagggagataattggagtgtacagagaccctg

SEQ ID NO: 357684 - DNA, 201 bp, Homo sapiens
cacctgaaaggtagtaacaggcacaagcaccaacctgacttttcagggttttttttattactttcaatttagtcatattcaagtctgcgcaattacttacaaaaaaaaaagttccatctaaatctctaggtttggtcagtgctgccaaagtcagaggagagctgcaggttgatatacttattcacagatttcatttttcat

SEQ ID NO: 357685 - DNA, 201 bp, Homo sapiens
ttatgtaagtaaatatcacagtagcaaggaaataaaccagagagtattgctttgtatgtcttcaaaaccacatgcccagagcatgttgcggatctctttgaaaaaaaaaaaaagataaaattcacacattatacaattcatctttttaaaatggtccagtggtttttaatatattcgtgaagttgtgcagccatcaccact

SEQ ID NO: 357686 - DNA, 201 bp, Homo sapiens
tagggctctagttcgtgaaatagacacatttcataaaagaaaaagggaagagaaaattacatggctaattaaaagaaatctaagtctaggctgcagtttgyattgtcacacaaaattcacttaaatgtgttacacttttaggcaaaatgccattataataattttatgttgacctgtgttgccctccaatttcatgcatca

SEQ ID NO: 357687 - DNA, 201 bp, Homo sapiens
gattttatttcctttatcccttaggaggaatgtgtatatggctgtttatcctgttatctgtgaataccatgtgacaactaaagaataaaaatatcaaactwttaaagaattaaagttagttttattccgaagcctgactgaggactatagactgaggcctatagccgggagcactgctgctgcacactgttgcagccacgg

SEQ ID NO: 357688 - DNA, 201 bp, Homo sapiens
gtggggacacagacaaaccatgtcaggaactaatgtggtttttcccaatcctgaaattctttgatggacaagttatcatcagaagacaggataatcagaaytcaacatacttgatttgacagagcatggaatagaaacctgatgccagatagtgataaagaagcaaagtaaaatccaagatagtaggcttgcaatgaaata

SEQ ID NO: 357689 - DNA, 201 bp, Homo sapiens; identical to SEQ ID NO: 76501

SEQ ID NO: 357690 - DNA, 201 bp, Homo sapiens
cagaaatgaagaaatatgtctttataatacatatactaaataaatatatgtatttttatatatgcttgtatacatacctgtttgcatatttgtaagtgctygaggtaagttcaaggtggaatgggttgaaaggagaatgtttaggttatctgaaataatataaaccaaattcctctcaatttagttaggaggttagaaagc

SEQ ID NO: 357691 - DNA, 201 bp, Homo sapiens
cacgccttccaggcatcagatgctttcatgctgccttcttaccaccttacaaggtttttctgctaagaagcagggacctgctaaagcacaggggggaaaawcagaccttaaagttcagtagacttgattttaaactccagcaccaatacttattagtcatataaaaattgtcaacttacttaaactccccaagcttcagtt

SEQ ID NO: 357692 - DNA, 201 bp, Homo sapiens
agatgattctaaatgagtctccacaaaataatggccagagcttaggattaacattttaaaaaatggagtcttgggcttttctcacaagaatattagctacwactcagggctgagttggcttagaacattttcactttttatacagttttatgatttttaatcacacctttgaattccatttttcctagtaaatgcatttat

SEQ ID NO: 357693 - DNA, 201 bp, Homo sapiens; identical to SEQ ID NO: 76576

SEQ ID NO: 357694 - DNA, 201 bp, Homo sapiens
gtatgaagtagattaagttcaactgtatccacgccttccaggcatcagatgctttcatgctgccttcttaccaccttacaaggtttttctgctaagaagcrgggacctgctaaagcacaggggggaaaaacagaccttaaagttcagtagacttgattttaaactccagcaccaatacttattagtcatataaaaattgtc

SEQ ID NO: 357695 - DNA, 201 bp, Homo sapiens; identical to SEQ ID NO: 76577

SEQ ID NO: 357696 - DNA, 201 bp, Homo sapiens
taaaaactgtttgtttgtttgttttttaaataatgagtactacatgtgaataacagtacaaacatagcaaaagtatgaagtagattaagttcaactgtatscacgccttccaggcatcagatgctttcatgctgccttcttaccaccttacaaggtttttctgctaagaagcagggacctgctaaagcacaggggggaaaa

SEQ ID NO: 357697 - DNA, 201 bp, Homo sapiens
aatccatctatctgtcttaccaggtagtgacattgatacgttcttgctagactatgctattatagaaggatatatataatgagatgctaaacctaaaattrttgactaaagcttagcaagtttctcttcagtgcactaattagttttatttaattatcaagagtgtgttctcccactaattaggataaaacaatatgaata

SEQ ID NO: 357698 - DNA, 201 bp, Homo sapiens
aactctaccagtttttggatagaaattctataatctgtatacaagtttatatataagaatagacccatatttattggtgtgtgtgtgtgtgtgtgtgtgtrcacacacaaacacatctgtgtatattgtatcaaaaatatttttttccactctttggctttccttttaactctcttaatgactattgatgaatagatcttg

SEQ ID NO: 357699 - DNA, 201 bp, Homo sapiens
agaaatagaggtattgaagtattcctgggaatttcagtcagttcaaatgatctcagtccagttggaaaccagaataaagagccttcaaggtggttttataygcagtaatatgaatgtgctaacacttgggggtgctcacccatgagagtgccaaggagacgtgcctaggcctacacatgttttcccagagccaaggaggcc

SEQ ID NO: 357700 - DNA, 201 bp, Homo sapiens
taagtgtatacagaaaggaggaaccgatgactcaaataggaatcaagccagaagcttctgccatatgggcagcatggacttcaaccaaaacaatgaaacaktgctgtggtttagcagaggtcctaccatgaatagaaggataccaggttgccactgtgtctcagactgcatctctgtgtcgttgacccttttaccaaaggt

SEQ ID NO: 357701 - DNA, 201 bp, Homo sapiens
tatgtaagtaaatatcacagtagcaaggaaataaaccagagagtattgctttgtatgtcttcaaaaccacatgcccagagcatgttgcggatctctttgaaaaaaaaaaaaagataaaattcacacattatacaattcatctttttaaaatggtccagtggtttttaatatattcgtgaagttgtgcagccatcaccacta

SEQ ID NO: 357702 - DNA, 201 bp, Homo sapiens
agcatggacttcaaccaaaacaatgaaacagtgctgtggtttagcagaggtcctaccatgaatagaaggataccaggttgccactgtgtctcagactgcawctctgtgtcgttgacccttttaccaaaggtaggaaacagagctgtagtcatgccccatatctataataagtatgtggataataagcatcgagtacagccc

SEQ ID NO: 357703 - DNA, 201 bp, Homo sapiens
ggggaactatctttcttcaggattctgctttggatggataagaatgttgacaatacgacaaaagtcacttgttccaaaaggtggaaagtactacatttttraagaggagcaatctctcactttccacacttgataatttatacatttctcaccaaataaataacaatttatcagaaaattttgttacatcaaaagcatgaa

SEQ ID NO: 357704 - DNA, 201 bp, Homo sapiens
gtaagatttggggggtgtttatttggggtttctttgcttatgttttaatatgagacatgagagcttctttaaaaactaatgggaagggagataattggagwgtacagagaccctgggtggtacaaagaggcgggattcaggacacaggtaaaggaattagtgttcaaaatcagtaaaacctatgtgcatgtttacagtagt

SEQ ID NO: 357705 - DNA, 201 bp, Homo sapiens
tatgagcacagaaaggaattatataggtttaaaattaatttttaagaatgaatactttcatcccactttcaaaaggctttattttttaaaaaaagtatttaaaatgaggcctgagtcaaacatttcagtatgagaagccttgcacaaaatttagctattgtagttatggtcctttggagacggtattagtcataaaactat

SEQ ID NO: 357706 - DNA, 201 bp, Homo sapiens
ggtttcgccatgttgcccagatggtttcgaactcctgagctcaatcgatctgcctgctgtggcctcacaaagtgctggaattatagccatgagccactgcrcctggcccattgcacacatactctaaaataaaactgttaatagatgcagagggaaaagggagataattttaaggaatctgtatcatatcagtcattttct

SEQ ID NO: 357707 - DNA, 201 bp, Homo sapiens
acttttgggaagagttttctatagtcactatctattttctctcctgtcctttgctcctgaactcagtttaaaaagggttctgctcccaccattccaaaacaaaaaaaaataccttatcagtctcaccagtgcctttgacgttggtacatccaatattcagtgttcttggtcctcactttatggacctaccaagagctttca

SEQ ID NO: 357708 - DNA, 201 bp, Homo sapiens
aatgagcaatagcaagtggcttataaaagatactggcaaattgaaaatgtcttaaatcattgaagatccattgaaaaattatcaatttattatagtaaatrtgcttcttgggaataaaggtttcttatttctagaccggctaaaaaaaacaaaaaaaggaattcatgccaaaaatgaattttcagtcaatatactgggaaa

SEQ ID NO: 357709 - DNA, 201 bp, Homo sapiens
ttatagccatgagccactgcgcctggcccattgcacacatactctaaaataaaactgttaatagatgcagagggaaaagggagataattttaaggaatctrtatcatatcagtcattttctcagagtataacacagtaaaaattggaaattgacagtgaaaggtttccataaaaattttgatatttgggcattaaaaatac

SEQ ID NO: 357710 - DNA, 201 bp, Homo sapiens
tagagacattcaggaatatgtgcagctctcataagtttcatcctactcactgaattcacttcagagaagatttcttttaattgtagaataatgtgatgggtttttttttttcatgttctatgaatgattctatgctgtggaacagccttcaatggagaaattcagaagaagcaggatgtgatgttttcacaatccaaaaat

SEQ ID NO: 357711 - DNA, 201 bp, Homo sapiens
aaattgaaaatgtcttaaatcattgaagatccattgaaaaattatcaatttattatagtaaatatgcttcttgggaataaaggtttcttatttctagaccrgctaaaaaaaacaaaaaaaggaattcatgccaaaaatgaattttcagtcaatatactgggaaaggagtcaagaaactctgccttgtccagacataagtgc

SEQ ID NO: 357712 - DNA, 201 bp, Homo sapiens
caagggaatctgagagagtagccatttttagcactcaatataattcagatcaagtgcactaacttcctaaagttgtcacttatgcttcagaagatactcaygaccagccaaataattaagctgtaaataatgaggcagccattaagcttggaatcgtgtgtttcatacagtgcagatttccgtgtgtatgacacatgctca

SEQ ID NO: 357713 - DNA, 201 bp, Homo sapiens
cttatgtgtgaatattttatctctatttgttattatcaaaataaacactattcatagagttcaatttcatcaataattaataatgtgactaatgcatgataaaaagaataagttaaattatgttttttgcttacaaatatcacattaattgaataactggagtaatattatgctgcttttattaaatatgtagtgacaagt

SEQ ID NO: 357714 - DNA, 201 bp, Homo sapiens
tcttaaatcattgaagatccattgaaaaattatcaatttattatagtaaatatgcttcttgggaataaaggtttcttatttctagaccggctaaaaaaaamaaaaaaaggaattcatgccaaaaatgaattttcagtcaatatactgggaaaggagtcaagaaactctgccttgtccagacataagtgcacagtgaatcag

SEQ ID NO: 357715 - DNA, 201 bp, Homo sapiens
aaacttagatgggagataggaaggtatggttgtaaaagcattacatctgtcatatgatctatcacatatcatataagaaaatgcattatattttggaaactttaattttatacacatatatatgaaatatgttcatatgaaatacatttcactttattaagctattcaatatctcaataagctattcaatattacaggcac

SEQ ID NO: 357716 - DNA, 201 bp, Homo sapiens
tgcacacatactctaaaataaaactgttaatagatgcagagggaaaagggagataattttaaggaatctgtatcatatcagtcattttctcagagtataayacagtaaaaattggaaattgacagtgaaaggtttccataaaaattttgatatttgggcattaaaaatacccttttaaataatatacatatttaagaggaa

SEQ ID NO: 357717 - DNA, 201 bp, Homo sapiens
cctttgatgtgcaataatgctacctgtggtctgttttaagatgctcttttttggccaggcgcagtggctcatgcctgtaatcccagcactttgggaggccraggcgggcagatcatgaagtcaagagattgagaccatcctggccaacatggtaaaaccccgtctctactaaaaatacaaaaattaactgggcgtcatggt

SEQ ID NO: 357718 - DNA, 201 bp, Homo sapiens
aaagtttttaaaattaaatagaaaattaaaatgattaaataaagatttaacaaaacctaatgcaggttctatcaaaagactattaaaatagacaaacctgkgtccagattgatgaagggaggaaagaatgtgagtaaataatattgagattaaaaaaagagatataatttagaaacatttttaaacacaaaagcatacttt

SEQ ID NO: 357719 - DNA, 201 bp, Homo sapiens
tatagtaggttctatgttagtgctgtttgcttttttctattgatctgtctatcaattcatttttttagtaattgattaaccaagcctttattaattcacacttcttctaaatgttctagtcaatttttactctccatttattattctatataaattttcaaaaaaattctccagttagaaacatcccagtgagatttgacc

SEQ ID NO: 357720 - DNA, 201 bp, Homo sapiens
aatgtgtatatggctgtttatcctgttatctgtgaataccatgtgacaactaaagaataaaaatatcaaacttttaaagaattaaagttagttttattccraagcctgactgaggactatagactgaggcctatagccgggagcactgctgctgcacactgttgcagccacggcttttacacaggttgtggaggttcagta

SEQ ID NO: 357721 - DNA, 201 bp, Homo sapiens
tttttttcacaaatagtgttcccaacctttgaaccttcatacttttccttatctaattgtgatgtttcctttaacatatattaaatttgcatctatagtargttctatgttagtgctgtttgcttttttctattgatctgtctatcaattcatttttttagtaattgattaaccaagcctttattaattcacacttcttct

SEQ ID NO: 357722 - DNA, 201 bp, Homo sapiens
atagtaggttctatgttagtgctgtttgcttttttctattgatctgtctatcaattcatttttttagtaattgattaaccaagcctttattaattcacacttcttctaaatgttctagtcaatttttactctccatttattattctatataaattttcaaaaaaattctccagttagaaacatcccagtgagatttgacct

SEQ ID NO: 357723 - DNA, 201 bp, Homo sapiens
tgaagacattcatttgatgcacaaagtctatttcacaagcatttaatttctaacatatgccagactcagagtttggcaatggcatgtagatgaaataggcmagttaacagacaaaatacagtatgttaagtgcttcagtggaggtaagcatgggaaatttataggagtgttactaattcaggtaagtcaatgagtggatga

SEQ ID NO: 357724 - DNA, 201 bp, Homo sapiens
tagtaggttctatgttagtgctgtttgcttttttctattgatctgtctatcaattcatttttttagtaattgattaaccaagcctttattaattcacacttcttctaaatgttctagtcaatttttactctccatttattattctatataaattttcaaaaaaattctccagttagaaacatcccagtgagatttgaccta

SEQ ID NO: 357725 - DNA, 201 bp, Homo sapiens
tcacacttcttctaaatgttctagtcaatttttactctccatttattattctatataaattttcaaaaaaattctccagttagaaacatcccagtgagatytgacctattcattaatatggaaaaaaaaatcacaacttccccaaattcactgtttccattgaagaatgtagtagatctcttcatttattcacattttctt

SEQ ID NO: 357726 - DNA, 201 bp, Homo sapiens
aaggttgacaggaaaaaaatgtggtacttcatccacagattttattttatacctgaagctcaagtaaagctagtttaatagaagctatcctcatgcatatygtttaagctcaagaaataaatcttctgacattgtcaacttttaattttagcacccaaaaagtagagaatgctttaagtgaactgttatgatgctgtaaaa

SEQ ID NO: 357727 - DNA, 201 bp, Homo sapiens
gaataagaagtaatttcatactatataaacagagtgccaatgtatgaatgaataatgttctacaagtacatttgtaaactagctatttgtagctttctctrcagaaacagttctgccatccgcaatcaggttccaaacctatcctgcaaagatttattttacccacaatgtagctgaaatgaagtattaatgttagtacag

SEQ ID NO: 357728 - DNA, 201 bp, Homo sapiens
tctcttgggcatggtggcggcgatggtggtgggatgtaggtgctgggtgtgggatgcagctgggcacggaatgcagcgttgcacgagctttggtctgtccwggggtcattctcaccactgcttcttccaatacacacttttaaatggtgcttctatggtctcccacatcaggagagccctcagtgctttccctcagcctaa

SEQ ID NO: 357729 - DNA, 201 bp, Homo sapiens; identical to SEQ ID NO: 76583

SEQ ID NO: 357730 - DNA, 201 bp, Homo sapiens
cgtgactggtaccatgatacactcaggtatgtccccgtcgggattttagaagtcatcctttgccattctcccttcctcactcccaaataagaatcctctgraacattcctaaccttcaaaatgacatcttttgttgttgttgttgttgtttttgagacagagtctcactctgttgcccaggctggagtgcagtggcacaat

SEQ ID NO: 357731 - DNA, 201 bp, Homo sapiens
gacaccaaacaaacagagcaggtggactggctgtcttctgcccttgaagtcatacactagtcaatatcttcagcttagtttgcatttgtggcaataagatvtaagtatattgtgcagacctacaaagtttggcttccaaaatggcgacttcatattttgtaaatttatcaaataaatgatttttcttaatgtaccttaagt

SEQ ID NO: 357732 - DNA, 201 bp, Homo sapiens
tcttaggggagagtggttattagattattgagctaatagagccacattacttgggttcaccactggctcttgaaatgacagtggggaacctttgagcaacstacttagcctttctgtgactcaatttcctcatctgtaaaataaggtttatacagtatctacttaccaaggttgtgcgaagatcaaatggataatatatgt

SEQ ID NO: 357733 - DNA, 201 bp, Homo sapiens
aaactctaccagtttttggatagaaattctataatctgtatacaagtttatatataagaatagacccatatttattggtgtgtgtgtgtgtgtgtgtgtgyacacacacaaacacatctgtgtatattgtatcaaaaatatttttttccactctttggctttccttttaactctcttaatgactattgatgaatagatctt

SEQ ID NO: 357734 - DNA, 201 bp, Homo sapiens
atgttggccaggctggtcttgaactcctgacctcgtgatccacccacctcagtctcccaaagtgctgggattacaggcatcagccaccatgcccagtcttstttgttgttttaaaacactctctatgtaattgtgtaagcaggaaacccaaggatcatccctggcttgctccgtatttcttatctcctacatctcacaatc

SEQ ID NO: 357735 - DNA, 201 bp, Homo sapiens
ggatatcgacattcatttacagcttatactatggattttttctttattcaatatttttaaagaaaagcacatttatcaaatttgctttgtcaaagtagtcraagtcaattcattaagcaacatatcacttctgagagtttagcttactcacaatattacctatttagaacaaagatgaagttcaagaaaaattctatcaac

SEQ ID NO: 357736 - DNA, 201 bp, Homo sapiens
ctaagtactattgttgacagctgaagtgatacctcagttcttcttggtttaaaatagtttaaacaagagctacacagcaaaggaggtgtagcatagagtartttattacaatggataaagatattttgaaagttaggtgcagaataaacagtataccctgagagagaaagaagtcaggacaggctgcttgtaagggtgaga

SEQ ID NO: 357737 - DNA, 201 bp, Homo sapiens
cgtgctactgactcataactagtatcattgtcatgtgtatatatggacagccaagatatcacagtgagtatggtatactattcaagtttttcatgattaargtgttcttaaataattgttgaatagaattatggatgcacttcaaatctcatttgctagcattgtaatatatttaatacaaacttaaaaaaaccaaaacaa

SEQ ID NO: 357738 - DNA, 201 bp, Homo sapiens
actgtatatggaagacttatgatgtgatataatagtattggaaaacggaggaatctagcagaggaatgatgcatttgaggaaatctgttatgtggtagagwtaacattacgtatcagtgaagaaacagcagattaatctataaataacattgggaaaattttcatgtcaaaaaaagtaacattgtatctctaccactcctc

SEQ ID NO: 357739 - DNA, 201 bp, Homo sapiens
tcaaccaaaacaatgaaacagtgctgtggtttagcagaggtcctaccatgaatagaaggataccaggttgccactgtgtctcagactgcatctctgtgtcrttgacccttttaccaaaggtaggaaacagagctgtagtcatgccccatatctataataagtatgtggataataagcatcgagtacagccctgatggtagt

SEQ ID NO: 357740 - DNA, 201 bp, Homo sapiens
tcaaagaagatatcttaatgactaatgagcaccaaaattcacaatttcacagaaattaagacgatgcaaatcaaaaccatgatatactatttttcatttayccgactgtcaaaaataaaacactgaataactgaatactcctaatgctctatggaaaccgtcacacatgtgcacattaagagacatacaggagatgctcat

SEQ ID NO: 357741 - DNA, 201 bp, Homo sapiens
aaattcagtaggtgcaattagacagaatcaggcaaatataaaggtcataacattagtcacagtgtcaccttatttctgagccttttctttcttctgaagtrgtgtcttgtcagtggggtgatagagcaacaagaactctctgttgttatgggagtttgttaaattttatctgcgatttttccaattttaattaaatacttg

SEQ ID NO: 357742 - DNA, 201 bp, Homo sapiens
ggttgcacatctatagtggaagccgtgaggaagattatctcaatgctaaaagaattactagagatttctttgcttcttgtaactcccctggtgtaaaacayagaagctccaggaagttcactaaaacaaggttaaattcaaggaattgttggaaaacatttcatatatatttttagtcagtatcttatcttgattggtgtg

SEQ ID NO: 357743 - DNA, 201 bp, Homo sapiens
tttctttagggtaagaccacaatcagaagcatttttagaattcaaaatatttataatgattttttttagtagaaaatcagcaccctgattttaacttggtgggggggtggtaaaaattttgagaaaaattggtttccttgatagggagttatcaaggaaaacaaaactttgatttcctttacataagtgtaaacagaaatg

SEQ ID NO: 357744 - DNA, 201 bp, Homo sapiens
aggtaagaacttacaaatggttgtatattattttcctccattacttttagactttatgtgaaggtggggtaggctgagtatttttaaatttaaaaaaaaawtttaaattagaagctatactaaattatgtttaaagttacatttaattaaatggatatcataactttgccaacaataacactatagagtagatacatatga

SEQ ID NO: 357745 - DNA, 201 bp, Homo sapiens
attaattttaattctcatgttttaatgtaatcccttaccttgtaagtaaaatgggaaaaatactacctacctaaactctcctaagtaaaatgggaaaaatrctacctaccgaaacttactattctctaccaatgtagaaagttgatgagtgatagtgatgtagtaagttgataaatgaagtgctttgaaaacacacaggac

SEQ ID NO: 357746 - DNA, 201 bp, Homo sapiens
gcggatcacgaggtctggagttcgagaccagcctgaccaacatagtgaaaccccgtctctactaaaaattcaaaaaaattagccaggcgtggtggcatgckcctgtaatcgcagttactcaggaggctgaggcagaagaatcgcttgaaccggagaggtggaggttgcagtgagctgagatcatgccattgcactccagcc

SEQ ID NO: 357747 - DNA, 201 bp, Homo sapiens
atgctaatttctatctctgattactccctgatcactttagtagcatccatttagatctgccatctctcatgccttctcattattcctagttagtaagaaascctattacaagagtaataatcattatatacctattatcttgtcacacccattatcctgatcactgatcatgtttaatatcttgctcagcactgggaaatt

SEQ ID NO: 357748 - DNA, 201 bp, Homo sapiens
gctgaggcagaagaatcgcttgaaccggagaggtggaggttgcagtgagctgagatcatgccattgcactccagcctgggctacagagcaagattctgtcaaaaaaaaaaaaaaaaggattacaattacaatattcttaaagtaaattctataataaagggaaatcaagggcctatggtcaagaacaaccctttctaaagt

SEQ ID NO: 357749 - DNA, 201 bp, Homo sapiens
actactgctgctcactcatgcctgccattgggttttattaccttactgtaattcctgattttcctcaatgattccactcctggtaaactgtcactaactamcattactttgtgttttcttgttataggatgattatgtacttgaagtgaggcactttcagtgtcctaaatggccaaatccagatagccccattagtaaaac

SEQ ID NO: 357750 - DNA, 201 bp, Homo sapiens
ctgaggcagaagaatcgcttgaaccggagaggtggaggttgcagtgagctgagatcatgccattgcactccagcctgggctacagagcaagattctgtcaaaaaaaaaaaaaaaaggattacaattacaatattcttaaagtaaattctataataaagggaaatcaagggcctatggtcaagaacaaccctttctaaagtt

SEQ ID NO: 357751 - DNA, 201 bp, Homo sapiens
aagcttctataagcaatgacagatgaattgacagatagatgtgtttttatttttattacttctgtgctatagaattattgatatgcaattaccgagtaggaaaaaaaaaaaaaaactttcaagccaggtgtggtggctcaagcctgtaatcccagcactttgggaggctgaggtgggtagatcacaaggtcaggagttcga

SEQ ID NO: 357752 - DNA, 201 bp, Homo sapiens
ttgccatgtataattttgtagactctgtactcgtgggcaaatttaattttacttggaaagtttgtcttagcaaatcaaggttttgggttagatcatttggrtcataaactcagctttcttatcaaatggagaaagacaacaaaaatagaacatctgaagatacaaagtatttaataaccaggtgatgtgttcataggtgtt

SEQ ID NO: 357753 - DNA, 201 bp, Homo sapiens; identical to SEQ ID NO: 76510

SEQ ID NO: 357754 - DNA, 201 bp, Homo sapiens
aaaataaaaaataaataaataaataaataaataaatagatttgtgatgcacactgcctaaatgcttcctagatgggttacactcatctgtcatataaatgrctaccccactgtatactacccaagattgatgattgtcatattgaaaatctttatgaattcaacagatttttaaaaatcatgttttgttactttaatttgc

SEQ ID NO: 357755 - DNA, 201 bp, Homo sapiens
aagataaaggtgctgtctctcttgttgattacttttcaaagaggtagttcccaggtccttgagaggtacatttctggattataaagttaccaagtggctaytaaaaagatttacgcctcacaggagtagagaaagaattacaagccgggcacagtggctcacgcctgtaattccagcactttgggaggccaaggcgggcgg

SEQ ID NO: 357756 - DNA, 201 bp, Homo sapiens
taacaacttcatttcatttaagggtttcagaaaataaatgtcactcttcctagtaaccttaagttttctatgacaattcctaaacaaagacagttcagtgaaaaaaaaaaaaaaagataaagtgaagtcattttattttttttaatctcatgaacacatagcccaagattatcctaggagatgttaaaaatcttcttttcg

SEQ ID NO: 357757 - DNA, 201 bp, Homo sapiens
tctgtctgagctggaactgtctgggctttgtgtaggacgcattgtgcttcttccccttgctgggcctcctttacttcaatctctgtggtttttgtttgttygtttgttcgtttgtttttgtttttgttttttggggttttttttgtttgtttgtttgtttgtttgtttgtttgttttgagaaggagtgtctcactcagtcg

SEQ ID NO: 357758 - DNA, 201 bp, Homo sapiens
aacgtgatacatagagatgttatcacagaataaaagtcagcctggtttagttttgttaacagctaactttctagtttcagaagtgaaactagaaggaggtwattttcctctaaccaatcaattttcaaacagagaactcagatatttaccaagtatgtatgagtaaaatgaaaaacaaactttaatgcaccctccactctc

SEQ ID NO: 357759 - DNA, 201 bp, Homo sapiens
gacaactaaagaataaaaatatcaaacttttaaagaattaaagttagttttattccgaagcctgactgaggactatagactgaggcctatagccgggagcrctgctgctgcacactgttgcagccacggcttttacacaggttgtggaggttcagtatgtgcaaaatcacatcagattcactcaaaagttacgttaaagta

SEQ ID NO: 357760 - DNA, 201 bp, Homo sapiens
tttgtgtaggacgcattgtgcttcttccccttgctgggcctcctttacttcaatctctgtggtttttgtttgttcgtttgttcgtttgtttttgtttttgytttttggggttttttttgtttgtttgtttgtttgtttgtttgtttgttttgagaaggagtgtctcactcagtcgcccaggctggagtgcagtggcgcaat

SEQ ID NO: 357761 - DNA, 201 bp, Homo sapiens
tctcagctccaagcaagggtggatgtatgttgactaatggagtgatggtggtgtgtgtttcccagcagcccagggaccctatgcatcttgggtgtgcctcmtaaggtcaggagaagacaacagttttaccagggtttcagcagatatgatagcaacagcacataccattgtgcaatatcttattatcttaggaggcaacca

SEQ ID NO: 357762 - DNA, 201 bp, Homo sapiens
aggcctatagccgggagcactgctgctgcacactgttgcagccacggcttttacacaggttgtggaggttcagtatgtgcaaaatcacatcagattcactyaaaagttacgttaaagtagaaacacatcgaggtttgggtgtgagagtctatctaactacagatgactaaagtacattggttatagattacagaagcataa

SEQ ID NO: 357763 - DNA, 201 bp, Homo sapiens
ttttgttttttggggttttttttgtttgtttgtttgtttgtttgtttgtttgttttgagaaggagtgtctcactcagtcgcccaggctggagtgcagtggygcaatctcggcttgctgctgcaatctccgcctcccaggttcaagtgattctcctgcctcagcctcctgagtagctgggactacaggcgcccgccaccaca

SEQ ID NO: 357764 - DNA, 201 bp, Homo sapiens
gcccatccgataatctcacaagaggatttagaagtggttgatttgcttgaatggatattatagacagatatttcctatcatctgtagattttttttaaagyttagctaagatttatattctggtcaaactttttctatgctagataatggtgactaaagcaagcctcgttgtggaggctgaacagggttcagttaagtgat

SEQ ID NO: 357765 - DNA, 201 bp, Homo sapiens
acatttgtaaactagctatttgtagctttctctacagaaacagttctgccatccgcaatcaggttccaaacctatcctgcaaagatttattttacccacartgtagctgaaatgaagtattaatgttagtacagtcagggattaagggacaatcatacaggaaggaggagaatgaatctgaacactcccatttattggaag

SEQ ID NO: 357766 - DNA, 201 bp, Homo sapiens
tgtctctgtgtgccaccttatcatccttctttcgttcacagcaaactgtttttaaaaagtgctttaattctactggttccctctaattcactctgtagtcygaattgcaagtctatcatttcacggaaattgatttattctatgaatgtggggtttggagttgggaaataaccaaatccaaactcattcttcactcatgac

SEQ ID NO: 357767 - DNA, 201 bp, Homo sapiens
ttgaatccaagtcactcaccactgatagctttatactgtttaaatgactttttaattttggtgtttgggtatgtttgttagcatgtagaaagcaagcccarggtaatttataaagctatgacttacagtgtatggagcactaagtagagtttattcaaggcaactggtgctagatgctatgaagattactgtagtcttcac

SEQ ID NO: 357768 - DNA, 201 bp, Homo sapiens
cttgcatctaaaaagtgtcttcttaagtatatcatctttccattttgctggaattctaaattttatgctacttatcattgaaaaaatactgaattacttcrtttttgtattttattaaactaaaatttgaatccaagtcactcaccactgatagctttatactgtttaaatgactttttaattttggtgtttgggtatgtt

SEQ ID NO: 357769 - DNA, 201 bp, Homo sapiens
tcaatagctgtattgtcagcattttatcatggattgaatgctttaaaatttttgagcagcataaaagatttgtagaggaaaacctattttccttagaaacragagacagtgttttttgatgcttcaaagtcttaaaaaatgtaggaatattagagttatgccttgccctgcttggtgggttttgagtgacattctgagacc

SEQ ID NO: 357770 - DNA, 201 bp, Homo sapiens
gcgtttacccctcatcttcagtgttcttagagccaatgaggtagcctgacatatgtattaagtgctcagtaagggtctgtcaactgactaaaacttgctgyacaggagaagagctcaatacaatttgaacattaggctgtcattcttaccattatccaggaacaagttgtagagttcactaagatattgattattggcaat

SEQ ID NO: 357771 - DNA, 201 bp, Homo sapiens
atagcttaaaaaaaaagtaaaacaaaattctgcatttttataaaacttgataaaaatatttcaaactgtacggtcaccagtgcacagttatcaaaaatgcrcacacttcgcttggcatttccagcaccttcagctttctgtgcctggtctccatttctgcagggttattcccctccttgccagtatcatcttttccctttt

SEQ ID NO: 357772 - DNA, 201 bp, Homo sapiens
atgcatatgatttttggccactctggagaattttgaacgtagatggcaatgctgtctgaaaaatggatccctgtgaaagaagcataaagcgtgaaatcacrtttaattagccaagagtggctagtgtatgttgccattaaatcctttaaattacagcacatctgggcaccgtccatcccacaagaatgtatccaatgatgc

SEQ ID NO: 357773 - DNA, 201 bp, Homo sapiens
cgtgatccacccaccttggcttctttacaggcgtgagccaccacgcccggcctgtaaataattttcaatgttttacatgcacaatcatgttatttgcacaytgtgatggtattattttttcctatacaatcttaagattttcgtttcttttttctttattgcactggctcagtcttccaattcaatgttaaatagaagtgg

SEQ ID NO: 357774 - DNA, 201 bp, Homo sapiens
cccctggggccttccccacccagagtgttcctctttctcaaatgcctacatgctttgtcctggaaacaacagagccccagcaactccatagtggggctccytctgaaagaggcagaaatgagaagaggaagatgctgggggttcagcagccgaggtgcatgtggtgcaggcattcagtccaattaaacaggcacccagagt

SEQ ID NO: 357775 - DNA, 201 bp, Homo sapiens
accataagtagtgtagaatgtatttatgtatttatttatttttttgagatggagtctctatcgcccaggctggagtgcagtggcgcgatctcggctcactrcaagctccacctcccgggttcacgccattctcctgcctcagcctcccaagtagctgggactacaggtgcccgccaccatgcccggctaatttttttttgt

SEQ ID NO: 357776 - DNA, 201 bp, Homo sapiens
agctgtttggagttaaacaactcatgtaattgtcacttttcaagtcaataatgtaaaccccacaggacaaattattttagtgccatacttacagattacatttttttttttaaagacagtcttgtcttgctctgtctcccaggctggagtgcagtggggtgatctcagctcactgcaacctctgcctttcaggttcaagca

SEQ ID NO: 357777 - DNA, 201 bp, Homo sapiens
caccatgtccagctaatttttatatttttagtagagacggggtttcaacatgttggccaggctggtttctcactcctgacctcaggtaatccacctgattyggcctcctttagcgctggaattacagcgcaagccaccatacccggcccagattacattttttgtcattgggctccatttttcttgaaatttagtctgtaa

SEQ ID NO: 357778 - DNA, 201 bp, Homo sapiens
tttgcattgtcacacaaaattcacttaaatgtgttacacttttaggcaaaatgccattataataattttatgttgacctgtgttgccctccaatttcatgyatcagtaagggcctagtggaaggcttatttagtttcaatttcctttgttttctgtatggtaattctgactctttaaaccaagaattttcaaggagcaaaa

SEQ ID NO: 357779 - DNA, 201 bp, Homo sapiens
gaaaaacctgttattgagagtgtcctatagtgaattcaagcaataatgggtaattgaactgtattagcccattttcatgctgctgataaagacatacccgmgactaagcaatttacaaacgaaagaggtttaattggacttacagttccacatggctggggaagcctcacaattatggcggaaggcaaggatgaccaagtc

SEQ ID NO: 357780 - DNA, 201 bp, Homo sapiens
tttaatgactgaggcacagaatcacaaaaattattttgaaatatagtgagacacattttgacttagggattttatttcctttatcccttaggaggaatgtrtatatggctgtttatcctgttatctgtgaataccatgtgacaactaaagaataaaaatatcaaacttttaaagaattaaagttagttttattccgaagcc

SEQ ID NO: 357781 - DNA, 201 bp, Homo sapiens
cttaaatatactgttactgaatagactgttagagaatcttcccctgggctgaaaaagtagacacaagtttagatacctttaaatccatgcgagtgtatttwtttatttattttattttttttgagacggagtctcgctctgtcgcccaggctggagtgcagtgacgcgatctcggctcactgcaagctccgcctcccgggt

SEQ ID NO: 357782 - DNA, 201 bp, Homo sapiens
attatacaaataattgaagttgtttcagaagctactttataagtgataggtacgtttatttctgttaaattatgctctctaacacaatttttttattcacrtagatgatgtcggagcaattccaataaagcactttccaaagcatgttgcagatttacatgcaagtagtgggtttactgaagaatttgaggtatgatttta

SEQ ID NO: 357783 - DNA, 201 bp, Homo sapiens
tactgttactgaatagactgttagagaatcttcccctgggctgaaaaagtagacacaagtttagatacctttaaatccatgcgagtgtatttttttatttattttattttttttgagacggagtctcgctctgtcgcccaggctggagtgcagtgacgcgatctcggctcactgcaagctccgcctcccgggttcacgcca

SEQ ID NO: 357784 - DNA, 201 bp, Homo sapiens
gctacacttctttatcctccttcagggatatgactgaggaagtctagacttataataggttaaatgagaaagtgttgaacaacccgatcgtgtgcacaggrctagtaaatggttgattgacatgagactcagatctatgtctgaattccaagtccttaactcctactatctaatcattttttagaaaaaatttttcgaagg

SEQ ID NO: 357785 - DNA, 201 bp, Homo sapiens
ttactgaatagactgttagagaatcttcccctgggctgaaaaagtagacacaagtttagatacctttaaatccatgcgagtgtatttttttatttattttwttttttttgagacggagtctcgctctgtcgcccaggctggagtgcagtgacgcgatctcggctcactgcaagctccgcctcccgggttcacgccattctc

SEQ ID NO: 357786 - DNA, 201 bp, Homo sapiens
gcacttaaaggatcacacaacttgattttcttctctgctgtgacacaatagcctcactttgcattcgtttcacaatctgggatcattatccaagctcagtragaatcaatttctcatagatgattgcctgaatcactgccagctcagccacattttttacatcatttaccaggaagtatagtttttaaaaagtcagaacaa

SEQ ID NO: 357787 - DNA, 201 bp, Homo sapiens
cacagcagatgctgtggcctctgtaatgagacagcaccatcctgtggtgaccagttaggtaaggaacctcccaaggaataaccacattatctggccacccrcctagaatgaatggagacaggtggagagaggctgtggaaagcaaaatgagaatatacaacacactgaggaaggagtcacctgagaaagcagagtagaatt

SEQ ID NO: 357788 - DNA, 201 bp, Homo sapiens
cggctcactgcaagctccgcctcccgggttcacgccattctcctgcctcagcctcccgagtagctgggactacaggcgcccaccaccatgcctggctaatyttttgtatttttagtagagacagggtttcaccgtgttagcgagcatggtctgtatctcctgacctcgtgattggccggcctcggcctcccaaagtgctgg

SEQ ID NO: 357789 - DNA, 201 bp, Homo sapiens
gcaaaactctgcatcacattataaaacaaatatttatgagaacttctaaggaaagaagagataattggcaccaaccaattttccctaaaagcaagtcaagrcaaattattctcatttccttttgcattaagtttttaggtttgtagattataggaatattttatttaggaaattatttgggaaaatctctcaggtggtcct

SEQ ID NO: 357790 - DNA, 201 bp, Homo sapiens
aatgactttcttaaatatcataatgctaaaaggaatttgtgctagaattttcctaaataaattgataactaccttctctgacctgtaaccccctgccaatwgcatatatcagccagacttgaaaagattttttgctgtcctgatgtgattgtcccattagtacagaaaacaaaggaaaatgtagtttgacgaaacaggttc

SEQ ID NO: 357791 - DNA, 201 bp, Homo sapiens
aaagacttgaaggtagctggcacctgtaattccagtgctttgggagaccaagacaggaagattgcttgaggccagaagtagaagaccatcctgggcaacayagagagactctatatctacaaaagaattttaaaaattagctaggcgtggtggcacatgcctgtagtctcagctacttgggagactgaggcagtagaatca

SEQ ID NO: 357792 - DNA, 201 bp, Homo sapiens
agcaaatccaaaacttggcatatgccaaaatatattacctctaaactctgtagtttccattctttcatacttcattagcatatctaggaagtaagatctayttgcagcactttgaaaaaaataaataaatgacatgtagtttttcttttccaagaccctaaaagtttgttcttgaagatcagttgtatttatgcatataac

SEQ ID NO: 357793 - DNA, 201 bp, Homo sapiens
ttgtatggagagtgccatttattaggaaggcatttctttttggcatcatggaatggacactggctcttctaaggatcacagaatttaatagaaccatctgstcctgaaagagttagtgaaaactgtctttttttttttttttttttttttttttgacagagtctctctttgtcacccaggcttgagcacagtgtatcgatc

SEQ ID NO: 357794 - DNA, 201 bp, Homo sapiens
agataatgtttgctccattaagagtaatatataactgctttaaaaacgtgatacatagagatgttatcacagaataaaagtcagcctggtttagttttgtyaacagctaactttctagtttcagaagtgaaactagaaggaggttattttcctctaaccaatcaattttcaaacagagaactcagatatttaccaagtatg

SEQ ID NO: 357795 - DNA, 201 bp, Homo sapiens
atttgtgaattaatgcatattttatctgtatttccatttgtatggagagtgccatttattaggaaggcatttctttttggcatcatggaatggacactggytcttctaaggatcacagaatttaatagaaccatctggtcctgaaagagttagtgaaaactgtctttttttttttttttttttttttttttgacagagtct

SEQ ID NO: 357796 - DNA, 201 bp, Homo sapiens
agaaatacattataaataatcgcaaaaaccatgtgagatttatatattcatataaactctgtaaggttagagaccaggccttattcattttttgcattcayagcaggcgctcaatagattatttgtgaattaatgcatattttatctgtatttccatttgtatggagagtgccatttattaggaaggcatttctttttggc

SEQ ID NO: 357797 - DNA, 201 bp, Homo sapiens
acaacactttcttaactacttggtgttttgggttctagaaatacatgataggacctataaagtaaggaaaataattttcttgaatggagcttgtaggaatygattttattcccttagactatgtgtgtatattgtcacagaatttcacatccctgctgcaatactattatgactgccatagtaataataatttatttatca

SEQ ID NO: 357798 - DNA, 201 bp, Homo sapiens
ttcgagagcaacagtacaagttctctagacaggtgttttcctcatacactggaaaggaagagattcatgaagcaggtatgtatttaaatataatcttctacaactctcatagatgcagtgttataggaggtaattttggtaaactgacaaatatagaggacttagagctttagaaatgttttaattattaattttgtagct

SEQ ID NO: 357799 - DNA, 201 bp, Homo sapiens
ttgtttcagggtttgaaggccagatggcccacctaagaaaactctaccagtttttggatagaaattctataatctgtatacaagtttatatataagaataracccatatttattggtgtgtgtgtgtgtgtgtgtgtgtacacacacaaacacatctgtgtatattgtatcaaaaatatttttttccactctttggctttc

SEQ ID NO: 357800 - DNA, 201 bp, Homo sapiens
tgagactggccaattttcactggtctttccctcttttgattatgatctcagtccgggagtaaggtcagcattcaccttgacctgtccatctttaatgtcayttctggtacgcgaacttcactttcactgattctcccagaaatacacgtaagcatataggcatcctctatgaggttggagctgtcatgaatgtgattaatg

SEQ ID NO: 357801 - DNA, 201 bp, Homo sapiens
tcaggtaatccacctgattcggcctcctttagcgctggaattacagcgcaagccaccatacccggcccagattacattttttgtcattgggctccattttkcttgaaatttagtctgtaaccctggggagtatgtttgaaagttttaatagttgtccaaaaaaatgttatctgtcagttcccattactctagcagaggatt

SEQ ID NO: 357802 - DNA, 201 bp, Homo sapiens
aaggagcagagagtttaataggtaagaaagatgggagaaggcagaaggaagaagctccccgtacagagacagagggagggggcctccaaagctgaaagagsagaacctgagttgtgtgtttttatatattctagatacaagtcccttatcagatatctgatttgcaattattttttcccattctgtgagttatcttctcac

SEQ ID NO: 357803 - DNA, 201 bp, Homo sapiens
tcagtcaaacagaattcaagtgtttcaatttaaccactcatgaatattgctccaaataaattaaatgacctacatcaaagagtgtcattagcagttttaaktattcaatttttaaaattaaagatggttggctttactttatagcagtagttggttctttgctcttgtcgatagtttgtggtgtgctcttaccagatgcta

SEQ ID NO: 357804 - DNA, 201 bp, Homo sapiens
ataaaaaacattgttcattttcttccataaagtacaaatctttaatattcttttttaaaatctgaattaataacaatgattctttttaattttctaaattmtataaattatactaaactactaaatttcatgatttccagccaaattacataaaaattcttaactgtgatttgtacaccagtgttaatgcaaaagcattta

SEQ ID NO: 357805 - DNA, 201 bp, Homo sapiens
ccacaagagggcttatgatgaccctaaggcaactttcagagctattctgcaagaagagagatttttatttcccaaaccagggggtaatttccaccagggckttgtttgtttgtttgtttgtttgtttgtttgttttgttctgcatttgccgtctcattggtaataacaagactgcagcaacaaaggaaagaaatctcactc

SEQ ID NO: 357806 - DNA, 201 bp, Homo sapiens
tattgttaaaactcatgctaaaatatcatggatagttgtatactatctatgcatgccggctcatagtatgtgaagacacatcaaataaaaactcctatgastatctttacaagcgtgctttgtatttaaataacattaaagataattaaatattgtgttagtgaggaactttatttccttatttggaatattcttaaactt

SEQ ID NO: 357807 - DNA, 201 bp, Homo sapiens
ttttttgtatttttagtagaggcggggtttcaccatgttagccaggatggtctcaatctcctgacctcgtgatccgcccgtctcggcctcccaaagtgctsggattacaggcatgagccaccacgcccggcccctagttaatgactttcttaaatatcataatgctaaaaggaatttgtgctagaattttcctaaataaat

SEQ ID NO: 357808 - DNA, 201 bp, Homo sapiens
taaattcctagctcttctatatagaaggtttaaagttgtatcccatccttaggaaaccctctctaagtgtctttttattgagcctatcttttttttttttwaaaaaaaagcaaaatataatacattaaaatttaagtacaaattctaataagctatacatagataaataatttccaaaaagtgacaccttttcttttttga

SEQ ID NO: 357809 - DNA, 201 bp, Homo sapiens
gtagctgggactacaggtgcccgccaccatgcccggctaatttttttttgtatttttagtagagatggggctttaccgtgttagccaggatggtctcgatytcctgacctcgtgatcctcccgcctcggcctcccaacgtgctgggattacaggcgtgagccactgcgcccggccaataatggagaatttaaagcagtggt

SEQ ID NO: 357810 - DNA, 201 bp, Homo sapiens
cactaatgaaaaagatgctgatgggatcctggcagcaggtgactcagaaataactcctggattcccacagtccccaacatcatctgttactagcgagaackcagaagtgttccacgtttcagaggcaggttagttacggatcagaaggacagattgaggtgtggtggtttgcttgctctaaaagtaaaatgaaaattatag

SEQ ID NO: 357811 - DNA, 201 bp, Homo sapiens
aaattcctagctcttctatatagaaggtttaaagttgtatcccatccttaggaaaccctctctaagtgtctttttattgagcctatctttttttttttttaaaaaaaagcaaaatataatacattaaaatttaagtacaaattctaataagctatacatagataaataatttccaaaaagtgacaccttttcttttttgat

SEQ ID NO: 357812 - DNA, 201 bp, Homo sapiens; identical to SEQ ID NO: 76515

SEQ ID NO: 357813 - DNA, 201 bp, Homo sapiens
atgaagcctgggtgatacatggagggataagcagcagcctgataaggagtagaaatgggctgaaaataggaaggtgagagaactctgaggagaagacttatttttttttttcttttaacccttcagttccttccccctttgctctgtcttcttattaccatctgacatcttagggaagcagagctttcaagtaacagctat

SEQ ID NO: 357814 - DNA, 201 bp, Homo sapiens; identical to SEQ ID NO: 76517

SEQ ID NO: 357815 - DNA, 201 bp, Homo sapiens; identical to SEQ ID NO: 76578

SEQ ID NO: 357816 - DNA, 201 bp, Homo sapiens
gagctttatccattttgtttgaggtaatatatatacactttacactaatgtaattcctttttaagtcacattaaatattgacgtgaaatatcaagacataktttctaacaaagagaggagctcacaagtaaaattaaaactggtggtcattttcaaaaaaagatgacccttgcctggtatttttaaaaggagactcttgtg

SEQ ID NO: 357817 - DNA, 201 bp, Homo sapiens
agagtttacagctggaatagacttttaagatcagatagtctagtcatttcgtattctaatgtggaaagtgtggttaagaaagactaggccgggcgtggtgkctcacgcctgtgatcccagcactttgggaggccgaggcgggcggatcacgaggtcaggagatcgagaccatcttggctaacacagtgaaaccccgtctct

SEQ ID NO: 357818 - DNA, 201 bp, Homo sapiens
atctactgctttgatgcggaccgattttcaagttttgaggaagcagtcaaaggaaaagggaagttaagagctttatccattttgtttgaggtaatatatakacactttacactaatgtaattcctttttaagtcacattaaatattgacgtgaaatatcaagacatagtttctaacaaagagaggagctcacaagtaaaat

SEQ ID NO: 357819 - DNA, 201 bp, Homo sapiens
taggccgggcgtggtggctcacgcctgtgatcccagcactttgggaggccgaggcgggcggatcacgaggtcaggagatcgagaccatcttggctaacacrgtgaaaccccgtctctactaaaaacacaaaaaattagccaggcgtggtggcaggcgcctatagtcccagctactcgggaggctgaggcaggagaatggcg

SEQ ID NO: 357820 - DNA, 201 bp, Homo sapiens
ctgaggcaggagaatggcgtgaaccctggggggcggagcctgcagtgagccgagatagcgccactgcactccagcctgggcggcagcgagactccgtctcaaaaaaaaaaaaaagaaagaaaagaaagactaaaaccttgaaaaggcttcactttacttgggattttctacactagcctactaccctgcatgtttgcatca

SEQ ID NO: 357821 - DNA, 201 bp, Homo sapiens
agtgtaagtaatcacaagtatgcaaacaatagtgattaagcgtgattttttttttaaagcatggtaaatacctcatggagatggtgttaatgtaaggtacrgaaccctaattggcctaagagtttcagggaaggcttaccagagaaagcgactttagattcagataaagcataaataggagttaaatcaacatgggtgaaa

SEQ ID NO: 357822 - DNA, 201 bp, Homo sapiens
tctccccatcacctgccaaatgaaaaaaaaaaaagggctctttagcttggcatataatggctttaatgagctggcccacctatcctgtttcattcctcatsattaccttccccctgcctgctgctataccagccttttcaaaagcaggtctctccgattctgtttataatcctgcctgaatagcagactatgcaccttctt

SEQ ID NO: 357823 - DNA, 201 bp, Homo sapiens
taatggctttaatgagctggcccacctatcctgtttcattcctcatgattaccttccccctgcctgctgctataccagccttttcaaaagcaggtctctcygattctgtttataatcctgcctgaatagcagactatgcaccttcttcaagtgaagccttctttcctgactcttcttttctgcaggccagagcacatccct

SEQ ID NO: 357824 - DNA, 201 bp, Homo sapiens
aaattagtggcaatcacggaagaaatggcttgcccttgagtgtctgaacatataggattctattaataaaaattactaagtacattataaggcttgtctgyaaaagaactaataagccatttagaaatattacattacacatcaaacattatttaaatgcaatcacttgagctaaagtaattatgaaaaaaattacacaat

SEQ ID NO: 357825 - DNA, 201 bp, Homo sapiens
aagatgaagttcaagaaaaattctatcaacaagagccctgagcaatcaaaatacatggtacagaatccatgcactaaacctaatacaattattttaatgcraaagcctctcaaattgtctctcagtggtattggggttttgttgttgttgttgttgttgctttgagacagagtctcgccctgtcgcccaggctggagtgca

SEQ ID NO: 357826 - DNA, 201 bp, Homo sapiens
cttagaatgtagaattctctttgctgatttttatgaagtctttgtgtatcataaaactatcattgttacttttatagatgcaaatctactgctttgatgcrgaccgattttcaagttttgaggaagcagtcaaaggaaaagggaagttaagagctttatccattttgtttgaggtaatatatatacactttacactaatgt

SEQ ID NO: 357827 - DNA, 201 bp, Homo sapiens
gatttgggtgggaaaacagccaatccatattatgcccataaaacatcttgtacaaaatgggacacagtgacgaattgctaataatgattagcacttctcakcacgttgaagtagagtaaggaggttacactccagatgcttttttaagctgttgtagacatctgagcccagtgcctaaaatacatttcaaagcagtgctat

SEQ ID NO: 357828 - DNA, 201 bp, Homo sapiens
aaagttttgagagttatttgggattcttttttagtaaatatgacagctaaagggaaactgttaatactgttagtcaaaaagtttcattatgaatcatgctrtctgccttttaaacgcattcttcatactgtgggagaagtaaatgggactcattgaaaagcaatgtagagtgaaatcgattttaattcacaggacatggat

SEQ ID NO: 357829 - DNA, 201 bp, Homo sapiens
cagttttgtaccagcagttggatggagaggaccaaaccaagcatgaatttttgacagatggctatcaagacttggtaactatatgatcagttgttttacayagggtaacattataatttaatttccaaggtaagaacttacaaatggttgtatattattttcctccattacttttagactttatgtgaaggtggggtaggc

SEQ ID NO: 357830 - DNA, 201 bp, Homo sapiens; identical to SEQ ID NO: 76511

SEQ ID NO: 357831 - DNA, 201 bp, Homo sapiens; identical to SEQ ID NO: 76514

SEQ ID NO: 357832 - DNA, 201 bp, Homo sapiens
  misc_feature (1)...(201): n = A,T,C or G
cctgagaagtactcatgctctgatctgagtgggaaatagttgttcagtgctcttgaaattgaaacaagaattttctttcaaccagagaaatgggaaagganttagtgattgcctgtaaaaacctaaggaactgttcaactatatagagccactgtttggccgcatggaggatcttaacacatccctaggtattcctgtatg

SEQ ID NO: 357833 - DNA, 201 bp, Homo sapiens
ctgtgcaaaagcagaaagggctgtaaaatactagagaatgtagacaaaggtaccataaattactttggaaggacttcttgccatcctgaagcaaggttttstgtgaatgtttacagctgactgtcacatctttagttacaaaattcaattttgttgcattatatccattcataattgaaacattggtgttttatttcaaat

SEQ ID NO: 357834 - DNA, 201 bp, Homo sapiens; identical to SEQ ID NO: 76519

SEQ ID NO: 357835 - DNA, 201 bp, Homo sapiens
atgaagaatgagatattgctataacttcaaaatacctcccctcaaaatactttctaattacaagacagagaataatattgcagtggaaagcctgacagatrctttaatcaagtgatcaaagtaaacgtcagcaaaaattacctttacagagatcctgtaccactgactaagatacagtgagaagaaaagagcatatttttt

SEQ ID NO: 357836 - DNA, 201 bp, Homo sapiens
gaaccaggtccttggttggggtctgggtgtccgccccgaagtagagctcagggtgtctccgttcgcagacatacaatgtggacagacaggtgccagacagygcagccacagccacggcctacctgtgcggggtcaaggccaacttccagaccatcggcttgagtgcagccgcccgctttaaccagtgcaacacgacacgcg

SEQ ID NO: 357837 - DNA, 201 bp, Homo sapiens
tgctccttcagggttgggggtgcccacggtgacagccaccaggatcctaaaggggcagaagaatggcaaactggggcctgagacgcccctggccatggacygcttcccatacctggctctgtccaaggtaagggctgggccacctcagagtcctccaagcagaggagagggatcaaggatatggagtgtggcaggagggag

SEQ ID NO: 357838 - DNA, 201 bp, Homo sapiens
ggcgtgcgaccagacgtgaatgagagcgagagcggtgagtgaggctgaatggcccgtgcagggggaccagggtgccagggatgggggcattcgcgggaggrggacgccgcctgcctgccctgaagtgcactcaccctcctaccagggagccccgattaccagcagcaggcggcggtgcccctgtcgtccgagacccacgga

SEQ ID NO: 357839 - DNA, 201 bp, Homo sapiens; identical to SEQ ID NO: 76591

SEQ ID NO: 357840 - DNA, 201 bp, Homo sapiens
gtggggagggacgtggagcatttacagccaggggcaaagtcctcccctgatttaaacccaggcagcctgcgctgcagccggttcctggtgtccccacttcrcctccctcctgctgcccccaagacatgcaggggccctgggtgctgctgctgctgggcctgaggctacagctctccctgggcgtcatcccaggtaatgagg

SEQ ID NO: 357841 - DNA, 201 bp, Homo sapiens
aaggaggtggccagatcagggctcggggtgcctggctgagtgccccctccactgagcccattcctgtgcctgcagcttcccacaggctgaggccccagtgycctgcttgtgctgctgagggggctccatggcctgttgagaggcctccccaggaagcccatagggaggaggttggggtgtctcctgccttgggggtgggac

SEQ ID NO: 357842 - DNA, 201 bp, Homo sapiens
ggtgcctggctgagtgccccctccactgagcccattcctgtgcctgcagcttcccacaggctgaggccccagtgtcctgcttgtgctgctgagggggctcmatggcctgttgagaggcctccccaggaagcccatagggaggaggttggggtgtctcctgccttgggggtgggacagtcccttcttgttcccaccccaggt

SEQ ID NO: 357843 - DNA, 201 bp, Homo sapiens; identical to SEQ ID NO: 76598

SEQ ID NO: 357844 - DNA, 201 bp, Homo sapiens
ggccaagcaagcaggtgagctggggcccgctgtggggtcaggaccaggcccaagatctcggtcaccgatcctgacctctgtcaccctcaggaaagtcagtrggagtggtgaccaccacacgggtgcagcacgcctcgccagccggcacctacgcacacacagtgaaccgcaactggtactcagatgctgacatgcctgcct

SEQ ID NO: 357845 - DNA, 201 bp, Homo sapiens
agcaggtgagctggggcccgctgtggggtcaggaccaggcccaagatctcggtcaccgatcctgacctctgtcaccctcaggaaagtcagtaggagtggtraccaccacacgggtgcagcacgcctcgccagccggcacctacgcacacacagtgaaccgcaactggtactcagatgctgacatgcctgcctcagcccgcc

SEQ ID NO: 357846 - DNA, 201 bp, Homo sapiens
tgccacagtcttggctttataacattagcccactgatggtctgcaacattctatgccctccaggcttctacctcttccctgcgctgattagactgtggatragccaatgagtgaggggtaagggtgaagccacctctgcaccctgattcgtatccagaatccttttttaaaaaaccctttctgagtagctattctatctgt

SEQ ID NO: 357847 - DNA, 201 bp, Homo sapiens
gcaacaagcagggggcaagaaggacctatgagagcgacatcttccctgagagccccaggacgaccaccgggaagccaggagggcgcaggcaggaggacccrggaaagctcggcctgagggaggccctaggcgtggtggggagtggggcagggcaggcagaggctgggcagcaggtgaggtcccctgggttctgagggccaa

SEQ ID NO: 357848 - DNA, 201 bp, Homo sapiens
gcccatttgccagcaccctcccgctcacagcctgccaatcaccaccaagctccttgtcccacaggcctctttgagcccggagacacgaaatatgagatccwccgagaccccacactggacccctccctgatggagatgacagaggctgccctgcgcctgctgagcaggaacccccgcggcttctacctctttgtggagggt

SEQ ID NO: 357849 - DNA, 201 bp, Homo sapiens
tcctggtgtccccacttcgcctccctcctgctgcccccaagacatgcaggggccctgggtgctgctgctgctgggcctgaggctacagctctccctgggcrtcatcccaggtaatgaggctccccaagctgttccacacacagggcaccccctcagccaggctgacctgatctctactctccccctggccagctgaggagg

SEQ ID NO: 357850 - DNA, 201 bp, Homo sapiens
accctgagtacccagctgatgccagccagaatggaatcaggctggacgggaagaacctggtgcaggaatggctggcaaagcaccaggtgatgggggctggygggtgtgggaggcacggcagggggaggccaagtgtgtgggtctcagggctgtgggctgaagcctggctctgtccctgcagggtgcctggtatgtgtggaa

SEQ ID NO: 357851 - DNA, 201 bp, Homo sapiens
cccccagcaaggctcaggacagcaaagcctacacgtccatcctgtacggcaatggcccgggctacgtgttcaactcaggcgtgcgaccagacgtgaatgaragcgagagcggtgagtgaggctgaatggcccgtgcagggggaccagggtgccagggatgggggcattcgcgggagggggacgccgcctgcctgccctgaa

SEQ ID NO: 357852 - DNA, 201 bp, Homo sapiens
ggagatgacagaggctgccctgcgcctgctgagcaggaacccccgcggcttctacctctttgtggagggtgcgtggtggcccctggggagtggaggaaggyggggcgcggcagggcaggttcaagcatcacccccctctggccttcctgcaggcggccgcatcgaccatggtcatcatgagggtgtggcttaccaggcact

SEQ ID NO: 357853 - DNA, 201 bp, Homo sapiens
tctcctttggtggctacaccttgcgagggagctccatcttcggtaggcctggggagagtggcaggtgctgctgcatcaattatgagggtgaagtttgagcytcagtttcctcctctgtcaaaagtgtgcaatgctggcaccagccctatagggatcttgtgaggaccgagcccccgaacaggcaaaaagtggcggtgcctg

SEQ ID NO: 357854 - DNA, 201 bp, Homo sapiens
gtactgctgaggggcagatgattgagcaagagacttgaacagagtgggggcttgagcaaggcagcacagcagtgcaaacgccctggggcagtgtcagcagrtgctctgggaggccaagggctggatcagaggggtgggggtgggtgggcagagtggggaaagcctgaggggtcaggagagtggggtgtgcatgggggactg

SEQ ID NO: 357855 - DNA, 201 bp, Homo sapiens
gagctccatcttcggtaggcctggggagagtggcaggtgctgctgcatcaattatgagggtgaagtttgagcctcagtttcctcctctgtcaaaagtgtgyaatgctggcaccagccctatagggatcttgtgaggaccgagcccccgaacaggcaaaaagtggcggtgcctggcacataggaggcactcccacagctgtg

SEQ ID NO: 357856 - DNA, 201 bp, Homo sapiens
ccacagccacggcctacctgtgcggggtcaaggccaacttccagaccatcggcttgagtgcagccgcccgctttaaccagtgcaacacgacacgcggcaawgaggtcatctccgtgatgaaccgggccaagcaagcaggtgagctggggcccgctgtggggtcaggaccaggcccaagatctcggtcaccgatcctgacct

SEQ ID NO: 357857 - DNA, 201 bp, Homo sapiens
cccaagctgttccacacacagggcaccccctcagccaggctgacctgatctctactctccccctggccagctgaggaggagaacccggccttctggaacckccaggcagctgaggccctggatgctgccaagaagctgcagcccatccagaaggtcgccaagaacctcatcctcttcctgggcgatggtgagtgagcaagg

SEQ ID NO: 357858 - DNA, 201 bp, Homo sapiens
agcgcagccacagccacggcctacctgtgcggggtcaaggccaacttccagaccatcggcttgagtgcagccgcccgctttaaccagtgcaacacgacacrcggcaatgaggtcatctccgtgatgaaccgggccaagcaagcaggtgagctggggcccgctgtggggtcaggaccaggcccaagatctcggtcaccgatc

SEQ ID NO: 357859 - DNA, 201 bp, Homo sapiens
tcttcctgggcgatggtgagtgagcaaggcctgtccagccccgtagtcctcacagccccggcacccgggaccttcagtggttccaggacaaccctggggcycaggactcacacatttctgctccttcagggttgggggtgcccacggtgacagccaccaggatcctaaaggggcagaagaatggcaaactggggcctgaga

SEQ ID NO: 357860 - DNA, 201 bp, Homo sapiens
cacgcggcaatgaggtcatctccgtgatgaaccgggccaagcaagcaggtgagctggggcccgctgtggggtcaggaccaggcccaagatctcggtcaccratcctgacctctgtcaccctcaggaaagtcagtaggagtggtgaccaccacacgggtgcagcacgcctcgccagccggcacctacgcacacacagtgaac

SEQ ID NO: 357861 - DNA, 201 bp, Homo sapiens
caaactggggcctgagacgcccctggccatggaccgcttcccatacctggctctgtccaaggtaagggctgggccacctcagagtcctccaagcagaggaragggatcaaggatatggagtgtggcaggagggagggagccaggacagctggggcctaagttaggagctgggagcagttaggatcccagaggaccagaacc

SEQ ID NO: 357862 - DNA, 201 bp, Homo sapiens
cattgactgccagtgcacacaccagaccccaacaccaacaagcagctggaagctccccttgatagaaccttgccactggggctgccagtctttgctaatgygcttggcatggtgcctgggaaccagccacatggctcttgagctgcccttcaaggaggaaacagaagtcccctgtcaaaagatgaggccaccatccaccct

SEQ ID NO: 357863 - DNA, 201 bp, Homo sapiens
gcctgagacgcccctggccatggaccgcttcccatacctggctctgtccaaggtaagggctgggccacctcagagtcctccaagcagaggagagggatcarggatatggagtgtggcaggagggagggagccaggacagctggggcctaagttaggagctgggagcagttaggatcccagaggaccagaaccaggtccttg

SEQ ID NO: 357864 - DNA, 201 bp, Homo sapiens
cgggagcccatgcctacagaatccctgccctgctctacctgcctgggcagcagtccctgctggccttcgcggaacagcgggcaagcaagaaggatgagcaygcagagctgattgtcctgcgcagaggagactacgacgcacccacccaccaggttcaggtgaggcaggaggtgtctgcactggctccccagggctctgcca

SEQ ID NO: 357865 - DNA, 201 bp, Homo sapiens
tcactgtcacccactgtccccaagttacctctgtcccctccctaccctttttagctgaagacttatttttaattgttattttcttagacctctggagcacyccacgcccccagcctgggttagctgtcaggagcccctgtctcttcctttcccactgcagcgccgccccctcgctgcctcagggggagcccacgcagcagc

SEQ ID NO: 357866 - DNA, 201 bp, Homo sapiens
actggcccatcctccccaggccagggccctgcagccaacactccccagagctgcgggatgcatcctcctaaagggacctaggcagcttagcccgaaaatcmctgtcacccactgtccccaagttacctctgtcccctccctaccctttttagctgaagacttatttttaattgttattttcttagacctctggagcacccc

SEQ ID NO: 357867 - DNA, 201 bp, Homo sapiens
gaagcagggtcttgagatgtaggaaaggagaatgaaccccacgcgggaagaggacaggccgccctgactttggtccactcagccagggggtgagcaccacytgtcttggtgaatgactctgagcccatctcaggtgtggctgcaggtgacacatcttctcttcctgtccaccccccagccccatggcgtcccttcctgtcc

SEQ ID NO: 357868 - DNA, 201 bp, Homo sapiens; identical to SEQ ID NO: 76622

SEQ ID NO: 357869 - DNA, 201 bp, Homo sapiens
aatgcagtctcagggaaggcccagccgcccggagggagctccggagccgcactgttcctggtcaggagttcaggaagagggtcttcaggctctgagtggaycaatcatcaagcagcccttcttgggtatgacctggggcagattcttcatctgggaacaactggcccatcctccccaggccagggccctgcagccaacact

SEQ ID NO: 357870 - DNA, 201 bp, Homo sapiens
ggggattctggaagctcaatgtgactcctccttggctacatgagtaggatatggagtgtagaaggtgagaggtgaccgtcacattctgtcttgtactggtsaggttattgcaccttccgccagggctttgctattcaaggatggtgagctggactggggtgggaagtggaggaaccaggatgaagttgggaatggctcatg

SEQ ID NO: 357871 - DNA, 201 bp, Homo sapiens
gggtgttctgtaaatgcatattgatggcaatggaaggaacagaatcactcagccgagtgtggctgccttggaggggtgaggtggcaccctgggccccgcakctctggggaaacgttgcaaggaggatatgagtgttgggtgaagagttcttctcgatgacttttgactctaacccgggagacacacccgtgcccacccctc

SEQ ID NO: 357872 - DNA, 201 bp, Homo sapiens
acagaatcactcagccgagtgtggctgccttggaggggtgaggtggcaccctgggccccgcagctctggggaaacgttgcaaggaggatatgagtgttggrtgaagagttcttctcgatgacttttgactctaacccgggagacacacccgtgcccacccctcccactcatgcagctcctggcaccatccccagctgtttc

SEQ ID NO: 357873 - DNA, 201 bp, Homo sapiens; identical to SEQ ID NO: 76627

SEQ ID NO: 357874 - DNA, 201 bp, Homo sapiens; identical to SEQ ID NO: 76630

SEQ ID NO: 357875 - DNA, 201 bp, Homo sapiens; identical to SEQ ID NO: 76621

SEQ ID NO: 357876 - DNA, 201 bp, Homo sapiens
ttggaccgcacaggctaaactaattcctattggccaatttaaagggaatgatgggataagtgatttggcgggaatcagggcagagcaggtagcaggtaatyggaataatcggaatgagtcagggtggaaaggtaatcgaaaaaggttgctttatgaggaagttaagtttaaaagtagaaggcaaagaattgaacatactga

SEQ ID NO: 357877 - DNA, 201 bp, Homo sapiens
cagaaggagagcgtgttccagtcgggagcccatgcctacagaatccctgccctgctctacctgcctgggcagcagtccctgctggccttcgcggaacagcrggcaagcaagaaggatgagcacgcagagctgattgtcctgcgcagaggagactacgacgcacccacccaccaggttcaggtgaggcaggaggtgtctgca

SEQ ID NO: 357878 - DNA, 201 bp, Homo sapiens
gactctgagcccatctcaggtgtggctgcaggtgacacatcttctcttcctgtccaccccccagccccatggcgtcccttcctgtcctgcagaaggagagmgtgttccagtcgggagcccatgcctacagaatccctgccctgctctacctgcctgggcagcagtccctgctggccttcgcggaacagcgggcaagcaaga

SEQ ID NO: 357879 - DNA, 201 bp, Homo sapiens; identical to SEQ ID NO: 76625

SEQ ID NO: 357880 - DNA, 201 bp, Homo sapiens; identical to SEQ ID NO: 76626

SEQ ID NO: 357881 - DNA, 201 bp, Homo sapiens; identical to SEQ ID NO: 76628

SEQ ID NO: 357882 - DNA, 201 bp, Homo sapiens
acaggctaaactaattcctattggccaatttaaagggaatgatgggataagtgatttggcgggaatcagggcagagcaggtagcaggtaattggaataatyggaatgagtcagggtggaaaggtaatcgaaaaaggttgctttatgaggaagttaagtttaaaagtagaaggcaaagaattgaacatactgacatattaat

SEQ ID NO: 357883 - DNA, 201 bp, Homo sapiens; identical to SEQ ID NO: 76629

SEQ ID NO: 357884 - DNA, 201 bp, Homo sapiens; identical to SEQ ID NO: 76631

SEQ ID NO: 357885 - DNA, 201 bp, Homo sapiens
ctactcagtggcaagctcaggaggtggtggcccaggcccggctggatggccaccggtccatgaacccatgccccttgtatgacgcgcagacggggaccctyttcctcttcttcattgccatccctgggcaagtcacggagcaacagcagctgcagaccagggccaatgtgacgcggctgtgccaagtcaccagcactgacc

SEQ ID NO: 357886 - DNA, 201 bp, Homo sapiens
cttctttctctctccctactcagtggcaagctcaggaggtggtggcccaggcccggctggatggccaccggtccatgaacccatgccccttgtatgacgcrcagacggggaccctcttcctcttcttcattgccatccctgggcaagtcacggagcaacagcagctgcagaccagggccaatgtgacgcggctgtgccaag

SEQ ID NO: 357887 - DNA, 201 bp, Homo sapiens
ggatgagtgtccatctttcctacgagcatggaagcccacaagtgcaggcgtatctattaggctcatggctgtgcctccatggccacaacagtatgtacatytgacaggcgctccatgtcctttgccccccagaactcactaagggccgtgtcttcccatccccgcagatcctgatctaccacccagccttcatcaagtatg

SEQ ID NO: 357888 - DNA, 201 bp, Homo sapiens
tcatggttcagggacagttgctgcaaggatttgccatgtgacccagcaccctgaattgagtaaaggaatgaccttactacctgtgggaagagcattctggdcagagcagataggctgtgtgtaggtcctgtgcttggcctgcttgagggacagcatggaggctgagctggagtgagcaaggaaaagtcgtggaaaatggaa

SEQ ID NO: 357889 - DNA, 201 bp, Homo sapiens
ctcatgacgtactggagaaacaggctcgggcctggaccaaccctgtgcggactcagactcacagctggccataggacctgggacaggcccttcacctttcratggcctccgagatgatggtatgtgtgatgcttaatattgactgtcaactcgtttgattgaatgataaaaggtattgttcttgggtgtctttgagagtgt

SEQ ID NO: 357890 - DNA, 201 bp, Homo sapiens
ggactgctgtcctgtccttgtgaagaccttgatcaggttgagggtgtgattacagaaccaggcgtctctgcagagggagcatttgttctcttgcagagtgstttcctgggagagctgcttcagtgtggaggccttaacttaaacacatttgtgtctccagctcccagcaaacatgcagaatgtgcaccagataaatgttgg

SEQ ID NO: 357891 - DNA, 201 bp, Homo sapiens
aaaggggaggtggccagagcctactgggtcaaaacctcattcgtaggggctcttttaaacaatgagaacccttgagaactagtagagtgagcactcactcmttacccggaggacaacatcaagccgttcatgagagatttgctccccatgacccagatgcctcccacagggccccacttccaacactggggatcacatttt

SEQ ID NO: 357892 - DNA, 201 bp, Homo sapiens
aatgtaaactggttttggccttatattcctcctccttgaaggatgacatttgagctgggacaggaatgataggagggagccagaaaattcagcaagtgcaraggcccaggggcaggaatgagcttgattccccaagaatggatggggagtgtattagtctgttctctgcattgctgtaaaggaatgcatgagggtgagtaa

SEQ ID NO: 357893 - DNA, 201 bp, Homo sapiens
gaaaacagctaaagaaatgtaaactggttttggccttatattcctcctccttgaaggatgacatttgagctgggacaggaatgataggagggagccagaawattcagcaagtgcaaaggcccaggggcaggaatgagcttgattccccaagaatggatggggagtgtattagtctgttctctgcattgctgtaaaggaatg

SEQ ID NO: 357894 - DNA, 201 bp, Homo sapiens
cacttttataattgctgccctgccagcctcacagagctattgtgagactctggttgaatggatggatctaaattgccaagaaaacagctaaagaaatgtaractggttttggccttatattcctcctccttgaaggatgacatttgagctgggacaggaatgataggagggagccagaaaattcagcaagtgcaaaggccc

SEQ ID NO: 357895 - DNA, 201 bp, Homo sapiens
aggctgaggccataaacatgcagaaaactttagaacagaccccaggatttgacagagaaagcctgtgggcagagagagaacagagcggagagggggagggkgggcagcggtgggggtcgggagggagacagaaacacagagatgggctctctctccttgcagcttgttttcagcttcagtctgcacatctctacattaaaa

SEQ ID NO: 357896 - DNA, 201 bp, Homo sapiens
ctcccagtgttggatgcctacctggtggccagctcagacagagctgggacagagctgtctctagcacctctggccatgagggtgtttggccattcccagcrgtcattcggcgtagctcagtttatctctcctgccagagtcgcctccttattggacggagggtgaggagcactcatgatcactttgtggggagagtgggca

SEQ ID NO: 357897 - DNA, 201 bp, Homo sapiens
agcagcaagcttatagcaagcacctgtttgtccctcggcttttgatcaaaaggcctagggagaaacctctctcaggacagaaactagagcagaagactggrgaagcatttgtccctgctgacagcagtgtctggccgtcacagtgtaggccagccaaaacatgtggaccgtgtatatggtctgcatctctcagatggagtc

SEQ ID NO: 357898 - DNA, 201 bp, Homo sapiens
tgttccataggtatacatgtgccatggtggtttgctgcacctgtcaacccatcatctaggttttaagcaggcattagctatttgtcctaatgctctccctsccctcaccccctgactggccctggtgtgtgttgttcccctccctgtgtccatgtgttttcactggagaagaacatggctttttaagcaggctgcctgggg

SEQ ID NO: 357899 - DNA, 201 bp, Homo sapiens
ccatcccgagcctcaccagggctgccaggcctcagctgctctgagcatgccctgaccccgtggtgccgatccttgcccatatgctccggccacccatgttytcgctcctcccactggacagcttggcagcccctggtcaagagggcaaggtctccctcctttcctgactgctgggccctttctgatgagagctactcttcc

SEQ ID NO: 357900 - DNA, 201 bp, Homo sapiens
agctgggattacagacgcctgccaccacacctggctcatttttgtatttttagttgagacagggtttcaccatgttggccaagctggtctttgaactcctracctcaagtgatccgcccacctcgaccttctaaagtgctgggattacaggctgaaccactgcacccggccagagagattgttcttttacataaatgttct

SEQ ID NO: 357901 - DNA, 201 bp, Homo sapiens
agtgggtgacatgagcccagcaggcatgagcaatactcaggtagaaggcgctgctggccacagaggtgtctggctggcaaagtgacacccaaggatcctgygacatcaggatctgctcacctgcaaaatgctggtctcacctggggctgtagtgttgcctggttgttgagagctctgtctctaggggacaatgcctgggtt

SEQ ID NO: 357902 - DNA, 201 bp, Homo sapiens
gcagaaaggggcaggtcccaggtgaaacaccaccttcaacccagggacagcctgaagcctgggggccaggctgccagttccagggggagtccatggcctaraggaagaacttatggtgctttatccaagcccatccatggccatccatggaccaatcagcacacacttcctcccttctgagcccataaaaaccctggactc

SEQ ID NO: 357903 - DNA, 201 bp, Homo sapiens; identical to SEQ ID NO: 76635

SEQ ID NO: 357904 - DNA, 201 bp, Homo sapiens
gtagctcaggggctctgctgccaggaggctggagccacaaagccaggttgaccaccttctgtcctccgcccacagaggctccagcgggagaagaagcccartaacttgaatgacaccatcaaggagctgttcagagtggtgcctgggaatgtggaccctatgctggagaagaggtcggtgggctgccggcgctgcgccgtt

SEQ ID NO: 357905 - DNA, 201 bp, Homo sapiens
cagcctgggtgctgtggatgccatgttgatggtagcaggaggcagacaggctcctgggcagaaaggggcaggtcccaggtgaaacaccaccttcaacccarggacagcctgaagcctgggggccaggctgccagttccagggggagtccatggcctagaggaagaacttatggtgctttatccaagcccatccatggccat

SEQ ID NO: 357906 - DNA, 201 bp, Homo sapiens
gtattttctctttaaaacacatgaaagtgccaaaggagagaatgacaagaaatttaaagacctaaattggctttattgtgattctagaattgagcaacacwtcgttccacaaaacaaacagaataggttttccagtgagctgagcagaggaggttggctttataaacaggactgaagaaaccagaagcaacaaagtgtgta

SEQ ID NO: 357907 - DNA, 201 bp, Homo sapiens
gaaggaaggctcttgcctcgcccacctgcccgtcccagctatcactggtcagatctcaactatttccaaagcactatggacagggatgctgggaaatgtakttcccaggcttccagcccctgcagttaggggaagcacacagcgagtgggaacaaactctcactcctgtagacagtggccagcataggaacccctgctggc

SEQ ID NO: 357908 - DNA, 201 bp, Homo sapiens
tgatttcatttggtcttttaaataaccctgcgagtaggacaggccaagggttctgctggactttttcctttttgtttacaaatgaggaccttgaagcttadtggggagagacagaattgacctttgtggtcatctactctgtggcgggaactgagctgttcacttttgtgcaaggccatttatcccacagcaacgcttcgt

SEQ ID NO: 357909 - DNA, 201 bp, Homo sapiens
gtcattcttcttactggaaggtttgagggccattaagtatccaagatttactggtcaggtcttacttggtcccaccctgtgcccatacatgaagccagccrgccaggatcccaaaggccaggacatgggaggatctgtttttcaataatgggaagtccccggatgtgttgcattggaagtcatctcactgtctgtgcagag

SEQ ID NO: 357910 - DNA, 201 bp, Homo sapiens
gaaaaactgcattttaaactgaaattttcaatccactctcatttttacttgcattcccattttacagaggagaagtctgagcgtccaaatgctttagcacwggtttagaattgcccggcatgtacatagtggacccgctctcttcagataggtgcagactatctctgaaagctcactctgcctcagttcctctctaacgat

SEQ ID NO: 357911 - DNA, 201 bp, Homo sapiens
ttagttaattaatgcaattgaaaaactgcattttaaactgaaattttcaatccactctcatttttacttgcattcccattttacagaggagaagtctgagsgtccaaatgctttagcactggtttagaattgcccggcatgtacatagtggacccgctctcttcagataggtgcagactatctctgaaagctcactctgcc

SEQ ID NO: 357912 - DNA, 201 bp, Homo sapiens
ccggagttcaagaccagcctggccaacatggtgaaaccctatctctactaaaaatacaaaaattagccaggcatggtggcgggctcctgtaatcccagctrctcgggaggctgaggcaggagaattgcttgaacccaggaggcacggaggttgcagttagccgagattgcgcccgtgcactccagcctgggcaaaagagcg

SEQ ID NO: 357913 - DNA, 201 bp, Homo sapiens
tcctcaaattaggaaaggccgtcctctggtgtctattggggcttgctgtgggcagaaacccggctggggtagggaggtgggggtccctgagggaagctatrgggggcaggagaggctatgcctgcttcattatctagccactacccccagagctgcatgcccaggttcctgggcctgtcccctgccccattaaccagcttc

SEQ ID NO: 357914 - DNA, 201 bp, Homo sapiens
ctctccttttcttatgaggacacctgtcatcaggtttagggcccaccctaatccaggatgatctcatgcagagatcctcaacaatttcacccacagaggcsctttttccaaatgtcatgctcacagattccggtgactagcacttgaacgtatctttttgggagccactatttcacccactacagctattgaaatgcaaaa

SEQ ID NO: 357915 - DNA, 201 bp, Homo sapiens
ggcctgtaatcccagcactttgggaggccgaggtgggtggatcatttgaggtcaggagtttgagaccagctggccaatgtggtgaaaccctgcctctactraaaatacaaaaattagccgggcatagtggtgggctcctgtagtacccagctactcaggaggctgaggcaggagaatcacttggacccgggaggtggagat

SEQ ID NO: 357916 - DNA, 201 bp, Homo sapiens
attttaaattctttgtgagccataatttatcttcctttaacatacataagaacattctggaatttgctcagtagcttgcacagctctagtatttacccagkaatggaattgctggggcctagggtgtgcctgtgtgtaaactgcctctgtacctccaggtacgtccttgcacctgtacctccattagctagtgtggctaat

SEQ ID NO: 357917 - DNA, 201 bp, Homo sapiens
taggtcctgctccttccctgcaggcacaaaatgctggcaaggggcttggtgtggtctctgggggccctaggagtgaaactaaataggtttctccaagtgcrtcatttctgggtaattttttttttcttttatttgagacagagtctcgctctgtcaccaggctggagtgcagtggtgtgaccttggctcactgcaacctcc

SEQ ID NO: 357918 - DNA, 201 bp, Homo sapiens
gtgtgtccatttagtgtgtgcttgtggagtgtcacgtgcttaacactgtgccccttaggccagtgttatgtttgtcttcagtttttggatgaaacccaggmtctcaggggttaactagcaagaccctgcggccaccaggtgactctgctggatatgaacgtaggcttttctgtgccagcgcctcagcaccctggaccagct

SEQ ID NO: 357919 - DNA, 201 bp, Homo sapiens
agccgcacagagccagcccagctgctggtttgatagacatgatatctggctagctggccttgctactggcctggacacatgcctgggcccccttggggatyaattctctcttctttagctcctccgacttgcctccagcctttggagaactggaaatgggcggaccccatgtctgtgggctcctggtcctttcactttgct

SEQ ID NO: 357920 - DNA, 201 bp, Homo sapiens
gctccaaaggaaacggactttccaagtcatgctcatggagactgggccactctctagactcccacagggtgtcctgtgcacccctctccagtccagccacratgtgccagttgcaatcactactgtctgctgctcacaagccagccgggctcccctttgccttcagtccccaagtccacgttcctcaggacttccacgatc

SEQ ID NO: 357921 - DNA, 201 bp, Homo sapiens
cttcccccagatcttctccagctctgcgtgagccatgggctgagtcctggcatatagttctcccgtgcctaggatgagccaaatgctattttggttgcacrcacatgatgtcatttaattgtcatgacaacctaggttgtgaatattatcattatcctcattttacacagggtaaactgagtcacagatctgtggcttgcc

SEQ ID NO: 357922 - DNA, 201 bp, Homo sapiens
tttcatctgaaaaattggggtaataatagctcattcagtcttcattaaaagcttaagaggtaggttttttaattattgttccaggctttgcttgagctgasagggccagcgagagtcaaggtataggagcaattgagcagagagagtgtatcagtcagtttttgctgtgtaacaaaaccatgaaatggcataagagcattc

SEQ ID NO: 357923 - DNA, 201 bp, Homo sapiens
ctaagagcgggggacagccactgctgtgtttggggtgctgcagagcataatcataaatgtgggagtccagatacaggtcagctgttagggctccaggagtstgcggacccctgccctcacctctttgtgtcaccggagctccggattaagggctttctgacaactcctgaccacactcctcatcttctttccctccctttg

SEQ ID NO: 357924 - DNA, 201 bp, Homo sapiens
tctctgccaatttctagctgtgtggccctgggcaaattatactctttcagaatcttaatttccacatctgtgaaatgggagtaaaactaccagccccagakgactgctgtgaagctggaatgaaatcatgcacatgagatgctttgcgtgctgttggcctcattgtctgtacttaacctatggttgctattgttgatgata

SEQ ID NO: 357925 - DNA, 201 bp, Homo sapiens
ttcaacgaatgaatatgggaaagagtgagagaaggagtgaagcagaagttagccctccaaagctatgcttctcgtccccaaactatcaccccctccacgcyggggaggagcatgtggctgtcccagcacctgcggactcttctggcattttgtaggtgagggctaaggatgctatagatcctgcacaagggcaggaagaac

SEQ ID NO: 357926 - DNA, 201 bp, Homo sapiens
tgggacaactgttagagagggctctggagttgaggtgttttctacagagtcaggggaatccctgcagggaaaccactggccaaggacacagaactcctggrccctggccctggccctggcccatctgctccgggctggggaccttgggcacgttgtttaacctctttgacccttcgtttcctcacctgggagatggtagta

SEQ ID NO: 357927 - DNA, 201 bp, Homo sapiens
aaagaaattgtcagggccctccttggacagccctgagggcctaaaggcattcctccaagacaccccggcacctgcctggaagctgggaccagagccaaggsccatctgcttctgcacccccccgacccctccccaaaatgcagatcctcccaggatttggcctgggaacgctgggaagtcctaggaataaccgcgaggctg

SEQ ID NO: 357928 - DNA, 201 bp, Homo sapiens
tgggtctggggagatgatttgcttattctgttggttgaatagaatggaattggctttctgcactttgcaatctcgacagatggtcagtcatctaactggawcctccttgggggttgggcccgtttttttccccattgaatccccagtactttggtggaggagaggtcactcagggagtgttctggaattgccccaaacaat

SEQ ID NO: 357929 - DNA, 201 bp, Homo sapiens
cccaattttaccagaattaatgggagccaggtacccaggggttccactgtctaccgaggttgagaacccgtgatctcgagaagcatgcatttgccttcccrtgtccttcgctgtccgctaggctgtgttcgggtttccacttatgctctgagaggtttgctgccaccccaggaagaggggcaggagggcaggccacacagc

SEQ ID NO: 357930 - DNA, 201 bp, Homo sapiens
ctcttccggaagctcggattccctgtctctacgacaggacttgcaacatgtgtctcccagggtgttttagtgagtaacagtgctctatgagaaagttctcrggagcaatagttctggcacattctgtgtaagtgcccaggaccgtggtggtggaagctcggatctcgcagcagattccggatacagaagcggattctcata

SEQ ID NO: 357931 - DNA, 201 bp, Homo sapiens
ttacgaccttgtacatttgctcggtagcagcaccttcgacctataagctcccaaggcccatctctcttcttcatcagaactgccgcatcctctctggcccrctttctgtctggcatttgcctgacatattcctccagtagatgccaaattccacagggcgaggacctagtcgttctccatctgcgtcaccttaagcactgt

SEQ ID NO: 357932 - DNA, 201 bp, Homo sapiens
  misc_feature (1)...(201): n = A,T,C or G
atcttttctaagatttctaaatggggactttattacacggggcaggtaattacaggaggctgcagctgcagcagagagcttcacatggctggtggctgatnggtgcattttggaggctgtcatctttgttctgactgggggattggaatcctggcagaggcagggcctctcccttagcagtacagtggaaggcagccctgc

SEQ ID NO: 357933 - DNA, 201 bp, Homo sapiens
ttttgcatactctatcaaacttagataggctcggagaggtcaggaaacttgcccagagacacacagctagttctggataaggctagaattgaagactcccygtgcctccagcatcttgccctttgcattgggttgtgctgcctcagggaagaagccacttatgtgtctctatagggtggggttggtggaagggacagcctc

SEQ ID NO: 357934 - DNA, 201 bp, Homo sapiens
tgtagacagtggccagcataggaacccctgctggcagcaagaaacagggtgccctgagaaccctcgaatgcaggcaggattgatgcaactctcaatatggkatttgagccatgtggattgcagataccactctagcttctagccttattcgttgatcatagctacaagtttgctgagttcttaaatgtttctgaacagtct

SEQ ID NO: 357935 - DNA, 201 bp, Homo sapiens
cccacaccggctgactaccaccagctactttccaccctgtgatctcccactggcatgtccctccgcctgagctccgctctcctcacatggtgtttgcaagyggctcactcaggagctcagtctcatggtccccctggtgccccacgccctgtcatttgcagtgatgttctgtgatcctcacaggaggcttgtgaagtccta

SEQ ID NO: 357936 - DNA, 201 bp, Homo sapiens
ataatggaggtcagaagctccccgaaggacacaaagctcttatgattatggttctgaactggcatcttgacacttcttcccacattccattggctaaagcrtgtcacaacatccagtgggtgaaaaaatacactcccacttcgagagacgaggacgagggatagagacccttgtggctcccatacccagccttctgccagt

SEQ ID NO: 357937 - DNA, 201 bp, Homo sapiens
ttaacagaaaaggtgttgcaacctctggtctacagctgagctgtccacacagaaccacttcttatggggataatgaaattttaattaaaatgaaataataygaaaaattcaggcctcagtcacatcacagttcatgtgcttagtagccacatgttgcttatgggtacccatggatagtgcagagagaggacatttttatca

SEQ ID NO: 357938 - DNA, 201 bp, Homo sapiens
cagccgcacagagccagcccagctgctggtttgatagacatgatatctggctagctggccttgctactggcctggacacatgcctgggcccccttggggaytaattctctcttctttagctcctccgacttgcctccagcctttggagaactggaaatgggcggaccccatgtctgtgggctcctggtcctttcactttgc

SEQ ID NO: 357939 - DNA, 201 bp, Homo sapiens
gtggtagcctatgctttattcttcattggactcacagagcaccctgtgggccaggcatgcctttccctcaccagcaccgagactggtgctctgaaggctgktgcagtgtgtccatttgtgtcagccgcacagagccagcccagctgctggtttgatagacatgatatctggctagctggccttgctactggcctggacaca

SEQ ID NO: 357940 - DNA, 201 bp, Homo sapiens
ggaggacacccagctggtgcatggtgtgtgggcacagaagtcttctgtgttgaccgttcgggtgtgagagcagaggataggcagggtttcagagattttakgaaataggtgggaataacactttctgagacttggtttccccatctgtaaaaaaggaagtagtaatagtacccacttgggagagttctgtgaggactcaaa

SEQ ID NO: 357941 - DNA, 201 bp, Homo sapiens
gcctcggcacctctggggcctctctgggccccatcctcttctctgaatttgccacgcccgtgacacatacaggcaaccactccaagaacaggaacatggaraggcaaagaaaagatgctgtgacttctactttgggcaatggcagaagctcgtaccagatcttttctcccactgagaactataaaagctggaaaaacttga

SEQ ID NO: 357942 - DNA, 201 bp, Homo sapiens
gtggggaaacaaaacagagataggtaggtaggtagagggagtcagtgagttcaggactgctaggtcaaccaaaacccaaggaaccaagaacctagagcaamaacaaccacaaagaaaagaacatgtgctctgtgccttctaaaattttcctttcaaggcatttgccagcacttaagtttcatgggtccagagtctaagaaa

SEQ ID NO: 357943 - DNA, 201 bp, Homo sapiens
tgcagagatcagcctcaaacagggatctcagtttcctccctgtagaacctgagtctgggactccgtgcacgtagattgcagaggaagtgttccagggaaasggtgggggacacagggctacgcaggggagctgctgagcagggatgtgctcccagctagagtcaaccttcagcctgatcccacggccaaccccagagcaca

SEQ ID NO: 357944 - DNA, 201 bp, Homo sapiens
gaaagatgacagtaaaccaagtccaaagaagttatcagaaagggaatggggaagatagggaagataagagcaggtattgatggaattgaatgatgagccayggctacacagaaagccacaggagaaggcaggagtctgcctttgctaccattttgctgtgtgaccttggataagtcacttgccttctctgggttttagttt

SEQ ID NO: 357945 - DNA, 201 bp, Homo sapiens
ttccctcactgacctcgtcctgtataattatcccttttactcagcacacctgtcccacaccggctgactaccaccagctactttccaccctgtgatctccyactggcatgtccctccgcctgagctccgctctcctcacatggtgtttgcaagcggctcactcaggagctcagtctcatggtccccctggtgccccacgcc

SEQ ID NO: 357946 - DNA, 201 bp, Homo sapiens
ggccactctgtattgaaagcgtcaattttgccaacagcctgcacagttcgctcaggcatttctctagtgaccatagtgccaggggctgtgtgaagggctgrgagggcatcccagcctgtgatgggtatttactaccatcccgttcagtgggtatttactacaggttcaaaaccccgtgtggttccttcatttgtgtttcca

SEQ ID NO: 357947 - DNA, 201 bp, Homo sapiens
cactgccctccagagggacatgatcagctctgcttccctcactgacctcgtcctgtataattatcccttttactcagcacacctgtcccacaccggctgamtaccaccagctactttccaccctgtgatctcccactggcatgtccctccgcctgagctccgctctcctcacatggtgtttgcaagcggctcactcaggag

SEQ ID NO: 357948 - DNA, 201 bp, Homo sapiens
gttcaaaaccccgtgtggttccttcatttgtgtttccaggagtttcacacagttctctcagtctctggtcattgcccctcaactccctattgccagaggartttatcttcattagggactctccttagggaaattcttacttttcagtccccaaaagtgtgctgacatttgtcagtcttgtgctggtgaccccgctaagct

SEQ ID NO: 357949 - DNA, 201 bp, Homo sapiens
acggtgcctggtcctccttcactaatttttgctgggttacattcactgccctccagagggacatgatcagctctgcttccctcactgacctcgtcctgtawaattatcccttttactcagcacacctgtcccacaccggctgactaccaccagctactttccaccctgtgatctcccactggcatgtccctccgcctgagc

SEQ ID NO: 357950 - DNA, 201 bp, Homo sapiens
ggagtcagcaccagctgagccctagagaatgagtaagagccatcggcaaagcagggtggggtggttttctggacagtggggacagcctgagcagggacacrgaggtaggagcaactgtgacctctgggtcagtcacattgcttcaagttacaaataacctactttaccccataaaggggatttattccctcatgtaactga

SEQ ID NO: 357951 - DNA, 201 bp, Homo sapiens
aaactgaaattttcaatccactctcatttttacttgcattcccattttacagaggagaagtctgagcgtccaaatgctttagcactggtttagaattgccyggcatgtacatagtggacccgctctcttcagataggtgcagactatctctgaaagctcactctgcctcagttcctctctaacgatgtgcagcaggtattc

SEQ ID NO: 357952 - DNA, 201 bp, Homo sapiens
tgagtctcagtttcttccaagacaaaaagggaaactaatatctagctgacagtatattctgaggattatctgaagagatacgtatgcatgaatatctcatyctctcagctcttagtggatcatcagagaatattgattcattcacatgttgaagaagaaaaattaaagttcagcaatggcctaatagataccagaagccca

SEQ ID NO: 357953 - DNA, 201 bp, Homo sapiens
ttgcagatgacagacaaccttctgtgccttcatcaagctggttgtgtacccaccatgtccctggcgacaggatgggaaagaaaaagccctaattaaggatmgtcagaaaccacagttggaggaggacggcagagacagtttccctccccgctataccaacacccttccttcgaggtcctcgctcctgagggaccctggact

SEQ ID NO: 357954 - DNA, 201 bp, Homo sapiens
ttgctggactgcagtgacttcctgttgctgacttcctaggcttctctggccatctaccctagagcccaccatggggcccggagcccctcctctgggtcccytgatattccatgttagctctcgcctggcgtcctcaccttcaggtgggagttcatctgtctgcctgtctgcctcccctgttagctgggcctctcaattttc

SEQ ID NO: 357955 - DNA, 201 bp, Homo sapiens
tcggagcccagccctgtagcctccctccaaggagcaggcagctcagtggttgaccagcaagcccatcatcattcagcactactgggttatccatctgtccrtctgtcaattaaacaagtgcttatgagggcctggggccaggggcacataccgagattactaagactaaataagacacagcgtgtgccctccacagcagtt

SEQ ID NO: 357956 - DNA, 201 bp, Homo sapiens
agactggagcttcagcccattctcacctctccttcacctgagacctgtggctgcagaaccagaaactcatttccagaagcagcagaatgtctctctttccrcagggctcagaagtatgtattaagccttccattaactgcatcttactcagctggaaaaataatactcaggatgcaattttatctgatttctggcctgtaa

SEQ ID NO: 357957 - DNA, 201 bp, Homo sapiens
cagtaccttggtgatcctgtcttgcacatatagactggagcttcagcccattctcacctctccttcacctgagacctgtggctgcagaaccagaaactcayttccagaagcagcagaatgtctctctttccgcagggctcagaagtatgtattaagccttccattaactgcatcttactcagctggaaaaataatactcag

SEQ ID NO: 357958 - DNA, 201 bp, Homo sapiens
tcttttgggcttactcataggctaggcctaggattaaaataataattagtatgagagctgtgctaattattaattttaggttgcttgtctggaaaactcayggtaagggtaatagtaagaagatttctccatcaaagaggagaaatgtcatgacttctagaaaaaactttatggaaaaggggaggtggccagagcctactg

SEQ ID NO: 357959 - DNA, 201 bp, Homo sapiens
tgaatcatacagtgtgaggacttaggaaaaaagagccaaagattggccgccgcagtcacctgcttcattccctgtccttcccctgtgatggagtttgctcygagtctctgctgttctcagcttatggtggccaccatggggtacaggaggaccactgggtccaggcaacatgacgctgtcagtaatgatgagaaaaccaga

SEQ ID NO: 357960 - DNA, 201 bp, Homo sapiens
ctggtaatgagagtgaggtgctctcagagttaaatgctcagtccccgtgtacacctggggccctgccaggcagttagtaggattcagattattgtcccacmctatttattgaggatctattatatctaagtcagagcaggaagcacggctttagtttcctgtggctgccataacaaatttctgcacaattcatggctcaaa

SEQ ID NO: 357961 - DNA, 201 bp, Homo sapiens
aaatgacgaggttttcatttctttgccctctatctgctatggctacaagcacttctgtttatcatttaaaatcctatttgaaaaggtcactggttatttgygtgaatcatacagtgtgaggacttaggaaaaaagagccaaagattggccgccgcagtcacctgcttcattccctgtccttcccctgtgatggagtttgct

SEQ ID NO: 357962 - DNA, 201 bp, Homo sapiens
gtgtgtactatatagtcatgtatatttatgctatatatatattacatatactaaaaccaattgaaaaatcacaaatgttactatagcaaaagtcacccatytcacattatttctaaaaatatgaatgtgtaagagctatttcttaaggcagcttttctatcccctactaagagcgggggacagccactgctgtgtttgggg

SEQ ID NO: 357963 - DNA, 201 bp, Homo sapiens
atatctaagtcagagcaggaagcacggctttagtttcctgtggctgccataacaaatttctgcacaattcatggctcaaaacaccaaaagtgcatcctctygcagctctggaggccagaagtctgaaaacaaattatgggcagacttggctcctcctggaggctctgagggggaagccgccccaggcccgctcctggctcc

SEQ ID NO: 357964 - DNA, 201 bp, Homo sapiens
ttttttaaattttgctggttctttttcatttattagttggtttcctactataaagaagaaattttcttcctctgttcatcttttttttttttttttttttwtgagatggaggagttactttcacccaggctggaatgcagtggtgcaatcttgatctttgcccactgcaacctctgtctcccaggttcaagcagttttcct

SEQ ID NO: 357965 - DNA, 201 bp, Homo sapiens
ggacacctgtcatcaggtttagggcccaccctaatccaggatgatctcatgcagagatcctcaacaatttcacccacagaggcgctttttccaaatgtcakgctcacagattccggtgactagcacttgaacgtatctttttgggagccactatttcacccactacagctattgaaatgcaaaaagagagagagatcctta

SEQ ID NO: 357966 - DNA, 201 bp, Homo sapiens
aagcaggcagaggaacgtggaaggactagactggtagactggctgagtcttccggcctccatctttctcctgtgctggatgcttcctgccctcgaacatcrgactccaagttcttcagcttttggactcttggacttacaccagtgatttgccaggggctcttgggcctttgaccacagactgaaggctgtgctgttggct

SEQ ID NO: 357967 - DNA, 201 bp, Homo sapiens
aatttttgtcagggggtttcatgatctgatcttgtcatttgaaaggtcattcccatgttaaatgcaaaatagatcgaagaagagcaagatatatgtgttcmtgtcttatttattgagcacctactatatgccaagcatcactacattgagatggaaaagatagagtctttcctttcttgggttgcaggagtgatggggaga

SEQ ID NO: 357968 - DNA, 201 bp, Homo sapiens
tcaaagatgttcttaaacccagtgctgtattcaagatataactttcctatcctataactttgaatgataaactaaaaaacccagctggttttgcaaagggytttctgagtgtgagagggtcagatgggtgttctccctgtctcctcccgaccctcagtttggttggtctcatgacgtactggagaaacaggctcgggcctg

SEQ ID NO: 357969 - DNA, 201 bp, Homo sapiens
tgttgagcaccactgtgtgcaggtcctggggtgggctctggggaggtaacagagaaccgggcaggtagggtcttttccctttcaaagatccaagggtctakggaaggaggtggtgagccaggcatggtaaggattagggtctgctctcagcctcagcactatggacttgtggggcaggatcagccttagtcacaagggctg

SEQ ID NO: 357970 - DNA, 201 bp, Homo sapiens
ttctatggaagccatcaggccccttcctcccctctaatccggaccctcccagagactggattgtcaggtttgatcttaaggaatcacatgtgaattttacwcttagctcctctacccttttcttttaatgttgtttcaaagatgttcttaaacccagtgctgtattcaagatataactttcctatcctataactttgaatg

SEQ ID NO: 357971 - DNA, 201 bp, Homo sapiens
tgtgtgcaggtcctggggtgggctctggggaggtaacagagaaccgggcaggtagggtcttttccctttcaaagatccaagggtctagggaaggaggtggygagccaggcatggtaaggattagggtctgctctcagcctcagcactatggacttgtggggcaggatcagccttagtcacaagggctgccccgtgcattgc

SEQ ID NO: 357972 - DNA, 201 bp, Homo sapiens
tcctgaccttgtgatccgcccgcctcagcctcccaaagtattgggattacaggtgtgagccattacgcccagccaaaacctttttctagaaagaatcagakaataaatattttaggctttgagagccgtgccatctcagtaccatctgtttgtgccattggagcacgaaagtagccgtggacactgtgtacacagacgttc

SEQ ID NO: 357973 - DNA, 201 bp, Homo sapiens
gcctcagcactatggacttgtggggcaggatcagccttagtcacaagggctgccccgtgcattgcaggatgtttagcagcatcactggtctctacctactraatgctaggagtgccccatccccagttgcgatagccagaagatctccagacattgtcaggtgtcccaggtggggtgtgcgtgtgtgtgggtgcacatgca

SEQ ID NO: 357974 - DNA, 201 bp, Homo sapiens
aaatctcataatcagtgagggatgttgattcttctttgtgatcgggcacatgacttaggaaacaaacctgggcttagagttatgagggttgtaagcagttycagcttgcagtgttttagctgtgacattgggctggccacttttataattgctgccctgccagcctcacagagctattgtgagactctggttgaatggatg

SEQ ID NO: 357975 - DNA, 201 bp, Homo sapiens
atcactggtctctacctactgaatgctaggagtgccccatccccagttgcgatagccagaagatctccagacattgtcaggtgtcccaggtggggtgtgcrtgtgtgtgggtgcacatgcatgcacaaagttgccctcccttgagaaccagcagggttgggaaaatgacacattgatggcagaggtggcttcacacacatc

SEQ ID NO: 357976 - DNA, 201 bp, Homo sapiens
gacctccccttccttctcctgccttgcttctcatccctctccagacagcacccaccatggacacctgcatccgtgccccagcctctgcttccagggaagcygacccgaggccccgtgcttcccaaggagctcaggccaccaggcggcaggcattgattgagcgctgattgtatgcagattgagcgctgattgtatatactt

SEQ ID NO: 357977 - DNA, 201 bp, Homo sapiens
gcctgctccatctcagctggtgtggggaggacttactatgataatctagagaaagagccagtttcccatctgagctctacctggccctgcactcactctgkgacctcaagtgagccctttccagggtctgggcctccatttccccttttgccaatgaaagattggaatgggtctgagatttctgaagcgtggggcttgtga

SEQ ID NO: 357978 - DNA, 201 bp, Homo sapiens
tgggactacaggtatacgccattgtggatcactcttggtgaagggataagcccagaccttcaccaaccttgcagttctatcacagtcgtccttagtttatkcctttagagtccccatcaatcacccttcccactctgaactgtagagaggtacacagcacagtgagttgacttgatcaacatctggtcgagtgtctgggaa

SEQ ID NO: 357979 - DNA, 201 bp, Homo sapiens
aaggaaggaaggaaggaaggaaggaaggaaggaaggaaagaaagaaagaaacccttttcttagatccttagaagactcgactggagcccaaaataaatccyctgaattggccaagtattaaaggactctattctccttccctgcctttagtgtgctggagccctaacaagggcaaagaactgccagtggtcaagagctcaa

SEQ ID NO: 357980 - DNA, 201 bp, Homo sapiens
gaataccttcacagctaggaatggcagtgccaggactcgaagccaaccctcctgggccaaagcctatgctcttccctaccatcgccatgggcgtgggttgkggggaagatgcatcacaagactgtgccttcctgttctttctctttctccaggcagacccagaaggcactgcaggacttcagagagcaaagagggaagtca

SEQ ID NO: 357981 - DNA, 201 bp, Homo sapiens
tttgttctgactgggggattggaatcctggcagaggcagggcctctcccttagcagtacagtggaaggcagccctgcaggacccaccctcaagctggtcasccctccactgactgccccaggggatggcaggcagcatctgttggcatgtgaatatcagacaagtcatggacagtaggagcagaggtgaccgttggaacac

SEQ ID NO: 357982 - DNA, 201 bp, Homo sapiens
tgtctcttctgcttacccttcagaatttaacatagacagacgtttgcacctccgaggggctctaatctcaggcctcctctcttccctccacgggctgcccktgtcaatagcagcctgaggtcgtgtttacagattctcctccagagccttgcactgctgggatcagagtctgctccagcacctacaggctctgtggcctta

SEQ ID NO: 357983 - DNA, 201 bp, Homo sapiens
acatacataagaacattctggaatttgctcagtagcttgcacagctctagtatttacccagtaatggaattgctggggcctagggtgtgcctgtgtgtaamctgcctctgtacctccaggtacgtccttgcacctgtacctccattagctagtgtggctaatgagtccacactttcactcacagggcatgaggcatgagtg

SEQ ID NO: 357984 - DNA, 201 bp, Homo sapiens
gtatctctcggacacttcccaggtaattctgttatggataaggtgactactgtcatcccatttatttcctgactcatgccagcttgacattataataaagyatttcccccatgctattttaaattctttgtgagccataatttatcttcctttaacatacataagaacattctggaatttgctcagtagcttgcacagctc

SEQ ID NO: 357985 - DNA, 201 bp, Homo sapiens
gacatggggtttcactatgttggccaggttggtctcaaactcctgacttcaagtgatccacccacctcagcctcccaaagtgctgggattacaggcgtgcrctcccgagcccggcctcctttactgagttcttaatgtgtgcctggcatgtatctctcggacacttcccaggtaattctgttatggataaggtgactactg

SEQ ID NO: 357986 - DNA, 201 bp, Homo sapiens
aggcaggagaattgcttgaacccaagagatggaggttacagtgagcggagatcacgccactgcactctagcctgggcaatagagcaagattccgtctcaaraaacccccaaaaattagctgggtgtggtggcacacacctgtaatcccagctacttgggaggctgaggcaggaaaattgcttgaacccaggaagcggaggt

SEQ ID NO: 357987 - DNA, 201 bp, Homo sapiens
gtgaattgagacctggaccctccagtctcccatgttctctgtggtgtttgggagattagcaaccccccacagaagagttaggacccacttcccctgctctyagaagccacgcaactcccctctcagcagggcagaagggagaggccccttgctgctcgccagggccctgggccaggtgggagtgacagagcgcagccccat

SEQ ID NO: 357988 - DNA, 201 bp, Homo sapiens
tataaatgcaaatttatagaaaagttataagaacagccaacaaattcctggacctccttcgtccaggttttcaaatgttcgcattttattatgttcatttyttcttttttctctatattttttcctgaaatcagaaacttgcatcttagaacacaactttctaagtcagaaacttaacattaatttgactattatctaacc

SEQ ID NO: 357989 - DNA, 201 bp, Homo sapiens
tgtgaattgagacctggaccctccagtctcccatgttctctgtggtgtttgggagattagcaaccccccacagaagagttaggacccacttcccctgctcytagaagccacgcaactcccctctcagcagggcagaagggagaggccccttgctgctcgccagggccctgggccaggtgggagtgacagagcgcagcccca

SEQ ID NO: 357990 - DNA, 201 bp, Homo sapiens
catttttcttgcttccgagtctcttggtttaagcccagcagttccctgcttggctcctagattggtgctagtggctaccagttggatggatggaaatgaargggatgaatgggctggaacaggatgatagtaattcgcctggtattaggaagaacactgaaccccgggtctaaggccctctgcccactgtccagctgcaca

SEQ ID NO: 357991 - DNA, 201 bp, Homo sapiens
tcacaacatccagtgggtgaaaaaatacactcccacttcgagagacgaggacgagggatagagacccttgtggctcccatacccagccttctgccagtccrtttgtacttgttctccagcaagaagctcaacagacatttctcaattggtcataaatctggtacctaggaatggtgctgacctcttgcaggcctccaggga

SEQ ID NO: 357992 - DNA, 201 bp, Homo sapiens
ttaatctcctcaagcctccatttactcaccttcaaaatgatgaaaatcatagtatacacatccaaggaccattgtgaagattaactgagcttttgagtatraagggcttagtttagcaagtacctgtaagtacttaaaaaatgttatctgttatgctagtttaagtgttatctgttattgctactaccagtatcaaagtga

SEQ ID NO: 357993 - DNA, 201 bp, Homo sapiens
ttccagtagcctgtgtttcacatgatgtgaggtgaaggggtgatggtatatttattggcctcgtatctgatagttgcctgcacattgtgcccagagaagcmctttgggaagtggagctggtgttcaaaaggccactaattggcttattccccaggattcatcttcagttgttgaaatctattttttgaaaggcttaacctg

SEQ ID NO: 357994 - DNA, 201 bp, Homo sapiens
acacttttatgaaatctctccagggtttaccacgagtgaggaaggctgaggcaccaacaggcatcactacatagtgtggccagagctccacctgaggtgaygggcgggcctgggcatgcagcgggggccaatagtgaaaccaccgggggccaatagggataccaactcatcctggttttagcactgagagtcctgcatcta

SEQ ID NO: 357995 - DNA, 201 bp, Homo sapiens
cccagcagtgctggggccgggggaactgagggtcaggcaggaaagatggcagatgtccctactgctctgtcccccatccctggccggggctggagaactgkcatttccacctactcctcgctcttcttgttaaggcttgagcgggagcacgcaacccctgggccctggtgtctgagcagggtgggagtaagacacagctag

SEQ ID NO: 357996 - DNA, 201 bp, Homo sapiens
tccccagcaggcccctggcatggggctggccaagagatgggcaaagggcagaagaaggagggaagtgaggtacccaccacactggccttttgcatactctrtcaaacttagataggctcggagaggtcaggaaacttgcccagagacacacagctagttctggataaggctagaattgaagactccccgtgcctccagcat

SEQ ID NO: 357997 - DNA, 201 bp, Homo sapiens
gagagggaaacctgggacatgaggtcattttaaggattggcgatgattccagccatcatcaggtggcttggtgcatatgtcttcactcactgacagtgtcyagtcccacctcacactgttccctggagcccccttctcctgagcagcctcccatctcactccctggcctccttggatttttctgtgtgtcagctcagtgat

SEQ ID NO: 357998 - DNA, 201 bp, Homo sapiens
catccccgcagatcctgatctaccacccagccttcatcaagtatgtctttgacaactggctgcaagggcacgggcgatacccatctaccggcatcctctcrgtcatcttctcaatgcatgtctgcgatgaggtatgccaccctccccctgcccacagggctgcctcgaagctcaccgtcctgtgttcccaagagaggccag

SEQ ID NO: 357999 - DNA, 201 bp, Homo sapiens
gtagaaacatgggtgcccctgtcatttccccaccccacccacctccagccagctggtcccagacccttgcttgaggttctgctcaagagccctttctcccrtcgtcccaccgatttggccctaacgttcttgccctggagcaggcccatgtccatgttgcatttcctgagaaagccacatgtggcatggtgctgtccccgt

SEQ ID NO: 358000 - DNA, 201 bp, Homo sapiens
tgccctcctgcactagagcaggcaggaagagcagcctggaccatgggtaccacatatcctatgaggaccccattgtgccacgcgttggttgactggatgayttccactgtgtttacactgcacagtctcctcacttcctttagacctcccggtgagcaagcttgtattgtcttttgtgaattctggcatctgcctcccctc

SEQ ID NO: 358001 - DNA, 201 bp, Homo sapiens
gttgaaactgagcctgggtgctgtcgcaacccagctgggtgtgtatgtactctgggtggtgttgacatgccagacccctgtcatcttggccccctccagastttggtcaccgacaggcacaggagggaagccaagaggagactgagggcagctcagtgcaggcctgcaggcgtccctcagcatgcacagcctgggtgctgt

SEQ ID NO: 358002 - DNA, 201 bp, Homo sapiens
acaacctctcattttatcctttgttaaagagcagccccttcacaaagaagtgacagtacgaacttgcaccttagttagcatggatgggtgccctgggcctkcaatcagtcaggtcagggatcaggtgagcttgggcaagtctcctcacctctctgaccctctgttttcttgtctagtgactaggggtacaaggcctgactt

SEQ ID NO: 358003 - DNA, 201 bp, Homo sapiens
tctccatgttggtcaggctggtctcaaactcctgaccacaggtgacccacccgccttggcctcgcaaagtgttgggattacaggcgtgagccaccgcaccyggccagcactgttgttcttttattgccactgacaaaaggcagagaaaaccagaatatttctttcccaaaacagtgacgccacatggagtaacctgcctgc

SEQ ID NO: 358004 - DNA, 201 bp, Homo sapiens
accctgtgctagctcacccacacaccccttgctgcttcacgcctggcttgcccttagcaggtgtgtgatctaggctggtagcataagctgagcacaacctrttgggccaagtgggtgacatgagcccagcaggcatgagcaatactcaggtagaaggcgctgctggccacagaggtgtctggctggcaaagtgacacccaa

SEQ ID NO: 358005 - DNA, 201 bp, Homo sapiens
caccccaccacctcaacccctttactcccgatgccgacactgttgcacagagaactaaagtaattggccccagaccacatggcattagtagaggcagaatytgaagctgggtgattcgatttccaactcaatgctttctccacaagctcaagcccctcttttggcttggcacctgtaggcaaacagaggcaagtctctccc

SEQ ID NO: 358006 - DNA, 201 bp, Homo sapiens
ggacccgggaggtggagattgcagtgagctgagatcgtgccatggcactccagtctcggcgacagagtgagactgtctcaaaaaaaaaaaaaaagagagcraggctttagagttctgctgcccgtcactgagggtccattaaaagcttctctttgtgaagacagccaccacctgatttatgtttgcttcagccagcatcat

SEQ ID NO: 358007 - DNA, 201 bp, Homo sapiens
ctagaaagccggtcccattggtgggaggacccatcaccacaggggttggcccgcgagccccgtatgcctggccctgcccagctgtctgcaaatctgtgtaygctctgctcggtcaccactggttcgctttgtcccacctgtgctgtgtttctctactagcttgttagttgcagagccccatgtgtcttagcacaggctgat

SEQ ID NO: 358008 - DNA, 201 bp, Homo sapiens
ggcttttgatcaaaaggcctagggagaaacctctctcaggacagaaactagagcagaagactggggaagcatttgtccctgctgacagcagtgtctggccstcacagtgtaggccagccaaaacatgtggaccgtgtatatggtctgcatctctcagatggagtcctgttaggaggtgtgtgtagacgcacgtggtggtgt

SEQ ID NO: 358009 - DNA, 201 bp, Homo sapiens
agagacgaggacgagggatagagacccttgtggctcccatacccagccttctgccagtccgtttgtacttgttctccagcaagaagctcaacagacatttstcaattggtcataaatctggtacctaggaatggtgctgacctcttgcaggcctccagggaggtcctgagagtcccatgagagtcgactttgctttgtcac

SEQ ID NO: 358010 - DNA, 201 bp, Homo sapiens
aaacctacagttcagtcaaggagacttctaataaataacaaagttaacaaataagagatttcatgatgtgtaggagaacaggtgctagaaaggagcgggcrgggggctggggagcgctggcagcagaggggcccggggtcagcaacactgagaagagaaagatgagcagagacttgaggaaggcaagaaccttgtccacgt

SEQ ID NO: 358011 - DNA, 201 bp, Homo sapiens
ggcagggttcagagccctggggacacttccataaactcacaagcaaacgttccttgcgaaacctacagttcagtcaaggagacttctaataaataacaaarttaacaaataagagatttcatgatgtgtaggagaacaggtgctagaaaggagcgggcggggggctggggagcgctggcagcagaggggcccggggtcagc

SEQ ID NO: 358012 - DNA, 201 bp, Homo sapiens
aggagtgaagcagaagttagccctccaaagctatgcttctcgtccccaaactatcaccccctccacgctggggaggagcatgtggctgtcccagcacctgyggactcttctggcattttgtaggtgagggctaaggatgctatagatcctgcacaagggcaggaagaacagttctggcaaattgctaaacgtgtcctcctc

SEQ ID NO: 358013 - DNA, 201 bp, Homo sapiens
cccggcacttaattagtaccttagtggtttcaacgaatgaatatgggaaagagtgagagaaggagtgaagcagaagttagccctccaaagctatgcttctygtccccaaactatcaccccctccacgctggggaggagcatgtggctgtcccagcacctgcggactcttctggcattttgtaggtgagggctaaggatgct

SEQ ID NO: 358014 - DNA, 201 bp, Homo sapiens
aactccaggattgaatgagttaatacagatgtggagatatttcaggcttggttccaggccactgcaataaagtgaggattgcagtagagcaagtcatacarattattttggtttcccagtgcacacaaaagttgtatttatactatactgtactgtagtctatgaagtgtgcagtagcattatgtctaaaacaacaatgta

SEQ ID NO: 358015 - DNA, 201 bp, Homo sapiens
agattgatcccttctcaaaagactaatttttattctagtcatgcccagctataagcatttgggcatttacagataatctttgttcctgaagggcatccgartatgtccttcctccttttaatgcccatgacccttactatcctggaacagagtccacattgcagaaaggacaaggctcaccacgttcagggccccatcaag

SEQ ID NO: 358016 - DNA, 201 bp, Homo sapiens
gcaaggctggtgaaacaggagctgggatctaggggtttggatgctggggtacaggaactcatcctggggttgaaggtggagagagctggaagttgattgtmtcagttctgcttacgttctggccacaatgaatctgctcatggcccatgtggtactaagagctgttaacagcaaagcagagtggagcagggagggcttttt

SEQ ID NO: 358017 - DNA, 201 bp, Homo sapiens
gatgaggaaactgaggcttccagaggcacacgggcaaggctggtgaaacaggagctgggatctaggggtttggatgctggggtacaggaactcatcctggsgttgaaggtggagagagctggaagttgattgtctcagttctgcttacgttctggccacaatgaatctgctcatggcccatgtggtactaagagctgttaa

SEQ ID NO: 358018 - DNA, 201 bp, Homo sapiens
tgttttctacagagtcaggggaatccctgcagggaaaccactggccaaggacacagaactcctgggccctggccctggccctggcccatctgctccgggcyggggaccttgggcacgttgtttaacctctttgacccttcgtttcctcacctgggagatggtagtataaattcccactccctctgttacaggagagttagg

SEQ ID NO: 358019 - DNA, 201 bp, Homo sapiens
tttgttttgttttgtttggaagtttggaagtttcattcagaaaagtaacccatgaccactgaaacaaatcctgaaaacagagaaaagtataaaagctcaaracagaaacagaaaatcctacagaaaccactctcccagaaagtacctatcttagtagttcatactgttttctttcacggcattttggttcctctaggttaa

SEQ ID NO: 358020 - DNA, 201 bp, Homo sapiens
cacttactgctctgccccacacaggctgtgtggcctcaggcaagtcagttgacctctctgagcctcagaccctcagctatgacttggaattgcaacacatytccagaggggtagagatcaaaccacactgtgcctgtgatggggctttgaattaaagcagggaaccttctgtgcctggagagcctcagcatctaggggcag

SEQ ID NO: 358021 - DNA, 201 bp, Homo sapiens
ccgtgctgaatgtctcccccagcaaggctgtctcttcttgagagatttcatccctgtctcttccccacagtgctcattttcttagcaccttctctgccctmggctctagggacagagacagtgagatgagccccttccctcgcctggtgagggtgttgggagcacaccaggaggccagagaaggattgtactccagggagg

SEQ ID NO: 358022 - DNA, 201 bp, Homo sapiens
gatgtttaatcagaaaaaccacttttcctgtagagcacatttcctaaaaggctgctgctgtgtagggaggtgtggccttttcctggtgcagtgtgaaggasggaagtgacgggcagtcgtgaactgtctgggacagatagcacaagtcagagtttgagcaaaactagggtgttaccggcgctatgttgaaattgtctggag

SEQ ID NO: 358023 - DNA, 201 bp, Homo sapiens
actcatctctgacaagtggtgcagcccttttcttttctgcacaatcacccaaatgggatcagaacccattaggatctttccactctgctgtgccaagaaasgggggtagggaaaggatgaaatcaatttccttaaccatcattactgagagctttgctggtgctccaaaaggtaggaggtggcagcatgcagtaaatcaat

SEQ ID NO: 358024 - DNA, 201 bp, Homo sapiens
tggtgctagaggccagtcccacttggatgtgaccctggcctctgccaggattcaaaccacaaagaacatttggaactgggatgtttgctttgaagcagccygaaaacaagtgaaaggaaaccaagataactctctctccctccgctggcaaggatcaaaaataccttgtgcagggaagcccgagcctcgaggggccactgc

SEQ ID NO: 358025 - DNA, 201 bp, Homo sapiens
gggatgccagctgcagcaggggaggcatagctggggctgcatgctccacagagctggcagggaccaggaacaggtgggaaccctgccttctatcaagttgkcagggcaggagccctgagctcccaggcacagctgcagctacctagccacagctctggacccaggcatccctctgctcttggggacccaggaagcccccct

SEQ ID NO: 358026 - DNA, 201 bp, Homo sapiens; identical to SEQ ID NO: 76641

SEQ ID NO: 358027 - DNA, 201 bp, Homo sapiens
tctctccatgtcgttacgcagctgagcactggttgggatgcattcgaatgacttcagcaagatcctgctttcctcagcccccgctctgttttatttattgkttaatatttccaatgatccaaatcaaagtgaataaacaaagagctattttattgtttgggtgtgtttgttgcttttctacaagggtcatgcatttgcgcc

SEQ ID NO: 358028 - DNA, 201 bp, Homo sapiens
ggcttctagttctggaagctgtagagggttgcaccctatgcatcttgggccctggatgtcttcagaagggcactgtggatttaatatggttttggagctgyccccctttctaccaaaaggtgatcaatctcctttcaactctaattttcctggaaaaaaatataccctgcttattgacaatctacaccttgagaatgggga

SEQ ID NO: 358029 - DNA, 201 bp, Homo sapiens
tgggtccagagtctaagaaaccaagcagaaaacagcagatgaaaagctaaaaagactgggcatgtggctcatgcctataatcccagcactttgggaggccraggtgggtggatcgcctgaggtcgagagttcgagaccagcctgaccaacatggagaaacctcgtctctactaaaaatacaaaaattagccaggcatggtg

SEQ ID NO: 358030 - DNA, 201 bp, Homo sapiens
tatcccacagcaacgcttcgtgtgagcatttttgtttgtttgtttgtttaagatggagtcttactttgtcggccaggcgggagtgcagtggtgcaatctcrgctcactgcaacctccacctcccaggttcaagcgattctcctgcctcagcctcctaagtagctgggattacaggtgcctgccaccacacccggctaattt

SEQ ID NO: 358031 - DNA, 201 bp, Homo sapiens
tttacatcatttctacttgtaccccaagacccacgggcttgcttcatagatgaggaaccacaatcttttattataatgggctgcaagtgaacctactcaayttctctcttggagggaggcattatctttatgatactggagagtaagcacacctgagccctgctctggaaggagacactatctctatgttccaggctctgt

SEQ ID NO: 358032 - DNA, 201 bp, Homo sapiens
gatcaaattactgaccttttctatgtctcagcttcctcttctatcatgaaggcacactttgtacagttgatgtgaaaactaaacaagtttattcagtaaargtctctcaacaaatgttagttttgattcctgagaaggtcaagatttagacagggcggtgtgggtgtgagtggtacttcaacatggccttttaacctattc

SEQ ID NO: 358033 - DNA, 201 bp, Homo sapiens
tatttccaaagcactatggacagggatgctgggaaatgtagttcccaggcttccagcccctgcagttaggggaagcacacagcgagtgggaacaaactctcactcctgtagacagtggccagcataggaacccctgctggcagcaagaaacagggtgccctgagaaccctcgaatgcaggcaggattgatgcaactctcaa

SEQ ID NO: 358034 - DNA, 201 bp, Homo sapiens
atgcgggttagacacagataaggaaaaacaattgatcaaagaacaattggcccagctagggtggagtttcttaaggcagccaggaagtggggggctggacrgagggaggaaggaaaggaaggagggagggccttcaaggaggggtggcggagatggggcggagggggagcagacagtggatcctaattgttacaggcactg

SEQ ID NO: 358035 - DNA, 201 bp, Homo sapiens
gatggagccccccagggcaggacaaggtggaggtggattaggagcaggcctggaggagacacacacacacacacacacacacacacacacacacacacacrcacaggcacacagagctgttatctcatttgaatctgcaacagctgggggtggggaggagtagtcacaagattaccagttggcaggtaagatgcccaggaa

SEQ ID NO: 358036 - DNA, 201 bp, Homo sapiens
ctatttccaaagcactatggacagggatgctgggaaatgtagttcccaggcttccagcccctgcagttaggggaagcacacagcgagtgggaacaaactctcactcctgtagacagtggccagcataggaacccctgctggcagcaagaaacagggtgccctgagaaccctcgaatgcaggcaggattgatgcaactctca

SEQ ID NO: 358037 - DNA, 201 bp, Homo sapiens
gggttagacacagataaggaaaaacaattgatcaaagaacaattggcccagctagggtggagtttcttaaggcagccaggaagtggggggctggacagagrgaggaaggaaaggaaggagggagggccttcaaggaggggtggcggagatggggcggagggggagcagacagtggatcctaattgttacaggcactgaatc

SEQ ID NO: 358038 - DNA, 201 bp, Homo sapiens
caggcccctgtgtgcgggctcaggtccctccttcatcacagggtggtattggcaccagcctgggggagcagttcatggggctgggtgtgctggaagagacrtgctgagaagttagggaccccaggttctctctgactttgttttctgtttttattttgctcacatagatttgtgagttgttaaaaaagaagggctcctggg

SEQ ID NO: 358039 - DNA, 201 bp, Homo sapiens
gcgtatctattaggctcatggctgtgcctccatggccacaacagtatgtacatctgacaggcgctccatgtcctttgccccccagaactcactaagggccrtgtcttcccatccccgcagatcctgatctaccacccagccttcatcaagtatgtctttgacaactggctgcaagggcacgggcgatacccatctaccggc

SEQ ID NO: 358040 - DNA, 201 bp, Homo sapiens
tccaggcgctctaggaaccagaaccctgggctccacagcagggccaggtgtctcctcaggtgctgtggtctcatcttagtgccacctcagccagtgtacarccttgggcaagtcacgccccctcctggagactctgaaaatggaacagaaaggtgtggtcatctgtgtgttcctctgtgatctggaaatgctacaaccttt

SEQ ID NO: 358041 - DNA, 201 bp, Homo sapiens
cggccattcagtaggttttaattcaatgcctttgacatgctgggtacttcggatacagcagcaaaaaacaaaaacatggtttctgctgtcatggaacttartctggcctgctgtttgctccttctgcctatactttcttcctccagctttcactagagagatctttcggaagccctccatggttccgcagtgccctcaaat

SEQ ID NO: 358042 - DNA, 201 bp, Homo sapiens
aacaattatgctatatggttgtattgtgttaatatttcatcaagaggaagtgccatacttaagtactcatctctccctgttgctgcttatttgcatattarcgtatgtcatcatcatcattatcacaaacaccaccgtgttgcctttagcattttctgtcatttgaactatgtcctttcgataagttcccaggagagagat

SEQ ID NO: 358043 - DNA, 201 bp, Homo sapiens
gaggaactcgctcctgataggagagaaagcccattctcatggctctcatttcttggggactaatgtgcggtgagttggtggggagcggggtgagctctcayacctgtgtgtaggctgctcgagagcccatgcctgcactagagcccatgactcacctcaagtccatttgaaaaattagggtgttggtaattcacggggaaa

SEQ ID NO: 358044 - DNA, 201 bp, Homo sapiens
tcccacatcagggactgcattctcaggaatcagctgagctcaggagtcctggggctgggggagtgtttgtgagcactctcgcagggctggctgtggccctyacgcctttgtaacaaccccacacacatagatttcaccccacagcctccctggcagccagctgctgtcatttcccttttttacggatgatgaaacccaggc

SEQ ID NO: 358045 - DNA, 201 bp, Homo sapiens
actcacaagcaaacgttccttgcgaaacctacagttcagtcaaggagacttctaataaataacaaagttaacaaataagagatttcatgatgtgtaggagracaggtgctagaaaggagcgggcggggggctggggagcgctggcagcagaggggcccggggtcagcaacactgagaagagaaagatgagcagagacttga

SEQ ID NO: 358046 - DNA, 201 bp, Homo sapiens
ttatgctaggacattctggaaattcatgtctatctgaatgatgctgaacagtcattctactctcactatcaacgccgccaccaactgcatttattaaaccrtgttcaggcccagtttcagaccctttcccttgctgttacttctgacatcaactcggtggcccaagtacagatgagcaaaccaagactctgaaaagctaat

SEQ ID NO: 358047 - DNA, 201 bp, Homo sapiens
tggttctttttcatttattagttggtttcctactataaagaagaaattttcttcctctgttcatcttttttttttttttttttttttgagatggaggagtyactttcacccaggctggaatgcagtggtgcaatcttgatctttgcccactgcaacctctgtctcccaggttcaagcagttttcctgcctcagcctcctga

SEQ ID NO: 358048 - DNA, 201 bp, Homo sapiens
agggttctcccaagctgctggcactgctgggctgtggggcaaatgggcaggcgccgatgcagaaaggagcagggaaacaggctccaaaggaaacggacttyccaagtcatgctcatggagactgggccactctctagactcccacagggtgtcctgtgcacccctctccagtccagccacgatgtgccagttgcaatcact

SEQ ID NO: 358049 - DNA, 201 bp, Homo sapiens
agtctctgctgttctcagcttatggtggccaccatggggtacaggaggaccactgggtccaggcaacatgacgctgtcagtaatgatgagaaaaccagacrctgctcagagtgcatggagtttgtaaatccacttgaaattgggctggtgcaactgaggaacggtgctttaaattttattccattttaattattagctaat

SEQ ID NO: 358050 - DNA, 201 bp, Homo sapiens
tacacagcagcttctaccactgccagaggaaggaaggctcttgcctcgcccacctgcccgtcccagctatcactggtcagatctcaactatttccaaagcrctatggacagggatgctgggaaatgtagttcccaggcttccagcccctgcagttaggggaagcacacagcgagtgggaacaaactctcactcctgtagac

SEQ ID NO: 358051 - DNA, 201 bp, Homo sapiens
ctggggcagctacacagcagcttctaccactgccagaggaaggaaggctcttgcctcgcccacctgcccgtcccagctatcactggtcagatctcaactayttccaaagcactatggacagggatgctgggaaatgtagttcccaggcttccagcccctgcagttaggggaagcacacagcgagtgggaacaaactctcac

SEQ ID NO: 358052 - DNA, 201 bp, Homo sapiens
ttctggggcagctacacagcagcttctaccactgccagaggaaggaaggctcttgcctcgcccacctgcccgtcccagctatcactggtcagatctcaacyatttccaaagcactatggacagggatgctgggaaatgtagttcccaggcttccagcccctgcagttaggggaagcacacagcgagtgggaacaaactctc

SEQ ID NO: 358053 - DNA, 201 bp, Homo sapiens
gcctcagcctcctgagtagctgggattacagacgcctgccaccacacctggctcatttttgtatttttagttgagacagggtttcaccatgttggccaagytggtctttgaactcctgacctcaagtgatccgcccacctcgaccttctaaagtgctgggattacaggctgaaccactgcacccggccagagagattgttc

SEQ ID NO: 358054 - DNA, 201 bp, Homo sapiens
gaacttgaggctcagcagcccatgtaacttcctgggggtcaccgcaaacagccccccaccccttgtggcagcagctaaaccaactcccgaccttctctccyccccaaagctccaccctctctctcttttcagttgcagcccatgacacctcctaagatcctgcccctgggaatgggaagaacacctactccggggtagcca

SEQ ID NO: 358055 - DNA, 201 bp, Homo sapiens
ggggtgaactcttgggattccatggcaacactgaaaaaccctgtgttgatttttctatcctcgctcatgttacctttcccacatctggccttgcttagaargaacgatgtctgaggctgtttgtttattagagagctctgttagccgaggagagacagattaaaggccgtggggacagccaagcctgtccaagtccccttg

SEQ ID NO: 358056 - DNA, 201 bp, Homo sapiens
tgatcctgggtaggtgacattttcctaatgttaatgttaatgttaaatattcttttgtgatggtcaggaattgttctaagcactatatatatatatatatwccaatagtattgtttccaatatgtgttaaatattcaagattattagtaacatgattgtacggtgtggtagctcatgcctgtaatcccagcactttgggag

SEQ ID NO: 358057 - DNA, 201 bp, Homo sapiens
ttgatggggcatggggagagggtgagaatgaggcccaggcggtcttaacagctcagaaagttctttttatccctgtccctggtggaaaagtgcattacagrtgacaggagcaaaagcagctgtgaccaaagctgctgccagctgtgggtagagcatgattatcatttgttattgccctcaactgagcaccctcttctcatt

SEQ ID NO: 358058 - DNA, 201 bp, Homo sapiens
aataggccttctcccacatgccaagtggtgtgctgggtggtgagggcacagtggtatgtagggcagacatgcccttgcccttatggagttaacgtgttggyggtaatgctttgtaggaatgcagggaacactgaaaatatcgaggggcagtgcccagccttgtccccagagtcagcgaagatgtctctgtgaagtggtgtt

SEQ ID NO: 358059 - DNA, 201 bp, Homo sapiens
tgattccttaataatctcagcctctgtcccaccctgtgatgttgctttcagtgagcaaggacgaagatcattctactttctctctccttttttttttttttcgacagagtctcgctctgttgcccaggctagaatgcagtggtgcaatctcggctcactgcaacctctgcctcccgggttcaagcaattctcctgcctcag

SEQ ID NO: 358060 - DNA, 201 bp, Homo sapiens
cgtggcctggacaatcccagagcatcagcatacctgagttcaggattgagcccattatggccgagagaggccctggtccccgtctcaggaaagttgctccsaggctccaggcgctctaggaaccagaaccctgggctccacagcagggccaggtgtctcctcaggtgctgtggtctcatcttagtgccacctcagccagtg

SEQ ID NO: 358061 - DNA, 201 bp, Homo sapiens
tgggcgccatccagagagaccagctgaggccgaaaggtagattcttagcatgaagagctgggcctctggagccgggctgtttggatcaccttttatcttayttttttgagacagagttttgctctgtcacccaggctggagtgcagtggtgcgatctcagctcactacaacctccacctcccaggttcaagcaattctcat

SEQ ID NO: 358062 - DNA, 201 bp, Homo sapiens
cattgtgggaggagataaaatgagacttgtgtgttttaaagttgagcagaacaagatgtttttaaaatgctgtgttccctatgtgggaggccttctaatgrtcagctggggacaatgcgtccagtcctcccacccctgggaggtcccggaaaggactgcagtgtgggatgggaggcacactcccagtgttggatgcctacc

SEQ ID NO: 358063 - DNA, 201 bp, Homo sapiens
atgagggctctctttctggcttgcaaatggcagccttctaatttgtcctcacatggctttcttatgtgcatatggtgagagtgctttctggcacctctttyttttttttttttataaggacatcaattctagcagattagggccccaccattatgacctcatttaaccttattaccttcctaaaggccttatctccaaata

SEQ ID NO: 358064 - DNA, 201 bp, Homo sapiens
ataaaatgagacttgtgtgttttaaagttgagcagaacaagatgtttttaaaatgctgtgttccctatgtgggaggccttctaatgatcagctggggacartgcgtccagtcctcccacccctgggaggtcccggaaaggactgcagtgtgggatgggaggcacactcccagtgttggatgcctacctggtggccagctca

SEQ ID NO: 358065 - DNA, 201 bp, Homo sapiens
ttatccatggccactgagctgcaaaatggcagagcctgagtggaagtcggctctcctgactatctactcagttcttacaaatcaaacgtttgttgggggggcgttagaatacttgcaaaaggaactctgtgtttgtcagctttgctgcataacaaaatcttccaagctcagtgacttgcaacaggtgtttatttcttgttc

SEQ ID NO: 358066 - DNA, 201 bp, Homo sapiens
catgagggtgtttggccattcccagcagtcattcggcgtagctcagtttatctctcctgccagagtcgcctccttattggacggagggtgaggagcactcrtgatcactttgtggggagagtgggcagagtagggctgagtggaggtgaactccccctgccgcatggacgctccccgaggtggggtatgggcgccatccag

SEQ ID NO: 358067 - DNA, 201 bp, Homo sapiens
actcgcttgaacccaggaggtggagattgcagtgagccaagattgcaccaccgcactccaccctgggcgacaagagtgaaacttcgtctcaaaaaaaaaaagaaaagaaaagaaagaaaagaaatagccacgtgaggctagtagatataaagaactgtgacagacctgagatgtcaacctatttgcaagccaacaaattag

SEQ ID NO: 358068 - DNA, 201 bp, Homo sapiens
gtgctgcagagcataatcataaatgtgggagtccagatacaggtcagctgttagggctccaggagtctgcggacccctgccctcacctctttgtgtcaccrgagctccggattaagggctttctgacaactcctgaccacactcctcatcttctttccctccctttgctgatgaagcaactgtcttcatttagctgcctga

SEQ ID NO: 358069 - DNA, 201 bp, Homo sapiens
atggaagggacccaagaaggaacagagaagagactctagatggcctacaggtctgggcaaaggccccaggtttggcatttagaagttgggctttcttatckttgggttacccaagcacaagcaagaacaaagcagagactccactgatgagaaaagatccaattgatatgtattctgcacatctagatttgaaaatggcct

SEQ ID NO: 358070 - DNA, 201 bp, Homo sapiens
gaagatgtggcatgtgtgagtcttagaagaatgaggaagaatggagacaaaagaccatgtgattcctggttatggtcataggtttactttgaaagaacatrttgaacaaagtaatgatgcttgggaacataccacatctcagaattgtgctgaacacagccagttctatacgatagacaggttgggaagagccttggacct

SEQ ID NO: 358071 - DNA, 201 bp, Homo sapiens
tgaggaacttgaggctcagcagcccatgtaacttcctgggggtcaccgcaaacagccccccaccccttgtggcagcagctaaaccaactcccgaccttctmtcctccccaaagctccaccctctctctcttttcagttgcagcccatgacacctcctaagatcctgcccctgggaatgggaagaacacctactccggggta

SEQ ID NO: 358072 - DNA, 201 bp, Homo sapiens
agcaatcgcttctgtgttcccaaggggtagatatatgggcaagagcgataagaaacaaggagaggaagaaaatgagctgaagatgtggcatgtgtgagtcytagaagaatgaggaagaatggagacaaaagaccatgtgattcctggttatggtcataggtttactttgaaagaacatgttgaacaaagtaatgatgcttg

SEQ ID NO: 358073 - DNA, 201 bp, Homo sapiens
tttcagttgcagcccatgacacctcctaagatcctgcccctgggaatgggaagaacacctactccggggtagccaccctgtagaatacagcaggttttttytaaggagtcaagcgggtcttgggacttgggcatctggttttctttagccctggtgcacttttcctgtgtatccttggaaaagtcacttcccgtttctgag

SEQ ID NO: 358074 - DNA, 201 bp, Homo sapiens
gggcatgattgccatcactgcagaagaagaaggaaggctgatgtctgtgagtgtgtatagctgttttttatatgattattggcaaggactctctctctgtygtgcacactgtctcactctctccctctagtataagaatggagtaacttttaaaatttctttgggagccatcttgtggtctctgtatgtgactccatgtaa

SEQ ID NO: 358075 - DNA, 201 bp, Homo sapiens
gtcaaggagacttctaataaataacaaagttaacaaataagagatttcatgatgtgtaggagaacaggtgctagaaaggagcgggcggggggctggggagygctggcagcagaggggcccggggtcagcaacactgagaagagaaagatgagcagagacttgaggaaggcaagaaccttgtccacgtgggtgtctggggga

SEQ ID NO: 358076 - DNA, 201 bp, Homo sapiens
ataggccttctcccacatgccaagtggtgtgctgggtggtgagggcacagtggtatgtagggcagacatgcccttgcccttatggagttaacgtgttggcrgtaatgctttgtaggaatgcagggaacactgaaaatatcgaggggcagtgcccagccttgtccccagagtcagcgaagatgtctctgtgaagtggtgttt

SEQ ID NO: 358077 - DNA, 201 bp, Homo sapiens
ctgcagcagagagcttcacatggctggtggctgattggtgcattttggaggctgtcatctttgttctgactgggggattggaatcctggcagaggcagggsctctcccttagcagtacagtggaaggcagccctgcaggacccaccctcaagctggtcagccctccactgactgccccaggggatggcaggcagcatctgt

SEQ ID NO: 358078 - DNA, 201 bp, Homo sapiens
ctgccagaggaaggaaggctcttgcctcgcccacctgcccgtcccagctatcactggtcagatctcaactatttccaaagcactatggacagggatgctgkgaaatgtagttcccaggcttccagcccctgcagttaggggaagcacacagcgagtgggaacaaactctcactcctgtagacagtggccagcataggaacc

SEQ ID NO: 358079 - DNA, 201 bp, Homo sapiens
ggaggcgaggccgactcgccaacgaggaaaacggggtgagaggggagccgggttttccaatagtcgccagggcgcctggcacgtcgtaggtgctaacgcartgttcattgacaaggccccaaggtggaaggtgctggcaggggcccggacgcccccttcttcccttccagtctctaaaatggagttcaaatgtatcgacca

SEQ ID NO: 358080 - DNA, 201 bp, Homo sapiens
aaatgtaaactggttttggccttatattcctcctccttgaaggatgacatttgagctgggacaggaatgataggagggagccagaaaattcagcaagtgcraaggcccaggggcaggaatgagcttgattccccaagaatggatggggagtgtattagtctgttctctgcattgctgtaaaggaatgcatgagggtgagta

SEQ ID NO: 358081 - DNA, 201 bp, Homo sapiens
acctggggctgtagtgttgcctggttgttgagagctctgtctctaggggacaatgcctgggtttgtgtcctggctctaccactttctagctgggagacctygcacaagttcttaactcctttgtgtttcacattttcatctgaaaaattggggtaataatagctcattcagtcttcattaaaagcttaagaggtaggtttt

SEQ ID NO: 358082 - DNA, 201 bp, Homo sapiens
aatgaaagggagagattaggcagacagtaccatcgttctttctttcaccacctgatagaagcttcaaatggaaaacacacctttcagaatgggttgaagamctggttccaacctaaggtctgctgctattttctgtttctccctgcgacctggaacaaactgagctcagcaaacatgatccttggaccacagtaagtcctc

SEQ ID NO: 358083 - DNA, 201 bp, Homo sapiens
aatcagtcaggtcagggatcaggtgagcttgggcaagtctcctcacctctctgaccctctgttttcttgtctagtgactaggggtacaaggcctgacttcrctgagttgttctgagaactgagtgcagcgatatgtctcagtgtctgcctgtcacagcccttggccttcagcaaatgtggtttcctgtcctgcttcctcat

SEQ ID NO: 358084 - DNA, 201 bp, Homo sapiens
tggcaatctgattccaggctccttgctcataaccgtcattattctaagctgacatgcagtgtaaaggattcagacttgcagggaccaagagtggacacttytcaccccaccacctcaacccctttactcccgatgccgacactgttgcacagagaactaaagtaattggccccagaccacatggcattagtagaggcagaa

SEQ ID NO: 358085 - DNA, 201 bp, Homo sapiens
ccaagagctgagcccacccagcagccaaaggcagggagctccctgatggagccccccagggcaggacaaggtggaggtggattaggagcaggcctggaggrgacacacacacacacacacacacacacacacacacacacacacacacaggcacacagagctgttatctcatttgaatctgcaacagctgggggtggggag

SEQ ID NO: 358086 - DNA, 201 bp, Homo sapiens
agtgaggtataataacctattcaaagtctcaaagccagtgaggaatagaacaagggttaatgcaagtcagtctggcccagaacctgtgctctctacttctyggtcagcactctccaatagaactttcctgatgatggaaatgctctatgtcggtactgcccaggtcagtagctgctagccacatgagactgttaagcactt

SEQ ID NO: 358087 - DNA, 201 bp, Homo sapiens
tcagtgaggtataataacctattcaaagtctcaaagccagtgaggaatagaacaagggttaatgcaagtcagtctggcccagaacctgtgctctctacttytcggtcagcactctccaatagaactttcctgatgatggaaatgctctatgtcggtactgcccaggtcagtagctgctagccacatgagactgttaagcac

SEQ ID NO: 358088 - DNA, 201 bp, Homo sapiens
ggcagcccctggtcaagagggcaaggtctccctcctttcctgactgctgggccctttctgatgagagctactcttcctctcctctggggcccaggtatggrggtggggctgagcctgggccagggcagtttaatcctgtgatccaactggacaccgtgacacccctccaaccttcagtgtgtagggatgggatggttcatg

SEQ ID NO: 358089 - DNA, 201 bp, Homo sapiens
aggctcccaaatgtctctgggtcaaggactaacttgtaggcctgggttttgaggtccctctgcagtttgccaagtttctttatttttatttttatttatttatttattatttatttatttatttatatatttattttttagtagagacagggtttcaccgtgttagccaggatggtctccatctcctgaccttgtgatcca

SEQ ID NO: 358090 - DNA, 201 bp, Homo sapiens
cccatcccggaaccctggagggtgctgcatgcctcgccattgtagtagctgggtttataacgtgatcttaatccccattagggacactgctagaggctgcscctcagctccttcaggcacctcctggatgcccctgaaaatcagtagcattaaaatatttccatgaagtcacggactagggagaaaggggcctctttaagc

SEQ ID NO: 358091 - DNA, 201 bp, Homo sapiens
gaggctcccaaatgtctctgggtcaaggactaacttgtaggcctgggttttgaggtccctctgcagtttgccaagtttctttatttttatttttatttatttatttattatttatttatttatttatatatttattttttagtagagacagggtttcaccgtgttagccaggatggtctccatctcctgaccttgtgatcc

SEQ ID NO: 358092 - DNA, 201 bp, Homo sapiens
aggtgtgagcctgggtgcgcgcatagtgcaacccctggaattcccagccacgttacacgcttctaatgtcatttggctatcctaggactccaaatgtagcwctcctcgatccacacacataagaagatttgtggatttaaattctttttgtgaggctatgaatatgaaaacatattcgcctccttctcatgtgaccctaat

SEQ ID NO: 358093 - DNA, 201 bp, Homo sapiens
tgaggctcccaaatgtctctgggtcaaggactaacttgtaggcctgggttttgaggtccctctgcagtttgccaagtttctttatttttatttttatttatttatttattatttatttatttatttatatatttattttttagtagagacagggtttcaccgtgttagccaggatggtctccatctcctgaccttgtgatc

SEQ ID NO: 358094 - DNA, 201 bp, Homo sapiens
cagaatcttttttttccccgacttccccagcaaaggaacaagcaggaggcactaaggtgcaaagaggaagatttgcaagcacatcgaagggttctcccaasctgctggcactgctgggctgtggggcaaatgggcaggcgccgatgcagaaaggagcagggaaacaggctccaaaggaaacggactttccaagtcatgctc

SEQ ID NO: 358095 - DNA, 201 bp, Homo sapiens
ctgaggctcccaaatgtctctgggtcaaggactaacttgtaggcctgggttttgaggtccctctgcagtttgccaagtttctttatttttatttttatttatttatttattatttatttatttatttatatatttattttttagtagagacagggtttcaccgtgttagccaggatggtctccatctcctgaccttgtgat

SEQ ID NO: 358096 - DNA, 201 bp, Homo sapiens
actgctgggctgtggggcaaatgggcaggcgccgatgcagaaaggagcagggaaacaggctccaaaggaaacggactttccaagtcatgctcatggagacygggccactctctagactcccacagggtgtcctgtgcacccctctccagtccagccacgatgtgccagttgcaatcactactgtctgctgctcacaagcca

SEQ ID NO: 358097 - DNA, 201 bp, Homo sapiens
ttttttttttttttgagacagagtttcactcttgttgcccaggctggagtgcaatggtgtgatcttggctcactgcaacctctgccttctgggttcaagcrattctcctgcctcagccacccgagtagctgggaatacaggcgtgtgccaccaagcccagctgattttttgtatttttagtagagatggggtgtcaccatt

SEQ ID NO: 358098 - DNA, 201 bp, Homo sapiens
tacccaagggcctcagcatccccttctgtaaaatgggattatggtgtcacctccctcataggacctggaactgcactttagctagtccctaaaatactgcrtagtctctcaaagcccaacttccttctctgcccaaagagcaaatgcctgcccgaagagcccctggggactttcgccaggcatccacacacaagaaatgta

SEQ ID NO: 358099 - DNA, 201 bp, Homo sapiens
ttgaaattgggctggtgcaactgaggaacggtgctttaaattttattccattttaattattagctaattattttaattaattagctaattaattagtggcrctaattagttaattaatgcaattgaaaaactgcattttaaactgaaattttcaatccactctcatttttacttgcattcccattttacagaggagaagtc

SEQ ID NO: 358100 - DNA, 201 bp, Homo sapiens
ccgaagagcccctggggactttcgccaggcatccacacacaagaaatgtattagctatggatgggtcaggcatgcacagataagttggggagggagtgagwtggagagaaggaggggcggaccagaggccactagatctagttagagatattccatgggcttttgtctgcaggcttatcaaacaatgaggattctttgata

SEQ ID NO: 358101 - DNA, 201 bp, Homo sapiens
tcagagaacaacaggagaggacccagcagatcaaactccaagaggggcccaggagtgggcggtggtcaagccacaggcgctgattggagcagccatgggcrggctaaggggaccttgccctctggctctactggtgttgactacatttctatgggagggactgatgctgtcatcagggagcttgggggacaggcttcttgg

SEQ ID NO: 358102 - DNA, 201 bp, Homo sapiens
tgcttgaacccaggaagcggaggttgcagtgagccaagattgcaccactgcactctagcctgggcaacagagcaagactgtctcaaaaaaaaaaaaaaaaacaacccacaaaaacaaaaattagctgggtgtggtggtgcacacctgtaatcccagctacttgggaggctgaggcaggaaaattgcttgaacccaggaagc

SEQ ID NO: 358103 - DNA, 201 bp, Homo sapiens
ctgattggagcagccatgggcgggctaaggggaccttgccctctggctctactggtgttgactacatttctatgggagggactgatgctgtcatcagggarcttgggggacaggcttcttggagtgtccccctggtgggacctggaatgtgttgaacttggctgagtggtgcaagggatcccctggtgccatccctgccaa

SEQ ID NO: 358104 - DNA, 201 bp, Homo sapiens
ttgcttgaacccaggaagcggaggttgcagtgagccaagattgcaccactgcactctagcctgggcaacagagcaagactgtctcaaaaaaaaaaaaaaaaacaacccacaaaaacaaaaattagctgggtgtggtggtgcacacctgtaatcccagctacttgggaggctgaggcaggaaaattgcttgaacccaggaag

SEQ ID NO: 358105 - DNA, 201 bp, Homo sapiens
ctggaatgtgttgaacttggctgagtggtgcaagggatcccctggtgccatccctgccaaagaccctatcagtgtcatgagcctgaggatgaaatctcccratgggtgagtgccccagcagcagttggagcagagtttgggcagattctagcgagagcagctacccaaggtggaggggaggccagggctcagggcatccag

SEQ ID NO: 358106 - DNA, 201 bp, Homo sapiens; identical to SEQ ID NO: 76639

SEQ ID NO: 358107 - DNA, 201 bp, Homo sapiens
ctgaggtctgaaacctgacagagccagggtgccatctgtggggactcccaaatggtacatattgcagaaggaaccccagtgatctcaccagggcctgtttwgcttcccatccacaagctgaacatgaccttagaaatcactttggtcagccctttcactttaatgtaaaaatattgaggctcagaggggaagtcactggac

SEQ ID NO: 358108 - DNA, 201 bp, Homo sapiens; identical to SEQ ID NO: 76640

SEQ ID NO: 358109 - DNA, 201 bp, Homo sapiens
aaagtggcagaaccaggatttataagtgcaccatttctgtctgaagcctgagacctcaggcaccatgcaacgtaattcccaagtcatcctatatccctggmtaagtggggactctggaagggaagggcagcttctctaaggttcagataggaaactagtcacaccaggtgcctggcccccagcccagcccacgagacgtgc

SEQ ID NO: 358110 - DNA, 201 bp, Homo sapiens
atgatctgcctgccttggcctcccaaagtgctgggattacaggtgtgagtcagaccacggcctctttattttacagccgagaggacagcacagacagggcmtggctggtgcgacagctcaacccatcatcaggcagaacctggataggaggccagcccgtggggtgatactgccaaggcctgcattaccactcagttatcc

SEQ ID NO: 358111 - DNA, 201 bp, Homo sapiens
ctggataggaggccagcccgtggggtgatactgccaaggcctgcattaccactcagttatcctctcatcttgggctgctcagggtgccctagagaacatgscttctgtgccctcctgcactagagcaggcaggaagagcagcctggaccatgggtaccacatatcctatgaggaccccattgtgccacgcgttggttgact

SEQ ID NO: 358112 - DNA, 201 bp, Homo sapiens
cacctagtgccccaggattgcagaacacctccttccttgtagccttgctcatttgctcagaagtcaaggcccaggatggaatctcattgcctgagaatgcrggagtacgaggagcttctagggagcccttgcttctgtcgtgggagggcagcctgtgcatttaccatcccactaggagagcatgcggtggaggagaggtgc

SEQ ID NO: 358113 - DNA, 201 bp, Homo sapiens
gggagggcagcctgtgcatttaccatcccactaggagagcatgcggtggaggagaggtgctccccaggaaaggactggcggctgtaagatgggagcacagratcctttgggagcagggcaaccccagcccaccctcaccctcttgattcctgcctgttccattctcttccatggcatggaaggagccctcaccccaggctc

SEQ ID NO: 358114 - DNA, 201 bp, Homo sapiens
catagttatgcagccttcattagctgaggttgcttagaagacaaacaggtccatgtttcacaattcctcccagatctgagaaaggaacgtgactctgagcrgacagaacaatatatgctgggcccagaggacagctgtacagcctgccagcatctcactcctctgaaagcaaattcagtccatccaagagcaaggccaagg

SEQ ID NO: 358115 - DNA, 201 bp, Homo sapiens
agggtcagatgggtgttctccctgtctcctcccgaccctcagtttggttggtctcatgacgtactggagaaacaggctcgggcctggaccaaccctgtgcrgactcagactcacagctggccataggacctgggacaggcccttcacctttcaatggcctccgagatgatggtatgtgtgatgcttaatattgactgtcaa

SEQ ID NO: 358116 - DNA, 201 bp, Homo sapiens
tggctcacacctgtaattccagcactttgggaggccgtggctggcagatcacgaggtcaggagctcgagaccatcctggccaacatggtgaaaccccaccwctactaaaaatacaaaaatattagctgagtgtggtgatgtgtgcctgtaattccaggtgctcaggaggctgaggcacgagaatcgcttgaatccaggagg

SEQ ID NO: 358117 - DNA, 201 bp, Homo sapiens
aaggccccggacacctccctgtactcttctcccttgtgtctcttcctcctggcccccttagcaccctgctcactggatccttctggaccctcactgtgagrcctcttagattgccgcaacctatgttgcaaactttgttctaggaacctggtatccaggctgttggccatctctaatttagtcctaagatagattcccaaa

SEQ ID NO: 358118 - DNA, 201 bp, Homo sapiens
aaggccccctcctcaacttggcaggagaggagccaggcggatcaaccctgcaaccttgctctcctctgtcctgccctctgcaactctgtggcaccaagagstgagcccacccagcagccaaaggcagggagctccctgatggagccccccagggcaggacaaggtggaggtggattaggagcaggcctggaggagacacac

SEQ ID NO: 358119 - DNA, 201 bp, Homo sapiens
gatgataacagaaagatactcgctaccacttctcaacaagcataccaggcagtgttctgagctcctgtgtacattttctaattcattctcataaccctatraggtcagggacttttattatccccatcaccaaaagaggagacacaggtactgagtgatgagataacttgtccaagaccctggtcagttgatggcatagcc

SEQ ID NO: 358120 - DNA, 201 bp, Homo sapiens
gtgttttctacagagtcaggggaatccctgcagggaaaccactggccaaggacacagaactcctgggccctggccctggccctggcccatctgctccgggytggggaccttgggcacgttgtttaacctctttgacccttcgtttcctcacctgggagatggtagtataaattcccactccctctgttacaggagagttag

SEQ ID NO: 358121 - DNA, 201 bp, Homo sapiens
tgttagagagggctctggagttgaggtgttttctacagagtcaggggaatccctgcagggaaaccactggccaaggacacagaactcctgggccctggccstggccctggcccatctgctccgggctggggaccttgggcacgttgtttaacctctttgacccttcgtttcctcacctgggagatggtagtataaattccc

SEQ ID NO: 358122 - DNA, 201 bp, Homo sapiens
aggcagaacctggataggaggccagcccgtggggtgatactgccaaggcctgcattaccactcagttatcctctcatcttgggctgctcagggtgccctaragaacatgccttctgtgccctcctgcactagagcaggcaggaagagcagcctggaccatgggtaccacatatcctatgaggaccccattgtgccacgcgt

SEQ ID NO: 358123 - DNA, 201 bp, Homo sapiens
gcaccaagagctgagcccacccagcagccaaaggcagggagctccctgatggagccccccagggcaggacaaggtggaggtggattaggagcaggcctggrggagacacacacacacacacacacacacacacacacacacacacacacacaggcacacagagctgttatctcatttgaatctgcaacagctgggggtggg

SEQ ID NO: 358124 - DNA, 201 bp, Homo sapiens
ttctctgctgtggccagaaggtggtgctagaggccagtcccacttggatgtgaccctggcctctgccaggattcaaaccacaaagaacatttggaactggratgtttgctttgaagcagcccgaaaacaagtgaaaggaaaccaagataactctctctccctccgctggcaaggatcaaaaataccttgtgcagggaagcc

SEQ ID NO: 358125 - DNA, 201 bp, Homo sapiens
gaactgggcctggcatcagcgttcctaggttttgtcgcagagtttgtaggtcccatcaggagtgactttgaagaagctcttcatctcactgagtctcagcytccttcgtgttacatgggagaaatgttacttcaccaggttctctacaaccctgcaaacattagttttaacaattgtatttatttttgttggtttaatggg

SEQ ID NO: 358126 - DNA, 201 bp, Homo sapiens
tgctattaaaaataacatgataggcctgggggcggtgtttcacgcctgtaattccagcactttgggaggccgaggtgggtggatcacgaggtcaggagttygagacgagcctggccaagataatgaaaccccgtctctaataaaaatacaaaaattagctgggcacggtggcaggcgcctgtaatcccagctactcaggag

SEQ ID NO: 358127 - DNA, 201 bp, Homo sapiens
ccctgcctgggaggctctcacactccctgcccaatcacctgtccaccctgtggaccctcagtcactaccacttcccccagacatcagccagtccctcttaygccctctgctcgtggcactgaaggctgccagtcagggctctccaggggagcagagcctatcccatatttgtgtatgcatattaagagattcaactttcgg

SEQ ID NO: 358128 - DNA, 201 bp, Homo sapiens
tatcaccaagacagtatcgatctttcttcttggggagggcggtttctaaaactcttaggctggtgtcgcccaggagggttaaaaaggcgtaagggaaaaayatcagcttctggatataagccatgtgtcttcaaagaacacaggctataatgtagacttaggaactgggcctggcatcagcgttcctaggttttgtcgcag

SEQ ID NO: 358129 - DNA, 201 bp, Homo sapiens
gaagtatcttaatgactcagagatccctgaaacgtagttttacgaaccgcagtacagtggttaagaacatggcttttttttttttttttttttttttctgkttttaagtttcgggatacaagtgcagaacgtgtgggtgtgttccataggtatacatgtgccatggtggtttgctgcacctgtcaacccatcatctaggtt

SEQ ID NO: 358130 - DNA, 201 bp, Homo sapiens
acgccctctgctcgtggcactgaaggctgccagtcagggctctccaggggagcagagcctatcccatatttgtgtatgcatattaagagattcaactttcrgaactggttcaggcagttgtggaggctgccaggttcaaaacctggtgggcaggccagagggctgaaatctcaggcaggacttgacttctctgttacaatc

SEQ ID NO: 358131 - DNA, 201 bp, Homo sapiens
cacttccacagggccttcctccctgtatccctttatgtctcacatgtccctctccttttcttatgaggacacctgtcatcaggtttagggcccaccctaayccaggatgatctcatgcagagatcctcaacaatttcacccacagaggcgctttttccaaatgtcatgctcacagattccggtgactagcacttgaacgta

SEQ ID NO: 358132 - DNA, 201 bp, Homo sapiens
cccagaagtatcttaatgactcagagatccctgaaacgtagttttacgaaccgcagtacagtggttaagaacatggcttttttttttttttttttttttttctgtttttaagtttcgggatacaagtgcagaacgtgtgggtgtgttccataggtatacatgtgccatggtggtttgctgcacctgtcaacccatcatcta

SEQ ID NO: 358133 - DNA, 201 bp, Homo sapiens
tcatagctcattgcagccttgaattcctggactcaagtgatcctcctgcctcagcctccacatagctgggatgacaggggcaagccacatgcctgctgatrcattaaatctaaccatcacagctggtcttttgtgtgattccttaataatctcagcctctgtcccaccctgtgatgttgctttcagtgagcaaggacgaag

SEQ ID NO: 358134 - DNA, 201 bp, Homo sapiens
ccccagaagtatcttaatgactcagagatccctgaaacgtagttttacgaaccgcagtacagtggttaagaacatggcttttttttttttttttttttttttctgtttttaagtttcgggatacaagtgcagaacgtgtgggtgtgttccataggtatacatgtgccatggtggtttgctgcacctgtcaacccatcatct

SEQ ID NO: 358135 - DNA, 201 bp, Homo sapiens
gatacattaaatctaaccatcacagctggtcttttgtgtgattccttaataatctcagcctctgtcccaccctgtgatgttgctttcagtgagcaaggacraagatcattctactttctctctccttttttttttttttcgacagagtctcgctctgttgcccaggctagaatgcagtggtgcaatctcggctcactgcaa

SEQ ID NO: 358136 - DNA, 201 bp, Homo sapiens
atgctggcttatgctcctagcactttgggaggctggggcgggcagattgcttgaggccaggagttccaaaccagcttgggcaacatagcgagattcacccyctaccaaaaaaagtgaaaacattagccgggaatggtgcatgtgcatctatagtcctagtcacttgggaaactgaggccagaagttcaaggctgcagggag

SEQ ID NO: 358137 - DNA, 201 bp, Homo sapiens
acacatagatttcaccccacagcctccctggcagccagctgctgtcatttcccttttttacggatgatgaaacccaggcacagactggttaagtaacttaacagtcacacagctaataagttggggggctgcgctgtgaaggcttacagcgtctccagagcccagtccccttgctgcctccccatcatcctcactgcctac

SEQ ID NO: 358138 - DNA, 201 bp, Homo sapiens
gctcccaccaccacacctggctaatttttatatttgtagtagagatggggtttcgccatgttggccaggccgatctcgaactcctgacctcaggtgatccycccaccttggcctcccaaagtgatgggattacagacatgagccaccatgcccggccattcagtaggttttaattcaatgcctttgacatgctgggtactt

SEQ ID NO: 358139 - DNA, 201 bp, Homo sapiens
cttgaactccttacctcaagttatccaccctccttagcctcccaaagtgctgggattacaggcatgagccaccacacccagccattctactttgtctaacytttgttttgttcagcacttgacagcaactgctagatggccggagcccagtgagtaattgtcaaatgaaagaatgaaagcaagagcgagaatccacaaagg

SEQ ID NO: 358140 - DNA, 201 bp, Homo sapiens
ccgccttctgggttcaagtgattctcctgcctcagcctcccaagtagttgggattacaggctcccaccaccacacctggctaatttttatatttgtagtaragatggggtttcgccatgttggccaggccgatctcgaactcctgacctcaggtgatccccccaccttggcctcccaaagtgatgggattacagacatgag

SEQ ID NO: 358141 - DNA, 201 bp, Homo sapiens
tgagaatgggggacctccagggtttgggctgcaatgcttcaggttgaggcccacaggccacgaagcttcaggaagtcagggcagaatctgcagctgccccrctgcctggaggtagaagaaggcaggttctggagtccagattctggggcagctacacagcagcttctaccactgccagaggaaggaaggctcttgcctcgc

SEQ ID NO: 358142 - DNA, 201 bp, Homo sapiens
actgataattattattactactaataattattatagctttaaattattggcacatacaatgcactaagtaatatattgatttttttctcaatctcatgaamccagagcattcgtttccatttttaatttttttcaattattttatttttatataaatgcaaatttatagaaaagttataagaacagccaacaaattcctgg

SEQ ID NO: 358143 - DNA, 201 bp, Homo sapiens
aagaagaaggaaggctgatgtctgtgagtgtgtatagctgttttttatatgattattggcaaggactctctctctgtcgtgcacactgtctcactctctcyctctagtataagaatggagtaacttttaaaatttctttgggagccatcttgtggtctctgtatgtgactccatgtaaaacaaatccacttgggccatggg

SEQ ID NO: 358144 - DNA, 201 bp, Homo sapiens
aggtggcctgaacaaattggggccatttcgacagcagtggttaagagttgagggtttctgtgctattcttcctgtcagatgaagtctttttttttttttttcctgagatggagtctcgctgtcgcccaggctggagggcagtggtgtgatctcagctcactgcaacctcgtctctcaggttcaagcaattctcctgcctca

SEQ ID NO: 358145 - DNA, 201 bp, Homo sapiens
agtggggagagacagaattgacctttgtggtcatctactctgtggcgggaactgagctgttcacttttgtgcaaggccatttatcccacagcaacgcttcrtgtgagcatttttgtttgtttgtttgtttaagatggagtcttactttgtcggccaggcgggagtgcagtggtgcaatctcagctcactgcaacctccacc

SEQ ID NO: 358146 - DNA, 201 bp, Homo sapiens
ggcatgcaccatcacgcccagctgattttgtatttttagtagagaccgggtttctccatgttggtcaggctggtctcaaactcctgaccacaggtgacccrcccgccttggcctcgcaaagtgttgggattacaggcgtgagccaccgcacctggccagcactgttgttcttttattgccactgacaaaaggcagagaaaa

SEQ ID NO: 358147 - DNA, 201 bp, Homo sapiens
tttatcctttgttaaagagcagccccttcacaaagaagtgacagtacgaacttgcaccttagttagcatggatgggtgccctgggccttcaatcagtcagrtcagggatcaggtgagcttgggcaagtctcctcacctctctgaccctctgttttcttgtctagtgactaggggtacaaggcctgacttcactgagttgtt

SEQ ID NO: 358148 - DNA, 201 bp, Homo sapiens
ggatgggatttgtgtcaaagttcaaggcacctgcagtggacgctattgtggttcccacctgggacaactgttagagagggctctggagttgaggtgttttytacagagtcaggggaatccctgcagggaaaccactggccaaggacacagaactcctgggccctggccctggccctggcccatctgctccgggctggggac

SEQ ID NO: 358149 - DNA, 201 bp, Homo sapiens
tctatcctattagtcctgtccctctagagaaccctgactaatagtatgtgactcgaaaggtctctagtgaaggtgcagtgagacaacttaggtagtatctrttggtgtggcacgttggcatcactccggagcctggtgacctaagtttgggtgactgactttgctgcctactagctgtgtgccctggaacaagtgacttca

SEQ ID NO: 358150 - DNA, 201 bp, Homo sapiens
atacatataattaagtgaatgtgtgtatgtataggtagttcatactctacatgtgtgtatgtgtataccttgacttcaggtctagggaaaaaagttccatygtacactttttgctaaataaagaatgaatagagggctccttctcctcttgccttttcaaaatcccacaaaccctgaagtttgctttccctgcatttttct

SEQ ID NO: 358151 - DNA, 201 bp, Homo sapiens
ttcacagctaggaatggcagtgccaggactcgaagccaaccctcctgggccaaagcctatgctcttccctaccatcgccatgggcgtgggttggggggaaratgcatcacaagactgtgccttcctgttctttctctttctccaggcagacccagaaggcactgcaggacttcagagagcaaagagggaagtcaaggaacc

SEQ ID NO: 358152 - DNA, 201 bp, Homo sapiens
tccactctcgttcagttatttttaggaaatgccatgtagttccatatacttgacatgtacctgctttcactacatctggagatattcaggaaagtccttgwtaacgataaggcctagggtggagctgcgacgtacttgccatttgtaaaagccaggcagaagagtccatgcgggttagacacagataaggaaaaacaattg

SEQ ID NO: 358153 - DNA, 201 bp, Homo sapiens
tcaagcacaggccttgcacctgcacccactgcatcgggcagcgcaagctctcggcctggttcgatgagaggttcaaccagaccatgcagccgctgctgacygcccagaacgcgctcttggaggacgacacctaccgatggtggctggtgagatgctgcctgagagcggggtctgggctgagagttggggtgtggactgaga

SEQ ID NO: 358154 - DNA, 201 bp, Homo sapiens
tggctaaagcaagtctcgtggccaaacttcgattctccctcatgctgggaggggaggcaaagccacactgcagagtgtgcgtgcaggtggcctgaacaaaytggggccatttcgacagcagtggttaagagttgagggtttctgtgctattcttcctgtcagatgaagtctttttttttttttttcctgagatggagtctc

SEQ ID NO: 358155 - DNA, 201 bp, Homo sapiens
ggccacaggtgccaggctgtggagtcagaggcttcattcagagcagggctccatgtttaatctgattcatagattaccgccttatatctttttttttttttggagacagagtttcactcttattgcccaggctggagtgcaatggtgcaatcctggctcaccacaacctccacctcctgggttctagtgattctcctgcct

SEQ ID NO: 358156 - DNA, 201 bp, Homo sapiens
ctaaatgaaggccccaaacagcatcgcaggtggccacagcctgtcccagtggcttaggacgtgcacacatgcacacacacacacacacacacacacacacaaaaccacactctatcgccctgggaccacataaacacagcagttcacctgatatgcacagctttttggggtgtgggaaactggagtgcctggagaagaccc

SEQ ID NO: 358157 - DNA, 201 bp, Homo sapiens
tctaaatgaaggccccaaacagcatcgcaggtggccacagcctgtcccagtggcttaggacgtgcacacatgcacacacacacacacacacacacacacacaaaaccacactctatcgccctgggaccacataaacacagcagttcacctgatatgcacagctttttggggtgtgggaaactggagtgcctggagaagacc

SEQ ID NO: 358158 - DNA, 201 bp, Homo sapiens
ttctaaatgaaggccccaaacagcatcgcaggtggccacagcctgtcccagtggcttaggacgtgcacacatgcacacacacacacacacacacacacacacaaaaccacactctatcgccctgggaccacataaacacagcagttcacctgatatgcacagctttttggggtgtgggaaactggagtgcctggagaagac

SEQ ID NO: 358159 - DNA, 201 bp, Homo sapiens
cttctaaatgaaggccccaaacagcatcgcaggtggccacagcctgtcccagtggcttaggacgtgcacacatgcacacacacacacacacacacacacacacaaaaccacactctatcgccctgggaccacataaacacagcagttcacctgatatgcacagctttttggggtgtgggaaactggagtgcctggagaaga

SEQ ID NO: 358160 - DNA, 201 bp, Homo sapiens
aggaaaatcttgcagacggtttgggaacaggggatcttgcttgaaattttttggggcaaactgattaactggcagcaagcaaaaaaaaaaaaaaaaaaaaagatggctctgggcaaaccttgagtaaggcttcacagaaaataatttcagttgattgcattttctagaaaactttaagagtttaactgtgcactctacgtg

SEQ ID NO: 358161 - DNA, 201 bp, Homo sapiens
cactttgggaggctgaggtggccagatcacgagatcaagagatcgagaccatcctggccaacatggcgaaaccccatctctactaaaaatacaaaaattakctggacatgatggtgtgtgcctgtagtcccagctactcgggaggctgaggtaggagaatcacttgaacccaggaggcggaggttgcagtgagctgagatc

SEQ ID NO: 358162 - DNA, 201 bp, Homo sapiens
actccacataaaaaaacaaaaatctatctaattggacatttacctttttggaaataaaaggcccagtgggaaaaaaaaaaaaaaagaaagaaagaaaggaaggaaggaaggaaggaaggaaggaaggaaggaaggaaggaaagaaagaaagaaacccttttcttagatccttagaagactcgactggagcccaaaataaat

SEQ ID NO: 358163 - DNA, 201 bp, Homo sapiens
tccccagaagtatcttaatgactcagagatccctgaaacgtagttttacgaaccgcagtacagtggttaagaacatggctttttttttttttttttttttyttctgtttttaagtttcgggatacaagtgcagaacgtgtgggtgtgttccataggtatacatgtgccatggtggtttgctgcacctgtcaacccatcatc

SEQ ID NO: 358164 - DNA, 201 bp, Homo sapiens
caactccacataaaaaaacaaaaatctatctaattggacatttacctttttggaaataaaaggcccagtgggaaaaaaaaaaaaaaagaaagaaagaaaggaaggaaggaaggaaggaaggaaggaaggaaggaaggaaggaaagaaagaaagaaacccttttcttagatccttagaagactcgactggagcccaaaataa

SEQ ID NO: 358165 - DNA, 201 bp, Homo sapiens
ccacacatgctatgggttacgatataggacaggaacaccgagcttggggtatccaccatcttgtggcagacagcaagcaagccagctttttgtctcagagrgaaacattacctcatgtctcaggattggttgctgcaaacccaacccaggtacagagcagtcagagccttgcattctttgtctacccagcaagatgtgtag

SEQ ID NO: 358166 - DNA, 201 bp, Homo sapiens
catgctatgggttacgatataggacaggaacaccgagcttggggtatccaccatcttgtggcagacagcaagcaagccagctttttgtctcagagggaaayattacctcatgtctcaggattggttgctgcaaacccaacccaggtacagagcagtcagagccttgcattctttgtctacccagcaagatgtgtaggaatg

SEQ ID NO: 358167 - DNA, 201 bp, Homo sapiens
ccccagaactcactaagggccgtgtcttcccatccccgcagatcctgatctaccacccagccttcatcaagtatgtctttgacaactggctgcaagggcaygggcgatacccatctaccggcatcctctcggtcatcttctcaatgcatgtctgcgatgaggtatgccaccctccccctgcccacagggctgcctcgaagc

SEQ ID NO: 358168 - DNA, 201 bp, Homo sapiens
acaactccacataaaaaaacaaaaatctatctaattggacatttacctttttggaaataaaaggcccagtgggaaaaaaaaaaaaaaagaaagaaagaaaggaaggaaggaaggaaggaaggaaggaaggaaggaaggaaggaaagaaagaaagaaacccttttcttagatccttagaagactcgactggagcccaaaata

SEQ ID NO: 358169 - DNA, 201 bp, Homo sapiens
aaaacaactccacataaaaaaacaaaaatctatctaattggacatttacctttttggaaataaaaggcccagtgggaaaaaaaaaaaaaaagaaagaaagaaaggaaggaaggaaggaaggaaggaaggaaggaaggaaggaaggaaagaaagaaagaaacccttttcttagatccttagaagactcgactggagcccaaa

SEQ ID NO: 358170 - DNA, 201 bp, Homo sapiens
aaaagcctaaaacaactccacataaaaaaacaaaaatctatctaattggacatttacctttttggaaataaaaggcccagtgggaaaaaaaaaaaaaaagaaagaaagaaaggaaggaaggaaggaaggaaggaaggaaggaaggaaggaaggaaagaaagaaagaaacccttttcttagatccttagaagactcgactgg

SEQ ID NO: 358171 - DNA, 201 bp, Homo sapiens
ggaaggctgatgtctgtgagtgtgtatagctgttttttatatgattattggcaaggactctctctctgtcgtgcacactgtctcactctctccctctagtrtaagaatggagtaacttttaaaatttctttgggagccatcttgtggtctctgtatgtgactccatgtaaaacaaatccacttgggccatggggtttatta

SEQ ID NO: 358172 - DNA, 201 bp, Homo sapiens
aaaaagcctaaaacaactccacataaaaaaacaaaaatctatctaattggacatttacctttttggaaataaaaggcccagtgggaaaaaaaaaaaaaaagaaagaaagaaaggaaggaaggaaggaaggaaggaaggaaggaaggaaggaaggaaagaaagaaagaaacccttttcttagatccttagaagactcgactg

SEQ ID NO: 358173 - DNA, 201 bp, Homo sapiens
ttgtaggttaaaagtttctttcttccagttattctgacgatgtttgtttcatttcttctgactctgtgtgtgtgtgtgtgtgtgtgtgtgtgtgtgtgtgkattttctctttaaaacacatgaaagtgccaaaggagagaatgacaagaaatttaaagacctaaattggctttattgtgattctagaattgagcaacactt

SEQ ID NO: 358174 - DNA, 201 bp, Homo sapiens
gagccccccagggcaggacaaggtggaggtggattaggagcaggcctggaggagacacacacacacacacacacacacacacacacacacacacacacacmggcacacagagctgttatctcatttgaatctgcaacagctgggggtggggaggagtagtcacaagattaccagttggcaggtaagatgcccaggaactgg

SEQ ID NO: 358175 - DNA, 201 bp, Homo sapiens
tggaggagaggtcactcagggagtgttctggaattgccccaaacaattatgctatatggttgtattgtgttaatatttcatcaagaggaagtgccatactwaagtactcatctctccctgttgctgcttatttgcatattagcgtatgtcatcatcatcattatcacaaacaccaccgtgttgcctttagcattttctgtc

SEQ ID NO: 358176 - DNA, 201 bp, Homo sapiens
ctctggtttgtttgtgtgagaggaatggttgccttgcagccagcctgcaagttcctacaccatgagagcctccaagcattggaatgcccgtgtataaaacrgagagtggctgctttgcatttgcctttttaaaaaaataaaataaaacttagtgctttatttttaatgctcatccgtatactttatctcagattttcatag

SEQ ID NO: 358177 - DNA, 201 bp, Homo sapiens
gaattgggaattttagaggttcagtgctttggccccatttccctccttaggtcctgatctctggtttgtttgtgtgagaggaatggttgccttgcagccarcctgcaagttcctacaccatgagagcctccaagcattggaatgcccgtgtataaaacagagagtggctgctttgcatttgcctttttaaaaaaataaaat

SEQ ID NO: 358178 - DNA, 201 bp, Homo sapiens
cgctcctcctttctctgcgcgagtgtttaagcgtgaccttgcgggaggaagcgcggctgaacttgagatgggggttgagcttgcgccccggcttggcacaragacgtcggagcgcgcattagcctggccttgcagccgggtctcccaggaagcgtgtggggatcgtctggctctgctcgtcagctggagccctgactcgct

SEQ ID NO: 358179 - DNA, 201 bp, Homo sapiens
gagctgcccctccaagctgaacccagagaccttcgtggccttctgcatcattgccatggacaggctcactaaggacacctaccgtgtccggtttgctctayccgggaacagccagcttggcctgcggcccggccagcacctcatcctacggtacactcaggtagcgggaggaccaaagcttcacagccctgctttgctatt

SEQ ID NO: 358180 - DNA, 201 bp, Homo sapiens
tcccaaagtactgggattagaggcgtgagccaccacacctggccttgcagttgtttctctgaaccccaaaacaacatgacattattattattattattatyatcattattattattattattattattgaggcagagtctcacttattattattattattattgaggcagagtctcactccatcacccaggctggagtaca

SEQ ID NO: 358181 - DNA, 201 bp, Homo sapiens
gggcacgggcctggcccccatggtgcctatcctgcagagcatcacagacaatgagaatgacgagacttttgtcactctggtcggttgcttcaagacctttsagagcatctacctgaaaaccttcctccaagagcaggcccgtttctggaatgtccgtaccttctttgtactcagccaggtgagcccagggtggtgactttc

SEQ ID NO: 358182 - DNA, 201 bp, Homo sapiens
caaagtactgggattagaggcgtgagccaccacacctggccttgcagttgtttctctgaaccccaaaacaacatgacattattattattattattattatyattattattattattattattattgaggcagagtctcacttattattattattattattgaggcagagtctcactccatcacccaggctggagtacagtg

SEQ ID NO: 358183 - DNA, 201 bp, Homo sapiens
cccagctacttgggaggctgaggcatgagaattgtttgaaccaggaggtggaggttgcattgagcccaaattgtaccactgcacttcagcctgggcgacasagcaacactctgtctcaaaaaaaaaaaaagaaacacagggtagtgatagaaagactcactaaggaactgaggcccggttctgccagttaattgtatgatg

SEQ ID NO: 358184 - DNA, 201 bp, Homo sapiens
ggagtgcagtgacgcgatctcggctcaccgcaacctccacctcccaggttcaagcgattctcctgcctcagcctcccaagtagctgagattacaggcatgygccaccacacccggctaattttgtatttttagtagatacagggtttctccatgttggtcaggctggtcatgaactcccaacctcaggtgatctgcccgcc

SEQ ID NO: 358185 - DNA, 201 bp, Homo sapiens
ccatgcctggctaattttttgtatttttagtagagatggggtttcaccgtgttagccaggatggctcgatctcctgacctcgtgaaccgcctgccttggcytcccaaggtgctgggattacagaggttcacccctctttaagaggcctagagcctggaaatagattcagtgaggaggagttgatggaactgggacctcctg

SEQ ID NO: 358186 - DNA, 201 bp, Homo sapiens
catgggggattgtctgcccctcatctcaagccaggccctcagctacctttggtggcctgcctttccctggttggtagcttcacttttccctcctgtcccckctgggttgggattcctgctgggccccctgtgttccctggtgctcagggtcagccttcttgcccggtgctgtggggtaccattctcatctggtcccgctat

SEQ ID NO: 358187 - DNA, 201 bp, Homo sapiens
cccagctgggccagggtggtgccagtggcctggggttgggcaagcgagtgggctggccatcagtggcaggtgaagggggtgactggtggctcctgcctgtrcacactctcttgactcagtgtgctctctcccctgcctgggccacagctgcagcatcctcaagagtctccccgtaccagccactccctgctgatttgtcct

SEQ ID NO: 358188 - DNA, 201 bp, Homo sapiens
gaccagagaataacccccatgttttccctctcccaggctggccaaggagcagggcctgcgcccgtggtctcatagagcctggcctgttctggaagagcacscagttgttccttctaggctgcccaagccccactgatgatggctgagagggaagaggacgacgacactgaggaagcctggatgcagctacggcccacagaa

SEQ ID NO: 358189 - DNA, 201 bp, Homo sapiens
atcacagacaatgagaatgacgagacttttgtcactctggtcggttgcttcaagacctttgagagcatctacctgaaaaccttcctccaagagcaggcccrtttctggaatgtccgtaccttctttgtactcagccaggtgagcccagggtggtgactttcttttttgattgagactctgctgtccctttgcacctgtcct

SEQ ID NO: 358190 - DNA, 201 bp, Homo sapiens
caaaggcaattggggaagtaagtcctttgtcctggaacagaaggaaggagtgccaagggagcaggatgcaatctgagaggattaggcaagaggtaggacakggaggagcttatagacaggactaacctaacatcacctcttaggggaggtgggcagaaccggggcatttgagttggaccttgaagaaggagtacaaattgg

SEQ ID NO: 358191 - DNA, 201 bp, Homo sapiens
acctaattaaagagctggtcagctgctgtcggagaaagccattcgcactggtctgtggctcggctgagttcaccaaagacatagccaggtgcttactgtgygcaggcctcactgaggactcctatttcctcttctagccctggcctctcttccaaagcctaggccatgagcctgctactgggacccaggaaggagcacaga

SEQ ID NO: 358192 - DNA, 201 bp, Homo sapiens
gacctctatcaccgagatctggcaaggtgggaggcagcccaagccagcaaggacaggagcctgctgcgtgggccagagtcacaggtgagagaggctgcttmtcgatatgagcaccagggcaacaatctacttgccttggccctgcaaagcacacctctaggaagccttccctgactgtacagcagaagaaaagagtatgca

SEQ ID NO: 358193 - DNA, 201 bp, Homo sapiens
ctggttgccaccattttagaagctgtatgaaactctgggcaaagctgaactgtagtggttaggattgcaaacaaaggtggcaaaactaggggaaaaaggamataattatcacctggggaagtgcagttatcaggaagggacacaggtggcttctggaatgctggcaagattctttttacttgactgagtagtagttacaca

SEQ ID NO: 358194 - DNA, 201 bp, Homo sapiens
cagccaaaccatatcagggtactaaagacaacatggaagaatccttcccttcttcttgggtgctgtcaaggccacagctggggtcatgcctccccctagayaggggccagaaaacaaagcgtgcatggagacagcctccagcaaggcaggagaaaaacctcacctttcctactagaccccttccagttgagccagggactt

SEQ ID NO: 358195 - DNA, 201 bp, Homo sapiens
cttgggtccttgtagccgcggtcccagggcggaaagatcggccgcgccagccagggcacgaagtgcatcttccccgcaaaggtgatgggctccagtccagrgatctcgtacaccctatccaggggaggaggctccgacttccgcgtggagcgcacgccccactcatacgccccgcgtctcggggccccgaagcccccaagg

SEQ ID NO: 358196 - DNA, 201 bp, Homo sapiens
cgtggtctcatagagcctggcctgttctggaagagcacccagttgttccttctaggctgcccaagccccactgatgatggctgagagggaagaggacgacracactgaggaagcctggatgcagctacggcccacagaacccttgccttcccagtgctgcggcagtggctgctcaccctgtgtgtttgacctctatcaccg

SEQ ID NO: 358197 - DNA, 201 bp, Homo sapiens
tcccaagcttcaggaaggcaacagctactagagggcctgaggacagattcttggtcgcagaagcggcattggctttagttcagccctcaccatgtttaccracgtcacttctgtgttcccctcatgggtctcccagctcccagtctccatgccacctccacgctgagaccagaccagttttccccacacacaaatccaagc

SEQ ID NO: 358198 - DNA, 201 bp, Homo sapiens
gtgatccacctgcctcagcctcccaaagtactgggattagaggcgtgagccaccacacctggccttgcagttgtttctctgaaccccaaaacaacatgacwttattattattattattattatcattattattattattattattattgaggcagagtctcacttattattattattattattgaggcagagtctcactcc

SEQ ID NO: 358199 - DNA, 201 bp, Homo sapiens
tgatggctctgttctggattttgtttttttgtgggcttgtaagatggttttttcatttaaattcttcagactatatatagttgtcccttggtattcatggrggattgactccaggaccccctgcagatagcaaaatctgaggatgctcgagtccttgatataaaatggtgtggtatttgcatgtaatctatgcacatcctc

SEQ ID NO: 358200 - DNA, 201 bp, Homo sapiens
gccaggaggagagggtgctggtggagaaggcagggtggatggaggaattggcagatatgagatgaacaaagtaggttggatgcaaaacaccctggagaccmaaggaataggaaacaaatatataagaagttgtggaggcccaattatgtggaaagaataattaggttgagctacatgaaattgctgatattctaacttttt

SEQ ID NO: 358201 - DNA, 201 bp, Homo sapiens
tatcctcccacctcagcctgtccctccataggaggaccccgccgtagctggcagcgactctccctgctgacccctcctccctctgactccacatcccctcygctcactcaggtaacccttctggggccacccccataggttagagcatgggggattgtctgcccctcatctcaagccaggccctcagctacctttggtggc

SEQ ID NO: 358202 - DNA, 201 bp, Homo sapiens
gacaacatggaagaatccttcccttcttcttgggtgctgtcaaggccacagctggggtcatgcctccccctagataggggccagaaaacaaagcgtgcatrgagacagcctccagcaaggcaggagaaaaacctcacctttcctactagaccccttccagttgagccagggacttccgttgccttgtgcaggtggtgccca

SEQ ID NO: 358203 - DNA, 201 bp, Homo sapiens
gccacagctggggtcatgcctccccctagataggggccagaaaacaaagcgtgcatggagacagcctccagcaaggcaggagaaaaacctcacctttcctwctagaccccttccagttgagccagggacttccgttgccttgtgcaggtggtgcccaaggaagtcagggatgatatcagagatggccatgggtgcttaaaa

SEQ ID NO: 358204 - DNA, 201 bp, Homo sapiens
tggttatcctgaccctgtttttggtaacatggagaggattcatgcatgagacagggctttagaccagggccctttgaggatccttccagtcctaatgcttmtgtcaggtgctagtaagtgtttaataaatgttagcagttgttttagtctttatcactctgtggtcgggaagaggtcaggaaaaatgacagtcatgtctcc

SEQ ID NO: 358205 - DNA, 201 bp, Homo sapiens
aattcagagagcctatacgcccatcagccctgccaacgcagaaggatactttgaagtgttaattaaggtgagttgacccttgaggatgctccaagatgccrtggagaagctatgggtctaagaatggagagctaaagggaaaatgtgggaaggaaactcagtgctgggaacaacatggacaaaggcaattggggaagtaag

SEQ ID NO: 358206 - DNA, 201 bp, Homo sapiens
ttggacaccaaggaagggcactgccgtccagttgaaggaagctcaaggaaaagtcccatagtagaggggataaggtgagactctcccaacccacctgtcayacataccccttctgttccccagtatggtgagctcctcttgctggctgcgggcacgggcctggcccccatggtgcctatcctgcagagcatcacagacaat

SEQ ID NO: 358207 - DNA, 201 bp, Homo sapiens
gcatgggggattgtctgcccctcatctcaagccaggccctcagctacctttggtggcctgcctttccctggttggtagcttcacttttccctcctgtcccytctgggttgggattcctgctgggccccctgtgttccctggtgctcagggtcagccttcttgcccggtgctgtggggtaccattctcatctggtcccgcta

SEQ ID NO: 358208 - DNA, 201 bp, Homo sapiens
gcctggatgcagctacggcccacagaacccttgccttcccagtgctgcggcagtggctgctcaccctgtgtgtttgacctctatcaccgagatctggcaargtgggaggcagcccaagccagcaaggacaggagcctgctgcgtgggccagagtcacaggtgagagaggctgcttctcgatatgagcaccagggcaacaat

SEQ ID NO: 358209 - DNA, 201 bp, Homo sapiens
tgcctttcacaaacaaggacggctttctggaggaggtagagaggggacataggtggttggacaccaaggaagggcactgccgtccagttgaaggaagctcraggaaaagtcccatagtagaggggataaggtgagactctcccaacccacctgtcatacataccccttctgttccccagtatggtgagctcctcttgctgg

SEQ ID NO: 358210 - DNA, 201 bp, Homo sapiens
agagctggtcagctgctgtcggagaaagccattcgcactggtctgtggctcggctgagttcaccaaagacatagccaggtgcttactgtgcgcaggcctcrctgaggactcctatttcctcttctagccctggcctctcttccaaagcctaggccatgagcctgctactgggacccaggaaggagcacagactggaatcag

SEQ ID NO: 358211 - DNA, 201 bp, Homo sapiens
ctctatcaccgagatctggcaaggtgggaggcagcccaagccagcaaggacaggagcctgctgcgtgggccagagtcacaggtgagagaggctgcttctcratatgagcaccagggcaacaatctacttgccttggccctgcaaagcacacctctaggaagccttccctgactgtacagcagaagaaaagagtatgcataa

SEQ ID NO: 358212 - DNA, 201 bp, Homo sapiens
aaagcgctctggcattcttagatccaattttgaaagggaagtaaggtgaggctagtgtccagtttacaggaaacttcccgagccaagacagcctctccttsgggacagtgggaaggatgctatggatgcctgtgtgtctgtggagccccggcctctagctgttggatctcttcctgttgcagagctgcccctccaagctga

SEQ ID NO: 358213 - DNA, 201 bp, Homo sapiens
ttttacaggaaagaaagatctgtgagtcacagcattcagagaaggcttcctggaggagatgcaggttggggtggaatgttaaaggcagtgggctgagactkagacatgaatttgaatttttgtctacagtgtgattgtggacaagtaagccagcatgactcaactcaggcctcagtttccacatatgtaatacacagatat

SEQ ID NO: 358214 - DNA, 201 bp, Homo sapiens
catagtctggactaagcagtttagccctttattgtaatgtttggaagggttcacagttatagatgtcagaacactggacttcaccccctgtataacacagrtagggaaactgaggacctattccttctgacactgtgcataggttttgttttgaatctgtccctgtcttggtctcccgcatctgaacagtcttcccatttt

SEQ ID NO: 358215 - DNA, 201 bp, Homo sapiens
aagatgagatttgggtggggaaacagccaaaccatatcaaaaggtaagcccagggaaatttgccacaatattaggtgtggagtgtgagaaaaagaggagcrtcctgggtgagaacaactgcaatcttttgggcctcaggaacttgaaaatagaatttacatgttttgagattgagaagactggtagaaacaagttgcatat

SEQ ID NO: 358216 - DNA, 201 bp, Homo sapiens
ataaaaacatacccaggactgggtaatttataaaggaaagaggtttaactgactcacagttcagcatggcaggggaggcccatgaaacgtacaatcatggyggaaggggaagcaaatatgtccttcttcacatggcggtagcaaggagaagtgccaagtgaaggggggaaaagccccttaggaaaccatcagatctcgtga

SEQ ID NO: 358217 - DNA, 201 bp, Homo sapiens
agtttcaataatgaaggagagagtgactgggctgacatagtgacagtgaatatattaagaaatatcaaattctaattagattttgaaggtatatttgcccrttcttatggtgctaataaaaacatacccaggactgggtaatttataaaggaaagaggtttaactgactcacagttcagcatggcaggggaggcccatgaa

SEQ ID NO: 358218 - DNA, 201 bp, Homo sapiens
agtgaccttccattggtacttaaaccgatttacacaactctacctttttctattaacactttcaacatatgtaactttgactaagtataaacatagactcmaatttaatattctctagtcctaatgaacataatagtatgatgttatatttaaaataagtaagcttaggtgtctttgactcttcattacctctaatagcag

SEQ ID NO: 358219 - DNA, 201 bp, Homo sapiens
cacgaaataaaaatcctgactattgaatgaaagaattgaattgtatgtgtgtgtgtgtgtgtgtatatatatgagattgtattgtgtgtgtatatatatawaattgtttgtgtgtatatatttacatatgcgtaaatatatatatataaatgtatatttgcttctgcactgccatcagacagtcttataggaaagttaaat

SEQ ID NO: 358220 - DNA, 201 bp, Homo sapiens
tattgttatattgaataaaatattaattagagaaggacacgaaataaaaatcctgactattgaatgaaagaattgaattgtatgtgtgtgtgtgtgtgtgtatatatatgagattgtattgtgtgtgtatatatatataattgtttgtgtgtatatatttacatatgcgtaaatatatatatataaatgtatatttgcttc

SEQ ID NO: 358221 - DNA, 201 bp, Homo sapiens
tgcttattaaaatattaaagtattagagtattaaataaattattgcttataataatttataataatttatttattatttgagtattaaataattagtattwgagtattaaataaatattagtattagagtattaaataaattattgcttatgattatttataattatttatttataatttattatttagttataacttata

SEQ ID NO: 358222 - DNA, 201 bp, Homo sapiens
gtattgttatattgaataaaatattaattagagaaggacacgaaataaaaatcctgactattgaatgaaagaattgaattgtatgtgtgtgtgtgtgtgtgtatatatatgagattgtattgtgtgtgtatatatatataattgtttgtgtgtatatatttacatatgcgtaaatatatatatataaatgtatatttgctt

SEQ ID NO: 358223 - DNA, 201 bp, Homo sapiens
aatgaatgtcatacaatgagaatatttcatctttatcttcataattaaagtggacattatcaccactatatgccatttatccatatatttatttttatttwttattttttgagaaagtctctctctgtcgccgaggctggagtgcagtggcgtgatctcggctcactgcaacctccacctcccgggttcactccattctcc

SEQ ID NO: 358224 - DNA, 201 bp, Homo sapiens
cattatctcctccaagtagaaatacaattataaagtttgcatattctttattgagttgtcaagttgcaaacacattttacctaactttcatttctaccttkggggacatcattttctattttctcttacttgcaagcaatccagaggttttgggtataaaaataatctgtcttcctactatagccttcctgcctactcttt

SEQ ID NO: 358225 - DNA, 201 bp, Homo sapiens
gggaggcagaggttgcagtgaccctagatcatgccactgcactccaccctaggcaacagaccgagaatctgtctttaaaaaaaaaaaaaaaaaaaaaaaaatctgaaatacaggagctagagctgtccagagcagaaaaagattttcctggaggaaactgtcactaactttataaatgatgtggcttcatgtgtatgcagg

SEQ ID NO: 358226 - DNA, 201 bp, Homo sapiens
actgtaatatatatatatgtgtatgtatatgtgtgtgtgtgtgtgtgtgtgtgtgtgtatatatatatatatatatatatatatatatatatatatatatactggtaactcactttgaatacttttggtaataaggtttgaaaacattaatacattaactcaccaaaatggacctagcacttattgaacatctattgcact

SEQ ID NO: 358227 - DNA, 201 bp, Homo sapiens
cgggaggcagaggttgcagtgaccctagatcatgccactgcactccaccctaggcaacagaccgagaatctgtctttaaaaaaaaaaaaaaaaaaaaaaaaatctgaaatacaggagctagagctgtccagagcagaaaaagattttcctggaggaaactgtcactaactttataaatgatgtggcttcatgtgtatgcag

SEQ ID NO: 358228 - DNA, 201 bp, Homo sapiens
tatttaattatattgttaattccatgtgtgtatgcatacacaatatgtaggtgtctctacctacctatttataataaacacatttgtaaactatctgtatmattttaggatatctttgtaaatatcatttgtagaatgtatttattataaataggtagttgaatagataagtaggcaggttgtctcctatatatgcataaa

SEQ ID NO: 358229 - DNA, 201 bp, Homo sapiens
cactgtaatatatatatatgtgtatgtatatgtgtgtgtgtgtgtgtgtgtgtgtgtgtatatatatatatatatatatatatatatatatatatatatatactggtaactcactttgaatacttttggtaataaggtttgaaaacattaatacattaactcaccaaaatggacctagcacttattgaacatctattgcac

SEQ ID NO: 358230 - DNA, 201 bp, Homo sapiens
tgcctgtattttaataacagaaaacaaaggatgcttgtctttaaatttatcttaaataaacagagaatatcctttgaaacaaatactatgcaatattaccrtttaaagttttagagaagtcatggggaatttctcataggatattgatcattataaaaaggtatgccacaaaataatatattcagtatctcagttatattt

SEQ ID NO: 358231 - DNA, 201 bp, Homo sapiens
acactgtaatatatatatatgtgtatgtatatgtgtgtgtgtgtgtgtgtgtgtgtgtgtatatatatatatatatatatatatatatatatatatatatwtactggtaactcactttgaatacttttggtaataaggtttgaaaacattaatacattaactcaccaaaatggacctagcacttattgaacatctattgca

SEQ ID NO: 358232 - DNA, 201 bp, Homo sapiens
aaatttataatcatcttgctcagatatatgtatttctaaaaaacactgtaatatatatatatgtgtatgtatatgtgtgtgtgtgtgtgtgtgtgtgtgtrtatatatatatatatatatatatatatatatatatatatatatactggtaactcactttgaatacttttggtaataaggtttgaaaacattaatacatta

SEQ ID NO: 358233 - DNA, 201 bp, Homo sapiens
aaacatagactcaaatttaatattctctagtcctaatgaacataatagtatgatgttatatttaaaataagtaagcttaggtgtctttgactcttcattayctctaatagcaggggaaatttgagaaatatcacaagaatattgtaatatgcaaaaaacctaaacaagtaatttaaattctttcagattcaggctcctcat

SEQ ID NO: 358234 - DNA, 201 bp, Homo sapiens
tttttgacagacattcataagccattgcattatcatcgcaaataaaatttccagaaatctaaaagtgggaatttcattctttgacctttcaccaatttcayggaaggataattttaaaataacagtgatttagcacctcattagtttcagaaactgtcaaattgttattatttcaataaacatttatcaggattgaaatta

SEQ ID NO: 358235 - DNA, 201 bp, Homo sapiens
gtcattccacaatgcatatatatatcatatatatacacattccacaatgcctatgtaggaaatgcatgttaattaactgtatttagtcattccacaatgcmtagtgtgtgtacaacatgcatatatgcaatacttcatacatatataccaaaacatcaagttgtacacacaataaataaaattttgtcaatttacaaataa

SEQ ID NO: 358236 - DNA, 201 bp, Homo sapiens
caagcagatcccgtgccagactaggccctctctgaggaaagtagctacttcttttatctctgaatccaggccctgacatgtactaagcacagaaagaaacytttatttaaatacataaacattaagtgagataaattaaagtacttctgaaataatgaagtcactaaagaattaagtggagtttttatggatacttgtaaa

SEQ ID NO: 358237 - DNA, 201 bp, Homo sapiens
aaaagtgcaacatcattaatcatcaggaaaatgcaaattaaaacttcagtaagatataacctcacaactgttaggatgcctattatacaaaaaaaaaaacmaaaaaaaaacaaagatgagcactggtgacaacatggaaaaaatggaacccttgtacacttttgatggcagtgtaaattagtgaaaagagtatgggtaaaa

SEQ ID NO: 358238 - DNA, 201 bp, Homo sapiens
atctctttcccaggtacgtctatttgaatcgccatataaatacaaggaaatggcacatgcctttctttaatgcagtctagcaaatttatattactttatgsttggtaattgtaaatcatggggtaatgagagctgcaatatgaatatagaatttgctgcttttttgtactaagctacttcttaaaaattatccctgatggt

SEQ ID NO: 358239 - DNA, 201 bp, Homo sapiens
cttatggtgcatttcaaatgctatgtataaatgaggtgttaaaacatggtagacatttatgttgcatgtatatccttagcttatgtgcatgcttcattgtsccattggactttgcttacaaaacacaagcccaaaataaaactttaaagaatttcaggactgtgacagcacatcattcaactaatatgaaacccttttgag

SEQ ID NO: 358240 - DNA, 201 bp, Homo sapiens
aatgttttagatggcttcttcccactttgcctaactggtccattgaagtagttgtacacacccccatccttgaccttccttccttagatgcaggaactttytcacccttgagcatattgagatctgtttcagcttgctccttttccaaatctttttgtctggcaatgcttaaatttagatcttaccttaaaaatcacttcc

SEQ ID NO: 358241 - DNA, 201 bp, Homo sapiens
ccctctccctgacatcgctgatatttgtgagaagcacaaactctggatgcatgtggatgtaagtcatctcctttagtctggcttataatacctcttttttwaaaaaaaatcctacaatccttaaagattcctaacaggcatttcaggcaagtcaaaaatttctctgtacctagattttataatgaataaatacagaaaata

SEQ ID NO: 358242 - DNA, 201 bp, Homo sapiens
tataaactttatcccatagttagcttggcctacactgaggaaggaactagggcagcttggaggttagaagcaaaatggagtcaggttaaatttttctcacwgttataatttttgcaaaggcagtttcagtattattatgtctattaagtagatacagaaacagtagcttactgatggatggagagaactaactctaagcaa

SEQ ID NO: 358243 - DNA, 201 bp, Homo sapiens
cccaccaacatgcctggctaattttttgtatcttttagtagagactgggtttcactgtgttagccaggatggtctcaatctcctgaccttgtgatccaccygccttggcctcccaaaccgctgggattatgggcatgagccaccatgcctggccctatccatatatttaatatgagcttttgcctaaacttaatcatgtat

SEQ ID NO: 358244 - DNA, 201 bp, Homo sapiens
catttgtagcatttaaaggtaaattgtttgcagaaatagaccatgaataagtgcagattgagtagttatagaacgccatctttggcttttctgagtgttcstgtcactttgccctgtaacagtagccaaagttgctttaatgtgctctaacgccacctgcatgatgccattttaggagctgaacaagatacttaaacagag

SEQ ID NO: 358245 - DNA, 201 bp, Homo sapiens
tgtaataaacgtatttgagtttaataaacacatttgagttgccttgaatatctctcatatgaatgcctctaggttcaaattatgtgtgaatttataactcratacaaattttccatttgccctttaaacatttttagttaattatattcttactgaaatgtaacattaaaatattatcaatatttttatacttagaaaatc

SEQ ID NO: 358246 - DNA, 201 bp, Homo sapiens
acttaagagcagtgcttaagtgaatgtaataaacgtatttgagtttaataaacacatttgagttgccttgaatatctctcatatgaatgcctctaggttcmaattatgtgtgaatttataactcaatacaaattttccatttgccctttaaacatttttagttaattatattcttactgaaatgtaacattaaaatattat

SEQ ID NO: 358247 - DNA, 201 bp, Homo sapiens
tatcctttgctttagtcaagagctggggggacatagtgcagactttatgttaatttctttgcccagatcacacatctcagggaaaaattgacataattaamagtgcaataacctcattcaacatcgttaaccttagcacatgcagtccacttcagtgatttatggataactttgaaaatcaacatgattcagcccctttca

SEQ ID NO: 358248 - DNA, 201 bp, Homo sapiens
ctaagctacttcttaaaaattatccctgatggtcttaaattgcctacaatttacttgaagctaatgatagttatgtagccatctggaataaggaagaatakttacttgtaaaacttctttataataatatttacacttacacacagattgctccaaagattaaagcacagatgatgatggaaggcacaatcatgataagct

SEQ ID NO: 358249 - DNA, 201 bp, Homo sapiens
aaaccccatctctactaaaaatacaaaaattagctgggtgtggtggcgcaagcctgtaatcccagcaatttgggaggctgaagcaggagaatcgcttgaamcctgaaggcagaggttgcagtgagccaagatcgtgccactgcactccagcctggcaatagagcgaaactccatcaagaaaagaaaagatggggaggtgtc

SEQ ID NO: 358250 - DNA, 201 bp, Homo sapiens
aggttgcctgctgactctgatggtagtttcttttgctgtgcagaaactcatcttgatgatactgttttaaagtgtttacaatagtctctaggcctgctctwacaaaagattaaaaagggggttcaaaagagcctaagaagaaaatatttacatgtgtaaataggacacccaaaatacagattcataaactattttcatttt

SEQ ID NO: 358251 - DNA, 201 bp, Homo sapiens
gcactgtaatattcagtacattcataagacctcatgccttaaaaaaaaaaaaaaatctcaaatgggctgggcatggtggctcacacctgtaatcctcgcaytttggaaggccgaagctggtggattgcctgagctcaggagttccaaaccagcctgagcaacacggtgaaaccccattcctactaaaacacaaaaaattag

SEQ ID NO: 358252 - DNA, 201 bp, Homo sapiens
taaattgttttttatattttgtctagtactttaccttttcctaaagatagatggatggtcaatggaagtacagcagaattcccaaaccaataagcatttaytatgtttaaggtcatttctggaaaacaagtctatcttggtgcagccttgaattaagaggaacgttctattcttatctattaaccatttgaatgtccaggg

SEQ ID NO: 358253 - DNA, 201 bp, Homo sapiens
aataatattgtaatattattactcaaaggaaagcttatagccttgaattccagcttttgctttctgaagaaattttgctttctgaagagctgactctaatkgcacagtgtgacacagagggagagttcccatcatggtcacctctgaatccttttccctgggtcccacattattcttgtcttgtgctatcttcttgcttta

SEQ ID NO: 358254 - DNA, 201 bp, Homo sapiens
gcttgaacctgggaggtgggggttgcagtgagccaagataatgccactgcactccagcctgggcaacagggtgagacttcatctcaaaaaaaaaaaaaaaagaaaaaaaaagcataaatgtatgtatggtatgacattattttctttttacatgtgtatttattttatttcccttcgtagtaaatgtgacagtatacaagg

SEQ ID NO: 358255 - DNA, 201 bp, Homo sapiens
ttataatgttaaatagaaggatcatcaccaataaaaggtgatatttgaataaaaatctcaaaaaagtgaagaggaggtcatgctgcatttaggagaagcayagctaaaaggaaacacaatttaaaaactttgagacagagcctgcctactttgcataatgcacaacaggagatctatgtggccagagtggagtgagtatgg

SEQ ID NO: 358256 - DNA, 201 bp, Homo sapiens
aggcttgctgtgtcaaaaacaaaatagttgagacttgggagaaatgcaaagaagctgctatgtgtttcctgtgtgacatgtgtgaagtttacctggttgtmgaaattctccggcaatgttcagggcctgaatttgcttgattagcctcagatgttagggtgtggactgggagtcaagttctaggagtggaatcatttcaac

SEQ ID NO: 358257 - DNA, 201 bp, Homo sapiens
ctcctttagtctggcttataatacctctttttttaaaaaaaatcctacaatccttaaagattcctaacaggcatttcaggcaagtcaaaaatttctctgtrcctagattttataatgaataaatacagaaaatacagataaagaataatcttatttacatcttttttttcttttctttcttttttttttttttttgacaga

SEQ ID NO: 358258 - DNA, 201 bp, Homo sapiens
tgtcaaaaacaaaatagttgagacttgggagaaatgcaaagaagctgctatgtgtttcctgtgtgacatgtgtgaagtttacctggttgtcgaaattctcyggcaatgttcagggcctgaatttgcttgattagcctcagatgttagggtgtggactgggagtcaagttctaggagtggaatcatttcaacactattcaaa

SEQ ID NO: 358259 - DNA, 201 bp, Homo sapiens
ggctgaggcaggagaattgcttgaacccgggaggcagaggttgcagtgaccctagatcatgccactgcactccaccctaggcaacagaccgagaatctgtytttaaaaaaaaaaaaaaaaaaaaaaaaatctgaaatacaggagctagagctgtccagagcagaaaaagattttcctggaggaaactgtcactaactttat

SEQ ID NO: 358260 - DNA, 201 bp, Homo sapiens
tgtgacattgtgtttagtgcccagccccgcccttacctacccagcctcctgccactcagactataagttctatgaaggcagagtctctctaccctttttcwcaccacaaatccaccgtctcagcaccatgtatgacaagtgctataaatatatgctgcttaatgactaagtgtagctcaatcatcacaccagataaagctc

SEQ ID NO: 358261 - DNA, 201 bp, Homo sapiens
cccaatagtcacattatggaatcagtctaagtgtccattcatggatgaatggataaagaaaatgaggtgtatatactcaagggaatactatttgtccattwaaaaaaaaaggaaatcctaccatttgtgaccacatggatgaatctggaagtcgttatgttaagtaaaataagccaaataagttaagtaaaataagcaaaa

SEQ ID NO: 358262 - DNA, 201 bp, Homo sapiens
gaggcaggagaattgcttgaacccgggaggcagaggttgcagtgaccctagatcatgccactgcactccaccctaggcaacagaccgagaatctgtctttwaaaaaaaaaaaaaaaaaaaaaaaatctgaaatacaggagctagagctgtccagagcagaaaaagattttcctggaggaaactgtcactaactttataaat

SEQ ID NO: 358263 - DNA, 201 bp, Homo sapiens
taagtaattagtataagaccacatgttctttgtatttgttgtaggcagcttggggaggtggactgctgctatccagaaactattcctataaactcagtggyattgaaaggtaagacctggggcattgcttgtgaaagcagaagaacccatttagactccttttccagtgactgtgagtgctaaccagagctgttttatcac

SEQ ID NO: 358264 - DNA, 201 bp, Homo sapiens
tcgtagtaaatgtgacagtatacaaggacttgagctcattatctcctccaagtagaaatacaattataaagtttgcatattctttattgagttgtcaagtkgcaaacacattttacctaactttcatttctacctttggggacatcattttctattttctcttacttgcaagcaatccagaggttttgggtataaaaataa

SEQ ID NO: 358265 - DNA, 201 bp, Homo sapiens
acactgaggaaggaactagggcagcttggaggttagaagcaaaatggagtcaggttaaatttttctcactgttataatttttgcaaaggcagtttcagtaytattatgtctattaagtagatacagaaacagtagcttactgatggatggagagaactaactctaagcaatagagttttagatgagacctggctactcatc

SEQ ID NO: 358266 - DNA, 201 bp, Homo sapiens
cataggtggcagtatatcaagcctttatggtattttagtagctcactataaacaatatccagagataaaaacaaaaggcatgactgcacttccatgcattrtattatttgtttctgagcaagtaagtatcaagtataggttcttttcaacttttaagaatcatgaaagataacctgataaaataaagactaagaatattgg

SEQ ID NO: 358267 - DNA, 201 bp, Homo sapiens
aatagaccatgaataagtgcagattgagtagttatagaacgccatctttggcttttctgagtgttcgtgtcactttgccctgtaacagtagccaaagttgytttaatgtgctctaacgccacctgcatgatgccattttaggagctgaacaagatacttaaacagagcttgtctctgtgaaatttacaaagaaactatatt

SEQ ID NO: 358268 - DNA, 201 bp, Homo sapiens
tcctgaattatgagaacattctatttactaatattctcctatcttcaatcatacttccctcgaatcaattatctttcaacttgagtgatctttctcaaatrcaaaactgatgctaccattatttgtttaaaatagttgacgtcatggtcatggcatggatgaatggaagtttgaaggaatttgtaaaccaaaatatgggga

SEQ ID NO: 358269 - DNA, 201 bp, Homo sapiens
ttttggaaatggaaacactcctatctacactacagctatgccttcagtgaagtccttttcattctctcctgaattatgagaacattctatttactaatatyctcctatcttcaatcatacttccctcgaatcaattatctttcaacttgagtgatctttctcaaatacaaaactgatgctaccattatttgtttaaaatag

SEQ ID NO: 358270 - DNA, 201 bp, Homo sapiens
atttttttgcctatttttctttaagtaatttgtaaatacatagtataatgaccaatttttgtttcatatatagcataatatacctatcatttatctgggtrtgtcaatatagattattttgaaagaaactaaaagttggtgtacaatattaattaaaaatgtggtcttcatgagaaaaagtgtgagctttgtaatttttat

SEQ ID NO: 358271 - DNA, 201 bp, Homo sapiens
ggatccttctgtatttaagttcttggtcttttttttttttggacagtctcagtcacccaggttcgagtgcagtggtgccatctcagctcactgcaacctcygcctcccaggttcaaatgattctcctgcctcagcctccctaatagtgggtactacaggtatgcaccacgatgcctggctaatttttgtatttttagtaaa

SEQ ID NO: 358272 - DNA, 201 bp, Homo sapiens
taaaaatttgagatagagaaacaataatgtgatgataataggttcatatctttgaacaaaagggaggaggcttatttctcaggttatctgaattcactgcygcaggaaggcaccctcagaatctaacttctggtcagtctagctttactcaagaatgatctggttttaggatgccttttacctaaagactgcttactacct

SEQ ID NO: 358273 - DNA, 201 bp, Homo sapiens
taaagacaaggttttgccatattgcccaggccggtcttgaacgcctgggctcaagggatccacctgccttggcctcccaaagtgctaggattacaagtgtragttactgcacctggtccatatttactttgacttagatgttttgggagtacagtagtgatctttatatagcttgtaattcaaaatatgcagaatttataa

SEQ ID NO: 358274 - DNA, 201 bp, Homo sapiens
atgcagcattattgcaatatcaataatttacattgaaggaatttacaacccgttgccaaaaaaccttttagtgtaatgtttcagagtagaaatgcttcctrctaaagaataaagcttctcgttacattcctcccagcagtttcaaaaaggtttcatggctgggcttggtggctcatgtctaatcccagcactctgagagac

SEQ ID NO: 358275 - DNA, 201 bp, Homo sapiens
aagacaggatccctctatagcccaggctggagtgcagtggcaggatcatggctcactgcagccttgacctcctgggctctattaagatgtgaataaactaraagtaggttaaaagatgaacagatggaattaaacaaatctgtttataaagcataataaacatagggacataaaaacgattaagagaatgaaaggcttaaa

SEQ ID NO: 358276 - DNA, 201 bp, Homo sapiens
cacatgcctgtggttctagctacctgagagactaaggcaagagaattgcttgagcctgggaggtcaaggccgaagtgagctgtgattgcaccactgcactycaacctgggcgacagagtgagaccctgtctcaaaaaataatatctgtcatgttaagctgttccatggaattacattgtctttttataatgggcacactaa

SEQ ID NO: 358277 - DNA, 201 bp, Homo sapiens
agcaattctccggcctaagcctcctgaggagctgggattacaggcaccttccatcatgcccggctaatttttgtatttttagtagagacggggtttcaccrtgttggccaggctggtcttgaactcctgacctcaggtgatccatccacctcggcctcccaaagtgctgggattatacacgtgagccaccgcgcccagcct

SEQ ID NO: 358278 - DNA, 201 bp, Homo sapiens
aggcagctaaaataactcagatgtcttagtttcattaagataaaagtctgtcacttaactgttttggttgaaaatacttctctggattgcaaacactaacrgttatttaattttttcccccagagttctaaatgtcgcacagtgcttgcttcgccccagaagattgaaggttttaagcgtcttgattgccagagtgctatg

SEQ ID NO: 358279 - DNA, 201 bp, Homo sapiens
tgtctcagcctcccgagtagctgggattacaggcgtgtgccaccacacaagccaggggtaatttcaagggttgtcacagtatatatcccacatatgtattmtttccatatatgaacaaattgttagcaccctttttaaagaaccttaaaactttttagtagctcttttaaaaaagttgcttagtcatgttatagtctaata

SEQ ID NO: 358280 - DNA, 201 bp, Homo sapiens
ttgcttgaacctgggaggcggagtttgcagtgagctgatagcataccactgcactccagcctaggtgacagaacaagactgcatctcaaaaaaaaaaaaaattgtgtgcttgaatagctttataataatttctaatgactagatcagtattacgtgagctgtaatgtgaacaaatcccaaaatcatcttgctatcttgctt

SEQ ID NO: 358281 - DNA, 201 bp, Homo sapiens
acatttccctccgtagtagttggcggcaggggccccaggtgggggtcgggggcgcctgcgcgggttgcctccggcaggtgtggctcggcgggcttagtcaggcgctaattcgggcgtgcccgcttcggggaatggagggcgggagcggcgcttgttcttgcctcgggcgcggataggaggggccctcccggccttgtctga

SEQ ID NO: 358282 - DNA, 201 bp, Homo sapiens
gacatttccctccgtagtagttggcggcaggggccccaggtgggggtcgggggcgcctgcgcgggttgcctccggcaggtgtggctcggcgggcttagtcaggcgctaattcgggcgtgcccgcttcggggaatggagggcgggagcggcgcttgttcttgcctcgggcgcggataggaggggccctcccggccttgtctg

SEQ ID NO: 358283 - DNA, 201 bp, Homo sapiens
cgacatttccctccgtagtagttggcggcaggggccccaggtgggggtcgggggcgcctgcgcgggttgcctccggcaggtgtggctcggcgggcttagtcaggcgctaattcgggcgtgcccgcttcggggaatggagggcgggagcggcgcttgttcttgcctcgggcgcggataggaggggccctcccggccttgtct

SEQ ID NO: 358284 - DNA, 201 bp, Homo sapiens
ccgacatttccctccgtagtagttggcggcaggggccccaggtgggggtcgggggcgcctgcgcgggttgcctccggcaggtgtggctcggcgggcttagtcaggcgctaattcgggcgtgcccgcttcggggaatggagggcgggagcggcgcttgttcttgcctcgggcgcggataggaggggccctcccggccttgtc

SEQ ID NO: 358285 - DNA, 201 bp, Homo sapiens
cagtcagtattgagttaaattcttatacttttcaagaactaaggtgtttttacctagggtataattttctgattagcagttgttacattttatttattttytatttttttgagatggagtttcgctcttgtttcccaggctggaatgcaatagcacgatctcagctcactgcaatctgcacctcccaggttcaagtgattc

SEQ ID NO: 358286 - DNA, 201 bp, Homo sapiens
tgtatttttagtagcgatggggtttcatcatgttggccaggctcgaactcttgacctcaagcccacctctgcctccctgccaaaaggggtgggattatagrcatgagctactatgcccagtccactgatggatgacatttctaataagtggcaaatagtatcattctgcttattgtggaagggtagtaacaaaccatccta

SEQ ID NO: 358287 - DNA, 201 bp, Homo sapiens
gcctgccccaggacataatgcctctaatgccttaagcttgagcaaaggaatctggggcccactcccactgcgggccgtcacgcgagagatacttgggctgmccgcgccgaagaggcgttttagttggtattgctgtggaaatccatgcttatataaaagcccagagatcccgtggatgcttaggccttgttcctggcggcg

SEQ ID NO: 358288 - DNA, 201 bp, Homo sapiens
accttaggaagagatctgattctcaagaacagcagaaaataggaagcagagaatgagttaggatgaaattcaaatgggagaaagaaatgaagaagccagayacttccagtagttaatttcttaacatggctacttataataatagagaaatggtaagaaaagaaggaaaagcaagaaaaatgtcgttactgaaattgtcca

SEQ ID NO: 358289 - DNA, 201 bp, Homo sapiens
tggcggcaggggccccaggtgggggtcgggggcgcctgcgcgggttgcctccggcaggtgtggctcggcgggcttagtcaggcgctaattcgggcgtgccsgcttcggggaatggagggcgggagcggcgcttgttcttgcctcgggcgcggataggaggggccctcccggccttgtctgaggggctggcgaagaggcctc

SEQ ID NO: 358290 - DNA, 201 bp, Homo sapiens
ggccagcctggccattgggtggcaaataagtggggcagatgcaaatagcatagcaaaggagttcataacaaacctgacactggaaccataacacaacctasaaacattgagtaaaaacttgaagcctaaaccaaaccagattgtctgctgaaagtttttaaaaatcaagacctagaatgatgtaacatgtcaaaatatcca

SEQ ID NO: 358291 - DNA, 201 bp, Homo sapiens
acagcacatcagaggctttgaaaactagaatacacaatagactgcctctccagggccagcctggccattgggtggcaaataagtggggcagatgcaaatarcatagcaaaggagttcataacaaacctgacactggaaccataacacaacctacaaacattgagtaaaaacttgaagcctaaaccaaaccagattgtctgc

SEQ ID NO: 358292 - DNA, 201 bp, Homo sapiens
aacattctagcttaatactatcttttctatttttgacacacagtctcactctgtcgcccaggctggtgtgcagtggcacgatcttggctcactgcaacctrattttaaaaatggctctgtcgactgtataaagcactttgtcttttccatcattaatttgatcagaaagcagaccactgaaaacctttcctccaaaacaag

SEQ ID NO: 358293 - DNA, 201 bp, Homo sapiens
attaataagctcagtttagaaactactgttctagaaaggaatatacttggtgttaatagttgttatgacccatcatcactagactgggctttttaaaaaaragagagagagagagagatggggcctcagtatgttgcccaggctggactcctgggccaagtgatcctcctgcctcctaatagcgagactacaggcatatgc

SEQ ID NO: 358294 - DNA, 201 bp, Homo sapiens
gttctagaaaggaatatacttggtgttaatagttgttatgacccatcatcactagactgggctttttaaaaaaaagagagagagagagagatggggcctcrgtatgttgcccaggctggactcctgggccaagtgatcctcctgcctcctaatagcgagactacaggcatatgctaccatgccaagctaaaatatttgagt

SEQ ID NO: 358295 - DNA, 201 bp, Homo sapiens
ttagttatttttcctggtcctctcccttctcccaccctgggactaaattttggactcaattgaagtttatttgtcaaacccttgttaaactcggtcttttycccccccccaggagagtggaattcgtgacctgataccaggttctgtcattgatgccacaatgttcaatccttgtgggtattcgatgaatggaatgaaatc

SEQ ID NO: 358296 - DNA, 201 bp, Homo sapiens
gcctaagatgtattctgagatagcacatataccagccactcagatatccagaagtaatattgtttgaggttactggtagctgagaagctttgtttcattakacctgtgtcagtccttgttttctgtctagccaaactgatgggttcctcctgtcttgctattgacaggcctctggtgggaggaaccataagatgccctggc

SEQ ID NO: 358297 - DNA, 201 bp, Homo sapiens
ttgttagccaggatggtcttgatctcctgaccttgtgatcctcctgcctcccagagtgctgggattacaggcgtgagccactgcgcccggccaaagccctrtttttataggtagtggatgaagaagagtccttcccctatcccctatgtgagtcaggcattgtcagagagattatggaaggttgaagaaagtaaacctata

SEQ ID NO: 358298 - DNA, 201 bp, Homo sapiens; identical to SEQ ID NO: 76677

SEQ ID NO: 358299 - DNA, 201 bp, Homo sapiens
gccaattgtcatttttaggaactatttttaatttttatttaggtacttatatactctggatttcccagagagtcgggtaatcagtcagccagatcaaaccytggaaattctgatgagtgagcttgacccagcagttatggaccagttctacatgaaagatggtgttactgcaaaggatgtcactcgtgtaagcatttttag

SEQ ID NO: 358300 - DNA, 201 bp, Homo sapiens
taaagtcatctttttttttctttcttttcttttttaataaagagcttcttttattctcgtaagaatttcatgaagccttctcaccaagggtacccacaccrgaatttccaggaagaaatagagtttcttaatgcaattttcccaagtaagtttaaataaaatataaacctgttgtcttcttaaagatagaaagtgcaacct

SEQ ID NO: 358301 - DNA, 201 bp, Homo sapiens
ctaaagtcatctttttttttctttcttttcttttttaataaagagcttcttttattctcgtaagaatttcatgaagccttctcaccaagggtacccacacyggaatttccaggaagaaatagagtttcttaatgcaattttcccaagtaagtttaaataaaatataaacctgttgtcttcttaaagatagaaagtgcaacc

SEQ ID NO: 358302 - DNA, 201 bp, Homo sapiens
cttgctagggattacagtgggtttgactcaattcaagtaagtaagcaaacatttaaatatttttcaggcataaatgttagcgttcttatcctgtaatatgsgaagtaaataaatttatatacttactgcctttgttacaatgcatgcaaacacgtggtaaggtgttcataccttaggaagagatctgattctcaagaacag

SEQ ID NO: 358303 - DNA, 201 bp, Homo sapiens
gtgcccaccaccatgcctggctaattttttttgtatttttagtagagacggtgtttcaccatgttggccaggctggtctcttaactcctgacctcaggtgwtccacccacctcagtctcctaaagtgctgggattgcaggcgtgagccactgcacccggcctgaattttaatctttaacttcataaggaaaggatggattg

SEQ ID NO: 358304 - DNA, 201 bp, Homo sapiens
gtgacacgatctcggctcactgcaagctccgccttccgggttcatgccattctcccgccgcagcctcccaagtagctgggactacaggtgcccgccaccaygcccagctaattttttttttttttatttttagtagagacggggtttcaccttgttagccaggatggtcttgatctcctgaccttgtgatcctcctgcctc

SEQ ID NO: 358305 - DNA, 201 bp, Homo sapiens
gcagtgagctgtgattgtgccattgttctccagcctgggtgacagtgagactggctcagaaaacaaaaggttatttctctgccattacagaagaagcatgstacactgtcttctcttattaaaatgcaattaataaaccctggacagaatgcattgttgagcagctatccaaggactctgagaagtaaattttagcaggtg

SEQ ID NO: 358306 - DNA, 201 bp, Homo sapiens
acagagtcttgctctgtagccagggctggagtgcagtgacacgatctcggctcactgcaagctccgccttccgggttcatgccattctcccgccgcagccwcccaagtagctgggactacaggtgcccgccaccacgcccagctaattttttttttttttatttttagtagagacggggtttcaccttgttagccaggatg

SEQ ID NO: 358307 - DNA, 201 bp, Homo sapiens
gcgtggggactaaattttatttttcattctgtaacttttaagttcagggtaacaagtgctagtttgttacataggtaaacttgtgtcatgggggtttgtcrtacacagtatttcgtcacccaggtgttaagcctagtacccattagttatttttcctggtcctctcccttctcccaccctgggactaaattttggactcaa

SEQ ID NO: 358308 - DNA, 201 bp, Homo sapiens
aaaattctgattaccggagcattactattagttgaggaaaggtttgaatggagaattttattaactgatgatgagtgagtataagagcattttgaagccartgggttggcacgtgcctataatcctagcactttgggaagctgagatgggaggatctcattagcccaggagtttgagaccaacctgggcaacatagggaga

SEQ ID NO: 358309 - DNA, 201 bp, Homo sapiens; identical to SEQ ID NO: 76678

SEQ ID NO: 358310 - DNA, 201 bp, Homo sapiens
tggctctgtcgactgtataaagcactttgtcttttccatcattaatttgatcagaaagcagaccactgaaaacctttcctccaaaacaagagtcagcaaastttctgtaaaggactagggagtaaattttaaattttgcaaggcagacagtctgttgcaattactcagctctgcccttatagggagaaaataaccatagtc

SEQ ID NO: 358311 - DNA, 201 bp, Homo sapiens; identical to SEQ ID NO: 76679

SEQ ID NO: 358312 - DNA, 201 bp, Homo sapiens; identical to SEQ ID NO: 76680

SEQ ID NO: 358313 - DNA, 201 bp, Homo sapiens
ggtcttgaactcctgacttcaagtgattgagccatcgcccctggtccctttgtgcattttttaatcactttttgttgagttgtgtgtaggtgtgtcttttrctttggatattgaccccttatgaggtgacttgcaagtattttattctgtaggttgtcttttcactcgtttcttttgatgtatagaaatgtttacatttta

SEQ ID NO: 358314 - DNA, 201 bp, Homo sapiens; identical to SEQ ID NO: 76682

SEQ ID NO: 358315 - DNA, 201 bp, Homo sapiens
tagtttgttacataggtaaacttgtgtcatgggggtttgtcgtacacagtatttcgtcacccaggtgttaagcctagtacccattagttatttttcctggkcctctcccttctcccaccctgggactaaattttggactcaattgaagtttatttgtcaaacccttgttaaactcggtctttttcccccccccaggagagt

SEQ ID NO: 358316 - DNA, 201 bp, Homo sapiens
ttttgtatttttagtaaaagacagggtttcgccatgttggctaggctggtcttgaactcctgacttcaagtgattgagccatcgcccctggtccctttgtscattttttaatcactttttgttgagttgtgtgtaggtgtgtcttttactttggatattgaccccttatgaggtgacttgcaagtattttattctgtaggt

SEQ ID NO: 358317 - DNA, 201 bp, Homo sapiens
tagctcacaacatagcttctttcaacaggtttcacggagacacgtgaaccacgttcttgtaagacaagagctattctacagggtatctagagtgcaaaccsaaaccatgtctttttcagtggatttttcatgttgacatcatcttatttcactttggggaaagtttttttctaaggatgatagcgaaaagtccttttgtct

SEQ ID NO: 358318 - DNA, 201 bp, Homo sapiens
cttgggagcaaatggccctagttagaaacactgataatgcctaggttatatcctgtgtttattagacataggtttgataatgcttatttaagcacccccccgcacttttttttttttgagacggagtttcgcccttgttgcccaggctggagtgtaatggtgtgatctcagctcaccgcaacctccgcttcccaggttcaa

SEQ ID NO: 358319 - DNA, 201 bp, Homo sapiens
ctctgtctcaggttcaagcaattctcctgcctcaacctcctgagtagctgggattacaggcgtgcaccaccatgcccagctaatttttgtatttttagtasagagggggggtttcaccatattgtccaggctggtctcaaactcctgacctcaagtaatgcgcccccccccccggcctcccaaagtgctgggattacaggt

SEQ ID NO: 358320 - DNA, 201 bp, Homo sapiens
cgatgtgcgtactccgtccctcgtgcttggattggctcccggggtagagccatcgcgtggcctgcctctcccattggttggcgtagggaggtgttctcctscggggcccctgattggccggctccgggaggcgccatcggtaatgcctgcggcaggggcggaactgctaggtggtctgagcccggctttgggctggggtcg

SEQ ID NO: 358321 - DNA, 201 bp, Homo sapiens
ggatcttttagatcacacccttaaccttttggatggaatggatgtcactaaggcaaaaatgtgtgagaatgtcactgtattaacctaagaacaaaccaaastagcagttaccagtatcatgcagcatatatttatgttgacaaagaatggtttaactttagcctttccacccaagtttagacctcttttctatgaatcttt

SEQ ID NO: 358322 - DNA, 201 bp, Homo sapiens
acctttagcacggatagtttcctggtcccaagtgggtgtggagccttccattatgggaataggaccaattccagccataaagcaagctgtgagtataaccytattcccttttatgaaatttgtcttcctgttagccttaagtgagcttattcatgtagttagctctagtctttccctaccagaagagtaaccaagagcatt

SEQ ID NO: 358323 - DNA, 201 bp, Homo sapiens
tgagccccctgccttaacctcccaagtagctgggggactacaggcatgagccaccacacccaactcaatatttatgtacaaaattattcttaaaacagttkaaggaaacatgtcatttctctgtatttgatcattgacttaacctatactgaaagaattaatttggtttcttgacatcccaactagacatacaaatgaaga

SEQ ID NO: 358324 - DNA, 201 bp, Homo sapiens
tttggggtcactcgctattttctaatacagaatgctcccgtcaagctcccttattgataactgatatctcttatgtcctgccagcagtgcacgattggctytgagactgcctgatccactcactcgtaaccagccaagtactatgacccaaactatagcagaatttggcacaaacaggtccctggtagctactttcctcag

SEQ ID NO: 358325 - DNA, 201 bp, Homo sapiens
aaatttctccagttacatgaaaaatggctctataaatgtgttggtagcacaaagcattaagagaatataaatgtttttgagctgttttctgtcaatattcyaatgtaaaaagacctttgataggatcagggataataaaagtattttatgtgacagccagcacaagacatacctccagaagctttggcaatgcgtttaagg

SEQ ID NO: 358326 - DNA, 201 bp, Homo sapiens
gtgcagtggcaccatcatagctcactgcagcctcaaaactcctaggctcaaatattcctcctgccttagcctcccattacctcgaactacaggtgcaccamgccttcttcatttcgtagagacaaggtctatgtcgcccaggctggttttgaactcctgagttcaattgatcctcttgccttaggctccccaagtgttgag

SEQ ID NO: 358327 - DNA, 201 bp, Homo sapiens; identical to SEQ ID NO: 76693

SEQ ID NO: 358328 - DNA, 201 bp, Homo sapiens
tgaaagggtagcatgctgatacattaagaggaaaaagacaagtttaagattttaaactgtgtccacagaagaataaacaatctaaatcttttctcccccgytaggtcaatattgaaggaggggctatagccttgggccaccctcttggagcatctggctgtcgaattcttgtgaccctgttacacacactggagagaatgg

SEQ ID NO: 358329 - DNA, 201 bp, Homo sapiens
ggcgtagggaggtgttctcctccggggcccctgattggccggctccgggaggcgccatcggtaatgcctgcggcaggggcggaactgctaggtggtctgagcccggctttgggctggggtcgggctgtcacacaatggctagaagtcgtgacttcgtctccttcgtgccgcatggttttcaacgcccttgacccgccggtt

SEQ ID NO: 358330 - DNA, 201 bp, Homo sapiens
aggtggtaaagaagccacagatatgtaactgaggttaataagcatggtagaaattaagtcactcatattttacaggaataaatgatggtgctgcagctgtygttcttatgaagaagtcagaagctgataaacgtgggcttacacctttagcacggatagtttcctggtcccaagtgggtgtggagccttccattatgggaa

SEQ ID NO: 358331 - DNA, 201 bp, Homo sapiens
ttgagatttcaggtgtgagccactacccccagccactgagagcatttggatcacatgctttctaggggaactgattctgttacattagccttaggtacacrtaacagatgctactggttcaaaattttaagacaatttagaatttctaagggatcttttagatcacacccttaaccttttggatggaatggatgtcactaa

SEQ ID NO: 358332 - DNA, 201 bp, Homo sapiens
ccaagacgtcaagtcggggaactccaacattggggtgtccagaaacactggggtttcaggcgctctgtaaatgcgtccgaggtccgcggttctgcccgcargcccagaccccggcctcacttccgccccgcgccccgcgccccggcctcacttccgccccgcgccccgcgccccgcgccccgcgcgcctccgcccgcccct

SEQ ID NO: 358333 - DNA, 201 bp, Homo sapiens; identical to SEQ ID NO: 76698

SEQ ID NO: 358334 - DNA, 201 bp, Homo sapiens
aataagcatggtagaaattaagtcactcatattttacaggaataaatgatggtgctgcagctgtcgttcttatgaagaagtcagaagctgataaacgtggrcttacacctttagcacggatagtttcctggtcccaagtgggtgtggagccttccattatgggaataggaccaattccagccataaagcaagctgtgagta

SEQ ID NO: 358335 - DNA, 201 bp, Homo sapiens
tttcctgtcagagatctcccctccccaactgctgtaatcctttttttttctttttgagacggagcctcactctgtcgcccaggctggagtgcagtggtgcratcttggctcactgcaatctccgcctcccaggttcaagcaattctcctgtctcagcctcctgagtggctgggactacaggcgcacaccaccacaccggct

SEQ ID NO: 358336 - DNA, 201 bp, Homo sapiens
caggccaagccgcgaggagccgcgggatccctggaaccctgcggctcccgcgttccctgacctggtgctacagccccaccctctcctctcccgatgtgcgyactccgtccctcgtgcttggattggctcccggggtagagccatcgcgtggcctgcctctcccattggttggcgtagggaggtgttctcctccggggcccc

SEQ ID NO: 358337 - DNA, 201 bp, Homo sapiens
tcctgggctcaagtgagccccctgccttaacctcccaagtagctgggggactacaggcatgagccaccacacccaactcaatatttatgtacaaaattatycttaaaacagtttaaggaaacatgtcatttctctgtatttgatcattgacttaacctatactgaaagaattaatttggtttcttgacatcccaactagac

SEQ ID NO: 358338 - DNA, 201 bp, Homo sapiens
aggtcatctttggacatgtcttggcagcaggtaagtctcagtgattccaggagaagtcaggcttattagaaacagcccataaacacacacacacacacacwctctcacacactcacacactctctcactcactcaagttcttgcctccttgcttttgctcagagttccctctgttatgattcctcctgttggcccccttct

SEQ ID NO: 358339 - DNA, 201 bp, Homo sapiens
caggacaaggttgcagttctgtcccagaacaggacagagaatgcacagaaagctggccattttgacaaagagattgtaccagttttggtgtcaactagaaraggtgagtatatcatagtggtttaaacatcaacctatttataggtaagagtaacatctaaaagagtaatacataggaatctttagaaattatatcttagt

SEQ ID NO: 358340 - DNA, 201 bp, Homo sapiens
catcgcgtggcctgcctctcccattggttggcgtagggaggtgttctcctccggggcccctgattggccggctccgggaggcgccatcggtaatgcctgcrgcaggggcggaactgctaggtggtctgagcccggctttgggctggggtcgggctgtcacacaatggctagaagtcgtgacttcgtctccttcgtgccgca

SEQ ID NO: 358341 - DNA, 201 bp, Homo sapiens
cagacaaaagcaaactagagagattgatagttgtacaatgcatgcttctttattggctcaaataaaggagctagaaggacattactgaaatataggtgaartttgaatgtggaccaaggattagataatagtgtttgattcatgttaaatttcctgatttttgttttgttttgtgagacagggtcacccaggctggagtgc

SEQ ID NO: 358342 - DNA, 201 bp, Homo sapiens
gccagggttgacagaatagttgctaataagagagttacaaaggatctgtgaatattgctctttcatgattttaatatccttggactcagtagcatttgtgrtaaaagtgctatattacaagtttagaatttagttaggcagcacacggtaactccttttatcctaagatggaactgtcattttagaaatgaacaaattcag

SEQ ID NO: 358343 - DNA, 201 bp, Homo sapiens
caaaactctgtctcaaaaaattaaattaaattaaattaaattaaaaaataggccaggtgtggtggctcatgcctgtaatcccagcactttgggaggtcaaygcaggcagatcacctgaggtcgggagtttgagacccacatgaccaacatggagaaactccatctctactaaaaatacaaaattagccaggctggtggcgc

SEQ ID NO: 358344 - DNA, 201 bp, Homo sapiens
tctcaggttcaagcaattctcctgcctcaacctcctgagtagctgggattacaggcgtgcaccaccatgcccagctaatttttgtatttttagtagagagrgggggtttcaccatattgtccaggctggtctcaaactcctgacctcaagtaatgcgcccccccccccggcctcccaaagtgctgggattacaggtgtgag

SEQ ID NO: 358345 - DNA, 201 bp, Homo sapiens
tcacaatttgcctttttgtgggtgtacgttttggtttttttttgttgttttttttctttgttttttttttcttttctttttttttttttttttttttttttgcttcaatacttctgccgctttggaaattgtaacagttaattactttgaatgttgctaaaaggacattttgtgtagggtcaagttatttttatatgagtt

SEQ ID NO: 358346 - DNA, 201 bp, Homo sapiens
tcacatttctaaagggtggatcttttggggtcactcgctattttctaatacagaatgctcccgtcaagctcccttattgataactgatatctcttatgtcmtgccagcagtgcacgattggctttgagactgcctgatccactcactcgtaaccagccaagtactatgacccaaactatagcagaatttggcacaaacagg

SEQ ID NO: 358347 - DNA, 201 bp, Homo sapiens
gtttaaacatcaacctatttataggtaagagtaacatctaaaagagtaatacataggaatctttagaaattatatcttagttatgtttttcaggttgcaartatatgtcctggatacatgaatgtggggagggggtatgctgggtttacaggacacggtaacatgggacctatgtcagcactcaagcactcttggttccag

SEQ ID NO: 358348 - DNA, 201 bp, Homo sapiens
tacataggaatctttagaaattatatcttagttatgtttttcaggttgcaaatatatgtcctggatacatgaatgtggggagggggtatgctgggtttacrggacacggtaacatgggacctatgtcagcactcaagcactcttggttccagagcgtccatgaccactgtgcacacacagcaggtttcatgagaagctgga

SEQ ID NO: 358349 - DNA, 201 bp, Homo sapiens; identical to SEQ ID NO: 76697

SEQ ID NO: 358350 - DNA, 201 bp, Homo sapiens
tgtgatggtcttacagatgcatttcacaactgtcatatgggtattacaggtaaggcagacatggctgaaactgtattagctttaaaaaggttaaaaagacmatatactaatctgcttcttaggtgctttcgtccttatggccagagactgtcttaaggatttttatatctcttctttgattaactgaagtgaagtaagtat

SEQ ID NO: 358351 - DNA, 201 bp, Homo sapiens
gtagggtcaagttatttttatatgagttaatgtgaaattgtaaatggaaatttttccttaaaatacaacacaatgatgtctgtataaatctgtctgtttaraatctgtgctgtgtaagggcattcgtactcatgctgttactgtacttatgcaccattcagacttgttagagtagatgtgggtttatgactgccaagtttg

SEQ ID NO: 358352 - DNA, 201 bp, Homo sapiens
tcgtaagtaataatacccgttcagccatttcatataggaggaggacatgaaaaaaccctccctcttcagatcatggcaagtttaatctatcccataagcayagccactaaaatctattattaggagaaaatgtggtagtcaaatgagaaaaaagatactggtccaagtttttaacttcaaatattactacttaaatgctaa

SEQ ID NO: 358353 - DNA, 201 bp, Homo sapiens
attcatgttaaatttcctgatttttgttttgttttgtgagacagggtcacccaggctggagtgcagaggcacaatcatggctcactgcagccttgaactcytaggctcaagtgatccttctgcctcagcctcccaagcagctaggactactagctacatggcacacacaccatgcccggctaaatttatttttaatggaga

SEQ ID NO: 358354 - DNA, 201 bp, Homo sapiens
gaaagtaatgagttataacttattcaataaaatgaaaatgtatgagtccatcctgatataaataactgaataaatgggagaaaaggaaaaggttttctttrtggtaaaatgccaattaatatcttaccaatagaaggaatgttggagttagaaagtcatgaatgaatgctaaaactagtgggtgaaaatatgatggggaag

SEQ ID NO: 358355 - DNA, 201 bp, Homo sapiens
gcctaaattttgaacaatttcagcgtgcaaataagtaatgatagtaatgggttataactgcccaagtattgaaaaatttcagcatcaaagtaagtaatgaragtaatgagttataacttattcaataaaatgaaaatgtatgagtccatcctgatataaataactgaataaatgggagaaaaggaaaaggttttctttatg

SEQ ID NO: 358356 - DNA, 201 bp, Homo sapiens
agcattctactagatagaggtatgtgtgtttggagcttagagaaacagctgaaagagtctctggcatagagagataatacatgaagtcatgggaacaaagrggctatcctggagagtattatgacatggtccagacaaagcagcatcacaaagccttccatccccgaaagcatttcaagaaggacataatcaaagggttgc

SEQ ID NO: 358357 - DNA, 201 bp, Homo sapiens
aaaaaaatggcattttaataaaataagtctacataaagttcccttaagtcctgcctacacaggatatttagatatactatacagaaacaatgtctagtccmtgcagaagagatgaaaatggttacttcatctcaatttacagtggcccaatgttattttatcccatgcgtataactgctcgtatcactgtgagactacaag

SEQ ID NO: 358358 - DNA, 201 bp, Homo sapiens
ttacagcttgtactttactttaatgtgtaatactcaactcaaggtacaagacaattgcatttaacattgttataaataaaaggaacatcagatcaatcatwaagggctccagagtgaacagcatcttcataacttccatgtttatcatctttactttctggatgtaatttaataagatcatcaattcgaagaatggtgatt

SEQ ID NO: 358359 - DNA, 201 bp, Homo sapiens
tgggagtatggttccaacaatacaggtaagttccctgccctcttagggctcagttctgagcttggaaaataggtgccacatcatgccccttgcaaatgggrcatatcactccccagaggaatatagctgagtcctgagagtgcccccatcttctgattctttgggtttgaacactcgtaattaattaattaattattatta

SEQ ID NO: 358360 - DNA, 201 bp, Homo sapiens
tttacagcttgtactttactttaatgtgtaatactcaactcaaggtacaagacaattgcatttaacattgttataaataaaaggaacatcagatcaatcawtaagggctccagagtgaacagcatcttcataacttccatgtttatcatctttactttctggatgtaatttaataagatcatcaattcgaagaatggtgat

SEQ ID NO: 358361 - DNA, 201 bp, Homo sapiens
tcattaagggctccagagtgaacagcatcttcataacttccatgtttatcatctttactttctggatgtaatttaataagatcatcaattcgaagaatggkgattgcagcttctgttgcaaatttcaaactcttaactttaactatggttggttcaaacacccctgcttgtttgttgtctcgaggtttaccattgctcaaa

SEQ ID NO: 358362 - DNA, 201 bp, Homo sapiens
ttttcagtctcaagtaaccttacccgtttttagtttccagcctaatcccagattgataacattgtgatgaatataatctctaagtttttatcagcgacttmtttgctagttcttccccacaaactctccaaggaagggtggtaggtttgagtatatctgaaactgggaatagagtaaccactttataaacatttaccattg

SEQ ID NO: 358363 - DNA, 201 bp, Homo sapiens; identical to SEQ ID NO: 76702

SEQ ID NO: 358364 - DNA, 201 bp, Homo sapiens
gcaccgcactgggcctgtctttttaatatgtatatgatcctgcatatgttttcagtctcaagtaaccttacccgtttttagtttccagcctaatcccagaytgataacattgtgatgaatataatctctaagtttttatcagcgacttatttgctagttcttccccacaaactctccaaggaagggtggtaggtttgagta

SEQ ID NO: 358365 - DNA, 201 bp, Homo sapiens
aagtaaccctgagagcttaccagtgaatttcacaatccaattttaagatagtatcttctaggtgttggccatgtgggtaatagttaaagaaatactagttactaggactgagttcattacttcccaaggtaaaaaaaaaaaaaaaaaaaaaaagacattggcttacttggcataaaaggaacgaggtaagataggcaggga

SEQ ID NO: 358366 - DNA, 201 bp, Homo sapiens
tacagccccaccctctcctctcccgatgtgcgtactccgtccctcgtgcttggattggctcccggggtagagccatcgcgtggcctgcctctcccattggktggcgtagggaggtgttctcctccggggcccctgattggccggctccgggaggcgccatcggtaatgcctgcggcaggggcggaactgctaggtggtctg

SEQ ID NO: 358367 - DNA, 201 bp, Homo sapiens
ggatttaaaaataaaagcaaaaaatgtaaagcttctagaagtatatataagagaatagcttttacagggtgcagtggcaggtgcctatagtcccagctacyagggaggctgtggtgggaggatcacttgaggccagcagtttgaggttgtatagtatactatggttgattttgcctgttagtagctgctgcactccagcct

SEQ ID NO: 358368 - DNA, 201 bp, Homo sapiens
caggagcgccgagggccggacttgtgtaggagaggggcgtatgtggaggaagccggtcaggccaagccgcgaggagccgcgggatccctggaaccctgcgsctcccgcgttccctgacctggtgctacagccccaccctctcctctcccgatgtgcgtactccgtccctcgtgcttggattggctcccggggtagagccat

SEQ ID NO: 358369 - DNA, 201 bp, Homo sapiens; identical to SEQ ID NO: 76703

SEQ ID NO: 358370 - DNA, 201 bp, Homo sapiens; identical to SEQ ID NO: 76723

SEQ ID NO: 358371 - DNA, 201 bp, Homo sapiens
tgccgttcctcggcagcccagcctgcgtagacggtcccgcggcgctgactgaccgggctgtgctttctcgtcttcagcaccagcaggcagctggctccggytttggggtatctgggctccaggcagaagcacagcctccccgacctgccctacgactacggcgccctggaacctcacatcaacgcgcagatcatgcagctg

SEQ ID NO: 358372 - DNA, 201 bp, Homo sapiens; identical to SEQ ID NO: 76732

SEQ ID NO: 358373 - DNA, 201 bp, Homo sapiens
ctcctgacctcaagtgatccgtctggctcagcctcccaaagtgctgggattacaggtgtgagccactgcacctggcctatataggcttttttcttaaacctatttagtaatgttttcccaagtttattttttatttttaattttttccccaagtttatttttctatttttttttcatggaaaaatggggtaacttagcagt

SEQ ID NO: 358374 - DNA, 201 bp, Homo sapiens; identical to SEQ ID NO: 76733

SEQ ID NO: 358375 - DNA, 201 bp, Homo sapiens
cagcggcttcagcagatcggcggcatcagcggtagcaccagcactagcagcatgttgagccgggcagtgtgcgggtgagaagaaaggggacccggtcacgsccccaagggcgaaggggctcgcggcgggcagggcctccgcggcaatggcgacagtggccgcaccgggcctggcgggaccggggcacctgcaggcggttct

SEQ ID NO: 358376 - DNA, 201 bp, Homo sapiens
agcggcttcagcagatcggcggcatcagcggtagcaccagcactagcagcatgttgagccgggcagtgtgcgggtgagaagaaaggggacccggtcacggscccaagggcgaaggggctcgcggcgggcagggcctccgcggcaatggcgacagtggccgcaccgggcctggcgggaccggggcacctgcaggcggttctc

SEQ ID NO: 358377 - DNA, 201 bp, Homo sapiens; identical to SEQ ID NO: 76751

SEQ ID NO: 358378 - DNA, 201 bp, Homo sapiens
tggctgtggtggcttcggcagcggcttcagcagatcggcggcatcagcggtagcaccagcactagcagcatgttgagccgggcagtgtgcgggtgagaagraaggggacccggtcacggccccaagggcgaaggggctcgcggcgggcagggcctccgcggcaatggcgacagtggccgcaccgggcctggcgggaccggg

SEQ ID NO: 358379 - DNA, 201 bp, Homo sapiens
gaattaaaattgtgaaacttagatccaggtgtcgcattctgatgttgtctaatttcttgggccctatgacaaaaatattttaatacatgtaatataacatkttactgtaattattgaaatctgttcatttgtgggtggttttggattttttttttaataggggagttgctggaagccatcaaacgtgactttggttccttt

SEQ ID NO: 358380 - DNA, 201 bp, Homo sapiens
ttgtttataagtgattgagtacctgcagagctttcttttacttaaacatattttaaaaattattaaaaagattttcatgtttgaaaacttggggaaaaaarataaaacaatgtcataatctcatcacatttaactgactaatatgaatatttttcaacaaaaagcatttgacttttattattatttgaggcaaaaactaaa

SEQ ID NO: 358381 - DNA, 201 bp, Homo sapiens; identical to SEQ ID NO: 76726

SEQ ID NO: 358382 - DNA, 201 bp, Homo sapiens
aaaattcagttactattgatttattaaaaaacaatagaaaagttacatctatttttagagtgactctcaagaaaatttaataagggaaacacagatctataaaaaaactgtttgtaaacctaacaaaggaaaaaaaaagttggtgtctttaaaaaaccctttgagattagctgtgtattcagatatcagttggttctctcc

SEQ ID NO: 358383 - DNA, 201 bp, Homo sapiens
ggcattgcactccagcctgggcaacaagagtgaaactccgtctcaaaaggtaaaaaatgaaaaaaaaaaaaaaaaaaaaaaaaagttgaagttataaaaawcaaaaacgtgaattaaaattgtgaaacttagatccaggtgtcgcattctgatgttgtctaatttcttgggccctatgacaaaaatattttaatacatgta

SEQ ID NO: 358384 - DNA, 201 bp, Homo sapiens
ctcccaaatagctgggattacaggcacataccaccatgcccagctaatttttgtgtttttagtacagacagggtttcaccatgttggccaggctggtcttraactcctgacctcaggtatctgcctgcctcggcctcctgaagtgctgggattacaggcatgagccaccatgcccagccaaatgttttacttattaaccct

SEQ ID NO: 358385 - DNA, 201 bp, Homo sapiens
ttttttttttttttttttgacggaatctcagtctgtcccgcaggttggagtgcagtgatgtgatctcggctcactacaacctccgtctcctgggttcaagyaattctcctgcctcagcctcctgagtagctgggattacaggcgtacgccaccacgcctggctactttttgtgggttttttagtagagacagggtttttcc

SEQ ID NO: 358386 - DNA, 201 bp, Homo sapiens
tttgtgaaaaggaaggagcacgaatgctttcaagttcctatgacatgctagtcatctttcagtgtgtcccattgttgcacccagtagtctcgatgcccagygtcacggtgattccaagtttgcctctctgcccactataatttgtgctccatgaagtcccaggacatgaggttcttgttcatttgtgcgtctgggcccata

SEQ ID NO: 358387 - DNA, 201 bp, Homo sapiens
gctactttttgtgggttttttagtagagacagggtttttccatgtcgtccaggctggtctggaactcctgacctcaagtgatccgcccatctcggcctccyaaagtgctgggattacaggcgtgagccacctcacctggccttgtatgtatgtttttttctttttctttctttttttttttctgtgacggagtattgccct

SEQ ID NO: 358388 - DNA, 201 bp, Homo sapiens
ctcatatttgtaatgcaattaaaatatatgttgttaactttttttttttttctcaagagctcggttgataaaaccaggggtatgtggactttttgagtctktgccttttgggggtgtgtatgggaatgttatgttttaacgttttttacaaaatagtattgtctttttaatttattcgttagtggtttgcacaaggaagat

SEQ ID NO: 358389 - DNA, 201 bp, Homo sapiens
caggcgtgagccacctcacctggccttgtatgtatgtttttttctttttctttctttttttttttctgtgacggagtattgccctgtcgcccaggctggastgcagtggcgtgttcttggttcactgcaacctctgcctcctgggttcaagccattctcctgcctcatgctcctgagtagctgggattataggcacgcgcc

SEQ ID NO: 358390 - DNA, 201 bp, Homo sapiens
acaagaggatttccatttttttctaatattaatagttcatttagtctgtagcttcttgaaggcatagaaaagactattttattttgcctacttatttggcraggtacccatgcagtatgccaggagttacagggcctattgagaaggagtaaagggtctgggaggggtggcagggagttgctaattcatgtatggtggcta

SEQ ID NO: 358391 - DNA, 201 bp, Homo sapiens
actcctgacctcaagtgatccgcccatctcggcctcctaaagtgctgggattacaggcgtgagccacctcacctggccttgtatgtatgtttttttctttytctttctttttttttttctgtgacggagtattgccctgtcgcccaggctggactgcagtggcgtgttcttggttcactgcaacctctgcctcctgggttc

SEQ ID NO: 358392 - DNA, 201 bp, Homo sapiens
atatattggtgcacccttatctacattttgtgcacagtaggaatcgattgttgatttactgaagttaccttatacttgttttttgttttttttgttgttgwttttttgagacaagagttttgctcttgttgcccaggctggagtacagtggcgcagtcttggctcactgcaacctccgcttcctgggttcaagtgattctc

SEQ ID NO: 358393 - DNA, 201 bp, Homo sapiens
gacccagttgatttagttgatgtgactaatctagaattatattctgtattactacagaataaaaggattacagctcttaaagtatacccttagttcagtcrtagagaaaactgcccatcaagacaggaagagctgggctgccttggagaagaacaatgactttattcccaaatggaggcgtagaagaaggagggtagaagt

SEQ ID NO: 358394 - DNA, 201 bp, Homo sapiens
tagccttgaggggaacatccaagttggtcatgtgagtgcaaaaaggccagtgaggctgcagctgcgtgagcacgtgctcaatgacggggtcaagtgcagcrcctcttggtagtaagagtagctgagtgtaaacacctagggttcgctccagtgagaaggggagcctttggagggggcaaggcccacccccaccccccaaaa

SEQ ID NO: 358395 - DNA, 201 bp, Homo sapiens
ttcttctacccctgacattggaatactcttgatctgtggctcacttcacaggatagacccagattttggcagaatctgaacagctcttttgggacagtgamatggcataacaatttgtaaaagccacaaaaaatttgtaagcaccgatctgtagagtcaggttatttgtagagctgcatgaccagaaaggctgatatttgt

SEQ ID NO: 358396 - DNA, 201 bp, Homo sapiens
gtcataccctaatgatcccagcaagataatgtcctgtcttctaagatgtgcatcaagcctggtacatactgaaaaccctataaggtcctggataatttttktttgattattcattgaagaaacatttattttccaattgtgtgaagtttttgactgttaataaaagaatctgtcaaccatcaaagaggtctgcattatgct

SEQ ID NO: 358397 - DNA, 201 bp, Homo sapiens
tacccctgacattggaatactcttgatctgtggctcacttcacaggatagacccagattttggcagaatctgaacagctcttttgggacagtgacatggcrtaacaatttgtaaaagccacaaaaaatttgtaagcaccgatctgtagagtcaggttatttgtagagctgcatgaccagaaaggctgatatttgtaagtga

SEQ ID NO: 358398 - DNA, 201 bp, Homo sapiens
cctattggaatattttctttatataggcgttttttttttttctttttttttggagacagagtcttgctctgttgcccaggctggagtgcagtggcgcgacyggagctcactgcaacctccacttcccgggttcaagtgattgtcccacctcagcctcctgaatagctgggattacaggtgcatgctaccatgcctggctac

SEQ ID NO: 358399 - DNA, 201 bp, Homo sapiens; identical to SEQ ID NO: 76746

SEQ ID NO: 358400 - DNA, 201 bp, Homo sapiens
tctgatgttgtctaatttcttgggccctatgacaaaaatattttaatacatgtaatataacattttactgtaattattgaaatctgttcatttgtgggtgkttttggattttttttttaataggggagttgctggaagccatcaaacgtgactttggttcctttgacaagtttaaggagaagctgacggctgcatctgttg

SEQ ID NO: 358401 - DNA, 201 bp, Homo sapiens
ttcacaaggaaaatagccctttagtgggaaactgaaacaggcttgtttttatttactatttactcatatttgtaatgcaattaaaatatatgttgttaactttttttttttttctcaagagctcggttgataaaaccaggggtatgtggactttttgagtctgtgccttttgggggtgtgtatgggaatgttatgttttaa

SEQ ID NO: 358402 - DNA, 201 bp, Homo sapiens
tcatatttgtaatgcaattaaaatatatgttgttaactttttttttttttctcaagagctcggttgataaaaccaggggtatgtggactttttgagtctgkgccttttgggggtgtgtatgggaatgttatgttttaacgttttttacaaaatagtattgtctttttaatttattcgttagtggtttgcacaaggaagata

SEQ ID NO: 358403 - DNA, 201 bp, Homo sapiens
cttctagactatcggttaatacttttgaagttttgtcagttaccagaatatcagatatattcatatgcaaccagtggttttggtatgctgccatttttgtytaatctgtaccacattccatcatttgtgcttataaagatgattacttttaaacccgtagaataagagaagtgagattttgacccagttgatttagttgat

SEQ ID NO: 358404 - DNA, 201 bp, Homo sapiens
aattttaggacaaacggatgttatagataagctggtcccattatctaatagcttacaaagaaaaaaatataatgtatacagtggttgaaaaagtaggagtyacaaaaaaatgtgtttgcattttaacttttcaggagatgttacagcccagatagctcttcagcctgcactgaagttcaatggtggtggtcatatcaatca

SEQ ID NO: 358405 - DNA, 201 bp, Homo sapiens
atctcctattggaatattttctttatataggcgttttttttttttctttttttttggagacagagtcttgctctgttgcccaggctggagtgcagtggcgygaccggagctcactgcaacctccacttcccgggttcaagtgattgtcccacctcagcctcctgaatagctgggattacaggtgcatgctaccatgcctgg

SEQ ID NO: 358406 - DNA, 201 bp, Homo sapiens; identical to SEQ ID NO: 76730

SEQ ID NO: 358407 - DNA, 201 bp, Homo sapiens
tacacatattgccagcactggtgaattgtagggcctgaaaagaaagctctactgtgtcactcgttttttttgcaaattgaaattgttcttgttgtataatrtgctttggggaaatgtttggtctctcaggtaggtgtgccagccgtttgcaggagggctgagagcgcctgtccactggtggccagacatcatcgggtccgc

SEQ ID NO: 358408 - DNA, 201 bp, Homo sapiens
tccagcctaggacttggagactccctgcatccccagctaccctgcaggtgaaacttcactgagcccacttgacttcaggtgggagaggaggaggcacaccrttgtggtgtgcgttaccaaaaaagcagtaacctaactgtggaacagttcaggatctttagacttgatacttttcttgatttcccttaggggtcaaagttc

SEQ ID NO: 358409 - DNA, 201 bp, Homo sapiens
cccaggctggagtgcagtggcgcgaccggagctcactgcaacctccacttcccgggttcaagtgattgtcccacctcagcctcctgaatagctgggattayaggtgcatgctaccatgcctggctactttttgtatttttagcagagacagggtttcaccatgttggccagggtggtctcgaactcctgacctcaagtgat

SEQ ID NO: 358410 - DNA, 201 bp, Homo sapiens
gtttccagaccttctgcctttctggggctctttggtagagtatatgaaaatattcggcttggaagtgccaggctgggctcaccaaatactttgctgttgakcctaattggatttaaaaaatgtcactgaagagtatgggaaatagagccatgagttgtctggcagagggttgggactttgaacttaaagtgataccttcac

SEQ ID NO: 358411 - DNA, 201 bp, Homo sapiens
tttttttttttctcaagagctcggttgataaaaccaggggtatgtggactttttgagtctgtgccttttgggggtgtgtatgggaatgttatgttttaacrttttttacaaaatagtattgtctttttaatttattcgttagtggtttgcacaaggaagataatcgatagtcatgttttttagactctctgtattgcttgg

SEQ ID NO: 358412 - DNA, 201 bp, Homo sapiens; identical to SEQ ID NO: 76753

SEQ ID NO: 358413 - DNA, 201 bp, Homo sapiens
atgttatgttttaacgttttttacaaaatagtattgtctttttaatttattcgttagtggtttgcacaaggaagataatcgatagtcatgttttttagackctctgtattgcttggtaagctacgtagtaaaaaatgtttacttttccttaaatgttttgaatttcggggttatgaaatttgttgagtaatttttagacag

SEQ ID NO: 358414 - DNA, 201 bp, Homo sapiens
agttggttctctcctttctgaatcgctaaacaactggagcttgtttcagaaagcagcattgtctacgtatgttccttttaaaaattttttttttaattctrtctaaaaaaaacagacggggtcacactatgttgcccaggctgctcttgaattcctgggctcccctatccacgcacctcggccttccagagtgctgggatt

SEQ ID NO: 358415 - DNA, 201 bp, Homo sapiens
acacatattgccagcactggtgaattgtagggcctgaaaagaaagctctactgtgtcactcgttttttttgcaaattgaaattgttcttgttgtataataygctttggggaaatgtttggtctctcaggtaggtgtgccagccgtttgcaggagggctgagagcgcctgtccactggtggccagacatcatcgggtccgca

SEQ ID NO: 358416 - DNA, 201 bp, Homo sapiens
gattttcttaactatatcttgtttaagatatttacatctgtgttcaaaatgaactatgcctataattgttggggtggattgaccttatctatttatagaakgaaaagtgggaacaggcacagtggctcacacctgtaatcctagtactttgggaggcagaggcgggcgaattgcttgagtccaggagtttgagaccaacct

SEQ ID NO: 358417 - DNA, 201 bp, Homo sapiens
agtttccatgcagaccccctgaagagggagtggcctagggagccccaccttgtcttgtaccatcaacaaagtcccctgtgctcagccaaaaaaataaatamataaaatttttttctataaagtttctatggattaatgatcaattcttaaatattctagttttgactggaatttggaataatattttattattattcctag

SEQ ID NO: 358418 - DNA, 201 bp, Homo sapiens; identical to SEQ ID NO: 76756

SEQ ID NO: 358419 - DNA, 201 bp, Homo sapiens
atattatcttatgtaaccacagtccaattattaaaatcaagaactaaccttgatagagtactggtatctaatcaacagaccttttccaaatgttgccaggygttccactaactctctctatagggaaactaacaacaggcaggcttccagtccaggctgcagaccaggatctcatgctgtgcttggctgtcttgtttcttc

SEQ ID NO: 358420 - DNA, 201 bp, Homo sapiens
aaataagagtcaaatgggagaaagctttaaatatcaaggttttgaaaacaggagagattggagaacatgatgatgcattaaatcaattgttgcgcaaacaygtattggctgcccctatatgaagggcattctgggtgataaaagcagtgcaccatggtctcttttctcaaacagctaaaaatgcagtagagctgacaacct

SEQ ID NO: 358421 - DNA, 201 bp, Homo sapiens
ccttctacaaaatttccatgatgaaaagtagtgtggaatataatagaggcatgaacaaaatatttaaatgtggctagtcatgtgaatatttttatataaawctgcctttatttaaaaaaaaagtcctttcctaagctccttataattcacctttctgtcttgttttaatgagaattgctgctattgaaacttttgatcgac

SEQ ID NO: 358422 - DNA, 201 bp, Homo sapiens
tactggtctgtacttttcttttttgtggtatttgtcttattttggtgtcagggtaacactggcctcatggaattagctgggaagtattccctcctctactrtttttttggaagagtttatgaagaatttgtattaattcatcttcaaatgtatagaatttaccagtgaagtcatgtgggtatagatgtttctttgtggttg

SEQ ID NO: 358423 - DNA, 201 bp, Homo sapiens
caagttttgatgaagtacttttccttagtttttagattatttatttctgcttttgtttccttgttgatgtagaggttatttcaaagtaattttctaatttygaaatactttggatgtttgcttgttttttattttttattttgttcctagagacttctttggattgttgtaaaaagaatataactattaagttaaaatttt

SEQ ID NO: 358424 - DNA, 201 bp, Homo sapiens
tggggcctttatagcccattcagtagcttcgtggtcccagtttcctgctgtgctgaagccctagaagacttcccagagtttcttgagcatggagtgttgcrtgctgccctggaaggtcttggaatgccagccgggcatgggctggtcatggacttttgggcccaaggatcactccacgtcccccaggagagtacttctgag

SEQ ID NO: 358425 - DNA, 201 bp, Homo sapiens
atttgagggagtgtttccttctatttattggtcgcattaatatcatacatatgtcactttaaccatcaacccagatagcctaagggagaaaacatttttgyggccaaaacctgagttttacataggaaaatgcttgggtgtaaatacagccaaagactcattggcttacttttctacatacgatttgagaattgagatatc

SEQ ID NO: 358426 - DNA, 201 bp, Homo sapiens
atcgcaaagtgccttttaccttctctcttaatcctgaatggtaagaaagtcttctttcctaacacattaatagtttcagccgtggtattttaggtaagctrtgaaagattggaaagtgttttctgtcaagaagaaataattatccctttcaaaaaattgtatattccaaacatcttctctctttgttaggttattgaaagt

SEQ ID NO: 358427 - DNA, 201 bp, Homo sapiens
cttcagattacttaaacaatagggaaaactggcgtcataaaacatgagccttttaggaagggcaactccaggattgatggattcagttactcacacccttyggatctgcttctttacccttcccactttgctaatggactttgttttgatggtggcaagatcagctctttggctgtaggcctggtatgcacattggaagaa

SEQ ID NO: 358428 - DNA, 201 bp, Homo sapiens
ttaatcctgaatggtaagaaagtcttctttcctaacacattaatagtttcagccgtggtattttaggtaagctatgaaagattggaaagtgttttctgtcragaagaaataattatccctttcaaaaaattgtatattccaaacatcttctctctttgttaggttattgaaagtctgctatttaaatagttatttcctgtt

SEQ ID NO: 358429 - DNA, 201 bp, Homo sapiens
agggagcaaatgaatcatatcctgttttaacaggtaagcttgagggaataataaacagttataatgtaatatcagaaatctattgttttattagctgtatraccagtatgacagtttatgaggtgtattagtttgagatagttgtaaatcatggtataaatgcactctcacttttaacaaagagctttttaatgtacagtc

SEQ ID NO: 358430 - DNA, 201 bp, Homo sapiens
atattccaaacatcttctctctttgttaggttattgaaagtctgctatttaaatagttatttcctgttacttattaactcagaaaattttctatatggttrtatttgggaagatttatttaaaagttttcttttagagttaacatcaataatctgcatgttttctacagtggaggtgttaatgttgaaacataagagaatg

SEQ ID NO: 358431 - DNA, 201 bp, Homo sapiens
tgcccaccagcttaagggtgggtctgccttccccagcctactaactcaaatgttaatctcctttggcagcaccctcacagacacacccaggattaatactytgcatcctccaatccaatcaagttgacactcagtataaaccatcacaagtccaccccttgtcaacttgaacccatacacgtctcctgcgatcataggcaa

SEQ ID NO: 358432 - DNA, 201 bp, Homo sapiens
ggaactgttcaagactagtagtaatctactaatgcataggccaaacgcactctctactgattaaaaaaaaaaaaaaacccagacatcagaacatgctctayggccaaactgtcatcatagtgaaaagtctgcgcagtacattattctataaaatgttgtttaactattttaatggctccttatgaagtcctaaagaatgaa

SEQ ID NO: 358433 - DNA, 201 bp, Homo sapiens
ttattactgatgacagtatacttttcaaattgaatttggtaaattgcttcactggctgaataagagagttgattctgaacgaaggagatcaaacctgaacrgtacattatcttcattatacttatggttgtatgcaataaacataacttttctaatccaaatattgtggcagactatcttacagaaaattgtatttgtgta

SEQ ID NO: 358434 - DNA, 201 bp, Homo sapiens
tttggtaaattgcttcactggctgaataagagagttgattctgaacgaaggagatcaaacctgaacagtacattatcttcattatacttatggttgtatgyaataaacataacttttctaatccaaatattgtggcagactatcttacagaaaattgtatttgtgtatatgaaggattttcctatgtgttttgaaggaaat

SEQ ID NO: 358435 - DNA, 201 bp, Homo sapiens
ctgattaaaaaaaaaaaaaaacccagacatcagaacatgctctatggccaaactgtcatcatagtgaaaagtctgcgcagtacattattctataaaatgtygtttaactattttaatggctccttatgaagtcctaaagaatgaagataattacaaacctgtaattttatggctgccttgttgaaaagggcagaccaaggt

SEQ ID NO: 358436 - DNA, 201 bp, Homo sapiens
atttgtgtatatgaaggattttcctatgtgttttgaaggaaatgaaaatgtgtaatggctacagcagtgatactgataggctagcaggcaattgattgctyagaggttaagttgagagagagagaattctctggaccatagtcattattccttattcacactccattcagctttccccgccccttctgggcacagcctcag

SEQ ID NO: 358437 - DNA, 201 bp, Homo sapiens
ctgtgtgtggcctactgctcctaggctacaatccctatgcagcatgtcactgtactgaatactgcaggcagctgtaaccaaatatatctgaacataaaaargtaatgtgttgtgctataccattaggaaggctactgcgtcatcagtcaataaatatttttaagcttcgttataatattatgggaccatctcatatatctt

SEQ ID NO: 358438 - DNA, 201 bp, Homo sapiens
ctcttatgagcttctctttcctcagtgttattgtaattgttggtagcatttttgagaacttactgtgccctagactgtgtgcctggtgctttatttctgtktttttttttttttttcgcttgttcgtaatgttaataatttgctcaaggtcagactgtgtgactcctaatgactgcgctctccccagctcccttgcctgcg

SEQ ID NO: 358439 - DNA, 201 bp, Homo sapiens
agaggcatgagaaagattggggtgggccaaggcaggattagaactaggaagacaggagggagacagtggggatcagcggggcttgtttcctgttgctgccrtttgttacctgtgcctgaggttgcagcgtgccttacttgattgatttgtggcctcactttctgctgccactgtccaagcccatggagaatgctgaggctg

SEQ ID NO: 358440 - DNA, 201 bp, Homo sapiens
cagaaggtgaaaggcacttcttacatggcagcaagagagaatttgtgcagggaaacttccccttataaaaccataagatctcgtgagacttattcactatmatgagaacagcataggaaagacccaccctcatgatgcaattacctctcaccaggtccctcccatgacaggtgggaattctggaagctacaattcaagatg

SEQ ID NO: 358441 - DNA, 201 bp, Homo sapiens
aaacatcacaaaaacagtaaattcaagttcagtattccctttggatctaactataaaactcatgaccatatataactgtaaaagtataactgtaaaattcmtaacaaaatataacatgttcaatcacatataacaagatcatatgtcataacaagaattttattgcaggattaggaaactggcttaacatttccaaaattc

SEQ ID NO: 358442 - DNA, 201 bp, Homo sapiens
ttttctacttctgtttcagcaaattgaggttgatgagggaagaactgtatgctaggaagaaaaatcgagctgtaggataatagaaggagtagaaaggactsgaattatcaggtgtaggtggaatatgtgctcaactacagtttttagaaatacagtgtaaagtagttctaaagagagacttgggtcgactatccagacctg

SEQ ID NO: 358443 - DNA, 201 bp, Homo sapiens
tttcttggatttgctttgaaattatatgagaggagagtaggtggtagagatggaaaatattggctatgaattgtgatggttgaagctggctgttgagtacmtagggccattatattttttggtgtgatttgataaaagttttaaatgtatatttatacatatgcgtgaataggcaaaatcttcatctgaaaaagaaagttg

SEQ ID NO: 358444 - DNA, 201 bp, Homo sapiens
gaaggggtcttgctatgttgcccagcatggtctggaactgctggactcaggtgatcctctcacctcagccaccagaggtgctgggattacaggtataaacygctgcacctggttcattgaagagttttaagcagataagtgacctgatctgacttcctaagatcactgtggctactgtattgagaaccgactgtaggagaa

SEQ ID NO: 358445 - DNA, 201 bp, Homo sapiens
cgtgtcggccagcttggtctcccaatcctgacctcaagtgatcccccaccccagcctcccggagcgctgggcttgcagccatgcggcactgctcccagccratacatattttaattcccacaggttccttgtgttttcattcattcagcaaactgtgtgtcaagttctgttcaggtgctgggattattaaattgttaaagg

SEQ ID NO: 358446 - DNA, 201 bp, Homo sapiens
aacctgactttacagagaactcattcactccattttcctggacaatcgtccttcagagccctgccctggctggccactctccctctcccgggtggtaagcrtcttggaagggctgcaggctgttttggcagtgtgtccccagcatgcagccctgaaaaacgagtgcgtctttctgtggtttgtgggatcctcggaggagga

SEQ ID NO: 358447 - DNA, 201 bp, Homo sapiens
gcgttggtagatgaggctcttctgttatgcgactctttatatttttagggactttgagaggaggctatgtaattataaactataattaattaattagatakgtatgagggaccctaatgattctttaatgtacctaagagcaaataaatgaaaacttcagaaagcagaagagaacctccctgactaatctatgtgaatttc

SEQ ID NO: 358448 - DNA, 201 bp, Homo sapiens
attttttggtaatggaaaccagaaaatgtgttgaatgtcttgatctgaattataaataaacatgagtccaccatctggtgactagaaaggagataaagttsatacgaattcatctataaagagttatttggcatattctattatttctgttaattgtgtgttcacattatcataaagatggatctttggtatttacatatt

SEQ ID NO: 358449 - DNA, 201 bp, Homo sapiens
ttaaggatgagtatggggaataacattaaatttgcggtttacaaggattactttggccgttagaaatagtggttttgaggaacaaaactgaagaaggcagrgaatagtcagtagagtggtggactaaaccagcaaagtgtttaggagctagtgactgacaaaagaggtcaaagtaagtggaaatgtttgcgagatgtctga

SEQ ID NO: 358450 - DNA, 201 bp, Homo sapiens
aaatccacaaaagatcacccttccttcaggctgtaggcctaaaaaaaacgtttttctaaaggagtgacagctacttgaaggaaaacatggatttttttttraaaagtgttttcctactgcctgccaaggagcagctacttcatgaaatcatgcaatggctgctgaagactgttccctggggacttacactgtttcttggct

SEQ ID NO: 358451 - DNA, 201 bp, Homo sapiens
gagtgaaggtgattataatgtgtcagattctcatttggggtgggaagtgttgatttgacagagatgaaagcctttggctggggaggggtgtgtgaggtgcrgtgtggcgaggattccccggtcggactgtgatgtcagtggccccggagggaacagcttgcactcagccttgagcagttggaatctgttgggagggcagtt

SEQ ID NO: 358452 - DNA, 201 bp, Homo sapiens
ttgtgatgagtaatccatggaatgatactttgagatcttgtgaatataatatttctcaacactgtattaggtgtttggttttggccatttctgtggtctgmatatttgtcctccccagccccaaaattcatatgttgaacataatcaccaaggtagatggtattagaatgtggggcctttgggaggtggtcaggtcatgag

SEQ ID NO: 358453 - DNA, 201 bp, Homo sapiens
aggtagatggtattagaatgtggggcctttgggaggtggtcaggtcatgagggctgtacccctgagaatgggattaattaatgctctgataagaggccccmaaatgctgctttccccttcagccatgtgcagacacataggagggctcatctatgaagaaggggccttcactagacgttgagtctactggtgctttgatct

SEQ ID NO: 358454 - DNA, 201 bp, Homo sapiens
ataaactttgtgattttccagaatagtgtctttttaattttctcaccaataacattttcaacagcaaaactagcataaatttctctttccttcttcacaawttcttggatagatttattctgacagcagatcttagcaagctcagcatacctttgttttttctttccttattaaatcaagaacttgcaccctttaacttaa

SEQ ID NO: 358455 - DNA, 201 bp, Homo sapiens
gccatgtgcagacacataggagggctcatctatgaagaaggggccttcactagacgttgagtctactggtgctttgatcttggacttccagccttcagaamtgtgaaaaataagcttctgttgttcctagattatccagtctaaggtgttttgttacagcctgaatggaccaagacagacgtattagttggagatatggag

SEQ ID NO: 358456 - DNA, 201 bp, Homo sapiens
aaataatatgtacacatggacatagagagtggaataatagatcttggatatgtggaagggtggaagattgggaggagagtaaggaattagaatttacttamtgggtacaggttacagtatttaggcgatggctacactaaaatcccagacctcaccactgtgcagtgtatctgtgtaacaaaactacacatgtatcatata

SEQ ID NO: 358457 - DNA, 201 bp, Homo sapiens
gtaactcagaaatggaaatcacatattgtatgttctcacttataagtaggagttaaataatatgtacacatggacatagagagtggaataatagatcttgsatatgtggaagggtggaagattgggaggagagtaaggaattagaatttacttactgggtacaggttacagtatttaggcgatggctacactaaaatccca

SEQ ID NO: 358458 - DNA, 201 bp, Homo sapiens
gtgacttcataaggatggcttttactccagttgcgagtatcttgttcatttccatctgatacctcatcagaatagcctttattgtccatgtttctatcagyattctgattgtgaccacttaagtaattcctaagaaaggtaaagcccttcctacagctgttttttttttttctaaaccctcaccagaatttcccttgatgc

SEQ ID NO: 358459 - DNA, 201 bp, Homo sapiens
tgtttggaaaatgttcaaaagctcagtgatgtcagaaaattcttcatatacatgtatccccgagtcctttgttgagatgactacaagtagtgtgtgtgtgwatatatatatatgttatgtatgatatatattatatatagtatactatatatagtatatatatgttatgtattatactatattatatatagtatatatata

SEQ ID NO: 358460 - DNA, 201 bp, Homo sapiens
aagttttgatagtaggcttagaatgttcagtatatcatgctctaaacaaatgtgctgtcattgaggctttgttgttccatttatagagcacagacagaatygacttagcataattcttaaggaccctagaatttttgaaatggtaaataatcattggctttaccctgatgtcaccagctacattagcccctgacaggagtc

SEQ ID NO: 358461 - DNA, 201 bp, Homo sapiens
gatgaagtcccccaaggccaggtatgaattattaaagtaaattgtaattgctaaagccaaatagtttaaggtgggcataaaatcatacataaatggaaagyatgtcatcatatattatgttaagggaatgggttattccaggcagatctggtgattaatatagaaacttcagaaatttatcttacaagattgagaactaga

SEQ ID NO: 358462 - DNA, 201 bp, Homo sapiens
gagagaggacgagagacagagctgacttcattgcatgtcagtaccaactacccccttgttggaggcctaaaacattttttttctggggggccctgaacccmttctttgaggccctgcatatggtaaagggctgtgttaagtcccgctcctggatggtgaccattgtttccttaatgtcttggtttctcctgaaggtgggcg

SEQ ID NO: 358463 - DNA, 201 bp, Homo sapiens
tcacagttttagttgcgactctcttgtgaacaaggtttcttacaagaggaggggaagctgtacaaatcacccctttctggacacagggaggggacaggagwgaggacgagagacagagctgacttcattgcatgtcagtaccaactacccccttgttggaggcctaaaacattttttttctggggggccctgaaccccttc

SEQ ID NO: 358464 - DNA, 201 bp, Homo sapiens
ccatatgcataacctgtacattgtttaatctgactaacacaaactttagaaaaatccacaaaagatcacccttccttcaggctgtaggcctaaaaaaaacktttttctaaaggagtgacagctacttgaaggaaaacatggatttttttttgaaaagtgttttcctactgcctgccaaggagcagctacttcatgaaatca

SEQ ID NO: 358465 - DNA, 201 bp, Homo sapiens
cttcgagccatcttttctgtaacagtgatgttgcccagctttggtgggcaggtggcaggttagtttgactcccatgagaggactaatccagagacaagtargctagcaaaggatggactgaggctacggcaggtgagctgcagggctggcccctgcagctggctagggcttaagggagccatttccacatggctggacctg

SEQ ID NO: 358466 - DNA, 201 bp, Homo sapiens
acagagtgagactccaactcaattttttatttttttaaattcatattgaacttaagagtgtggcacttcggtagatgcaatgcgtaaagcggtccctcttyctgatttttaggcattgcttacttgggtatgtggcctttgcaagggtcacttgtctgatgggtcaggtgacaggaagtaactcttccttcgctaagaatg

SEQ ID NO: 358467 - DNA, 201 bp, Homo sapiens
attgtaaatttggaattacatgaagtacaaaggaggctacagttttgtacatggcacataataagcactcaaaaggtgtttgttgggtcaaaatgaaaagyacatactctttatgtttgctgtgatttgcattatggttcaacttgattcagtatgtatttctactcttgtgactgcaagcatgactctggaagcagacgc

SEQ ID NO: 358468 - DNA, 201 bp, Homo sapiens
tatggttcaacttgattcagtatgtatttctactcttgtgactgcaagcatgactctggaagcagacgcctgggttttaattgagctttgccacagactarctgtgtggccagctatttaacctccctctgcgtcagttccatcctctaaaatggagggaataatactaattcttaccatatagaatttttgtgaaaaaca

SEQ ID NO: 358469 - DNA, 201 bp, Homo sapiens
cttatgactagacaagctgtgttatctggctgatagtcacatatcttttacatctggacttcagtaagccagtcttatttgcacagtgacccagaattccyaataaaatattatttatgtattatttaaaatactacagatttttaaactttgaaatgtgatatattggaaaaacagtaaatgggaagagctgtgataaaa

SEQ ID NO: 358470 - DNA, 201 bp, Homo sapiens
taaagtagttctaaagagagacttgggtcgactatccagacctgaatgctgcttctatcacttattaattctgaagcctcagtaaggttcttaacatcttwataagtccattatgaaatgtaaattccaaacctataatgttttgtggtgcttgagacaataaatagaaagtgcttaaaacaatgtttagcacatttaagt

SEQ ID NO: 358471 - DNA, 201 bp, Homo sapiens
ttgtgaaaaacacatgtgactacccaatgagtattagctcttatttatgactactttcttgtaaatcagtgttacctgccctctagattctatcccggaascttttctagtcttcataaacactcctgaaatgtttttgccaataactttcctcaacctcagatgtgtacaactgaaaatccaaatttttcaagtgacatt

SEQ ID NO: 358472 - DNA, 201 bp, Homo sapiens
cttattgatgataaagaaaatacaaaggctaatactggttaaaatagaatagagtcatctagttttattggagtggtaacaaaaacaaaatttaaagcaarcatcgtaatgaatcttgctttggttgctagatctctaagccgtccataccaatgacagtcatctgtcagcagtgttttctgaatgtttctgtgtgcaggg

SEQ ID NO: 358473 - DNA, 201 bp, Homo sapiens
tctctagtaaatggtaatctggcccctctgaccactacagctcccaagtggcaagcaccatccctacttgacatctcggtttcagccttcatcgtattttrtctgtttttccgccttttcctcctcatccatcactgtttctccaagtgtttgtgtcccaaatccgtcctccaagtatatgtctgaatatgtttttctcct

SEQ ID NO: 358474 - DNA, 201 bp, Homo sapiens
taaaattaaagaagtatgggactgaaaaagctccccttggatacctgagccaactaggttaaacactacctagccagtgcagtctatcttaagagtccttytttacattttccatacgttacatgcatatcgatttatcttttttcagattgacattttagtatatgcactatttgcctctgaaacatttactcgctgttc

SEQ ID NO: 358475 - DNA, 201 bp, Homo sapiens
gtgagtcttagaaggttctcagaagggaagatttctaatgaaaatgaaaaatgtaaccaaatcacttgacttgcagctactgattctgtcttcaggtaacrtgtgtcaagtctgtagggaggttggaccctgtgtgtgtttgtggtctgatagaatcttgatcccaatgacaggatgcattttgtctcatttcattatttt

SEQ ID NO: 358476 - DNA, 201 bp, Homo sapiens
gaccttggtcacagtgatagggatgcagtagataatcccgtgttgagtgggcaatgggaagagattaagtcatgaagtaagggtaaatacaagagcatctkcagagaaggtcagtctgcgttctcatttttccctgagcttcccattgtgccttaatgctggccatcaggattgttttcatggtgtttggggcccgtcgct

SEQ ID NO: 358477 - DNA, 201 bp, Homo sapiens
agatagaatatctgatgggcatctgtagcatactgcacaggtttggcaaccttgtttctctaccctttactcttggtaattactgagagttctgatttatycgtataatgatgttatttatccatttattctgcaatgacaaatttaaccatgtaataaaaatgttgaaactctttaattcagacatacaaataatgacat

SEQ ID NO: 358478 - DNA, 201 bp, Homo sapiens
gggtttaggaaatgaacgtaaaactaaagaagatcatgagggctggtgacgggtgactgtgtactaatactgatattttttcgctggtgggacagttactrtatcacaacagataccataaaagagtctttatcctcttacttctttttggctagagaactggaagggaactggtgaatgagtttccagtgctcatggatt

SEQ ID NO: 358479 - DNA, 201 bp, Homo sapiens
tgaccaactgggactttcctagtcttggcaccacaagtcccacgtcctggcaaactccttagtcccgagtgggcagactgggatcagtgttcaccctaatmgcagtctttccaacaagcacctccccaacgaggtctccattactcccacctcccccactttaacactcactgataatttaatattaatggccgatcagat

SEQ ID NO: 358480 - DNA, 201 bp, Homo sapiens
gatttgatgtacagagaagagcaattacaaggctcttcaaagatgcaggtgctgccctcacaaatctatttcgcaaagaattggtcaagggtgtatcttckggaccctctaaggctgggatgagtaggtctaaagtgtctaatccactccaccatcctaatttccctaagcctttggatcccttcctctacgttaacccaa

SEQ ID NO: 358481 - DNA, 201 bp, Homo sapiens
gatctctaagccgtccataccaatgacagtcatctgtcagcagtgttttctgaatgtttctgtgtgcagggacctttatgaggtgtttaacctcatttaasctctgtggtttgcagcttgaattttaaaaggccaaaaataatggttgttctttcctggaagacatatgaaaattatatgttgcatttttttttaacagta

SEQ ID NO: 358482 - DNA, 201 bp, Homo sapiens
aaatattattcagccttacaaaagaagaaagttctgacatatgctacaacgtggttgaaccttgaggaaattatgctcagtgaaataagctagttacaaayggacaaatattatatgatcccacttatatgagtagtcaaatttatagtgccagaaagcaccaggtgtagctaccttcgtgaatcatctttgctagatcat

SEQ ID NO: 358483 - DNA, 201 bp, Homo sapiens
acaattttcagatcacatttgggctgtttattaggaattttatgatagaacgtgcttcaaactattcttcctttcccatgagaaacaaaaggaactctatrtaagtcaagaagtacttaattactttctagaaggaacttgatggtgttatcacttagcattgatactggttctggggatatcgtgattgtcacttcaaac

SEQ ID NO: 358484 - DNA, 201 bp, Homo sapiens
cataactactcggaatggtggagaatttaaaattatgaattatttatttctggaattttccatttaatattgtggttgactgtgggtaactgcaattgcaraaagtaaaactgcagatgaagggttctactgtaaagattactcttcatttgaccctacctactcatgtttggtcattttaatttgtgccctctatttaat

SEQ ID NO: 358485 - DNA, 201 bp, Homo sapiens
cacatattctgtgcattgacctgttccatggatatttactgtcttctttgttccacatgcaggtgatacgatgagaacaaacaggacaaaatctctgcccktcagaaactcacattccacgtgccattctactctctccttttccacttcccctgcgctcatcctttagagttggtcaccctctgtgatggctggtgacat

SEQ ID NO: 358486 - DNA, 201 bp, Homo sapiens
catttaatgaatcaagatagaatgattgaataattcagaagcactgtaatgtgtttaatgagattttttttgattcatggtaatgtgatgaatataaggtkgtactttttagcacattatgttaaaaatatatttctttatagtaattggaagctgtattctttagagtaattatatattgcttatcacagtgaatcattt

SEQ ID NO: 358487 - DNA, 201 bp, Homo sapiens
gtggcagcatcattctattctctgcctctattttcacatccccttttcctctgtgcacttctctctcaaaaattcctctgcctccctcttttaaggatacrtgtgattgcacgtaggtccccctaagattatcaaggataatttccttaaagtcaatggactgtgactgctaatcatgtctacaaaataccttcacagcaa

SEQ ID NO: 358488 - DNA, 201 bp, Homo sapiens
gtatatttgttgtgggtccacaacagatataatttatcaattttaaaacatttccttctattcctaattttctgtgagtttgcatctgatttggtgttggrtattatcaaatttttataagctatttcaaaatgattggagtagacaattgtattattactcaatgttgaaccactcttacattcctggtataaaggctat

SEQ ID NO: 358489 - DNA, 201 bp, Homo sapiens
attcagaagcactgtaatgtgtttaatgagattttttttgattcatggtaatgtgatgaatataaggtggtactttttagcacattatgttaaaaatatakttctttatagtaattggaagctgtattctttagagtaattatatattgcttatcacagtgaatcatttttagtattcaaggatacattgtctaaaagtag

SEQ ID NO: 358490 - DNA, 201 bp, Homo sapiens
tgattcctggacccatgaatcctggctatgggagaaacggtatcatacattagacactagtttaggacatatacaatctcccacagaacattgccccagcsctgcaagatatcccacctacctgctgctgagacttcaaataccccttttcttttctgtcaagccagctgcttcaggatatggggacatggtttgaacagt

SEQ ID NO: 358491 - DNA, 201 bp, Homo sapiens
gtaacaatttgaaaaggacaactaagtaaagaacttcaagagataaaagttcgtaaatagagagtcatctatactcgtcttgattaaaaaacaagacaagstagtaaaaatccccaaagagtaaaacctgtttttttttttgtttgttctcatgacccttgaatccatggtgtttcttttggtgtatagttattttttttc

SEQ ID NO: 358492 - DNA, 201 bp, Homo sapiens
gtgaaaaccggagagaaaaattcttcgcataaattacggattggttgttttaagctaaatttcttttcaggaactttgctgctccttatgaactacagccatagcaacctcagaaacccgtgtggagcgtcactcctaagcatgttggcttcctgagcatattagtgtaaaacacttctctacctaattgaatacaacacc

SEQ ID NO: 358493 - DNA, 201 bp, Homo sapiens
cctcactgatagagttttgatatgagtgtgcaagcagttaatttcctgtggtctctgtgctgtcaaacctctctgctaatgttaatctgtatttgcagccwctccccagcgctagcatcaccacctcagctccatctcagatcatcgggcactagattctcataaggagcacacagcctagatcccaagcaagcaagtgca

SEQ ID NO: 358494 - DNA, 201 bp, Homo sapiens
atctggccatttctccttccattcaaagtgtacaaccaggtgcactgctcaaagttttgcccactgggaagattacccttcaccgccgtccttcagggatrtcctagaaaagggctgtagtgcctcagctatccacttttgggtggtgcctgcatatcgtgcagaaccatctgtgaaccaggtcctagccttctcttcttc

SEQ ID NO: 358495 - DNA, 201 bp, Homo sapiens
ggccatttctccttccattcaaagtgtacaaccaggtgcactgctcaaagttttgcccactgggaagattacccttcaccgccgtccttcagggatgtccyagaaaagggctgtagtgcctcagctatccacttttgggtggtgcctgcatatcgtgcagaaccatctgtgaaccaggtcctagccttctcttcttctgtc

SEQ ID NO: 358496 - DNA, 201 bp, Homo sapiens
cacaggacgttctccagaatgtatggaatgaattttgactgcatgtgtagtctttctctttttccatgccaaatgtgaaaaattttccgcagtcttgtgtrtgttacccgtccgccataaagctggacaccgtcattcagtcaggtacaaaccttgcacgttaaggacacctaggcagggcctgggtggtgcagtggcttt

SEQ ID NO: 358497 - DNA, 201 bp, Homo sapiens
tctttatttcactaagtcagcaaacccatggcaaggctccatccacatactcatctgtccatacatccgtacacccatccgttcatctgtctgtctgctcrtctctccatccatccatccatccatccacccacccacccactcactcacctatctatccatccacccacctacctatgcatccacccatacatctaccca

SEQ ID NO: 358498 - DNA, 201 bp, Homo sapiens
ataatacaattaatggagaagagtgaagcatgtaagtagggaaagacagaaatgtggtctcagcttcttgaaacacagtcttctctgtagaaatctagatkactgtaggttgagacttttaagtttactacagggtctctaagagtcagttattagaagttaacattgactgggtgccattaaatatctcatctcatctga

SEQ ID NO: 358499 - DNA, 201 bp, Homo sapiens
ccccttggtttggatatcatcctgcttattttcctgtgctctgcttctagtggtgacagctttctttgtcttatcacttaatattatttccttctagtccrctgcttggttttattttagctgctacttccttccaagttactggattttatgagaaccctttcctgacctttaaacctccatcttcactccccttgcaag

SEQ ID NO: 358500 - DNA, 201 bp, Homo sapiens
tttttctttattagctaaaggacaggaattgacagggaaataatacaattaatggagaagagtgaagcatgtaagtagggaaagacagaaatgtggtctcwgcttcttgaaacacagtcttctctgtagaaatctagattactgtaggttgagacttttaagtttactacagggtctctaagagtcagttattagaagtta

SEQ ID NO: 358501 - DNA, 201 bp, Homo sapiens
gagtggcttgtcaagtttttctttattagctaaaggacaggaattgacagggaaataatacaattaatggagaagagtgaagcatgtaagtagggaaagayagaaatgtggtctcagcttcttgaaacacagtcttctctgtagaaatctagattactgtaggttgagacttttaagtttactacagggtctctaagagtc

SEQ ID NO: 358502 - DNA, 201 bp, Homo sapiens
atatttatgattatttgttaaaaatttttccctagtgattttgtttggataaataatgaggaaaaacaagtgacctattcataagccccagaagctttcaygttaacctcactcttttatccatttatgaaaattactttttagaaatatgaaggctgcttataatttgtcctcgtatgcttaacatgtgagagggtgtca

SEQ ID NO: 358503 - DNA, 201 bp, Homo sapiens
agagtgctatgacgatagactttataacaggagaaagcaaaaaggaataaatttgatccttctgtatgcttcgatgcatatcactgaagttcagtactttygagaaattggtaagctgtgatttggggtcacctcttctagagagctatttgtctcgtacatgatgcagccacttggccagtgacttatgactagacaagc

SEQ ID NO: 358504 - DNA, 201 bp, Homo sapiens
gtggaaactggagaaggtccccatctcttcacagctcccagtggtcactccttggaaagggtcctagtggaatgtaaaaccaagcaggtttacacactgawacaggcttatagtaattaaacatcttcccacagcaaacactgccttccagatcactgtactggtgaattttattaaatacttaaaaagaataatgccaat

SEQ ID NO: 358505 - DNA, 201 bp, Homo sapiens
ctatgctactctgtttatacaacactctaggcaatgcaatgtaatatacagtgacagaaaacagatcaatggttgcttgggatggcagttggcagggattwtaatggatctgcggaaacttttggggtgatttgtgtgttttttcagttgtgtcagtggtttcacatgtgtatgtgaactttgcaaccttttaactttaaa

SEQ ID NO: 358506 - DNA, 201 bp, Homo sapiens
gtagctgtttgtggtcggtcttcccttaaggggagcagcagtggtttcattttaccattacttagcagaggcgcaatagatgcatgattgacttttgggcrgttgggacactaaggcagaaatgggtagaaataaattggagagacggactttatattatgccatgtaagaaaaaaacagaaaaagagtttggtggccaaa

SEQ ID NO: 358507 - DNA, 201 bp, Homo sapiens
gaatgcaatgcaaagtagggcgaagagataagtctttgattgttatggcagtatttcaagtgtactagaatgaaccagagaaaccaatgtgttatttatakctggtgccagtaaaaatactctacaaataaaaagctgtgaatatgttgaatcattttataacttttttgaatgacagataaggcacctgtccttacttta

SEQ ID NO: 358508 - DNA, 201 bp, Homo sapiens
ggcagaaatgggtagaaataaattggagagacggactttatattatgccatgtaagaaaaaaacagaaaaagagtttggtggccaaaaaggggtaaatgcrtttagtaggaaagagttaaggtataggtgtgggttttatggaagtcttgaggaccataggaatggggagagtagcgggagatgaaggttgtttggggcca

SEQ ID NO: 358509 - DNA, 201 bp, Homo sapiens
gattttcctaatgactaaaaatgttaaacgttttaatgagtttttcatttctgcatcatcatttgtgaagaatctattcaaatcttttgctgttttgtatrtttgagtattcatcctcttagtattgagttgtaagagaattttatgtgttttagttataggtcttttgccagatacgtattttgaaaatactttctccca

SEQ ID NO: 358510 - DNA, 201 bp, Homo sapiens
tttaaatttgataaagtctgttctatcaattttttctttgatgatttgtgtcttttatgtctactgtaggaaatcattgcctaactcaatatattctcctrttttcttatacacattttacagttttcacccttatatgtgcatctgtttatttcacattaatctttatgtattgtgtgaggtaagggttaatttgtttat

SEQ ID NO: 358511 - DNA, 201 bp, Homo sapiens
tttgatgatttgtgtcttttatgtctactgtaggaaatcattgcctaactcaatatattctcctgttttcttatacacattttacagttttcacccttatwtgtgcatctgtttatttcacattaatctttatgtattgtgtgaggtaagggttaatttgtttatgaatatccatttcttccagcaccatttgttgaaaaa

SEQ ID NO: 358512 - DNA, 201 bp, Homo sapiens
ttatgaatatccatttcttccagcaccatttgttgaaaaagattatcctttcttcattgaatcactttggtatctttgcctaaattcacatatatgcataygtctatttctagattctgttttggttcgttgatttacatgtctctcattatgtcagtaccacactgttttgatgaatgtagctgtgtaggaagtcttgga

SEQ ID NO: 358513 - DNA, 201 bp, Homo sapiens
gtagggaccatggggaggagtaagaagtttccccttacaaaatcttgacttaatttgtcatggggaaaaaaaaaaattcaaacaaaactcttgagagtgcmgccatccaaagaagaagaaaagctgctgtctgttgaactaaaagagatgctgggcttcccttaggctgaggctggccgccctgagcatctggacgattcg

SEQ ID NO: 358514 - DNA, 201 bp, Homo sapiens
taaaagagatgctgggcttcccttaggctgaggctggccgccctgagcatctggacgattcggcccacaattgggacccctgtatttacctgaagtcagtycggattgaatgaagcaggaacttcctgcttgtactgagctcaaggtcgtggctcacccagtgggcactcctggttcctgtctctagtcagggcgagcaga

SEQ ID NO: 358515 - DNA, 201 bp, Homo sapiens
agtatcttttctgggatcttgtgccccatgacatctgttaaatattagaataagaaagtctctgcatgagccataaagttaaaaatggaaataacacaggygctattctagtaagagtgctatgacgatagactttataacaggagaaagcaaaaaggaataaatttgatccttctgtatgcttcgatgcatatcactgaa

SEQ ID NO: 358516 - DNA, 201 bp, Homo sapiens
caaaagaaatttagaagggacattcagatagacaggaagcaaactagtactctatagctctgttttgatctgccaattcattaaaattatcaattgatgaraactttgttttgttcacaccttgactctttttggtgccaaccttcagtcaagccccctacagtatcattgacagggtttcattgcaccgaaaagtttaca

SEQ ID NO: 358517 - DNA, 201 bp, Homo sapiens
attaataaagtcgtaactttcttttgactggtattaaacagtatatcttttccatcattttaattttactctatgtctttatagttcgagtagaattcttktaagcagtatatagttggctgatacttttttattcaatctgacagtctttgacttctaatcatgatgtttagaccattcacattttatgtttaggtgtaa

SEQ ID NO: 358518 - DNA, 201 bp, Homo sapiens
tgtctacatggttcatcggtcctgtgggacatcctggtatgaatgactttaaaatttactttttgaaatattgggtgacataacctcttcctccttctacrtatatgcctcaccacgatctttgtttgtaattatttttaaatactgcatgtataaattactttttttcctaaatattccaataaaaaagggctgagatta

SEQ ID NO: 358519 - DNA, 201 bp, Homo sapiens
ttccaataaaaaagggctgagattattatacaaatatgcagccttttcagattctctgtaggggctctagcaacatggttgtagcctggttaaaaaatctraaaagctttcataaaaacagaggctagagtttctttcagctgggtaactgaaagagacaggggttactactgacaagaattttatacagctagtaaacat

SEQ ID NO: 358520 - DNA, 201 bp, Homo sapiens
cagccttttcagattctctgtaggggctctagcaacatggttgtagcctggttaaaaaatctgaaaagctttcataaaaacagaggctagagtttctttcrgctgggtaactgaaagagacaggggttactactgacaagaattttatacagctagtaaacatatgaaaaaaatctcatcatcactggtcattagagaaat

SEQ ID NO: 358521 - DNA, 201 bp, Homo sapiens
ttttcagattctctgtaggggctctagcaacatggttgtagcctggttaaaaaatctgaaaagctttcataaaaacagaggctagagtttctttcagctgkgtaactgaaagagacaggggttactactgacaagaattttatacagctagtaaacatatgaaaaaaatctcatcatcactggtcattagagaaatgcaaa

SEQ ID NO: 358522 - DNA, 201 bp, Homo sapiens
gcaaactatcgcaaggacagaaaaccaaacaccacatgttctcactcataggtgggaattgaacaatgagaacacatggacacaggaaggggaacatcacmcactggggcctgttgtggggagcggggagggatagcattaggagatatacctaatgttaaatgacgggttgatgggtgcagcacaccaacatggcacatg

SEQ ID NO: 358523 - DNA, 201 bp, Homo sapiens
agaaaaccaaacacaacatgttctctcttataagtggaagttgaacagtgagaacatatggacacagggaggggaacatcacacactggggcctgttgggrgatgggaggctaagggagggatagcattaggagaaatagcaaatgtagatgaagggttgatgggtgcagcaagccatcatggcacgtgtatacctatgta

SEQ ID NO: 358524 - DNA, 201 bp, Homo sapiens
cgttctgcacgtggaccccagaacttaaagtataataataataataataataaatgtttagaacaccacgtgtaaatttagcatcaactttcaacctaacrtcatatatctattagaatagatcgaaaagaaacatgtcttcttattcaaagtgtgatactttgtcagtaatttgattatggcaccatttcattgcagatc

SEQ ID NO: 358525 - DNA, 201 bp, Homo sapiens
gaactctctatggtgccatagacagtaggtgcttgggcctgtctttaagaaagtgttttaaatacttccacccacgattaggtcaaagatacaactctacygagaaagaaacagaaagaaatccttgtggtttttgttttgttttgttttgtttttgcattttggtactgtggtttccataaactagaatagttgtgcaag

SEQ ID NO: 358526 - DNA, 201 bp, Homo sapiens; identical to SEQ ID NO: 76769

SEQ ID NO: 358527 - DNA, 201 bp, Homo sapiens
aagagtgggcccgtcttccccagcccactgactcaaatggtaatctcctttgacaacaccctcacagacacacccaggattaatattttgtaccttcaatsaagttgacacttagtattaaccgtcacaatggtctgtttgttaatagtttatttttcagtgcagagctctttagttaggttttttgtcaatttttgtttt

SEQ ID NO: 358528 - DNA, 201 bp, Homo sapiens
ttaatttgttctgctctcataatttatggatttgaacgaagctgtgatttttagaagtcagtgttttctagcaacatcagagtgtttagcaaaatattttsttcaggctttggaatcagacaactttaaaattgaatttgggatctgccacttaatatttagctgaataacctcatttaattacttaaccttaacttcctt

SEQ ID NO: 358529 - DNA, 201 bp, Homo sapiens
aagtggcattgaattaacggtgaattgccttactttgctgttcacgtgttcattagggggtcatgtttttatggtcttcctcctgggatcatggtttcatytgtcagcccctaaaatttgatcgatttctgtcttcctctggcctcccacttctcctacacaagatcccaaaatgtcaaacgatgaatattaaaaaaattg

SEQ ID NO: 358530 - DNA, 201 bp, Homo sapiens
ttgaaataggacattggaaaccatctaatggcctgtctacgagtgggcgcttggttaaataacatttgcagcagtgtaaacgaatgtccagaagatcttcragatacaccgttatgtgaaaaaagcaaggtgtaaacaacatacacacacactcagatacatacatttttatgttagaaaggacaataaaagcatatactt

SEQ ID NO: 358531 - DNA, 201 bp, Homo sapiens
atgaggtgtttaacctcatttaagctctgtggtttgcagcttgaattttaaaaggccaaaaataatggttgttctttcctggaagacatatgaaaattatrtgttgcatttttttttaacagtaatttcccaaagtccttataccttagttgttctatcctatcaatcaggtaaataggaaaaaaaattcatatctgacat

SEQ ID NO: 358532 - DNA, 201 bp, Homo sapiens
gttttaaaataggtaaaaagtcttaattcagaattgtccatgagctataatttcctaactgatacaacagaaatgctgaagaagtaggatggtgttaacargagccgcattgctgaacattgtggactattcatttttttccattcctagtctttattagttagtatttgtctcaagggctctaagcatttgtctggcttc

SEQ ID NO: 358533 - DNA, 201 bp, Homo sapiens
cacatcctaaatactaaagcaacataataaaaatgtttctaaagagtcacaaaacattgtaagagttttaggaaggcttagtaaatttttattcataattmtaaagtttcttagatgtttataaatagccattttaaactatgaattttcaggtattattgaatatccaagttaagacagtgaatactgcctcaaatgtcg

SEQ ID NO: 358534 - DNA, 201 bp, Homo sapiens
taatactaattcttaccatatagaatttttgtgaaaaacacatgtgactacccaatgagtattagctcttatttatgactactttcttgtaaatcagtgtwacctgccctctagattctatcccggaaccttttctagtcttcataaacactcctgaaatgtttttgccaataactttcctcaacctcagatgtgtacaac

SEQ ID NO: 358535 - DNA, 201 bp, Homo sapiens
ctaggaagaaaatcaccaaataaacattgtgtttaaactggtgtttggatcagctggacctaaggtttacagagcattttatctgataattgtggaatacmcattcttctcatcagcacatggaacagtcttcaggatataccacgttaggccacaaaacaattctcaagatattttaaaaattttgaaatcaagtatctt

SEQ ID NO: 358536 - DNA, 201 bp, Homo sapiens
taaaaataaactgattttggaaactgtatttaatagttagacaaagagattttaaacctctggttaaaagtagcgatttctagcattttagcactcttttygtgaccaaataaaaatgttctgtatgcaaaatattattatctgtgtcttaataatcacagaatcattttggaatgattttatttttcagtaatgtaaaag

SEQ ID NO: 358537 - DNA, 201 bp, Homo sapiens
aataatactaattcttaccatatagaatttttgtgaaaaacacatgtgactacccaatgagtattagctcttatttatgactactttcttgtaaatcagtrttacctgccctctagattctatcccggaaccttttctagtcttcataaacactcctgaaatgtttttgccaataactttcctcaacctcagatgtgtaca

SEQ ID NO: 358538 - DNA, 201 bp, Homo sapiens
aatagtctcatcttcagagaggcttaggagaggattaggagttgaagagtaaatgaaatatttctatggtgccacttcaatgtagaagataagatattttycctatgacaattgttacatgtgttacattcttagggaagtcagaggccgtactctaaccattatgcaacaatgataagaaaatatatgagcaagtgtgta

SEQ ID NO: 358539 - DNA, 201 bp, Homo sapiens
aattataattactatcttgggtagttgatggatgacagtcagtggcctctctctatccaaaattaatactaaaacacagaaggagtgtttatttcatttgragaaataaatggcagacttggcctgagaactcaagttgcccaatgtatagagccaggcatccttatttgtattaagaatcaatgtatttctgtaccataa

SEQ ID NO: 358540 - DNA, 201 bp, Homo sapiens
ccaatgctgacaagctggtataaacaaccccacaactcctcagacacacggaacaaagcagcactattattaatgactatgtttcatgccttgaccagagygccatgcaggtacatttcttatttcaacagaacagctcacaccagctccaggtctgctggaactaaccttcgaagcacgagtgttaaaggtcatttggga

SEQ ID NO: 358541 - DNA, 201 bp, Homo sapiens
atatttcttaggtgatcttttttggagatgtcaattataattactatcttgggtagttgatggatgacagtcagtggcctctctctatccaaaattaataytaaaacacagaaggagtgtttatttcatttggagaaataaatggcagacttggcctgagaactcaagttgcccaatgtatagagccaggcatccttattt

SEQ ID NO: 358542 - DNA, 201 bp, Homo sapiens
tgagtacggcacacagatgcattttgttcggctgcacgtgcctatggggttttctgagtcagttgccaacatttagaaattgagacactgtatgtaaagaytggatttctggcttcccttgaaccagaaggtaagataactctcacagggcagcagtcttcccagggtgggaagcggaagctgccttcagctgcatgatgc

SEQ ID NO: 358543 - DNA, 201 bp, Homo sapiens
ctggcaccatttgttaaaaatggaactataacttttaaaatgcttgttgtttatgagcttggtaaatatccaacttagtttcattggttttatacttttartggatcaatttatctgatattgcttgaaactttatagctaatatatggtaatatttcttaggtgatcttttttggagatgtcaattataattactatctt

SEQ ID NO: 358544 - DNA, 201 bp, Homo sapiens
tcactgggtgccttcgctattaatgtcacatttgtggaactcacaattgaagagttccttggtctggacgcttaaaaggtaccaggaagtgacagaggggyggacctagaattttggcagctgctaggagcagcagaaaatgctgaaaagtgatgcttgaggataagatggggactctgaaaagtgaactttggcagagtc

SEQ ID NO: 358545 - DNA, 201 bp, Homo sapiens
ttttttctctactgtattgcatttgctcctttgtcaaagatcagttttatatatttatttgggtctgtttataggctctctgttttattccattgatccaygtatccattatttccctaataaccacactgttttgattattgtagctttattgtatgtcttgaagtcgggtattgtcagtcctcgaactttgttgttctc

SEQ ID NO: 358546 - DNA, 201 bp, Homo sapiens
tatatatttatttgggtctgtttataggctctctgttttattccattgatccatgtatccattatttccctaataaccacactgttttgattattgtagcyttattgtatgtcttgaagtcgggtattgtcagtcctcgaactttgttgttctcttacaatattgtgctggctattgtgagacttttgtctctcaatataa

SEQ ID NO: 358547 - DNA, 201 bp, Homo sapiens
tttataggctctctgttttattccattgatccatgtatccattatttccctaataaccacactgttttgattattgtagctttattgtatgtcttgaagtygggtattgtcagtcctcgaactttgttgttctcttacaatattgtgctggctattgtgagacttttgtctctcaatataaactttaatcagttttccagt

SEQ ID NO: 358548 - DNA, 201 bp, Homo sapiens
ttttaatctctctcaagacagtggatactataaggtttatttctatgggagtatttataagaatttttttttttcgacatggagttttgctctgtcacccrggcttgagtgcagtggcacgacctcgactcactgcaacctccgtctcctgggttcaagcgattcttctgcctcagcctcccgagtagctggaatgacagg

SEQ ID NO: 358549 - DNA, 201 bp, Homo sapiens
aagccttatcaataacataagtttattaacacttatagtttctacatattttatgcatttatggcatacctgatttttttcttaaaaattttcggtatttstaggctatgcagttcgtctgcaagttttttcaaattgttgaaaatctccaaaattttttccagtataattattgaaaaaatcgtcacataggagcagtgc

SEQ ID NO: 358550 - DNA, 201 bp, Homo sapiens
gaggggtcctttgctcaggtacttgctgtaggatttgggattcctggtgggtccgtctgtgatcttgtgaactgggccgttttcagcaaacaaacctatascactccctattagtcttctgtgaaatcatacaagacaaaggattactaagcaattaattcacttgatgatagtctgtgtgtttagggtcctcagaattac

SEQ ID NO: 358551 - DNA, 201 bp, Homo sapiens
caggagccggtgcccctggcggagcgcgggagcgttcggccgcgcagggacgccggggtttcccaggctccgcgagcgctcgggggaagggcggctcgggrgggcggcgggagcttggacgttgcgagcgggacctgccgcctccttctccgcccctcgtgccgtttctggccacacttgtccggcgcgtatttatactca

SEQ ID NO: 358552 - DNA, 201 bp, Homo sapiens
actggaagcatgcggtcactgtagcacactgcatgtatgccatacttcagaacaatcacacgcttttcacagaccttgaggtgggtgtgcactctttacckctgtttctcgtaacctcagtggatttaatactgtgtgtcaggagcacattgatgacatggatttgtgacatgttattccaagacaaattttggcttaata

SEQ ID NO: 358553 - DNA, 201 bp, Homo sapiens
caccttgcgagatccaagggttagtgctcagtgtcttcaatcgaatcccgggacattcggcactcttggttttcctgcgaatgcaccagctgttcctcccktggggttttttgtttgtttgtttttgttttgttgtttttttcttaatccttctctttcctcagacttagaccatgcagtctgttcccccttttcaggtat

SEQ ID NO: 358554 - DNA, 201 bp, Homo sapiens
tttataatagcaatagcattgttagaatttaacattgaatagattttgctgaaactgacctttctttccttgtgcagatttgctttatctgtacttttttrgaacatttgctttatacctttaagttgatacctcctgcaccttttcctagagttgagagagaaactcaaaaataatttgactatcagattcctaagcaga

SEQ ID NO: 358555 - DNA, 201 bp, Homo sapiens
taatctgggttcggcttaagtatagtgggccctatattttcctctcactgtcagcacctctaagtaggaagagaaatcctcgttaggtcttccaatgatgygtctaagggaaaaggttttgagtttttaggatgtcacagcaaaatgccagcagtgactctgccagtaactggccataggcaagttgcgaagcagaaaagc

SEQ ID NO: 358556 - DNA, 201 bp, Homo sapiens
acttggtgcagtttttctctgttgaataggccaggcctcctctaaatgccaggatttttttttctcccctcagtttcccaaaggcttctcttagtgcctcytcatttaactgtccacgtgattggtagtgctgcatgctcagtcctttttaaaacccagcaaaactgacctgtccaggtctcatgtcctcaggcctacgaa

SEQ ID NO: 358557 - DNA, 201 bp, Homo sapiens
gaaggcctgagtcccctgacttctgcccttatgttgttcttctcattggcccaccacctggcacacctgtggctctgacagtggtgccctgaggactctcrtacccatgtaattctgcctagtgctcaataggacttctgcccaagcagttgaaccctgtattcagtatgcccgaattgtgcttggtattatacttattta

SEQ ID NO: 358558 - DNA, 201 bp, Homo sapiens
cattcctcctcatgactctctcctgaccccaagtattgggttcatttattcaaacattcattaatttaaatatgtattgagcacctgctattgaccaggcrctgttctaagtgcttgtgatatatcagtgaacaaaacggaagagccctgtccttgtgaattcatatattctagtaaaataaatggacagcaaataaaagt

SEQ ID NO: 358559 - DNA, 201 bp, Homo sapiens
tcactatggctgccagtggtatctactggataagcagggcattcagaagagtactgctggctaacacagtgacaacagcaagcaaggagaataatacaatrgacttgaaaagctaaccttcagtcgcccccccccacacacacacacacacacacacacacacacacacactcactcacacatacacacacacgttactca

SEQ ID NO: 358560 - DNA, 201 bp, Homo sapiens
atctactggataagcagggcattcagaagagtactgctggctaacacagtgacaacagcaagcaaggagaataatacaatggacttgaaaagctaaccttyagtcgcccccccccacacacacacacacacacacacacacacacacacactcactcacacatacacacacacgttactcatggtagggaaaagcaggaag

SEQ ID NO: 358561 - DNA, 201 bp, Homo sapiens
agttcataccatatgcagataagttatttagcctggaatatagacaatttcagtcggtgacatttttttcaaatttataatttttctcatacatccatttktctttcttcccttcctccaggaaggcctcctttccttccttctttccatccattcaaaaataatctctatgccagggactgttatgtgtctgaagacaca

SEQ ID NO: 358562 - DNA, 201 bp, Homo sapiens
acaacagcaagcaaggagaataatacaatggacttgaaaagctaaccttcagtcgcccccccccacacacacacacacacacacacacacacacacacacwcactcacacatacacacacacgttactcatggtagggaaaagcaggaagtgtgtatttgctcacagcttgccttgaccttggtcacagtgatagggatgc

SEQ ID NO: 358563 - DNA, 201 bp, Homo sapiens
ttataaggccattagaaaaaatgatgaaactttatgtagtgatttttcttcgctattattcataagattctcttacattatgccaaatttggagaaaagcrcatctctgagaaatactaaaggtatgagctgataacctagaaatggtatcagttgccaagatctctataacgtttttttgaaaaaacgtaccccgtatct

SEQ ID NO: 358564 - DNA, 201 bp, Homo sapiens
ttttaaagtgtcaaagtttttattaaaagtaatttcttttagaaaaatattctacagtttgccattattttttaattggctgatacgtgtggaatgcagtytgttgtggtccacgtcacattactccttctgagccgcctccagcagccccccagttggccacgcagctgtgctcacctccagccccttatcctcgggtct

SEQ ID NO: 358565 - DNA, 201 bp, Homo sapiens
tgcagcctgccggagatcctattttgaaggggaaaggggtttttcaattccagaaagaataggtttgactttctaaattttgtatcataagcattataggsaatgctttaaatagtttacgaagcttagtttttttttttttgaaagcttaaatttgctaggtgaggattcattgaacataattcctttttttttagttct

SEQ ID NO: 358566 - DNA, 201 bp, Homo sapiens
cggctggtcaaggaggatactgagaaagttagcaaaataagatgggaaaaaaaatggtgaatgcagactgcggatagcttcagactacagttgattgccamatattcaaaacaggagatgtgtatgctcccaggaattgtggagtttaaatgtgctccacactcatcagtaaccactcttactgtttcttgagacataaga

SEQ ID NO: 358567 - DNA, 201 bp, Homo sapiens
catacacacacacacacacacacactcacaaacacacatatacagagacagagagaggttgcccgattgactttaaggcactggctcacgtggttgaggargccagcaagtctggaaacaggctaagagctgtgctgcagccgtgagtgtgaatttctacagagcagcaggctggaacctcagccagtgtttccgtgtttc

SEQ ID NO: 358568 - DNA, 201 bp, Homo sapiens
tctgctcttcattaatagattatccttatgtctgtttactattcatgtaaatgtccttagcatcctcctgtttagtgtgttggagggctggatagtgagcrtcggtggcaccagttcagtctggagtgactgaggggaaccccgaggaaactagagttgtggacattctcacagggggagttgatcacagtgatttttctc

SEQ ID NO: 358569 - DNA, 201 bp, Homo sapiens
ttagtgtcctggtttagctgctgtcacaaagtcccatagactggtggcgtaataaacatcagaaattacaactctggaagctgtgaagttcaagatcaagktgatggcacattcggggtctgctgaggaccctcttcctgataaaaggcagctgtcttcttgccgtgtcctcacagggtggaagtgtcctgtccctaatcc

SEQ ID NO: 358570 - DNA, 201 bp, Homo sapiens
atgactgtatccattttatttagtgtttctgtatgccaagtttcaaaagaaatgctcaattcagttagtgaatcatgaagtttctctggatttctattccrtgtgtttctaaatacagggccctgttgcagacatgagcatgaactcacatccaactctcagcatattaaatgggatcttgtgtcattacttcccgcagaa

SEQ ID NO: 358571 - DNA, 201 bp, Homo sapiens
atttataaaacgtgtgtgtgtgtgtgagtgtgtgtgtgtgtgcgtgcgcctgtccatgtgtggagagaaagattgatagatacaatttactgatagaatgmtaaggcaaataagaaaaatggaattactggtaaaccttagtgtcctggtttagctgctgtcacaaagtcccatagactggtggcgtaataaacatcagaa

SEQ ID NO: 358572 - DNA, 201 bp, Homo sapiens
ttagtgataaactgcccttttaaaatttcagattccactttgacattggtccttttgaaaacatgtggcctggaatttttgtctacatggttcatcggtcmtgtgggacatcctggtatgaatgactttaaaatttactttttgaaatattgggtgacataacctcttcctccttctacatatatgcctcaccacgatctt

SEQ ID NO: 358573 - DNA, 201 bp, Homo sapiens
gcagttcgtctgcaagttttttcaaattgttgaaaatctccaaaattttttccagtataattattgaaaaaatcgtcacataggagcagtgcaattcaaayctctgttgttcaagtgtcaactgtacttgtctttgacttcacattcctctggcttgttccttgtagcaaattggctggatccagccttgggcacccatct

SEQ ID NO: 358574 - DNA, 201 bp, Homo sapiens
attaaatgggatcttgtgtcattacttcccgcagaatattttttatggacttgatgcaacagtgtaattttcttgggaaggagacgttttcattaagttcwtagtgaatgttttcaagttggcttcactggtatgtccagccaaattgtcttgaattttatggcatgcagcagccaaagtcacctcgtttcttcactaatt

SEQ ID NO: 358575 - DNA, 201 bp, Homo sapiens
acgggtggggggtcataatcctttataggacatttttgggacaacaggtgaactgtgaatgtgggtttttatttagctaatattgctgtagaaacgttaamttttctgatcatggtaactgtatttaacttgtaagggaatgttcttttacttgggaaatgcacactgaagtgtctaggaataaaggggcacaccaacttg

SEQ ID NO: 358576 - DNA, 201 bp, Homo sapiens
ttctttacttactgtgtttattctaatcacgtttagtgataaactgcccttttaaaatttcagattccactttgacattggtccttttgaaaacatgtggsctggaatttttgtctacatggttcatcggtcctgtgggacatcctggtatgaatgactttaaaatttactttttgaaatattgggtgacataacctcttc

SEQ ID NO: 358577 - DNA, 201 bp, Homo sapiens
ccttgtagcaaattggctggatccagccttgggcacccatctctgtgggttctgcctggaagctctcacattagactgtcttggtatctttgaggttagtktgtgggtacaccttccagttaatatgatggctagctagacaatttctggatttgatacttctcaatataagcatcatggatgtatctaaaccattaatta

SEQ ID NO: 358578 - DNA, 201 bp, Homo sapiens
caatcagttttggatgtgctaagttggagatgcctaatagatttccaaatgggagatgttaagtagtaagttgtatatatgagactggagtttaggtaaaygttctgggttagagatataaatttgagatcattagtaatatgatgatttaagaaccatccacatacagatagtagctagagtcatgaacccagatgagat

SEQ ID NO: 358579 - DNA, 201 bp, Homo sapiens
aatagcatatgtgatctgggatttgaacttagacgggtggggggtcataatcctttataggacatttttgggacaacaggtgaactgtgaatgtgggtttktatttagctaatattgctgtagaaacgttaaattttctgatcatggtaactgtatttaacttgtaagggaatgttcttttacttgggaaatgcacactga

SEQ ID NO: 358580 - DNA, 201 bp, Homo sapiens
gctagtgaaggtagctccagtgaaactgcctttaaattggctaaatgtctcactgagccgtaagagaggaggggattgagggcagatagcagcgaagaccrtggatgaggtgaggaaaggaagggcttggcatgctggaggactgaaatgggggaagcatagggctaagtggcatcattgctactgactgctccctttcca

SEQ ID NO: 358581 - DNA, 201 bp, Homo sapiens
ttttatttgaccttgcagagggctagggacagtggaaagcggctgagtgagatgtgacttggagtttaccatctagttgtgggaatagacatagagccacwtagcagaatgcatcagtagtaaacagggatacaagcactggaagtatataaaaaggaaccttacattccactgtgcagcctagtaagacccccttcagcc

SEQ ID NO: 358582 - DNA, 201 bp, Homo sapiens
atgatgatttaagaaccatccacatacagatagtagctagagtcatgaacccagatgagatcacttgacaggtgagtgtggctcaaccctggaacataacrtttagaagcctgagacttctaagggaggaagaagtagaaaggaagactgaacacaagaggtggaaagagaatcaggggcatatgtttcttttaaataaaa

SEQ ID NO: 358583 - DNA, 201 bp, Homo sapiens
tcttaaaatatgggataaatgacagcatgtttatatatttgtggaagtgattcagtagagagagaaagtttgatgcaatgggacagagaggggaggatggyctaaacagagtctttaagggcttagagaggccctgtcagcctcccaggtcctccctattgcagctttacctgttccttcacaactaattaccatttactc

SEQ ID NO: 358584 - DNA, 201 bp, Homo sapiens
aaactcttagttgtaattcaaaacattttaatttccttttaaaatgtaaattaggctcctccagctgatcatttctctaagtctgtctaaaggaaaactcyacagtgacagaggaactcataatcttgcaaggaaatcagaaggtatccagtactcttgtgttctttgtagcactcaccacttgctgaaattatcttgctc

SEQ ID NO: 358585 - DNA, 201 bp, Homo sapiens
ctttgccttgtttgtttgtgcttccaaatcctcctgttcatttaatttcactttttcccattcccacatatggcacaatcaggagctgtgctttgtgcttycctggctctgctttccagggaacaaaagtagataaaacaacttgaatttccccattgtaatctgaatcaatgactcctgtatgtatttgtacctgtttta

SEQ ID NO: 358586 - DNA, 201 bp, Homo sapiens
caagctggtagtttccctgtcagggaaagtcttacagagaaagaggcgcgattacgacgagattttgttttgacaggtagaaggaggttttgggaaatgtrtataacatgacaactcctcaaagatctaaattccagagtctttttttctaactcttattttcagtttaattttattgctttcatagcattttcatttcag

SEQ ID NO: 358587 - DNA, 201 bp, Homo sapiens
gcacacgagaagaggtaggagctggaccagagatggggccatgcacatgaatggtcgggagagatacaagcaggaggtagcagttaatagtcacacatccrggtggctggttggataaggcaggagacatttgactccttagtttctggattggaaaggtgtgtgtgtgtgtgtgtgtgtgtgtgtgtgtgagagagagag

SEQ ID NO: 358588 - DNA, 201 bp, Homo sapiens
tagaagtgactcttgttcttatgatgaaaatgacactaatttttaattccattttactgtcctggctgtcacttctgtgtgctctttaatgaagtaatacwtacttaaacttcactcctgaaatacagaagtctttctagtccttactataaatgtgcaaatgctatgctgaccagtcttatattgttgtgttctagagac

SEQ ID NO: 358589 - DNA, 201 bp, Homo sapiens
ttttagattgtttgctttcgacatatagaaatgctacagattatcatatgttgattttgtatcctgcaactttactgaattcgtgtatcagttcaaatagyttgtttgctaaagtctttatgttttttgaaatacaagatcgtgtcatttgaaaaccaggacagcttgacttcttcctttccaattagatactctttattt

SEQ ID NO: 358590 - DNA, 201 bp, Homo sapiens
agatggggccatgcacatgaatggtcgggagagatacaagcaggaggtagcagttaatagtcacacatccgggtggctggttggataaggcaggagacatytgactccttagtttctggattggaaaggtgtgtgtgtgtgtgtgtgtgtgtgtgtgtgtgagagagagagagagagagagagttggggttggaatgggag

SEQ ID NO: 358591 - DNA, 201 bp, Homo sapiens
gaagtcccccaaggccaggtatgaattattaaagtaaattgtaattgctaaagccaaatagtttaaggtgggcataaaatcatacataaatggaaagcatrtcatcatatattatgttaagggaatgggttattccaggcagatctggtgattaatatagaaacttcagaaatttatcttacaagattgagaactagaaaa

SEQ ID NO: 358592 - DNA, 201 bp, Homo sapiens
cacacatccgggtggctggttggataaggcaggagacatttgactccttagtttctggattggaaaggtgtgtgtgtgtgtgtgtgtgtgtgtgtgtgtgwgagagagagagagagagagagttggggttggaatgggagtagttccatgcccagagaaaagagatatcagaatgggaagtatgagaattgagcccctact

SEQ ID NO: 358593 - DNA, 201 bp, Homo sapiens
aagtttttctttattttgatgtacttttcttgggttaacaaccacaaacattatttgttttgaagaaaattaaggaataaagggaataattcaataatatyaaaatagtatagcaatttgaaatttgagaaagcatgattttctccccattcatcttagggtgatgaaatgaagaaattgggaatacagcctattcctatg

SEQ ID NO: 358594 - DNA, 201 bp, Homo sapiens
tgttgattttgtatcctgcaactttactgaattcgtgtatcagttcaaatagtttgtttgctaaagtctttatgttttttgaaatacaagatcgtgtcatytgaaaaccaggacagcttgacttcttcctttccaattagatactctttatttctttctcttgtgtaattgctctggctgggacttccagtactatattga

SEQ ID NO: 358595 - DNA, 201 bp, Homo sapiens
caggggcagtagaaatggcctctgagtgacaaggtgtcatcggccatgcagttatctggggaaaagcaccctaggcagagggggctcacaaggcagaggakcggggtgacggccgtgctggagctgagcccaccaggcagtggcaagtgaagtggcaaatgggccggatgaaggctttgtcagtcagaggaaaaaactgca

SEQ ID NO: 358596 - DNA, 201 bp, Homo sapiens
aggcatctttgtcttgttagatcttacaggaaaggcttcagtttttccctgttcagtgtcatgctagctataggtttgttgtatatggcctttattgtttygaggtatgtttcttctatagccagtttgctgagcgtttttatcataaaggaatgttgaattttattgaatgctttttcagcatctattcaaatgatcata

SEQ ID NO: 358597 - DNA, 201 bp, Homo sapiens
aaatgatcatatgctttctgtctcattctattaatgtgatatatcatatttattgatttgcatatgttgaaaccatctttacatgtttagatatgaatccygcttaattatgatgaatggatttttaatgtattacagaatttagttttttagtattttgttgaagattttttcatcatgttcattagtgatactggcctg

SEQ ID NO: 358598 - DNA, 201 bp, Homo sapiens
gtgtcatcggccatgcagttatctggggaaaagcaccctaggcagagggggctcacaaggcagaggagcggggtgacggccgtgctggagctgagcccacsaggcagtggcaagtgaagtggcaaatgggccggatgaaggctttgtcagtcagaggaaaaaactgcagtttactccgcatgaaagcagaggctttgggga

SEQ ID NO: 358599 - DNA, 201 bp, Homo sapiens
ttattgatgatttccttttttcccctcaataataaattatcattagtcatttagattgtcacataagaagctgatggctgaactggaatatagaaaagcamacagctcagttttggtctcattgggtttacaaattaatttattttcctcagttttaccaaatatctagtatgtgcataacgcttgctaagcattagacac

SEQ ID NO: 358600 - DNA, 201 bp, Homo sapiens
ttctatataacttcaggggtgtaaactatcatttggcccttgtggatattattaacatttttaattagaggtttgcttttcttcttttaggccttttgatrtatagtatcagttctcttctgggacatgactatttgccccacctggtcagatctctaagaaaatggcaaaatgggaaaggaaatattgaagagtaatggg

SEQ ID NO: 358601 - DNA, 201 bp, Homo sapiens
cggccgtgctggagctgagcccaccaggcagtggcaagtgaagtggcaaatgggccggatgaaggctttgtcagtcagaggaaaaaactgcagtttactcygcatgaaagcagaggctttggggaggttttgagcagtgggtgatccatggtttatgatctcagaagctcattctggctgcagtttggtgaatgaatgaag

SEQ ID NO: 358602 - DNA, 201 bp, Homo sapiens
ggcagagtggccttaggtgagcctggagcctgtccaggacaccatccctctctgccatggacactgtagcttatatttgctttgtatggtttccctctgtkactggttgtttactctagacttttgtagattgttggtctgtattcttaactctgtgtgtggacttagtcctgtacatgcatcacagttttcttttgtaat

SEQ ID NO: 358603 - DNA, 201 bp, Homo sapiens
ctttctccattgcttacttttgtcaactttgttgaagatcagattactataggtttgtggctttatttaagggttctctattctattcattgctctatgtrtctgtttttgtaccagtactgtgctgtttgggttactgtagccttgttgcatagtttgaaattggatagtgtgatgcctccagccatgttctttttgctt

SEQ ID NO: 358604 - DNA, 201 bp, Homo sapiens
attgctggggaagcatttgccagattactgaagtgtaacttttaaagcacctgtttttagtgatttcagttagttcagacatcaacctttaaaacatgtgygatgccttctcttcttagatatagtgttgtgcatctgatattttacctttttatgagcatcagttattattgttttatagtagagaaatgtattttaaag

SEQ ID NO: 358605 - DNA, 201 bp, Homo sapiens
ttttggatatttaggcccatctggcatcatctttatttagttcccatttgctttctaagaattaatcatatggcatggtgattgttgaacagtatacttgygggaaattatgtactaatagaaacaaaatagaaacaaaatatatcattaatagaatatgcatttaaaatacatcaggccttagttttctgatggaaataa

SEQ ID NO: 358606 - DNA, 201 bp, Homo sapiens
atacaaagcacaatccgcaaagggaagaggtgcactgggtgaaatccaggagagacttggcacaggcttccgaggataccttcattcctccagcagtgacrtctaacagtgtttgtctagtgttacctaccagggaagcatgttagagactcaattcccagttttcttattgggggttggtcaggtacacaccctctgcct

SEQ ID NO: 358607 - DNA, 201 bp, Homo sapiens
ggagtttaccatctagttgtgggaatagacatagagccacttagcagaatgcatcagtagtaaacagggatacaagcactggaagtatataaaaaggaacyttacattccactgtgcagcctagtaagacccccttcagcctgtcttctgagagtgtttatcaaaagaatgtatctcatcatatatcgcttcatgttcagt

SEQ ID NO: 358608 - DNA, 201 bp, Homo sapiens
actcctgggctcaagcagtcctccctccttggcctcccaaagtgttgggattacaggcgtgagccactccacctggccatagattgatttttatgtctctytctcttttttttttttttttttttgggacagagtcttgctctgttgcctaggctggagtgcaatggtgcaacctcggctccttgtaacctctaccactca

SEQ ID NO: 358609 - DNA, 201 bp, Homo sapiens
ataaaaactgaaataatatagtatgcatatttaaacttaacagtttgccttttgaagtctttttcttaatgatttacattttctttaaatgaaatttatawttaaaggtagagttttaaatgtatctgaattttttttgttttttagtggctgattggttagacttgtttaaaatctgttcccttgctttctaacttgtta

SEQ ID NO: 358610 - DNA, 201 bp, Homo sapiens
cattggggaaatataaatagtaatgtccttttatagaggaagtctaaaagaaattcttgggtgaattgataatcaaacatttttaagaaggtatatttgckagcaaagaaagaaaaaatatgacagcttatttatatagaaaacctatgtattctgtgatttttctttgtttcaagtctgtatatgaatatcatgctatcc

SEQ ID NO: 358611 - DNA, 201 bp, Homo sapiens
ttataaaacataaaggtttactagaaagtctttaaataaattgaaatgtaactaatgtaatgtctcagtattaggtatagattttgctgatggaatggtcrgtatatgcaattttcattgatggctccttttttaggtttattgtagtaccccgtatttgtgctgcttttgatcatatcagaatactgactcatgccatca

SEQ ID NO: 358612 - DNA, 201 bp, Homo sapiens
ccttattcatcctaaaacaaaatataatgcctgactcatagtcagacttcacagtatttttaaatgaattacattgcattggggaaatataaatagtaatrtccttttatagaggaagtctaaaagaaattcttgggtgaattgataatcaaacatttttaagaaggtatatttgcgagcaaagaaagaaaaaatatgaca

SEQ ID NO: 358613 - DNA, 201 bp, Homo sapiens
tcgcccccccccacacacacacacacacacacacacacacacacacactcactcacacatacacacacacgttactcatggtagggaaaagcaggaagtgkgtatttgctcacagcttgccttgaccttggtcacagtgatagggatgcagtagataatcccgtgttgagtgggcaatgggaagagattaagtcatgaagt

SEQ ID NO: 358614 - DNA, 201 bp, Homo sapiens
gcttgcagtgagccaagattgtgccactgcactccagcctgggcgacagagcgagactccgtctcaaaaaaaaaaaaaaaaaaaaaaaaggccttgttgcrtacctattgtgtgctgggcacttggcttagggcagatgttacaaaggtaagtagagactattggcttccaaagaaataagaatcttgaggtcaaagcaga

SEQ ID NO: 358615 - DNA, 201 bp, Homo sapiens
gggccatgggaacagctagtatcagttcaaatactgctaccatttactattcatgtaataatggggcaagttacttctcagtgcctcaattttcctaataygtacaatgggaaaagattttcctgcgttaatattgttattgtgaggagcaggcaaatcaattcatataaattgtataaatgttcctggcacatagtaaac

SEQ ID NO: 358616 - DNA, 201 bp, Homo sapiens
ctctctaggggcactgattccctgttccttctttctttcccgcatctcagggactgagtctgtcttcttcaacttaatatccctatgaacagcagggtacmtagcaaaattgtagctgtctctgagcttcccaagtcagatcccactgtacactgtattttgctttctcaacattatataagtctccttcatggaacatag

SEQ ID NO: 358617 - DNA, 201 bp, Homo sapiens
gagacagaaagaaagaaagaagcctagtagaagctacgaagctgctgtgggagcttcccactctgccatccagtaatagagacagagtcccctagaagcasgtttgaagttaatgcccaggggtcagtggccaccatgcccagtgcccttactctgcccttatcaggccattcctgacttcacctcatctcctgccatctg

SEQ ID NO: 358618 - DNA, 201 bp, Homo sapiens
tcaagcttgggaaggggatagattattaaaagagagtagccaatttctgctctgacactctttactttttgggtctttgtttctgtctgttgctgcctgasaagccactggtctgaattgctaaagtactgaagtttgacagatttttctgatatgtatcgtttaaaaaatcagtcttttgaaaaagaatttctagattct

SEQ ID NO: 358619 - DNA, 201 bp, Homo sapiens
agcacaaagtcatgagggatcctctcccatggtccaaacacctcccacggggccccacctccagcattggggattacaattcagcatgagatttccaaacwctgtcaaaggcagagcacaagacagtatcccttggcatctaaattgattataaaagaagtttctttctttacagggtttctttctagcatgaacttttac

SEQ ID NO: 358620 - DNA, 201 bp, Homo sapiens
tctctgtgtcataaataagttaaagaaaaggtgctgtgccttgatgtgcacgtacacaaacatccaaacatctgggtgccgtaaagagcagtattgccttsagcatgtctcaccttcagccctaaggcggttttctcctatctcagtaaatagaacatacaatcgggttttacaccgagacattctattgcccctggagac

SEQ ID NO: 358621 - DNA, 201 bp, Homo sapiens
ctttgaaccagactgaatgaatgacagaagcagagtttgatgaggaggccttggccttgtggagagagtacttcattcactttcccattgtcaagtttggrtttgtggagggagcaggaaatcctcatggagatgtctggcaggcaaccagagaagcatgcagccactgaggaggaggaagccaggctagaaaggaggact

SEQ ID NO: 358622 - DNA, 201 bp, Homo sapiens
tctgcacaatgccatctgtgagtagtcagtttttttttccttttcaatctatattggatacagaataatatctattatatataatgtaaactatgttattwgtatgtatgtgtgtgtatgtatatacagtttttaaaagtttactgaaaaggagtggtgagaatattgaataatgttgaatataattcgcatattcagcat

SEQ ID NO: 358623 - DNA, 201 bp, Homo sapiens
caccttgtctctggatgttaagtgctcccacttgtcctctaccacatcaatatcccatcttctgggtgaattcaaggaacccagccatatggcagcagttycctcattaattcctggcctgcaccagagccaggtatatattcacatatgccagggctccccctgtaaatgtgtttctcatggccttggtgaaggggggca

SEQ ID NO: 358624 - DNA, 201 bp, Homo sapiens
ttattccatatcttgttattgttatttctcctcactgtttactgtatctcctcttattataacatttatttactaacttctgcaaaatgaaaccagtaatratggctgggtttctggtaattcagtagtggagaaaatcaggataaagtacaaaataatgatacattaagtttttctttattttgatgtacttttcttggg

SEQ ID NO: 358625 - DNA, 201 bp, Homo sapiens
ttatatgcattaactgacttatttttattacggtctcaggaggttgtttttattattgccaccattttactgatgaggaagctatagaacagagaggttaracatcttacccaaagtcacacaggtaaaaaggagttaagtaggggtttaattgaggcagtccctccaagacttatgctattaactattatagttgccttc

SEQ ID NO: 358626 - DNA, 201 bp, Homo sapiens
caggtttgacagatgaaaaagtgaaggcatatctttctcttcacccccaggtattagatgaatttgtatctgaaagtgttagtgcagagacagtagagaartggctgaagaggaagaacaacaaatcagaaggtaaggtctcttgtggatctcattttaaaccagctttttctatcttacggcaaaagactaagcatttaa

SEQ ID NO: 358627 - DNA, 201 bp, Homo sapiens
attattcagatattactaccacttctaaataaactatatttcagacactggtagtattctaaaatggctaagctacgaaaataacaaatggatattacttyttttcggtgcattaaaaattatttttaaagtgtcaaagtttttattaaaagtaatttcttttagaaaaatattctacagtttgccattattttttaattg

SEQ ID NO: 358628 - DNA, 201 bp, Homo sapiens
atataaagtagacaaatattaacactgtaattctatcagagttattccatttaaaaagataaagtaagttagagaagaaataaatacaaaagaaagatccrtgactaattaaaaataaaaatttggcaaatcttgagaattcagttgattaagttacaaccatattgaaaaatgcagaagtcagtattataattgatttta

SEQ ID NO: 358629 - DNA, 201 bp, Homo sapiens
attttaacacatatgtagattcccgtaaccaccactgacctcagcatgaagaatggcacttttttgtgccgtcctttataatcctgccctccattcacccmgtccttggcaatgacttctgtgttagtgatcactatagttttgtgttttcccaaatgtcgtgtgaatgacatcatgcagtgtcgagcctttttgagattc

SEQ ID NO: 358630 - DNA, 201 bp, Homo sapiens
atacgtgtggaatgcagtctgttgtggtccacgtcacattactccttctgagccgcctccagcagccccccagttggccacgcagctgtgctcacctccarccccttatcctcgggtctctagttcagatcggggtggacatgtggcccatgagggccccagcagattctttgctaaaacctgtatcttggactcagcaat

SEQ ID NO: 358631 - DNA, 201 bp, Homo sapiens
ttactgcatgaccattgattctgttaacaaatcaatttgaaagactcacatctgcctctcaccctggaggatgcatacatgttagattctcccactgagcycagtttcttccttttcttattactttggcagccacaaaagccgatggatttgcactgtatttccttggagagtgcaataatgtaagtatctaaatttaga

SEQ ID NO: 358632 - DNA, 201 bp, Homo sapiens
tggatgtaccacaatttatcggattactttctaaagcctatttggattatttccaatttgggggaaattatggataatattaatgctattttaaataataytttagaatgagagatttctcttcatgggaaatactgggtcctaattgctttaactggtgtttgtgttgaactatcttgtcttatgtttttgtctctgatg

SEQ ID NO: 358633 - DNA, 201 bp, Homo sapiens
ttcttgaaatacattaactatacttcttctatgttcctttgaatttacagtttcttgggctttgtttcgtccaactctgacagatggtgacttttttgctwatgtgttttatggttttctttttatttttcctttctctctctctctctctctctctctctaactgtgaattctattcttccatgggcctcttaaatggat

SEQ ID NO: 358634 - DNA, 201 bp, Homo sapiens
tagaccaatggagttacgttcccagggggcctctgctgtgacatataggtcaccagaaaagtggggtaaagccggcagccacaggcctcacccagctcccrtggagcctgcagctcacacccaccatgccccgcaacacactgagtttatttccagacaggtggtgagcagggctgagaacttgccccagggtacaagcct

SEQ ID NO: 358635 - DNA, 201 bp, Homo sapiens
acggccgtctacatagatgtaaatttgtttactatccagtgccatctagtgtctaaaaggataatagcttattggtaaacctaaatactttttttttcttyttaagaagtgtttccaaaatttaactggttgtaagttgaagtcttaacattgaaatgaagtctcatgaataaagtgatgtttgaattgtgcatggaaaga

SEQ ID NO: 358636 - DNA, 201 bp, Homo sapiens
tatgaaacattgctgaaagaaattaaagaaaatcgaaatgaatgaagacagatttactctttatgaattgtctggataacaattctccccaaattgatccrtaatttcaaagaagtccttatgaaaatccccgcaggtctttttatagaaattgattaactgattttaaaatgcatatggaaatgcaaaggacctcttaga

SEQ ID NO: 358637 - DNA, 201 bp, Homo sapiens
tttcaaagaagtccttatgaaaatccccgcaggtctttttatagaaattgattaactgattttaaaatgcatatggaaatgcaaaggacctcttagaagartcataataatattttaaaatgaagttcaatatgaaggatttgcattacatgattcaaaaattactgtacaaacactgtatgttagtttattttgtactgc

SEQ ID NO: 358638 - DNA, 201 bp, Homo sapiens
atatgccttactgtaagagctaaattctaaaatttcttagaaaaaagtatggtctttggtggggtaaagttcttatatgtgccaccaaaagcacagtccawaaaattttaaaaaaacagtaaattgtagttcactaagaacttgtatccagaatatataaaggattcttaaacaaaataataagacaacccatttttttaa

SEQ ID NO: 358639 - DNA, 201 bp, Homo sapiens
gtgacctagctgcatatttatttgaactttttaaaaaagtatcatattagtaatattttggctctcatcatcattttatttgaaagttggatcagtgtatrtttaatcacaaaatggtatacagtggttggcttattatgtttgtatgtttcttgttataagaaatgtgagtagttatatatttattgatttaacttttaa

SEQ ID NO: 358640 - DNA, 201 bp, Homo sapiens
tttatcttgtgtactatgcctgaacaaggaatctgagcatagttttcagtcttcggaattttgactggatttggcatccttaatgtactcagaatgacctwcatacttcataatattagtaagtgtccttacaagatggatagtttagaacatcatcatttaaaaatatctcagcaagttataataaaatgtttttattat

SEQ ID NO: 358641 - DNA, 201 bp, Homo sapiens
cttcccattgtgccttaatgctggccatcaggattgttttcatggtgtttggggcccgtcgctgtgtagagctcatggtggacatttagcagacaggaaastcccttgagtctctagtaaatggtaatctggcccctctgaccactacagctcccaagtggcaagcaccatccctacttgacatctcggtttcagccttca

SEQ ID NO: 358642 - DNA, 201 bp, Homo sapiens
gtaatcccagcactttgggaggccgatgcaggcagatcacgaggtcgggagatgaagagcatcctggccaacatggtgaaactccgtctctactaaaaatmcaaaaaaaaaaaaaaaaaaaaaaattagccaggtgtggtggtgcgtccctgtaatcccagctactctagaggctgaggcaggagaatcgcttgaatccag

SEQ ID NO: 358643 - DNA, 201 bp, Homo sapiens
tcaagactagtagtaatctactaatgcataggccaaacgcactctctactgattaaaaaaaaaaaaaaacccagacatcagaacatgctctatggccaaaytgtcatcatagtgaaaagtctgcgcagtacattattctataaaatgttgtttaactattttaatggctccttatgaagtcctaaagaatgaagataatta

SEQ ID NO: 358644 - DNA, 201 bp, Homo sapiens
tagctcacttacaataatttatcttgtgtactatgcctgaacaaggaatctgagcatagttttcagtcttcggaattttgactggatttggcatccttaaygtactcagaatgaccttcatacttcataatattagtaagtgtccttacaagatggatagtttagaacatcatcatttaaaaatatctcagcaagttataa

SEQ ID NO: 358645 - DNA, 201 bp, Homo sapiens
tatattaccatttctattcttttttgtacttaatgtgttataatctattgctgtatttattatttccgatattcaaactacccagatttggccagtatgckttctttcaaacattttcttactatatttcatatgtctttattaacctcagaaacacttgctctcttggcacaacatttcccttatttactttgtatgttc

SEQ ID NO: 358646 - DNA, 201 bp, Homo sapiens
agagtaaagcatacaaatacaaagcataaaattgtatcagctgtgattcccttcacatgacctgctgaaagcagatgtgtgcgtgagcaccagccagacaygctgaaacatgttcatgaagtgggaaatagaggtgacaggcattcagtgttgatgcaggagctacctgcttcacgtgagttacggtcacttcaaaggaaa

SEQ ID NO: 358647 - DNA, 201 bp, Homo sapiens
tgatacaatcatgtcagagtagttaaaaggagtttagcaggtccttcaggtcctgctgagggcaattactttgtgtccttgacaaagcagtctcaaggccrttatacaacacatactgtgggagtgaaaggctgatgaggaaagctgcaaatgtaaatctgccggtagggaagatcactgagacacagagagaaacatcaa

SEQ ID NO: 358648 - DNA, 201 bp, Homo sapiens
ctatgctcaaacggctcatctcatagcatctcatgtacaatccatgtgggaactctgaactaatataagttttataatttgaaagtgaagtcgtgtgtttsaaagtgctttgtaagctgtagaactttctacaaatgtaaggtcttactactattattgtcaggaaaataaataactagacctgagtccatttgctgcatt

SEQ ID NO: 358649 - DNA, 201 bp, Homo sapiens
gtttttactgtattttaactcaataaatgtatattaagaaaagtgaaattaattgaaaatcaacttagagtagtactatattgaccaataatgaaataatrtcaaaataattgatgaatctgcaaattgactgcatcttaattatctcaaactttttagtttcaacaaagggtttttttccctcaattacaaataaaaacc

SEQ ID NO: 358650 - DNA, 201 bp, Homo sapiens
ggaacaatttttgaaaataccactgtctgacttgatacaatcatgtcagagtagttaaaaggagtttagcaggtccttcaggtcctgctgagggcaattaytttgtgtccttgacaaagcagtctcaaggccgttatacaacacatactgtgggagtgaaaggctgatgaggaaagctgcaaatgtaaatctgccggtagg

SEQ ID NO: 358651 - DNA, 201 bp, Homo sapiens
tggctttcctgttcctgtttgcatgtctgaccaacttctgcttaagtgaggacatctttatccctaggctggtgagcacttacttactgcttctttgccastcttgctgaatttggatttatactttttgttcaggtgttctgtatatctcctctgtgattcattaagtactgatcctacattttgttctttgggacagac

SEQ ID NO: 358652 - DNA, 201 bp, Homo sapiens
gaaaggcaatgcatgtttgttttaataattcaaataatatagaggtataaaaaagagtaatattctatttttctgcattccagtagcaactgtctatttcmtgtaatgtcatcttaggcatttttctatgatttttcaaaggtaggggtgtgtgtgtgcgtgtgtgcatacagtatgttcaagcataactcagatgtattg

SEQ ID NO: 358653 - DNA, 201 bp, Homo sapiens
aatcacaatttagaatttggaatgcaaaatgtggttttcaatattaatttctaatataggcattaaatgatcacctttctttattctggatttcttctttrttaaataaataaataaatatatatatatatatatatgcacacaccatggaatactactatgtttgttgtgtgtattacacacacacacacccccccccac

SEQ ID NO: 358654 - DNA, 201 bp, Homo sapiens
ccttggagagtgcaataatgtaagtatctaaatttagattttggtgctctagataagaaaatatcataagctcctttaaaaaagttataaacaaccgacayttcatgattaagtacttttcatttaaatcattttgtgttttgtttctatatttggttattaccagtcaagaattttactgacatggcaacatttaggcat

SEQ ID NO: 358655 - DNA, 201 bp, Homo sapiens
ctcttcttttcttggttaatcttgctaatgatctctcaattttatggatgttttcaaagaaccacctttttgtttcatttatctttgtatttgtttttttktttcgatttcatttagttctgctctgatcttgcttatttcttttcttctgctgggtttgggtttgttttgttcttttttctttagctccttgaggtgtga

SEQ ID NO: 358656 - DNA, 201 bp, Homo sapiens
attcagatcagtgttgaaataaccatgcttgaattctctgcttttatattgaagttatgaagctttcagggaatttgaagtgtggatgataagtgtttctrtatacagttttttgtttgtttaaattgagacagggtctcactctgtcacccaggctggagtgcagtggtgcaatcttggcttacttcaatctccgcttcc

SEQ ID NO: 358657 - DNA, 201 bp, Homo sapiens
tgaaataagcagaaatctcttgtaattgtacctattattttatatggtaggtatgcagaggccttgccaaacagacagaattgaatgacttcctactcgaygtatcaaagtaagtgttcatttctagggatagtagctcttattaatcaatggtttaaattaagggcagcctgtggcagaaatagaccattgtctattgca

SEQ ID NO: 358658 - DNA, 201 bp, Homo sapiens
gggtctcattatgttgccccacctggtttcgaactcctggcctcaagctatcctcccaccctagctcccaaagtgctgggattacagctgtgagccatggkgcctggcctaaattgttataaatatagtaagaaagctttggacttctcatttccccacatcctaaatactaaagcaacataataaaaatgtttctaaaga

SEQ ID NO: 358659 - DNA, 201 bp, Homo sapiens
tagttatactagtatatatattcatatttctcatctctataaaataaaatataaggaaggcactttacaagttgttacattttctataggagaagaacacrtgcagttcacactatggctgttttagtcatcacttttcatttatggaattggaaagcttcgtgttactctcactgatggtgatgggatgggatgggatgg

SEQ ID NO: 358660 - DNA, 201 bp, Homo sapiens
ctgccgcaaccaccctttttttatactgcgtcctgctccctatcctcttcccacattgccttccaattccccttatcctggtctgcattctcccaaccaarcatttccaactcgctgtatgatatagttatttatcaagtttattgacagtcacctgcatttagaatacagcttcatgaagacaaggattattgtatcttt

SEQ ID NO: 358661 - DNA, 201 bp, Homo sapiens
tattgtatcttttttattctccaagatattgtaagcataaagaactctgacaggcacttagtaggtgctcagtaaatatttgaagataaaaggattttgarttaatagtgagcaaaacatatttgagagtctagtgaaaccagccttatttgagtgaaaagagtcttatatattgtagattccagctggataaatagagtc

SEQ ID NO: 358662 - DNA, 201 bp, Homo sapiens
ttgttgttgatttcaggttgatgcctcttgttattacagggtggctgccaccactggctaggtctgagaagctttcttgtttgtgattctctcaaaaccaygaaatttaagtcattttcttcagtctgattggagacatttattcggtgtctggcatgaagtagacttttggtaaatacttgtggatgaattgttaaaatt

SEQ ID NO: 358663 - DNA, 201 bp, Homo sapiens
ttagaaatattaaaataactacagcctgaaaggcaaattgagatggatagtgttgaaggatagaggtgcagtgaagtcagtcacaaagttctccatagtaycagtgtgtgacttaaatttcttttcccatcctgtggaatgagcacagaaagcaggctacttactcatggaagatttagtaaaaatgaccctatgttaaac

SEQ ID NO: 358664 - DNA, 201 bp, Homo sapiens
aggtgcagtgaagtcagtcacaaagttctccatagtatcagtgtgtgacttaaatttcttttcccatcctgtggaatgagcacagaaagcaggctacttaytcatggaagatttagtaaaaatgaccctatgttaaacctcaaggaaattatcagtcaattaaagtagaaattgttcaaaatgcattctcagtaactttgt

SEQ ID NO: 358665 - DNA, 201 bp, Homo sapiens
tttttactggtgaagggtcttgcctcagtattggtggcttctgaccagggtggtggttgcaaatcatagaacggtagggatgcatgtggcaatttgttttyttctccttcttttttaaagatggggtcttgttcagcctgtcaacgtgcagtggcatcatcatagctcactgcagcctcaaactcctgggcgccagggatc

SEQ ID NO: 358666 - DNA, 201 bp, Homo sapiens
aagtcagggctcgtagagtaggaggatctcatggctggggggctttgtgcagaggagaagggacggagaaagctggcacggtggatcaggtcttccttacgcactgagtccagctttgcattgggggaaggcgtggggaggtgccagagggcacggtgtggggagataccatgacatgcagatatttagtgcatgtttcct

SEQ ID NO: 358667 - DNA, 201 bp, Homo sapiens
cagggtggtggttgcaaatcatagaacggtagggatgcatgtggcaatttgtttttttctccttcttttttaaagatggggtcttgttcagcctgtcaacrtgcagtggcatcatcatagctcactgcagcctcaaactcctgggcgccagggatcctcctacctcaacctcctgagtagctaggactacaggcacacacc

SEQ ID NO: 358668 - DNA, 201 bp, Homo sapiens
gtagcccttttaatttccttgaagaattttttctttccattcacaacttggctgtttggcccaagagtccttgctttcagcctatctcagctttagatgtkccttcctaagtttagtcacttctagcttttgatttaaagtgagagacatatgactttttttcacttgaacagttagaggtcattgtagagttattaattg

SEQ ID NO: 358669 - DNA, 201 bp, Homo sapiens
ttccttgaagaattttttctttccattcacaacttggctgtttggcccaagagtccttgctttcagcctatctcagctttagatgtgccttcctaagtttrgtcacttctagcttttgatttaaagtgagagacatatgactttttttcacttgaacagttagaggtcattgtagagttattaattggcctaattttaata

SEQ ID NO: 358670 - DNA, 201 bp, Homo sapiens
ttctatctttggatagtactggtattgggttatgctacacttataaaatgagctcagaaatgttccattcttttctatggactaaagtggtttaaataatrtacatattatttgttcacctgatgtttgatataaatcagctaagaccccattagagtcttattggggtagatctctgattctcttttcaatttcttctat

SEQ ID NO: 358671 - DNA, 201 bp, Homo sapiens
ctgacactctttactttttgggtctttgtttctgtctgttgctgcctgacaagccactggtctgaattgctaaagtactgaagtttgacagatttttctgrtatgtatcgtttaaaaaatcagtcttttgaaaaagaatttctagattctttaaaaattttagaatggccaaatgcatacaaatgtgtctaattgttgagt

SEQ ID NO: 358672 - DNA, 201 bp, Homo sapiens
cagtaaatggtcttctggcctctgtctttttttttttccccctcctgaggggaaaagtcagcagttgttgttctcctcagtatactgtgatcttttacccygaccgcttttacagtcattcttcttggtgtcttctgaggtttctgggtctgtgggctgctgatttcagtgaagtttggagaagtttcaagcattacattt

SEQ ID NO: 358673 - DNA, 201 bp, Homo sapiens
tgtttcttgggaatctgttatattcctataatacatagtaactggagttatcaaatggtgagcaaaacccttcacagcctctgtcctcattgaggttctartctgtggggagacagacatgagccaaatatcaacataactatgaaactagtcagagtcaggcctattaaggagcataacagtgccctgaaagcttgtgat

SEQ ID NO: 358674 - DNA, 201 bp, Homo sapiens
tcattcatttttatagctgctatgtttctcctgaaattccccatctcttcacctatcttttctaaatatatattttcctgaagattctttagcgtatctgyacattatttagagattgttgtctgaattttcactatctgggttttctatgagttttgtcttgttgactgattttactctagacagtgtaatacatttttc

SEQ ID NO: 358675 - DNA, 201 bp, Homo sapiens
aatgaattagattttcaaatcaatttttataaatttgtaggtactttatatttcctttctgatctgaaaacatcaactacttaactcaaattagtgtgagrtaataaaagagaggatttactggctcagactgctgaaaagccattgaatgttcaggcttatataattagcggacatgggggctcaaataatcttttcatg

SEQ ID NO: 358676 - DNA, 201 bp, Homo sapiens
aaaagaatgtagaatgaggatagaagagaggaaatcccaacatttaacaggtgagtagaggacacgaagccagcaaaagaaatttagaagggacattcagrtagacaggaagcaaactagtactctatagctctgttttgatctgccaattcattaaaattatcaattgatgaaaactttgttttgttcacaccttgactc

SEQ ID NO: 358677 - DNA, 201 bp, Homo sapiens
tttctctttacatgatggcagcaatagccctgacagctgtcgtcttatgtttaaaatgaagttttatatcaaaatcaataaataatcagtgtttatatcawatcactcacttcaccaacaagataataaatgaagcacatttgtttcctaattttttttactcttcttacctactacccttacatagttttagatatataa

SEQ ID NO: 358678 - DNA, 201 bp, Homo sapiens
atattaccaaaattttagatatttttaactccttttcagcatctgagggtcatttcaaagttaaacattaatatttggggagagtgaaaaggtgaacataygtttagaaatgctcatcttaaaacagaagcctctttttctttctttagacagggtctggcactgtcaccctggctggagtgcagtggcacaatctctgct

SEQ ID NO: 358679 - DNA, 201 bp, Homo sapiens
tttgtatttgtttttttgtttcgatttcatttagttctgctctgatcttgcttatttcttttcttctgctgggtttgggtttgttttgttcttttttcttkagctccttgaggtgtgaccttagattgtctacctgtgctctttcagacttttgatgtaggcacttaatgctgtggacttttctcttagtaccacttttgc

SEQ ID NO: 358680 - DNA, 201 bp, Homo sapiens
ttgttccagttctcagaaggaatgctttcagtttttcacattcaatataatgttggctgtgggtttgtcatagatggcttttattaccttaaggtatgtcycttttatgccaattttgctgagggttttaatcataatgggatgctggattttgtcaaatgctttttctgcatctattgagttgatcatgtgatttttgtt

SEQ ID NO: 358681 - DNA, 201 bp, Homo sapiens
gatagaatatctgatgggcatctgtagcatactgcacaggtttggcaaccttgtttctctaccctttactcttggtaattactgagagttctgatttattygtataatgatgttatttatccatttattctgcaatgacaaatttaaccatgtaataaaaatgttgaaactctttaattcagacatacaaataatgacata

SEQ ID NO: 358682 - DNA, 201 bp, Homo sapiens
ttcctggttttatcttagagggttgtatgtttccaggaatttatccatctcctctagatttcccagtttatgtgcataagggtgttcatagtagccttgamtcatcctttgtatttgtgtggtgttgtttgtaatagctcccgtttgtttcttattgagcttatttggatcttctctcttcttttcttggttaatcttgct

SEQ ID NO: 358683 - DNA, 201 bp, Homo sapiens
gctctgatcttgcttatttcttttcttctgctgggtttgggtttgttttgttcttttttctttagctccttgaggtgtgaccttagattgtctacctgtgytctttcagacttttgatgtaggcacttaatgctgtggacttttctcttagtaccacttttgctgtatcctagaggttttgatagatcatgtcactattat

SEQ ID NO: 358684 - DNA, 201 bp, Homo sapiens
agcagatacttggtttgtgaatttattttgtaattttttggagactgggtcttgctctgtgccccaggctggagttcagtggtgtgatcttggctcactgyggcctctacttcccaggttcaaggaattcttatgcctcagcctctcgagtagctgagattacaggtatatgccaccacactcagctaatatgtgtatttt

SEQ ID NO: 358685 - DNA, 201 bp, Homo sapiens
aaggtggtcccataagactgtaatgccatatcttttctgtgccttttctgtgtttagacacacagatacttaccattgtattatagctacctacagtattmagtacagtcacatgctgtacaggtttggagcctgggagagatagactataccaccttatagcctaggtgaagtaggctataccatctaggtttgtgcaag

SEQ ID NO: 358686 - DNA, 201 bp, Homo sapiens
gggagggacactctttttcagtaacaatttatattgttaacttatttcactttgaacttgtaaggtggcagaagttaggcaccttgcccaatgtaatatcrctagtgactgcaggtttgggcttcaaaccttagtccatgctctaaaccagcggttcccaaccttttggcaccagggaccagttttgtggaagacagatgt

SEQ ID NO: 358687 - DNA, 201 bp, Homo sapiens
tcgccctgctatttatttaataccttgggtttttttcattgtgttgttgttttataggtcctgtgaggattaggctttagagaggttctattttggtgtaytttgaagatttgtttcaagatttagagtttcttttattaacagcagttctcatagtgctggcttggtagtggcgaattctcttggcatttgtttgtctga

SEQ ID NO: 358688 - DNA, 201 bp, Homo sapiens
cgctgttagatttgatgtacagagaagagcaattacaaggctcttcaaagatgcaggtgctgccctcacaaatctatttcgcaaagaattggtcaagggtrtatcttctggaccctctaaggctgggatgagtaggtctaaagtgtctaatccactccaccatcctaatttccctaagcctttggatcccttcctctacgt

SEQ ID NO: 358689 - DNA, 201 bp, Homo sapiens
cacattttttaatttttttgaaaactccaaagacttgtctttttttttttttttttttgagacagagtctcactctgtcacccaggctggagtgcagtcaygtgaccttggctcactgcaacctctgcctcctgggttcaagtgattctcctgcctcagcctccagagtagctgggattacaggcatgtaccaccatgccc

SEQ ID NO: 358690 - DNA, 201 bp, Homo sapiens
cattttttaatttttttgaaaactccaaagacttgtctttttttttttttttttttgagacagagtctcactctgtcacccaggctggagtgcagtcatgygaccttggctcactgcaacctctgcctcctgggttcaagtgattctcctgcctcagcctccagagtagctgggattacaggcatgtaccaccatgcccgg

SEQ ID NO: 358691 - DNA, 201 bp, Homo sapiens
atgactttaatagacatgagtttagagttttaatttttaaggtagtatttgatgtatcttgataaatcatgtttatcatgtataaggtttatctgtatccrtgttccatggatagaaggtttttctctaatttcttagtgttactgatttcttatttgatgaataggtttttaaattttctaattttgtgccactccttaa

SEQ ID NO: 358692 - DNA, 201 bp, Homo sapiens
ttaaccattttgggaaggttcatttaatcattttgggaattactcatttgtgaaactatccagtcaccttttaaattttaatttaatttaattcacttttytgagaccgggttttctctgtcccccaggcttaagtacagtggcacaaccacagctcactgcagccttgacctcccaggctcaagggttcctcctacctca

SEQ ID NO: 358693 - DNA, 201 bp, Homo sapiens
tctgtcccccaggcttaagtacagtggcacaaccacagctcactgcagccttgacctcccaggctcaagggttcctcctacctcagtctttcaagtagctraatagctgagaccataggcaaacaccatcatgcctggctacattttttgtcattatttgttgagataatttgttgagacagagtcttgctatgttgccag

SEQ ID NO: 358694 - DNA, 201 bp, Homo sapiens
attaatatttgaagccattttaggctggtgccttttttgctaatattttttgatagtttttgaattatctttatgattctggttggatttatatttttcarcactttctaagcttattttattttctgaaacattgtccatttgatccagattttaaacaaatattaacatatttatgccaaaatattaagcaactgacat

SEQ ID NO: 358695 - DNA, 201 bp, Homo sapiens
gagacagagtcttgctatgttgccagtgctggtcttgaactccagggctcaaatgatcttcccaccccagcctcccaaagtgctgggattacaggtatgakccatcatgtccagcctgtcacctttttaaatgaaaaatatttaacaaactttcagtgtcttttatggtttggggatttgttttgtttttgccactttatt

SEQ ID NO: 358696 - DNA, 201 bp, Homo sapiens
agatttaaaacttcataaaaaatgtatgcacagattattttcacttaaaatttaattgatattactaaatttgtatttatatctaattttcagtgttttayatttttatttcttcctttcttatataatccattttgcctgggaatttttaattactcctttttaataaaactaacttttataaaatttttcatttatttg

SEQ ID NO: 358697 - DNA, 201 bp, Homo sapiens
ggtcagtatatttgcatttataagcactaatgtccttgtcacaagtccacagctcagccttgtggggtgatggcagaatcagacaatatgtgaatgaatgrtgtggctgtgttccaatacaactttacttataaacaggagagggctgatttggcccctgggtgcggtttgctgaccactgctctaagtttttaaagtgga

SEQ ID NO: 358698 - DNA, 201 bp, Homo sapiens
ttcaaagtaattttctaatttcgaaatactttggatgtttgcttgttttttattttttattttgttcctagagacttctttggattgttgtaaaaagaatrtaactattaagttaaaattttatagttgatcaatattttcttcctggccaagacagaaaagatgattgttaaagcaactttatttaggtgtaattacact

SEQ ID NO: 358699 - DNA, 201 bp, Homo sapiens
atatgcaatagaagcatatgtaaattgcaaagattgaggggagatttatgactgactgtgtcctttatttcttctgcccttttgttgttgttgttattttyggttctgtcaccccacagagaagtagacttgtacacaggctacaccacgcggaacatcctgtgcatgcccatcgtcagccgaggcagcgtgataggtgtg

SEQ ID NO: 358700 - DNA, 201 bp, Homo sapiens
gagggagctctctgaggtttctattatgtgggaactaatcccattcatgagggctctaccctcatgacataatcaccttccttccaaaagtcccacctccraatactaacatgttggacattaggatttaacatattaattttaggggaaagaaacattcagtctatagaaacttgtattatctagagttacaaatatgta

SEQ ID NO: 358701 - DNA, 201 bp, Homo sapiens
acacaaaagtatagtcatagctcatgtttggacacccaccaggaaagttctgtttgtgacaaaaagtgaggcaccaggttgtccatgtcacatgcattctmggtgttaactcagtcctcgtgaaagttgtaccgtgttcactgaagggtaaaatgaagttcaatgtgcattctcaagtctcactttaaaaatagtggaatt

SEQ ID NO: 358702 - DNA, 201 bp, Homo sapiens
caaaagtcccacctccaaatactaacatgttggacattaggatttaacatattaattttaggggaaagaaacattcagtctatagaaacttgtattatctrgagttacaaatatgtagaataacagtaagtgcttttctgttactgatccttccttcctctcttctttcccgatattgttttcactattctgggtctctag

SEQ ID NO: 358703 - DNA, 201 bp, Homo sapiens
ttattgtctgtcttttacattgttatattttagatgaatggaacatttagtattctgtaaactctagtaatcctttaataatattactagaattctgaggytagggaaaattttagtatggtgatcttttcatagagctaaatcaacatacattcagttgcccccttaatcaattagagaaactgcttttttgggagtagg

SEQ ID NO: 358704 - DNA, 201 bp, Homo sapiens
tagtaatgatcaagatcataaatatgaaaaatctttgtgcagcatgaagtgctttttaattgttgaccgttattgtcattttaattgtgttgatcttgggsaattcagagtatttctgctgttgaacaaattattgtgtccctaatagaagcatgttttgtacatgaaaattcttgtttctaatactgaacatgataatgt

SEQ ID NO: 358705 - DNA, 201 bp, Homo sapiens
gcatgaagtgctttttaattgttgaccgttattgtcattttaattgtgttgatcttgggcaattcagagtatttctgctgttgaacaaattattgtgtccstaatagaagcatgttttgtacatgaaaattcttgtttctaatactgaacatgataatgtaatggcatattttattgtggtcttgtttgattaagagccta

SEQ ID NO: 358706 - DNA, 201 bp, Homo sapiens
ttgaatacattccttttatttaattaaaggggaacgtctctgattggcagcatctctctttcatttattgagctaacatactgggaagtactatcaacagraaacatcttttaaatccaagtcaattaatttactcatttatactgtgattttaaagaaaccatttaatatgccttagaaaagctaataggacagtagtat

SEQ ID NO: 358707 - DNA, 201 bp, Homo sapiens
ttactttttttcctaaatattccaataaaaaagggctgagattattatacaaatatgcagccttttcagattctctgtaggggctctagcaacatggttgyagcctggttaaaaaatctgaaaagctttcataaaaacagaggctagagtttctttcagctgggtaactgaaagagacaggggttactactgacaagaatt

SEQ ID NO: 358708 - DNA, 201 bp, Homo sapiens
acgccctgcggccaggtggctcagctgctggttgggaatcaatgaattagattttcaaatcaatttttataaatttgtaggtactttatatttcctttctkatctgaaaacatcaactacttaactcaaattagtgtgagataataaaagagaggatttactggctcagactgctgaaaagccattgaatgttcaggctta

SEQ ID NO: 358709 - DNA, 201 bp, Homo sapiens
taaaaatatataaatatgtatattaaacaacagtcacacgtgttatcataggcacctcaggagttttcagaaatcactttcatagcttgaaagaaagctarggggtgagtttgttctgttttcttcatatatctgggaatacttttagcatgaagccaaacacgtgttctatgaagcaaggcaaggcaaatagttaaacga

SEQ ID NO: 358710 - DNA, 201 bp, Homo sapiens
agaggcctccgctgtggttcacctatggggacctgccaaaggctccaaacagcatccctgtctactactgacacctcaagcaccattggatctgctgggtyatatagtccaagtggcagagcagcttgcatgttagcctggacctgttgcagagccttttcctgttctggactccactcagaactggcagccttttgggtc

SEQ ID NO: 358711 - DNA, 201 bp, Homo sapiens
ttaccatgatggtggataaagcattctgtgaatccacggacagtagtcttggcagaagcattgcatgcaggataggcaaacctatatccagagtaagtgtmtattccattgagaacaaacctctgccctttccatgatggaagaggcccaatataatcaactgccaccaggtagctagctgatcaccctgagaaatggtgc

SEQ ID NO: 358712 - DNA, 201 bp, Homo sapiens
gtgcagttcgcagtagggtttgcgctctatgagaatctaatgccactgctgacctgacaggaggcggagctcaggcagtaacgcagtgacagagagcagtygtgaatacggatgaagcttcgcccgcttgccgccgctcacctcctgctgtgtggcccagttccggcctcctgctctaagccactgtctatcatatgtgtt

SEQ ID NO: 358713 - DNA, 201 bp, Homo sapiens
gtgattggatcatgggggcggatttccccattgcttttctcatgatagtaaatgtgttctcgtgaggtctgatggtaggtaaaaagtgtgtggcacttccygccttgcactccctcttctgccaccatgggaagaagttccttgcttcccgtttcccttccgctgtgattataagtttcctgaggcctcacagtcatgctt

SEQ ID NO: 358714 - DNA, 201 bp, Homo sapiens
taatagtcgacctgaattctttttctggcaattcagagatttcatcttggtttagatccattgctggtgagctagtatgatcttttggggtgttaaagaamcttgttttgtcatattaccagaattgtttctctggttccttctcatttgggtagactgttgtcagagggaaggtctgggactcaagggctgctgttcaga

SEQ ID NO: 358715 - DNA, 201 bp, Homo sapiens
tctatgagaatctaatgccactgctgacctgacaggaggcggagctcaggcagtaacgcagtgacagagagcagttgtgaatacggatgaagcttcgcccrcttgccgccgctcacctcctgctgtgtggcccagttccggcctcctgctctaagccactgtctatcatatgtgttcccacagtgcaactctactctagaa

SEQ ID NO: 358716 - DNA, 201 bp, Homo sapiens
agaaatactaaaggtatgagctgataacctagaaatggtatcagttgccaagatctctataacgtttttttgaaaaaacgtaccccgtatcttgatcaatrcttatttgactaatactcagagtttccttatgaaatagtatgccactattttcaataaagattcagatttagaaattcctcgggcaaccttttggtaggt

SEQ ID NO: 358717 - DNA, 201 bp, Homo sapiens
aatacttgcattagaataactgttcgtagaataatatgagtcctgggagagacattgtggcatcatctcatcatgcagctcagagtcatgtgggtcgttcmccttctgttctctgcaaactcagcggaggaccggagacttgggtgtgatagggtgacattgacattgtcggggatttcagggcccacttgaacctcagat

SEQ ID NO: 358718 - DNA, 201 bp, Homo sapiens
aaaggtaggacagctggaagcatgggggccaggtagcatccaggtcatagtcggattcaaaaattttctgatgggcaattagttgaaagagttattatcaragacctggaatcaatagaaaggaatgtctggcttaaggtaagggttttggagcccaagcttttatcatgcaaatgaagcccccaagtagcaggtttcaga

SEQ ID NO: 358719 - DNA, 201 bp, Homo sapiens
ttttattttaggaccgagggtgcatgtgcaggtttgttacatgggtaaattccatgtcacaatgtacccatgtaaatggtgggggtcattgtaaagattakttcatcacccagtaataagcataatactcgatggtagttactcaaatttttccttcaaaatgtttttactacaaattcgaactggaagagcaatgctaag

SEQ ID NO: 358720 - DNA, 201 bp, Homo sapiens
accaagccgcagatgcttttcctcatacttgatttactgttttatctgttgaccttttttacaatttttgtgcctaccctaagcctttctcctacttgctrtacctggtacacttacctcctcttaagaaatgtttccctgttcccactatagtcattagtgatgtggtatttctggttttcctcctgggtatgaggtaag

SEQ ID NO: 358721 - DNA, 201 bp, Homo sapiens
tttaagagaacaactaaaattggggaaatttcatattctgtattccacaagcatgtggaggccatccatgctgagtgctgtggtgaacacagcaggctgcrtgggaccttatacagctgatactcattgtcatttcaagtcattttacccaattaacttttcccctgtaccttgcttgtaaacagaattggaaactatcta

SEQ ID NO: 358722 - DNA, 201 bp, Homo sapiens
tcttcagagaggcttaggagaggattaggagttgaagagtaaatgaaatatttctatggtgccacttcaatgtagaagataagatattttccctatgacarttgttacatgtgttacattcttagggaagtcagaggccgtactctaaccattatgcaacaatgataagaaaatatatgagcaagtgtgtattaatacagt

SEQ ID NO: 358723 - DNA, 201 bp, Homo sapiens
tctcagaaagtaagagagaactctataaaagacattcccccaaaaaggaggattaacataatcaactgtatcctgtgacttcaaatgaaactttggcaacrtctgactagttgtgatcataattatgctctacaactaatcagtcactgaatatagaatttagaattttcagagtttctgtatgaatctgttcattacctt

SEQ ID NO: 358724 - DNA, 201 bp, Homo sapiens
aacctgactcagcctgttcttccacctaagcccctgcacgcactgcacgcactccatggtccagtcacaccaagccgcagatgcttttcctcatacttgayttactgttttatctgttgaccttttttacaatttttgtgcctaccctaagcctttctcctacttgctatacctggtacacttacctcctcttaagaaatg

SEQ ID NO: 358725 - DNA, 201 bp, Homo sapiens
gtaagaaggcggctgaatggaggtgcctggacaaggaaggaacatatgtgtatgagcatgactggcccaggggtcagggaagcctgagtcctcaactgcarctccttccagaaaactgcagtgcactgactgtgcaccaagcatgttgtgtggtggggtcagcttttctccatgagggctgccaggcacaactttgtaact

SEQ ID NO: 358726 - DNA, 201 bp, Homo sapiens
atatgtattatgtacattatatacaatgttactaggaatagagacaaaagcattctgagatttttaataggactcttaaatataacagttttgcaaagtgygaaaatagttgcacaaaaatatttattggctgatttaattaacttacagcttcttattcatttccatggccactgttttcccttgtattgtaacaaatta

SEQ ID NO: 358727 - DNA, 201 bp, Homo sapiens
taaaccactgaccagataattattatacaagcacatattattctgtgaatagaattttcttaaagtagattgcagtaatgttagagaagacactcccagtrtatggttgtaaaagccatcatttctttagtgattatttagttattttatttttttctattaaatatgagctttcttggctgtttggccacagtgttttcc

SEQ ID NO: 358728 - DNA, 201 bp, Homo sapiens
aagcagctggctcagaaaagctttgcatcgaacaagcagctgtggaggccggtacttggtggttgacacatatggatgtgttttgtttgtatttataaagrttttgagttatttgccgcacgaagaaatactggtaagacacacaggaaaacatacttgtgtgttttcttggggagaaatctggtgagaatgagacttctc

SEQ ID NO: 358729 - DNA, 201 bp, Homo sapiens
tcaacaacctgactcagcctgttcttccacctaagcccctgcacgcactgcacgcactccatggtccagtcacaccaagccgcagatgcttttcctcatayttgatttactgttttatctgttgaccttttttacaatttttgtgcctaccctaagcctttctcctacttgctatacctggtacacttacctcctcttaag

SEQ ID NO: 358730 - DNA, 201 bp, Homo sapiens
ttatattgttttaatttttgaatgtgtaacaatttgaaaaggacaactaagtaaagaacttcaagagataaaagttcgtaaatagagagtcatctatactygtcttgattaaaaaacaagacaagctagtaaaaatccccaaagagtaaaacctgtttttttttttgtttgttctcatgacccttgaatccatggtgtttc

SEQ ID NO: 358731 - DNA, 201 bp, Homo sapiens
aggcagctgtaaccaaatatatctgaacataaaaaggtaatgtgttgtgctataccattaggaaggctactgcgtcatcagtcaataaatatttttaagcytcgttataatattatgggaccatctcatatatctttggtcgcttgttgaccaaaacatcattacgctgtgcatggctgtaattgcagctaaagcattgct

SEQ ID NO: 358732 - DNA, 201 bp, Homo sapiens
tgaaggatgttttgttgttgttgatcatgtttcaggattggtggaagtgttagtgtcttagaaatctttacattaaaaggggcaaggagagtttgaagacrtgagacataaaggggaaataactgagtgagcaaggaaaagaaggaatcaagaaccaaaaaagagagccagctgagttaggagagaagctagaaagtgggt

SEQ ID NO: 358733 - DNA, 201 bp, Homo sapiens
tgaagaatttgtattaattcatcttcaaatgtatagaatttaccagtgaagtcatgtgggtatagatgtttctttgtggttgttatttttccctttgactrctaattcagtctttgtactttttataggtctattcacattgactatttcttcttatgtcatatttagtcacttgtgtctttctagaaatttgtccatttt

SEQ ID NO: 358734 - DNA, 201 bp, Homo sapiens
tttcaactaacttgtctactttattggcatacagttgttcatggtagttctttatgatcctttttatttctgtaagattggtagtaaagttccctttttcrtttctgttccttattaagttgaatcgtctttctttttctccctctccctctctgtcttttcttggtcagtctagcttaaaagtttatcagttttgttgat

SEQ ID NO: 358735 - DNA, 201 bp, Homo sapiens
aaatatcccattgctttcatcatcacctgatcatctttgccttttgcttctgtttgtcacacgtagaaaaatgcagacttattttcatcactttggtattrgaaatatttttcagagtttgttgagagtatctgaataaaatgtgtttctagaaaaccgacattgaaattgataggatgtacataattgttatgattcagt

SEQ ID NO: 358736 - DNA, 201 bp, Homo sapiens
ttggcagtgagaattgtgaattacaattagcactctacagaatggtgagacatactggaagtaaagctgaggatgactgctttttggtttgtttgtttgasacagggtctcattctgtcgcccacgctggagtgcagtggcacgatcgtggctcactgcagcttcaacctccctgagctcaggtgatcctcccacctcagc

SEQ ID NO: 358737 - DNA, 201 bp, Homo sapiens
aagttccctttttcgtttctgttccttattaagttgaatcgtctttctttttctccctctccctctctgtcttttcttggtcagtctagcttaaaagtttrtcagttttgttgatcttttcaaataaccagcttttggtatcattgatttttttctaatgtttttctcatccaaatttcatgtatttcttttgtaatcttt

SEQ ID NO: 358738 - DNA, 201 bp, Homo sapiens
taaaacttactttaaatatttcaatatgtcatttttaaaagaacctcagactcacaaatctaatgatttatcatttaaaaagtttcttcttttaaaaaacycaataaagtgaaaatatcccattgctttcatcatcacctgatcatctttgccttttgcttctgtttgtcacacgtagaaaaatgcagacttattttcatc

SEQ ID NO: 358739 - DNA, 201 bp, Homo sapiens
aacacttaagaatggggatttctttttaaaagcaaactcagtttgcctaagaggtgaagtgtaatgcttccaaagggtatcacaatgtgtgaaagtggctraggtcacaaatgagagaactatctcttcaagaacaaaatgtgaagaaaactgtcttaggaactctggcctgtctcactcagataacattatccatagcag

SEQ ID NO: 358740 - DNA, 201 bp, Homo sapiens
ctggagggttcagaaggacagtaagttcaatgtttctctcctactttttaacagatactggcaacttcaggcatttgtagtctatgagagtatcactccartctctgcctccatcatcacatgccagtgatgagatacctgtgtgtctctgtattcccctggtgtctttccttctttgtatcactttcctcttcctataag

SEQ ID NO: 358741 - DNA, 201 bp, Homo sapiens
aaaatgaaattagttggttagggacaaattgaataagtggttgaacctttattcgttccagaattcaaccaccaagtattgcctatcttttttataccagrtggtggatataaagatgactatgataagaacaactcttatttgatataaggctttattgtgtgacaggaattgttctagacactttacatacgaaatctc

SEQ ID NO: 358742 - DNA, 201 bp, Homo sapiens
tttttataccagatggtggatataaagatgactatgataagaacaactcttatttgatataaggctttattgtgtgacaggaattgttctagacactttayatacgaaatctctttttgtatgttctcccaacaataccatgagtgtggttattattatctccacgttttataagaaaaaaaatggatgtatagaatttaa

SEQ ID NO: 358743 - DNA, 201 bp, Homo sapiens
gccaagaatctgcagaagctcctcacgggtcagtggctgggcctgagtttctcatacctggggtggaatttcacaggccctagcagagcagttgagagtgscacagtgtgcagagttaagcatcccacggagattgtagggatcacacagtatttggaaacagactttcagctcatctagagtagagagagcttgtccaca

SEQ ID NO: 358744 - DNA, 201 bp, Homo sapiens
ttcaagcaaaaataatactagggtaagatagggtttgtatcatatgtagtgattaaatatgaaaacagcacaaaggatgagactatgtagaattatagttstatatattctatagttataagtttcttacatttgtgaagggtagagtgaagtgttaagtggaagaacattaattttcagtagataagtatgcatattata

SEQ ID NO: 358745 - DNA, 201 bp, Homo sapiens
ctttctcctgaattcagctgtctcttatttcacaggaacataatacacacacattttttttttaatttgttcccagtgctttcaaatccactgaaacacaytagaggaaactattgtcacctttgcagtcctcagcatgaaagaactctctatggtgccatagacagtaggtgcttgggcctgtctttaagaaagtgtttt

SEQ ID NO: 358746 - DNA, 201 bp, Homo sapiens
gggatagcacttagattacattgggataataagagagtattataaataatatgctaataaatttgaaacttagatgaaccggataaattttttgagaaatmcagcttactatacttgaaccaaaaagaactctgaatatttcattgaagaaatctaatcttaaaacaaacaaacaaacaaaccacccatccctcaggacca

SEQ ID NO: 358747 - DNA, 201 bp, Homo sapiens
atttcattgaagaaatctaatcttaaaacaaacaaacaaacaaaccacccatccctcaggaccaggcctcaacagcttcatgtggggttgctatcaaacartcttgcacaaaagctttccaaaagaaggacaagaaccatttcctaccttattttatgaaggctaaataatcctgatttccaaagtctgtcaaaaacatca

SEQ ID NO: 358748 - DNA, 201 bp, Homo sapiens
ggacttgcttagagaatcaatttaatttgactaatgatattatttaatgctattgacaaacatatagaaaatatgtagtttaataagtattttgtcaattygattttaaatgtaaattaaataggggaaaagagtgcacaatttataatagtagaacaattattatatctcaagtgttcccaaagtcaaactacttgtatc

SEQ ID NO: 358749 - DNA, 201 bp, Homo sapiens
taatgatattatttaatgctattgacaaacatatagaaaatatgtagtttaataagtattttgtcaattcgattttaaatgtaaattaaataggggaaaasagtgcacaatttataatagtagaacaattattatatctcaagtgttcccaaagtcaaactacttgtatcttaaagaataccagttggtgtgcagtaaatg

SEQ ID NO: 358750 - DNA, 201 bp, Homo sapiens
ttttatcagttagaaaaaaaatcacggttatgaagatgatttcagaatgttcatgcgttttcgtttgtgctacccacagatttgccgtttgcagcaaaatrcttggtacagttgttcagttaataaattaggtatacatgcttctttcacaaaaagacaaagattccaaatttgctaacttcttctaatgacaaatgaaag

SEQ ID NO: 358751 - DNA, 201 bp, Homo sapiens
ctttggcttgtcttttcattctcttaatggtttctttctaagagcaaaagttttaaactctgaagaagtccagttgatcaatttatccttttattatgatktttaacattgtattgaagaaatacttgcctaacctaaggtcgttaagacatttctcctctgttttttttttctagaagttttatagttttaggttctata

SEQ ID NO: 358752 - DNA, 201 bp, Homo sapiens
tttttaatactggattttatgaaaatgcaaataagtttatatatctgatttacagcaattttcaataagtttcaaaggcataatattataatgtggttcastgttcaaaaagtgcagttgaccgtacagaaggctggattagatcagacataagttagaattacgtggagtcagttctcgttacctgtcgctatggtttgt

SEQ ID NO: 358753 - DNA, 201 bp, Homo sapiens
ttttgaatgaattttcatagtattgtttggtttgaaaatatcagtgaagtttcagtctccctggttgattgatgcctctccaaaacatcagcacacttatytgatggtttgtcatgtcagtatcaactgatgacttaaacatatcttaatgcagtggctcaaatttttaaaattgaagcaaaaactttttatatctatatt

SEQ ID NO: 358754 - DNA, 201 bp, Homo sapiens
gtaactttagaatctgttaataaatttgttgtaatgattaaatagtctcatcttcagagaggcttaggagaggattaggagttgaagagtaaatgaaatayttctatggtgccacttcaatgtagaagataagatattttccctatgacaattgttacatgtgttacattcttagggaagtcagaggccgtactctaacca

SEQ ID NO: 358755 - DNA, 201 bp, Homo sapiens
ggattttatgaaaatgcaaataagtttatatatctgatttacagcaattttcaataagtttcaaaggcataatattataatgtggttcactgttcaaaaartgcagttgaccgtacagaaggctggattagatcagacataagttagaattacgtggagtcagttctcgttacctgtcgctatggtttgtgtatggtttgt

SEQ ID NO: 358756 - DNA, 201 bp, Homo sapiens
attgctaaaaaatgctaaagattatctgagctgtcggcaagttgtaatctttttgctgggggagattcttgcctagatgtagatggcttctgatgtatcarcattgtggttgctgaaggttggggtggctgtggcaatttttaaaaataaggcaaaaataaagtttgccacatcagcagactcttcctttcatagaagatt

SEQ ID NO: 358757 - DNA, 201 bp, Homo sapiens
tgtagatggcttctgatgtatcagcattgtggttgctgaaggttggggtggctgtggcaatttttaaaaataaggcaaaaataaagtttgccacatcagcmgactcttcctttcatagaagatttctctgcagcatgcaacgctgtttgaaagtatttttgcccacagtagaacattggggttcatcctttcaaaccctgt

SEQ ID NO: 358758 - DNA, 201 bp, Homo sapiens
ttttctttgttttgagaccattatgaatcttctagctattttgaaatacacaataaattattaagtgtaattttcctagtgtactatcaaacaatagaacrtattccttttatccaactgtatttttgtaccccttaaccaacattatacacaatggaacattattcagccgtaaaaaggaatgaaatcgcgtaacttgca

SEQ ID NO: 358759 - DNA, 201 bp, Homo sapiens
taaacattagttgaagaacattttgacagtttctctaggtcatttttagcccatggctatgtatttttaaaaatcaggcatagatttgaatgccatttccwcaacttactagttgtaagtaattttacctgtgaatcttagcttccttgattgaaaaatagagataatactgaaagcccctcttgtgtccccttccagttg

SEQ ID NO: 358760 - DNA, 201 bp, Homo sapiens
gtgtaattttcctagtgtactatcaaacaatagaacatattccttttatccaactgtatttttgtaccccttaaccaacattatacacaatggaacattaytcagccgtaaaaaggaatgaaatcgcgtaacttgcagcagcatggatgaaactgaaggtcgttaggttaaataaaattatccaggcacaaaaaggcaaat

SEQ ID NO: 358761 - DNA, 201 bp, Homo sapiens
gatattttcatttattaagtttgaattggcttaatgcaagattgaaaacaaccatttcttagtaatctctgtattaagaagatgttttcaacaacatttcrttgttgtctaaccaagattgtcaaaacgggtcttatcagtccttgttctccctcttgcatttgtgtaggcttaaggatgggcagcaggactagagagcct

SEQ ID NO: 358762 - DNA, 201 bp, Homo sapiens
tgatttgcagaatccctgcctgtgtgctttctacttcgacatgaattcattgtccagggacagtcctgataatcagccatgatcgttctgtcctcatgccstgcttgttcctctgctaccctctcttttagtacttcctcctgcagtttctgtcatctgtgctagcattctttaagatgcattctctaaacttcggaacta

SEQ ID NO: 358763 - DNA, 201 bp, Homo sapiens
tattctcatgatagtgagtgagttttcacaagatttgatggctttataaggggcttccccctttgctcaggactcattctctctcctgccgctctgtgacrtggtaccttccactatgattgtaagtttcctgaggcctctctagtcatgtggaactataagtcaactaaacctcttttctttataaattagctagtcttg

SEQ ID NO: 358764 - DNA, 201 bp, Homo sapiens
caaatatcacacgtctgactcacttatgggagctaaaaagtagatctcatgacagtgtagagtagaagggtggttacaggtctcttattcagtgttccccrtatgtatgtggagtatgtatttgattttaggacttgcttagagaatcaatttaatttgactaatgatattatttaatgctattgacaaacatatagaaaa

SEQ ID NO: 358765 - DNA, 201 bp, Homo sapiens
atccttagcattgtgttacagttgtctacagtattccgtacagtaccatgctgtacagtctgtggcctggaagcagtagtctatagcataaagccttggtrtgtagtaggctggaccatatgggtttgtgtaagtccactctgtgatgttcacacaacaatgaaaccaactagcaacacgtttctcacgtgtttccattaa

SEQ ID NO: 358766 - DNA, 201 bp, Homo sapiens
tcctacttcgtattggaaataaccatatagccgtcctatgggcaactacatttaagcagatcccaaaccaaaacaattttcttttccatgaatccttcacsaccttttatatttttaatcatgttctagcataactgcctggtcaattacctaagctagaaactttggagtcacctttgacatatcctactgcttcattat

SEQ ID NO: 358767 - DNA, 201 bp, Homo sapiens
tgtgtaactgtgttatagagtgattgcatctaggcattattgccagccaagattgataaatatgcccaataagtataattgttctctgtgtcagcccttgytgaaggaatactcatggcagtggtgatcactgctatcatagctaccattaaattactcattgtgactggttgtactgctttcctcaggttttcttctgcc

SEQ ID NO: 358768 - DNA, 201 bp, Homo sapiens
ccactgccacaacagaaaagtagactctcttgttgattatcaccaaaatcaaacaaaagagccaaatgatgtggcaacacagtgctgatacccatctaagrtaacggttgctgatagcgctgagagcttcacagtcactggccagtgcttttccttagcctttccccgtgttattccattgaacgttacattcttggctaa

SEQ ID NO: 358769 - DNA, 201 bp, Homo sapiens
gtcctatgggcaactacatttaagcagatcccaaaccaaaacaattttcttttccatgaatccttcaccaccttttatatttttaatcatgttctagcatmactgcctggtcaattacctaagctagaaactttggagtcacctttgacatatcctactgcttcattatctataatttgtcaccagtttctgttggctagg

SEQ ID NO: 358770 - DNA, 201 bp, Homo sapiens
agcccgtccctgatgctccagataggaccctctggaatgaccctttgtgtttgttaactgtccctgtccaccccatccccagctccttcaacttccccccrccgccccacctcgctttccccttctcaccactgtgggtaggagtgaaagtgagccgcaccagggagggaaatcgcaaagtgccttttaccttctctctta

SEQ ID NO: 358771 - DNA, 201 bp, Homo sapiens
gcctaagactgataggccatcaaaatatatttcagttttagacaaacagcagttttttctgctagaattctcttctacttggacagtgactccaagattayttacgcagtgttataggcaaataatttatacaaaatgcacctaaaaagacaacatagttttctaccttcatcagtagtttgcatgagtatgataaaatca

SEQ ID NO: 358772 - DNA, 201 bp, Homo sapiens
gaactctggcttttccaggggcaagtctgggtcaccatctgaagtgttgcttctcttctaaaattacagacatctaaactaagcccgtgtcataaatcctyaggtccagaaggacccagaagggctactgagcccgtccctgatgctccagataggaccctctggaatgaccctttgtgtttgttaactgtccctgtccac

SEQ ID NO: 358773 - DNA, 201 bp, Homo sapiens
ataggaatcgttgtgcagcacctctgcctgttctgcaatgcaatcttactaaacaagtatgttcattttttctaactgggtccaatcctgtttacaaaaargtttttgagggtggtatgcctcaattatagtagcagatttattatggtaaatactgagatcagaaagcatgtgtaactgtgttatagagtgattgcatct

SEQ ID NO: 358774 - DNA, 201 bp, Homo sapiens
gttcactttcctagcagaatctacgctatcatctctaaagtggaaagcaagtgacattccattaaggtatatgaggacaatgtgaaaacttgggtcttgakatgtttttgggtaaatgatattaaataattttttattgattgttaatacatggatggagctttcagaaagttcatgcactagaaggtcatgtcttgtcca

SEQ ID NO: 358775 - DNA, 201 bp, Homo sapiens
aatgggaagtgacctggacttgcaatcctgcctgtcagaaaggacagatttagagatgtgaaagaggtcagtgaatatcattttctcctgcctctgaactstggcttttccaggggcaagtctgggtcaccatctgaagtgttgcttctcttctaaaattacagacatctaaactaagcccgtgtcataaatcctcaggtc

SEQ ID NO: 358776 - DNA, 201 bp, Homo sapiens
aagttcatgcactagaaggtcatgtcttgtccaggaagcagtctcctctcacagagtgggccttgcgcagctaggaaaaggtgacagcagtgtccagcctrtgcttctaaacctatctgtgctctttctcaactttactaaggaagattattttatcagttagaaaaaaaatcacggttatgaagatgatttcagaatgtt

SEQ ID NO: 358777 - DNA, 201 bp, Homo sapiens
cataatgtgagaaaatattctcagtatttatgtttgacgaaggtattatataactttgtaaagtcaataataaaacaacccaagaaaaaaattatatgaargatttttacagaatttaaagccaataaacacatggaattttctcaacatctctaatcataaggtaaaaccagggtggtgtatgtaccattatgcacccac

SEQ ID NO: 358778 - DNA, 201 bp, Homo sapiens
tacagattatgttacattgtgagaccttcaacaaatagttaatgttttgtataaaagcaataaagcatccctataacttgaattttaaataaagccgcaawtaaaacttctttgtgcacctaaggcaattgggtagttttcgaaccaatgggaagtgacctggacttgcaatcctgcctgtcagaaaggacagatttagag

SEQ ID NO: 358779 - DNA, 201 bp, Homo sapiens
tgccttcatgtagatacttcaccaatgagaaatgcaaagtatatatctttttttttttttttttaagcagggtctcactctgtcacccaagctggagtacrgtggcacaatatcagctcactgtaacctcaaactcctggcttcaagtgatcctcccacctcggcctcctgagtagctagtgctacaggcatgcaccacct

SEQ ID NO: 358780 - DNA, 201 bp, Homo sapiens
tcaaatttatgcatttcattctatataacataacctaaagtataaaaaaagtatgatctataaatctgcattttgtaaaatacaaagcattttgtttgaartattttgttcttaagatgtcgattacctcagtatcactttaaaggaaatcattaaaagattaatatggaatgatccttaattcaccaagtgagatcttat

SEQ ID NO: 358781 - DNA, 201 bp, Homo sapiens
agagttatctaaaccactcagttcaatttatgttcacttcctgcagttccgtctttggtacagaaaagggacagttgcttccttatagtttgagaaaatcrttgtcaattccaatttttcttcattctaaatataccacattttaaattttttttcttgcatttatctattctttttgttcttgaattacctttctactct

SEQ ID NO: 358782 - DNA, 201 bp, Homo sapiens
ttgtgatggctaattatgtaaggaattgcctaacacaagccattctttgctgtcatatgagatggactgtgtagaatttggtcactggaaggcttttaccrccggcatagaaatgccctcatggctattggaaacctttctcttctcctcaccattttctagagttccttataacactcgagttaacacagacatcatttc

SEQ ID NO: 358783 - DNA, 201 bp, Homo sapiens
atatatgtaattttttaatccataagtgtatactttctatttaaacatattaaatagcttagttctttttaaaataattacttaaatttttcacatgcatygtacttaatagcaaatacaatttaagcacagccctatgtggatatacttggaaatacaagtattttgaacttagcttctaatcatttataattgttatta

SEQ ID NO: 358784 - DNA, 201 bp, Homo sapiens
tgatggctaattatgtaaggaattgcctaacacaagccattctttgctgtcatatgagatggactgtgtagaatttggtcactggaaggcttttaccgccrgcatagaaatgccctcatggctattggaaacctttctcttctcctcaccattttctagagttccttataacactcgagttaacacagacatcatttcccc

SEQ ID NO: 358785 - DNA, 201 bp, Homo sapiens
ttaaacatattaaatagcttagttctttttaaaataattacttaaatttttcacatgcattgtacttaatagcaaatacaatttaagcacagccctatgtrgatatacttggaaatacaagtattttgaacttagcttctaatcatttataattgttattaatttcaagtacccaaggttaaagcaaagctttgcttttct

SEQ ID NO: 358786 - DNA, 201 bp, Homo sapiens
tggctaattatgtaaggaattgcctaacacaagccattctttgctgtcatatgagatggactgtgtagaatttggtcactggaaggcttttaccgccggcrtagaaatgccctcatggctattggaaacctttctcttctcctcaccattttctagagttccttataacactcgagttaacacagacatcatttcccctgt

SEQ ID NO: 358787 - DNA, 201 bp, Homo sapiens
gtaaggaattgcctaacacaagccattctttgctgtcatatgagatggactgtgtagaatttggtcactggaaggcttttaccgccggcatagaaatgccytcatggctattggaaacctttctcttctcctcaccattttctagagttccttataacactcgagttaacacagacatcatttcccctgtaacaaggatgt

SEQ ID NO: 358788 - DNA, 201 bp, Homo sapiens
cgaagtaatgtgagtgagtcttagaaggttctcagaagggaagatttctaatgaaaatgaaaaatgtaaccaaatcacttgacttgcagctactgattctrtcttcaggtaacatgtgtcaagtctgtagggaggttggaccctgtgtgtgtttgtggtctgatagaatcttgatcccaatgacaggatgcattttgtctc

SEQ ID NO: 358789 - DNA, 201 bp, Homo sapiens
ccgccggcatagaaatgccctcatggctattggaaacctttctcttctcctcaccattttctagagttccttataacactcgagttaacacagacatcatytcccctgtaacaaggatgtggactcctccacctgtccttttcaaagatttgggtttgcttcccatgttccctaggtggcaccatctatatctttacagtt

SEQ ID NO: 358790 - DNA, 201 bp, Homo sapiens
ctccagcttggagtggcttttatatcttaactccttattttcttgtttggacaattcatgttcaaaagaaacaagattaagtatgctcttagctgatgtcrttggccttaggactaatgtggttatccaatggacatttgcctccactgctggttgttctttattcaggatggctgatgagttttctccatactattcaaa

SEQ ID NO: 358791 - DNA, 201 bp, Homo sapiens
gggaactgcaattcaagatgggatttgggtggggacacagccaaaccatatcattctgcccctgcccccttccagatctcatatcctcacaattcaaaacrcaatcctctacttccaacagtccctcaaattcttaactaattccagtgttaactcaaaagttcaagtccaaagtctcatctgatacaagtccctcccacc

SEQ ID NO: 358792 - DNA, 201 bp, Homo sapiens
cttgaaattatttttcttattttaagaatgcaagaagatggtttaaaggttttgtcttttaattcccatttcatatattagcctgttggtgttctacattkattgtaataggaaaagtagaaagagcataaatattcaaaattaggtatttaattgatagcttaaagtatggtgagttgcagaactatatataattctttt

SEQ ID NO: 358793 - DNA, 201 bp, Homo sapiens
agtttggatacaatgaatatgcttgttactcctttttttaaaaaagtttttgggtttttaaattgttgttgttcatttttgtaccagtaattttgatgtgrtatgctatgaggtagttttgctacagattataaatcttgaaattatttttcttattttaagaatgcaagaagatggtttaaaggttttgtcttttaattc

SEQ ID NO: 358794 - DNA, 201 bp, Homo sapiens
tgctgtcatgggctgaggagcaacatgagcaaaggcaggaaagcagagctcctgtgattgactttctcccagagccccgagacgggaggagctggcacaarcaattccaattagaagccagtttcacggaaagcagaggttagtgtaaagccggttggctagcatgacagttcaattcaaacaacagtttggatacaatga

SEQ ID NO: 358795 - DNA, 201 bp, Homo sapiens
tagctgaatctgtgtctaatgcttagcaagcgttacgcacatactagatatgcgcttatctagcaatagataaggagaatctatctattctccttatggakaataaacatgggagaataaatgtggtgctgtcatgggctgaggagcaacatgagcaaaggcaggaaagcagagctcctgtgattgactttctcccagagc

SEQ ID NO: 358796 - DNA, 201 bp, Homo sapiens
tcttttttcttagtctatgagcataccaccataaaattgcctattctcatctgatatattctttctgagagtatttggccaggttagggaaatcacttatkccttttgaccaaggatccacagcagtccaaccaaatttatttggattttgataattttatagattaagtcatattatcacgaataatgttagagattatg

SEQ ID NO: 358797 - DNA, 201 bp, Homo sapiens
agtgatcttcctacctcagcctcccaaggtgctgggattacaggtttgagccactgagcccagcctaggcagttctaattatgatgaagtactttctcatktagaaccaagcagcctcccaaaatggccattctccagtatttgttttgacttttatttcgtatccaaaccctttgagtatagggattatgttatgtcttt

SEQ ID NO: 358798 - DNA, 201 bp, Homo sapiens
aactgattgacataaagaacaaaggaaatgcatttgaatttcaaccaaacatattagtagttaggaaacaaaaatataagtgtaatgtttaagaacagccwatacaaccttttttttttttttgagagagagagagagagagtcttgctctatcgcccaggctgaagtgtagtagtgcaatctttgctcactgaaacctcc

SEQ ID NO: 358799 - DNA, 201 bp, Homo sapiens
aattaccaatttatatacttactctgtagacacagtctatgactgacgaatgcaaacctgtgttactcatttgagttcattgctggaacaccaataacacyccaaattcagtcctgttaagaacagtaacaatatacagtcaagactaaaaaccagagaaggtaatgatgataaaaccttcccaaggaagatgaatttgat

SEQ ID NO: 358800 - DNA, 201 bp, Homo sapiens
gaatgttcttttacttgggaaatgcacactgaagtgtctaggaataaaggggcacaccaacttgctcttaaaatattaaaacatatttataaaacgtgtgwgtgtgtgtgagtgtgtgtgtgtgtgcgtgcgcctgtccatgtgtggagagaaagattgatagatacaatttactgatagaatgctaaggcaaataagaaa

SEQ ID NO: 358801 - DNA, 201 bp, Homo sapiens
gaaattatagtatatattataccatactgtttattcaagtctaatgttggtaactaaattagcaaatgaaaaataggtaataactctggtgtttatattartgaaattgttatctcagttaaaataggagatagaacagtttcaactccaaaaatacttctgaaaaggcttttccccccttttctatgattgtatatttat

SEQ ID NO: 358802 - DNA, 201 bp, Homo sapiens
agtcttagaaggttctcagaagggaagatttctaatgaaaatgaaaaatgtaaccaaatcacttgacttgcagctactgattctgtcttcaggtaacatgkgtcaagtctgtagggaggttggaccctgtgtgtgtttgtggtctgatagaatcttgatcccaatgacaggatgcattttgtctcatttcattattttctg

SEQ ID NO: 358803 - DNA, 201 bp, Homo sapiens
ccttttgaaaacatgtggcctggaatttttgtctacatggttcatcggtcctgtgggacatcctggtatgaatgactttaaaatttactttttgaaatatwgggtgacataacctcttcctccttctacatatatgcctcaccacgatctttgtttgtaattatttttaaatactgcatgtataaattactttttttccta

SEQ ID NO: 358804 - DNA, 201 bp, Homo sapiens
ctgaggcaccacagcaaatgtacaagagtaactcaggatatattaaaatgtcatgggaaacacagtggcatatgttggacagaacctgatgtagcttgacrtatgttatatatatacatatatatacatatagcttgacaatgttagcttgacatagttcagttttaatattagatcactacagttctatcgttcaggtct

SEQ ID NO: 358805 - DNA, 201 bp, Homo sapiens
ctgctgtcagttggatttgcctatgcgtctgaggtcagctggccatgagttaggtgctggctggcctcttatgccatcgctttccctgtgtctctcacccscttccagtaaggctatcctggtgtgtttttgtgaggtaacaggagtctgagagaagtagtgggaaacatacaagtgagttttcaagccactgcttacatc

SEQ ID NO: 358806 - DNA, 201 bp, Homo sapiens
ttgaaaacatgtggcctggaatttttgtctacatggttcatcggtcctgtgggacatcctggtatgaatgactttaaaatttactttttgaaatattgggkgacataacctcttcctccttctacatatatgcctcaccacgatctttgtttgtaattatttttaaatactgcatgtataaattactttttttcctaaata

SEQ ID NO: 358807 - DNA, 201 bp, Homo sapiens
atgtagcttgacgtatgttatatatatacatatatatacatatagcttgacaatgttagcttgacatagttcagttttaatattagatcactacagttctrtcgttcaggtcttatctttgtgaagctgtgtttttggtggttgctcaaataaaacgcaagtactacatgaaatcagcgtggaacagaatatgaagatggt

SEQ ID NO: 358808 - DNA, 201 bp, Homo sapiens
agggaaggagagaaggagggcccatgctgtataagttctcatttgaaaatgttctgttgtgtatgtaagctttcaaaagatctgtacattacaagtacagrgttacactatttcatgaagttctaattcatcctgatagcttcttacagacagtagaaattgaagaaatagaattgatgcttttgatattaattcattcaa

SEQ ID NO: 358809 - DNA, 201 bp, Homo sapiens
aatagttttcttttgctcttttttactcatttaggaattaaatgtcttatagagcctcttagtttctctagaactaaattgtcattcttcttgaagcctgygtattttctatctgtgactttttgtaaattagtgtttcaaaaggatgagcataggatacctaactccagttaattctcagaatgcagttgagagtttgac

SEQ ID NO: 358810 - DNA, 201 bp, Homo sapiens
ggctatcatcatttagttttcctttgaaaagtactgcttattattgattacaagtatcatggcaatttctgatagaaataagaatcatcacttaatgatcrtttcactgaatttatgtctttttgtctttttgtttttcaggatgaacgatttccaagaggtactggactggaatcagggactcgtatccagtctgttctt

SEQ ID NO: 358811 - DNA, 201 bp, Homo sapiens
tattttctatctgtgactttttgtaaattagtgtttcaaaaggatgagcataggatacctaactccagttaattctcagaatgcagttgagagtttgaccrgttggaattcttaaaatgccataccttatacttcaaagacatttgaaaattttcagtggagaaaaacacaggttacttttttttttaagtttttatgaat

SEQ ID NO: 358812 - DNA, 201 bp, Homo sapiens
taagaaagcaatttcattgtcttgttttgccattttgccataccttgtgagtttaagaactgtagaaattatactttcaagttgcattgtaatttatattmaaaaaaattgaaaatttaacaataagtgagaaaaactttgttgatacatattgactctcatttaagttcctaattcatttttggaattatatcattacat

SEQ ID NO: 358813 - DNA, 201 bp, Homo sapiens
cctttcacactgccctagcagggttctccatgagggctctggccctgcagcaaacttctgcctggacatccaggcttttccatacattctctgaaatctargtggaggtttccaaacctcaattcttgacttctctgtaccctcaggcccaacaccacatgtaagccaccaaggcttggggcttgcacccagtaaaataac

SEQ ID NO: 358814 - DNA, 201 bp, Homo sapiens
gccattttgccataccttgtgagtttaagaactgtagaaattatactttcaagttgcattgtaatttatattcaaaaaaattgaaaatttaacaataagtragaaaaactttgttgatacatattgactctcatttaagttcctaattcatttttggaattatatcattacattttcccaaaacatcagatcgttttggct

SEQ ID NO: 358815 - DNA, 201 bp, Homo sapiens
tcaggcccaacaccacatgtaagccaccaaggcttggggcttgcacccagtaaaataacagcctgagccatacattggccccttttcgtcaccactggagktgaagcagctggtaaacagggcaccatgtcccaaggctgcatagagcaggggggcccacgaaaccatttctgccccttgggcctctgggcttgtgatggg

SEQ ID NO: 358816 - DNA, 201 bp, Homo sapiens
cctgacctcgtgatccgcccacctcggcctcccaaagtgctgggattacaggcttgagccactgcgcccggccccctgtacttcttttgagtaaatttgcyaagctagaaaattttaaaatcaaagaaccaatttcatttcttatgataagtaattgatcattattagttgattcaaatacttaatatgggcctttgagat

SEQ ID NO: 358817 - DNA, 201 bp, Homo sapiens
aaccatttcagcaaattcagaaaagaccatggtgcgttttaagctatgatatcagataaaagtatccttttaagtattaagatgacaaatatggaagttgytggtagtttttaaaatttttactttcatgtatttcatgcaagaactgcctttcgtaaacacaaattgtaaagataaactaatttcataatttgaaatggc

SEQ ID NO: 358818 - DNA, 201 bp, Homo sapiens
cttctttaaaatgtctttttcttagcttgtgtcctgcataaaagactctagtgtcaaatacatttgaattccattcactattcactcaataggctcattamtactaaaagcaaatattaaaatgatacatttatcacatccagtataaaccagtttccttcagtggcctcactcctgttcacttgcctgaatgaacccatc

SEQ ID NO: 358819 - DNA, 201 bp, Homo sapiens
gcctctttgaggttggaatatctgcacccctgtgatagagcctgtgctctttatctgctccacttgatctgggataattaatacatggcagtcggggagaraggagggaaaaggaaacgaagacgggagagagaaatgccttgtctttataactcttatgggtgttaataatttgcatttggctctacctctaatgtctgg

SEQ ID NO: 358820 - DNA, 201 bp, Homo sapiens
caatgccttattttgggatattacaattttctgttatttctagaaattttaacttaatcagttatatttacttactccctgccttaaatattttgcaatayatgtgtgtccattcacatacatatatatctatatataaaataaatacatatataattaatgcaataaatggcatatgtcctgctgtagtatttgttttcc

SEQ ID NO: 358821 - DNA, 201 bp, Homo sapiens
taaaacgtatggatcaattgctaagaatactttagttgttcatgttgatagttatttcagagaactgtggtgagtcacatactgaaggatttagcacttaygcagatacaaagagagaatgatcattcttttacatattacttacatgtgtgtctaattctctgagctcaactgaaagagtttaggaacttactcactgaa

SEQ ID NO: 358822 - DNA, 201 bp, Homo sapiens
tctgtggactgaaagaattcatactaccttggccacgactcctttctacagctgccgttgcagtaaataggctttcttttctgacttgaaatagagggggyggatgaatttgaattgttttatttttaacaagcagaaaatattttgtcattggctaaacaaagatatttttggagagttacattatagattttaattcag

SEQ ID NO: 358823 - DNA, 201 bp, Homo sapiens
ctttgagtatagggattatgttatgtcttttctagtaaaacatcttagtttctaaactttattttccatatgcctccttaagatgtgggttgacagtcttyggacaaactatatattattaatatatctttaaaacattgcagccttaacactacagactaattgcgtcttgaccctggtaaaatgaggtgggacagatac

SEQ ID NO: 358824 - DNA, 201 bp, Homo sapiens
ggaatgcccttggctaagaggacagtctttcagtcagttggggaatgtactgttttatttttggtttgtagttgtatatggtgggtgagaagagaggaatsagtaatgactcccaacttttttgatctgagcacttgatagaataaaatttctccttactgttatgcagaaaactataggaggaatggggttgattgagat

SEQ ID NO: 358825 - DNA, 201 bp, Homo sapiens
aagatggtggtatccaatttgatttgggaaaaatgtgtagctcccagcttaactctactttggaattttaactcgtctcgaattacgaatgctgcagtgaygcccagtataaacttgttgtagtttctcttaggaaagtcatgaagggactttatgaagttaaaaatgctgtaaaaatacaagttcttaacatctttatta

SEQ ID NO: 358826 - DNA, 201 bp, Homo sapiens
tgtgctaacattctattagatgaaatattagaatttgaagcttaatataaacaagaaaaaattttaaaacctaggtcatagcttatctcagaaatttagtsttggaaagggaaagcattttacagacagtataattcagccttcttattatacaaatgagaaaactaaagcccagagacgtgaaatgaaacctcatgataa

SEQ ID NO: 358827 - DNA, 201 bp, Homo sapiens
tgaaatattctgactttctcttgtggtcatcaagtcagatttttgttcatttaagccacaacttttctgtttagacaaatgaaaaaaaatatgtcaatagyctgcgccgttcagttccagggacactgttatctttgttttgtgttgctataccggaatactacagactaggaaatttataaataaaataaatttatttct

SEQ ID NO: 358828 - DNA, 201 bp, Homo sapiens
actgcttcccctgccctcgaccccactggccaccgtcctgatcctccgagtctcagggcacactcgccttcaagtttatgttgttactgctcccctgccckgcgtgctcttctcccacactgcgcttgccgctctccttaccctgtttcgggtctttgctcacacctggccttttcatgaggtgtgcctgcctagtttatt

SEQ ID NO: 358829 - DNA, 201 bp, Homo sapiens
agcattgttagaatttaacattgaatagattttgctgaaactgacctttctttccttgtgcagatttgctttatctgtacttttttggaacatttgctttwtacctttaagttgatacctcctgcaccttttcctagagttgagagagaaactcaaaaataatttgactatcagattcctaagcagagaaacaaagaaagg

SEQ ID NO: 358830 - DNA, 201 bp, Homo sapiens
cagagttgtggagttggtaactctacattttggagtctctgagatggccttgctcccagggcttctctaggtattggcctactgggggctgtctgtgcggkctccactgctgtaacaagtttgtccgtgggccccaggctgactactacatcctttgaaatctaggtagaggctgctgtggcaccacagctcatgaagcct

SEQ ID NO: 358831 - DNA, 201 bp, Homo sapiens
tcttaaatgatttttctcaaactcatcttatcaaggtagctattacatcatagtgacttgattcctatcacaaacaatgtttaaaaatataatctgggttyggcttaagtatagtgggccctatattttcctctcactgtcagcacctctaagtaggaagagaaatcctcgttaggtcttccaatgatgtgtctaagggaa

SEQ ID NO: 358832 - DNA, 201 bp, Homo sapiens
gggctccactgctgtaacaagtttgtccgtgggccccaggctgactactacatcctttgaaatctaggtagaggctgctgtggcaccacagctcatgaagsctgcaagtttgcagttagtattatgtggataccactatgacttactgtttgtgccctctgaaggtgtggcaggagctgcacttgaactcacttgaaccgt

SEQ ID NO: 358833 - DNA, 201 bp, Homo sapiens
tttggtgctctagataagaaaatatcataagctcctttaaaaaagttataaacaaccgacatttcatgattaagtacttttcatttaaatcattttgtgtyttgtttctatatttggttattaccagtcaagaattttactgacatggcaacatttaggcataaaatcgtgtgtgtgtgtgtgtgtgtgtgtgtgtgtttc

SEQ ID NO: 358834 - DNA, 201 bp, Homo sapiens
gtgtgtccattcacatacatatatatctatatataaaataaatacatatataattaatgcaataaatggcatatgtcctgctgtagtatttgttttccacygaaaacctaggaacaatctcctactggagttgcattgatatttttatgattccatttcctaaattaaattttcctctaagtgatctatgaaacattctaa

SEQ ID NO: 358835 - DNA, 201 bp, Homo sapiens
gcctcctctaaatgccaggatttttttttctcccctcagtttcccaaaggcttctcttagtgcctcttcatttaactgtccacgtgattggtagtgctgcmtgctcagtcctttttaaaacccagcaaaactgacctgtccaggtctcatgtcctcaggcctacgaaggtaaatgatgaccttactctattgtgggtgctc

SEQ ID NO: 358836 - DNA, 201 bp, Homo sapiens
ttgataacatagttgcaatagattctctacttgaacacataatggtaggttgtttttgttctgagtatgattctgtttaacccttaggcccatggtgctartatatggcataacatttaaacttattcatccacaggcactttcaatattatgaaaatgtggtggcttaggaattcaccttgatctgtttgtcacttgcgt

SEQ ID NO: 358837 - DNA, 201 bp, Homo sapiens
ccacgtgattggtagtgctgcatgctcagtcctttttaaaacccagcaaaactgacctgtccaggtctcatgtcctcaggcctacgaaggtaaatgatgamcttactctattgtgggtgctcttcgaattacctgctgggtagaagtgaaaagtgtttcagatatggagctatttgagtcattttcaagccatccccagta

SEQ ID NO: 358838 - DNA, 201 bp, Homo sapiens
cctctgataggattgattttctgctctttgggcaatctcatcgatgctagttgagaggtggagggactagtggtcaccatcacctctggaactctcaagtrctaaagaactgcagcggcctttggtcgagtagatatcctgaaggcagttactttcttctttggaaatgatagaggtggctaatgtttgaaactttaaagt

SEQ ID NO: 358839 - DNA, 201 bp, Homo sapiens
tgttatgaaacaactgaaggaatttgtaaatcagtgagtagctttaagaaaaatataaagttataatgtagactgacactgagcttatgctaggggtacarggagcacttactgctcgttctttgtattattaatattttcttttaaaaacagctttattgaagtgtaatttacatactatacagttcatccatttaaagt

SEQ ID NO: 358840 - DNA, 201 bp, Homo sapiens
ctttttaaaacccagcaaaactgacctgtccaggtctcatgtcctcaggcctacgaaggtaaatgatgaccttactctattgtgggtgctcttcgaattayctgctgggtagaagtgaaaagtgtttcagatatggagctatttgagtcattttcaagccatccccagtaggtagctgatgttgagcttgctcatggttca

SEQ ID NO: 358841 - DNA, 201 bp, Homo sapiens
acagtcacttaagaaatataaatatcactggaattgctaatgtgcacttttgtttcttgtccgtggtttttgcatggaggcagcttgggttctacaatgcygtggccattccctgctatacaacccttacccagatcctccctcccacggagcctcttctgaaagcatgcaggtatgtactatggttcaagccgtaaaaat

SEQ ID NO: 358842 - DNA, 201 bp, Homo sapiens
tttaaaacccagcaaaactgacctgtccaggtctcatgtcctcaggcctacgaaggtaaatgatgaccttactctattgtgggtgctcttcgaattacctkctgggtagaagtgaaaagtgtttcagatatggagctatttgagtcattttcaagccatccccagtaggtagctgatgttgagcttgctcatggttcagtt

SEQ ID NO: 358843 - DNA, 201 bp, Homo sapiens
cacttccttgattactgtggttttgtagtaagttttgaaattaagaagtgtgagttccctaacttttcaagattcttttagctcttctgggtacctaacaratacatttaaattttagaagtagcaggtcaatttctacaaagaaatcaggtggaatgctgataggaattatgttgaatctgtagagcaatttgaagtatt

SEQ ID NO: 358844 - DNA, 201 bp, Homo sapiens
aactggtccctgaaatccaatttaataacaaacatacttactgagcaccttctatttgccaacaactgttttaggcactggggatatagtgataaacagarcaaccacaaatccctgtcctctggaactcaccgtcagagtgaggaaggcctgagtcccctgacttctgcccttatgttgttcttctcattggcccaccac

SEQ ID NO: 358845 - DNA, 201 bp, Homo sapiens
ccggcgctgtagggcgctatagaggcgcgtgcccggcgctgtagggcgctatggaggcgcgtgcccggcgctgtagggcgctatggaggcgcgtgcccggygctgtagggcgctatggaggcgcgtgcccggcgctgtaaggcgctatggaggcgcgtgcccggcgctgtagggcgctatggaggtgccttccttgtggag

SEQ ID NO: 358846 - DNA, 201 bp, Homo sapiens
acaacagatataatttatcaattttaaaacatttccttctattcctaattttctgtgagtttgcatctgatttggtgttgggtattatcaaatttttatawgctatttcaaaatgattggagtagacaattgtattattactcaatgttgaaccactcttacattcctggtataaaggctatttaattgtaatattttctt

SEQ ID NO: 358847 - DNA, 201 bp, Homo sapiens
tggtgtttggggcccgtcgctgtgtagagctcatggtggacatttagcagacaggaaagtcccttgagtctctagtaaatggtaatctggcccctctgacsactacagctcccaagtggcaagcaccatccctacttgacatctcggtttcagccttcatcgtattttgtctgtttttccgccttttcctcctcatccatc

SEQ ID NO: 358848 - DNA, 201 bp, Homo sapiens
tacatagtaactggagttatcaaatggtgagcaaaacccttcacagcctctgtcctcattgaggttctaatctgtggggagacagacatgagccaaatatmaacataactatgaaactagtcagagtcaggcctattaaggagcataacagtgccctgaaagcttgtgatgggatctaacgtagctggggaggctgtggca

SEQ ID NO: 358849 - DNA, 201 bp, Homo sapiens
ccttgagtctctagtaaatggtaatctggcccctctgaccactacagctcccaagtggcaagcaccatccctacttgacatctcggtttcagccttcatcrtattttgtctgtttttccgccttttcctcctcatccatcactgtttctccaagtgtttgtgtcccaaatccgtcctccaagtatatgtctgaatatgttt

SEQ ID NO: 358850 - DNA, 201 bp, Homo sapiens
ctgtcctcattgaggttctaatctgtggggagacagacatgagccaaatatcaacataactatgaaactagtcagagtcaggcctattaaggagcataacmgtgccctgaaagcttgtgatgggatctaacgtagctggggaggctgtggcaagctttcctgatgctgtgactttggtctggtggatgtgtggaagttaca

SEQ ID NO: 358851 - DNA, 201 bp, Homo sapiens
agcaaggggtcaggggcaagaagggagagccagtaaaaggcgagttactggttccagcaggcccccgctcaggaggacagaaggcagccgcaccctcgctrtgcactcccagatgcttcttttggaaatcgagtgggctctcctggccctggcaggggtgctggatgaaagcagcaaggctcagatgtgcgcctgaagtag

SEQ ID NO: 358852 - DNA, 201 bp, Homo sapiens
gtgatcagttcatctaggtcagtgcttctcaataggttgatgctgacatttaggcagagcagttccctctggcacagtgttatcctgggcaccgcagaccygcagcgtctttagcttgtgagaactcgtaaccaacaaacatacctgcactcatttccagacgccctgcggccaggtggctcagctgctggttgggaatca

SEQ ID NO: 358853 - DNA, 201 bp, Homo sapiens
aatagttcattaaatactttttcctgcacagaagaaattgcaggcttgttttaggtcataatactttggaattttcttgaattgcccaccttacatatttrtaatcagttttgatttcaagtatgataggctccacctaggttttcaacataaaaagagacaagaaaatggagagccgtttccagaaatccttcaaatgtt

SEQ ID NO: 358854 - DNA, 201 bp, Homo sapiens
atatataaatatttttatatatttcatgtttcttaaattaatttttcatgatgatgcctgtaatttcttagatatcatttactaacaagtgttacagtttyagtatagttttaatgatttctttgctcctcactttttcttgaaccccgagtcttcccatgtgtccttgaatttatctatttcttcatttttgcttgagcc

SEQ ID NO: 358855 - DNA, 201 bp, Homo sapiens
ttcaaagaccttccaggcaggcgtccattgtgcagctgtggccaggtgctccttctcatcccggaactgtgtttggagcagcaggggagcaggtgggtggygatgccgctgttgactcctgctcgcctgtctttcctcgacatcataagcttgagttctgctgtccatctcagatgactagcagtgccctgcaggaatcac

SEQ ID NO: 358856 - DNA, 201 bp, Homo sapiens
agcctctacgtctggtttgcctttatctgaaacaaagctatcaaggctttatctaattttaattaaaaattctgcaaataatttgaggaattacacttttwtatgttacgatatatctggaattgtttaatactgtcggatgggcatgtgtacttctcaaaaatggttggcttctgtctctcagtaggtcatatttcataa

SEQ ID NO: 358857 - DNA, 201 bp, Homo sapiens
atggtttccctctgtgactggttgtttactctagacttttgtagattgttggtctgtattcttaactctgtgtgtggacttagtcctgtacatgcatcacrgttttcttttgtaatttaatttactctaacttgaagaaaggtgagaatgtgcccatcatgagcaatgatctccttatgggtacattttgagagtgctgtg

SEQ ID NO: 358858 - DNA, 201 bp, Homo sapiens
aaagaaaaaaaatgaggaaattcctttctagccttggagtgaggagaccctttaaatgggactcaaaaaccagaagtaaagaaaagattgataagttaatycacattcaaaaaacacaatgaaacaccttggtattgccccaaatcctgtaagccaggtcttagcatgttcctgttgaggccctggtgcctctcctacctc

SEQ ID NO: 358859 - DNA, 201 bp, Homo sapiens
gatagactactgaatacatgatttgaggatactaggtagtcatctagaaaaaaataaaaatagattattccatgcagagcacctccaggatagattccaartggattacatatgtacatatataggtatatttatgtgtatatttaaatgcaaaaaggaaatcataaaaagaaaaaaaatgaggaaattcctttctagcct

SEQ ID NO: 358860 - DNA, 201 bp, Homo sapiens
ttgatcatcaacacaggatttagaagccagaggaaccagttgacagatacagtgttccagtaaggtaaagtgaaattctgacatcttggattttgaaaatyaaagagcccaataagaatttctcacccagatggaaaaccactcattcttgatgataacttctcacccagatggaaaaccactcattcttcatgaagaaga

SEQ ID NO: 358861 - DNA, 201 bp, Homo sapiens
atgaaaacatttctacacagcaaagtgaaagtgttgcttatgaagggctgacgtgtttgaatatgatgaattatttacaaaaatacaagcgtatttggccytttaaaagttggtaagtactgtgtaagaagcggctttgcataaagagcagtttactctgttggaaaaaaagagactaacaggtaactgcagagttgcagt

SEQ ID NO: 358862 - DNA, 201 bp, Homo sapiens
tggagacggaggtccctctgcgctcctgtggagctctcaggccctgcagctctctggcctttctgctctgtctctctccacttcctcagtgtgattcagcrcatggctggtgcttctgccctgtgtcatggtatcctcctgactgggagtctttcctcttggttgccaccagtgccctggaaccctttttccctgcatctt

SEQ ID NO: 358863 - DNA, 201 bp, Homo sapiens
tgagtagctgtgtccggtggggcagagaactgagacactgagcaggggaagaaggcaagcagaatgccttcatgtgagcagactgttttgtgtggacagtyacatccaagaacgtaggtgagctttgttttcttgcctaaaacttactagcttacaattagtaatggtaattgaatcattattgctggaatattaaatcaa

SEQ ID NO: 358864 - DNA, 201 bp, Homo sapiens
aatgtcaacagcagactagaatattttatatattataatttaacaggttatggtgataattattggtgataaagagagtaaagcatacaaatacaaagcayaaaattgtatcagctgtgattcccttcacatgacctgctgaaagcagatgtgtgcgtgagcaccagccagacatgctgaaacatgttcatgaagtgggaa

SEQ ID NO: 358865 - DNA, 201 bp, Homo sapiens
ttcttttccttcagcccacatgagaagtgtggtctacagtctttatgtctccaacaggttgtgtgtagtccttgttccaagacatgtagaaacaggtgttkgttcagtttttttttatggcaatcagaagatcagggaaatagagccttcatgaaatatcccttggtttcctgaaacccatacactttcttttttttcttc

SEQ ID NO: 358866 - DNA, 201 bp, Homo sapiens
cacaaactttttggtttcccagtgcatataaaagttgtatttacaccatgtgttctactaagtatgcaataacatcatgcctaaaaaatacacaccttaawttaaaaatgctttgttgcttaaaaatgctaatgatcatctaagacttcagcaaatcataatctttttactggtgaagggtcttgcctcagtattggtggc

SEQ ID NO: 358867 - DNA, 201 bp, Homo sapiens
aactcagccttgttctgagcatttggaatactgtgggaaaagagaagtggtttctgctgtttctgtagctcacaggctaagggaggtgagaagtaacctasaggtcctgatactaggcagtatactcagtccctgcgtagtgggcacagccagtatttgtttggtgtatagtagcagtgagtacaaacatgtaatagtgta

SEQ ID NO: 358868 - DNA, 201 bp, Homo sapiens
ttatatttgtatattacataatgggcaacaagctccattatctttctggatgctcttgtctttctctgaaggtaattaacttttatcctagtggccagttrcatttctcatcaatcatcctaaatatatgagtatgttcctttaagctttagttgggtggttccatttctgttttggccttggtgtactctgtcagggatt

SEQ ID NO: 358869 - DNA, 201 bp, Homo sapiens
cgagattatcaagcagtttttgttatttattctattagtaaggtgcattagattaattgatatttagatgttaaaccaaccttgcattcctatgatagatrtcaggtaataatggtgtatagttgttctatatattgctggatttggcttgatgatatttcgttgaggacattagtgcctgtattcataaattatactggt

SEQ ID NO: 358870 - DNA, 201 bp, Homo sapiens
taatgcaaatatgaaagccatgtatctccttagaggttatatttcatagcttttacacctgctgcatcacagacttcaactaatcagaatgagtggtggtygtagtgctgacagaggctcagatctaggcaccagggaaggcctgagaggttctggaagagggccttggatggcagaagggcactgggaagttaggccagc

SEQ ID NO: 358871 - DNA, 201 bp, Homo sapiens
ttttaggcctgtttattgatttctgtactgcttatcttgtatcttgaaaccttgatgaacgcatttattacttctaatgcttaggcatctctgtacacacrtaagattatgtcatcttcaaatagagatagttatacaattctcttttaatctgtttgccttttctttctatttgataaatgtctggcttgtgctgaattt

SEQ ID NO: 358872 - DNA, 201 bp, Homo sapiens
gtttacctgcaagttctttgaatgtctcattgtcttcctcttattttgtcatttgtctttagatatatgcaaaaaacctggtgaatgccgatcgttgtgcrcttttccaggtggaccataagaacaaggagttatattcagacctttttgatattggagaggaaaaggaaggaaaacctgtcttcaagaagaccaaagaga

SEQ ID NO: 358873 - DNA, 201 bp, Homo sapiens
ttaaacaatggaatactgtactattcagcaatttttaaagttatgaactctgaatcatgagacaacatggttgaatcacacaaatgttagtttgagcaaartggttacatactactatatgatactattgtaatgcagttctacaacaggcaaaacaataatgttagtgattgtgctggaatttaaactggcagttgctgg

SEQ ID NO: 358874 - DNA, 201 bp, Homo sapiens
gccgttgtcacttaaatgaacagaatggagtttattttgttgatggaggcatgggggcttgctcatatcgcacctggaaacctacacaaggagcactctgrcaaaacgtttaagaatcgagcttaacattcagaagctgagaaaataattttagacatttgcatttcttttgctgtatgtgtctcgtttaactcatcttct

SEQ ID NO: 358875 - DNA, 201 bp, Homo sapiens
agtagtcattccgtttctaaagtgggtttgtttttttctgtcctataaaatgcacgtaagtctttgtttatgtgctacgtttggacatatttgagggagtrtttccttctatttattggtcgcattaatatcatacatatgtcactttaaccatcaacccagatagcctaagggagaaaacatttttgtggccaaaacctg

SEQ ID NO: 358876 - DNA, 201 bp, Homo sapiens
tctgcattttgtaaaatacaaagcattttgtttgaaatattttgttcttaagatgtcgattacctcagtatcactttaaaggaaatcattaaaagattaayatggaatgatccttaattcaccaagtgagatcttatctcactgtgaggtgattaggaattgataagctcatggaagcaatccacagaattctacattata

SEQ ID NO: 358877 - DNA, 201 bp, Homo sapiens
tcgcacctggaaacctacacaaggagcactctggcaaaacgtttaagaatcgagcttaacattcagaagctgagaaaataattttagacatttgcatttcwtttgctgtatgtgtctcgtttaactcatcttctgtataacaccgtaaagttctctggtaataacaccattctggcaaaacactgtgtcttcttaattaag

SEQ ID NO: 358878 - DNA, 201 bp, Homo sapiens
tgcctccactgctggttgttctttattcaggatggctgatgagttttctccatactattcaaaaaggatacttctccaaaattatttttttctctgttaarttacggtcttaagtcagaaatacacttccagactgcttttcttcactatacaatttacctttccttatcaatgtggcatcatgcctttactaccaattca

SEQ ID NO: 358879 - DNA, 201 bp, Homo sapiens
cctcccaaagtgctgggattacagggtgagccaccacacctggccaaataatagtgttttataacctctgaaattctatggcttcctccgtgtccccaaayaggcaatttcttgattatcatcaagtatttggtcaattgaatactggattatggaatgtgatacattaaaaaaacctgaacacatgcaaaaaagtataga

SEQ ID NO: 358880 - DNA, 201 bp, Homo sapiens
aagaatcgagcttaacattcagaagctgagaaaataattttagacatttgcatttcttttgctgtatgtgtctcgtttaactcatcttctgtataacaccrtaaagttctctggtaataacaccattctggcaaaacactgtgtcttcttaattaaggattgctgtttatttgggcgttctatcataaaaggagactgatg

SEQ ID NO: 358881 - DNA, 201 bp, Homo sapiens
caacttggtgcttaatggttgcacacggcagaagtgggagcagggcagcgtcccaggctggcctccagttttgggtgtgggcaggtgggtgaatgatgcgygactgtcagcgagaaggggaatggagaaggaaggaagggctggtttcgggagggagatgttcagttttgagtcaatagattttgaagtatttgttggaca

SEQ ID NO: 358882 - DNA, 201 bp, Homo sapiens
gaagaaggcagagccatggagcaccctggagaggtgtgacccggcaagatcctgagatggaaggtagcacggcctggagttcagaagcggagcctcaagasggaagaagccagatgctccagagagcaggtgagttccagcagccaggaggtcgtccgtggcctcggtcgggagattgcggtggagtggcatggataatac

SEQ ID NO: 358883 - DNA, 201 bp, Homo sapiens
aaataattttagacatttgcatttcttttgctgtatgtgtctcgtttaactcatcttctgtataacaccgtaaagttctctggtaataacaccattctggyaaaacactgtgtcttcttaattaaggattgctgtttatttgggcgttctatcataaaaggagactgatgtcagggaaactcaaggtgtgcctcaccgtgg

SEQ ID NO: 358884 - DNA, 201 bp, Homo sapiens
gaggataggacagaagaaggcagagccatggagcaccctggagaggtgtgacccggcaagatcctgagatggaaggtagcacggcctggagttcagaagckgagcctcaagagggaagaagccagatgctccagagagcaggtgagttccagcagccaggaggtcgtccgtggcctcggtcgggagattgcggtggagtgg

SEQ ID NO: 358885 - DNA, 201 bp, Homo sapiens
gtaataacaccattctggcaaaacactgtgtcttcttaattaaggattgctgtttatttgggcgttctatcataaaaggagactgatgtcagggaaactcraggtgtgcctcaccgtggggccccaccactgtctgcccctcagcgcttcctgtgtattccatgtccattaactctgatttataggcactatattggtact

SEQ ID NO: 358886 - DNA, 201 bp, Homo sapiens
ctgggaaggaccttctgaggccaagggaaagggatcttctgaggttgcagggtggaaaacagcctggacaggtggtaggttggggacccgggtgataagamaggagagaggattacttaggctaagctaaggatactttacaatgacccctcagacgagtgtatagaaacagctatggaagacaggtagaaagaatcccct

SEQ ID NO: 358887 - DNA, 201 bp, Homo sapiens
  misc_feature (1)...(201): n = A,T,C or G
aaaataaatctaaacagaacaaaacatggtgcctgtcttcaagaaacctagaaatcgatgagcactctttgaaagcttcctttgtatgagcctctgttctntggactcaggattccaaggtgtatgagacaaaatcagttatttcgaggagcacacagatcacagaagagatggacaagagttcacagacacgctcaccca

SEQ ID NO: 358888 - DNA, 201 bp, Homo sapiens
ccaatagggaaaaaactcagtgcaacagtcagtcaagcaaatattaggattttgtttactatacggcaggttaaacatagtgcggtgcacatttcaccaaygaatacattgttaatttttgtttgtttcgaaatagctgatgcaatctgagagaaaaaataattttcatgtaaaacgaatattttcccttaaaaggaaaac

SEQ ID NO: 358889 - DNA, 201 bp, Homo sapiens
cctctttgtctttcttaactgctgttgctttaaagtttgtcctgtctgatgtaaaaatagctactcctgccacttgcttttagtgtccatttgcacataayatctttttccacccctttactctaagtttatgtgagtccttatgagtcaggtgagtctcttgaagagagcagatacttggtttgtgaatttattttgtaa

SEQ ID NO: 358890 - DNA, 201 bp, Homo sapiens
ctcagggagactgaggttgtagaagaatgcgagaacaacactcagcagtggaaatgggtctaaatcagccaacagctaactcacagatacttgttgagtayctactgagtgtaaattgtttgagggagattaaaataatgataacaggtaccccaaaggacttgaaatatagctatggacacctacaaaaatgaccagcaa

SEQ ID NO: 358891 - DNA, 201 bp, Homo sapiens
tgccacttgcttttagtgtccatttgcacataatatctttttccacccctttactctaagtttatgtgagtccttatgagtcaggtgagtctcttgaagaragcagatacttggtttgtgaatttattttgtaattttttggagactgggtcttgctctgtgccccaggctggagttcagtggtgtgatcttggctcactg

SEQ ID NO: 358892 - DNA, 201 bp, Homo sapiens
atatgatctcttttaagagcaaatgtgtttaacacgtacaaactacactagactcgccattaacttctgtttgtgggctcagggagactgaggttgtagamgaatgcgagaacaacactcagcagtggaaatgggtctaaatcagccaacagctaactcacagatacttgttgagtatctactgagtgtaaattgtttgag

SEQ ID NO: 358893 - DNA, 201 bp, Homo sapiens
gtgtcattccttttttttttctttcagtttgatcttctgttggtctgatatgcaagttgtcacgtaaaggctgttttgtccagttactgtttgtatgaatrctggttttatttttattaccatcgaaagcaaatcatgtgtagagggtatgatatgccagctccgcttctgtccattttagctctgcgttttggctcttca

SEQ ID NO: 358894 - DNA, 201 bp, Homo sapiens
tttatcccatggggtgctcccttgatgtgattttcttccccttcccctaggaatggggcttcctgagagtcgaactgcaacaattattatttatcttctgratgtaaccacacagcagaactaccaggttccaacttgtctctggggagtgtctgcagagagtcccatgatgtgatccatctttaggtctttcagctgtgg

SEQ ID NO: 358895 - DNA, 201 bp, Homo sapiens
ccatggggtgctcccttgatgtgattttcttccccttcccctaggaatggggcttcctgagagtcgaactgcaacaattattatttatcttctgaatgtarccacacagcagaactaccaggttccaacttgtctctggggagtgtctgcagagagtcccatgatgtgatccatctttaggtctttcagctgtggatacca

SEQ ID NO: 358896 - DNA, 201 bp, Homo sapiens
gggcatgtctgatctcagactccccttgggcaggggttgctgtgactgctgtgcgggatgggagtgtggttcctagaccaatggagttacgttcccagggrgcctctgctgtgacatataggtcaccagaaaagtggggtaaagccggcagccacaggcctcacccagctcccgtggagcctgcagctcacacccaccatg

SEQ ID NO: 358897 - DNA, 201 bp, Homo sapiens
tgaattgctaaagtactgaagtttgacagatttttctgatatgtatcgtttaaaaaatcagtcttttgaaaaagaatttctagattctttaaaaattttaraatggccaaatgcatacaaatgtgtctaattgttgagtgtcattccttttttttttctttcagtttgatcttctgttggtctgatatgcaagttgtcacg

SEQ ID NO: 358898 - DNA, 201 bp, Homo sapiens
acacctgaagtgtgtcacttatgtccaggctactctgtaatctcattttagtcgctgtcactgcagaaaaccctgcttcacaaagacaggttgttggacayggaagcaggcttttcagtgcttttgtggcaacctcaggatattctacctggactttcatccagaacatatggagatttgaagttgtctcaaacatatttt

SEQ ID NO: 358899 - DNA, 201 bp, Homo sapiens
tatagcaatttgaaatttgagaaagcatgattttctccccattcatcttagggtgatgaaatgaagaaattgggaatacagcctattcctatgatggacaragacaagaaggatgaagtcccccaaggccaggtatgaattattaaagtaaattgtaattgctaaagccaaatagtttaaggtgggcataaaatcatacat

SEQ ID NO: 358900 - DNA, 201 bp, Homo sapiens
aaaaattagtcaggcatggtggcgggcgcctgcagtcccagctactcaggaggctgaggcaggagtattgcttgaacccggaaggcagaggttgcagtgarctgagatcacgccattgcactccagcctgggcaacaagagtgaaaatccatctcaaaaaaaaaaaaaaaggatgctgtcagtgtagacacatttgatgaa

SEQ ID NO: 358901 - DNA, 201 bp, Homo sapiens
taattttttgtatttttagtagagacggggcttcactgtgttagccgggatggtctcgatctgacctcgtgatccatccgcctcggcctctcaaagtgctrggattacaggcgtgagccaccgcgtccagccaggcttgtcttttaatgcagggtgcttggtctccgtgtggtaatgcagttttgaaggtttcatggcttc

SEQ ID NO: 358902 - DNA, 201 bp, Homo sapiens
gccaccgcgtccagccaggcttgtcttttaatgcagggtgcttggtctccgtgtggtaatgcagttttgaaggtttcatggcttccttggatagctggtcrccacatatacacagtggacttgaagaatgtgcatcacctgttgcaatgaacccataatttaagtaggacttgttattttctattaaatgcagctttcttt

SEQ ID NO: 358903 - DNA, 201 bp, Homo sapiens
gtccagccaggcttgtcttttaatgcagggtgcttggtctccgtgtggtaatgcagttttgaaggtttcatggcttccttggatagctggtcaccacatayacacagtggacttgaagaatgtgcatcacctgttgcaatgaacccataatttaagtaggacttgttattttctattaaatgcagctttcttttcattggc

SEQ ID NO: 358904 - DNA, 201 bp, Homo sapiens
cagtaaaaataaataacacaggcaccgtgctcagtggtaatgagtgctgtggagacagaaaagcgagaggcagggtaaatgatgtgggaccaggcaagcttggctcactgggaacacatttgaggaaaaacctaagggaagtgaaggagtgaaccatgctgagaaccgggtaggagctttccatgcagatggtacaggaag

SEQ ID NO: 358905 - DNA, 201 bp, Homo sapiens
tctattaaatatgagctttcttggctgtttggccacagtgttttcctttgcttcaaaatacaggcttgatgagatttctttacatggcaggtgttctacattttttttctctccacttaattgtcagctgtaaccttgcctccatcactcttaattatagtggcctctatatttttgagaagacggaggttatgtgatata

SEQ ID NO: 358906 - DNA, 201 bp, Homo sapiens
tatgggataaatgacagcatgtttatatatttgtggaagtgattcagtagagagagaaagtttgatgcaatgggacagagaggggaggatggcctaaacagagtctttaagggcttagagaggccctgtcagcctcccaggtcctccctattgcagctttacctgttccttcacaactaattaccatttactcactttcca

SEQ ID NO: 358907 - DNA, 201 bp, Homo sapiens
aacctcccagtgtgggctttatggccatgaacatgtcacagtgctgctgcagagattttgtttatggccagttttggggccagtttatggccagatttttggggggggcttattcccaacatgtcccccttctttgatttgcaaatcgataaaagcaaaggcagctttgtgacggtcagctacttctcgcaggagtcagga

SEQ ID NO: 358908 - DNA, 201 bp, Homo sapiens
taggtcacagagcagcctggcaatgaggattagcattgtcaaaagctaataactgcagtactatatcctgagcagccaaatctgcaatcattatctatattatatatatatatatatctatcattatctatctatctgtctgtctgtctgtctgtctgtctgtctatctatctatctatctatctatctatctatctaatg

SEQ ID NO: 358909 - DNA, 201 bp, Homo sapiens
ttatatttgggtgttttcttattgttgaattttgagggttctttgtatatttgtggtaacagtctttgatcagatatgccttttgccaatgttttctctcrgtctgtggcttgcctttttactcttttgacagtatcttttgcagggcatacatttttaatttttaatgaagtctagcttattctttcatgaatcatgcct

SEQ ID NO: 358910 - DNA, 201 bp, Homo sapiens
aggtcacagagcagcctggcaatgaggattagcattgtcaaaagctaataactgcagtactatatcctgagcagccaaatctgcaatcattatctatattatatatatatatatatctatcattatctatctatctgtctgtctgtctgtctgtctgtctgtctatctatctatctatctatctatctatctatctaatgc

SEQ ID NO: 358911 - DNA, 201 bp, Homo sapiens
atgaggattagcattgtcaaaagctaataactgcagtactatatcctgagcagccaaatctgcaatcattatctatattatatatatatatatatctatcattatctatctatctgtctgtctgtctgtctgtctgtctgtctatctatctatctatctatctatctatctatctaatgcattagaagcattgacagcagt

SEQ ID NO: 358912 - DNA, 201 bp, Homo sapiens
tgaggattagcattgtcaaaagctaataactgcagtactatatcctgagcagccaaatctgcaatcattatctatattatatatatatatatatctatcattatctatctatctgtctgtctgtctgtctgtctgtctgtctatctatctatctatctatctatctatctatctaatgcattagaagcattgacagcagtg

SEQ ID NO: 358913 - DNA, 201 bp, Homo sapiens
ccattctggcaaaacactgtgtcttcttaattaaggattgctgtttatttgggcgttctatcataaaaggagactgatgtcagggaaactcaaggtgtgcstcaccgtggggccccaccactgtctgcccctcagcgcttcctgtgtattccatgtccattaactctgatttataggcactatattggtacttgggtttta

SEQ ID NO: 358914 - DNA, 201 bp, Homo sapiens
gttactttattttaaagtaaaataattaaaatgaggctagatgacagcttctaaacaaaacatccactgtacatcccccacctttgctttttagttaaccrcttgataacacttaaccactctcacagtaataattaagactacctcataacagaattctggtctttgcttatacatcagtatacttttgaatacagaaat

SEQ ID NO: 358915 - DNA, 201 bp, Homo sapiens
gaggattagcattgtcaaaagctaataactgcagtactatatcctgagcagccaaatctgcaatcattatctatattatatatatatatatatctatcattatctatctatctgtctgtctgtctgtctgtctgtctgtctatctatctatctatctatctatctatctatctaatgcattagaagcattgacagcagtgt

SEQ ID NO: 358916 - DNA, 201 bp, Homo sapiens
tggcaaaacactgtgtcttcttaattaaggattgctgtttatttgggcgttctatcataaaaggagactgatgtcagggaaactcaaggtgtgcctcaccrtggggccccaccactgtctgcccctcagcgcttcctgtgtattccatgtccattaactctgatttataggcactatattggtacttgggttttaaaattt

SEQ ID NO: 358917 - DNA, 201 bp, Homo sapiens
gaaaagaaatatctgctaatgagaagcacagtgtttggaggctgcatccagctcacacacttgcacggggagagtgaggaaccaggttgcacagctacctyctcctctggccttgccacaaattcctgtccctttagaaaagtcatttcatttctgtgcacctcagactttgctaatataaaatgaaaggattgggataga

SEQ ID NO: 358918 - DNA, 201 bp, Homo sapiens
gattagcattgtcaaaagctaataactgcagtactatatcctgagcagccaaatctgcaatcattatctatattatatatatatatatatctatcattatctatctatctgtctgtctgtctgtctgtctgtctgtctatctatctatctatctatctatctatctatctaatgcattagaagcattgacagcagtgtgat

SEQ ID NO: 358919 - DNA, 201 bp, Homo sapiens
aggattgctgtttatttgggcgttctatcataaaaggagactgatgtcagggaaactcaaggtgtgcctcaccgtggggccccaccactgtctgcccctcrgcgcttcctgtgtattccatgtccattaactctgatttataggcactatattggtacttgggttttaaaatttttttgtctgtttgttgttggttttttt

SEQ ID NO: 358920 - DNA, 201 bp, Homo sapiens
ctaatgagaagcacagtgtttggaggctgcatccagctcacacacttgcacggggagagtgaggaaccaggttgcacagctacctcctcctctggccttgmcacaaattcctgtccctttagaaaagtcatttcatttctgtgcacctcagactttgctaatataaaatgaaaggattgggatagattttctcttaagacg

SEQ ID NO: 358921 - DNA, 201 bp, Homo sapiens
gcccccaaggcactctaaataatatttgccaatattagctgagtggccagtgcccgctctgactgtgggttatcatgggtgaggcaccacctctgcctctttgagagccagcattgctggggaagcatttgccagattactgaagtgtaacttttaaagcacctgtttttagtgatttcagttagttcagacatcaacctt

SEQ ID NO: 358922 - DNA, 201 bp, Homo sapiens
aaatataagtatgaaaatatttttgcaaaggaaaaatactgatattagatataaaaaacagacaatccttgtattttgattattttaaaatttaacaaatkaggtaaaaatactagaagttgtacattgcgttatttctgtatagtgcttgaattgcaaacaccataaaattcagttctgtataatatctcaagctcacgt

SEQ ID NO: 358923 - DNA, 201 bp, Homo sapiens
aagcctgatccatagccataaaagtgtaccaggggatttagatggcagcctagtcagagcctacattatatttgatttcttcagtagcattgaggcaacargaacatatgatgcactcctcacgggacttgtgatagaagtgactcttgttcttatgatgaaaatgacactaatttttaattccattttactgtcctggct

SEQ ID NO: 358924 - DNA, 201 bp, Homo sapiens
aggaggatactagttgattgtttgatctcagtttgtgagttaatattttaaggttctcaggtgattactgtgtaatggttttctgctttatttttacgtayttcataaggtgatttagaatatgtaaacgtaaaagtaatacacgcatttaagtaaaacagtgcttttaattcaatattattaacaatggaatatttttga

SEQ ID NO: 358925 - DNA, 201 bp, Homo sapiens
aaaagaaaaggaaattcatgaagccatcactgcagctatgacaacaggagcaaaaaccttgcactgtttgtgaaatatctttttatctcatactaaaaatrcacgttttgttcaggtacaggattgctatgagaaaggcataactatagactgtaatatgatttctatattctagacaaatgtagaaaatgtgcagtcatt

SEQ ID NO: 358926 - DNA, 201 bp, Homo sapiens
agctcagccttgtggggtgatggcagaatcagacaatatgtgaatgaatgatgtggctgtgttccaatacaactttacttataaacaggagagggctgatytggcccctgggtgcggtttgctgaccactgctctaagtttttaaagtggaaacactataagttggtttagcaagttatatctctcataaacacgatcaac

SEQ ID NO: 358927 - DNA, 201 bp, Homo sapiens
cggcgctgtagggcgctatagaggcgcgtgcccggcgctgtagggcgctatggaggcgcgtgcccggcgctgtagggcgctatggaggcgcgtgcccggcrctgtagggcgctatggaggcgcgtgcccggcgctgtaaggcgctatggaggcgcgtgcccggcgctgtagggcgctatggaggtgccttccttgtggagc

SEQ ID NO: 358928 - DNA, 201 bp, Homo sapiens
tttataagataatacatgggtatgtctaaaacatgtataataagtgttaaaattcattttggattgtggtggtattatgtattatcacatatgtgatcaartcaactattataacattttgatagatgtcaaaaaataaaaaaaaaattgaaaacttttttcttagatacctatggcttaaaacagcaatagttaatataa

SEQ ID NO: 358929 - DNA, 201 bp, Homo sapiens
gcgcgtgcccggcgctgtagggcgctatggaggcgcgtgcccggcgctgtagggcgctatggaggcgcgtgcccggcgctgtagggcgctatggaggcgcrtgcccggcgctgtaaggcgctatggaggcgcgtgcccggcgctgtagggcgctatggaggtgccttccttgtggagctctgagaacacggtgtccactgt

SEQ ID NO: 358930 - DNA, 201 bp, Homo sapiens
aataaagttccctgtatacctttatccatattccccaaatgttaatatatttgccatttttgctttgatatactttctctgtctctctctttctctgttamatagatactatctttctccaatctatatgagagtatgtttcagatgtaatgtctcataactcctaaatgattcagtttgtattttctctaaaaacaagga

SEQ ID NO: 358931 - DNA, 201 bp, Homo sapiens
ctgcagattccctggtatgctttgtagcctctctaagtgcaaggctggtgggaaattgctcaggttcgacatgtctcaagatattttactcagatacttaygagaagcatctctttggccatttctacccccccatcatcaccttctcatgcacagtgcagatactgcctggccagggtgggggtgggagagagacacaaa

SEQ ID NO: 358932 - DNA, 201 bp, Homo sapiens
catcagggaactttcaagaaaggccccctcgccccacaccttgccctgagcagtagctttggccttgaacaggagcaaaaggttagaacagtcttatttgrgacatgactgaggtagtaaacaagaagatacttttaaacaaaattatcagacccacttcactcaagcttgggaaggggatagattattaaaagagagtag

SEQ ID NO: 358933 - DNA, 201 bp, Homo sapiens
aatagtgagcaaaacatatttgagagtctagtgaaaccagccttatttgagtgaaaagagtcttatatattgtagattccagctggataaatagagtcaamccagattagagcaaaggaatttattattttgtaagaatgagagttttctacaagattttattttaaataacaatgtattaatttaatgatgtaaaagtaa

SEQ ID NO: 358934 - DNA, 201 bp, Homo sapiens
gccctatctctaaatacagctgcattctaaggtactggggcttaggctttaatacatgaattttaagggggccacaatctaacccatcacaagtactgtgytgttatctcatctgcagacctcttgagtctcctttcatctggaactattccttagtgttgtctctcatgacctgggtatttttaaagcgtatacacctgt

SEQ ID NO: 358935 - DNA, 201 bp, Homo sapiens
ctcttccatgatccttgccaccaggtgaagcagtggcctgccttcctcttcctctgcctttggccaccccacagtgcacccatccatttacttattgatcrttttctctcttcccttagccttcagtggctctgcacaatgtttcaccatttcctcggctgtttctaaagaagggaacagctaggttttccacagtgacct

SEQ ID NO: 358936 - DNA, 201 bp, Homo sapiens
gtgtcagattctcatttggggtgggaagtgttgatttgacagagatgaaagcctttggctggggaggggtgtgtgaggtgcggtgtggcgaggattccccsgtcggactgtgatgtcagtggccccggagggaacagcttgcactcagccttgagcagttggaatctgttgggagggcagttggccaatcctaggcctgag

SEQ ID NO: 358937 - DNA, 201 bp, Homo sapiens
taatcccagcgcttttggaggctgaggcgggcggatcacgaggtcaggagttcaagaccagcctgaccaacatggtgaaaccccatctctactaaaaaaawaaaaaataaaaaaaaattagcctagcatggtggtaggcacctgcaatccctgctactcaggaggctgaggcaggagaatcgcttgaacctgggaggcaga

SEQ ID NO: 358938 - DNA, 201 bp, Homo sapiens
aaaggcagctgtcttcttgccgtgtcctcacagggtggaagtgtcctgtccctaatcccattcatgagggctctattctcctgacctaatcactcccctgragctcccacctcctgattgcatcacagtgggggttaagatttcagcgtaggaattttagggggagacagagatacagtctatagctctgggtaaaaggta

SEQ ID NO: 358939 - DNA, 201 bp, Homo sapiens
agatcattgtagagttattaattggtttgtctaatttcaacattgttttgtctcaggattagggaggttcaaggagaggaggggagatgggagaatagttrcagatgattaaatatcactgactgtagatcaccttaacaggtacaataataatgaaaaagttttgaaatacagtgagaattacaaaatgtgacatagaga

SEQ ID NO: 358940 - DNA, 201 bp, Homo sapiens
ctcctaatatatgtatatgtaagtagacaaatacatgcagaatgacaattatcagcttacacatacctatgtgtgtgtttgtgtgtgtatgtgtgtgtatrtatatgccgagaccagctcggttggggagaccctaacccagcagcgctagaggaattaaagacacacacaaagaaatatggaggtgtgaagtgggaaatc

SEQ ID NO: 358941 - DNA, 201 bp, Homo sapiens
agatttacccacatatttattaacagcaagccagtcattagcattgtttctatagatattaaattaactaaaagtatcccttatgggaaacgaagggatgracctaattaaaggaataggttgggctaattttctgcagcaggagcatgtccttaaggcacagatcactcatgctattgtttgtggcttaagaatgccttt

SEQ ID NO: 358942 - DNA, 201 bp, Homo sapiens
atcagctgaacgtagtgtggctgtggctcgcagactgagaggtgcaattcaagctaaacatccccttaggggaccaattagtaatgattccataggaatcrttgtgcagcacctctgcctgttctgcaatgcaatcttactaaacaagtatgttcattttttctaactgggtccaatcctgtttacaaaaaggtttttgag

SEQ ID NO: 358943 - DNA, 201 bp, Homo sapiens
acaagcataacctttaccccaagttattttacctatttcccaacgttttgttattggatctctccaccaaatcggttgttctgcttctgtctttgcatctrgtttctgtagatactgttcaggtgctgataacatctggcctttggacaggctcaaaaaatttaaagttaataatgctagattcaattgcatctgtggggt

SEQ ID NO: 358944 - DNA, 201 bp, Homo sapiens
gtcacacatccgggtggctggttggataaggcaggagacatttgactccttagtttctggattggaaaggtgtgtgtgtgtgtgtgtgtgtgtgtgtgtgwgagagagagagagagagagagagttggggttggaatgggagtagttccatgcccagagaaaagagatatcagaatgggaagtatgagaattgagccccta

SEQ ID NO: 358945 - DNA, 201 bp, Homo sapiens
ccctaggccttgagtatccttgcccttatgatttttgctggggccagcccacacttcagctctcacaggttggtgtctcatgcctgagcttctccagagtwgtggagttggtaactctacattttggagtctctgagatggccttgctcccagggcttctctaggtattggcctactgggggctgtctgtgcgggctccac

SEQ ID NO: 358946 - DNA, 201 bp, Homo sapiens
agccccacttcctggtaccagttttctgttttagtccattttgtgctgctgtaatagagtatctgagactaggtaatttataaagaacagaaatttatttyttacaattttggaggctgggaggtcctgggatgaggggccttcatttggtgagggccttactgctgtgtcatcccatggcagaaaggagaagagcaagag

SEQ ID NO: 358947 - DNA, 201 bp, Homo sapiens
ggagtcaaaggagattattttggggccttaatatttaatgactgtcctactgggttctggacttgtacagggcctgtaccccatttgtttgggccagtttyttccttttggaatgggagcatttacccaatgcctgtaccccaaacaagtaactaacttgtttgtgattttagaggctcacaggtggaagggccttgcatt

SEQ ID NO: 358948 - DNA, 201 bp, Homo sapiens
tatatcctgagcagccaaatctgcaatcattatctatattatatatatatatatatctatcattatctatctatctgtctgtctgtctgtctgtctgtctrtctatctatctatctatctatctatctatctatctaatgcattagaagcattgacagcagtgtgatatagcttcaactcttggattttaaatgccatttt

SEQ ID NO: 358949 - DNA, 201 bp, Homo sapiens
tcctgagcagccaaatctgcaatcattatctatattatatatatatatatatctatcattatctatctatctgtctgtctgtctgtctgtctgtctgtctrtctatctatctatctatctatctatctatctaatgcattagaagcattgacagcagtgtgatatagcttcaactcttggattttaaatgccattttctac

SEQ ID NO: 358950 - DNA, 201 bp, Homo sapiens
tcccccagtaatggtattaacctatttatgaagacggggccatcatgacctaatcatctcttaaggtcccacctctccgtactgttgcgttggggatcaartttttaacgcaaactttgggaggtacatttaaaccatagcactccacccctggccaccaaaattcatgtccttttaacatgtagtgtacacatttcagtg

SEQ ID NO: 358951 - DNA, 201 bp, Homo sapiens
agccttttgtatttataaattacgtagcctcaggtattcctttgtagcagcaaacatggactaaacaccaatgccctcactcactgcagctgaaaaccacmgggctaaagtgatgggacccaagggtggaacggaaagcacaaggaggagtggacagaaagcctgtctctttacagcaccctaagtagaattttcttaaag

SEQ ID NO: 358952 - DNA, 201 bp, Homo sapiens
atcaaattaaatgacagtaatagcggatcaagataagtctttgatctcatgttcacatggaggaagtcagggaggcagccaggcatgctcactcttcttcrgattatggctttctagcttcatcacttcattgtttcgctgaaaataattctgaacctcaatctgatatttagaaaacatcagacaaatcaaaattggcct

SEQ ID NO: 358953 - DNA, 201 bp, Homo sapiens
aattctgaacctcaatctgatatttagaaaacatcagacaaatcaaaattggcctatattcttcaaaagtatcaagttcaggaaacacaagacgggctgaggaactgttgtacgttgaaagatgctgaagaaatgtgatgcctaaatagcatatgtgatctgggatttgaacttagacgggtggggggtcataatccttta

SEQ ID NO: 358954 - DNA, 201 bp, Homo sapiens; identical to SEQ ID NO: 76762

SEQ ID NO: 358955 - DNA, 201 bp, Homo sapiens
gctcaaataaaacgcaagtactacatgaaatcagcgtggaacagaatatgaagatggtggtatccaatttgatttgggaaaaatgtgtagctcccagcttaactctactttggaattttaactcgtctcgaattacgaatgctgcagtgatgcccagtataaacttgttgtagtttctcttaggaaagtcatgaagggact

SEQ ID NO: 358956 - DNA, 201 bp, Homo sapiens
gagagatacaagcaggaggtagcagttaatagtcacacatccgggtggctggttggataaggcaggagacatttgactccttagtttctggattggaaaggtgtgtgtgtgtgtgtgtgtgtgtgtgtgtgtgagagagagagagagagagagagttggggttggaatgggagtagttccatgcccagagaaaagagatat

SEQ ID NO: 358957 - DNA, 201 bp, Homo sapiens
agagatacaagcaggaggtagcagttaatagtcacacatccgggtggctggttggataaggcaggagacatttgactccttagtttctggattggaaaggtgtgtgtgtgtgtgtgtgtgtgtgtgtgtgtgagagagagagagagagagagagttggggttggaatgggagtagttccatgcccagagaaaagagatatc

SEQ ID NO: 358958 - DNA, 201 bp, Homo sapiens
gagatacaagcaggaggtagcagttaatagtcacacatccgggtggctggttggataaggcaggagacatttgactccttagtttctggattggaaaggtgtgtgtgtgtgtgtgtgtgtgtgtgtgtgtgagagagagagagagagagagagttggggttggaatgggagtagttccatgcccagagaaaagagatatca

SEQ ID NO: 358959 - DNA, 201 bp, Homo sapiens
agatacaagcaggaggtagcagttaatagtcacacatccgggtggctggttggataaggcaggagacatttgactccttagtttctggattggaaaggtgtgtgtgtgtgtgtgtgtgtgtgtgtgtgtgagagagagagagagagagagagttggggttggaatgggagtagttccatgcccagagaaaagagatatcag

SEQ ID NO: 358960 - DNA, 201 bp, Homo sapiens
acttcagtcatatcatattagtccattttcacactgctgataaagacatacccgagactgggaagaaagagaggtttaattggactttcagttccacgtgrctggggaggcctcagaatcatggcaggaggtgaaagacacttcttacatggtggcagcaaaaggaaaaatgaggaagaagcaaaagtggaaacccctggt

SEQ ID NO: 358961 - DNA, 201 bp, Homo sapiens
ctttatatttttagggactttgagaggaggctatgtaattataaactataattaattaattagataggtatgagggaccctaatgattctttaatgtaccyaagagcaaataaatgaaaacttcagaaagcagaagagaacctccctgactaatctatgtgaatttcgagaaacactaagtagttacctgttagcaagttc

SEQ ID NO: 358962 - DNA, 201 bp, Homo sapiens
tcacacatccgggtggctggttggataaggcaggagacatttgactccttagtttctggattggaaaggtgtgtgtgtgtgtgtgtgtgtgtgtgtgtgtragagagagagagagagagagagttggggttggaatgggagtagttccatgcccagagaaaagagatatcagaatgggaagtatgagaattgagcccctac

SEQ ID NO: 358963 - DNA, 201 bp, Homo sapiens
tcctcagtgcatcctgttagcaggcatgtgcttcgtcactgagcctattaaccgtctgcacttgaaaggtcctgtctgcaggtttctccacaggaacttasccccactttctcactgacttctttagaagagagtttatacataaatctctacgtccgttcattctgtctgtctctttctgtctctacgatacctaacctc

SEQ ID NO: 358964 - DNA, 201 bp, Homo sapiens
aaatatattggttacaaaaaggatttttcccgtggctctttgtcatctggcatagaacaataattacggccaacagggcagggtggtatgagatgttgcgktggtagatgaggctcttctgttatgcgactctttatatttttagggactttgagaggaggctatgtaattataaactataattaattaattagataggta

SEQ ID NO: 358965 - DNA, 201 bp, Homo sapiens
tagtctctgttttaaaatatattggttacaaaaaggatttttcccgtggctctttgtcatctggcatagaacaataattacggccaacagggcagggtggkatgagatgttgcgttggtagatgaggctcttctgttatgcgactctttatatttttagggactttgagaggaggctatgtaattataaactataattaat

SEQ ID NO: 358966 - DNA, 201 bp, Homo sapiens
tcactgacttctttagaagagagtttatacataaatctctacgtccgttcattctgtctgtctctttctgtctctacgatacctaacctccagtctaataycacagaatgccctctagccatctcattttcatcttcggaactttttttgttacagtgagaaatttggctctccctattcagcatcaatcttattccaact

SEQ ID NO: 358967 - DNA, 201 bp, Homo sapiens
tgacccaaggacaaacttatcttattaacctgttttgcttagtatatcctgatcttagtctctgttttaaaatatattggttacaaaaaggatttttcccrtggctctttgtcatctggcatagaacaataattacggccaacagggcagggtggtatgagatgttgcgttggtagatgaggctcttctgttatgcgactc

SEQ ID NO: 358968 - DNA, 201 bp, Homo sapiens
gggatcagcggggcttgtttcctgttgctgccatttgttacctgtgcctgaggttgcagcgtgccttacttgattgatttgtggcctcactttctgctgcyactgtccaagcccatggagaatgctgaggctggggactagtgaaaacagaaatggacagtgggacagggaagaaaagggctgaatgaaaagactgaccca

SEQ ID NO: 358969 - DNA, 201 bp, Homo sapiens
tttcagaaacctttattagccctcattaataccagcattttatattgccgcttgtattacagcaatttgataacagggctgtttcaaaatgggatgtgggraaaagtcattttgagtaagaatatgtgtgaaagttaagaatatggaaactgatcatcttaaaatttattcatttgtccatgtatcccttgaaatattgtt

SEQ ID NO: 358970 - DNA, 201 bp, Homo sapiens
tcactttaaaaactcaaacaatgtggaaaatcttcaaagtaagctaagaaattccactacccacatatgaccctgttagcttttttcttctacactgaaakccacatgtatgtgtaatgatcatcttaaacagaatggtacctttagcagcttccttttgtatttagtaacatagcgcaagcagccctccagctttccact

SEQ ID NO: 358971 - DNA, 201 bp, Homo sapiens
gcttgtattacagcaatttgataacagggctgtttcaaaatgggatgtggggaaaagtcattttgagtaagaatatgtgtgaaagttaagaatatggaaaytgatcatcttaaaatttattcatttgtccatgtatcccttgaaatattgttgtatactttcaagaatacataaattaagaactagactagcaggttcaaa

SEQ ID NO: 358972 - DNA, 201 bp, Homo sapiens
tggagggttgtttgtaatagagcttgagagtagagaaagtttatttttttagtttttgttttttaactgtcaagttttctgtgtaggaattattcactttmaaaactcaaacaatgtggaaaatcttcaaagtaagctaagaaattccactacccacatatgaccctgttagcttttttcttctacactgaaatccacatg

SEQ ID NO: 358973 - DNA, 201 bp, Homo sapiens
ccaactcaaaaggaataagagatttgagtccacagcttcataatgattccttcttccctcttctccctggccttccagtctgatgaagactggtggctggrtttatttcaaaactttgttccaattcagaaagaccagttcacatgtcttctttacaatgatattttttgccttgttgaagaaagcatccatgtaaataaa

SEQ ID NO: 358974 - DNA, 201 bp, Homo sapiens
cggtggtaaaatgtaaagagtgaggcaaagaagggggttcaggagagctaccacacttctaatgtggtgactggagggttgtttgtaatagagcttgagartagagaaagtttatttttttagtttttgttttttaactgtcaagttttctgtgtaggaattattcactttaaaaactcaaacaatgtggaaaatcttcaa

SEQ ID NO: 358975 - DNA, 201 bp, Homo sapiens
ttgttccaattcagaaagaccagttcacatgtcttctttacaatgatattttttgccttgttgaagaaagcatccatgtaaataaaaaaataaaagaaaayagctccaaatgtatgctagtttcaataagatagcatcgcgtatctttatagtgggatccctagaaccttacccacttgaaaaggttgatgccacgaacta

SEQ ID NO: 358976 - DNA, 201 bp, Homo sapiens
tgacacattatagagggtaatctgctttactcagagtccactgatttaaatgttaatcacattttaaaaatacctttacagcaccatctagactggtgttyggccaaacaactgggcctcatggtccagcctagctgtcttatagagttaaccatcacagtgagaaggcagtggctgtgataccatgtgagggagaaactt

SEQ ID NO: 358977 - DNA, 201 bp, Homo sapiens
tttattagtcttcatgataatccttataagattgatactattattatcaccattttacagatctgagccttaggataagtccattgcccaaggtcacacarcaggggccacaccatttgtaccctgattataaaggaaggtatgaactcccattttcatgatatggagcaacttctgtacaagtgttttaagtttggaaaa

SEQ ID NO: 358978 - DNA, 201 bp, Homo sapiens
aatgaggacacatggacacagggtggggaacatcacacactggggcctgttgtggggtggggggagcggggagggatagcattaggagatatacctaatgytaaatgacgagttgatgggtgcagcacaccaacatggcacatgtatacatatgtaactaacctgcacgttgtgcacatgtaccctacaacttaaagtata

SEQ ID NO: 358979 - DNA, 201 bp, Homo sapiens
aaagcccttcctacagctgttttttttttttctaaaccctcaccagaatttcccttgatgcttcctttattgcagtctaggttctttacagccatttcctycaagttcttttgtcctctactcatttcccagttccaaagctgcttccacatttttagatatttgttattgccacagccccacttcctggtaccagttttc

SEQ ID NO: 358980 - DNA, 201 bp, Homo sapiens
catgaagttctaattcatcctgatagcttcttacagacagtagaaattgaagaaatagaattgatgcttttgatattaattcattcaatttccctgtactwcttctttttttttttttttttttttttgagacggagtctcgctgtgtcgcccaggctggagtgcagtggcttgatctcggctcactgcaagctccgcctc

SEQ ID NO: 358981 - DNA, 201 bp, Homo sapiens
tctattgtgtcctctagctgctggactcgggtctcgggccctccccagctgtaggaagtttcccgtccgtcctaggaagcccaggccggaagcgggcggayggcgtttctagggtgggcatgatgtcatcagaagtgcctgtgcccacccgtcatgtgccaccttctctgtggctgctgattgcatgagggctgctctagt

SEQ ID NO: 358982 - DNA, 201 bp, Homo sapiens
agtggcttgatctcggctcactgcaagctccgcctcccgggttcacgccattctcctgcctcaggctcccgaatagctgggactacaggcgcctgccaccrcgcccggctaatttgttttgtatttttagtagagatggtgtttcactgtgttagccaggatggtctcgatctcctgacctcgtgatccgcccacctcggc

SEQ ID NO: 358983 - DNA, 201 bp, Homo sapiens
gctcactgcaagctccgcctcccgggttcacgccattctcctgcctcaggctcccgaatagctgggactacaggcgcctgccaccgcgcccggctaatttkttttgtatttttagtagagatggtgtttcactgtgttagccaggatggtctcgatctcctgacctcgtgatccgcccacctcggcctcccaaagtgctgg

SEQ ID NO: 358984 - DNA, 201 bp, Homo sapiens
ctgggagggagtttttaattaaggcttgtaagctagaggtgcaagatcagatatgtgttttgaaaagataaccctggattagaggaaacaagtggggaatkaggttagacttttttgaggatcttttttataatacggaagatttattattttcagacaagcaaatctgggtaattttttttttttttcctgagacatagt

SEQ ID NO: 358985 - DNA, 201 bp, Homo sapiens
gagcagggtttggaccacaaaatttcgctggccctaactcagccttgttctgagcatttggaatactgtgggaaaagagaagtggtttctgctgtttctgyagctcacaggctaagggaggtgagaagtaacctagaggtcctgatactaggcagtatactcagtccctgcgtagtgggcacagccagtatttgtttggtg

SEQ ID NO: 358986 - DNA, 201 bp, Homo sapiens
catttggaatactgtgggaaaagagaagtggtttctgctgtttctgtagctcacaggctaagggaggtgagaagtaacctagaggtcctgatactaggcastatactcagtccctgcgtagtgggcacagccagtatttgtttggtgtatagtagcagtgagtacaaacatgtaatagtgtaatagttctatagtagtagt

SEQ ID NO: 358987 - DNA, 201 bp, Homo sapiens
ctattccttagtgttgtctctcatgacctgggtatttttaaagcgtatacacctgttgttttttaaggatatttcttttttttttttttttttttttgagrcggagtctcgctctgttgcccaggctggagggcagtggcgctgtcttggctcactgcaagctccgcctcccgggttcacgccattctcctgcctcagcct

SEQ ID NO: 358988 - DNA, 201 bp, Homo sapiens
ctctcatgacctgggtatttttaaagcgtatacacctgttgttttttaaggatatttcttttttttttttttttttttttgaggcggagtctcgctctgtygcccaggctggagggcagtggcgctgtcttggctcactgcaagctccgcctcccgggttcacgccattctcctgcctcagcctcccgagtagctgggact

SEQ ID NO: 358989 - DNA, 201 bp, Homo sapiens
gtatttttaaagcgtatacacctgttgttttttaaggatatttcttttttttttttttttttttttgaggcggagtctcgctctgttgcccaggctggagkgcagtggcgctgtcttggctcactgcaagctccgcctcccgggttcacgccattctcctgcctcagcctcccgagtagctgggactacaggcgcccgcta

SEQ ID NO: 358990 - DNA, 201 bp, Homo sapiens
aaatgtgttctcgtgaggtctgatggtaggtaaaaagtgtgtggcacttcccgccttgcactccctcttctgccaccatgggaagaagttccttgcttccygtttcccttccgctgtgattataagtttcctgaggcctcacagtcatgcttcctgttaagcctgtggaactgtgagtcaattaaaccaaacaccgcatgt

SEQ ID NO: 358991 - DNA, 201 bp, Homo sapiens
tgggagcccaccccttgcatcagcatgcactggatgtgagacatggagtcaaaggagattattttggggccttaatatttaatgactgtcctactgggttytggacttgtacagggcctgtaccccatttgtttgggccagtttcttccttttggaatgggagcatttacccaatgcctgtaccccaaacaagtaactaac

SEQ ID NO: 358992 - DNA, 201 bp, Homo sapiens
tatgaagacggggccatcatgacctaatcatctcttaaggtcccacctctccgtactgttgcgttggggatcaaatttttaacgcaaactttgggaggtasatttaaaccatagcactccacccctggccaccaaaattcatgtccttttaacatgtagtgtacacatttcagtggcctcaaagttcttaagttgtacagc

SEQ ID NO: 358993 - DNA, 201 bp, Homo sapiens
aaagctggagaataatcttctttgactcaatttgtcccattctgggcacactggagttggggttaggctccctaggccttgagtatccttgcccttatgatttttgctggggccagcccacacttcagctctcacaggttggtgtctcatgcctgagcttctccagagttgtggagttggtaactctacattttggagtct

SEQ ID NO: 358994 - DNA, 201 bp, Homo sapiens
attaagtacttttcatttaaatcattttgtgttttgtttctatatttggttattaccagtcaagaattttactgacatggcaacatttaggcataaaatcgtgtgtgtgtgtgtgtgtgtgtgtgtgtgtttcctttggctttggtttgtggtaccctatgttataaatggcatttctagatttagtgttgtgtacaaaag

SEQ ID NO: 358995 - DNA, 201 bp, Homo sapiens
ttaagtacttttcatttaaatcattttgtgttttgtttctatatttggttattaccagtcaagaattttactgacatggcaacatttaggcataaaatcgtgtgtgtgtgtgtgtgtgtgtgtgtgtgtttcctttggctttggtttgtggtaccctatgttataaatggcatttctagatttagtgttgtgtacaaaagg

SEQ ID NO: 358996 - DNA, 201 bp, Homo sapiens
atgcctgtaccccaaacaagtaactaacttgtttgtgattttagaggctcacaggtggaagggccttgcattgtctcagatgagactttagacttggacattttttttttttttttttttttttgagacagagccttgctctgtcacccaggctggagcacagtggtatggtctcggctcactgcaacctccacctcctgg

SEQ ID NO: 358997 - DNA, 201 bp, Homo sapiens
cttaatagcaaatacaatttaagcacagccctatgtggatatacttggaaatacaagtattttgaacttagcttctaatcatttataattgttattaattkcaagtacccaaggttaaagcaaagctttgcttttctctcccttcctccttgttcatttaaccaagtttatggggtttattagtcaagttaatggggttca

SEQ ID NO: 358998 - DNA, 201 bp, Homo sapiens
ttggtgctttgtgtttggaaaatgttcaaaagctcagtgatgtcagaaaattcttcatatacatgtatccccgagtcctttgttgagatgactacaagtaktgtgtgtgtgtatatatatatatgttatgtatgatatatattatatatagtatactatatatagtatatatatgttatgtattatactatattatatata

SEQ ID NO: 358999 - DNA, 201 bp, Homo sapiens
accagttcacatgtcttctttacaatgatattttttgccttgttgaagaaagcatccatgtaaataaaaaaataaaagaaaacagctccaaatgtatgctrgtttcaataagatagcatcgcgtatctttatagtgggatccctagaaccttacccacttgaaaaggttgatgccacgaactactgccaatgaccaagacc

SEQ ID NO: 359000 - DNA, 201 bp, Homo sapiens
gtatccccgagtcctttgttgagatgactacaagtagtgtgtgtgtgtatatatatatatgttatgtatgatatatattatatatagtatactatatatagtatatatatgttatgtattatactatattatatatagtatatatatatacgttatgtattattacttataggtatgtatttcttgttttttttaggttgc

SEQ ID NO: 359001 - DNA, 201 bp, Homo sapiens
atgatattttttgccttgttgaagaaagcatccatgtaaataaaaaaataaaagaaaacagctccaaatgtatgctagtttcaataagatagcatcgcgtwtctttatagtgggatccctagaaccttacccacttgaaaaggttgatgccacgaactactgccaatgaccaagacccaaattctggtcatcactgtggca

SEQ ID NO: 359002 - DNA, 201 bp, Homo sapiens
ccgagtcctttgttgagatgactacaagtagtgtgtgtgtgtatatatatatatgttatgtatgatatatattatatatagtatactatatatagtatatrtatgttatgtattatactatattatatatagtatatatatatacgttatgtattattacttataggtatgtatttcttgttttttttaggttgcaacagc

SEQ ID NO: 359003 - DNA, 201 bp, Homo sapiens
tgttaatgcttattatgtttttattttcctttatttcatctttagaaatacttgaatacattccttttatttaattaaaggggaacgtctctgattggcarcatctctctttcatttattgagctaacatactgggaagtactatcaacaggaaacatcttttaaatccaagtcaattaatttactcatttatactgtgat

SEQ ID NO: 359004 - DNA, 201 bp, Homo sapiens
tggaactgttcaagactagtagtaatctactaatgcataggccaaacgcactctctactgattaaaaaaaaaaaaaaacccagacatcagaacatgctctrtggccaaactgtcatcatagtgaaaagtctgcgcagtacattattctataaaatgttgtttaactattttaatggctccttatgaagtcctaaagaatga

SEQ ID NO: 359005 - DNA, 201 bp, Homo sapiens
cgagtcctttgttgagatgactacaagtagtgtgtgtgtgtatatatatatatgttatgtatgatatatattatatatagtatactatatatagtatatatatgttatgtattatactatattatatatagtatatatatatacgttatgtattattacttataggtatgtatttcttgttttttttaggttgcaacagca

SEQ ID NO: 359006 - DNA, 201 bp, Homo sapiens
attagggttctccagagaaacagaaccaacaggatacatatatagatgaatagatacacgagcgaggacttaggagggaaattggttcatatgattatggmagctaaaaagtcccccaataggccatctgcaagctggagaaccaggaaagccagtagcatagctcagtccaagtccgaaagcctcacaaccagggaagct

SEQ ID NO: 359007 - DNA, 201 bp, Homo sapiens
ttgagtgcctcaggtgagcagagaccaaagcgtgacctgtgctagtggagctcttgttgccctgtttcgttcacaaggaggcaagttctacttcagtcttrcatgtgggtcacacacagctgacctcaggttgccatttcttttcttttccattttaccagcctcacagtcttttttctgttaccttccatttacaatcca

SEQ ID NO: 359008 - DNA, 201 bp, Homo sapiens
ggaaattggttcatatgattatggcagctaaaaagtcccccaataggccatctgcaagctggagaaccaggaaagccagtagcatagctcagtccaagtcygaaagcctcacaaccagggaagctgatggtgtaaccctgagtcagaggccaaaggcttgagaagctggggtgcagctggtgcaagttaaactccaaaggc

SEQ ID NO: 359009 - DNA, 201 bp, Homo sapiens
ctcccagaaataccctcactgaaacacccagaaatcatgctctacctgctatccgagcatcctctaacccagtcaagttgacacttagaattaaccatcamagacggtgaggttaattttgtcagaaatgaagggggaaagtttaggaaaaaaacccaaaacttcatcgataaagtaatatagatggtagagcaaggatag

SEQ ID NO: 359010 - DNA, 201 bp, Homo sapiens
caggaagtttacactcatggcagaaggtgaagcgggagcaggtgcgtcacctgcaagagcaggagtaagggtggggggaggagccacacacttttaaatgkccagatctcactagaactcactatcatgaagacagcacaaagtcatgagggatcctctcccatggtccaaacacctcccacggggccccacctccagcat

SEQ ID NO: 359011 - DNA, 201 bp, Homo sapiens
ctacctgctatccgagcatcctctaacccagtcaagttgacacttagaattaaccatcacagacggtgaggttaattttgtcagaaatgaagggggaaagwttaggaaaaaaacccaaaacttcatcgataaagtaatatagatggtagagcaaggatagggttcatgaaagagtttggaatcgattaacagaaagtttaa

SEQ ID NO: 359012 - DNA, 201 bp, Homo sapiens
gtttgctgcaattcatttgtacaagattaggacttaaaactcctaacgtgggaatcagcctcagtgacttaggggctggaattttgaactggaattagttwatgttagaatgttaagttttaggagggcttaggagaaaggaaaataaaaaacagagaaatgctgcaagagacaatcagagctgacgaattacattcaaag

SEQ ID NO: 359013 - DNA, 201 bp, Homo sapiens
tggacatttgttcgttccacacataagcattaatcactcctagatgctaggtacagattaagaattaatggaccctacatcctaggtggtttcatgtcctrtgtttatatatttgaaatattccttggcacagactacaggacaattttccagttttatttgaccttaaaggtatcatttccaaaagcgcctgctctgcag

SEQ ID NO: 359014 - DNA, 201 bp, Homo sapiens
ggtaatctggcccctctgaccactacagctcccaagtggcaagcaccatccctacttgacatctcggtttcagccttcatcgtattttgtctgtttttccrccttttcctcctcatccatcactgtttctccaagtgtttgtgtcccaaatccgtcctccaagtatatgtctgaatatgtttttctcctgtttaaaagtca

SEQ ID NO: 359015 - DNA, 201 bp, Homo sapiens
attattgtcaggacaaaatgagatatgtgaataaagtcttagaacagtgcgtagtccatatgaataaactcttagaacagtgcatagtccatagtagacaktcagtgttgcatcctttgttttcacattagtcattatattttatgaattatcattgcagccaattttataaaatttcaattcattgttaaatatatagct

SEQ ID NO: 359016 - DNA, 201 bp, Homo sapiens
acctggtatcatccggcttttctcctgtctgctgcagtttgatgttgctgagatcttgtgcacagctgttaagctatctggaaaagaactaactggaacaygtaaagtagtcattccgtttctaaagtgggtttgtttttttctgtcctataaaatgcacgtaagtctttgtttatgtgctacgtttggacatatttgagg

SEQ ID NO: 359017 - DNA, 201 bp, Homo sapiens
catttttccctgagcttcccattgtgccttaatgctggccatcaggattgttttcatggtgtttggggcccgtcgctgtgtagagctcatggtggacattyagcagacaggaaagtcccttgagtctctagtaaatggtaatctggcccctctgaccactacagctcccaagtggcaagcaccatccctacttgacatctc

SEQ ID NO: 359018 - DNA, 201 bp, Homo sapiens
caacagtgtattttaaatctctcagtaagtgtttttcattagctcaatttgtagagggtactaatatctattcatctttccattcttagattttttttcakgtcatcgtttacttgtttacctactcaaatttctctcaaattatctcccttgtgagagaccctcatgctcagatatatgtaatgttttccatgtgcccca

SEQ ID NO: 359019 - DNA, 201 bp, Homo sapiens
gaattggatttttctatttcattaaaagatggtgtttttataaattgtactagtctattctcttgttcattttccaccaaatctatttatttcccaaaatktacatttttgtaatttgaatgctttttaagtcctttactgaaccaacctattgattatgacttgtgcgcccaatcttttctagtttaaattatctcactt

SEQ ID NO: 359020 - DNA, 201 bp, Homo sapiens
gtaataactattatctccattgaatatttaagaaaatacatgtcagagaaattaagtagattggcctgagtgcacaccgaatttcaaaacccaggcaagcygatcctggagttgtactgtgcattattctgttaatttctcatggtttaagtttatgatatcttttaaattctcatcatttaaggttactataattcacag

SEQ ID NO: 359021 - DNA, 201 bp, Homo sapiens
atgccaatgatggcttcagggtttcagccttgatggaataatggaggatcatcaggtttaggaagaaaatctggagtctgccagatgtttccaccataaargtatcgtttctcctttgtgatgagtaatccatggaatgatactttgagatcttgtgaatataatatttctcaacactgtattaggtgtttggttttggcc

SEQ ID NO: 359022 - DNA, 201 bp, Homo sapiens
taaaaaataaaaataattgccgggtgtggtggcatgtgcctgtagtcccagctacttaggaggctcaggctagaggatatcttgagaccaggagtttgagkctacattgagctatgtgatcgtgtcactgccctctagcctaggcagcagagcaagactctacctctgaaaaaaaaaagagaaaagaaaagaactatcaca

SEQ ID NO: 359023 - DNA, 201 bp, Homo sapiens
cagtggcgctgtcttggctcactgcaagctccgcctcccgggttcacgccattctcctgcctcagcctcccgagtagctgggactacaggcgcccgctacyacgcccggctaatttttttttggtatttttagtagagacggggtttcaccgtgttagccaggatggtctcgatctcctgacctcgtgatccgcccgcctc

SEQ ID NO: 359024 - DNA, 201 bp, Homo sapiens
ttcactctttgtcacccaggctgtagcgcaattacgtgatcttggctcactgcaacctccgcctcccgcgtttaaacgattctccagcctcaggctccccmgtagctgggattacaggcatgcgttaccatgtctggctaatttttgtatttttagtagagatggggtttcaccacgttggccaggctattctcgaactcc

SEQ ID NO: 359025 - DNA, 201 bp, Homo sapiens
agtgcagctgcaagctctctgtggaatttattaccttttttcttttttttttttttttgagatggagtctcaccctgtcgcccaggctggagtgcagtggygccatctcggcttgttgcaagctcctcctcccaggttcacgccattctcctgcctcagcctcccgagtagctgggactacaggcacccgccactacaccc

SEQ ID NO: 359026 - DNA, 201 bp, Homo sapiens
gggcatctgtagcatactgcacaggtttggcaaccttgtttctctaccctttactcttggtaattactgagagttctgatttattcgtataatgatgttayttatccatttattctgcaatgacaaatttaaccatgtaataaaaatgttgaaactctttaattcagacatacaaataatgacatactaattttactgaat

SEQ ID NO: 359027 - DNA, 201 bp, Homo sapiens
agttaatgtataggtaaagaaaagttaatgtataggatatctttactagagatcacttaaagtggccgcttctgagccacatttcagggacatgaactgamcgggtgtgccaacctgtgcccctttattattgattcttgaatctctccttgatgccttaagcctctccttgaagatttaaaaatgtaaagctgcatagtg

SEQ ID NO: 359028 - DNA, 201 bp, Homo sapiens
cccgccactacacccagctaattttttgtatttttagtagagatggggtttcgccgtgttagccagggtggtctcgatctcctgacctcgtgatccgccckcctcggcctcccaaagtgctgggattataggtgtgagccaccgcgccctgccccattttttaactgcagtatatttttctccttactaaagctcataaaa

SEQ ID NO: 359029 - DNA, 201 bp, Homo sapiens
tcaaaaacataataaaatgaaataaaaatgtattatagactattcctgttctctaatactcctccagacgacctttccctgtttcctttgaagacataaaygttgggttttgaaatgtttgctatttgatttcatttttcccctcaattattccatcttctttctcccttccaagggggttttacagtttttttctactct

SEQ ID NO: 359030 - DNA, 201 bp, Homo sapiens
tgttccagttcttctacatttgtcatctgtacaccatctttggtgaagtgtcttttcacatcttttgtccatcttttgtttgtggtggtttgttttcttaytgatttttagtagctctttatatattctggatacaggtcattttcatttatcagatagattatttgtaaatatttgctcgcagtctttggcttgtctttt

SEQ ID NO: 359031 - DNA, 201 bp, Homo sapiens
tttaacaatcccattactgggtatatacccaaaggattataaatcatgctgctataaagacacatgcacatgtatgtttattgcggcactattaacaatarcagagacttggaaccaagccacatgtccaacagtgatagactagattaagaaaatgtggcacatatacaccatggaatactatgcagccataaaaaatga

SEQ ID NO: 359032 - DNA, 201 bp, Homo sapiens
ttcacaaatgtgttcgggcagatgcataaacagtctatccagtttttgcaaaataatagcttgcgtggcaaatgtccttttgtgaaccgtaagtattgcayttagggtgggaagctggaggggaacagacagcagctgttcttggggatacagttggggcctcagcctgtggaacgtctggaatgtgaggtttcctgtaag

SEQ ID NO: 359033 - DNA, 201 bp, Homo sapiens
cagtctgttcccccttttcaggtataatttgtctttcaaaataaaaattgtgattgtgattgttactaacacattgagtcaatattctttaaacacttcartcttttcaagcaatgtttggcataacctgaattccactcaaaatcccttcatgaaagaatagaaactgtcatatgaaatgtgttgtaataggatttaacc

SEQ ID NO: 359034 - DNA, 201 bp, Homo sapiens
agtatgcaataacatcatgcctaaaaaatacacaccttaatttaaaaatgctttgttgcttaaaaatgctaatgatcatctaagacttcagcaaatcatawtctttttactggtgaagggtcttgcctcagtattggtggcttctgaccagggtggtggttgcaaatcatagaacggtagggatgcatgtggcaatttgtt

SEQ ID NO: 359035 - DNA, 201 bp, Homo sapiens
atcatgcctaaaaaatacacaccttaatttaaaaatgctttgttgcttaaaaatgctaatgatcatctaagacttcagcaaatcataatctttttactggkgaagggtcttgcctcagtattggtggcttctgaccagggtggtggttgcaaatcatagaacggtagggatgcatgtggcaatttgtttttttctccttct

SEQ ID NO: 359036 - DNA, 201 bp, Homo sapiens
tgcagccatataatacttgcttccctttcaccttcgccatgattgtaagtttgctgaggcctccccagccatgtggaactgtgagtcaattaaacctcttytctttataaattacccagtatcaggtaattctttatagcggtgtgaaaatggactaatacagcaaggatgtcaagcagctgaaatactcatatattgctg

SEQ ID NO: 359037 - DNA, 201 bp, Homo sapiens
ctttgttgagatgactacaagtagtgtgtgtgtgtatatatatatatgttatgtatgatatatattatatatagtatactatatatagtatatatatgtthtgtattatactatattatatatagtatatatatatacgttatgtattattacttataggtatgtatttcttgttttttttaggttgcaacagcaaatctt

SEQ ID NO: 359038 - DNA, 201 bp, Homo sapiens
ttagtgaagtatacttccaaactttgtaacaataatttccaccattctcagatatacttaaataactgctaaaatgtatgttggtattgtaaaacctaatyggcaaactgacaggtttggggtttttttcccctcaacaaaaaagtaagtggaaaaagactctcttaaaattagagttgtgagtggtttgttggcttgact

SEQ ID NO: 359039 - DNA, 201 bp, Homo sapiens
ttgttgagatgactacaagtagtgtgtgtgtgtatatatatatatgttatgtatgatatatattatatatagtatactatatatagtatatatatgttatrtattatactatattatatatagtatatatatatacgttatgtattattacttataggtatgtatttcttgttttttttaggttgcaacagcaaatcttgc

SEQ ID NO: 359040 - DNA, 201 bp, Homo sapiens
gaaggaatctcttccagcatattgagttgctgaaaaatacacaggtgatggtgatgctttaatcatgccccctccattgggagggacgccttgtgaatttsagctagaactgggatcccatcttggcaaatctgcgtaattcttgggtatacagctctaataggcaaaatgatctcccacagatgtcagtaggaaatgtcc

SEQ ID NO: 359041 - DNA, 201 bp, Homo sapiens
atgactacaagtagtgtgtgtgtgtatatatatatatgttatgtatgatatatattatatatagtatactatatatagtatatatatgttatgtattatastatattatatatagtatatatatatacgttatgtattattacttataggtatgtatttcttgttttttttaggttgcaacagcaaatcttgcctgggctt

SEQ ID NO: 359042 - DNA, 201 bp, Homo sapiens
atttaattaagaaagatggcatatcattttgatgttataatttaaatagtttcattttaaaaagcattaaagctagttacagatcaatatattaatgtgtragttaattttttgtactcagaaaattccctttacccactaacagctaaatgtgcacagttcttatttcaacacatgccagtacagttaaacacaaatata

SEQ ID NO: 359043 - DNA, 201 bp, Homo sapiens
tttcttttttttttttgacacggtgacttttctttcttctcagaagtatggtatgctatttccagaagttgtgaaggaatctcttccagcatattgagttsctgaaaaatacacaggtgatggtgatgctttaatcatgccccctccattgggagggacgccttgtgaatttgagctagaactgggatcccatcttggcaa

SEQ ID NO: 359044 - DNA, 201 bp, Homo sapiens
attttctgttatttctagaaattttaacttaatcagttatatttacttactccctgccttaaatattttgcaatatatgtgtgtccattcacatacatatrtatctatatataaaataaatacatatataattaatgcaataaatggcatatgtcctgctgtagtatttgttttccactgaaaacctaggaacaatctcct

SEQ ID NO: 359045 - DNA, 201 bp, Homo sapiens
gttaatgtataggtaaagaaaagttaatgtataggatatctttactagagatcacttaaagtggccgcttctgagccacatttcagggacatgaactgaaygggtgtgccaacctgtgcccctttattattgattcttgaatctctccttgatgccttaagcctctccttgaagatttaaaaatgtaaagctgcatagtgt

SEQ ID NO: 359046 - DNA, 201 bp, Homo sapiens
aagtagttctaaagagagacttgggtcgactatccagacctgaatgctgcttctatcacttattaattctgaagcctcagtaaggttcttaacatctttakaagtccattatgaaatgtaaattccaaacctataatgttttgtggtgcttgagacaataaatagaaagtgcttaaaacaatgtttagcacatttaagtat

SEQ ID NO: 359047 - DNA, 201 bp, Homo sapiens
ctttccctgtttcctttgaagacataaatgttgggttttgaaatgtttgctatttgatttcatttttcccctcaattattccatcttctttctcccttccragggggttttacagtttttttctactctgtaatttctgtagctataaagaaaagttaatgtataggtaaagaaaagttaatgtataggatatctttacta

SEQ ID NO: 359048 - DNA, 201 bp, Homo sapiens
ctggctacagtaggagggaaaatattctggtttattttcttccaaaaagtcctatttggtttttctaacaatgtcagtaaattaagcatcattattattaktatttaaattttcccatgtatagtatctcagttatcatttctgagaaaatgttttatttcgctggtttggcctagaaaaaatccctttggctggcagtgg

SEQ ID NO: 359049 - DNA, 201 bp, Homo sapiens
acaacattggtttttataccttgattatgtatcctgcaagcttgatgaactcatatattagttccaatagtttcttagtttcttagtggattacatacatacacacacacacacacacacacacacacacacacacacgatcatgccttctataattagagacagttttactccctactttctaatccagatgtgttttct

SEQ ID NO: 359050 - DNA, 201 bp, Homo sapiens
caacattggtttttataccttgattatgtatcctgcaagcttgatgaactcatatattagttccaatagtttcttagtttcttagtggattacatacatacacacacacacacacacacacacacacacacacacacgatcatgccttctataattagagacagttttactccctactttctaatccagatgtgttttctt

SEQ ID NO: 359051 - DNA, 201 bp, Homo sapiens
tggattagaggaaacaagtggggaatgaggttagacttttttgaggatcttttttataatacggaagatttattattttcagacaagcaaatctgggtaattttttttttttttcctgagacatagtctcgctctgtcaggaggctggagtacagtggcatgatctcggctcactgctacctctgccattctcctgcctca

SEQ ID NO: 359052 - DNA, 201 bp, Homo sapiens
ccctccagcacagcagtatggatgcatatccgctgtgtattctgttgggatctgttagtattagcatgtaacagtgacttttatatcatatatatgaaatrtttatatacttgtatatttatttacttataatgctaataccaaccaattagagtataggacagctgaaattaatacttattttatgataaagtttacctg

SEQ ID NO: 359053 - DNA, 201 bp, Homo sapiens
acttaagggcctatgaaggacacaacaaaaactgtgagtaaacctggtatcatccggcttttctcctgtctgctgcagtttgatgttgctgagatcttgtscacagctgttaagctatctggaaaagaactaactggaacatgtaaagtagtcattccgtttctaaagtgggtttgtttttttctgtcctataaaatgcac

SEQ ID NO: 359054 - DNA, 201 bp, Homo sapiens
gagaactaagaatttcctcttggcagcatgtgatgaagctggctgcaccctccttcctgggtaactgtgtctttgatccccaggacccttcttgagttggkttttgtccttcgctgccccacttcatcctctcaatctctaaatgttgggaggctgcaaagctcaggcctccaacctctctcttcgcccacttagtcccac

SEQ ID NO: 359055 - DNA, 201 bp, Homo sapiens
tggtggcgtgcacttgtcatcctaactactcgggaggctggggtgggaagatggcttgagcctggcaggtggaggtttcagtgagctgagacggcaccatygcactcctgcactccagcctgggtgacaaagtgagaccctgttttaaaaaaaaaaaaaaaaaaaaaaggttgttaatattccttcattctctacttggac

SEQ ID NO: 359056 - DNA, 201 bp, Homo sapiens
gctggacaccgtcattcagtcaggtacaaaccttgcacgttaaggacacctaggcagggcctgggtggtgcagtggcttttctggcaggacatgtgtgcgrtgacagaatcagggccacattctggaagccacatcctagtatggtataggtggtggtggttgttttgattgttttttattgcttcagccttgatctgtga

SEQ ID NO: 359057 - DNA, 201 bp, Homo sapiens
ccagaatgtatggaatgaattttgactgcatgtgtagtctttctctttttccatgccaaatgtgaaaaattttccgcagtcttgtgtatgttacccgtccrccataaagctggacaccgtcattcagtcaggtacaaaccttgcacgttaaggacacctaggcagggcctgggtggtgcagtggcttttctggcaggacat

SEQ ID NO: 359058 - DNA, 201 bp, Homo sapiens
ctgattagataccatgttgagttggcctctttcacccagcacagagaatttctgacccatttaaaaagagatgttactgacaacatctgctaacggcaggmgagggctggctggaggaaaggaggagatgggaaatggaataaaaacctatgggagatgggattgtggtgaatgaaggctacaaagcgttttctcatttca

SEQ ID NO: 359059 - DNA, 201 bp, Homo sapiens
aactcaaaagttcaagtccaaagtctcatctgatacaagtccctcccacctatgagcctataaaatcagaagcaagtcagttacttcctagacacaatggrggtacaggcattgggtaaatatagcattccaaatgggagaaattggccaaaacaaaggggttacatgccccatacaaatccaaaatccagtaggacagcc

SEQ ID NO: 359060 - DNA, 201 bp, Homo sapiens
ttaaaccaagccatatttagaaaataaagtcagacatggagcacctagttatgaatgcaagcagctgaaaagggaaaagtcattttggttgaaaggctggwgttgaaaagaaatatctgctaatgagaagcacagtgtttggaggctgcatccagctcacacacttgcacggggagagtgaggaaccaggttgcacagcta

SEQ ID NO: 359061 - DNA, 201 bp, Homo sapiens
tttgaatctgattagataccatgttgagttggcctctttcacccagcacagagaatttctgacccatttaaaaagagatgttactgacaacatctgctaayggcaggcgagggctggctggaggaaaggaggagatgggaaatggaataaaaacctatgggagatgggattgtggtgaatgaaggctacaaagcgttttct

SEQ ID NO: 359062 - DNA, 201 bp, Homo sapiens
gtagttggcttttatttgcgtttagttttgactcttactgtgctttaaaagttatctgaagtataaagtgaaaataaaaaggaaggtgaatgtgttgcatrgtagaatcatcgccaaacagaaagggttaaaatactttttcttttcttttttggtggggggagggtggtgggaagtaagaggctttccaatgaggcattt

SEQ ID NO: 359063 - DNA, 201 bp, Homo sapiens
gtacatacggcagtactgtaataattttgcagcaaccttcttttgctgttacggtgagctcaagtgttacaagtatccacttaaaatgctgtgtttaaaaygctctgtgatgctaattgtctctgagctattcgtctctccagtaaattgtgtatcacagtaaaaagtgatctctcgtggttcttgcatagttttcattgt

SEQ ID NO: 359064 - DNA, 201 bp, Homo sapiens
atggcaagaattggtataagaaaattaaatcatttttattttaaagctatatttgctttgatataaaacgactccttccaccctctctctctgtctcttgycttccttctcgtccttcctctttgttaactccatttgtagttggcttttatttgcgtttagttttgactcttactgtgctttaaaagttatctgaagtat

SEQ ID NO: 359065 - DNA, 201 bp, Homo sapiens
cctgccaccgcgcccagctaattttttgtatttttagtagagacggggtttcaccttgttagccaggatggtctcgatctcctgacctcgtgatccacccrcctcggcctcccaaagtgctgggattacaggcgtgagccaccgcgcccggccagatttcagtaggtattaacctttgtaatatgttttgaatcttcatgt

SEQ ID NO: 359066 - DNA, 201 bp, Homo sapiens
ccttcttccctcccatttggtcaggataaagatgaaataatgaatgtgaaggtactttgtagactataaaaatcagcattgttagggcgtcattacaaaakctggaggacacagaatgtaaatgttaataagccttattgttatataatgtttgagtggtaattgtgtgttctaggttcttaaagactctagttttccctt

SEQ ID NO: 359067 - DNA, 201 bp, Homo sapiens
agtttgaatttggttcctccatacattggttgtggactcctaggcaaattgtttaacttttgaatgtctccctaatctgtaaaatggtggtaattttactwtcacacagccagctagcttccttccttcctgccgcctgcctgctttccttccttcctgccttcctctctctctctctctgtctccctccctccctccctc

SEQ ID NO: 359068 - DNA, 201 bp, Homo sapiens
aaaccaatatcttcaaaagtcctttcctgtccagaaattctgtgtgttttatgccaggtacttggaagccaggtcatgagtgctgactgtgcatgcccggygctgtagggcgctatggaggcgtgtgcccggcgctgtagggcgctatagaggcgcgtgcccggcgctgtagggcgctatggaggcgcgtgcccggcgctg

SEQ ID NO: 359069 - DNA, 201 bp, Homo sapiens
tagcaatttgaaatttgagaaagcatgattttctccccattcatcttagggtgatgaaatgaagaaattgggaatacagcctattcctatgatggacagaracaagaaggatgaagtcccccaaggccaggtatgaattattaaagtaaattgtaattgctaaagccaaatagtttaaggtgggcataaaatcatacataa

SEQ ID NO: 359070 - DNA, 201 bp, Homo sapiens
tttgccatgttggccaggctggtcttgaactcctgacctcaggtgatccacatgcctcagcctcccaaagtgctgggattacaggtgtgagccactgcatsctgccctctcttcattttttatcttgattttttttgcagttgagaattataataggtatggctttctttaaaaataaaactaatctctgagttttaaatt

SEQ ID NO: 359071 - DNA, 201 bp, Homo sapiens
gcaactttctaactgaattccttgccattaccttttagaatttgtgcaaaagtaattaataatgtggtctttggtgccaggttgcttgaaattaaaattcygctttggcacttggtatttaacctcaggccagtttatgagatagggatgataataattcggattccatccgtaccctgcttctgatcctcttgttgtaat

SEQ ID NO: 359072 - DNA, 201 bp, Homo sapiens
atacatcttataccagtgcattgagtcacaaagttatctcctaaaattcaactatctcctgttagtggtgacatgatcacacacagaaacacacacacacacacacacacacacacacacacacacacacacacatccttttccctcatcttgaatttgaatactcttagatactaatgaataacaattcttaaactgaat

SEQ ID NO: 359073 - DNA, 201 bp, Homo sapiens
tacatcttataccagtgcattgagtcacaaagttatctcctaaaattcaactatctcctgttagtggtgacatgatcacacacagaaacacacacacacacacacacacacacacacacacacacacacacacatccttttccctcatcttgaatttgaatactcttagatactaatgaataacaattcttaaactgaatt

SEQ ID NO: 359074 - DNA, 201 bp, Homo sapiens
ggcacacagctagagagtcatttttccaatgcccctactttctcctgaattcagctgtctcttatttcacaggaacataatacacacacattttttttttaatttgttcccagtgctttcaaatccactgaaacacattagaggaaactattgtcacctttgcagtcctcagcatgaaagaactctctatggtgccataga

SEQ ID NO: 359075 - DNA, 201 bp, Homo sapiens
ggcctgtctttaagaaagtgttttaaatacttccacccacgattaggtcaaagatacaactctactgagaaagaaacagaaagaaatccttgtggtttttkttttgttttgttttgtttttgcattttggtactgtggtttccataaactagaatagttgtgcaagcatggtaagtcacataccaaatgctgtatttttgc

SEQ ID NO: 359076 - DNA, 201 bp, Homo sapiens
tagatgaagggttgatgggtgcagcaagccatcatggcacgtgtatacctatgtaacaaacctgcacgttctgcacgtggaccccagaacttaaagtatawtaataataataataataaatgtttagaacaccacgtgtaaatttagcatcaactttcaacctaacgtcatatatctattagaatagatcgaaaagaaaca

SEQ ID NO: 359077 - DNA, 201 bp, Homo sapiens
tgggctcactgcacgccccgcctcctggattcacgccattctcctgcctcagcctcccaagtagctggaactacaggagcccaccaccatgcccggctaattttttttttgtattttttttttttttagtagagctggggtttcattgtgttagccagaatggtctcaatctcctgaccttgtgatccgcccgcctcagcc

SEQ ID NO: 359078 - DNA, 201 bp, Homo sapiens
agacttggcccagttgctgccatcaaaaatggaggtttagggtggtttgcctccattttggcaaaccctccgcgatgtggggcttgcagattacttaaggyggtgttcctaaaaacagatcagaactagtaacaggagctcatggcagtaagttaagttcagacaggtaagctgttggcattcaaaaaggcatgggagaat

SEQ ID NO: 359079 - DNA, 201 bp, Homo sapiens
agggcattcagaagagtactgctggctaacacagtgacaacagcaagcaaggagaataatacaatggacttgaaaagctaaccttcagtcgcccccccccmcacacacacacacacacacacacacacacacacactcactcacacatacacacacacgttactcatggtagggaaaagcaggaagtgtgtatttgctcac

SEQ ID NO: 359080 - DNA, 201 bp, Homo sapiens
ggcattcagaagagtactgctggctaacacagtgacaacagcaagcaaggagaataatacaatggacttgaaaagctaaccttcagtcgcccccccccacacacacacacacacacacacacacacacacacactcactcacacatacacacacacgttactcatggtagggaaaagcaggaagtgtgtatttgctcacag

SEQ ID NO: 359081 - DNA, 201 bp, Homo sapiens
aatttcaacattgttttgtctcaggattagggaggttcaaggagaggaggggagatgggagaatagttacagatgattaaatatcactgactgtagatcaycttaacaggtacaataataatgaaaaagttttgaaatacagtgagaattacaaaatgtgacatagagacatgaagtgaacacaggctgttggaaaagtgg

SEQ ID NO: 359082 - DNA, 201 bp, Homo sapiens
ttgaggtgccactataccaccatggttccagataataggaacttttgctgtattttttgccatttctaccgtctgactgttttgttcagatcagctgaacrtagtgtggctgtggctcgcagactgagaggtgcaattcaagctaaacatccccttaggggaccaattagtaatgattccataggaatcgttgtgcagcac

SEQ ID NO: 359083 - DNA, 201 bp, Homo sapiens
cggagacaagtttgcatgagtccatcaagtctctctacttttaaatggtatgggatttctaaaatctttttttgacataattgcagtttttaaatgcattsagatcagtgttgaaataaccatgcttgaattctctgcttttatattgaagttatgaagctttcagggaatttgaagtgtggatgataagtgtttctgtat

SEQ ID NO: 359084 - DNA, 201 bp, Homo sapiens
tttcccagaggtcatgggaatggctcctattacagtaaaatgcttacataatgataacacttagcttgtgatatttgcagttattttaaatgttattcttygaaacactgcatacaggcagcttactgtaatggtgcagtatataatatttttctattaagagaatggaatcttctgtttctatcaaacaagatatgtcta

SEQ ID NO: 359085 - DNA, 201 bp, Homo sapiens
ttttgccttctgctttggcgttctgcccttattgtaaatatcattccacagagaattccgtgatagctccgtaaagtcttgagtacaaatctgggaggackcgccccgcctgtgccggggaaacttgggtcctgggtcgatgacccctgtccttgcctttctttttccgatccttggatgagaagaagcttgcactattga

SEQ ID NO: 359086 - DNA, 201 bp, Homo sapiens
tttatagtagagaaatgtattttaaaggactcttgaggtttacagttctgtttgctgctataattagttaactacctcatatttctaggtatttttatttrtctttctaaagataaataaaagatttaaaaaaacctttcttatgacttttaacatttttttttctttgttgacctctgggcgtcagtcaccccttactgg

SEQ ID NO: 359087 - DNA, 201 bp, Homo sapiens
attaaaaattaaaaattaaaaaaagcgtctttgaggatgaagtgtatgatgaaggtggcagttcaatgagtggaaaagtgataatgattcagcccatgacrtcctacttgacagtatctgtggaataaatggaatgtaaattaacgtttccctagcgctgagtatgtgtaaacttcaacctctattttagactttttatat

SEQ ID NO: 359088 - DNA, 201 bp, Homo sapiens
accagcctggccaacatggtgaaacctcatctctataaaaatacgaaaaaaaaaaaaaattagcccggcgtggtggtgcacacctgtagtcccagctgctygggaggctgaggcatgagaattgcttgaacctgggaggtagaggttgcagtgagctgagatcgtgccaccgcactccagcctgggtgacctgagtgagac

SEQ ID NO: 359089 - DNA, 201 bp, Homo sapiens
aaactaaggagagcatctgtgaatgtgggagactctttatttcactaagtcagcaaacccatggcaaggctccatccacatactcatctgtccatacatcygtacacccatccgttcatctgtctgtctgctcatctctccatccatccatccatccatccacccacccacccactcactcacctatctatccatccaccc

SEQ ID NO: 359090 - DNA, 201 bp, Homo sapiens
ccagagtcaaagcagtaagttacacccccgatgaaatgagcacatcacacacacacacgttcatgattccacgccccgaatgggcgtcaaaggaaaccagrttcctaccagccacgcctctgccactccagctggtggcctgcaggacagaggctgcggggctgccgtgggaggtacagggtggctggagagttgagatga

SEQ ID NO: 359091 - DNA, 201 bp, Homo sapiens
atctgttagtattagcatgtaacagtgacttttatatcatatatatgaaatatttatatacttgtatatttatttacttataatgctaataccaaccaatyagagtataggacagctgaaattaatacttattttatgataaagtttacctgcaagttctttgaatgtctcattgtcttcctcttattttgtcatttgtct

SEQ ID NO: 359092 - DNA, 201 bp, Homo sapiens
gtgcccggcgctgtaaggcgctatggaggcgcgtgcccggcgctgtagggcgctatggaggtgccttccttgtggagctctgagaacacggtgtccactgygtgggcagctctgcctcattcctgcttcagtatacttggctggaccacataacttcttaaaggccattttaatcttattaacgcttaaaaagcgtatgat

SEQ ID NO: 359093 - DNA, 201 bp, Homo sapiens
ctgtgttagcccctatggatgtggggctgtgggagagcaggtgtttctggtggaggggcagcttgtgcagagacctgaagggtaggagacatctttaactscaggcgtggctttccagaatcatggtattccaccttcccagagtcaaagcagtaagttacacccccgatgaaatgagcacatcacacacacacacgttca

SEQ ID NO: 359094 - DNA, 201 bp, Homo sapiens
tccagaaattctgtgtgttttatgccaggtacttggaagccaggtcatgagtgctgactgtgcatgcccggcgctgtagggcgctatggaggcgtgtgccyggcgctgtagggcgctatagaggcgcgtgcccggcgctgtagggcgctatggaggcgcgtgcccggcgctgtagggcgctatggaggcgcgtgcccggcg

SEQ ID NO: 359095 - DNA, 201 bp, Homo sapiens
gaattctctgcttttatattgaagttatgaagctttcagggaatttgaagtgtggatgataagtgtttctgtatacagttttttgtttgtttaaattgagrcagggtctcactctgtcacccaggctggagtgcagtggtgcaatcttggcttacttcaatctccgcttccctggctcaagtgattgtccagcctgaacct

SEQ ID NO: 359096 - DNA, 201 bp, Homo sapiens
gggcatctagggacatctccccaaggaagagacagaggagaaggaaaagactgtgttagcccctatggatgtggggctgtgggagagcaggtgtttctggyggaggggcagcttgtgcagagacctgaagggtaggagacatctttaactgcaggcgtggctttccagaatcatggtattccaccttcccagagtcaaagc

SEQ ID NO: 359097 - DNA, 201 bp, Homo sapiens
gtatggctttcgttaactgtctcatcttctaatggcataacaaggaagttagttgtgggcaaataaataattatgatacagataagtttaacaaatgtttwaaaaagtccacaggatggtggtttttgataagttctcaaatttccctactttatttaaaattgatttatacaaaatttagacaagtccacagctcacaga

SEQ ID NO: 359098 - DNA, 201 bp, Homo sapiens
tggccgggcatggtggctcatgcctgtaatcccagcactttgggaggccgaggccggcagatcacgaggtcaggagatcgagaccatcctggctaacacayggtgaaaccccgttctctactaaaaatacaaaaaaaaattagcggggcgtggtggcgggcgcctgtagtcccagctgcccaggaggctgaggcaggacaa

SEQ ID NO: 359099 - DNA, 201 bp, Homo sapiens
cctggagatcaacgtaaatccagacaatcacgcttgccctggccttgctcatgaccgtccatgcttctgagctgcagtggcagaagtgggcaagtgccagrgagacagcagggctgacaaagtctgaaacacgtgccatctggccttccacaggggaaggctacccctgttctaagacagtcatttcatacgggggttttc

SEQ ID NO: 359100 - DNA, 201 bp, Homo sapiens
tttgggcagttgggacactaaggcagaaatgggtagaaataaattggagagacggactttatattatgccatgtaagaaaaaaacagaaaaagagtttggyggccaaaaaggggtaaatgcgtttagtaggaaagagttaaggtataggtgtgggttttatggaagtcttgaggaccataggaatggggagagtagcggga

SEQ ID NO: 359101 - DNA, 201 bp, Homo sapiens
tgaaggtagagcatggggaggggaagatgcagagtgggcagaaccagcactcagagactgaaactgaagctttacgtgaggaaagtgagtagctgtgtccrgtggggcagagaactgagacactgagcaggggaagaaggcaagcagaatgccttcatgtgagcagactgttttgtgtggacagtcacatccaagaacgta

SEQ ID NO: 359102 - DNA, 201 bp, Homo sapiens
taggcacaggccaccactgctgtggcagaaaccagaagcaggctgagaggatgtggtaccaagcgccagaggcttctgctactaacacaattagggtgacrtttatgttctttattctactttccaagtctgaggtgtatgattttttaaaaagcactcattaatttttaaagttcccagatttcctggagatcaacgtaa

SEQ ID NO: 359103 - DNA, 201 bp, Homo sapiens
tgatccatttttatttaatttctgtgactggtttgaggtgtgtgtctatattcattttctatcatgaggctgtccggctgttcctgacactatttgttgamaagattattttttctctactgtattgcatttgctcctttgtcaaagatcagttttatatatttatttgggtctgtttataggctctctgttttattccat

SEQ ID NO: 359104 - DNA, 201 bp, Homo sapiens
gactcctggccacaaaggatgctgattctacatctggacaatcccgactttgaaggatatccctccctctgaccacattgatcctggtagtatctactgayaccttagagggagtcctcctttctctcctctgtaaaaactggtatcatcttttaggggacctatgactgtccagagaaaggagctgtcatctttgtgata

SEQ ID NO: 359105 - DNA, 201 bp, Homo sapiens
catttttatttaatttctgtgactggtttgaggtgtgtgtctatattcattttctatcatgaggctgtccggctgttcctgacactatttgttgacaagaktattttttctctactgtattgcatttgctcctttgtcaaagatcagttttatatatttatttgggtctgtttataggctctctgttttattccattgatc

SEQ ID NO: 359106 - DNA, 201 bp, Homo sapiens
atttattaaatcacatatttttattggttttatttactacaggagtctgcatctatatatctgacccatgtaattaatcactgaaatctaaaatatgcgcygggatgtggtaactttagggtcatgtcctcctacaagttcactaaaggaataatgtagtttttcctctgtggcctccagcaacaacgatgacatgttatg

SEQ ID NO: 359107 - DNA, 201 bp, Homo sapiens
aatgcagccgcgcatggtggctcacgtctgtgatcccagcacttcgggaggccaaggtgggtggatcatgaggtcaggagatcgagaccatcccggctaaracggtgaaaccccgtctctactaaaaatacaaaaaattggccgggcgtggtggcaggtacctgtagtcccagctaatcgggaggctgaggcaggagactc

SEQ ID NO: 359108 - DNA, 201 bp, Homo sapiens
ttggctgggcgcagtggctcacgcctgtaatcccagcactttgggaggctgaggcgggcggatcacgaggtcaggagatcgagaccatcctagctaacacrgtgaaaccccatctctactaaaaatacaaaaaattagccgggcatggtggtgggcacctgtagtcccagctactcaggaggctgaggcaggagaatggcg

SEQ ID NO: 359109 - DNA, 201 bp, Homo sapiens
actgctttcctcaggttttcttctgccatctgtgacagcttcttgatctgtccccatgtgggtggctgtgtttgacgggtgttgctcgtgacagttggggwcctcctcagcgtcagtctcgacatggctgcaactagggggtcctcgggatcctcccagaatctcttcctcggcatctggctcatgataaggttttaggtg

SEQ ID NO: 359110 - DNA, 201 bp, Homo sapiens
agctctgtttttagttttttgaggagcctccatactgttttccataatggctgtagtaatttacattcctaccaatagcgtacgagcattcccctttcttygccagcatttgttgttttctgtcttttttgacaacagtcattttaactgaggtaagatgatatctcactgtggttttgatttgcattttcctgatgatta

SEQ ID NO: 359111 - DNA, 201 bp, Homo sapiens
acacacacaccccatagaatactactcagccatggaaaataatgaaatcatgtcttttgcagcaacatggatggaactagaaaccattatcttaaatgaartaactcagaaatggaaatcacatattgtatgttctcacttataagtaggagttaaataatatgtacacatggacatagagagtggaataatagatcttgg

SEQ ID NO: 359112 - DNA, 201 bp, Homo sapiens
gtcaccccagtcaacactgtaactccattcttagcttgttgacttaaaggtaggaggagcccagagtgtccctgtggcaatcttccagtttaatggaatcrttgttgtgagtcctggtggcagtgtttcttcctctggaaataagacctctaggagagcagaatgtaatgtctcaggaacaggaagcaaaaattttgctaa

SEQ ID NO: 359113 - DNA, 201 bp, Homo sapiens
cattcagaagagtactgctggctaacacagtgacaacagcaagcaaggagaataatacaatggacttgaaaagctaaccttcagtcgcccccccccacacacacacacacacacacacacacacacacacactcactcacacatacacacacacgttactcatggtagggaaaagcaggaagtgtgtatttgctcacagct

SEQ ID NO: 359114 - DNA, 201 bp, Homo sapiens
ttcagaagagtactgctggctaacacagtgacaacagcaagcaaggagaataatacaatggacttgaaaagctaaccttcagtcgcccccccccacacacacacacacacacacacacacacacacacactcactcacacatacacacacacgttactcatggtagggaaaagcaggaagtgtgtatttgctcacagcttg

SEQ ID NO: 359115 - DNA, 201 bp, Homo sapiens
cagaagagtactgctggctaacacagtgacaacagcaagcaaggagaataatacaatggacttgaaaagctaaccttcagtcgcccccccccacacacacacacacacacacacacacacacacacactcactcacacatacacacacacgttactcatggtagggaaaagcaggaagtgtgtatttgctcacagcttgcc

SEQ ID NO: 359116 - DNA, 201 bp, Homo sapiens
agtttacagtgtttcatactggatgggttagttttaatggcttttgaggatttctgtggtgttctagttgggtgatttttccctttatttttcatagggtggttacatatttgctttaggcaaatttattattggctaaatgacctgctttaccatgttatgtaggagaaatttccaagaaactaacggattagttaacaa

SEQ ID NO: 359117 - DNA, 201 bp, Homo sapiens
gaagagtactgctggctaacacagtgacaacagcaagcaaggagaataatacaatggacttgaaaagctaaccttcagtcgcccccccccacacacacacacacacacacacacacacacacacactcactcacacatacacacacacgttactcatggtagggaaaagcaggaagtgtgtatttgctcacagcttgcctt

SEQ ID NO: 359118 - DNA, 201 bp, Homo sapiens
aactttggagtcacctttgacatatcctactgcttcattatctataatttgtcaccagtttctgttggctaggcttagccagtattaaagagaattttaatttttttttttacttgaattgttgttatagtgcttccgttatttatttatatttttttattatactttaagttttagggtacatgtgcacaacgtgcaggt

SEQ ID NO: 359119 - DNA, 201 bp, Homo sapiens
agagtactgctggctaacacagtgacaacagcaagcaaggagaataatacaatggacttgaaaagctaaccttcagtcgcccccccccacacacacacacacacacacacacacacacacacactcactcacacatacacacacacgttactcatggtagggaaaagcaggaagtgtgtatttgctcacagcttgccttga

SEQ ID NO: 359120 - DNA, 201 bp, Homo sapiens
ttgtcaccagtttctgttggctaggcttagccagtattaaagagaattttaatttttttttttacttgaattgttgttatagtgcttccgttatttatttwtatttttttattatactttaagttttagggtacatgtgcacaacgtgcaggtttgctacatatgtatacatgtgccatgttggtgtgctgcactcattaa

SEQ ID NO: 359121 - DNA, 201 bp, Homo sapiens
agtactgctggctaacacagtgacaacagcaagcaaggagaataatacaatggacttgaaaagctaaccttcagtcgcccccccccacacacacacacacacacacacacacacacacacactcactcacacatacacacacacgttactcatggtagggaaaagcaggaagtgtgtatttgctcacagcttgccttgacc

SEQ ID NO: 359122 - DNA, 201 bp, Homo sapiens
tcaccagtttctgttggctaggcttagccagtattaaagagaattttaatttttttttttacttgaattgttgttatagtgcttccgttatttatttatatttttttattatactttaagttttagggtacatgtgcacaacgtgcaggtttgctacatatgtatacatgtgccatgttggtgtgctgcactcattaactc

SEQ ID NO: 359123 - DNA, 201 bp, Homo sapiens
tactgctggctaacacagtgacaacagcaagcaaggagaataatacaatggacttgaaaagctaaccttcagtcgcccccccccacacacacacacacacacacacacacacacacacactcactcacacatacacacacacgttactcatggtagggaaaagcaggaagtgtgtatttgctcacagcttgccttgacctt

SEQ ID NO: 359124 - DNA, 201 bp, Homo sapiens
ctcacactgaattttacaccactggggctcttttgcagggtgaatatagccagagatcttattttcatttgtcttatacaactctatttgtgtgtgtatakgtgtgtgtgtgtgtgtgtgtttaaattgactatttaactaccaatttcattgaaagaagtcattttccttttcagttataccattctgttgtagaatccc

SEQ ID NO: 359125 - DNA, 201 bp, Homo sapiens
ctgctggctaacacagtgacaacagcaagcaaggagaataatacaatggacttgaaaagctaaccttcagtcgcccccccccacacacacacacacacacacacacacacacacacactcactcacacatacacacacacgttactcatggtagggaaaagcaggaagtgtgtatttgctcacagcttgccttgaccttgg

SEQ ID NO: 359126 - DNA, 201 bp, Homo sapiens
acagcagtccaaccaaatttatttggattttgataattttatagattaagtcatattatcacgaataatgttagagattatgaaactaattcaaataaatatatagctttgttgcaaactatattgatttctgaagtgatttttaaaaacaaattaaaaccctatgaaatataagtggcaaaaccatttcccagttaaaaa

SEQ ID NO: 359127 - DNA, 201 bp, Homo sapiens
gctggctaacacagtgacaacagcaagcaaggagaataatacaatggacttgaaaagctaaccttcagtcgcccccccccacacacacacacacacacacacacacacacacacactcactcacacatacacacacacgttactcatggtagggaaaagcaggaagtgtgtatttgctcacagcttgccttgaccttggtc

SEQ ID NO: 359128 - DNA, 201 bp, Homo sapiens
cagcagtccaaccaaatttatttggattttgataattttatagattaagtcatattatcacgaataatgttagagattatgaaactaattcaaataaatatatagctttgttgcaaactatattgatttctgaagtgatttttaaaaacaaattaaaaccctatgaaatataagtggcaaaaccatttcccagttaaaaag

SEQ ID NO: 359129 - DNA, 201 bp, Homo sapiens
tggctaacacagtgacaacagcaagcaaggagaataatacaatggacttgaaaagctaaccttcagtcgcccccccccacacacacacacacacacacacacacacacacacactcactcacacatacacacacacgttactcatggtagggaaaagcaggaagtgtgtatttgctcacagcttgccttgaccttggtcac

SEQ ID NO: 359130 - DNA, 201 bp, Homo sapiens
agcagtccaaccaaatttatttggattttgataattttatagattaagtcatattatcacgaataatgttagagattatgaaactaattcaaataaatatatagctttgttgcaaactatattgatttctgaagtgatttttaaaaacaaattaaaaccctatgaaatataagtggcaaaaccatttcccagttaaaaaga

SEQ ID NO: 359131 - DNA, 201 bp, Homo sapiens
tgcgtaacctccatccctgccaccatggccactttgttcattggcccatagggcgatgacaggggtggctggggaaagaggctgagtggtgtccacagaayggttcatcctatccacttgattactaaactcctcctctgctgaggtcacccattggtgagcactcacgtggcatacaaatatcttcacagtttttgacca

SEQ ID NO: 359132 - DNA, 201 bp, Homo sapiens
atgtataagatgtcattattaaccatggtaaccatgctgtgcaatggatagctaaagcttattcctcctgtctgatggaaactgtatgctttgaccaagawctttcttttccccatccctgcctgtcccagcctctggtgaccaccgttctgttctctacttcaatgaattcttttaaaagttccaaatataagcgaggtc

SEQ ID NO: 359133 - DNA, 201 bp, Homo sapiens
gcttcttccaagtccctgaccatccacccaaaccgttggttacagtccatgaatccgtatataatcacacatctggccatttctccttccattcaaagtgyacaaccaggtgcactgctcaaagttttgcccactgggaagattacccttcaccgccgtccttcagggatgtcctagaaaagggctgtagtgcctcagcta

SEQ ID NO: 359134 - DNA, 201 bp, Homo sapiens
ctagtaggggctgggagacaacaatattaaataccatgtagctctcatttgagacggtgacattttgaacaatagctcgcaggaggtgtgatgtagacacytgaggaaagaacagtattccaggcagaggcacaagctagggaaaaggccaggatgtggatgtatgcctagtttgtgcaaggtcagagaggtcatgaggaa

SEQ ID NO: 359135 - DNA, 201 bp, Homo sapiens
tagaagagctttccatacactcttgggtacagtatttgcttatctgttacttgtgtattgtatgaaacctacacagaagcaatacatattttataatactractatatgatcatctaataatgtaggaatgtataagatagtctgttattattggattatgaagctatgtataacttaaacatgtgattaaattcagcctt

SEQ ID NO: 359136 - DNA, 201 bp, Homo sapiens
atatagcgttctttgtatcttctccttctctctttttattttttttggtggtggttttatttttctacttctgtttcagcaaattgaggttgatgagggargaactgtatgctaggaagaaaaatcgagctgtaggataatagaaggagtagaaaggactcgaattatcaggtgtaggtggaatatgtgctcaactacagt

SEQ ID NO: 359137 - DNA, 201 bp, Homo sapiens
tagatatgtttagatacacaaatccttagcattgtgttacagttgtctacagtattccgtacagtaccatgctgtacagtctgtggcctggaagcagtagkctatagcataaagccttggtatgtagtaggctggaccatatgggtttgtgtaagtccactctgtgatgttcacacaacaatgaaaccaactagcaacacg

SEQ ID NO: 359138 - DNA, 201 bp, Homo sapiens
cttcattttcccttctgctggagttttgggccttcatatcacaatgtattcaatgtttggttagcatttatcctcagctctcattggaaacatttctgttrggttaatgtgaacaaaaatcatgagctaattaggaaaataagtataaagtttccactataaagtattactcaatttttgataattttttttaactacata

SEQ ID NO: 359139 - DNA, 201 bp, Homo sapiens
acactggggaaatgaccacaggatgagtccagggacccactagacccaatgtaagttagacctgagctgaagctccattaattacctgacctccataagcycctactttaactggagaaccacaatgatgtttgagtcccctggaatcaacatcagctcagagccagtgtccactagtacccaaaaggtctgatcatttcc

SEQ ID NO: 359140 - DNA, 201 bp, Homo sapiens
atcatgatacaattatgtcaaaatattgcccccaatttctacatgattaaagtagcaattcttatttagtagaaagtaattttaaaatatgtttggatttygtcaaaataactgatgctatttttaaaaaacaatttattttaaaatagtttcaggacattaccttcccacccagtcatttgaaagggaaagatccctcag

SEQ ID NO: 359141 - DNA, 201 bp, Homo sapiens
agaccctattttagagatatttctttttaaatgtcaacagcagactagaatattttatatattataatttaacaggttatggtgataattattggtgataragagagtaaagcatacaaatacaaagcataaaattgtatcagctgtgattcccttcacatgacctgctgaaagcagatgtgtgcgtgagcaccagccaga

SEQ ID NO: 359142 - DNA, 201 bp, Homo sapiens
taattgtctgtttttataatttaaattactcttttgtccatttgacctagaagttttctccttagaaaaattaagtaggaatacagtagacttcctatcartttcacttctaggaacaccatgattagttagccaatgccagagctctacacgagtaagaatattctgattgctgttttgtctctgctgtccattatagta

SEQ ID NO: 359143 - DNA, 201 bp, Homo sapiens
atcaattggaactggtttctgtacatgactgccacccttacatgttaatgcctttctcatcttagagaagcacttatcttgtgctgcggctgtaacttgtrtagtttgaggtcggatggcaaactagcacagatttatttttccttcttcacggtttcatggacagaaaatttgttcttactgctgatcttagcaacctca

SEQ ID NO: 359144 - DNA, 201 bp, Homo sapiens
taattttccctgcggcattgtacctgtaaacaccctaagactgttccggcacatagaagacgatgaataagtgccagcatttatgattactttttttattrtcatatgaaattaacatatgtcattcgttcattaaatttatgctgcataaggataaagaaatattaaagcagtatttgggtataagttccatgaaaaagt

SEQ ID NO: 359145 - DNA, 201 bp, Homo sapiens
atgactgccacccttacatgttaatgcctttctcatcttagagaagcacttatcttgtgctgcggctgtaacttgtatagtttgaggtcggatggcaaacyagcacagatttatttttccttcttcacggtttcatggacagaaaatttgttcttactgctgatcttagcaacctcagcagacaattgttttttctttcct

SEQ ID NO: 359146 - DNA, 201 bp, Homo sapiens
atatttggtgctttgtgtttggaaaatgttcaaaagctcagtgatgtcagaaaattcttcatatacatgtatccccgagtcctttgttgagatgactacawgtagtgtgtgtgtgtatatatatatatgttatgtatgatatatattatatatagtatactatatatagtatatatatgttatgtattatactatattata

SEQ ID NO: 359147 - DNA, 201 bp, Homo sapiens
acagtcttaaatataagaaaataggccgggcgcgttggctcactcctgtaatcccagcactttgggaagccgaggtgggcggatcatgaggtcaggagttygagagcagcctgatcaacatggtgaatccccgtctctactaaaaatacaaaaattagccaagcatgatggcgcatgcctgtagtcccagcaacttgggag

SEQ ID NO: 359148 - DNA, 201 bp, Homo sapiens
cttaccttgcattttgtgacgttactgaactcacatattcattctagtagtttcttgcagattcctcaggactttttttttttttttgagacggagtctcrccctttcatccaggctggagtgcagtggcgcgatctctgctcactgcaagctccacctcctgggttcacgccattctcctgcctcagcctcccgagtagc

SEQ ID NO: 359149 - DNA, 201 bp, Homo sapiens
ttcatccaggctggagtgcagtggcgcgatctctgctcactgcaagctccacctcctgggttcacgccattctcctgcctcagcctcccgagtagcctccygagtagctgggactacaggcgcccgccaccacgcctggctaattttttgtatttttagtagagacggggtttcaccgtgttagccaggatggtctcgatc

SEQ ID NO: 359150 - DNA, 201 bp, Homo sapiens
agtaccaggtcacactttcatgctaaactcttactctgttactgattttttttttttttttttttttttttttttttttttttttggagacagggtcttgytctgtcatcctggctggagtacagtgacaggatcacgactccctgcagccttgaactcctgggctcaagtgatcctcctgccacagtctactgcctcagc

SEQ ID NO: 359151 - DNA, 201 bp, Homo sapiens
ttttttgttatggccattcttgcaggagtaaggtggcatctcattgtggttttgatttgcagttccttggtaattagtgatgttgagtattttttcatacrttttttggccatttgtatatcttcttttgagaattgtctattcatgtccttagcccacttactgatgggattgtttttttttttcttgcttatttgagtt

SEQ ID NO: 359152 - DNA, 201 bp, Homo sapiens
attatagtgtagttcaaacccaatgatcattcattagcaggtaatttaacttctctgtatttgtctgattttgagggtcccttttggagttgatttccaaytttattccattatggtctgagagagtccttgctatgattttgattttcttaaatttgttgagatttgtttggtggcctatctgatggtctgtcttggaga

SEQ ID NO: 359153 - DNA, 201 bp, Homo sapiens
gacaacagcaagcaaggagaataatacaatggacttgaaaagctaaccttcagtcgcccccccccacacacacacacacacacacacacacacacacacactcactcacacatacacacacacgttactcatggtagggaaaagcaggaagtgtgtatttgctcacagcttgccttgaccttggtcacagtgatagggatg

SEQ ID NO: 359154 - DNA, 201 bp, Homo sapiens
aaggtatttggctatcaaattctcttttaggcatatatttgttttttcatctgtctttccttttttaactctgactgtggaagttgtactggtagattttatcatcatcatcatcatcatcatcaatcatcactattataatagtaatcgttttatcatgtattgggtacttacaatgaaccagaaacttaaatattttgt

SEQ ID NO: 359155 - DNA, 201 bp, Homo sapiens
aggtatttggctatcaaattctcttttaggcatatatttgttttttcatctgtctttccttttttaactctgactgtggaagttgtactggtagattttatcatcatcatcatcatcatcatcaatcatcactattataatagtaatcgttttatcatgtattgggtacttacaatgaaccagaaacttaaatattttgta

SEQ ID NO: 359156 - DNA, 201 bp, Homo sapiens
taatcacacatctggccatttctccttccattcaaagtgtacaaccaggtgcactgctcaaagttttgcccactgggaagattacccttcaccgccgtccttcagggatgtcctagaaaagggctgtagtgcctcagctatccacttttgggtggtgcctgcatatcgtgcagaaccatctgtgaaccaggtcctagcctt

SEQ ID NO: 359157 - DNA, 201 bp, Homo sapiens
ggtatttggctatcaaattctcttttaggcatatatttgttttttcatctgtctttccttttttaactctgactgtggaagttgtactggtagattttatcatcatcatcatcatcatcatcaatcatcactattataatagtaatcgttttatcatgtattgggtacttacaatgaaccagaaacttaaatattttgtac

SEQ ID NO: 359158 - DNA, 201 bp, Homo sapiens
gatgtacataattgttatgattcagtaaacttatcaaatgtgatttatctaaaaataatgaatggaattgaattagttattttacatgtatttcttttcttttctttctttctttctttctttttttttttttctgagatggagtcttgctctgtcacccaggctggagtgcagtggtgtgatctcggctcactgcaacct

SEQ ID NO: 359159 - DNA, 201 bp, Homo sapiens
tttggtgatgctaaatttgctcactaggttcagatggagtctgccagatgtctccaccataaaggtatcatttctcctttgtgatgagtaatccatggaaygatactttgagatcttgtgaatataatatttctcaacaccgtatcactcagtggttttactattcattgatgatctttgcctgaattattgctttggggc

SEQ ID NO: 359160 - DNA, 201 bp, Homo sapiens
cgtgcagaaccatctgtgaaccaggtcctagccttctcttcttctgtcaactgatcatagggaactccccatgaggccatcggtacagactgacagactgrggaagagaaggcagatggcaggagtggagatcatggacattttagccacttcctcatgtaacttacttgtgccttcaggacctgctggagcctgatcatg

SEQ ID NO: 359161 - DNA, 201 bp, Homo sapiens
caaaatgctagattctcttaaagtaaagggagacgtggccgggcgcggtggctcacgtctgtaatcccagcactttgggaggccgatgcaggcagatcacraggtcgggagatgaagagcatcctggccaacatggtgaaactccgtctctactaaaaatacaaaaaaaaaaaaaaaaaaaaaaattagccaggtgtggtg

SEQ ID NO: 359162 - DNA, 201 bp, Homo sapiens
caaccaaatgagaaatgtgtggcctccaaaatccaaataggctcagtaggcattgtgcctccttcttggttgtaggaggggccaaatgcagcaacttattyttcaccttagagggaatatcttgataggccccagaccactggacccctagaaattttactgaggttaggagatccctgaattttagtcggatttatttcc

SEQ ID NO: 359163 - DNA, 201 bp, Homo sapiens
aatcccagcactttgggaggccgatgcaggcagatcacgaggtcgggagatgaagagcatcctggccaacatggtgaaactccgtctctactaaaaatacaaaaaaaaaaaaaaaaaaaaaaattagccaggtgtggtggtgcgtccctgtaatcccagctactctagaggctgaggcaggagaatcgcttgaatccagga

SEQ ID NO: 359164 - DNA, 201 bp, Homo sapiens
ctacaagtagtgtgtgtgtgtatatatatatatgttatgtatgatatatattatatatagtatactatatatagtatatatatgttatgtattatactatkttatatatagtatatatatatacgttatgtattattacttataggtatgtatttcttgttttttttaggttgcaacagcaaatcttgcctgggcttcagt

SEQ ID NO: 359165 - DNA, 201 bp, Homo sapiens
aaaatagactccctacttagtgggcccaaatcagtaaattcagcctgatccaattttatgtttcttccaccattatcccatacccttaatatccattcccwtgcctgttctccagatttatgtttatataaattagataactcaaacagttcaagtgtagtgcacctcctcatgggtcacactctcaactttacctctagg

SEQ ID NO: 359166 - DNA, 201 bp, Homo sapiens
atcccagcactttgggaggccgatgcaggcagatcacgaggtcgggagatgaagagcatcctggccaacatggtgaaactccgtctctactaaaaatacaaaaaaaaaaaaaaaaaaaaaaattagccaggtgtggtggtgcgtccctgtaatcccagctactctagaggctgaggcaggagaatcgcttgaatccaggaa

SEQ ID NO: 359167 - DNA, 201 bp, Homo sapiens
cctggtacagaaatctgtattagtcagggttctctagagggacaaaactaataggagatatatatccatagtgaggagtttattaagtattaattcacacsatcacaaggtccaacaataggccctctgccggctgaggagcaaggagagtcagtctgagtcccaaaactgaataactgggagtctgatgttgcagggcag

SEQ ID NO: 359168 - DNA, 201 bp, Homo sapiens
tcccagcactttgggaggccgatgcaggcagatcacgaggtcgggagatgaagagcatcctggccaacatggtgaaactccgtctctactaaaaatacaaaaaaaaaaaaaaaaaaaaaaattagccaggtgtggtggtgcgtccctgtaatcccagctactctagaggctgaggcaggagaatcgcttgaatccaggaag

SEQ ID NO: 359169 - DNA, 201 bp, Homo sapiens
gagatgaacatttaaaaagacctttttttatgtggtcttttatgtggatttatcccaagaataaagcctacttgattgtggcgaattaactttgtgatatratgctggatttgggttgctagtattttgttgaggatttttccatctatgttcatcagggatattagactatagttttctttttgcattgtgtctttgcca

SEQ ID NO: 359170 - DNA, 201 bp, Homo sapiens
cccagcactttgggaggccgatgcaggcagatcacgaggtcgggagatgaagagcatcctggccaacatggtgaaactccgtctctactaaaaatacaaaaaaaaaaaaaaaaaaaaaaattagccaggtgtggtggtgcgtccctgtaatcccagctactctagaggctgaggcaggagaatcgcttgaatccaggaagc

SEQ ID NO: 359171 - DNA, 201 bp, Homo sapiens
gaacaaaatggagtctcttatgtctacttctttctgcgtagacacagtaacagtctgatctctctctcttttctgcacaatgccatctgtgagtagtcagtttttttttccttttcaatctatattggatacagaataatatctattatatataatgtaaactatgttattagtatgtatgtgtgtgtatgtatatacagt

SEQ ID NO: 359172 - DNA, 201 bp, Homo sapiens
gagaccctattttagagatatttctttttaaatgtcaacagcagactagaatattttatatattataatttaacaggttatggtgataattattggtgataaagagagtaaagcatacaaatacaaagcataaaattgtatcagctgtgattcccttcacatgacctgctgaaagcagatgtgtgcgtgagcaccagccag

SEQ ID NO: 359173 - DNA, 201 bp, Homo sapiens
actttctcctgaattcagctgtctcttatttcacaggaacataatacacacacattttttttttaatttgttcccagtgctttcaaatccactgaaacacrttagaggaaactattgtcacctttgcagtcctcagcatgaaagaactctctatggtgccatagacagtaggtgcttgggcctgtctttaagaaagtgttt

SEQ ID NO: 359174 - DNA, 201 bp, Homo sapiens
agtcagtaaaaataaataacacaggcaccgtgctcagtggtaatgagtgctgtggagacagaaaagcgagaggcagggtaaatgatgtgggaccaggcaagcttggctcactgggaacacatttgaggaaaaacctaagggaagtgaaggagtgaaccatgctgagaaccgggtaggagctttccatgcagatggtacagg

SEQ ID NO: 359175 - DNA, 201 bp, Homo sapiens
gtcagtaaaaataaataacacaggcaccgtgctcagtggtaatgagtgctgtggagacagaaaagcgagaggcagggtaaatgatgtgggaccaggcaagcttggctcactgggaacacatttgaggaaaaacctaagggaagtgaaggagtgaaccatgctgagaaccgggtaggagctttccatgcagatggtacagga

SEQ ID NO: 359176 - DNA, 201 bp, Homo sapiens
gaggcttggctgtgcaacagtgaacctggaagaaatatatgctaccctggacgtgaaaggacacgtcagaacatttacatgtgtatgtgtatgtgcgtgcrcagccacacacacacaatttggtttcttgaacagaaagaagcaagcgtcctcaaaagacaacccactttctcattgggttcagttggaactctgagcttc

SEQ ID NO: 359177 - DNA, 201 bp, Homo sapiens
tcagtaaaaataaataacacaggcaccgtgctcagtggtaatgagtgctgtggagacagaaaagcgagaggcagggtaaatgatgtgggaccaggcaagcttggctcactgggaacacatttgaggaaaaacctaagggaagtgaaggagtgaaccatgctgagaaccgggtaggagctttccatgcagatggtacaggaa

SEQ ID NO: 359178 - DNA, 201 bp, Homo sapiens
gtgtttggaaaatgttcaaaagctcagtgatgtcagaaaattcttcatatacatgtatccccgagtcctttgttgagatgactacaagtagtgtgtgtgtrtatatatatatatgttatgtatgatatatattatatatagtatactatatatagtatatatatgttatgtattatactatattatatatagtatatatat

SEQ ID NO: 359179 - DNA, 201 bp, Homo sapiens
tttattttctacccatagccccaagtagagacaaggcttcttttttgcttatggagttctcagttcagctcctctcctcatgcagccacagggaagtctcrtcctgcatggaccttcccttcacatccgggagcctcaagccacaccctgcgatgggtctgttatttctttagtcggctgcagcactgctctatgctatga

SEQ ID NO: 359180 - DNA, 201 bp, Homo sapiens
ggggagaaggggtcctgggggatggaaaaccagagttgtggggagacttttcagtgttaccccgttttatacattttgatttttgaataatataacttatytcccattcaaaaattaaatttcagaattagcaagaaggtaccgaagtggcattgaattaacggtgaattgccttactttgctgttcacgtgttcattagg

SEQ ID NO: 359181 - DNA, 201 bp, Homo sapiens
ttttctctcccttcctccttgttcatttaaccaagtttatggggtttattagtcaagttaatggggttcattctcttttaagatgtttaaagaaagagttytgtaattttacaaggcttaaaaaccacatacctgataagttaataaataatacctgtctcatccttagaactaccttagtaataacaagtattgtagaaa

SEQ ID NO: 359182 - DNA, 201 bp, Homo sapiens
gcatggactggcggggtggaaacggttgcacctccacccaggggacgcacccccaccccgggccgcgtcctgttggtcccgggcttctctggggtccgggstggtagagaaaagggaaggacaataggtcgctagggtggaagagaaaggcgccgccgcctccgactcgcaggatgcgcccccgggcccactgtggcgtgg

SEQ ID NO: 359183 - DNA, 201 bp, Homo sapiens
tacagagcattttaaggaagacaaatgccaagtaatctcatcacccagagataatgtctgataaaaatttgtaaagcagagataccattttttaaaaaaakcatttcttttgaatctgcaaagtcatgtctgcacatcccagtgcatatggaaatacggataataataaatccactttggttttaattctagttctgattc

SEQ ID NO: 359184 - DNA, 201 bp, Homo sapiens
ctgtcaggcacttttgagcctaaagctgtatgacgtagagttataggcatatttccctatgctactgagtacttttaggtctctagtgagacttctttcaraagtggcttctagttgtcagaatgtatgggtggatgccatgcatgcccaggccttcttgttaccatttgtgccctgttatgtgctttaataaatgttctt

SEQ ID NO: 359185 - DNA, 201 bp, Homo sapiens
ggtacatcatgatgacacagcagcatataacatggaaaccaccccaaaacaaaatgatactaacaacataattaattcagttatcttaagaatgccaggcragtatgattgttaacatgatacttcatggggttaggggttactggcgagatttcccttccaattatgtggcgggaaaaaccagttcagcattatcaggac

SEQ ID NO: 359186 - DNA, 201 bp, Homo sapiens
gtagctttaagaaaaatataaagttataatgtagactgacactgagcttatgctaggggtacaaggagcacttactgctcgttctttgtattattaatatkttcttttaaaaacagctttattgaagtgtaatttacatactatacagttcatccatttaaagtgtgcgattcagtggtttttactatattcacggatatg

SEQ ID NO: 359187 - DNA, 201 bp, Homo sapiens
atgtacataattgttatgattcagtaaacttatcaaatgtgatttatctaaaaataatgaatggaattgaattagttattttacatgtatttcttttcttttctttctttctttctttctttttttttttttctgagatggagtcttgctctgtcacccaggctggagtgcagtggtgtgatctcggctcactgcaacctc

SEQ ID NO: 359188 - DNA, 201 bp, Homo sapiens
tgtacataattgttatgattcagtaaacttatcaaatgtgatttatctaaaaataatgaatggaattgaattagttattttacatgtatttcttttcttttctttctttctttctttctttttttttttttctgagatggagtcttgctctgtcacccaggctggagtgcagtggtgtgatctcggctcactgcaacctcc

SEQ ID NO: 359189 - DNA, 201 bp, Homo sapiens
gtacataattgttatgattcagtaaacttatcaaatgtgatttatctaaaaataatgaatggaattgaattagttattttacatgtatttcttttcttttctttctttctttctttctttttttttttttctgagatggagtcttgctctgtcacccaggctggagtgcagtggtgtgatctcggctcactgcaacctccg

SEQ ID NO: 359190 - DNA, 201 bp, Homo sapiens
gaccctattttagagatatttctttttaaatgtcaacagcagactagaatattttatatattataatttaacaggttatggtgataattattggtgataaagagagtaaagcatacaaatacaaagcataaaattgtatcagctgtgattcccttcacatgacctgctgaaagcagatgtgtgcgtgagcaccagccagac

SEQ ID NO: 359191 - DNA, 201 bp, Homo sapiens
accctattttagagatatttctttttaaatgtcaacagcagactagaatattttatatattataatttaacaggttatggtgataattattggtgataaagagagtaaagcatacaaatacaaagcataaaattgtatcagctgtgattcccttcacatgacctgctgaaagcagatgtgtgcgtgagcaccagccagaca

SEQ ID NO: 359192 - DNA, 201 bp, Homo sapiens
aatttttgatcttttaaagaaatcaagtctcatagtaacaaataataattaaagttttctttatgtatttttatagatttaatttttttattattattatyatacttcaagttttagggtacatgtgcacaatgtgcaggttagttacatatgtatacatgtgccatgctggtgtgctgcacccattaattcgtcatttag

SEQ ID NO: 359193 - DNA, 201 bp, Homo sapiens
cttcctggtttagtcttgggagagtgtatgtgtcgaggaatttatccatttcttctagattttctagtttatttgcgtagaggtgtttgtagtattctctsatggtagtttgtatttctgtgggattggtggcaatatgccctttatcattttttattgcgtctatttgatttttctctttttttctttagtagtcttgct

SEQ ID NO: 359194 - DNA, 201 bp, Homo sapiens
gtagtttgtatttctgtgggattggtggcaatatgccctttatcattttttattgcgtctatttgatttttctctttttttctttagtagtcttgctagcrgtctatcaattttgttgatcctttcaaaaaaccagctcctggattcattaattttttgaaatgttttttgtgtctctatttccttcagttctgctctgat

SEQ ID NO: 359195 - DNA, 201 bp, Homo sapiens
taccggttgttcctttccatgtttagtgcttccttcaggagctcttgtaaggcaggcctggtggtaacagaatctctcagcatttgcttgtctgtaaagtattttatttctccttcacttttgaagcttagtttggctggatatgaaattctgggttgaaaattcttttcttttaagaatgttgaatattggcccccactc

SEQ ID NO: 359196 - DNA, 201 bp, Homo sapiens
tccttcacttttgaagcttagtttggctggatatgaaattctgggttgaaaattcttttcttttaagaatgttgaatattggcccccactctcttctggcytgtagggtttctgccgagagatttgctgttagtctgatgggcttccctttgtgggtaacccgacctttctctctggctgcccttaacattttttccttca

SEQ ID NO: 359197 - DNA, 201 bp, Homo sapiens
gcttagtttggctggatatgaaattctgggttgaaaattcttttcttttaagaatgttgaatattggcccccactctcttctggcctgtagggtttctgcygagagatttgctgttagtctgatgggcttccctttgtgggtaacccgacctttctctctggctgcccttaacattttttccttcatttcaactttggtga

SEQ ID NO: 359198 - DNA, 201 bp, Homo sapiens
tctctctggctgcccttaacattttttccttcatttcaactttggtgaatctgacaattatgtgtcttggagttgctcttctcgaggagtatctttgtggygttctctgtatttcctgaacctgaacgttggcctgccttgctaggttggggaagttctcctggataatatcctgcagagtgttttccaacttggttccat

SEQ ID NO: 359199 - DNA, 201 bp, Homo sapiens
tttcaggtacaccaatcagacatagatttggtcttttcacatagtcccatatttcttggaggctttgctcattcctttttattcttttttctctaaacttcccttctcgcttcatttcattcatttcatcttccattgctgataccctttcttccagttgatcgcatcagctcctgaggcttctgcattcttcacgtagtt

SEQ ID NO: 359200 - DNA, 201 bp, Homo sapiens
ggagagatagactataccaccttatagcctaggtgaagtaggctataccatctaggtttgtgcaagtcactctatgatgttctcacaacagtgaattacarcaatgcgtttctcagactgtatctcaccattaagtgacatattactgtataaacttgcttctctcaagaacatcactttcatttaggggaagtcagataa

SEQ ID NO: 359201 - DNA, 201 bp, Homo sapiens
aacaatagaacatattccttttatccaactgtatttttgtaccccttaaccaacattatacacaatggaacattattcagccgtaaaaaggaatgaaatcrcgtaacttgcagcagcatggatgaaactgaaggtcgttaggttaaataaaattatccaggcacaaaaaggcaaatatcacacgtctgactcacttatggg

SEQ ID NO: 359202 - DNA, 201 bp, Homo sapiens
tgagccaccgcgcccggccaaggatatttcttaatttggatttgtctggtgtttcctcacaattatatgaaggtcttatttgtgacaatgagttcacgtgyggatgtgtcctcagtgcatcctgttagcaggcatgtgcttcgtcactgagcctattaaccgtctgcacttgaaaggtcctgtctgcaggtttctccacag

SEQ ID NO: 359203 - DNA, 201 bp, Homo sapiens
tttgttgtgggtccacaacagatataatttatcaattttaaaacatttccttctattcctaattttctgtgagtttgcatctgatttggtgttgggtattrtcaaatttttataagctatttcaaaatgattggagtagacaattgtattattactcaatgttgaaccactcttacattcctggtataaaggctatttaat

SEQ ID NO: 359204 - DNA, 201 bp, Homo sapiens
cttcaagtttattgaaagcaaatgacatgttttgtattttaaaacctactcagtcgctaattgtgtttttccctcttccttctctatccccagatgaatcrgctcctaaggaagtcagcagggtaagtgatgtgaatattatttctactactgcagtataggaaatgaatctgttttgtttatctctcagtactctaacac

SEQ ID NO: 359205 - DNA, 201 bp, Homo sapiens
tcctgggctcaaggaatccccccacaccttagcttcccgaatagctgggactataggtgcgtaccaccacgcctggctaatttttgtatttttgtagagayggagttttgccatgtaacccaggctggtctcgaacttctgagctcaagcaatctgcccatcttggcctcccaaagtgctgggattacagggtgagccacc

SEQ ID NO: 359206 - DNA, 201 bp, Homo sapiens
gagatcagcctggccaacatggcaaaaacccgtctctactggaaaatacaaaaattagccggacatggtggcgggcgcttgtaatcccagctaatagggargctgaggcaggagaatcgcttgaacctgaggttgtggtgagccgagattgtgccactgcgctccagcctaggtgacagagtgagactccatctcaataga

SEQ ID NO: 359207 - DNA, 201 bp, Homo sapiens
attggtgtataagaatgcttgtgatttttgcacatcgattttgtattctgagactttgctgaagttgcctatcagcttaaggagattttgggctgagacartggggttttctagatatacaatcatgtcgtctgcaaacagggacaatttgacttcctcttttcctgcttgaataccctttatttctttctcttgcctgat

SEQ ID NO: 359208 - DNA, 201 bp, Homo sapiens
cttggttttcagctccatcagctcctttaatcacttctctgtattggttattctagttatacattcttctaaatttttttcaaagttttcagcttctttgyctttggtttgaatgtcctcccgtagctcagagtaatttgatcgtctgaagccttctgctctcagctcgtcaaagtcattctccatccagctttgttccgt

SEQ ID NO: 359209 - DNA, 201 bp, Homo sapiens
aatcccagatacttgggaggctgaggcaggaaaatcgcttgaacccgggaggtagaggtagcagtgagccaagaccatgccactgcactccagtctgggckacagagcaagacttcatctcaaaaaaacaagaaaagaatttaggaaaaataactttttatatttttcacatgtataccatttcctctgtttttaattcat

SEQ ID NO: 359210 - DNA, 201 bp, Homo sapiens
ctatcatttcatttgagcccaaataacctcctttaacatctctcagtgtgttgacagcagatcctttgaggtgtttttttgtttttgttttttgtttttgtttttttttaatctaagaatggctttattgtggcttcgctttttaaagatattttcactggacttagagttcttagtgggcagattattttttcatcattt

SEQ ID NO: 359211 - DNA, 201 bp, Homo sapiens
caggaaatggctggagtccgcaagcaattccactttcttggcaagaaattaaaggaaaatgtgttgcaaataaaagggaagaatttttggaaaaagaactaaaaaaaaaaaggggattgtcattagaatgcttcttccatttaggggaagctattttttgaaaggctattgtagtcccattccccatttatgggacttctg

SEQ ID NO: 359212 - DNA, 201 bp, Homo sapiens
cgctttttaaagatattttcactggacttagagttcttagtgggcagattattttttcatcatttcataaaagtcagtaaatggtcttctggcctctgtctttttttttttccccctcctgaggggaaaagtcagcagttgttgttctcctcagtatactgtgatcttttaccctgaccgcttttacagtcattcttcttg

SEQ ID NO: 359213 - DNA, 201 bp, Homo sapiens
agtccgcaagcaattccactttcttggcaagaaattaaaggaaaatgtgttgcaaataaaagggaagaatttttggaaaaagaactaaaaaaaaaaagggrattgtcattagaatgcttcttccatttaggggaagctattttttgaaaggctattgtagtcccattccccatttatgggacttctgcacctccaaaagaa

SEQ ID NO: 359214 - DNA, 201 bp, Homo sapiens
gtctttcaccattaagtgtggtattagatatgggtattttatagatgaactttatcaggttgaggaagtttccttctaattctgatttgttgagtgtttatttttttattgtgaatgggtgttggattttgtcatatgctttatctgcatctatcgagattatcaagcagtttttgttatttattctattagtaaggtgca

SEQ ID NO: 359215 - DNA, 201 bp, Homo sapiens
aaatagcaagaccgagttccatgttgtctatgacgtatgcactttaagtagaaagatttgttgaaagcaaatgataaagatataccatggcaacagcattaaaaaaaaaaaactggtgtacctatattaaaattgtacaaaataatctttaagataggaaacattgccagatataaagaggtcaagtttactctgaaatgg

SEQ ID NO: 359216 - DNA, 201 bp, Homo sapiens
agagcaataaaacataaagcaagcaacagaaggaagattcgaaatgccagtagttctttgaaaagactattaaaatggatacaattctgactaattaaggaaaaaaaaagaaaatattaacaccaattgccaatgttgacagtgaaagaggggatagcacttagattacattgggataataagagagtattataaataata

SEQ ID NO: 359217 - DNA, 201 bp, Homo sapiens
agtataaaaaaagtatgatctataaatctgcattttgtaaaatacaaagcattttgtttgaaatattttgttcttaagatgtcgattacctcagtatcacyttaaaggaaatcattaaaagattaatatggaatgatccttaattcaccaagtgagatcttatctcactgtgaggtgattaggaattgataagctcatgga

SEQ ID NO: 359218 - DNA, 201 bp, Homo sapiens
cagtcatatcatattagtccattttcacactgctgataaagacatacccgagactgggaagaaagagaggtttaattggactttcagttccacgtggctgrggaggcctcagaatcatggcaggaggtgaaagacacttcttacatggtggcagcaaaaggaaaaatgaggaagaagcaaaagtggaaacccctggtaacc

SEQ ID NO: 359219 - DNA, 201 bp, Homo sapiens
gacacttcttacatggtggcagcaaaaggaaaaatgaggaagaagcaaaagtggaaacccctggtaacccatcagatttcatgagacttattctctatcaygagagtagcacgggaaagaccaactcccatgattcaattaccacccccctgggtcccacccacaaacttgggaattctgggagatacaattcaagttgag

SEQ ID NO: 359220 - DNA, 201 bp, Homo sapiens
gtataaaaaaagtatgatctataaatctgcattttgtaaaatacaaagcattttgtttgaaatattttgttcttaagatgtcgattacctcagtatcactttaaaggaaatcattaaaagattaatatggaatgatccttaattcaccaagtgagatcttatctcactgtgaggtgattaggaattgataagctcatggaa

SEQ ID NO: 359221 - DNA, 201 bp, Homo sapiens
aaacttttatgctctgctttcccttgaatgctttgccacttagaaatttcttccaccagataccctcaatcatctctctcaagttcaaagttccacagttccctagggcaggggcaacatgccaccagtctctttgcatagcaagagtgacctttattccagttcccaacaagttcctcatctacatctgagaccacctgg

SEQ ID NO: 359222 - DNA, 201 bp, Homo sapiens
gtgtggatccacttatatgtagatatttttcaataaatatattgaaagatttttttggagatctatgacaaaaatacagaacaacatatcctagaaatataaaaaatttaagtatgccataagtgcataaaatatatgtagatactagtcgattttatcatttactaccataaaatatacaaaaatctatgataagttaaa

SEQ ID NO: 359223 - DNA, 201 bp, Homo sapiens
gattcctcagggatctagaactagaaataccatttgacccagccatcccattactgggtatatacccaaaggattataaatcatgctgctataaagacacaatcacatgtatgtttactgtggcactattcacaatagcaaagacttggaaccaacccaaatgtccaacaatgatagactggaataagaaaatgtgacaca

SEQ ID NO: 359224 - DNA, 201 bp, Homo sapiens
aggagacatctttaactgcaggcgtggctttccagaatcatggtattccaccttcccagagtcaaagcagtaagttacacccccgatgaaatgagcacatmacacacacacacgttcatgattccacgccccgaatgggcgtcaaaggaaaccagattcctaccagccacgcctctgccactccagctggtggcctgcagg

SEQ ID NO: 359225 - DNA, 201 bp, Homo sapiens
tgcccccaaggcactctaaataatatttgccaatattagctgagtggccagtgcccgctctgactgtgggttatcatgggtgaggcaccacctctgcctctttgagagccagcattgctggggaagcatttgccagattactgaagtgtaacttttaaagcacctgtttttagtgatttcagttagttcagacatcaacct

SEQ ID NO: 359226 - DNA, 201 bp, Homo sapiens
ttaattttactctatgtctttatagttcgagtagaattcttgtaagcagtatatagttggctgatacttttttattcaatctgacagtctttgacttctartcatgatgtttagaccattcacattttatgtttaggtgtaaatctaccatcttgccatttgttttctatgtgtttaatctgttctttattcccccttttt

SEQ ID NO: 359227 - DNA, 201 bp, Homo sapiens
agtagaattcttgtaagcagtatatagttggctgatacttttttattcaatctgacagtctttgacttctaatcatgatgtttagaccattcacattttaygtttaggtgtaaatctaccatcttgccatttgttttctatgtgtttaatctgttctttattccccctttttttctctctacctttaaaattgaattttaa

SEQ ID NO: 359228 - DNA, 201 bp, Homo sapiens
ttaaatgtttgacactttcaaaagtgtggctgagctttgcttaagcacttgataaaaaaagatgcaaatttcagcttgctatataatgagggataatagtrtagtgtaagaatatatggtctttgtgggatatgaaattgagtacaggtcctagaacctattgtagtgctaccataaaaactaactcttgaattttcataa

SEQ ID NO: 359229 - DNA, 201 bp, Homo sapiens
ggaggtactgctgcacactttttttttttttttgagttggagtcttgccttgtcacccagcctggagtgcagtggcgtgatctcggctcactgcaacctcygcctcctgggttcaagcaattcttctgcctcagcctcccgagtagctgggactacaggtgcccgccaccacgcctggctaattttttgtatttttagtag

SEQ ID NO: 359230 - DNA, 201 bp, Homo sapiens
gagttcaaggccagcctagccaacatggggaaaccccatctgtagtaaaaatacaaaaattagccaggtgtggtggtgcatgcctgtaatcccagatactygggaggctgaggcaggaaaatcgcttgaacccgggaggtagaggtagcagtgagccaagaccatgccactgcactccagtctgggcgacagagcaagact

SEQ ID NO: 359231 - DNA, 201 bp, Homo sapiens
ccgggagttcaaggccagcctagccaacatggggaaaccccatctgtagtaaaaatacaaaaattagccaggtgtggtggtgcatgcctgtaatcccagayacttgggaggctgaggcaggaaaatcgcttgaacccgggaggtagaggtagcagtgagccaagaccatgccactgcactccagtctgggcgacagagcaa

SEQ ID NO: 359232 - DNA, 201 bp, Homo sapiens
tattatttccattttgttcaatgtgaaaaactttaaaataattcaatttatacctctttttgtcttttctgctatagttatatatgtagctattattgctrcatatgttatacaccccacataggttgctaatatttaaaattaaataatgaatcaattattaaagaatttaagaaatatgggctgggtgtggtgactcac

SEQ ID NO: 359233 - DNA, 201 bp, Homo sapiens
tagaatggcgatcattaaagagtcaggaaacaacagatgctggagaggatgtggagaaataggaatgcttttacactgttggtgggaatgtaaattagttsaaccattgtagaaaacggtatggtgattcctcaaggatctagaactagaaataccatttgacctagcaatcccattactaggtatatacccaaaggatta

SEQ ID NO: 359234 - DNA, 201 bp, Homo sapiens
tacaatgatattttttgccttgttgaagaaagcatccatgtaaataaaaaaataaaagaaaacagctccaaatgtatgctagtttcaataagatagcatcrcgtatctttatagtgggatccctagaaccttacccacttgaaaaggttgatgccacgaactactgccaatgaccaagacccaaattctggtcatcactgt

SEQ ID NO: 359235 - DNA, 201 bp, Homo sapiens
ttgaagtttgcaacaacaggactgcttaatggtatggatgtgaggtgtgagagacaatgaagagtcagggaggacttgtatcatcccagtcattctccctratcttgtgcatgtaactggtcatctagtcttgtcagtctgccatgtaattatgagttttattttgctactgtttctcaactgcactgctgcagtgggact

SEQ ID NO: 359236 - DNA, 201 bp, Homo sapiens
gagttaatttttgtataaagtataaggaaagtctcagttttctgcatatggctagccagttttccctacaccatttattaaataaggaatcctttccccawtgcttgtttttgtcaggtttgtcaaagatcagatggttgtagatgtgtggcgttatttctgaggcctctgttctgttccattggtctatatatatctgtt

SEQ ID NO: 359237 - DNA, 201 bp, Homo sapiens
gggtttgtgtaagtccactctgtgatgttcacacaacaatgaaaccaactagcaacacgtttctcacgtgtttccattaagtgacacacacgcatgcacayacacacacacacacacacacactcacaaacacacatatacagagacagagagaggttgcccgattgactttaaggcactggctcacgtggttgaggaggc

SEQ ID NO: 359238 - DNA, 201 bp, Homo sapiens
tgtattagtctattctcatgctgctatgaagaaatacccaagactgggtaatttataaaggaaagaggtttaattgactcacagttcttcatgtctggggmggcctcaggagacttacagttatgacagacggggaagctaacacatccttcttcacgtggcagcaggagagagaaaaatgagtgcccagcaaagggggaa

SEQ ID NO: 359239 - DNA, 201 bp, Homo sapiens
gaaatacccaagactgggtaatttataaaggaaagaggtttaattgactcacagttcttcatgtctggggcggcctcaggagacttacagttatgacagayggggaagctaacacatccttcttcacgtggcagcaggagagagaaaaatgagtgcccagcaaagggggaagccccttataaaaccatcagctcctgtgaa

SEQ ID NO: 359240 - DNA, 201 bp, Homo sapiens
agattttaaaatattttctatgattttgagtatgcagctgttcaaataatactttcagaaaaactgtattattcttaggctagtttaatgtttactaaatyactcaaaataggtcacattttgatgaaggtatagtagttattacagatatgatttaaattactcaacccaatgatttaaaatcccttgaaaatgagttta

SEQ ID NO: 359241 - DNA, 201 bp, Homo sapiens
gtacatcatgatgacacagcagcatataacatggaaaccaccccaaaacaaaatgatactaacaacataattaattcagttatcttaagaatgccaggcargtatgattgttaacatgatacttcatggggttaggggttactggcgagatttcccttccaattatgtggcgggaaaaaccagttcagcattatcaggaca

SEQ ID NO: 359242 - DNA, 201 bp, Homo sapiens
tcagtaacagctacctgcagaagttcgaccaccctctggccgctctctactccacttccaccatggagcagcaccacttctcccagactgtgtccatcctycaggtgagtcactgcacgccgtctctcgcttagtctgaagggctgtctgggagatagggatacttcataggtggaaaaggaagatcattatggcttcctt

SEQ ID NO: 359243 - DNA, 201 bp, Homo sapiens
cttctctgtaccctcaggcccaacaccacatgtaagccaccaaggcttggggcttgcacccagtaaaataacagcctgagccatacattggccccttttcrtcaccactggagttgaagcagctggtaaacagggcaccatgtcccaaggctgcatagagcaggggggcccacgaaaccatttctgccccttgggcctctg

SEQ ID NO: 359244 - DNA, 201 bp, Homo sapiens
gaggcaaagaagggggttcaggagagctaccacacttctaatgtggtgactggagggttgtttgtaatagagcttgagagtagagaaagtttatttttttrgtttttgttttttaactgtcaagttttctgtgtaggaattattcactttaaaaactcaaacaatgtggaaaatcttcaaagtaagctaagaaattccact

SEQ ID NO: 359245 - DNA, 201 bp, Homo sapiens
aggcaaagaagggggttcaggagagctaccacacttctaatgtggtgactggagggttgtttgtaatagagcttgagagtagagaaagtttatttttttaktttttgttttttaactgtcaagttttctgtgtaggaattattcactttaaaaactcaaacaatgtggaaaatcttcaaagtaagctaagaaattccacta

SEQ ID NO: 359246 - DNA, 201 bp, Homo sapiens
tgtgcagcacctctgcctgttctgcaatgcaatcttactaaacaagtatgttcattttttctaactgggtccaatcctgtttacaaaaaggtttttgaggrtggtatgcctcaattatagtagcagatttattatggtaaatactgagatcagaaagcatgtgtaactgtgttatagagtgattgcatctaggcattattg

SEQ ID NO: 359247 - DNA, 201 bp, Homo sapiens
gtaatgattccataggaatcgttgtgcagcacctctgcctgttctgcaatgcaatcttactaaacaagtatgttcattttttctaactgggtccaatcctktttacaaaaaggtttttgagggtggtatgcctcaattatagtagcagatttattatggtaaatactgagatcagaaagcatgtgtaactgtgttatagag

SEQ ID NO: 359248 - DNA, 201 bp, Homo sapiens
aagaaatatctgctaatgagaagcacagtgtttggaggctgcatccagctcacacacttgcacggggagagtgaggaaccaggttgcacagctacctcctsctctggccttgccacaaattcctgtccctttagaaaagtcatttcatttctgtgcacctcagactttgctaatataaaatgaaaggattgggatagattt

SEQ ID NO: 359249 - DNA, 201 bp, Homo sapiens
catcacagacggtgaggttaattttgtcagaaatgaagggggaaagtttaggaaaaaaacccaaaacttcatcgataaagtaatatagatggtagagcaargatagggttcatgaaagagtttggaatcgattaacagaaagtttaacacttgggacatacttccaaggagaattatgtaaattaaatttgtaattataga

SEQ ID NO: 359250 - DNA, 201 bp, Homo sapiens
taacacttgggacatacttccaaggagaattatgtaaattaaatttgtaattatagatgatgaactattgccttaagagtattgtatattcccaagaaaasttttctaagaaatatcaaaaatacatcttataccagtgcattgagtcacaaagttatctcctaaaattcaactatctcctgttagtggtgacatgatcac

SEQ ID NO: 359251 - DNA, 201 bp, Homo sapiens
aactgaattatttttggggttacatgaaaataaaagtttaatacttctccaagtctacaagtttatagataactaatttcagccgagttcagtcttttttkttcttcttttggttataaggttataaaatttataactgacatggacatttgttcgttccacacataagcattaatcactcctagatgctaggtacagatt

SEQ ID NO: 359252 - DNA, 201 bp, Homo sapiens
tataaaaaaagtatgatctataaatctgcattttgtaaaatacaaagcattttgtttgaaatattttgttcttaagatgtcgattacctcagtatcactttaaaggaaatcattaaaagattaatatggaatgatccttaattcaccaagtgagatcttatctcactgtgaggtgattaggaattgataagctcatggaag

SEQ ID NO: 359253 - DNA, 201 bp, Homo sapiens
aagctttttactttgatgaaaacatttctacacagcaaagtgaaagtgttgcttatgaagggctgacgtgtttgaatatgatgaattatttacaaaaatamaagcgtatttggccctttaaaagttggtaagtactgtgtaagaagcggctttgcataaagagcagtttactctgttggaaaaaaagagactaacaggtaa

SEQ ID NO: 359254 - DNA, 201 bp, Homo sapiens
gatgtttccggttatttctttatatctacttttacaagtaatgtcatccaggacactcttgtgtagctatctctgcatgcttttgacagtatagtaacacttttttttttttttttaacaaagagagtaagtgcagtcttgtgcatgtagcttctcaggtagcttgtggacactcacgtgggcatgtcacctactcagctg

SEQ ID NO: 359255 - DNA, 201 bp, Homo sapiens
cttttaaacaaccagatctcatgagaactctatcacgagacagcaccaggaggatggtgctaaacgattagacaccaccccataatccagtcacctctcascagcccccacctctaacacctggggccacagttcaacatgagatttacaaaagcatagacgttctcccctgggcttgtgcttacactaaacaaagtattg

SEQ ID NO: 359256 - DNA, 201 bp, Homo sapiens
gcagtcatcagcaagcacaggtggcagctgctcctgagggaggagcacagtccctgcaaccactatggtctgcaaccccctgctcaggccccctggatgcrtttgagtgtaccctcacattttccacaccagttgtttctaaactgcaactatacattgcatgaaaacattcaatgactccttgataccatcaggataaag

SEQ ID NO: 359257 - DNA, 201 bp, Homo sapiens
gttaacaagtactaaattctgtgcagtcaaccacattcagacttatataaatgacttagttgttggttttcttcagggtctttcccaagccctcttttctyttcattctgtaatgtacctactgtctttgccattctcttagaggttgacactgtgttagatgtaagctctttgaggaccaggcccacacctcttgtttgc

SEQ ID NO: 359258 - DNA, 201 bp, Homo sapiens
tacaggaggttccagtggcatcgggaagtgcattgctatcgagtgctataaacaaggagcttttataactctggttgcacgaaatgaggtaaggcttctasgttcattattactgacttgcttcttcgacttgaaattagtcaaagaggctgtgctaaacatcttagcattcacacctagaaagcgcttcttccttgatgt

SEQ ID NO: 359259 - DNA, 201 bp, Homo sapiens
gatgatttagatcaggggttgacagaactttcaccaaagggcagacagtatatatgttaggttttaaaggctgaatggtgcctaatacagctacttaagtmggctatgatagcaggaaagcagccttactagacaatgtgtaaatgaacaattgtcactgtgttccaataaaactttacttataaaaaacaggcagagggc

SEQ ID NO: 359260 - DNA, 201 bp, Homo sapiens
tgtcacacaggaatgcttagagagcatcacatacgtatctacccaaaaatcacatgctgaaaaaggcaagggaaagttctttctattgctgtgtacagtcrtcccctcttatccgcaagggatgtgagctaagacccccagtggatgcctaaaatgttaagagcccagaagagtattcactgtggccaaccctcttatagt

SEQ ID NO: 359261 - DNA, 201 bp, Homo sapiens
ccagctaaaatgggaatggaccttctaatctgacacagattactgtagcagttcactgaggtcatattttcaagagaacactttgtaacctaagagatgcyggatgttcctatcaaacatcagtattattaacaaggagaaaccaaaaaagttgaaggacagactcactagagttctcaaatcaagataaaaagatactgc

SEQ ID NO: 359262 - DNA, 201 bp, Homo sapiens
agcaaatgaataggtgaagcgggaagaaaggaattaatcagaacttaccaccttgaactgtggccaattttagttttatatatttttttctcttttatacsaatactttgtaaatgtgaatctctgcagcataaaaattggcacttaaactccctagactgtatatttgtagaaagatgtttgtgatttaggttttttccc

SEQ ID NO: 359263 - DNA, 201 bp, Homo sapiens
tgccatcttggctcactgcaacctccacctctcgggttcaagcgattctcctgcctcagcctcctgagtagctgggattacaggtgtgtgccaccacaccyggctaattttttttgtatttttagtagagacagggttttaccatgtttgtcaggctagtctcaaactcctgacctcaggtgatctgcctgccttggcctc

SEQ ID NO: 359264 - DNA, 201 bp, Homo sapiens
attttctgagaaagggcacatcagaggtaatattgttttagaaacaacatgtctgaaaatgcctttatttttattttaaccttttttttttttttttttgwgatagagtcttgctctgtcacccatgctggagtgcagtggtgcaatgttggctcactgcaacctctgcctcctgggttcaagagattctcgtgcctcagc

SEQ ID NO: 359265 - DNA, 201 bp, Homo sapiens
tatgggcgtgagccaccatgcctggccaatatacttagttctacttcttttattatatcattcttattttttaacagctttatgagatataatttatataycatacagttgacccatttaaaatatataattcaatgatttttaatgtattcatagagttgtgcaactgtcatcaaaatcaattttagaatgttttcctca

SEQ ID NO: 359266 - DNA, 201 bp, Homo sapiens
attttttttgaaacctggataatttggtcaaggtaggtgtgttttctgtcaatgaaatcttatgtaattgctcaaactccagatactttttttttttttttaatttttattttctgaagacagagtcttgctttgttgccgaggctggagtgcagtggtttgatcttggctcactgtagcctccacttcctgggcccaagc

SEQ ID NO: 359267 - DNA, 201 bp, Homo sapiens
aaacatgcagtatactttttataaggagaaaactaactttgaccagttttcaggaaaaacattaactgctgtcatggtcagaatgcaagactagactgaaacagtcttcaaatggtaggtcctgagtcttcaaatgctaggtctcaaatcacatttcatttatatcatcatgtcatcattcattcattcagcaagcctgtt

SEQ ID NO: 359268 - DNA, 201 bp, Homo sapiens
tctgtattcaatgaactgtcttttctttaaaaaatatctttaagaaatagtttggtacctgcaaaactttgatcactttttttcttttttaacaggtggtrctttgcatatcagttgatgtatctcaagactataaccaagtagagaatgtcataaaacaagtaagaggttgggctaattggaattcaccaatgtgcttga

SEQ ID NO: 359269 - DNA, 201 bp, Homo sapiens
acaagtaagaggttgggctaattggaattcaccaatgtgcttgacttttgatttgttcttgccattttgctatgtggcttggaatggacacaacttctctrtaggtttaatagttttgtaaattttatttatcagcatggatttgctgctgagtggtttttcttctctgtttcttaatgcctgctctgctacatttttcta

SEQ ID NO: 359270 - DNA, 201 bp, Homo sapiens
tgatagagcaccacattggtgagatatgggacgagcgttgcagtacagatgagctgctgggacagcgacagtcctgatgtgccgcgtagggactgatagaycatgccattctcataccataggaaccagccacagattttattgttatcaactggcctaatactcttaataatatatcgtgataatatgcttagccaatag

SEQ ID NO: 359271 - DNA, 201 bp, Homo sapiens; identical to SEQ ID NO: 76778

SEQ ID NO: 359272 - DNA, 201 bp, Homo sapiens
gacaaggctgattttgaagagagttgcttttgaaataaaatgatcacctgttctttatgtgactctcccactgaacctgcagacattatttttataccacrtgctaaggaagcccactcatctaactctgtagccctggaaaccctcttggcccctgaatgttgtttccaggttataggatctgtgttcattagtggattt

SEQ ID NO: 359273 - DNA, 201 bp, Homo sapiens
aaaacacaaaaattagctgggcatggtggcggacgcctgtaatcccagctactcgggaggttgaggtaggagaattacttgaacccgggaggtggaggttkcagtgagccgagatcaagccactgcactccagcctaggctacaagggcaaaactctgtctcaaaaaaaaaaaaaaagatagtagtgcagtgtaatgaagt

SEQ ID NO: 359274 - DNA, 201 bp, Homo sapiens
ctgaccaaaaaggtgatagtagtccgggcgcggtggctcacgcctgtaatcccagcactttgagaggctgaggtgggtagatcacttgagatcaggagttygagaccagcctggccaagatggtgaaactgtttctactaaaaacacaaaaattagctgggcatggtggcggacgcctgtaatcccagctactcgggaggt

SEQ ID NO: 359275 - DNA, 201 bp, Homo sapiens
atataaagtcacatatatatatatataaagtcacatatatataaagtgactttttttaaacaaaatttactacttttcaaaacaaaagttcagtgaggacrgtggcattggttcacattttcaccagttgctttaaggtctgcattaacagctggattcaaatagctgcttctgcattccatctgttgtaataatgttgtt

SEQ ID NO: 359276 - DNA, 201 bp, Homo sapiens; identical to SEQ ID NO: 76776

SEQ ID NO: 359277 - DNA, 201 bp, Homo sapiens
cattaaaaggctcaggaagatggcacaagtgagactttatttttcctgcttatctcgggtcaaagcaaatgcatttggtgttttttgttgttgttgttgttttgtttgtttgtttgttttgagacggagttttgctcttgttgcccaggctggagtgcagtggcacgatcttggctcactgcaacctctgcctcctgggtt

SEQ ID NO: 359278 - DNA, 201 bp, Homo sapiens
gcattaaaaggctcaggaagatggcacaagtgagactttatttttcctgcttatctcgggtcaaagcaaatgcatttggtgttttttgttgttgttgttgttttgtttgtttgtttgttttgagacggagttttgctcttgttgcccaggctggagtgcagtggcacgatcttggctcactgcaacctctgcctcctgggt

SEQ ID NO: 359279 - DNA, 201 bp, Homo sapiens
tgcattaaaaggctcaggaagatggcacaagtgagactttatttttcctgcttatctcgggtcaaagcaaatgcatttggtgttttttgttgttgttgttgttttgtttgtttgtttgttttgagacggagttttgctcttgttgcccaggctggagtgcagtggcacgatcttggctcactgcaacctctgcctcctggg

SEQ ID NO: 359280 - DNA, 201 bp, Homo sapiens
cccaaagtatttcaagtgttcattctctctggagcatttattattcagatttttgaactttctggactgatcctctaatttccttctattttctctctctytttttttttaatctcttgggccttttgttctcccttctaggtttttattcgctttatccttaaacctttttgttgaaatctttatttctactgggttaca

SEQ ID NO: 359281 - DNA, 201 bp, Homo sapiens
tgtgtactaccatgcctcaccgtttttttgtttattttttatttatttattttttgtagacatggggtctcgctcgctatgttgcctgggctggtcttgayctcctggactcaggtgatccacctgccttggcctcccaaagttctgggattacaggaggtgtgagccactgtgtctggcctgtaaatatttttgacaatt

SEQ ID NO: 359282 - DNA, 201 bp, Homo sapiens
gagctgtagtgtatgcagttcttcaacctcaccaaagtggttaagctcccataagtaggaatgcggtttctgttgcgccacatccctgccaatacttggtwttgacagactttttactttttgcctttctgatgagttttgaatagtatttcactgtggtattcattgactttttcccttctagaatgttagagatctttc

SEQ ID NO: 359283 - DNA, 201 bp, Homo sapiens; identical to SEQ ID NO: 76779

SEQ ID NO: 359284 - DNA, 201 bp, Homo sapiens
caatgctttgtgaccattttatctcacttaaagtgaacgagcacactccactgtttctgatgtgtccgactgatttctgtccacattactaggattccctytttctcttctttttcttctcttttagcaaggaaatttcaacagttcccttggctcagatgggtacatgctctcggccctgacctgtgggatggctccagt

SEQ ID NO: 359285 - DNA, 201 bp, Homo sapiens
tgccaaggccgtgcgtccatttctgagtgctgatcaatgctttgtgaccattttatctcacttaaagtgaacgagcacactccactgtttctgatgtgtcygactgatttctgtccacattactaggattccctctttctcttctttttcttctcttttagcaaggaaatttcaacagttcccttggctcagatgggtaca

SEQ ID NO: 359286 - DNA, 201 bp, Homo sapiens
ttggaatggacacaacttctctgtaggtttaatagttttgtaaattttatttatcagcatggatttgctgctgagtggtttttcttctctgtttcttaatrcctgctctgctacatttttctaggcacaggagaaactgggtccagtggacatgctggtaaattgtgcaggaatggcagtgtcaggaaaatttgaagatct

SEQ ID NO: 359287 - DNA, 201 bp, Homo sapiens
cccaaagttctgggattacaggaggtgtgagccactgtgtctggcctgtaaatatttttgacaattctttggtttaattaactttgaagtctccctgtccrcctccctttgcccccaaactaaggtaggaccctggcattgttaagggtactatgagtaattttaaaagaatgctttgttggcattttttagtcttttttt

SEQ ID NO: 359288 - DNA, 201 bp, Homo sapiens
aataaataaaataatatgtaaatggtgaggtgactagccactggaggtatccagccagagactgggagagtcatttggttggatggcatagcgagaatacyaatctaggaagcgactggactggtttctcccaaccccagctatctgtgttccttcctcatgaggaagctgttctgaaaagctctgttttaacctttggca

SEQ ID NO: 359289 - DNA, 201 bp, Homo sapiens
cactgcacccggcccacaaatcggttcttgaacaagtggtcagttgtctttctgtttgaggttgaggccagggagaagggaagaagtaatagtaggatggrtgtggggcagagtcgggggcacagagaatggtcaggcaacagggatgaggagaagcagtggccgggcagcaggggactcagttagtgaggacctggctca

SEQ ID NO: 359290 - DNA, 201 bp, Homo sapiens
ttagtgaggacctggctcatccattcttagaaagagtggtgatctcagggagctagcattgtctcataagaacaagtaaagccagcctaccctcatttttktttatgacagggttatgagattggtagattaaaagaagatgtagatgtggtttagtatattcagattttagcaaattatttgaccaagagtttcaggaaa

SEQ ID NO: 359291 - DNA, 201 bp, Homo sapiens
tcagataaggcagagggctttccctatgtgaatgcaggttgaggttgtccacaggggaggtacttggctggtctgacttggaggttctacccagtggttcytgttggttcagtggaggaggaagtgactcttgacctcctaatgtgcagaggccggttatacagggagctctggaataagcagacttctcagggacagttc

SEQ ID NO: 359292 - DNA, 201 bp, Homo sapiens
cgtcggacggctcccagggcctctgtctgggcagcaggagtggaagacactgcaaaggaggtgacttgccatactttagggccagctgttttctggggtcyaggttagggtgagctttttgcctacattctggaatcatcatggagaggggtttctcaatgcaattggtgtagttccccgcctaacagaatcaccccattg

SEQ ID NO: 359293 - DNA, 201 bp, Homo sapiens
gggtgagctttttgcctacattctggaatcatcatggagaggggtttctcaatgcaattggtgtagttccccgcctaacagaatcaccccattgttctcamcgctttttgggaatcagggcagccagtgcaggttggcagtgtaggacctcagtgtgtcttgtttactgaaggtacacgtgttgttttgaaatgcaggtga

SEQ ID NO: 359294 - DNA, 201 bp, Homo sapiens
tattattttgtccaagatacacagtgtttcattggtgtgctaggcactgtacttgctcatggggaatcagatggaaggcgacctctccagcttcaggggcwtacagtcaagtggaatgcactgaccaaaaaggtgatagtagtccgggcgcggtggctcacgcctgtaatcccagcactttgagaggctgaggtgggtaga

SEQ ID NO: 359295 - DNA, 201 bp, Homo sapiens
ctactcaggaggctgaggtgggaggatcatttgagccagggaggttgaggctgcagtgagccatgattgtagtactgcatttcgacctgggtgacagagcragaaccaatatctaaaaaaaaaaaaaattaaaattaaaaataaaaaaataaaaatttaaggccagccatggtgtctcacacctgtaatcccagtactttg

SEQ ID NO: 359296 - DNA, 201 bp, Homo sapiens
tgcatggggacacagatccgaaccatatcagatagtttgagcctaggacgtcgaggctgcagtgagccaagattgcgccactgcactccagcctgggcaayagagtaagaccttgtttcaaaacaaaaacattaagactcatatctgttccccattccctgtgtactcctcccatctctttagttaaatcaggtttagtgc

SEQ ID NO: 359297 - DNA, 201 bp, Homo sapiens
ctattagattcattcttttttcctcagacatttctcctggggtcgtccccgttcctggtctgttctagttctgccacccagcggtggtgtcaggacttgtmttcacctcacactgcacgttcccttctcccctccctttgacggagcccatgactctcacttttttggtttatctgctcattttggtggagctataatatt

SEQ ID NO: 359298 - DNA, 201 bp, Homo sapiens
actctagctttgatggtcctcagtggagccaagactccgtatgttctaagagaatggcaaaggcctccttgtcttgtgttagctactgggtagaattttaygtagtaactaggtagacactgatttagaatccagatggaccttattctagaaataggaatctgcccaaaggtagaaaattggaattatttgtaaatcagg

SEQ ID NO: 359299 - DNA, 201 bp, Homo sapiens
acttaggaggtaaaatgcaaatgcacaagtagctataatgtgtattaaaacagaaatgttcacagaagaaagagagaggttactgccagttaggtatttarggaaggctttttgagttaggtaagagttgagatggaccttttgaggaagaaaaggctaagatttggggtctgcagctccagcctggtaactagcatgcag

SEQ ID NO: 359300 - DNA, 201 bp, Homo sapiens
agcccctcgccctgcccggggcgcatgtggtggtgagtggcctcctgttgctgccccccgacttaccggcccgcgcggcctttccgccgccgaggccgcgyagcctacgtccctttttccaggccgcggtccccaggaaggcatggccaaatggggaaggtcacctgccgccgtccaccccggcgcttttcccccggcccc

SEQ ID NO: 359301 - DNA, 201 bp, Homo sapiens
atgtatgtatgtatgtatgtatatatatgtgtatatatatatataattttaaaaattcatttatgttgctgcaaaaagttggagtaaatttttttttttttactgctgcgtagtattctattgtatgtatagactacattttgttcatcagttcagcaattggtggatatttagtttgttcccagtatttttgttagtttg

SEQ ID NO: 359302 - DNA, 201 bp, Homo sapiens
tttcccccggccccggcacccggcctcgcggacccgccctccgcagcctcgggctcctcctagggccggagagcgtgcgacgggggaccccgccggccgcrgggttcccggggccccaggggttctgtggctgctcgtgaatccatgcaacatccctgggatgtggatgttttgtcctcagtttttccgatgagtcaactg

SEQ ID NO: 359303 - DNA, 201 bp, Homo sapiens
gacacgtgccatcatgcatggctaatttttgtatttttggtagagatggggtttcgccatgttgcccaggctggtcttcaactcctgggctcaagcagtcygcctacctctgcctcccaaagtgctggtattataggagtgagccactgtgccctgcctctttttctttttaattttaccatatatgcacataactctaaa

SEQ ID NO: 359304 - DNA, 201 bp, Homo sapiens
ggtttttacagtaatcttctgctgataactggctgattacccaccaaataaatctcttcagtggtggcaggttgaagctaaaaagaagtaagggatgcctrtgagtcccatagagataggtgcatttgcgtaggagacacttcccaatgatgttaaaatcctaacatggagtcagagatcttcctcccagcatgatttatg

SEQ ID NO: 359305 - DNA, 201 bp, Homo sapiens
tgttgaaatcaggtcggccccacaagtatttatttagtaccattggcatattaggcaacatcatcatagatactgcagatcctgagatgggagaggccaakgtctagttgaaggagcacacctggccattggaagccagggagggcccttggccaggtcagaagtgctggaagcagtgattctggagctgatacctgaagg

SEQ ID NO: 359306 - DNA, 201 bp, Homo sapiens
cttggaaaatcagaaggtttagctgcacagagtctgcattcttacctggcagtcatcagcaagcacaggtggcagctgctcctgagggaggagcacagtcyctgcaaccactatggtctgcaaccccctgctcaggccccctggatgcgtttgagtgtaccctcacattttccacaccagttgtttctaaactgcaactat

SEQ ID NO: 359307 - DNA, 201 bp, Homo sapiens
cattttgctatgtggcttggaatggacacaacttctctgtaggtttaatagttttgtaaattttatttatcagcatggatttgctgctgagtggtttttcytctctgtttcttaatgcctgctctgctacatttttctaggcacaggagaaactgggtccagtggacatgctggtaaattgtgcaggaatggcagtgtcag

SEQ ID NO: 359308 - DNA, 201 bp, Homo sapiens
ttgggctaattggaattcaccaatgtgcttgacttttgatttgttcttgccattttgctatgtggcttggaatggacacaacttctctgtaggtttaatasttttgtaaattttatttatcagcatggatttgctgctgagtggtttttcttctctgtttcttaatgcctgctctgctacatttttctaggcacaggagaa

SEQ ID NO: 359309 - DNA, 201 bp, Homo sapiens
atagcttaacatacttcacaacttctttctttcataggctgtggcccagtctgtctatgcaatgtagatactgttttgtgtgttttctggaatttaatacrtacatatagaaataattgctttttttctctcctttgcaataaacggacatgcatatagacggtcatcacgactaattattctgtattgctttcaggataa

SEQ ID NO: 359310 - DNA, 201 bp, Homo sapiens
attcatagcttaacatacttcacaacttctttctttcataggctgtggcccagtctgtctatgcaatgtagatactgttttgtgtgttttctggaatttamtacatacatatagaaataattgctttttttctctcctttgcaataaacggacatgcatatagacggtcatcacgactaattattctgtattgctttcagg

SEQ ID NO: 359311 - DNA, 201 bp, Homo sapiens
gtgtcaggacttgtcttcacctcacactgcacgttcccttctcccctccctttgacggagcccatgactctcacttttttggtttatctgctcattttggyggagctataatattttccaccaattttctgagaaagggcacatcagaggtaatattgttttagaaacaacatgtctgaaaatgcctttatttttatttta

SEQ ID NO: 359312 - DNA, 201 bp, Homo sapiens
ttggaggccgaggcggctggatcgcttgagctcaggggtttgagaccagcctggccaacatggtgaaaccccatctctactaaaaatacaaaaattacccrggtgtggtggtgcatgcctgtaatcccagctacttgggagtctgaggcaggagaatcacttgaacctgggaggcagaggttgcagtgagcagagatcaca

SEQ ID NO: 359313 - DNA, 201 bp, Homo sapiens
gggctggcatggtggctcacacctggcgtgttgtcctggactcccctgcttctgtccctcacgtcagagatcattgtcatccttgtcactcagttcttcamattcttccattctctgcaattctggcagtgcttctggagcccaggcctgggttgccgcagcaggccccctgcttgagttacacactttttgagccagagg

SEQ ID NO: 359314 - DNA, 201 bp, Homo sapiens
aactcaatgaaatcacaagctaaccccaagaatagtactacttatatttccatgttataaatgagggaacaggcactgaaagcttaaatacttggctcaasgtcacagctactcaatggtgaagccaggatgagaatcttgattctgatttttaggcatctagccccgtactaaatgtcttctagcagcacagaaggaatg

SEQ ID NO: 359315 - DNA, 201 bp, Homo sapiens
cgatttgcttaggacatgatatatatctctagtgaaatctatacaccatagaggaacctcgtccctccttagaagtttagcaaaatgtgtttttctgtatyaagtcaacacagaatctgtttttattttttgtcagggtttgtttttgtcttgccaaagttgtttttagagcacaaagcagtgacactgtgcacgtgaact

SEQ ID NO: 359316 - DNA, 201 bp, Homo sapiens
cagatcacttgaggtcaggagttcgagaccagcctgcccaacatggcgaaaccctatctctactaaaaatacaaaaaattagctaggcatggtggctggcrcctgtaatcccagctacttgggaggctgaggcaggagaatcgcttgaacccaggaggcagaggttacagtgagccaagatcacaccactgtactccagcc

SEQ ID NO: 359317 - DNA, 201 bp, Homo sapiens
tagaaactctgcatgccttttggaagaattcgcctctcctttggttcctctctattgcatgatattatttaagttactttttacagcaaattaagataatmtgatatctgttttcttgagactaagtaaaacaaacaaaattaggaccttggaagaattacataattacacaggtaaccttgcttaagagtattttatagt

SEQ ID NO: 359318 - DNA, 201 bp, Homo sapiens
ggctggagtacagtggcacgatctcggctcactgcaacctctgcctcccgggctcaagcggagtgtcctccagcctcctgtgaggatgaagctggggagtrtgttggtgtcttcgtgtgcgccgtctagacagactttcccttaaacctctctctttatctagacttactatccctagaaacagaacctccagtctcctgc

SEQ ID NO: 359319 - DNA, 201 bp, Homo sapiens
ttctttttattttattttgtatttttatttttgcaattgcagtctgtgctgcaagtaaaaatccttgtgtatatcttctgcacatgtgagtttttctctargactgtggtctttacccccttctctgaagcccacaagcattggaaaaacaccagctctgtaaattgccccgttttttcccgtattcctgtaatatctgat

SEQ ID NO: 359320 - DNA, 201 bp, Homo sapiens
gcgcgtcactacgcccagctaatttttgtatttttagtagagacagggtttcaccatgttgatcaggctggtctcgaactcccaacctcgtgatccgcccrcctcagcctctgaaagtgctgggattacaggtgtgagccaccatgcccagaccactcaatattattctttaggccaggtgcggtggctcatgcctgtaat

SEQ ID NO: 359321 - DNA, 201 bp, Homo sapiens
ttatacaaatgcttaagaggaaaggaatatttaaaatttatttggttatggaatttttgatgaataaaatgctatttatatttcagtataaaacataatarcaaattaataatcacacacccatcacccagcctaagaagtagaaatgatcagggtctctgaagcccccacagcagccttgtccctcttttcttgttccta

SEQ ID NO: 359322 - DNA, 201 bp, Homo sapiens
tcattttaattttttttttaatgaactttatacaaatgcttaagaggaaaggaatatttaaaatttatttggttatggaatttttgatgaataaaatgctrtttatatttcagtataaaacataatagcaaattaataatcacacacccatcacccagcctaagaagtagaaatgatcagggtctctgaagcccccacagc

SEQ ID NO: 359323 - DNA, 201 bp, Homo sapiens; identical to SEQ ID NO: 76777

SEQ ID NO: 359324 - DNA, 201 bp, Homo sapiens
ttagtctaatactgtgtgaatgtgagtaaggttaaccagatattttattttatagagatttttctttaacaagaagtttgtccttatgactgaataatacrtgaaattagtatatgtttgagggaagagcttgaatcagctgctaatttttagcttttagacaagtcatttaacttgctctcagtttcctcatctgtaaaa

SEQ ID NO: 359325 - DNA, 201 bp, Homo sapiens
ggctgcagtgagccaagattgcgccactgcactccagcctgggcaacagagtaagaccttgtttcaaaacaaaaacattaagactcatatctgttccccaktccctgtgtactcctcccatctctttagttaaatcaggtttagtgctcatattaatattatgcacacttggaccattctatagtgacatttcctttcttg

SEQ ID NO: 359326 - DNA, 201 bp, Homo sapiens
caaacaaacaacaataaaaaaatctaatattctcttgaattaagatattatgattgtatgttcatgttctgttcataatatgaaaaaaaattatgattgayctcaagttccacaattgaggtatttagtttttatttacatgatgatctaatatttttacaaatatttgaatatttgaaacattttaatgcaagtattatt

SEQ ID NO: 359327 - DNA, 201 bp, Homo sapiens
attataaccctaagactgcaagcaatatatattttattctgcttatggtttgaatttattaattggacaaatattttgttatgtatctgggctgtccagcrgtgcagagcacacacattctgttctcacagcttactgacatttacagagttttcattatattcatccttagagcagactagaagatttgtcttagaaact

SEQ ID NO: 359328 - DNA, 201 bp, Homo sapiens
gaggtcaggagttcgagaccagcctgcccaacatggcgaaaccctatctctactaaaaatacaaaaaattagctaggcatggtggctggcgcctgtaatcycagctacttgggaggctgaggcaggagaatcgcttgaacccaggaggcagaggttacagtgagccaagatcacaccactgtactccagcctgggtgacaa

SEQ ID NO: 359329 - DNA, 201 bp, Homo sapiens
gcagtgagctgagattgagccattgtgctccagcctgggcaacaagagcaaaactccatatatatatatatatatatatattcacatatatatatatatawagtcacatatatatatatataaagtcacatatatataaagtgactttttttaaacaaaatttactacttttcaaaacaaaagttcagtgaggacggtggc

SEQ ID NO: 359330 - DNA, 201 bp, Homo sapiens
gcgccggctcctcctcttcccctccgccgcggcccgccccggcccgcaaacccaaacactccaggcgcccgcccgccgcgcgtgattctcgcctcgccgcmgcccagccctgcgcgccttgcccggcggcccccgcccggccgctccgggcccctggccccgcggagcgatgctgctgctggctgccgccttcctcgtggc

SEQ ID NO: 359331 - DNA, 201 bp, Homo sapiens
cacctgccgccgtccaccccggcgcttttcccccggccccggcacccggcctcgcggacccgccctccgcagcctcgggctcctcctagggccggagagcstgcgacgggggaccccgccggccgcagggttcccggggccccaggggttctgtggctgctcgtgaatccatgcaacatccctgggatgtggatgttttgt

SEQ ID NO: 359332 - DNA, 201 bp, Homo sapiens
tcaactgaggcacagagaggctgagaaactttgccaaggacacagcggtcggtggtgtgcagggtgcggcgcgcggccccgggcgggggcagacagcgggkaagtggggtcccagccgccgggacccgccgaggcagctcggaactggaagatggcctgtgcgagtgacgggaagagccgctgccagaggattccaggaag

SEQ ID NO: 359333 - DNA, 201 bp, Homo sapiens
cagcgggctggcggtggtggcttagcggtattgggacgcctgtcccgtctacactgcttgtctctgagctcagcgtggcatctgctgattgctgctccaaygcaatcctttgctgttttctagtgggaaggatgagctaaacgacaaggcttgtgtgcgaggaatgaaggagaggtggataggtgtgatttatttcttggc

SEQ ID NO: 359334 - DNA, 201 bp, Homo sapiens
gaccactcgttggattttttgtggtgtttttctctggtctatgcacagcagagggcaaggctgggggagacaaggtttttataagtcactatctcaaaaacaagtggaagcgagtttctggctcatctgccttactacctggccccgatccagagctatttatgagcatggctgggccgtgaagctgcatgccctggcaat

SEQ ID NO: 359335 - DNA, 201 bp, Homo sapiens
tccctttgcccccaaactaaggtaggaccctggcattgttaagggtactatgagtaattttaaaagaatgctttgttggcattttttagtcttttttttttactcagtcttttaggaagaaaggtaaagattttaaaagttactcttttggaaagcagacttctgaggtgggttatagctaaagatgtggtagcagagacc

SEQ ID NO: 359336 - DNA, 201 bp, Homo sapiens
ggaggcggaggttgcagtgagccaagattgtgccactgcactccagcttgggcaacagagtgagactccatctcaaaaaaaaatatatatatatatatatatgtgtgtgtgtgtgtatatatgtatatgtgtatatgtatatatgtatacacacacacatctatctatctaatttttaagttgaaaatgaaacttcagttc

SEQ ID NO: 359337 - DNA, 201 bp, Homo sapiens
taacgccagagattattttgcctgtatttgaactttaaatcatctcacatatttttacttagtaacgttattgaaaagactgctttgtgcctttataagtgaaaaaaaagtgtttttccaatacacattaaaaaattatttaaagtatataccacctaaaagtacttcatgttataccagtggtatatgtaccatactcag

SEQ ID NO: 359338 - DNA, 201 bp, Homo sapiens
aaggagtcctagccttttatatttgaatatccttttttttctactttttaatggtttgctgctggatttcatactattgtatcttttttgaatttttcctygttttttgaacagtattttaaatcttttacttctgttttagattatgatattaagtgtatatttgttaaaattaaaaatcggtttgtgatttgagttttc

SEQ ID NO: 359339 - DNA, 201 bp, Homo sapiens
aaaggagtcctagccttttatatttgaatatccttttttttctactttttaatggtttgctgctggatttcatactattgtatcttttttgaatttttccytgttttttgaacagtattttaaatcttttacttctgttttagattatgatattaagtgtatatttgttaaaattaaaaatcggtttgtgatttgagtttt

SEQ ID NO: 359340 - DNA, 201 bp, Homo sapiens
atagaatatgaaaggagtcctagccttttatatttgaatatccttttttttctactttttaatggtttgctgctggatttcatactattgtatcttttttkaatttttccttgttttttgaacagtattttaaatcttttacttctgttttagattatgatattaagtgtatatttgttaaaattaaaaatcggtttgtga

SEQ ID NO: 359341 - DNA, 201 bp, Homo sapiens
ctgctggaggaaggggtagaaaagaggtgataatcattggctatgatgagttagagatgatcttccctccttcttccaacatagaatttccttgtctgaaraaatacatatttaagagttcaaacctttctacatagaatactaatggaaaaaaatctctctcatttccctttaatagatgaagcacagggtgataaagcc

SEQ ID NO: 359342 - DNA, 201 bp, Homo sapiens
tttaagattactaccacttattaagcactagaggggaaaaagagaaagccacaggtaactattttttttttaactcatcttctatgtgtgatcatacaagyaatttattgtaggaaatttcaaaatatagaaagcatcaagaaaaaaactaaaagcagctgggtgcagtcgctcacacctgtaatcccagcactttgggag

SEQ ID NO: 359343 - DNA, 201 bp, Homo sapiens
aatgtttacatgtgactatgtcacaaagattctttttctggatattgttaaaacttataaataagttgtacatgataaaatggcattgatactgcatttarcatacaattttgcacttagatttgagagcatttttgttgaaagagattcagtagtttcatactaaagttccaaatattacagaagtttctcagctataga

SEQ ID NO: 359344 - DNA, 201 bp, Homo sapiens
agattattaaaataattgttatctttcacaaaatattataattgtataattgcaacaatgactcattttgtggaataagtcaagtgttgatttgtctgtgkttttttccttttcttttctttctttttttttttttttttgagacggagtcttgcacggtcgcccaggcttgagtgcagtggcgtgatttcagctcactac

SEQ ID NO: 359345 - DNA, 201 bp, Homo sapiens
ttgggaggctgaagtgggagaatctcttgagcccaggaggtggaggttgcagtgagccgagattgcaccagtgtactccagcctgggtgacacagtgagaycctgtcttaaaaaaagaaaaggccttattaatcatcctaatgtgttttaaattttcctatgaaatgatttttgaagtatttgtgtattattttgatataa

SEQ ID NO: 359346 - DNA, 201 bp, Homo sapiens
tgtttatgctttgatttaaatgttgttattttgcctccctcaaacagaaagcgatagatctggctagcaaagcagcgcaagaagacaaggctgggaactaygaagaagcccttcagctctatcagcatgctgtgcagtattttcttcatgtcgttaaatgtgaggccataggttatattttatttaaaaacacgaaaagga

SEQ ID NO: 359347 - DNA, 201 bp, Homo sapiens
acaaaaatatggttgaactcattttatggtatattacttataccactttttctcaaacatgagtcattgatgtatcatcttcatgaatttttccatgtatrtgtaccattactaatttttaatatttttctttgcttattttttagaacaacatttttactagagtatagcataaatatacagagacatacaggagcccct

SEQ ID NO: 359348 - DNA, 201 bp, Homo sapiens
taacagcataaaagttgacatcataatcctataaaagcacaaaaatatggttgaactcattttatggtatattacttataccactttttctcaaacatgastcattgatgtatcatcttcatgaatttttccatgtatgtgtaccattactaatttttaatatttttctttgcttattttttagaacaacatttttactag

SEQ ID NO: 359349 - DNA, 201 bp, Homo sapiens
ataacgtgactgcttcttatttactacattctttaaaataagtaagcataacttttaatgtaaatgtctgattttgccactgaaattacaaatatttcagsttaatttttccttcatttttgccttatttgatagcaatgagtgatcatttgaatatattaaattctttttattaggaatgacagtgatggggaaggagaa

SEQ ID NO: 359350 - DNA, 201 bp, Homo sapiens
gtaggccacgcactgtccgcctagcttcaaggtgcagtttactacccaacttcaggagtatgaaacttaacagcataaaagttgacatcataatcctatamaagcacaaaaatatggttgaactcattttatggtatattacttataccactttttctcaaacatgagtcattgatgtatcatcttcatgaatttttccat

SEQ ID NO: 359351 - DNA, 201 bp, Homo sapiens
tggccgatacaaccagtttttaatagggatttctctaaattccctatcacttacaataaaggccagaaatgtaaaacaaacaaataaaagagaaaaaaaamcaaatacttaaaacatttaaatgaggaaatgtatttgaaatttcaggatgaaatagaatatgaaaggagtcctagccttttatatttgaatatccttttt

SEQ ID NO: 359352 - DNA, 201 bp, Homo sapiens
agccaaacttttagccttgctatactagtgtcttcgttttggtagtatttttgtcttgcctaccctactgggatgtctaggaaaacactgtaaggataatrtgttgacaacagaccaggtaatgaatagagaacatctttagatgccaagaacttcagtggtagatatagtccaagggcaaaatcttgagtttacactcaa

SEQ ID NO: 359353 - DNA, 201 bp, Homo sapiens
actctctggccattagctaatatggaagcttaaggttataggagtgaccagagagttaaacctttgaccacatggaaaaaatgaaaagtaactccaacaaygtaaattttttttggatatcttatgcaaaattttttgatgtgaatttgtgttagatttgctttatgttgtcattgtaaagaaaacaacacagcataactt

SEQ ID NO: 359354 - DNA, 201 bp, Homo sapiens
gaagaacattctcagttttcaaaattttctgtcagtttcagatcttcaaagacctttaatggcaggtttaatagtaacttccagaggagaaacttttacayggtacatagatatacatgtaaatgtgtatacacccatatatttgtgtgtgaactaaccataatgcttatctgagaagttactcagaaacccctttgtttt

SEQ ID NO: 359355 - DNA, 201 bp, Homo sapiens
catatatttgtgtgtgaactaaccataatgcttatctgagaagttactcagaaacccctttgttttaatccttggtgtattattttttattttttgtactytgttcagctttgaagaatttttagtaacttagagtggtccttttcattatttttcatatccttttacaggagtctaggcttagaagttagttttttaatg

SEQ ID NO: 359356 - DNA, 201 bp, Homo sapiens
tgttggtattacacagaatatatgggatttccatcactttactcttctgaaataaagcttttgtagacattcatagaaatgattaatactgctttccttcyatttgtcttttttataattgggtttgtctaagacaagcaactttgaactatctgcaaaaatgtaagggaaaaatatgaaagcttcagaatattaaataat

SEQ ID NO: 359357 - DNA, 201 bp, Homo sapiens
aggcttagaagttagttttttaatgaatctctgatattagcatatttttctaaccatttcgatcttaattgtaactaattattttaaaattctggttagtwgatttttcatagaatggtattctgcttcacttaagtgtaagtgaatgatattttccttttgaattatactgacttggaaaattgatctcgtttaagaaaa

SEQ ID NO: 359358 - DNA, 201 bp, Homo sapiens
acctgggaggcagaggttgcaatgagccaagatcacgccactgcgctccagcctgagccaacagagtgagactccaactcaaaaaaaaaaaaaaagaatasggagtttatcgttagtatcttatggcagactgcaaatattcatatttaaacttaggttaaagttcatagcaataatgataatatgacggttttttatttt

SEQ ID NO: 359359 - DNA, 201 bp, Homo sapiens
aatgacaaaccctcctgatgctccttatccccatccctggctgtatttttccccatagtgcttgtcatctaacatacgatataatttactattttccttaygtgatttctcccactaacaggtatgctatgaaatcagagtttcttgtctgttttgtcctctgctgtatctccagtgtctagaagagtgctggtgcctgat

SEQ ID NO: 359360 - DNA, 201 bp, Homo sapiens
tccagctgtcactgagactcccttgacagcagaagcttctcttcccttgtccatagaagctcttctctcttgcttgaaaaccctgtaaggatctcttctgrgatgattacctgacaaggcgatgccagtttttcttttgtactgaacagcaatcttcgtttacagtaggacccactttggctaatttaagcaaaaagggat

SEQ ID NO: 359361 - DNA, 201 bp, Homo sapiens
taaaataggtaagtttataaagtggctttgttcttactggtctagtgaagttatgataaatttctgtctcggtgattgagaactacacaatcaaaaatgtrttcaaactagctcaccctggcccaccaaaaccgatagtacatctttcccagctgcgagttcagtgacctcatactagtaatttaaagtctgctctgatgg

SEQ ID NO: 359362 - DNA, 201 bp, Homo sapiens
tttgctagtccacatcacgtatttccattaaaacctaatgatgatgaaccatgtaacctcttgcaggaagaccacccaaactacccccaccctacttttgrgtttctttagcagttaaattgctgctgctgctgtgttaagatttttctctggagcatgttctattgatcatgtttagatcatttagattgtaagttctga

SEQ ID NO: 359363 - DNA, 201 bp, Homo sapiens
agcaaccaaaatctatcccattacccaggggataactactttttgttgtatattcttaattttttttccaaaagtaaacattctaataaaacatacaaaaytattatacattttaactttcctggtaatggattaagtcttaatgttcaattttgtttcaaatacatatttcagattactgtttatttcaggttcgcggac

SEQ ID NO: 359364 - DNA, 201 bp, Homo sapiens
tatttcaggttcgcggaccttcccgagctgatcctaaccatcttgtagatgatctgctaacaccttgctctccaggtgaccctggtgccattgaaatgacrtggatggatgtccctggagataaacttttggagccagttgtttccatggtttgaaattttgtttgtttttaagaaaatattttaaaacattatacttcat

SEQ ID NO: 359365 - DNA, 201 bp, Homo sapiens
aaaggtaagtcatttttatctatcctttcctatcttttttttttttttttgagacagtctcactctgttgcccaggctggagtgcagtggcactatctggrcttgctgcaacctccgcctcccgggttcaagcaattctcatgccttagcctcctgagtagctggaattacaggcgtgtgccaccacgcctggctaatttt

SEQ ID NO: 359366 - DNA, 201 bp, Homo sapiens
tggccttattccagttgtaaagcaagacactttttttgtctgctctattggatttggttttgtttccctctccctaccctgccccaggtaaaaatcagttkcatatctttaattttcgaaaagatacattttttttttcttttttgtttttttgagacaagggtgtcgctgtgttgcccaggctggagtgcagtggcgcaa

SEQ ID NO: 359367 - DNA, 201 bp, Homo sapiens
tgctcttcatctgcttttcagtgttcctgtttacatttaattgtttaagctttctgtgtttaccatccacacctgtaaagccctttcattctgttctactrtagcacagtggcataacagaggggacataggtttttggctccattcagatcttgattctgttcaagggtctgccacttagaactttctaattgtgggcaa

SEQ ID NO: 359368 - DNA, 201 bp, Homo sapiens
catgtgaatcttttgcagtgtctacctcacccacagccccaccgtcctatgataaccaaggcaattccattttggcataaaacatgtcatgcttttatctycctttatatgttattgttttaaaaatgatataatgccttatttttggctttatcacttttatacttaacattgtatcaggaatatctttccaataaacta

SEQ ID NO: 359369 - DNA, 201 bp, Homo sapiens; identical to SEQ ID NO: 76791

SEQ ID NO: 359370 - DNA, 201 bp, Homo sapiens
ctgcctcagtctcccaagtagctgggactataggcgcatgccgctacgcctggtcaattttttgtgttttagtagagacggggtttcactgtgttgcccasgctggtcgcaaactcctgagctcaggagaattttagtttgagataattgtagattcacacgcagttgtaagaaatactgagaatccagcattccctttat

SEQ ID NO: 359371 - DNA, 201 bp, Homo sapiens
caggaaccaaagtggggagatcctatttttcttcatcacttggtagccagtacctgggccctttatgtaaccttggcatatcaggtgctgccactcaggtycttcagtcttgaacaagtaacagagatggcaggacatttaaaatagaatcatagcagcatcaccagcatctaactggatgggactctggtagctcctagt

SEQ ID NO: 359372 - DNA, 201 bp, Homo sapiens
atattattacaaatatttcttaatgttattttagtgatcctttggtgttctgttttgtggcatcctttatgatttaagtttccaggttttgtttttgttayttaaaagacctctctgataatatctgtgctcagtaaaccttttagttaattactggattgaaatatatgagtatttttcagattcttgatatttcattgc

SEQ ID NO: 359373 - DNA, 201 bp, Homo sapiens
atagttttactacctaaattaacccagttggaatgttttaataagtcatgtttgccctttatttgtatgtatctgtgcataatttttttttttttttttttgaggtggagtctcactctgttgcccaggctggagtgcagtggcatgatcttggctcactgcaaccaccgcctcccgggttcaagcaattctcctgcctca

SEQ ID NO: 359374 - DNA, 201 bp, Homo sapiens
tttaagtcagaattcttttaggtgtatgcttatggatgtctagttcctctagcaccacttcttaaaaagcctgactcggtgccattgactggctttttgcrtcattttcaaaaatctcttggctttattagtatggatttatttctgggactttttaaaaaaatgccacaaaagtagtccatgttccttatggacattttt

SEQ ID NO: 359375 - DNA, 201 bp, Homo sapiens
cagttgtaagaaatactgagaatccagcattccctttatccagttgtctgcagtggcagcatcttgtagaactgggacaatatcacaaccaggatattgayattgatacattccaccactcttactcatattttcccagttttacttgtcctcatgtgtttttatgtgtgtgggtgtggttgtttgtgcagttttatcaca

SEQ ID NO: 359376 - DNA, 201 bp, Homo sapiens
agaaattaagtgactaaattctggtgaatagaaatatggacacttttattcttttctttatattttatctttatttttaatttctcaaaatgaagttttarggggctgggcgcagtggctcaggcctgtaatcccagcactttgggaggccgaggcaggcggatcacctgaggtcaggggttcaagaccaacctggccaac

SEQ ID NO: 359377 - DNA, 201 bp, Homo sapiens
ctcaggcctgtaatcccagcactttgggaggccgaggcaggcggatcacctgaggtcaggggttcaagaccaacctggccaacatgttgaaaccctgtctytaataaaaatacaaaaaaaaatagcttggtgtggtggctggcgcctgtaatcccagctactcaggaggctgaggcagaatcatttgtacctgggaggcag

SEQ ID NO: 359378 - DNA, 201 bp, Homo sapiens
ccaccacttgactgtgtgactccatgttttatgttcatatactagctgataaaacttgaaaatttagctttgaatttaggctacttgacctgtgagatacrtaactattacattttatcaattctgaagtaaaccatttatttttcttccctgctacaatagaggaagcatggtcttccagcgggagacctgttcctccca

SEQ ID NO: 359379 - DNA, 201 bp, Homo sapiens
taagacggagttcctagtgcaaatgcaaggtagtgttactaattttttttttctttttgagacggagtctcactctgtcgcccaggctggagtgcagtggygcgatctcagctcactacaacctccacctcccaggttcaagcaattctcatgcctcagcctcctgagtagctgggattacaggcgcacaccaccatgccc

SEQ ID NO: 359380 - DNA, 201 bp, Homo sapiens
agccccccatgtagcagctgggattacaggcatgcaccaacacacccagctaatttttgtagagacggggattcgctgtgttggccaggccagtctcaaastcctgaactcaggtgatccacccccgttggcctcccaaagtggtagaattacaggcgtgagccactgctccctgctgtatctgcattttaaaagtgaggg

SEQ ID NO: 359381 - DNA, 201 bp, Homo sapiens
tattgtaataaaatgtactgggcaaggaggcaaggtctgtgggatgggaggcggtaaggggccaaattagtagagtatccattcaaatgaagtggaaaggrttgatcaaaggagaaaaattgaagatggagaagagtcaagcttgtatctgcatttatttttttttttttgagacagagtctcactctattgcccaggcag

SEQ ID NO: 359382 - DNA, 201 bp, Homo sapiens
tttattacagtatattgtaataaaatgtactgggcaaggaggcaaggtctgtgggatgggaggcggtaaggggccaaattagtagagtatccattcaaatraagtggaaaggattgatcaaaggagaaaaattgaagatggagaagagtcaagcttgtatctgcatttatttttttttttttgagacagagtctcactcta

SEQ ID NO: 359383 - DNA, 201 bp, Homo sapiens
atgcatgtcctttaacatggtctgagtgaaatgaattcagtcctgggtggtctgcatgtgagatcctatcgaaggctgaatacacaaacaccacctgccaycccactgaccttcctagtttctgaagtccttgatcacagcagggaaactccattttgttcaacaaaccttagctatttaagaacacaccctctttgtact

SEQ ID NO: 359384 - DNA, 201 bp, Homo sapiens
ctggttcctagtcctattgactactccctaacacctgcttcctgctcacgctatttcaaaaaggttgttagtacataaaactttcccaattttataatgcrtttctttaacatcattatttcatgttgtcttctaactttggtgaaatagtctttcttaatttaaagataacgtaattttttgcaggtgccattgttatag

SEQ ID NO: 359385 - DNA, 201 bp, Homo sapiens
gcccaggctggagtgcagtggcgcgatctcagctcactacaacctccacctcccaggttcaagcaattctcatgcctcagcctcctgagtagctgggattmcaggcgcacaccaccatgcccggctaatttaatgttactgatttttaaagtcgtttttgtttattttataacaatttttataacagtaatgaaaaattca

SEQ ID NO: 359386 - DNA, 201 bp, Homo sapiens; identical to SEQ ID NO: 76789

SEQ ID NO: 359387 - DNA, 201 bp, Homo sapiens; identical to SEQ ID NO: 76790

SEQ ID NO: 359388 - DNA, 201 bp, Homo sapiens
caaatctgaaatctcagccattctgctatcctgcccctcctgtgttctgttttgtctgcaagaacaagttaagcatctgtggctgagataaagttttatargaaggctgtggtcttgagatacccagtttgagtaacaatgaactaggtaatctggaccaacccttttgctgtgaacaacagtatccagtattactcatga

SEQ ID NO: 359389 - DNA, 201 bp, Homo sapiens
tagccagccacctaatggtggttagtcttggacgtaggtgctaacacagtagctagagtgggacagacatgtgatttgcctggaggtgaggtgtgtttccraatctgaaatctcagccattctgctatcctgcccctcctgtgttctgttttgtctgcaagaacaagttaagcatctgtggctgagataaagttttataag

SEQ ID NO: 359390 - DNA, 201 bp, Homo sapiens
atccataatcattcatccagaaatctgcatgttcacacagacatctggaatgacttccacataatgctcatgatgttattagattgattttttttttttttaacttactttacttcttgtatccccttcaggtctattccgatgtctctttttcagtgaaaccttccttggccatcctactgaaaatgacaaaccctcctg

SEQ ID NO: 359391 - DNA, 201 bp, Homo sapiens
gtcttcacaaaaatcagcaagagaggtacatgtagccagccacctaatggtggttagtcttggacgtaggtgctaacacagtagctagagtgggacagacrtgtgatttgcctggaggtgaggtgtgtttccaaatctgaaatctcagccattctgctatcctgcccctcctgtgttctgttttgtctgcaagaacaagtt

SEQ ID NO: 359392 - DNA, 201 bp, Homo sapiens
cctaatgatgatgaaccatgtaacctcttgcaggaagaccacccaaactacccccaccctacttttgggtttctttagcagttaaattgctgctgctgctgtgttaagatttttctctggagcatgttctattgatcatgtttagatcatttagattgtaagttctgagagttacattttccccagcaattaatatagtgt

SEQ ID NO: 359393 - DNA, 201 bp, Homo sapiens
tactatttcatttggtcttcacaaaaatcagcaagagaggtacatgtagccagccacctaatggtggttagtcttggacgtaggtgctaacacagtagctrgagtgggacagacatgtgatttgcctggaggtgaggtgtgtttccaaatctgaaatctcagccattctgctatcctgcccctcctgtgttctgttttgtc

SEQ ID NO: 359394 - DNA, 201 bp, Homo sapiens
ttttatttcatgaattccagacataggaacactgtggccaaaataacccaaaaatgcacgaaagattcagccacttcaaactggctcccaggctattttgrttttatttgtttgtttttaatgtgttctggatattatccctttaacctaaatatatatgtttaaccttggcacatacaggcccacttaacttagtatctg

SEQ ID NO: 359395 - DNA, 201 bp, Homo sapiens
cctttctacatagaatactaatggaaaaaaatctctctcatttccctttaatagatgaagcacagggtgataaagccaagcaaagtatcagggcaaagtgyacagaatatcttgatagagcagaaaaactaaaggagtacctgaaaaataaagagaaaaaagcacagaagccagtgaaagaaggacagccgagtccagcag

SEQ ID NO: 359396 - DNA, 201 bp, Homo sapiens
agccagtgggtgagcatacaggtaaatacaatgacagtgatgggatgagagagtgcagtgggggcagatagcaaagagaaggaatgaggtgcagcctttgytatagcaaattagggaggcctctctaaggacttgccatctgaactaggactgaaaaggagacatcatgcatctgtctggggaaaggagggaagagcattc

SEQ ID NO: 359397 - DNA, 201 bp, Homo sapiens
gtcgatggaaatatctagtggagagaaattgttaagaatgacagaagtgaagtaaccaaaaggaagaagatactgaaaaaggagtagggaattttttttttcattcgttaaacaatttcgagtacctgttgtatgccggcaccattctaggcatgggtagctcaaggtgaagtcctgtcctcatggaacctacctccctaa

SEQ ID NO: 359398 - DNA, 201 bp, Homo sapiens
tggagtgcagtggcgcgatctcagctcactacaacctccacctcccaggttcaagcaattctcatgcctcagcctcctgagtagctgggattacaggcgcrcaccaccatgcccggctaatttaatgttactgatttttaaagtcgtttttgtttattttataacaatttttataacagtaatgaaaaattcaagcagaat

SEQ ID NO: 359399 - DNA, 201 bp, Homo sapiens
gtgtcattcacttcagttcatatcatgacgtaggcattttattatttcacataatcacaagaaggttgagaacagtgcaataagatgttgagagagagaaaccacattcacatcacttttattacagtatattgtaataaaatgtactgggcaaggaggcaaggtctgtgggatgggaggcggtaaggggccaaattagta

SEQ ID NO: 359400 - DNA, 201 bp, Homo sapiens
tgaaatttcttttgattaaaacaggtgtcagcaaactatggctcatgggccaaagctgcccagctgcctgtttttggaataagctttatcagaacacagcygtgcccattcttttacatattgttgtctagggctgctttcgtgccgtaacaacaaagttgtgtggttgtgtggagaccgtatggcccacgaaacctaaaa

SEQ ID NO: 359401 - DNA, 201 bp, Homo sapiens
cctgtgtcattcacttcagttcatatcatgacgtaggcattttattatttcacataatcacaagaaggttgagaacagtgcaataagatgttgagagagagaaaccacattcacatcacttttattacagtatattgtaataaaatgtactgggcaaggaggcaaggtctgtgggatgggaggcggtaaggggccaaatta

SEQ ID NO: 359402 - DNA, 201 bp, Homo sapiens
aagtatcattgtacgtgatgcccttatgcagcctgttaggaaagtacagtcagctactcattttaaaaaggtaagtcatttttatctatcctttcctatcwtttttttttttttttgagacagtctcactctgttgcccaggctggagtgcagtggcactatctgggcttgctgcaacctccgcctcccgggttcaagcaa

SEQ ID NO: 359403 - DNA, 201 bp, Homo sapiens
tggcactatctgggcttgctgcaacctccgcctcccgggttcaagcaattctcatgccttagcctcctgagtagctggaattacaggcgtgtgccaccackcctggctaattttttgtatttttagtagagacaggatttcaccatgttggccaggctggtctcgaactcctgactccaggtgatccacccacctcggcct

SEQ ID NO: 359404 - DNA, 201 bp, Homo sapiens
aattgtataattgcaacaatgactcattttgtggaataagtcaagtgttgatttgtctgtgtttttttccttttcttttctttctttttttttttttttttgagacggagtcttgcacggtcgcccaggcttgagtgcagtggcgtgatttcagctcactacaacctccacctcccaggttcaagcgattctcttgcctca

SEQ ID NO: 359405 - DNA, 201 bp, Homo sapiens
ctgcagcagacctctcagcggctccatcctttacttcttttaaagctgattatttcagttaacaagaagaagattccctgtttattttttgcatttactartattttatttctaaaatactaatctgggaccggtggtagatcagaaagtagagcagtcaaaaaagacaaaaatccctgacctcatgcagctaaaatatta

SEQ ID NO: 359406 - DNA, 201 bp, Homo sapiens
gggaatgcagataactaaaaatcaaaattatataatgtaataaagctgcacagtattctccacttccctgtggttttactttccacagtttcaataacccraagttaacctgggtccaaaaattttaaatgaaatattctagaataaatagttcataattttgaaacactatgtcacaatgcctgtgtcattcacttcagt

SEQ ID NO: 359407 - DNA, 201 bp, Homo sapiens
aagtcaataaggcacaaaagagtagcctaaaatacttgtattgagtccccgtcgtggacttccggtagtttgttgaacaagcagttattggagtgcctgayagaggcatcaaaggtaatggaagaactccttaacccatgataattgattctgaagaaagaccactcaaagtagacccacttaaacagagattaaaatttc

SEQ ID NO: 359408 - DNA, 201 bp, Homo sapiens
acctaatgatgatgaaccatgtaacctcttgcaggaagaccacccaaactacccccaccctacttttgggtttctttagcagttaaattgctgctgctgctgtgttaagatttttctctggagcatgttctattgatcatgtttagatcatttagattgtaagttctgagagttacattttccccagcaattaatatagtg

SEQ ID NO: 359409 - DNA, 201 bp, Homo sapiens
aacctaatgatgatgaaccatgtaacctcttgcaggaagaccacccaaactacccccaccctacttttgggtttctttagcagttaaattgctgctgctgctgtgttaagatttttctctggagcatgttctattgatcatgtttagatcatttagattgtaagttctgagagttacattttccccagcaattaatatagt

SEQ ID NO: 359410 - DNA, 201 bp, Homo sapiens
gaatcacgtgaaccagggaggcagaggttgcagtgagccgagattgcacaaccgcaccccagcctgggcaacagagcgagactctgtctccaaaaaaaaaacaaaaaatagggccaggtacggtggctcatgcctgtaatcccaacactttgggaggccgaggcgggtggatcatgaggtcaggagatcgagaccatcctg

SEQ ID NO: 359411 - DNA, 201 bp, Homo sapiens
aaacttataaataagttgtacatgataaaatggcattgatactgcatttagcatacaattttgcacttagatttgagagcatttttgttgaaagagattcrgtagtttcatactaaagttccaaatattacagaagtttctcagctatagagcaacttctgagaattttttaatatatctgtttttggtctttaagattac

SEQ ID NO: 359412 - DNA, 201 bp, Homo sapiens
ccaagaaaggaaatgtgcagggtatttttgaaaaattgccttattctgcacccatctctagaggcaacggaaactttaaattcttttcattgtcacagagwgttacctggagaaaaaacagtctgctcagaccacttaaattatccctcatcgttgcttctctgtctccaaataccgaaattctaagaaagcaagcaaaat

SEQ ID NO: 359413 - DNA, 201 bp, Homo sapiens
gtggcagcatcttgtagaactgggacaatatcacaaccaggatattgatattgatacattccaccactcttactcatattttcccagttttacttgtcctyatgtgtttttatgtgtgtgggtgtggttgtttgtgcagttttatcacatgtagatatgtgttacattttgagagttctttatgtattctcgatactagtt

SEQ ID NO: 359414 - DNA, 201 bp, Homo sapiens
agtgagaccctgtcttaaaaaaagaaaaggccttattaatcatcctaatgtgttttaaattttcctatgaaatgatttttgaagtatttgtgtattattttgatataagtatagaaacttaaatgtacagatgtaaggctgcttctgacacatctagaatatttttgagtagaatctggtgcatttatacctcataaagta

SEQ ID NO: 359415 - DNA, 201 bp, Homo sapiens
ttttcactcttcacagttctgtattacattcatttattttgtatggtaaaaattagcacttcagtttttgccacttttatcccattcacttgatgatttgygccagcattctagcttaccatccagtaccaagaaaggaaatgtgcagggtatttttgaaaaattgccttattctgcacccatctctagaggcaacggaaa

SEQ ID NO: 359416 - DNA, 201 bp, Homo sapiens
cagtgagaccctgtcttaaaaaaagaaaaggccttattaatcatcctaatgtgttttaaattttcctatgaaatgatttttgaagtatttgtgtattattttgatataagtatagaaacttaaatgtacagatgtaaggctgcttctgacacatctagaatatttttgagtagaatctggtgcatttatacctcataaagt

SEQ ID NO: 359417 - DNA, 201 bp, Homo sapiens
aatgcaggggttggtgtagacaatgatggaattttggttctgggagctacaaatataccctgggttctggattctgccattaggcgaaggtaggataatayagtaaatatcttatttctcactgcagatgtaacaagtagatgataattctctttttgtcttgtcaggaagcattctaacaacttttcaaaagatttgtaa

SEQ ID NO: 359418 - DNA, 201 bp, Homo sapiens
ttttaaaatattgttttgatccttagaggtttagagtgaaaatctttccagagtattcctcagtatagatgatacaattaagtgttaaaattctcatgacrtttttctaaatctaaattttaggcaagagaacaccttggaggggaatcctattatttgggccgcctggaacaggaaagtcctacttagccaaagctgtag

SEQ ID NO: 359419 - DNA, 201 bp, Homo sapiens
acagtgagaccctgtcttaaaaaaagaaaaggccttattaatcatcctaatgtgttttaaattttcctatgaaatgatttttgaagtatttgtgtattattttgatataagtatagaaacttaaatgtacagatgtaaggctgcttctgacacatctagaatatttttgagtagaatctggtgcatttatacctcataaag

SEQ ID NO: 359420 - DNA, 201 bp, Homo sapiens
tggatataatttttgtacaatattctggtatcaagcagtgtacacagtagatgatcagaaagtaccttttaactgaactcttttcccctactagactccaygcagggcagaaatccttttgcctgtgcacatgttacggttttgatacatattggttgaatgaatgagcaaacaaatgtacttcctgttagaaggcttatg

SEQ ID NO: 359421 - DNA, 201 bp, Homo sapiens
acacagtgagaccctgtcttaaaaaaagaaaaggccttattaatcatcctaatgtgttttaaattttcctatgaaatgatttttgaagtatttgtgtattattttgatataagtatagaaacttaaatgtacagatgtaaggctgcttctgacacatctagaatatttttgagtagaatctggtgcatttatacctcataa

SEQ ID NO: 359422 - DNA, 201 bp, Homo sapiens
aaccatgaaagtctgctacctagctggaggctgaggtgggcagatcacctgaggtcagaagatcgagaccagcctgaccaacatggtaaaaccccgtctcyactaaaatacaaaaactagccaggcgtaatggcgggcacctataatctcagctacctgggaggctgaggcgggagaattgcttgaaaccaggaggcagag

SEQ ID NO: 359423 - DNA, 201 bp, Homo sapiens
atatgtgtgtgtgtgtgtatatatgtatatgtgtatatgtatatatgtatacacacacacatctatctatctaatttttaagttgaaaatgaaacttcagytctaggaaaggtatacggactcttcacttttcactcttcacagttctgtattacattcatttattttgtatggtaaaaattagcacttcagtttttgcca

SEQ ID NO: 359424 - DNA, 201 bp, Homo sapiens
caagttgggctggctggactgttctctttgatgtgatctctcatcatgcagtagtccagcctgagtttctttccatggcagcttactcccaatcccggaarcttcaatgcctcttaaggcccagaccaagaaataaacaagttagaagaccagtcaagatttacggcatgaaaaataaattctacttcttcatgggaggac

SEQ ID NO: 359425 - DNA, 201 bp, Homo sapiens
cttcatgttataccagtggtatatgtaccatactcagacactgacttgtaaatgtatacatgtaaaataggaaaatgaaattcaagtaacagttgctttcrtaacagttaagtgaaacagtgttattcatctgcatatcattcttttgcagatactgtgtacacatccatagtttgcacctagcagttttttttgttttgt

SEQ ID NO: 359426 - DNA, 201 bp, Homo sapiens
gaggcggaggttgcagtgagccaagattgtgccactgcactccagcttgggcaacagagtgagactccatctcaaaaaaaaatatatatatatatatatatgtgtgtgtgtgtgtatatatgtatatgtgtatatgtatatatgtatacacacacacatctatctatctaatttttaagttgaaaatgaaacttcagttct

SEQ ID NO: 359427 - DNA, 201 bp, Homo sapiens
ctttgggaggccgaggcaggcggatcacctgaggtcaggggttcaagaccaacctggccaacatgttgaaaccctgtctctaataaaaatacaaaaaaaaatagcttggtgtggtggctggcgcctgtaatcccagctactcaggaggctgaggcagaatcatttgtacctgggaggcagaggttgcagtgagctgagatc

SEQ ID NO: 359428 - DNA, 201 bp, Homo sapiens
tcttgaacctgggaggcagaggttgcaatgagccaagatcacgccactgcgctccagcctgagccaacagagtgagactccaactcaaaaaaaaaaaaaaagaatagggagtttatcgttagtatcttatggcagactgcaaatattcatatttaaacttaggttaaagttcatagcaataatgataatatgacggttttt

SEQ ID NO: 359429 - DNA, 201 bp, Homo sapiens
ccaggcagtgtggtgcacacctgcaatccagctactcagctgaggcaggagaatcacgtgaaccagggaggcagaggttgcagtgagccgagattgcacarccgcaccccagcctgggcaacagagcgagactctgtctccaaaaaaaaaacaaaaaatagggccaggtacggtggctcatgcctgtaatcccaacacttt

SEQ ID NO: 359430 - DNA, 201 bp, Homo sapiens
caggttcaagcaattctcatgcctcagcctcctgagtagctgggattacaggcgcacaccaccatgcccggctaatttaatgttactgatttttaaagtcrtttttgtttattttataacaatttttataacagtaatgaaaaattcaagcagaatttctccattctaacaaactgtttcattttgccatgtttcattcca

SEQ ID NO: 359431 - DNA, 201 bp, Homo sapiens
ttatacttcataattttcagttatataagatttgctggaaaatcttagtataaacaggtgtattttacttaatattgttgactcattaaaaattatgaagwtaattgaacttaaaatataaaaagtcattatttttaaactattttcttgggtttagaggaacctttaagtgaaaaagctattttttaaagcacaagattc

SEQ ID NO: 359432 - DNA, 201 bp, Homo sapiens
atttttataacagtaatgaaaaattcaagcagaatttctccattctaacaaactgtttcattttgccatgtttcattccaattgtcttccatatgcatacrtaatttttactcaattgtaattatcttgtaggactcactgacataaatagaaaagagatttaatgtattcatttataatgtaccaggaacaacttcagta

SEQ ID NO: 359433 - DNA, 201 bp, Homo sapiens
cagagaagtcatgtaatacaggtactcacttctctgtcaaatcagtctctaatctagaatttcttttgtgggaaaagatagcatatatctacaacctagtraatcataaagtgaattatccagttgtagcattcttattttctgtacctgaaacatgattaggctttttaatctacagagttcttgtaatattgatatatt

SEQ ID NO: 359434 - DNA, 201 bp, Homo sapiens
ctgatcttgtttctaagtggctaggtgaaagtgaaaagtaagtagtaaatcaattttttaaagttttttctttgcctgtaattactgtatcactccttaayagatttcttacatcacttatagatattcagagaagtcatgtaatacaggtactcacttctctgtcaaatcagtctctaatctagaatttcttttgtggga

SEQ ID NO: 359435 - DNA, 201 bp, Homo sapiens
ggggaatcctattatttgggccgcctggaacaggaaagtcctacttagccaaagctgtagcaacagaagccaacaactcaacatttttttcaatatcttcytctgatcttgtttctaagtggctaggtgaaagtgaaaagtaagtagtaaatcaattttttaaagttttttctttgcctgtaattactgtatcactcctta

SEQ ID NO: 359436 - DNA, 201 bp, Homo sapiens
ctctggatgtgagagaaggagaagggtgaaccaagaaggtcctatgacttcagcccatttcagctttgttttctggctgccctatactcctccaaaggctstcgccttggttctagggctagtcccagcagtagaaaaagaaaaaaatagctgatcagagctggaagacaagggaggggaagaaggctgggtgtctctccc

SEQ ID NO: 359437 - DNA, 201 bp, Homo sapiens
gcgggtggctgggtccagcccatactgggccacattgcgatgcatgttttctggggatgtctgtgacagaagctggtacaggctctcactgagggggtgasggtaaggggcaggggcatgaatgggagggcacctgtcagcacccacctctcaggaactgccaggccttttcttctgcctattcctccgtctattcactca

SEQ ID NO: 359438 - DNA, 201 bp, Homo sapiens
tatataagcttctctctggcccttacttttcctaggcagtttctgggttttacatctcctgtaagagttttgaaaccactacaggctttgaccctcacagkggcacccccctctctgatcatgaagccctgatggctactctgtttgtgaggcacagccccccacagcagaaccccagctctacccacggtgagtcacccc

SEQ ID NO: 359439 - DNA, 201 bp, Homo sapiens
tggccccagcgccggtggtcccagcagtcgcctcccctgccccgctcttcccttccttaggggcattccgtacttgagcaagcaccgggccgaccgcatgmggcgcctgggagactttctgaaccaggagagcttcgacctggctttgctggaggaggtgagattgtgcagcacggtgcggaacccaggctgggaggaggg

SEQ ID NO: 359440 - DNA, 201 bp, Homo sapiens; identical to SEQ ID NO: 76804

SEQ ID NO: 359441 - DNA, 201 bp, Homo sapiens; identical to SEQ ID NO: 76805

SEQ ID NO: 359442 - DNA, 201 bp, Homo sapiens; identical to SEQ ID NO: 76806

SEQ ID NO: 359443 - DNA, 201 bp, Homo sapiens
gaccccaaagggcagcgactgggcagggagggcctgacctgggggaagggggttggcttgggaaggctggtgggtgtgtcgggggtctgacctgattgggrgtcactgcccggaggttcaggttggggtagcgggtggctgggtccagcccatactgggccacattgcgatgcatgttttctggggatgtctgtgacagaa

SEQ ID NO: 359444 - DNA, 201 bp, Homo sapiens; identical to SEQ ID NO: 76807

SEQ ID NO: 359445 - DNA, 201 bp, Homo sapiens
gccttcctccccctatcccgccccacgatctcagggtgtagggaaaacccgaacctccaaagtccacatctggccccagcgccggtggtcccagcagtcgyctcccctgccccgctcttcccttccttaggggcattccgtacttgagcaagcaccgggccgaccgcatgaggcgcctgggagactttctgaaccaggaga

SEQ ID NO: 359446 - DNA, 201 bp, Homo sapiens
catgctttcatatgctgtgtctctttgtctactaacctgtgtagatcctttgctcagctagtctagtcttggaccactgatgggtggaaagtggggtagcygggagctggttctctgggaagaggccctcatatataagcttctctctggcccttacttttcctaggcagtttctgggttttacatctcctgtaagagttt

SEQ ID NO: 359447 - DNA, 201 bp, Homo sapiens
gtctggggagaaggcgccgccggccgcccccgtccccaccgcggccgtcgctggagagttcgagccgcctagcgcccctggagctccccaaccatgaagcycaacttctccctgcgactgcggatcttcaacctcaactgctggtgagtgcgtctgcggagtgcggtctgggggccaccttccgttcgcacccatgcagcc

SEQ ID NO: 359448 - DNA, 201 bp, Homo sapiens
gacagaagctgtcacctacctacccagctgcacaccacttccggaggtgagaagcccactggcctgaagcctgttgtcatcccaggaggctcttggccctsccagcccttccctatcctgcctgcactctccagtctcctccagcctcctctccctctggatgtgagagaaggagaagggtgaaccaagaaggtcctatga

SEQ ID NO: 359449 - DNA, 201 bp, Homo sapiens
gacctttgacctcttccacctcccttccccacctccagtaatacaaggtagaggaggcagccctctgagagctgcaggggatgggcagaaagatggtggcrgtgccctgagtttctatctcctcctgcctgcagatccatcatggtgactggttcagtgggaaggctgtggggctgctggtgctccatctaagtggcatgg

SEQ ID NO: 359450 - DNA, 201 bp, Homo sapiens; identical to SEQ ID NO: 76808

SEQ ID NO: 359451 - DNA, 201 bp, Homo sapiens
gtgcctctctacctcaagctctgtgtcccccaagcagggccaggcccagagtctctctggaggtctcccaggcccactcaccatctcctgggtgctgctcrtagccacctggccacagtgtggcctcacaggtatggcagcggaagcagctccggtggaagaaatggccgttgacacagaggcgttccaggacatagaggt

SEQ ID NO: 359452 - DNA, 201 bp, Homo sapiens
tgggaaattactgtcgtgttttgagcaaggaaatgaaagcagattgctatttctaaaagaccatgctggccaggtgtggtggcgcacacttataatcccakcactttgggaggccaaaatgggaggactgcttgaggccaggagttcaagaccagcctgggcaacatagcaagatcctatctgtacaaaaataaataaaca

SEQ ID NO: 359453 - DNA, 201 bp, Homo sapiens
gtgacagtgagacatgggccatgcaaactgtgtacagggtgcattgggagatgggtaagaaaacaccctccaactcccttcaccaaagcgaacacagagcsttacagggcggcaatggagtggagagcactcggtctccttttgatggttcctgttctctatgatccaccttcctcttggagaaatctctaatttttgtta

SEQ ID NO: 359454 - DNA, 201 bp, Homo sapiens
taaaaatacaaaaattagctgggcatggtggcacacacctgtagtcccagctactcaggaggctgaggcaggagaattgcttgaacccagcagggggaggktgcagtgagccgagatcgcaccactgcactccagtctgacgacagggtgagacaccatttaaaaaaaaaaaaaaaagttttaaatccaaataacatttct

SEQ ID NO: 359455 - DNA, 201 bp, Homo sapiens
tagtcccggctactcgggaggctgaggcaggataattgcttgaacccaggaggcagaggttgcagtgagccgagatcgtgccactgcactccatcctgggygacagagcaagactctgtcttaaataaataaataaataaataaataaataaaaattagctgggtgtggtggtgtgtgcctgtagtcccagctactgaaga

SEQ ID NO: 359456 - DNA, 201 bp, Homo sapiens
accccatctccactaaaaatacaaaaaattagccaggcgtggtggcatgcacctgtagtcccggctactcgggaggctgaggcaggataattgcttgaacscaggaggcagaggttgcagtgagccgagatcgtgccactgcactccatcctgggcgacagagcaagactctgtcttaaataaataaataaataaataaat

SEQ ID NO: 359457 - DNA, 201 bp, Homo sapiens; identical to SEQ ID NO: 76809

SEQ ID NO: 359458 - DNA, 201 bp, Homo sapiens
ttgttcagtgttggcatatagaaatgctattgatttttgtatgtttttgtatcttgcaactttactaaatttatttatcagttctaatagacttttgtgtrgagtctgtaggtttttctaaatatgagatcatgtaatctataaacaaggataatttgacctctttcttttttttttttgagatggagtctcacgacactg

SEQ ID NO: 359459 - DNA, 201 bp, Homo sapiens
ggctgcatgggtgcgaacggaaggtggcccccagaccgcactccgcagacgcactcaccagcagttgaggttgaagatccgcagtcgcagggagaagttgrgcttcatggttggggagctccaggggcgctaggcggctcgaactctccagcgacggccgcggtggggacgggggcggccggcggcgccttctccccagac

SEQ ID NO: 359460 - DNA, 201 bp, Homo sapiens
taaatgggtttactttttagatttctttttcagattgttcagtgttggcatatagaaatgctattgatttttgtatgtttttgtatcttgcaactttactraatttatttatcagttctaatagacttttgtgtggagtctgtaggtttttctaaatatgagatcatgtaatctataaacaaggataatttgacctctttc

SEQ ID NO: 359461 - DNA, 201 bp, Homo sapiens
gaggaaagaagggctgaggaaagcaatgaaagaaaaataatttcagaagtgagtaaactacaaggaacataagaggaaataaaaatacaacatatgtcctraaagaagtacaaggtaggcagaggaatttttttgtttgctttaatttttgtgggtacatagtaggtgtgtatctttatgaggtacctgagatattttggt

SEQ ID NO: 359462 - DNA, 201 bp, Homo sapiens
gagactgaggcaggagaatcacttgaactcgggaggcagaggttgcagtgagccgagatcacgccactgcactccagcctaggagacagagtaagactctygtctcaaaaaaaaaaaaaaaaaaagccacaaaagacatttattagtaagagaagcaagcactatcatttaaggcaggaaggaataggctaactgtactgt

SEQ ID NO: 359463 - DNA, 201 bp, Homo sapiens
tagagatggggtcttgctctgttgtccaagctggtctccaactcctgggctcaagtggtcctcctgagttggccttctgagtcattgggattacaagtgtragccaccaagcctagcctgcaaaataccttttttgtcttgtattgaaaatgcagcttttatgtgggcacaggatggctataagaaaggcagacctgtaga

SEQ ID NO: 359464 - DNA, 201 bp, Homo sapiens
tgcccagttccctgttctctaagctttgtctcctccttttagaaaacctaaagacagctgctgatcggcaggctgaggaccaggtcctgaggaagctggtrgatttggtcaaccagagagatgccctcatccgcttccaggaggagcgcaggctcagcgagctggccttggggacaggggcccagggctagacgagggtgg

SEQ ID NO: 359465 - DNA, 201 bp, Homo sapiens
ggtgcatgccaccacgctggctaattttaaaaaaaagatttgtagagatggggtcttgctctgttgtccaagctggtctccaactcctgggctcaagtggycctcctgagttggccttctgagtcattgggattacaagtgtgagccaccaagcctagcctgcaaaataccttttttgtcttgtattgaaaatgcagcttt

SEQ ID NO: 359466 - DNA, 201 bp, Homo sapiens
gctggattacgtggcaccatctcagctcactgcaacctccacctctggggttcaagtgatcctcctgcctcagcctcccgagtaactgggatacaggcacrcgccaccatgcccagctaattttttctatttttagtagagatggggtttcaccatgttggccagactggtcttgaactcccaacctcaagtgatctgccc

SEQ ID NO: 359467 - DNA, 201 bp, Homo sapiens
gtaagaaaattcaaacacttaacaaagattcatttttcaatagcccattagtcacagaacaattacccaactattaacaattaaacctacctgtatattaraaatacatttcatttcacccatacatccaacacactttaaaatggatagaggaaaattttattaactggctttagaaaaaaaaaagtacctattgaactc

SEQ ID NO: 359468 - DNA, 201 bp, Homo sapiens
tgttgcaaatgactggatctcattcttttttatggctgaatagtattccattgtgtatatgtaccacattttctttatccattcttctgttgatggacacktaggtagcttccaaatcttggcaattgtaaacagtgctgcaacaaacataggagtgcaggtatctctttgatataatgatttcctttcttttgggtatat

SEQ ID NO: 359469 - DNA, 201 bp, Homo sapiens
attaacaaaatgagaagaaaaaggatatctacctgaacaagttttatggcagacaaaagtgacctattctggaaaaaaaaaaaaaaaagccacaaaaaggycaggcgcagtggctcacacctgtaatcccagcactttgggaggctgaggcgggtggatcacctgaggtcaggagttcaagaccagcctggccaacatggt

SEQ ID NO: 359470 - DNA, 201 bp, Homo sapiens
ttgtcaagatatggatcttggagaaattcaaggcctaatatataccacagcagaggcattcaaagatgagttgatagagatgagtgcctccgaaccagtgycagatcatgaggaagaagacgtagaaggagcagtgtcaggaaacaaactgacactagacaatctggcggaagggttccagttactcaagactacttttga

SEQ ID NO: 359471 - DNA, 201 bp, Homo sapiens
attctgaccactattacactaattttatattagaatgaacaatagaagtttcaaggtgattataagaataaagagaataaagagcagagtaacatcagcaytgatagtgaatgtaccctagaaagacatgctcataggatacagttgacccttgagcaacatggatttgaaatgtacgagtccacttaaagaaacttacag

SEQ ID NO: 359472 - DNA, 201 bp, Homo sapiens
ccatgccacttagatggagcaccagcagccccacagccttcccactgaaccagtcaccatgatggatctgcaggcaggaggagatagaaactcagggcacygccaccatctttctgcccatcccctgcagctctcagagggctgcctcctctaccttgtattactggaggtggggaagggaggtggaagaggtcaaaggtc

SEQ ID NO: 359473 - DNA, 201 bp, Homo sapiens
tctaaacatttaggaaaactaatgtcaccctatataacaaagagagtttctctgaaagaaaataatgtttattcaggaatagggtattgctgtaggcatayatgtgccataggaaacgatgtgcatattcaggaaggtaaaggcagacaaagggttttaaaggaaaattggggaagattacgtaattgttttgaaatgatt

SEQ ID NO: 359474 - DNA, 201 bp, Homo sapiens
agagtttcgctccgtcatccaggctggattacgtggcaccatctcagctcactgcaacctccacctctggggttcaagtgatcctcctgcctcagcctccygagtaactgggatacaggcacgcgccaccatgcccagctaattttttctatttttagtagagatggggtttcaccatgttggccagactggtcttgaact

SEQ ID NO: 359475 - DNA, 201 bp, Homo sapiens
gatccctaccatcatgggagaattagaaatcaatcaaagaagcatacaaataaatgtaaggtttcaaccctgggaacttctctaaaggagcgacagagaayttaatataagcaaggtggcctgggaaacttcccccaaggaggtgatgactgggctgaggtctgaaggaagaccaggaggtgaccatgccaaagggtaggg

SEQ ID NO: 359476 - DNA, 201 bp, Homo sapiens
ttcttttttatcaaacttgttatgtgacctaccagtgtcatgctctccacccacaggaaaactgtctcatggtttgtggtttgcacccactcctcttttgmattcccactggactctaggaaattggtgtggattctattccccagtttccctcccctttcagcctaggttacctcaagatgttttgtgttctcttcctcc

SEQ ID NO: 359477 - DNA, 201 bp, Homo sapiens
cactgcctgcccctcctcctcacatcttatcttctgacctcttacacactcggttgcacacacagcctctggctgcctcctaagcacatcaagcatgcatkggccctgaggcctcgtttattttgcctggggcacataccgcccagcctgttcctgcaggtatcccttgtttcaccccctgcccccaaccccactgtctgt

SEQ ID NO: 359478 - DNA, 201 bp, Homo sapiens
tagtataaaacatttctcaaggggtcctgttaatattaggggctcctgacaatgagttcagtgttgactctcatgtgctaggctttcagatgctgtgttcttttttttttttttttttttgaaacggagtctcgctctgtcgcccaggctgtagtgcagtggcacgatctcggctcactgcaagctccacctcccaggttc

SEQ ID NO: 359479 - DNA, 201 bp, Homo sapiens
ttgccatggcatttgtaaactgtcatggcgctaatgggagtatagcagtgaggaccaccagaggtcactctcatcgccatcttggttttggtgggttttgsctggcttctttactgtagcctgttttatcagcaaggtcttaatgacctgtatcttgtgccaacctcctgtctaatcctgtgactcagaatgccataacca

SEQ ID NO: 359480 - DNA, 201 bp, Homo sapiens
tggccaacaaaggccgtcacagcaacgggtcacaattctatatcacactgcaagcaactccttatctagatagaaaatttgtggcttttgggtatgtataktgtagatctatttatataatattcacacctgtaaaaatgtcatttaaaaatatttggataagtattgtatatagtgtataggtagctaaaaatagggctt

SEQ ID NO: 359481 - DNA, 201 bp, Homo sapiens
agtataaaacatttctcaaggggtcctgttaatattaggggctcctgacaatgagttcagtgttgactctcatgtgctaggctttcagatgctgtgttcttttttttttttttttttttgaaacggagtctcgctctgtcgcccaggctgtagtgcagtggcacgatctcggctcactgcaagctccacctcccaggttca

SEQ ID NO: 359482 - DNA, 201 bp, Homo sapiens
attcatgcttccctttttcagaccatacagggtaacttcctgatgttgccatggcatttgtaaactgtcatggcgctaatgggagtatagcagtgaggacsaccagaggtcactctcatcgccatcttggttttggtgggttttgcctggcttctttactgtagcctgttttatcagcaaggtcttaatgacctgtatctt

SEQ ID NO: 359483 - DNA, 201 bp, Homo sapiens
ataagaatatcacaggatgtggtgaggattcaatgacctggtgtgttggaagtgccaaactctggaaacatcctctctccctacagatgtccagttcccaygatccagaccccaagagagggttcttgaatctctcacaagaaagaattcagggcgagtttgttgagtaaagtgaaagtaagtttattaggaaagtaaagg

SEQ ID NO: 359484 - DNA, 201 bp, Homo sapiens
tcaaaaatgacataggagagtagggtgacattttattttaccaattttatttttacaaattttaaatgctcacctaaatacatagtacctagaaatacagyggttttaataagtatgctaagagtgggaatttgaaaatatagtaaatggaaaacaacttatttctcaccaaacatgttacattattacaagtaaaaagaa

SEQ ID NO: 359485 - DNA, 201 bp, Homo sapiens
tgtcgtgttttgagcaaggaaatgaaagcagattgctatttctaaaagaccatgctggccaggtgtggtggcgcacacttataatcccagcactttgggargccaaaatgggaggactgcttgaggccaggagttcaagaccagcctgggcaacatagcaagatcctatctgtacaaaaataaataaacaaaaatattggc

SEQ ID NO: 359486 - DNA, 201 bp, Homo sapiens
tggtgtctgaatggacagtaagtccatttcctaagtcagccatgatttccaatatatcctctttatcctcctgagcctctgaagtttactatattatgccwcctattctttagttacactattctgttttatacttaaaaacttgtagtatagaagctgagaggcacaaattaattataattagtatggatggaacagttc

SEQ ID NO: 359487 - DNA, 201 bp, Homo sapiens
gtgccagtggggaggtttccagtggcagaggatagtcatgaagcatgaggtccagggatgagagatagttatcaggatgtgatggcagtaggggtggaggkactttgcagtcctgctcagaaaccttcttgtagcaacaactgcattgtgcagaaaatcatttcatgcccatggcggcctgtgcctacagtgagccaatgc

SEQ ID NO: 359488 - DNA, 201 bp, Homo sapiens
gccgagatcgcaccactgcactccagcctggtgcagagcgagactccgtctcaaaaaaaaaaaaaagcatgaacacatagttagcaagagcaagcccagayaggctgtgccagtggggaggtttccagtggcagaggatagtcatgaagcatgaggtccagggatgagagatagttatcaggatgtgatggcagtaggggt

SEQ ID NO: 359489 - DNA, 201 bp, Homo sapiens
aaaaaaaaagaaagttttgggtcctgtaaaatatggtaacactgataaatttaaacactccaggaagtatcgaccaactggctctatcagtgatttatagytcagcataagcaagtctcttctctgcctagaagcaggttttgataagggcataggaagcaagcaataggatattaaatctgctgaggagaatgaagcaag

SEQ ID NO: 359490 - DNA, 201 bp, Homo sapiens
gactctgtctcaaaaaaataaattttttttgtagagacagagtctcactatattgcccaggctggtcttgaactcctggcctcaagtaaccctcccacctyggcctcccaaagtgctgggattacaggcatgagccaccacacctggccactttccatacattcagagctcttctccagaatgagttgttttatgttatca

SEQ ID NO: 359491 - DNA, 201 bp, Homo sapiens
tcgctccgtcatccaggctggattacgtggcaccatctcagctcactgcaacctccacctctggggttcaagtgatcctcctgcctcagcctcccgagtarctgggatacaggcacgcgccaccatgcccagctaattttttctatttttagtagagatggggtttcaccatgttggccagactggtcttgaactcccaac

SEQ ID NO: 359492 - DNA, 201 bp, Homo sapiens
aaggtcaaatagccaatagctatgtgacagtgagacatgggccatgcaaactgtgtacagggtgcattgggagatgggtaagaaaacaccctccaactccyttcaccaaagcgaacacagagcgttacagggcggcaatggagtggagagcactcggtctccttttgatggttcctgttctctatgatccaccttcctctt

SEQ ID NO: 359493 - DNA, 201 bp, Homo sapiens
ctgaggcaggaggatcacttaagccaggaggtcaaggctgtagtgagctaagatcatgccacagcactccagcctgggcaacagagtgagaccctgtctcaaaaaaaaaaaaaatcaccctgactgcagggagaaaaacagaggggagggtgccaagcagatggaggaagccagcttagagctgcggcaggaggccagctg

SEQ ID NO: 359494 - DNA, 201 bp, Homo sapiens
gaggcaggagaatcacttgaactcgggaggcagaggttgcagtgagccgagatcacgccactgcactccagcctaggagacagagtaagactcttgtctcaaaaaaaaaaaaaaaaaaagccacaaaagacatttattagtaagagaagcaagcactatcatttaaggcaggaaggaataggctaactgtactgttgtgtg

SEQ ID NO: 359495 - DNA, 201 bp, Homo sapiens
ccctcctcccagcctgggttccgcaccgtgctgcacaatctcacctcctccagcaaagccaggtcgaagctctcctggttcagaaagtctcccaggcgcckcatgcggtcggcccggtgcttgctcaagtacggaatgcccctaaggaagggaagagcggggcaggggaggcgactgctgggaccaccggcgctggggcca

SEQ ID NO: 359496 - DNA, 201 bp, Homo sapiens
agaggcagaagataaattccaagatgtcattaacaaaatgagaagaaaaaggatatctacctgaacaagttttatggcagacaaaagtgacctattctggaaaaaaaaaaaaaaaagccacaaaaaggccaggcgcagtggctcacacctgtaatcccagcactttgggaggctgaggcgggtggatcacctgaggtcagg

SEQ ID NO: 359497 - DNA, 201 bp, Homo sapiens
gaggcagaagataaattccaagatgtcattaacaaaatgagaagaaaaaggatatctacctgaacaagttttatggcagacaaaagtgacctattctggaaaaaaaaaaaaaaaagccacaaaaaggccaggcgcagtggctcacacctgtaatcccagcactttgggaggctgaggcgggtggatcacctgaggtcagga

SEQ ID NO: 359498 - DNA, 201 bp, Homo sapiens
tgctagagaaatgaaaaagcaaaaagtcaaacaaattataatgtatttccgtaaagttaacactgagtgtgaccacctttcctgcctccccttctacctcrtccacctctctgcctctgccaccctgagacagcaagaccaactccttctcttcctcctcctcagcctactcagtgtgacaaggatgaagactgttatgat

SEQ ID NO: 359499 - DNA, 201 bp, Homo sapiens
cacctttcctgcctccccttctacctcgtccacctctctgcctctgccaccctgagacagcaagaccaactccttctcttcctcctcctcagcctactcartgtgacaaggatgaagactgttatgatgatccacttccacttaatgaatagtagatatattttctcttccttatgattttctttataacattttattttc

SEQ ID NO: 359500 - DNA, 201 bp, Homo sapiens
gggaagattgcttgagcctgggaggcagaggctgcagtgagccaagattgcaccactgcactccagcctgggcaacagagcaagaccttgtctcaaaaaamaaaaaaaaaaaaaaaaaagctaaaagacattaagaaaatgatacaagacatgaaagagctcataaatcagaattagaaaaaaacatgatgcaacagagct

SEQ ID NO: 359501 - DNA, 201 bp, Homo sapiens
gttacaatccaattatacacttttattttaaaaggtacaattattattgactatagttgccctcttgttctatcaaatacgaggtcttactcattttttctttttttttgtgcctattaaccatcctcaccaccctcctttaaccctcactacccttcccagtttctggtaaccatccttctactctcgtctccatgattt

SEQ ID NO: 359502 - DNA, 201 bp, Homo sapiens
aggtgggaatataggaatactaagacagagttttttttgttttgttttgtttttttgttttttgttttttgaaatagagtcccactctgtcacccaggctsgagtgcagtggcgtgatctctgctcactgcaacctctgcctcccaggttcaagtgattctcttgcctcagcctcccaagtagctgggattacaggcacac

SEQ ID NO: 359503 - DNA, 201 bp, Homo sapiens
tggaagaaagaagatagagatgaaatgtaatagaggctaataagaatattccatagtcctggccgggcgcggtgcctataatcccagcaccttgggaggcygaggcgggcagatcacgaggtcaggagatcgagaccatcctggctaacacggcaaaaccccgtctatactaaaaatacaaaaaattagccaggcgcggtg

SEQ ID NO: 359504 - DNA, 201 bp, Homo sapiens
aaagctattggcgttaacccatttatgtattcctctctttattcagctgctgtgtgccagagattgtggcaggtgggaatataggaatactaagacagagytttttttgttttgttttgtttttttgttttttgttttttgaaatagagtcccactctgtcacccaggctggagtgcagtggcgtgatctctgctcactgc

SEQ ID NO: 359505 - DNA, 201 bp, Homo sapiens
gaacccgggaggcagagcttgcagtgagccgagatagcgccactgcagtccggcctgggcgaaagagcgagactccatctcaagaaaaaaaaaaaaaagartattccatagtcctgaacatgactttaaactcaagaagtatcaaatgtgtatatatatagctctatccactgaaaaggtctataaacaatggccacaacc

SEQ ID NO: 359506 - DNA, 201 bp, Homo sapiens
aaatgcaaaaattagctgggcgtggtggcgggtgcctgtaatcccagctacttgggaggctgaggtaggagaattgcttgaacccaggagacggaggttgyagtgagctgaggtcacaccgctgcactccatcctgggcaacagagcgagactccgtctcaaaaaaaaaaaaaaaaaaaaaaaagaaaagaaatagtagtc

SEQ ID NO: 359507 - DNA, 201 bp, Homo sapiens
gtttaagaaaaactttcttgatggcattaaaaaacaggatagtagcccaaaaaacccagcaatacagttttacatatgttaaatggtcacgaaacatacakaccttgcaaaagacctgaagttcatgaaggtgggtatggaaagagttgcagcttttgagcaattttgaagtggcggaaggagggttttctgcaatcagaa

SEQ ID NO: 359508 - DNA, 201 bp, Homo sapiens
gggctggcgtgtcctggccgggcgggctccgtctggaggaccgggaggagagtataggggggcaagtgcgggtccgggggcgggcgttccacttggcgacytttaaagggagaactgagcgaaggaagggttcagaaccgcgctgggagataaggtaatcccctccgagacacacacacacacacccgcagattttgttct

SEQ ID NO: 359509 - DNA, 201 bp, Homo sapiens
ggggtgactcaccgtgggtagagctggggttctgctgtggggggctgtgcctcacaaacagagtagccatcagggcttcatgatcagagaggggggtgccmctgtgagggtcaaagcctgtagtggtttcaaaactcttacaggagatgtaaaacccagaaactgcctaggaaaagtaagggccagagagaagcttatata

SEQ ID NO: 359510 - DNA, 201 bp, Homo sapiens
ctcaaaaaaaaaaaaaaaaaaaaaaaagaaaagaaatagtagtcaacctgcagtattgcctcaaactgagcacagacactggaactgagaaacaagatgcrtcagctattgcttggggacagaaggaaatggcctaattattgttgccctcttcatgagtattcccaaagtaggccacactcacatcctggttttctcccc

SEQ ID NO: 359511 - DNA, 201 bp, Homo sapiens
tgtgcctgtaattccagccactccggaggctgaggcaggagaatcacatgaacctgggaggtggttgcagtgagccaagatcatgccactgcactccagcyggggtgacacagcaagactctgtctcaaaaataaataaataggccgggtgcagtggctcacacctgtaatcccagcactttgggaggctgaggcaggcag

SEQ ID NO: 359512 - DNA, 201 bp, Homo sapiens
actgagatcagagttcctccagtgctctgttcttgagcaacctagagactcctggatattctgtcttgtacccctcagaccatccaacggcgactaaatgwgattgaggctgccttgagggagctagaggccgagggcgtgaagctggagctggccttgaggcgccagagcagtgagtgacaagctaggacacccctctgc

SEQ ID NO: 359513 - DNA, 201 bp, Homo sapiens
gctggggcctgccagtccagagccctcaaggtaacccatcctcacagatgtgctgacccagggtgggacagggtgggagcactggcttcctgcagaggaawtctggggaatacagagggaagttgtggggatcccaggccgtggcagcctctcctctgctccattcttctcagttcctcccatgccccaacacatacattc

SEQ ID NO: 359514 - DNA, 201 bp, Homo sapiens
atgcctgtaatcccagcactgtgggagactgaagtgggaggattgcttgagcccaggagttcaaaaccagccagggtaacataacgagatcccatctcttaaaaaaaaaaaaaaaattagctgggcgtggtggcatgcacctgtggtcctagctacttgggaggttgaggtaggaggatctcgagctggggaggtccaagg

SEQ ID NO: 359515 - DNA, 201 bp, Homo sapiens
agccgggcgtggtggtgggcgcttgtagttccagctactaagggaggctgaggcaggagaatggcatgaacccgaggcgcagcttgcagtgaaccaagacygcgccactgcactccagcctgggcaacagagcgagactccatctcacaaaaaaaaaaaagaaaaactctctgagtctttgctgtgggcagatttccattt

SEQ ID NO: 359516 - DNA, 201 bp, Homo sapiens
agtataaagcaacttaatgttttaagtgttaaatgaaatgtaccaaaaatttactattagaaaaaaaatcagggaaatttatgttggtaaataattttttwaaaaaaaattagagctagccaggtgtggtagcacacacctgtagtcccagctactcaggaggttgaggcaggaggccttgagcccaggagttcaagacta

SEQ ID NO: 359517 - DNA, 201 bp, Homo sapiens
gcgatttccgtaggccctggcattactgcctggctggaagcagcatagcctcgggttcttaagattcacatacacattctggacttagagaatccacacayagtcgtttagttttcacactttttttcaggtccatacatttttaagtttctaagtcagggactacctgcaccttttaaaaatataatttattctgtccct

SEQ ID NO: 359518 - DNA, 201 bp, Homo sapiens
gcggtggctcacgcctgtaatcccagcactttgggaggccgaggcgggtagatcacgaggtcacgagatagagaccatcctagcaaacacggtgaaacccygtttccactaaaaatacaaaaaattagccgggcgtggtggtgggcgcttgtagttccagctactaagggaggctgaggcaggagaatggcatgaacccga

SEQ ID NO: 359519 - DNA, 201 bp, Homo sapiens
gctgaagcaggagaatcacttaaacctgggaggtggaggttgcagtgagccgagatcgcaccactgcactccagcctggtgcagagcgagactccgtctcaaaaaaaaaaaaaagcatgaacacatagttagcaagagcaagcccagacaggctgtgccagtggggaggtttccagtggcagaggatagtcatgaagcatg

SEQ ID NO: 359520 - DNA, 201 bp, Homo sapiens
aggtcaggagttcaagaccagcctggccaagaccagcctggccaacatggtgaaacctcgtctctgctaaaaatgcaaaaattagctgggcgtggtggcgrgtgcctgtaatcccagctacttgggaggctgaggtaggagaattgcttgaacccaggagacggaggttgcagtgagctgaggtcacaccgctgcactcca

SEQ ID NO: 359521 - DNA, 201 bp, Homo sapiens
tccgtctcaggaaaaaaaaaaaaaaaaaaagagatcgagaccatcctggccaacatggtaaaaccccgtctctactaaaaatacaaaaagttagccacgcrtggtggcagatgcctgtaatcccggctgctcgggaggctgaggcaggagaatcgcttgaacctgggaggcagaggttgcagtgagccgagattgcgccac

SEQ ID NO: 359522 - DNA, 201 bp, Homo sapiens
ttaaaactggggctgtgaaaaactgcaaccacaaaactcacttttgttaagcttaacacaaaaataatgcaataagtaatgtatcatttaattagattatyattttataaacgaattaatttttttttaacctagggaaagtctgttttgctttgttttgaatcacaacttttaaagtcctaaataaataggctctttcta

SEQ ID NO: 359523 - DNA, 201 bp, Homo sapiens
ttagaaaaaatccaggaagcaatcaagtgggaagaagagatgttccagaaggaaagatgagtaactgtgaaagcgagagcacagctagtcctcagaacagytaaggcatgggtctttctccctcatcccttcacctgcctgggaatgtgaatgcagcagccagccagtccttcctccacatttctctcatgggttcctact

SEQ ID NO: 359524 - DNA, 201 bp, Homo sapiens
aaaaaaaagaatattccatagtcctgaacatgactttaaactcaagaagtatcaaatgtgtatatatatagctctatccactgaaaaggtctataaacaayggccacaacccagtagcaatgtgtagtcctagaatttagattgttgttttgaaatgtcatttcttacttaaagaaaccagagtctctgggagaaatggca

SEQ ID NO: 359525 - DNA, 201 bp, Homo sapiens
tctccagcgacggccgcggtggggacgggggcggccggcggcgccttctccccagaccgttccttcttcgcaggcggcgcgcacaggtgggcaccaagccygcgtggctcaggtcgggcccgactcccgcgttcccccggcaaccggccggctgttcccaatcaggcgggccgccaacccggaaaggcgatccgctgccga

SEQ ID NO: 359526 - DNA, 201 bp, Homo sapiens
aaaaaattagccgggcgtggtggcaggcgcctgtagtcccagctacttgggagactgaggcagaatggtgtcaacccgggaggcggagcttgcagtgagcsgagatcgcaccactgcactacagacttggtgacagggtgagactccgtctcaggaaaaaaaaaaaaaaaaaaagagatcgagaccatcctggccaacatg

SEQ ID NO: 359527 - DNA, 201 bp, Homo sapiens
aataattggaaaaatgtatgaacacattttggaatgttaagaatgaattccagcttttgttttttctagtacaagaagctacaggtgcacatgtaatttcyaatatatactgaataactttcacaaagcagtgtttgtgaagagttggatttggtaatactaggatttagtttggttgtaggggaatctgtgtctgttaca

SEQ ID NO: 359528 - DNA, 201 bp, Homo sapiens
ttaatttgctggttaccgatatgggaaggctagaagttgcgtgatgtaagggtgttgggttcaaacccaagtagaccagtatccctcagaaggacacggawtggaagctttaaatgccatgttactacttgggtataagggtacacaaggtggtatttcatcttcctaacgcacataatgtgtagcacatggtgattagac

SEQ ID NO: 359529 - DNA, 201 bp, Homo sapiens
gagatgatgccattgcactccagcctgggcgacagagtgagacgctgtctcaaaaaaaaaaaaaaaaaaaggaatttgtacaaaggtgtaaaaagagagamggaataaaatataattagtccaggctgagtacagtggctcacgcctgtaatcccagtactttgggaggcctaggaggcagatcacttgagaccaagagtt

SEQ ID NO: 359530 - DNA, 201 bp, Homo sapiens
aataatgaccctttttgcttgttaacctccagtctaaacgcccattccatcccgcaccagtttccccttctgtgaaggcatgcatggagtatgtcgctctycactgacctgaagctgctctcactgcaccagcaaaggcagaggcagccatcttcaccttcgcctacggcggccgctttgggtttaaaagcacaagagcaa

SEQ ID NO: 359531 - DNA, 201 bp, Homo sapiens
aaacgagagctggacagtattactccagaagtccttcctgggtggaaaggaatgagtgagtacaactgaagtaatgttttttttttatgttttaaccactratcaatgaatctaaacttgcttcatctccattgtagtccacatccctctggcatgcatgcatatctctttttgttacagcgttttattttaaccacagtc

SEQ ID NO: 359532 - DNA, 201 bp, Homo sapiens
cctcaggtgatacacctgcctcggcctcccaaagtgctgggattacaggcgtgagccactgcgccggcccatttattattaaattagtattcttactagcygcctttcttcaaatgaccatttatttttgcattttagtaaattatctaaaattgtcatttgctttactttttggtattcccgaaacagcatatagaaatg

SEQ ID NO: 359533 - DNA, 201 bp, Homo sapiens
cccctcaacttgtttctctctaaataaactgagttgaacaatctgctcagctattccagcccaaatcatgctttgttgttcctccatcaactcatattcasttgccccacagatcctaccagttttgcatccaacataaatcccaaatctgtccactccattactaccaccttagcccaagctgtcatcttaacagcttcc

SEQ ID NO: 359534 - DNA, 201 bp, Homo sapiens
tggaaatcctccatggactacccatttcatttaatataattccaaattcttaaccagtacccaaaaggcttcttgatcactgcatgccatgagccatttcrctgctccaggcaccctggtattttttgtctgtaccttgactatatcttttgtcttgggacctttatgttttctctgcctagtacattgttctatcctctc

SEQ ID NO: 359535 - DNA, 201 bp, Homo sapiens
tctcgagtaactgggactgcaggcacgtgccactgtgcccagctaatattttgtatttttagtagagacagggtttcaccatattagccgggatggtctcratctcctgacgtcgtgatctgcccgccttgggctcccaaagtgctgggattacaggcttaagtcactgcacccgacacagtatctgccttattctttatg

SEQ ID NO: 359536 - DNA, 201 bp, Homo sapiens
tgtaaaatgtaaaatttcaatgtaaaaacttactggatttttttgtgggatatactttttaaccttaatgcatgattcttataaactattttaaattaacrgtagaaaaagttaatttgttgtatatcaatctatatttcaaatgtagaactgcccattaacttatgggtgcctttttcgtttgtgtgggaggagtcctta

SEQ ID NO: 359537 - DNA, 201 bp, Homo sapiens
tagaaacagaaagtacatggtggttgccaggggccagagagagaggaaaatgggggatgactgcttaatggatataggatttccttttagggtgatgaaartgttctaagattagatagtggtgatggttgttgtacaacatcgtggatgtactaaataccgtggaattgtacattttaaaatggttagaatggtgaattt

SEQ ID NO: 359538 - DNA, 201 bp, Homo sapiens
gtttaagggaagtgtacataaaacttattattgttgggagaggggcacgtttctggaacagcatgtggtataggaagtattgttgcagtcaattttggatrttatcctcagccttctggacccaactgacatccctcccacatgcacatccctcccactcacaaccttctccaagactctccagagtctaatgccatcaaa

SEQ ID NO: 359539 - DNA, 201 bp, Homo sapiens
ttcatgtttaatatttcaaaataatgtaacaaactaaaacctaattttagactgtctttaaggcacaccaccttcatattcctttgtatttaaatcccctkttctcttaacaggttctggataaaagcagtctccaagtcccaaatgagtggtgccaccagttttaaaagtaacttgcttggctcagtgcagaacagatca

SEQ ID NO: 359540 - DNA, 201 bp, Homo sapiens
ggataaataagaaactgacagtgtcagttgcctatggcaagcatggggtggctggggaaagaagtatgaggaagattttactctatgcatatttaaacttytaaaattattatttaaaacctcagattttaaatttatttagtattaggagcttttaacttatagtcaaaacacattctgtcaaagggaggatggagagtc

SEQ ID NO: 359541 - DNA, 201 bp, Homo sapiens; identical to SEQ ID NO: 76820

SEQ ID NO: 359542 - DNA, 201 bp, Homo sapiens
attatgtcacatgataaatctgaattggatatttttggcatccgaatgctctcaggaatgaaaatgtttcatcaagtgattggaatcctatagatgtgaaktgtgtgtgtgtgtgtgtgtgtgtgtgtgtgtgtgtaatatggattgtaactgattactttggagaatttcaaacattaaaaagtaagaagaaaactaaag

SEQ ID NO: 359543 - DNA, 201 bp, Homo sapiens
gctgaggcaggagaaccacttgaaccagggaggcagaggttgcagtgagctaagatcgtgccactgcattccagcttgggcgatggagcaagactgtctcaaaaaaaaaaaaaaaatactgacagtcattggctttaggatattgaatataagtcatgccagctgacctttagaatggagcttaggtcctcattcccctca

SEQ ID NO: 359544 - DNA, 201 bp, Homo sapiens
ctgaggcaggagaaccacttgaaccagggaggcagaggttgcagtgagctaagatcgtgccactgcattccagcttgggcgatggagcaagactgtctcaaaaaaaaaaaaaaaatactgacagtcattggctttaggatattgaatataagtcatgccagctgacctttagaatggagcttaggtcctcattcccctcat

SEQ ID NO: 359545 - DNA, 201 bp, Homo sapiens
tgcatccaacataaatcccaaatctgtccactccattactaccaccttagcccaagctgtcatcttaacagcttccactattttttctttttctttctttyttttttttttttgagacagagtctgtctttgtggcccagggtagagtgcagtagtgcaatcttggctcattgcaacctctgcctcccaggttcaagtgat

SEQ ID NO: 359546 - DNA, 201 bp, Homo sapiens
aggtccttgcctgctcagtcatatgtagaaatatgtatcacaatctcagatgtcttttttgtttactgtctgctgcctccattgagatatacactgtgagrgcaagaagttcgtctgccctaagcaccattggatccgtacagatagtaggcactgcctggcacacagggctagtagcacttcataaatacttatgcactg

SEQ ID NO: 359547 - DNA, 201 bp, Homo sapiens
atgttgaatttaaattcatttaaaaataagcagttttctttgtttagaagtctatgtcaagtctatgtcaataactaccagatacttactaattttctttwcttttttctttttgagatggagtcttgctctgtcgcccaggctggagtgcagcagcgcaatcttggctcacggcaagctctgcctcctcggttcacgcca

SEQ ID NO: 359548 - DNA, 201 bp, Homo sapiens
ttttttgtttagattgcaggcgagaagaaatctgctcagtggcgcacagtggagggtgcattgaaggaacgcagaaaggcagtagatgaagctgccgatgyccttctcaaagccaagtaattactcatggactttaacaagtaattagggcctcctggtggctttctttgggccgggttttctttgtattgtctgtataga

SEQ ID NO: 359549 - DNA, 201 bp, Homo sapiens
tttagtagagatggggtttcaccattttagtcaggatagtctcaatctcctgacctcatgagccacctgcctcagcctcccaaagtgctgggattacaggygtgagccaccacgcccggccaactaattttcttaatgattcttcaaagtaggcattattactcacaaatgagaaagtggagatttgagaagataaatcat

SEQ ID NO: 359550 - DNA, 201 bp, Homo sapiens
gctgaacaggacagaaaggtaagagaaatgagaattgttgcctaacatttaaagtgactctaacttgattgtttacttgtagaaataatactggctcagcygggtgcagtggttcatgcctgtaatcgcggcactttgggaggccaaggtgggtggatcccttgtggtcaggagttcgagaccagcctggccaatatggcg

SEQ ID NO: 359551 - DNA, 201 bp, Homo sapiens; identical to SEQ ID NO: 76824

SEQ ID NO: 359552 - DNA, 201 bp, Homo sapiens
cctggctgctggcgtctgggtcgccggttgggcgcgcgataggttttcagtgctgaaggtcgacgggcgagaactacagttcccgtcaggacgagcggagsggcggcttgttgcatccttaataaggaggtgcctggacttctagcgagagtccacattttaggggtcaaggttgtaattatctgggagggagtgcctttc

SEQ ID NO: 359553 - DNA, 201 bp, Homo sapiens
catttaaagtgactctaacttgattgtttacttgtagaaataatactggctcagccgggtgcagtggttcatgcctgtaatcgcggcactttgggaggccraggtgggtggatcccttgtggtcaggagttcgagaccagcctggccaatatggcgaaacccccgtctcttctaaaaatacaaaaattagctgggtgtggt

SEQ ID NO: 359554 - DNA, 201 bp, Homo sapiens
tatcccatgtcctagcaaattgccttacagcacccaaatcaaatacacccatttttttggtaaaatgccactctaccattaatgttgaatctaaatggttstataaaacctgccttatacatccatgctcctagtgactcaatttcctagcgtatcttactttttgaccatgaccagcagtaaaaaatttacatcacgatt

SEQ ID NO: 359555 - DNA, 201 bp, Homo sapiens; identical to SEQ ID NO: 76825

SEQ ID NO: 359556 - DNA, 201 bp, Homo sapiens
gaactccctcattgctcatgcacatcgtcgtattgatcagctgaacagagagctggcagaacagaaggccaccgaaaagcagcacatcacgttagccttgragaaacaaaagctggaagaaaagcgggcatttgactctgcagtagcaaaagcattagaacatcacagaagtgaaatacaggctgaacaggacagaaaggt

SEQ ID NO: 359557 - DNA, 201 bp, Homo sapiens
aaaaagataatagatatttatcaatttatttttctgtcttaaagcacatgtaacataattttttgtactgtgctataatatgttgatgtctctggaggtcrtgggatgtagctttttgctggacagagagttcagtactcatggcagctgtttatagttttttgatctccttgtcatttgttttgctcctgtttcccttgt

SEQ ID NO: 359558 - DNA, 201 bp, Homo sapiens; identical to SEQ ID NO: 76810

SEQ ID NO: 359559 - DNA, 201 bp, Homo sapiens
tactactgttgattttgccctcggagcaaactgaataaagcaacaagatgaaaactgagtatcttatcccttttcaaaaagtacagttctggccaggtgcrgtagctcacgcctgtaatcccagcactttgggaggctgaggcgggtggatcacctgaggttgggagttcgagaccagcctgaccaacatggagaaaccca

SEQ ID NO: 359560 - DNA, 201 bp, Homo sapiens; identical to SEQ ID NO: 76813

SEQ ID NO: 359561 - DNA, 201 bp, Homo sapiens
gtgggaagtttgtcctccgtccattgcgaccatgccgcagatactctacttcaggcagctctgggtatgtattatgtctccctataaccaggcttttcacygtgtgctgcttagggagtgtgtgttttccttgaatatgggaatagctgtctaaacctttttttaaaaaggggtacatacaccgaagctttgctgtaacat

SEQ ID NO: 359562 - DNA, 201 bp, Homo sapiens
tgggctcaagcaacccttccacctaggcctcctaaaatgaataaatactatttttggtggcaacatgttataaacaaatcaggaaaaggtgatgtgcagayatggtggtaaacttggctgctatgatctgaattagtggtagataagtagaggctagaggtcttcgagatggttacattggtataggaaaataggtgtagg

SEQ ID NO: 359563 - DNA, 201 bp, Homo sapiens
cctgacctcaggcgatccacccgccttggcctcccaaagtgctgggattacaggcgtgagtcatagctcctggccctacttttctttttaaattttttgtytgtttatttttctatatagagacgaggtctcactgtgttgcccagcctggtatcgaacctctgggctcaagcgatcctcccgcttcggcctcccgaagta

SEQ ID NO: 359564 - DNA, 201 bp, Homo sapiens
aatgtcatccaacttcctccctgtaacccaccccaaccatactttttcacaatgtttttgactagtcttctacatcatttattcttccctatggactttamaatgtccatattggctgagggagataattttgcagcttcataagtcaaggagcagaaccctgtggatttattctaaaatcttgaatctattttaagctgc

SEQ ID NO: 359565 - DNA, 201 bp, Homo sapiens; identical to SEQ ID NO: 76816

SEQ ID NO: 359566 - DNA, 201 bp, Homo sapiens
atttattctaaaatcttgaatctattttaagctgcatgacccaggaaaaaatagctggaagctgttctaggagcatggagtaaggttgaaaaattcagagmagtgttcttttctcagttgatgtgacttcagatttcattctttgtagatgaatcctttatctctccaaatagccttggcctctcctcactccactttagc

SEQ ID NO: 359567 - DNA, 201 bp, Homo sapiens; identical to SEQ ID NO: 76818

SEQ ID NO: 359568 - DNA, 201 bp, Homo sapiens
tgtgacttcagatttcattctttgtagatgaatcctttatctctccaaatagccttggcctctcctcactccactttagctaccttggagaacatttctasttaataactcagcatgtttgtactaaaccacctccacacttacactgctccttatttgcttttttggattaaagatagtaccaagttgtcaggtgtagct

SEQ ID NO: 359569 - DNA, 201 bp, Homo sapiens; identical to SEQ ID NO: 76819

SEQ ID NO: 359570 - DNA, 201 bp, Homo sapiens
actccactttagctaccttggagaacatttctacttaataactcagcatgtttgtactaaaccacctccacacttacactgctccttatttgcttttttgkattaaagatagtaccaagttgtcaggtgtagctaggccagaattcgtagattcttcacaggttgctcatattttgttagctatcctatcttgtttaatct

SEQ ID NO: 359571 - DNA, 201 bp, Homo sapiens
ttaacttaaataatgaccctttttgcttgttaacctccagtctaaacgcccattccatcccgcaccagtttccccttctgtgaaggcatgcatggagtatrtcgctctccactgacctgaagctgctctcactgcaccagcaaaggcagaggcagccatcttcaccttcgcctacggcggccgctttgggtttaaaagcac

SEQ ID NO: 359572 - DNA, 201 bp, Homo sapiens
tgacattcaaggagcctaaatacccagttacttctagttttgcgtaattgccaaagttactttctaaaattgaaaattaaaaagcctgtttccactgctcrtgattttcaggaagttgatattttggcaaaatgtagatagcaaaccaagtactgtgactcaagcagtaattgaacagaatccctaggaatagtgagttag

SEQ ID NO: 359573 - DNA, 201 bp, Homo sapiens
ctaagttaattttctcacctctgaattacaatagcagttagtgtttctattttttttttttttttaccatttactcaagcactctctactgttaaacatcstgtcaacttgttgctgtgcattttatttcatagtaacctttttagtggcaacatgatttgttataacattgtctctatatttactgtccatgcataaaat

SEQ ID NO: 359574 - DNA, 201 bp, Homo sapiens
agttagagatcataaaagtcaagctttgttttttcaagttcgcttctcttcctatttgctgctaggtaacagaagcagccccttccataggaaagtggaaygaacctgtgttagttttctattgctgcgtaacaaataccacaaatttagcagcttaaaacaacacccatgaatgaccttacgggttctgtaggatagaag

SEQ ID NO: 359575 - DNA, 201 bp, Homo sapiens
gtgaaaaaatagtttagtggtgtctcagtaacttttttttttttttctggagacagagtttcactcttgttgcccaggctggagtgcagtggcgcgatctyggctcaccgcaacctctacctcctgggttcaagggattctcctgcttcagcctcccgagtagctgggattacaggcatgcgccaccacgcccagctaatt

SEQ ID NO: 359576 - DNA, 201 bp, Homo sapiens
ccaaattacattaagatagtaccaaatatatatgacatacatatatatatatttgagagaaatgtatatgtatatattagagagaaatgatgtttttatgrtgtgtctatatacacaaatctagtaagaatttgaatgaatttttctagatggtgaggaaccagataatacagttttaacatttatatggaggaattaatg

SEQ ID NO: 359577 - DNA, 201 bp, Homo sapiens
aagtggaaataaaaataaaagtaattttctctggcacatatctggcagccctcttaaatgaatagtgtcttaaacttagagcaggcaataattgggaaagrggaaggcaagccttgcttacaaattgatcatatatcttactgtgcaattgcatgaatcctggagatcaaagaaacaaaattcatttgtattttcactcag

SEQ ID NO: 359578 - DNA, 201 bp, Homo sapiens
ttctgtttcttggaatgtttatggtactttttgttcaatttaatcacataccctgtgtatttgctcaggtccaagcagctcagtctgaggctaaggttgtrtctcagtatcatgagctggtggtccaagctcgggatgactttaaacgagagctggacagtattactccagaagtccttcctgggtggaaaggaatgagtg

SEQ ID NO: 359579 - DNA, 201 bp, Homo sapiens
cttatattctatttctgagcttcagatttccttacacatttccaacaaaatgtaaacaaatgaaggaatactacttctgtttcttggaatgtttatggtaytttttgttcaatttaatcacataccctgtgtatttgctcaggtccaagcagctcagtctgaggctaaggttgtatctcagtatcatgagctggtggtcca

SEQ ID NO: 359580 - DNA, 201 bp, Homo sapiens
gataagtgtaaattttcaaattaataggtatgaatggtttaaagtttatgaaaaccttccccaatagtatttagatgcttgttcatttgcttaatttaggrgatccacatattattaagaaatatttaggtgtattttactcttattaaaaccaatcacaagccatatagccctgatcatttgtttttatgtaaggataga

SEQ ID NO: 359581 - DNA, 201 bp, Homo sapiens
tgctttactttttggtattcccgaaacagcatatagaaatgtgatcttaatagatggaagcctcttgaacattggtgtctgctatttcttgagtccttttrtggaagaacactgtccatttcaagttgcctttgggttttgttttgtattttttgacctgttttcttatttgtctttttctttctcttgtctgttttcttg

SEQ ID NO: 359582 - DNA, 201 bp, Homo sapiens; identical to SEQ ID NO: 76812

SEQ ID NO: 359583 - DNA, 201 bp, Homo sapiens
tagaactcatctaagatcccttccatttgtacagctttttttcaggatggtctcctacccagaatgacttcctttccttcgcttattaatgttctcttcargggctgcatccttcactgtacagatctaagttaattttctcacctctgaattacaatagcagttagtgtttctattttttttttttttttaccatttact

SEQ ID NO: 359584 - DNA, 201 bp, Homo sapiens
gccatgtttttagctagactttgtgggtgatttttcagatgtctaaactaagcttttaaagtaaaaatagatttttttttttgccaattaagaaaacatayagcaaataccaattgtattcaagaaataattaacatacttaagacttatttaaaggtgctaattgatcatagtctgataatttttttttaatattaaaag

SEQ ID NO: 359585 - DNA, 201 bp, Homo sapiens
cgggcctgtcagttatcgggtgtgaccgccgccgcccaggtgagcactggggctcccggaggcgcgtgaggaggctgaactagaaccgtcagcgaaaaacrggggagccttggtcgctgcctagcctccaggacaaaggcgagcctcagggccaccctcgtcgggagaggcccgggcgggcagctaggcagccaccaggga

SEQ ID NO: 359586 - DNA, 201 bp, Homo sapiens
ctctacctcctgggttcaagggattctcctgcttcagcctcccgagtagctgggattacaggcatgcgccaccacgcccagctaattttgtatttttactrgagacgcggggcttctgcatgttggtcaggctggtctcgaattcccaacctcaggtgatctgcctgcctcagcctcccaaagtgctgggattacaggcgt

SEQ ID NO: 359587 - DNA, 201 bp, Homo sapiens
gcttgaccgagatgctgcgggcctgtcagttatcgggtgtgaccgccgccgcccaggtgagcactggggctcccggaggcgcgtgaggaggctgaactagraccgtcagcgaaaaacgggggagccttggtcgctgcctagcctccaggacaaaggcgagcctcagggccaccctcgtcgggagaggcccgggcgggcagc

SEQ ID NO: 359588 - DNA, 201 bp, Homo sapiens
aagggattctcctgcttcagcctcccgagtagctgggattacaggcatgcgccaccacgcccagctaattttgtatttttactagagacgcggggcttctscatgttggtcaggctggtctcgaattcccaacctcaggtgatctgcctgcctcagcctcccaaagtgctgggattacaggcgtgagcgactgagcctggc

SEQ ID NO: 359589 - DNA, 201 bp, Homo sapiens
cgtccgcttgaccgagatgctgcgggcctgtcagttatcgggtgtgaccgccgccgcccaggtgagcactggggctcccggaggcgcgtgaggaggctgamctagaaccgtcagcgaaaaacgggggagccttggtcgctgcctagcctccaggacaaaggcgagcctcagggccaccctcgtcgggagaggcccgggcgg

SEQ ID NO: 359590 - DNA, 201 bp, Homo sapiens
gtacattttaaaatggttagaatggtgaattttatgttaaggggattttgtcacatagaggaaaaaaaaaatacctgccaccaggtatttgcagatggcckgaagtatagagccagagctagatacacacatacacaccctaaacttgcagaggcttccattggcccaagataggaaaatttgagcaaaaagacagtaatt

SEQ ID NO: 359591 - DNA, 201 bp, Homo sapiens
atatccaaattgtctcctgaactaggcctgttgctctccatgcgcacacagtctttcccatcttcctcccagtctctacccacctagatctctcctcctawcagaatctgggtcatccttatattaataccagagaatcttctaaaagaagtgctatgatattttcatgataacacctattaatgtacttccagatatttt

SEQ ID NO: 359592 - DNA, 201 bp, Homo sapiens
gtataaacatatgtttggttatctgtagctgtgtaacagaccaccctaaacttagtggtattaaatagcagtgtaattataattattatattaacaataayaaacgtattaatatataaattatgtaaataaaaattactcagtgctttgagaggccaaggtaggaggattgcttgaggccatgagttcaaaactagcttg

SEQ ID NO: 359593 - DNA, 201 bp, Homo sapiens
gttacagtgagctatgatcataccactgcattccacaaccttggcaacagagcaagactcagtctcttaaaaaaaaaattatttatatgcttgaaacactytatttctgtattttcacccctcagattgtcaatgatgaaaaaaaaatgatacaatacagtgtgttggagaaaatgtgggaaaacatactttcatattact

SEQ ID NO: 359594 - DNA, 201 bp, Homo sapiens
agtcaggagaatatgcacatttgaataaatatacataaaatgtctctggataaataagaaactgacagtgtcagttgcctatggcaagcatggggtggctggggaaagaagtatgaggaagattttactctatgcatatttaaacttttaaaattattatttaaaacctcagattttaaatttatttagtattaggagctt

SEQ ID NO: 359595 - DNA, 201 bp, Homo sapiens
aaattttcaaattaataggtatgaatggtttaaagtttatgaaaaccttccccaatagtatttagatgcttgttcatttgcttaatttaggggatccacawattattaagaaatatttaggtgtattttactcttattaaaaccaatcacaagccatatagccctgatcatttgtttttatgtaaggatagactagttata

SEQ ID NO: 359596 - DNA, 201 bp, Homo sapiens
cagatgtctaaactaagcttttaaagtaaaaatagatttttttttttgccaattaagaaaacatatagcaaataccaattgtattcaagaaataattaacrtacttaagacttatttaaaggtgctaattgatcatagtctgataatttttttttaatattaaaagtaattttatgtgagccttggggtgtaagaagcatc

SEQ ID NO: 359597 - DNA, 201 bp, Homo sapiens
tacacatttccaacaaaatgtaaacaaatgaaggaatactacttctgtttcttggaatgtttatggtactttttgttcaatttaatcacataccctgtgtwtttgctcaggtccaagcagctcagtctgaggctaaggttgtatctcagtatcatgagctggtggtccaagctcgggatgactttaaacgagagctggaca

SEQ ID NO: 359598 - DNA, 201 bp, Homo sapiens
catgatcatggctcacagcagccttcatctcccagtcttaagcattcctcctacctcggcctcttgagtagctggggcacgtgctactacacctggctaattttttttggcagggtgtggtgggtagagatggggccttactgtggtgcctagggtggttttgaactcctgggctcaagcaacccttccacctaggcctcc

SEQ ID NO: 359599 - DNA, 201 bp, Homo sapiens
tgtcagacattgtgggagggaatactgcagttttaaatggaatgtgtaaggaataccttacctggaaggggttatctgagcaaagattagaaagagataasgggggtaagtcatgtaaaagggtggtggggaaaagcatcccaggcagcaggattagctggtgtagaggcttgatatattcaaacaaagggcaaatgaggc

SEQ ID NO: 359600 - DNA, 201 bp, Homo sapiens
ccaaagtgctgggattacaggcgtgagccactgcgcccagcctaaaaaaatttttaaactctaatcttaaatgtctcttcattcacacacagcttcttgtaaaaaaaaaaaaagtctgtaaaagagcatggatttttggctctttggtattgggcatttctttacgctaggaggctggacatagctgatcagtttattctt

SEQ ID NO: 359601 - DNA, 201 bp, Homo sapiens
ccacctttgtgtcttcttagcagtactactggccactccttccttcttgaaactatttcttccctaggctccctgacaccatactcttctggcctttctcytaccttgctggccactccttaacctccttttctgctcagcctctcaaatggtggcatacctggcattagttctgaaacgttttctccatctgaactgtct

SEQ ID NO: 359602 - DNA, 201 bp, Homo sapiens
tggaaataaaaataaaagtaattttctctggcacatatctggcagccctcttaaatgaatagtgtcttaaacttagagcaggcaataattgggaaagaggaaggcaagccttgcttacaaattgatcatatatcttactgtgcaattgcatgaatcctggagatcaaagaaacaaaattcatttgtattttcactcagagc

SEQ ID NO: 359603 - DNA, 201 bp, Homo sapiens
ctgtgtctatttacgcaggcaaataaaacatagtcgaatcagacactacactgctggaaatcctccatggactacccatttcatttaatataattccaaaytcttaaccagtacccaaaaggcttcttgatcactgcatgccatgagccatttcgctgctccaggcaccctggtattttttgtctgtaccttgactatatc

SEQ ID NO: 359604 - DNA, 201 bp, Homo sapiens
tcaggtgatccgcccacctcagcctcccaaagtgctgggattacaggcgtgagccactgcgcccagcctaaaaaaatttttaaactctaatcttaaatgtytcttcattcacacacagcttcttgtaaaaaaaaaaaaagtctgtaaaagagcatggatttttggctctttggtattgggcatttctttacgctaggaggc

SEQ ID NO: 359605 - DNA, 201 bp, Homo sapiens; identical to SEQ ID NO: 76827

SEQ ID NO: 359606 - DNA, 201 bp, Homo sapiens
actgtcttttctgtgctagacattcttgtaagtactggggaaacagccatgaacaaaaacagttaaaaaattttttcagctaatatttcttgattgggtgmggagagggaataaacaagtaaaacgtataggatgtcagacattgtgggagggaatactgcagttttaaatggaatgtgtaaggaataccttacctggaag

SEQ ID NO: 359607 - DNA, 201 bp, Homo sapiens
ttctgtgctagacattcttgtaagtactggggaaacagccatgaacaaaaacagttaaaaaattttttcagctaatatttcttgattgggtgaggagaggraataaacaagtaaaacgtataggatgtcagacattgtgggagggaatactgcagttttaaatggaatgtgtaaggaataccttacctggaaggggttatc

SEQ ID NO: 359608 - DNA, 201 bp, Homo sapiens
gacattgtgggagggaatactgcagttttaaatggaatgtgtaaggaataccttacctggaaggggttatctgagcaaagattagaaagagataagggggrtaagtcatgtaaaagggtggtggggaaaagcatcccaggcagcaggattagctggtgtagaggcttgatatattcaaacaaagggcaaatgaggctagag

SEQ ID NO: 359609 - DNA, 201 bp, Homo sapiens
ctgagcaaagattagaaagagataaggggggtaagtcatgtaaaagggtggtggggaaaagcatcccaggcagcaggattagctggtgtagaggcttgatmtattcaaacaaagggcaaatgaggctagagtgaattgagtaaggggagaacaggagcaaatgaggtcagagagggagcaaaaagtttattgtggcagtcc

SEQ ID NO: 359610 - DNA, 201 bp, Homo sapiens
tctttttaaacaagaagattaaagcctgattcctatttcttcattttggaatcattaagagtaatgatatggttttagaattcttaacacaaaaatgcccygcattgatataactggccagtacaaacgatgctttttttatatccctgttagctattaaaattctatgctgaaatttgatttcctcttatttacttttgc

SEQ ID NO: 359611 - DNA, 201 bp, Homo sapiens
atatggttttagaattcttaacacaaaaatgccccgcattgatataactggccagtacaaacgatgctttttttatatccctgttagctattaaaattctrtgctgaaatttgatttcctcttatttacttttgctgcaagaagaagcatcctcatcttctataagggagcgaccacctgaagaagttgcagctcgccttg

SEQ ID NO: 359612 - DNA, 201 bp, Homo sapiens
gcctgtacttgatgtccactgttcactcacgcatgtcatgggatccaaataccacggtttctctcccttgcccctttctcttgttgtatcccctgctctcrtttcacttctatcacttctgtcaatttctttttattttctccttattagttttcctcttatctttcttgcagaggtaccatttgtagttcctcagattcc

SEQ ID NO: 359613 - DNA, 201 bp, Homo sapiens
cttttatacatgatatactcatcagaactatttaatgcctaggcaacacgtagacactaagtatacatttacactaggtttaggtcttcagagtttcttargaaatttttaaaatttaaatgtccgaatgtatctttttaaacaagaagattaaagcctgattcctatttcttcattttggaatcattaagagtaatgata

SEQ ID NO: 359614 - DNA, 201 bp, Homo sapiens
gaatctttaaaaactgatcaccctgaaattggtgaaggaaaacccacacctgcactttcaggtaatttaattatttctatttgttcttttatacatgatayactcatcagaactatttaatgcctaggcaacacgtagacactaagtatacatttacactaggtttaggtcttcagagtttcttaagaaatttttaaaatt

SEQ ID NO: 359615 - DNA, 201 bp, Homo sapiens
atctctattccaagtcatttaaggagtaaattaaagtaaaatgcataaattattaatcttaaggatcaggatcatacatggtcagtaaagttactttgccwtcataattgtagttttaaaaaaaattttacacacactttacattgtttcagtcgtatgtacttatattacaaaagagtttaattagacctctgatgttag

SEQ ID NO: 359616 - DNA, 201 bp, Homo sapiens
tccaagaaaaatacttaaatatcagagttcagtcagcaaagtggaaaccacccaggaaatttaatttgctggttaccgatatgggaaggctagaagttgcrtgatgtaagggtgttgggttcaaacccaagtagaccagtatccctcagaaggacacggattggaagctttaaatgccatgttactacttgggtataaggg

SEQ ID NO: 359617 - DNA, 201 bp, Homo sapiens
atgtcattgacatttacatgctttgtaattctatttgggtcagttcatgtggcccaactcagcatccattcctttttttttttttttttttttttgagacrgagtcttgctctgtcaccaggctgtagtgcagtggcgtgatctctgctcactgcaacctctgcctcccaggttcaagcaattctcctgccttagcctctc

SEQ ID NO: 359618 - DNA, 201 bp, Homo sapiens
gctgggattacaggcatgcgccaccacgcccagctaattttgtatttttactagagacgcggggcttctgcatgttggtcaggctggtctcgaattcccarcctcaggtgatctgcctgcctcagcctcccaaagtgctgggattacaggcgtgagcgactgagcctggctgtgtctcagtaatttaaacatagaattacc

SEQ ID NO: 359619 - DNA, 201 bp, Homo sapiens
ccaggctcatgcagtttgttggcagaattcagtcccttgcagttacaggactgaagtacttcttttcttgctgcctcttgccagccactgctcccagcttytacagcctgcctacagttccttgcctcaaggcctctagaggccattcataacattgatgtttgctttcgtgcaggctaccaggagcttgcctctctgact

SEQ ID NO: 359620 - DNA, 201 bp, Homo sapiens
gtccatatttactgctgtatttccagtattaacaatagtccctggctccaagtagatgctcagtgaatgtttatgacatatataaatgaaagaatgaatgkgttcatgaatttttttttaatttaaaaagattttttagagatggggtctcattatgtttcccaggctggtcttcagcttctgggctcaagtgatatgccc

SEQ ID NO: 359621 - DNA, 201 bp, Homo sapiens
ctggagtacagcagtgtgatcataactcattgcagtctcaatctcctgggcttaagcgatcctcccacctcacctcctgagtagctgggactacaggcttrtgccaccatgcccagccaatgttttggacttttagtagagatgggatctcgcaatgttgttccagctcattttgaacttctgggctcaagcaatatcccc

SEQ ID NO: 359622 - DNA, 201 bp, Homo sapiens; identical to SEQ ID NO: 76817

SEQ ID NO: 359623 - DNA, 201 bp, Homo sapiens
agtagtatatctgaaatgttaaatgttttttatttccaagattcagtcgggtccactaaaaatctctagtgtatcagaagtaatgaaagaatctaaacagyctgcctcacaactccaaaaacaaaagggagatactccagcttcagcaacaggtacttatattttgaaccatctttttaaaattataggtaaatctcttca

SEQ ID NO: 359624 - DNA, 201 bp, Homo sapiens
atttatttgttggagtcagaatggcttacactgccttatcatctagcctctggactctctagtagtgcttttatctgacactggtggggcatggaatgttmtacacatcgctggtttccagctaacaagcatattcctttttaagtttcagttttatggtttttttgtttgtttgtttttaagagatgggctcttactgtg

SEQ ID NO: 359625 - DNA, 201 bp, Homo sapiens
cagtggtgcaatctcggctcactgcaacctccgcctcctgggttctagcaattctcctgcctcagtctctcgagtaactgggactgcaggcacgtgccacygtgcccagctaatattttgtatttttagtagagacagggtttcaccatattagccgggatggtctcgatctcctgacgtcgtgatctgcccgccttgggc

SEQ ID NO: 359626 - DNA, 201 bp, Homo sapiens
tccaccagcagcgccgtccgcttgaccgagatgctgcgggcctgtcagttatcgggtgtgaccgccgccgcccaggtgagcactggggctcccggaggcgygtgaggaggctgaactagaaccgtcagcgaaaaacgggggagccttggtcgctgcctagcctccaggacaaaggcgagcctcagggccaccctcgtcggg

SEQ ID NO: 359627 - DNA, 201 bp, Homo sapiens
cagcagcggggtggggtgtggagagtagcgggaggcgcggcttcgtgggcatgtagtccaatcagggccgcgctgcccccgtccaggaccaatcctggctsctggcgtctgggtcgccggttgggcgcgcgataggttttcagtgctgaaggtcgacgggcgagaactacagttcccgtcaggacgagcggagcggcggct

SEQ ID NO: 359628 - DNA, 201 bp, Homo sapiens
tgccagactcagaggaatcgaacaggctgttcagagtaagcataagctatgtttatcttacagataattttcctcagcataatttatcaaaataattttayagggaaaatggggtacatgtactgacatcaggacataaaaatactaatcactctacttaattgcagtttttgccattaaaagtaatggcaaaatctatat

SEQ ID NO: 359629 - DNA, 201 bp, Homo sapiens
ctgaggctaaggttgtatctcagtatcatgagctggtggtccaagctcgggatgactttaaacgagagctggacagtattactccagaagtccttcctggrtggaaaggaatgagtgagtacaactgaagtaatgttttttttttatgttttaaccactgatcaatgaatctaaacttgcttcatctccattgtagtccac

SEQ ID NO: 359630 - DNA, 201 bp, Homo sapiens
ttttcctttgtaggtgtttcagacttaggtgagtgttatgtatatttcatgtttaaagtcttttgttttgggtattaagagactaaagtctttttgttgtrcctatgattcttacacaaagccatctaaatagatataaagtagaattatgtcacatgataaatctgaattggatatttttggcatccgaatgctctcagg

SEQ ID NO: 359631 - DNA, 201 bp, Homo sapiens
ccgggttgaagcgatcctcctgcctcagcttcccaaatagctgggattacaagcatgcgacaccacaccaggctaattttttgtacctttttttttttttytcttttttttttttttgagacaaagttttactcttgttgcccaggccggagtgcaatggcgcgatcttggctcactgcaacctccgcctcccacgttcaa

SEQ ID NO: 359632 - DNA, 201 bp, Homo sapiens
tggtcttcccagtagactaaatcctactaatttttccaagccagctctcaggtttttaacttttgctttttttctgcttttgaaagtgcctatcgcaaaamtttttttttttttttttttttgagatggagtcttgctgtgtcacccaggctggagtgcagtggtgcaatcttggctcactgcaacctccgcctcatgggt

SEQ ID NO: 359633 - DNA, 201 bp, Homo sapiens
aaaggcagtagatgaagctgccgatgcccttctcaaagccaagtaattactcatggactttaacaagtaattagggcctcctggtggctttctttgggccrggttttctttgtattgtctgtatagaataaagaggaggtagagaaacccttctctcacttttccacctgtgcttgttctgaattggcattaggaatttgt

SEQ ID NO: 359634 - DNA, 201 bp, Homo sapiens
atgagaattgttgcctaacatttaaagtgactctaacttgattgtttacttgtagaaataatactggctcagccgggtgcagtggttcatgcctgtaatcrcggcactttgggaggccaaggtgggtggatcccttgtggtcaggagttcgagaccagcctggccaatatggcgaaacccccgtctcttctaaaaatacaa

SEQ ID NO: 359635 - DNA, 201 bp, Homo sapiens
tagatctctcctcctaacagaatctgggtcatccttatattaataccagagaatcttctaaaagaagtgctatgatattttcatgataacacctattaatrtacttccagatattttgtattgtttaaaagatggaagaccacaggatgtaaaaactagagaaatctttcttaccttctgaataagtatgaagccaggagt

SEQ ID NO: 359636 - DNA, 201 bp, Homo sapiens
ccgaaaacacatgatgggaaagcgagtggactacgctgcgcgctcagtcatctgcccagacatgtacatcaacaccaacgaaattggaattcccatggtgtgtgtgtgtgtgtgtgtgtgtgtgtgtgtgtgtgcgcgcgcgtgcagggctcatttgctccccgtgggtggcagatgagaatgccgcagaggactggggac

SEQ ID NO: 359637 - DNA, 201 bp, Homo sapiens
aggcatggctgtgttccaatcaaactttatttacagaagcaggtggccagcctgaggactgtagtctgctacccaccaaaacctgtcattttttttttttkattttttttttttttgagacaaggtctcgctctgtctcccaggctaaagtgcagtggtataatcacagcttgcttcagcctccacctcctgggctcaggt

SEQ ID NO: 359638 - DNA, 201 bp, Homo sapiens
tgagggactcttgagtccagtagcacttacagttgcagaaaagaactagttttggccaggtgcagtggctcactcctgcaatcccagcactttgggaggcygaggcaggtggatcatgaggtcaagagatcgagaccatcctggccaacgtggtgaaaccctgtctgtactaaaaatacaaaaattagctgggtgtggtgg

SEQ ID NO: 359639 - DNA, 201 bp, Homo sapiens
tctcctgcctgctatctgttgtgatttagaggagatttggggtggcagagatttcaccaagtcttcataattcctttgtactacttagaggagcccttcargatgcatggggtggcagttaccttcatacatttgtcttttaaggtgtcactttatgttcagtgtttaggaggcccagtagttaatataattaaagataag

SEQ ID NO: 359640 - DNA, 201 bp, Homo sapiens
aagtgccgggctcgctgccctggggcagtgacccgtcagcgcagccgcctggccatctcccaggcccaggacagagagagccgtccacactgaagatttcsaaggcttctgtgtgttcccagtggagaagtctttccaggtccccagtgcaccacgctttattacagggtcttaacagatagtccattcacccccaaaact

SEQ ID NO: 359641 - DNA, 201 bp, Homo sapiens
tggagttaatctttttcttccttgcccacaaaccacagggagagcaggagggtgatgaggaagaggaggggcacattgtggatgctgaagctgaggagggrgacgccgatgcctctgatgccaaacgcaaggagaagcaggaggaggaggtgagagaccctgtgtggggtgaaggagctgtggtcccagcccccttccctg

SEQ ID NO: 359642 - DNA, 201 bp, Homo sapiens
cacacctgccggtctgcccctgccctgcttcatctctgggaatgtgtgcacctgcattcggcccttctgtagccaactctggttatctccagataaagctrtctccctttgagctctctgcagagcagccgcttgagaaagcgcttctcttggcttcctgttagcagtgcttgttgggtggatgacccctctgagggatcc

SEQ ID NO: 359643 - DNA, 201 bp, Homo sapiens
tctcccagccctggagcctgtcacacctgccggtctgcccctgccctgcttcatctctgggaatgtgtgcacctgcattcggcccttctgtagccaactcyggttatctccagataaagctgtctccctttgagctctctgcagagcagccgcttgagaaagcgcttctcttggcttcctgttagcagtgcttgttgggtg

SEQ ID NO: 359644 - DNA, 201 bp, Homo sapiens
aggctgaaattgattatgcaaagcttggcaatgcagagtcctgttttcctgcaagactgctgagtggcttcagataatcaaactggtataaggctccacamccataactctgagccttaggaaccaggccacaaaaggacaggcccagggcagagagagctgtccacactgaagatttccaaggcctctgcatgttcccag

SEQ ID NO: 359645 - DNA, 201 bp, Homo sapiens
ctgaaattgattatgcaaagcttggcaatgcagagtcctgttttcctgcaagactgctgagtggcttcagataatcaaactggtataaggctccacacccmtaactctgagccttaggaaccaggccacaaaaggacaggcccagggcagagagagctgtccacactgaagatttccaaggcctctgcatgttcccagtgg

SEQ ID NO: 359646 - DNA, 201 bp, Homo sapiens
ggctgtaagttttggcctccggtccccagccatgaaaagacccagctgacagtctgtaattgtagcttctgtgaatctgactttccaaacagcaggtggtrgagctgttgccaggcgcgttcagaaaccgccaggggtcatgtgctctgtttgtaattatttacgtgggacgggaggcttctctgcccctgcccctcctgt

SEQ ID NO: 359647 - DNA, 201 bp, Homo sapiens
ggggacagggtggatcctaagaggccctaaaaatagatggctctggaggaagtggcagggggccaggttctgagcttcaggttggttcttttaaattggtrtggttctaacttgttgacacgattcattgccacaagctaagttatctctgcccttcgaaattttgatgagcccttccgaagtcctcgttctttcgtcaca

SEQ ID NO: 359648 - DNA, 201 bp, Homo sapiens
actaccagtacgacaccgaggagagcctgtggtgccaggtcagtgtggccgtgcaggccagggcttgggtggttggtccagctggccaaatccctctgtgkaaggggcctgctgagctcccctgcacagctgggcagggggcagccaacattccccatggtctcccactcagagcacagccaggcctcctgtttggggcct

SEQ ID NO: 359649 - DNA, 201 bp, Homo sapiens
cagaagggagcagaaggccaggccctctaaataaatcccttccttcctctctccaggtcctggatctgcgccgcctctactccaacgacatccacgccatrgccaacacgtatggcattgaggccgcgctgcgggtgatcgagaaggagatcaaggatgtgtttgccgtgtatggtaaggggagcttgcagataacacccc

SEQ ID NO: 359650 - DNA, 201 bp, Homo sapiens
gctttgaaggaacaggaagagggccttcccctctcaagtgctagaggggggctgcctcgtgatcccatcagcttcagagactcaggacccacctgagtccygagacttcagtgttcagccccataatcacctcatgacattcccaacttctacctcaacaccctgacacatgtttttgtgtctctgtcaggatcccacgat

SEQ ID NO: 359651 - DNA, 201 bp, Homo sapiens; identical to SEQ ID NO: 76860

SEQ ID NO: 359652 - DNA, 201 bp, Homo sapiens
agtgcccgcgaacacctttctgccctgtggaagaatgaaggtgctgtatcaggctaaagaaatagccttgatcttctctaggcttttatttcctggactcrttaaccctgccttattacttcttttaagttgtaatgattgtagcttcctcctggaactgatccagaggtttggggcagtcttcagggcacattgacattg

SEQ ID NO: 359653 - DNA, 201 bp, Homo sapiens
tgtaccactatactccagcctggcaacagagagagaccctgtctcagaaaaatagtacagcctagtgaggatccaaccacccctttcccatagacacacayacacacacacgcacacgcacacggagagagagagaagctgggttggtttttaaattgttttttttttttcatcatgtcacatgccacctgggtttttttt

SEQ ID NO: 359654 - DNA, 201 bp, Homo sapiens
ctaggttgaggaccttgctgcagctgaagtggcagcgctcactgtgtgagccgggcgaggctgtgggcctgctggctgcccagagcatcggagagccctcyacccagatgaccctcaacaccttccactttgcaggcagaggcgagatgaacgtcaccctgggcattccaaggtgtggggcacaagggagcacagggtggg

SEQ ID NO: 359655 - DNA, 201 bp, Homo sapiens
agcctggcaacagagagagaccctgtctcagaaaaatagtacagcctagtgaggatccaaccacccctttcccatagacacacatacacacacacgcacaygcacacggagagagagagaagctgggttggtttttaaattgttttttttttttcatcatgtcacatgccacctgggttttttttttctttgctgtaatac

SEQ ID NO: 359656 - DNA, 201 bp, Homo sapiens
ctaactaagaacccttttctggctctgctatatgaagctgggcaaactttttgtgaaatgtagaatttctgtttagaataatgtactcacatgtgatcacygggggggggattcgaaagtctgccaatgcctttcaaacccagtggttttatggttatgtcttcattttgttatggttatatcttcaggagttgtatccat

SEQ ID NO: 359657 - DNA, 201 bp, Homo sapiens
cagcgtgcgttatgttgccgtgaacacagacccgacagataaggttcaggagactggggatcagaatggctgtgaaagtgtcaaatgaaattaatgcactyaccaaatctcaggcttttcataaaagcctttctttttggcatctggtagataacagcctttattaagggcccaccatgaaccctgtgctgtgttgtgaag

SEQ ID NO: 359658 - DNA, 201 bp, Homo sapiens
gaaaattcaagttacagggataccctattcacaaagcatcctaaccagagacattaattgttatgtcattttgctattaaggagaatagtaaagctgacarttgtctggggttttgattcagaggtgttctttctgatcctaagcaggagttaggaaatttagaattataagtagacctttagtaattgctttaatcagca

SEQ ID NO: 359659 - DNA, 201 bp, Homo sapiens
tcagcctgaggcaagagaatcgcttgaacccaggaggtggaggttgtagtgagtcaggatcagccactgcactcctgcctgggcaacagagtgagactccrtctccacaaaaaaaaaaaaagtagactgcatagtttctgtcctttgcttctaacttaaatttggtgtcctcataatacaaatatggtggtaataggcagt

SEQ ID NO: 359660 - DNA, 201 bp, Homo sapiens
caaaaatatttggaacaatatttgacaccatcttcttctaagaaagcaagtcctggcacttttttttttaatttttgggaatgaaactttgcaagtaagtrgtgcatgtaaagatgaagactgaagggaaggaggcctgggttctgggactggacagagtagatgccagtagacgggttgggttgggtggcagtggatgga

SEQ ID NO: 359661 - DNA, 201 bp, Homo sapiens
gctaagttctgattctaaacatggtttttctctttgaaaccagactaacccacaaacaaattcttgcatagtgtagtcactcttgcccttttcacctgttkgcaaaaaaaaagcccgtaccaacctttagagacacactaaaaaatctcacccgtgacagaagcaaaacctggacctatttcctaattttatttggtacag

SEQ ID NO: 359662 - DNA, 201 bp, Homo sapiens
gggtttctccatgttggtcaggctgggctcgaactcccaacctcaggtgatccaccaaccttggcctcccaaagtgctgggactacaggcctgagccaccrcgcccaacctgtgggaagattttcaattaaaatttctatttctttagtagacatagagctatttttggttatctacttcttgaatgagctttaattgttt

SEQ ID NO: 359663 - DNA, 201 bp, Homo sapiens
aactaagaacccttttctggctctgctatatgaagctgggcaaactttttgtgaaatgtagaatttctgtttagaataatgtactcacatgtgatcacggbgggggggattcgaaagtctgccaatgcctttcaaacccagtggttttatggttatgtcttcattttgttatggttatatcttcaggagttgtatccattt

SEQ ID NO: 359664 - DNA, 201 bp, Homo sapiens
gcattgaactaactaagaacccttttctggctctgctatatgaagctgggcaaactttttgtgaaatgtagaatttctgtttagaataatgtactcacatrtgatcacggggggggggattcgaaagtctgccaatgcctttcaaacccagtggttttatggttatgtcttcattttgttatggttatatcttcaggagtt

SEQ ID NO: 359665 - DNA, 201 bp, Homo sapiens
taagatatgtgtttaactttaatagatagtttcctaaagttttccaaaatgcttgtaataatacacacttctaccaggatggagtgcagttgtgccatctyggctcactgcaacctctgcctcccaggttcaagtcattctcttgcctcagcctctcgagtagctgggattacagatgtgctccaccacacctagcaaatt

SEQ ID NO: 359666 - DNA, 201 bp, Homo sapiens
ctgcataatattccatagtgtggatacactattgccccttctatggggcagtcaggttatttctagtttttgccgctgtaaatgctgctacacaaacatayatactcatctaaccttgtgtgggtgcttttttttttcttgaagagccaacagaaaatgtgttttaagtgttttaattgctattttcaaactccgttccca

SEQ ID NO: 359667 - DNA, 201 bp, Homo sapiens
tgacttatcttttattattattattattattattgtagagctggtgtttcactgtgttgcactggctggtctcgaacccctggcctcaagtgatcctccarcttcagcctcccaaagtgctgagattacaggcatgatccaccatgcctggccaagtatatctgttagataaattcttaaagtacaattgctgggtcaaag

SEQ ID NO: 359668 - DNA, 201 bp, Homo sapiens
aacaggaatcggggagagagttttggggagtatctcttaattacttctagcctctctctttaatgaactttctaatgcagtttcataaatgtgggcaacayaagaagaaactagacttccaataatttgttgttttctcctgcctgctatctgttgtgatttagaggagatttggggtggcagagatttcaccaagtcttc

SEQ ID NO: 359669 - DNA, 201 bp, Homo sapiens
gtagtggtggtcacagaaatcagaaaaggcaaagtggtgtggggaacaagagatgcttgtatgttgtcctagttaccatgccgatagtcatcagaacgttwgatctttatatcttataactggataccaatagctgagtgtgaaaacaggaagctataagaataataaaagaaatgttcatagaaacaatagtgaaatacc

SEQ ID NO: 359670 - DNA, 201 bp, Homo sapiens
tggctggactgtggatgtgtcttccttagaaccctgaggtccttctgaggcaggccagctgcatccagagggcttccttttacaagtgaaagtaactagcrcttattgagtactggctgtatttcaagcccccactgcattcatgattctttgtcttagtaagagcttactgaggtggttactattcttattcccatatta

SEQ ID NO: 359671 - DNA, 201 bp, Homo sapiens
ctttggaggaaccaagaggaaaaggaaatgctcctggccttgcggcggtgcccatcactgctcatcacaggccttcttgcttcctctcgttctcaccgccrtcctgaggggcagcagtaatacactgcctgtattactgtattctcctttggtgacagggcacatgcaaacatagatcaagtcacctcttttgttcttctc

SEQ ID NO: 359672 - DNA, 201 bp, Homo sapiens
ggcctggtggacactgctgtgaaaaccagccgctcaggctatctccaaaggtaaaatgtatctgccgtgccccttgaggtagagtgccagggcccttcctsccatcatctttcacattatatcagcagctcatttaagattccttggatgaaaaaacttttggaaagtttccatgaatggcctgagacagaaagcagcaaa

SEQ ID NO: 359673 - DNA, 201 bp, Homo sapiens
tgccctctgcccacccatacccatggctgacctgcccttctttaacactgagttcacctctgcaaagttgcatcagccttgaaggaactttggaggaaccragaggaaaaggaaatgctcctggccttgcggcggtgcccatcactgctcatcacaggccttcttgcttcctctcgttctcaccgccatcctgaggggcag

SEQ ID NO: 359674 - DNA, 201 bp, Homo sapiens
caaaaggaaataggccactcatgtaaaaggttttattctcagaagagtccagaccagagacagagaaatggctaagccagcaatagtctgactttctttcycctttgtttggggttcctgagtctgggtggcttcaagggagtgtctagcaagagtagactgcatagtagcctggtgcagtggctcacacctgtaatccca

SEQ ID NO: 359675 - DNA, 201 bp, Homo sapiens
gtctagcttctacaccgaacgaccatgccaggtgaccctagttgagtcacttccttatactagtgtctgctataaagtgcatgtgatttgtggtgagattkcacacctaggctgttccgggctaccagctctcgcagctctagaaagaatagcctacttccctcaggctttaagagtgtcccttttgggtcacagtactag

SEQ ID NO: 359676 - DNA, 201 bp, Homo sapiens
tgagtataccgaaaatcaccatggctactgtgtctctttctaatatcctgtttgtttttattccctctcttcagaagctgtacctgctgcttcggggctcytgtttaaactgccacatgctgacttgtccccgggccgtgattcacctcttactctgccagctgagggttctggaagtcggggccctacaagcagtctacg

SEQ ID NO: 359677 - DNA, 201 bp, Homo sapiens; identical to SEQ ID NO: 76861

SEQ ID NO: 359678 - DNA, 201 bp, Homo sapiens
acatatattcacgttatatagataaattatgtatactcacacaatttttacgtaattttgcatgattgtttctttctttctttcgttttttttcgagatgragtcttgctctgtcaccgggctggagtgcagtggcgcaatcttggctcactgcaacctctgcctcccaggttccagagattctcctgcctctcgggatta

SEQ ID NO: 359679 - DNA, 201 bp, Homo sapiens
tcatctcaagtaccaccttgattgtaatggctgccagaactgtggagttgagatattccgatgccatgtctgggctcagggacagcaccatgatgcattartgatgtctgccagggtagatgagggatgtcagggtatttgaggacaggcatttgccacctgtctcaaggaagtgccccatgccacctttgggaactttga

SEQ ID NO: 359680 - DNA, 201 bp, Homo sapiens; identical to SEQ ID NO: 76894

SEQ ID NO: 359681 - DNA, 201 bp, Homo sapiens
gctgtctgccaggcccatcacaaggtggcgccactgtctcttggacacttatggtgcaggttacacttggggctttctgtggttttgcttgtttcctgatyggcccgcattggtgtgcttttaaaaactccttagtgtaaaagacatcagccatgtgcatgccttagtgcagtttccaagaaaagaccatgggataactgt

SEQ ID NO: 359682 - DNA, 201 bp, Homo sapiens; identical to SEQ ID NO: 76895

SEQ ID NO: 359683 - DNA, 201 bp, Homo sapiens
gaacgcaataggaatgttggttgtttttgtttgtttgttttgaagtggagtcttgcactgtctcccaggctggagtgcagtggcatgaccttgacttactrcaacctctgcctcctgggttcaagtgattctcctacctcagcctcctgagtagctgggattacaggcacgcaccaccacacccaaataatttttgtattt

SEQ ID NO: 359684 - DNA, 201 bp, Homo sapiens
tagttgatgacatagaatatcgtatggcaaacctagttccttttaagaaattgttccacctgcatgtttgtaattggtttggatcaagtttttcaaagccrtaaataaaactgaaactgcatgtgagaattggttatctggcaagataacagaacttcataagaaatgtactgatgtgggaaggacttcttagttttcttt

SEQ ID NO: 359685 - DNA, 201 bp, Homo sapiens
gtgtcgctgctaggggaactttccttgcttcctaagggaagccttaatcctagtaaacaggtctcagtttaaaaataagaagaaaaaatccttttcttccyattgaatctaaagcgtgtccaaagtggacacgctggattcttgtaatgacgatacagaccttgggccccggccagcgagccgtcagcagctctgcctagc

SEQ ID NO: 359686 - DNA, 201 bp, Homo sapiens
agcacttgttcaatatttctttctttaaaaataagtgaagaccttttttaaaatttacagaagcatcacatactcattataggaagaacgatgctaagatrtaggaaagtagctgagtgtggtgactcatgcctgtaattccagcactttgggaggccaaggcgggaagatcgtttgaggctagaaggttgaagctgcagt

SEQ ID NO: 359687 - DNA, 201 bp, Homo sapiens
gacagctcagccgcaccttggccccttggtaaggcccagcacatgcctgtgcggctgactggcccccactccatgcaccctggaggggtgtgtaatgtgtygctgctaggggaactttccttgcttcctaagggaagccttaatcctagtaaacaggtctcagtttaaaaataagaagaaaaaatccttttcttcccattg

SEQ ID NO: 359688 - DNA, 201 bp, Homo sapiens
aggtttgggctctggtaagcacctaagagatggtggcaatctgttaataatgatgttaatatcatcttccttactcaggtatttcctgcatctgtggcactggactctgtgctctggccttactgagtttagtctggtgggagaaatcaggcctgaggtcgcctacaagcttgtctgtttcacttcacaggcgtggaagac

SEQ ID NO: 359689 - DNA, 201 bp, Homo sapiens
gggaggaggctaacttaaaaaaaaatttttttattcaacatattttttatgaagatcaaagtaatgatgtgtgtgctgtctgtgttttaatagtccaggarggtgattaaaaacaagtgaagtttcttccccatccttgcccatctcagtccctggtttaagagctattgtccctgtagtacccatttttatgctatcata

SEQ ID NO: 359690 - DNA, 201 bp, Homo sapiens
gtggagcaggtggggcctaggtagcccaggccagccaaggctttgcaggggtctttgttccacaggcagagtccaggtagatggtgggtccccaagtgacmcagcctgtgctcccttttctgccaggttgattatgagagtgaggaagaggaggagagggagggcgaggagaacgacgatgaagacatgcaggaggaacga

SEQ ID NO: 359691 - DNA, 201 bp, Homo sapiens
accagtctcctgctgtcataatggccgagggaacttaccggtgagcaggtacaccagtgagggctgagtgagggtgagctccacctctgtgaggggctcakggggacagagaggtggcattctcaaggcaaaaggaagaagaaagaccaaccaggccggagcagaggagccgggagtgtggagcaggtggggcctaggtag

SEQ ID NO: 359692 - DNA, 201 bp, Homo sapiens
cagctggccaaatccctctgtggaaggggcctgctgagctcccctgcacagctgggcagggggcagccaacattccccatggtctcccactcagagcacasccaggcctcctgtttggggcctgcgagagtcatttgttctttttaatcccagatccctttaggaatctggtgatggctataaaccctctgccccgaaaaa

SEQ ID NO: 359693 - DNA, 201 bp, Homo sapiens
atgaaggtgctgtatcaggctaaagaaatagccttgatcttctctaggcttttatttcctggactcattaaccctgccttattacttcttttaagttgtartgattgtagcttcctcctggaactgatccagaggtttggggcagtcttcagggcacattgacattgagtcatagagcaggagaggtcatacccagcacca

SEQ ID NO: 359694 - DNA, 201 bp, Homo sapiens
caccgtcagtcagaacagaatggctctcaaatgggaatgtaaggtggggactcttaacaagggtgtaggcagggtttggggggactaactggggcctgtgwcttcggggttccccgcgatcccaggtgtgaaggaatggggagcagtcatgagaaacggagaggacgactatgtgctagggccactggacagagccctggg

SEQ ID NO: 359695 - DNA, 201 bp, Homo sapiens
agctttttggggtttttgttttgttttgttttgtgtttttttttttgagacagggtctcactttgtcatccaggctggagtgcagcgatacgatctcggcyccctacagcctctgcctctcaggttcaagcgattctcctgtctcagcctccctagtagctgggattacagtcatgtccagtattttctttttttctgaga

SEQ ID NO: 359696 - DNA, 201 bp, Homo sapiens
acactcagctgagaagcagcaggaaggacaaggagttcctggatcttcctagggtttgtgctaccacagggatggagacctctgtgcacagggagtgccargggctgctcagagatgcctagtgtcaatcagcatcctctgctccttggagcttctctattcccatcagccgtctgccacgaaggaatcaggcaggtggcc

SEQ ID NO: 359697 - DNA, 201 bp, Homo sapiens
acacttattttttgttcttttttttcctttatagattcttctaattctagttctatttctactactgctgccattacttcctccactgaagtcttgacccyctgaaagtcatacttaagggttggaatcaacttgttccaaactcctgttaatattgatgttcctcccatgaatcacaaattttttaatgacatctagaat

SEQ ID NO: 359698 - DNA, 201 bp, Homo sapiens
cccactcagatcttggctgagggactcttgagtccagtagcacttacagttgcagaaaagaactagttttggccaggtgcagtggctcactcctgcaatcscagcactttgggaggccgaggcaggtggatcatgaggtcaagagatcgagaccatcctggccaacgtggtgaaaccctgtctgtactaaaaatacaaaaa

SEQ ID NO: 359699 - DNA, 201 bp, Homo sapiens
agaactagttttggccaggtgcagtggctcactcctgcaatcccagcactttgggaggccgaggcaggtggatcatgaggtcaagagatcgagaccatccwggccaacgtggtgaaaccctgtctgtactaaaaatacaaaaattagctgggtgtggtggcgtgcacctgtagtcccagctactggagaggctgaggcagg

SEQ ID NO: 359700 - DNA, 201 bp, Homo sapiens
ttggaaagtttccatgaatggcctgagacagaaagcagcaaacactgttccccttcgcaggatcggtagagcatgagctcagaggcttataccaagggctytgtgttctgagggtctgccattccctgggggaagctatggctgtgggagaaggtcttgggcagtggcaagcttatcttgcttcctagaaggctcagctgc

SEQ ID NO: 359701 - DNA, 201 bp, Homo sapiens
ggggccatttgccgtgtgctgggccctcagctaaagcacactatcaatactatccgttttcctcctcactgcaacccagggaagtaggcattactctgccsattttgcagctgaggcaactgagtatcaaagcataagtaaacagtcggtgagtggcagagccagcatttgaacatgggcccgtcagacacaaactcatga

SEQ ID NO: 359702 - DNA, 201 bp, Homo sapiens
gagcagcgctgaagtgttctttctgatcatcctgtgtccccatggcctcatctctttgtggcacacttgggtttcctggacaaaggcgtgatgtgtcaggrgacagcagtctgagaaggcccagtcctgtacccactgcctcttgggaaccatagtccttgcattcaaaggctggatcatgtggtgaggaccagctttgca

SEQ ID NO: 359703 - DNA, 201 bp, Homo sapiens
agaaaccgccaggggtcatgtgctctgtttgtaattatttacgtgggacgggaggcttctctgcccctgcccctcctgttccctttctgttgctacattcmggtgagctgcacaaccttgagaaggcagtcactgtgggccgttagttcccctgctcttggcaaaaccatagaagggcaaattgcacctccaggaaaactg

SEQ ID NO: 359704 - DNA, 201 bp, Homo sapiens
tccctcccacatagctgagacccatccttctgttcagatgctgaggatgtggtatgagttggatgaggaaagccgaaggaaataccagaagaaggcggccrcttgtcctgaccccagtctgtctgtctggcgtcctgacatctactttgcatcagtgtcagaaacatttgaaacaaaggttgatgactacagtcaagagtg

SEQ ID NO: 359705 - DNA, 201 bp, Homo sapiens
gtgaggatgtgggcaagacaagacagggatataagaagggctcttgatagaaagtggcttccaggcaggcaattagggattagagtttgacttaagatttrttttcattcttcttgtgttgtctgttttggcttataggatggccaaccattggcgggactgatccaggatcacatggtttcaggggcaagcatgactact

SEQ ID NO: 359706 - DNA, 201 bp, Homo sapiens
tttgcccaaatgagcccttcaagggaagtgtttaggaagcagagggccttgcagcctgatctggaaacctgaccacagtctggcttgtgggtatgactttmttagccacacgtcactccctgagcccatttcttctcttgggttgacgtcaggattgttgtcttctggggcttgcaggcattaagacatggaaatgtgggt

SEQ ID NO: 359707 - DNA, 201 bp, Homo sapiens
cttgagagtgaaaaccgcaatggccgcagccctgggactcaggaggtgatgcagggaggtggtgtccttaatgtccagcacgtccaggcttagtcagtggstgagggatgaggggctgttttcctaagagaaggtagaatcatgaactccagctttgttcaccgtcagtcagaacagaatggctctcaaatgggaatgtaa

SEQ ID NO: 359708 - DNA, 201 bp, Homo sapiens
tctctgctaaaaacacaaaaattagccaggcgtggtggcgggcacctgtaatctcagctactcaggaggctagggcaggagaatcgcttgaacccaggagkcgcactctgcagtgagctgagatcgtgccaccgcactccagtctgggtgacagagcaagactccgtctcagaaaaagaaagaaaaagcacaacctgcaat

SEQ ID NO: 359709 - DNA, 201 bp, Homo sapiens
ttggtctggggtagggtccaagtggagttacaaaagctcccagatgattcccatctgctgccaggtgcagagccactcatgtggctggactgtggatgtgycttccttagaaccctgaggtccttctgaggcaggccagctgcatccagagggcttccttttacaagtgaaagtaactagcgcttattgagtactggctgt

SEQ ID NO: 359710 - DNA, 201 bp, Homo sapiens
aggccagggctcctggggagcatcataggcatattccctggggcacatgagtataccaagtgatgtcctgcttcagcatagcaccaaagccctgcatcagygcatgtggctgcatgctctttcatcttgctagattcctagttcccctttagtttgctctggttatttattcctcactgtcctgtcggctcttcagaacat

SEQ ID NO: 359711 - DNA, 201 bp, Homo sapiens
gcaaaatttgaatgttgtttgaggattagaaggtaataatttatcagtgctaagttaccattttttgatgatcgtatcacggtcatatttgtgagtgtccrtgtttatagaaaatgttcaccaaagtatttggggttgttggtatatcagatcagcagtgtactgtcaaatggttcaagaaagatagatttctggaaatac

SEQ ID NO: 359712 - DNA, 201 bp, Homo sapiens
cattgagctcccactcacagtgtataaccctctcctcttcgatgtaagtgctgccttagttgtgtgggtctccgggctgctggtgggatttgtgagtgctscctctctcccacaagagtggtctaaggaggttaagccccaggcactccaatgaaagcattctgtagaatgagattttgaagttttgagccaaatacaata

SEQ ID NO: 359713 - DNA, 201 bp, Homo sapiens
acaagaccagcctggaatgtcacatgccagaaaggaagtatgtgctcaaagaacgattggacatgtccaaagggcacaaaagcctgtgtgaagggcccacwctggccaaatctaggacagtttgagcatcataataaatgatgatactaagtgattataacccattgaataaagtaggaatccatgaacctacttttatgt

SEQ ID NO: 359714 - DNA, 201 bp, Homo sapiens
cttcttggagaaatagctgatctagagctgggacagagaaagtacaagaccagcctggaatgtcacatgccagaaaggaagtatgtgctcaaagaacgatkggacatgtccaaagggcacaaaagcctgtgtgaagggcccactctggccaaatctaggacagtttgagcatcataataaatgatgatactaagtgattat

SEQ ID NO: 359715 - DNA, 201 bp, Homo sapiens
aaatgaaattaatgcactcaccaaatctcaggcttttcataaaagcctttctttttggcatctggtagataacagcctttattaagggcccaccatgaacsctgtgctgtgttgtgaagagataactaataatggctattctcccttctgcagtcatgcacatcaggcccactcacagctctcttgaggaacctgtgccgg

SEQ ID NO: 359716 - DNA, 201 bp, Homo sapiens
agcatttgctttttttttttttttttttttttttttttttgtcttttggggatagccatcctaatgggttgagatgaaaccttattgtggttttgatttgkgtttttgtgttttctcaatgactagtgatgttgaacattttttcatatatttgttggccatttgtatgtgttttgagaaatgtttgttcagatcatttgc

SEQ ID NO: 359717 - DNA, 201 bp, Homo sapiens
tggctccggtgcgcactgacacaggagcccatccctaggaggaagctccccgacacgtgggtggctttttagattcaccttgtagtctccgggcagaagartggctgcccttaaacaggactactcaaagggcagtccccagaccagcatcagcagcagccctggagcttgtgagcaatgcacatccccccacctctactg

SEQ ID NO: 359718 - DNA, 201 bp, Homo sapiens
acaggttcatcatgttggccaggctggtctcaaactcctggcctcaagtaactggcctcaagtgatctgcccaccttggcctcccaaaatgctgggattaygggcatgagccaccgcacctggctgagaagtctcttaattaaatcttggaataaaataaagatatttttctacctcaggttgtacgcccaaagtaaattt

SEQ ID NO: 359719 - DNA, 201 bp, Homo sapiens
tcaccgtcagtcagaacagaatggctctcaaatgggaatgtaaggtggggactcttaacaagggtgtaggcagggtttggggggactaactggggcctgtkacttcggggttccccgcgatcccaggtgtgaaggaatggggagcagtcatgagaaacggagaggacgactatgtgctagggccactggacagagccctgg

SEQ ID NO: 359720 - DNA, 201 bp, Homo sapiens
atgaactccagctttgttcaccgtcagtcagaacagaatggctctcaaatgggaatgtaaggtggggactcttaacaagggtgtaggcagggtttgggggractaactggggcctgtgacttcggggttccccgcgatcccaggtgtgaaggaatggggagcagtcatgagaaacggagaggacgactatgtgctagggcc

SEQ ID NO: 359721 - DNA, 201 bp, Homo sapiens
ttgtagtctccgggcagaagagtggctgcccttaaacaggactactcaaagggcagtccccagaccagcatcagcagcagccctggagcttgtgagcaatrcacatccccccacctctactgaatttgaatctctgagaatagagttcagaatctttctttaccgtgctttccagggggttcttctgcatgctgatgtttg

SEQ ID NO: 359722 - DNA, 201 bp, Homo sapiens
ggagagccaaggctcattgccctgctcagcagcctgccagaagcaggcctttggctccgagcctgcctctgaaaattctgaccctggggcactggggcacrctaattttcactgcagtatttatttagagacaagagaaaggaagggccttgggtttgggttggcaaggggaataccctgtgctccagggcttctgtttgg

SEQ ID NO: 359723 - DNA, 201 bp, Homo sapiens
aaacactatgctgggcaaacctgtcggggtgatcctaagacacgaagaggaactaccttgtttgcaccccagaaatgagtgcacgctgttttaggaaaatrgctttgataaagaggcttcaccttgggtgagtgctgggctcactgccctggggctcccctgaagcagtcacctggccccttttagtgtgggcttgagatc

SEQ ID NO: 359724 - DNA, 201 bp, Homo sapiens
aaatgcagcccctggctgggggacactggagcaagcccagaccccggggcattggatctagcctgttctgaagtcttgtttgcctgcagaacaggagcccycctttccctcccctccactgcccccaaccctcatcagaggctgccctggggaggtgatgggccggcggggactgagccgatggtgtccttacaggtgcat

SEQ ID NO: 359725 - DNA, 201 bp, Homo sapiens
catggaattgaaaataggaaatcactttttaagacttcttcctgatgagggacagccctggcttgttcccagccgtgaagtactttttcaactcctccctktgttttgcttgtgaacttgaaaatctgtgataaataaagccatgcgcagtagcttttggtggaggtggcctcaaggactcagcagaatggggctgagggg

SEQ ID NO: 359726 - DNA, 201 bp, Homo sapiens
tgtgataaataaagccatgcgcagtagcttttggtggaggtggcctcaaggactcagcagaatggggctgaggggttaggcagagctaaaagatggggcastggatgagctgggtgcggtctggactccctttgtcaggccccaggcagcagagcagctgtgttcaggcctctggccgcccacaggaaatgggaggaagtg

SEQ ID NO: 359727 - DNA, 201 bp, Homo sapiens
tcctgtatgtattttggtttttccatttagctttttccctcatttctaggcttaattgtaggtgaactatgactgccctacagggtagggcagaagacacygggggctattgtagctgtcgaggtcaaaaagtcctaggagatcagggaagggagtggcctgtctggtcaggaaaggctgctggaggtgttggcctgagcc

SEQ ID NO: 359728 - DNA, 201 bp, Homo sapiens
actgccctggctagaacctctagtacattgttgaatagaaatggcaagcgtagacatccttgtcttggtcctgactttaggcagaaggcatccagtcttcyatcattgagcatgttagtagtaggtttttcataggtgcctccctttattaggttggtgacagtctgttcctagtctgttgagtatttttatcctgaaagg

SEQ ID NO: 359729 - DNA, 201 bp, Homo sapiens
gagaaatcaggcctgaggtcgcctacaagcttgtctgtttcacttcacaggcgtggaagacattttggtgaagccaaaggcagatgtcaagaggcaacgtrtcattgaagaatccacccactgcgggccccaggtaaggagggacttcgaggccgtggcctgccctagaggggtgaagtgtgtgctgagtcaaaacccaca

SEQ ID NO: 359730 - DNA, 201 bp, Homo sapiens
atttctactactgctgccattacttcctccactgaagtcttgaccccctgaaagtcatacttaagggttggaatcaacttgttccaaactcctgttaataytgatgttcctcccatgaatcacaaattttttaatgacatctagaatggtgaatcatttccagaaggttttccatttactttgcccatatgcatcagaaga

SEQ ID NO: 359731 - DNA, 201 bp, Homo sapiens
ggggtacactagtgagaaagacagattgtgccctccagagctatcaagcaggcattaaataatcacttaactataggtttgtgctggaaaggaaacatcasagaggttggtaactttagctttcctcttggtcttttttatccccttaggaaattaagtgttaaatccattacgaaccctcgatacctggacagcctgggg

SEQ ID NO: 359732 - DNA, 201 bp, Homo sapiens
atctcaataaatgaatagagtagagtagagtagagagagtagagtagagtagctgggcatggtggcacacacctatagccctagctacttgggaggctgartatgaggctgcagtgagctatgattgtgccacagcactctagcctaggtgacagagcaagaccctgtctctcttttttttttaaaggaccatttcaaagt

SEQ ID NO: 359733 - DNA, 201 bp, Homo sapiens
tggctgtccagctgtgtggagtggagacttctagtgccggggttagacagattggtttaaaatggagacagaaatggaggcacattcacagaagcaggtaytgtgcctcagaagagaaggcgttgtgcctgagttgttgtcagcttttgtttcggaagggttcagggttgatctccagcatttgaccctcagtataaaact

SEQ ID NO: 359734 - DNA, 201 bp, Homo sapiens
acctgcagctgcgtgcctgttcacacaaacccgcccgccgacccgtcagcggctggccaagcctgctgcggaggcccagccagcgaacagcagatacaacmgccatctttgatttctctgcagagcatgttgggaaagcgtgcctcgaccttcaggaaggtggggcgcagtgggcggggagcagggaacagctccgctatt

SEQ ID NO: 359735 - DNA, 201 bp, Homo sapiens
tctcgagtttataactcagtgcacattcacaaagtgaatacatctttgcaaactctcacccagatcagaaagtagcatatcaccagcacccccagaagacmcctccacggcccctcccagtttctacccccgtcaaaggtaattactaacttgacttccaacactataaacaagttttgtctttccttgaagtttatttaa

SEQ ID NO: 359736 - DNA, 201 bp, Homo sapiens
cctgcagctgcgtgcctgttcacacaaacccgcccgccgacccgtcagcggctggccaagcctgctgcggaggcccagccagcgaacagcagatacaaccrccatctttgatttctctgcagagcatgttgggaaagcgtgcctcgaccttcaggaaggtggggcgcagtgggcggggagcagggaacagctccgctattg

SEQ ID NO: 359737 - DNA, 201 bp, Homo sapiens
atcatcttccttactcaggtatttcctgcatctgtggcactggactctgtgctctggccttactgagtttagtctggtgggagaaatcaggcctgaggtcscctacaagcttgtctgtttcacttcacaggcgtggaagacattttggtgaagccaaaggcagatgtcaagaggcaacgtatcattgaagaatccacccac

SEQ ID NO: 359738 - DNA, 201 bp, Homo sapiens
ccgcagcccggcattggtggccttgccctctgcaggtgatcatcagggaaggggagctgctctgcggagtgctggacaaggcgcactatgggagctccgcytacggcctggtccactgctgctatgagatctatggaggcgagaccagcggcaaggttctaacctgcctggcccgcctcttcaccgcctacctgcagctct

SEQ ID NO: 359739 - DNA, 201 bp, Homo sapiens
  misc_feature (1)...(201): n = A,T,C or G
aaacatagttgtgtcctatgggagcacctttcaaaccaaacataaaatgtgatgaaaccttttttaaggtttgactaaatgtgtttaatgttgtcaaattnactatttctgcatacagggattgttgcatcacattcccttcattgaactgggtgggctttggagttaagtctattccatatcctgcctcccccacattct

SEQ ID NO: 359740 - DNA, 201 bp, Homo sapiens
gctagctgctcagtgcttggcactttcagtccttaacgacacccattctcagttcttaacaacaccatttgtggtggcacctccagtaaaaaattcaggcycagagaacaaaatgtctctctaggaagtggcaaaggtcatcttcaaacctaagtctattgatctcaaactctactgactggtggaatccttgctagttgc

SEQ ID NO: 359741 - DNA, 201 bp, Homo sapiens
cagttccccttcctggccagcaactacgaggtagtgtgctagatcccggagcctgggggccgagcagtaggcctcccccaccgaggttagagaactggaaygcgctgagctttgcaacccagtccaagtggccattggaaagtagagtgggaagggtttataagacaccggtcagtgccctgaaacacttgacaatttcaa

SEQ ID NO: 359742 - DNA, 201 bp, Homo sapiens
gtcggagacccccgctgatggcgtctggcaagtcactgccctgctttgagccttatgagttcacccccagggctggtggctttgtcactggcaggttcctyaccggcatcaaacctcctgtatgtattttggtttttccatttagctttttccctcatttctaggcttaattgtaggtgaactatgactgccctacagggt

SEQ ID NO: 359743 - DNA, 201 bp, Homo sapiens
ttcctgtgctgctggaaggaagcgggaagcaggatgcaggggtcagggaaagatgccccagaccacggggaagggttaagtagcgtgagcaggtggcggasctgaaggggagccccagagtctaactcccaagccatgtgctgatgtggaggcagcttggcttgtgtctgctgactgctcccgtggtcactgcttaatccc

SEQ ID NO: 359744 - DNA, 201 bp, Homo sapiens
cagcttctgaccccagccacgggggcacctaagccccaggggacaaaaattgtgagtaagggcagctttggtcagggacccatccggctcctgttcggatyctggtgattggtggccatcaggtgtggctccggtgcgcactgacacaggagcccatccctaggaggaagctccccgacacgtgggtggctttttagattc

SEQ ID NO: 359745 - DNA, 201 bp, Homo sapiens
taggtgctgggttctctttcttagatctgggtttgtttggtagtggcttgtccctggaggagagaccccgaagtcacttctctgcccacctgcagactgcygcaagtctcagggccatggtggcctggggcgtaggtattcctcacaggatagctgggaagattagagtggatagaactgcctctggccccttggatcaca

SEQ ID NO: 359746 - DNA, 201 bp, Homo sapiens
gcccccactgcattcatgattctttgtcttagtaagagcttactgaggtggttactattcttattcccatattataattgagaaactgaaggcttaaagargtcactcagtaattgtcagagctcaagtgtattagggttctatggaagattttgtttaagaaagtggtggtgggggtgtttccgctggttaaaaataaaa

SEQ ID NO: 359747 - DNA, 201 bp, Homo sapiens
tttcttccccatccttgcccatctcagtccctggtttaagagctattgtccctgtagtacccatttttatgctatcatatcccctgcatacaaactgtcaygtacacaggggctattttttgtttttataaagaaaaatgaggccaggcacgttggctcatgcctccaatcacagcaatatgggaggctgaggcaggtgga

SEQ ID NO: 359748 - DNA, 201 bp, Homo sapiens
ctagtcctgggtggggttcccctctcctacagtagattctgccttccttgttagaggacgaccacagcggcacctacaactgtccttcaccaagcacgcastctgccaggcgctgtgagaggaatcagacatagggttgtttctcatcattagcaaacaagattgcagaatacgtagtaattcccatattttctagacaat

SEQ ID NO: 359749 - DNA, 201 bp, Homo sapiens
gtagagggacttgcacaacgagggtcacacatggagtagagggtgggtgactcccacaggaggcatcacccgcagcccggcattggtggccttgccctctrcaggtgatcatcagggaaggggagctgctctgcggagtgctggacaaggcgcactatgggagctccgcctacggcctggtccactgctgctatgagatct

SEQ ID NO: 359750 - DNA, 201 bp, Homo sapiens
ggaagcagttggctcccaagcaagaacatagtgaggatgtgggcaagacaagacagggatataagaagggctcttgatagaaagtggcttccaggcaggcrattagggattagagtttgacttaagatttattttcattcttcttgtgttgtctgttttggcttataggatggccaaccattggcgggactgatccaggat

SEQ ID NO: 359751 - DNA, 201 bp, Homo sapiens
ctcagatagagaagcaatgacagagcagaagcagaaagctccctgcactcagccatcccacaaacacatactgagccatgcccattcgtcgctgagtcacrggggcaggcgtgggcaacacagtacgacttttctgccctcagccctctgccctctcaccttatggggcctggcctcgagccagccctctgtgcaggtggc

SEQ ID NO: 359752 - DNA, 201 bp, Homo sapiens
gacccatccggctcctgttcggattctggtgattggtggccatcaggtgtggctccggtgcgcactgacacaggagcccatccctaggaggaagctccccracacgtgggtggctttttagattcaccttgtagtctccgggcagaagagtggctgcccttaaacaggactactcaaagggcagtccccagaccagcatca

SEQ ID NO: 359753 - DNA, 201 bp, Homo sapiens
gccacctttccagcccatctgtaatcgttatctttgagtttacatagagcccatcactgtagtgtttagaccatttgacaaggatccttttttagcctttkagttagtacatatggttaaatttctggtgcttctcccagactgcatttgtgagttcccttagccttagttataaaacatgaccatactgttggctagtat

SEQ ID NO: 359754 - DNA, 201 bp, Homo sapiens
attcacatagaacgtgcccccacgtggccctgggccctggcccttcaggtaaatatatgtgctggacaaggggaatgagtgtggggtcagacccatctgcrttcagtccctggccctgcctttttctagcagaaagactctggacaggtacctcactttccaaacctcagggggtccttctgtggaaggccagaggctggg

SEQ ID NO: 359755 - DNA, 201 bp, Homo sapiens
ggcttcagatatgtttcctgacttctacttagtcagctagaaaattcaagttacagggataccctattcacaaagcatcctaaccagagacattaattgtwatgtcattttgctattaaggagaatagtaaagctgacaattgtctggggttttgattcagaggtgttctttctgatcctaagcaggagttaggaaattta

SEQ ID NO: 359756 - DNA, 201 bp, Homo sapiens
gtgaaggaaactcctcgatccgttcctggctttaaccctgactcgatgtgcgagtcccaggtatggctgtccagctgtgtggagtggagacttctagtgcyggggttagacagattggtttaaaatggagacagaaatggaggcacattcacagaagcaggtactgtgcctcagaagagaaggcgttgtgcctgagttgtt

SEQ ID NO: 359757 - DNA, 201 bp, Homo sapiens
atttcttctctattaccaggttatcttccttaagtaaccataatactgaattaaagtacattttgtcgttggttttatgtacttagtagagttttgtggcrtctttttacttaaaataggagttgaatggaactcatttcttttccatgaaaacagttaaacttttcatttatgtgttactttttggactaattttttttc

SEQ ID NO: 359758 - DNA, 201 bp, Homo sapiens
aggggacactaccggggagcagcagatggttttttgctggcagagtgacctgaggcattagctatgtggggagtttaggtgctctgaagtcctcagaccartgaccttgaatgtgctgtgcttgattttgattgaatacggtgcaaagccataggagacttcatgcttacattgtgtcctgcagtgggctgacatataaat

SEQ ID NO: 359759 - DNA, 201 bp, Homo sapiens
tagcagccgagtcatatttcaccagaggggacactaccggggagcagcagatggttttttgctggcagagtgacctgaggcattagctatgtggggagttkaggtgctctgaagtcctcagaccaatgaccttgaatgtgctgtgcttgattttgattgaatacggtgcaaagccataggagacttcatgcttacattgtg

SEQ ID NO: 359760 - DNA, 201 bp, Homo sapiens
cacttgaagcattcgtgtaacttgtccaaggacactcagctgagaagcagcaggaaggacaaggagttcctggatcttcctagggtttgtgctaccacagrgatggagacctctgtgcacagggagtgccaggggctgctcagagatgcctagtgtcaatcagcatcctctgctccttggagcttctctattcccatcagc

SEQ ID NO: 359761 - DNA, 201 bp, Homo sapiens
gccatacactgtgcagagagcactttagaggctcctcatttcaccctccccacagtccttggaggtaggtgctattcatgtccacattttacacttgaagsattcgtgtaacttgtccaaggacactcagctgagaagcagcaggaaggacaaggagttcctggatcttcctagggtttgtgctaccacagggatggagac

SEQ ID NO: 359762 - DNA, 201 bp, Homo sapiens
gaaaaagactctttgattgctattgaccgatcctttttgagtacacttccaggccagtccctcatagacaaactttacaacatttggattcgccttcagarccacgtcaatattgtgtttgatagcgagatggacaaactaatgatggacaagtacccaggcattaggcaggtgagcaaaaaactggattcccattgctag

SEQ ID NO: 359763 - DNA, 201 bp, Homo sapiens
ctcagagatttccagggttttgctccagatgaaaaattccccttgcatttagttaactagaacgtgagacaaaagccacaccttggtcaagctgaggtgarcacttggaaagagccgtggtgatactgacgtttgcactgatcacccacctgtccactctgttcccaggtgtgccggcatgtgaagaatggggacattctg

SEQ ID NO: 359764 - DNA, 201 bp, Homo sapiens
tagttgtcagatccagggtaagaaagaaaaattaaatcaagccaggccttttggagcttttttccatcatccctgttttcttggtttcatcttccaggaaraagactctttgattgctattgaccgatcctttttgagtacacttccaggccagtccctcatagacaaactttacaacatttggattcgccttcagagcca

SEQ ID NO: 359765 - DNA, 201 bp, Homo sapiens
ggctgtgtgaggttgatgggaaggaaacactgaggtctcgtccggggaggaaccacaggctaggtgaggaggggaaaggccaaaaggacccatttcctctrtgaagtatgaaagctctgccccatcccctgggccttgtaaataaaagaggaaatggcccggagagccaaggctcattgccctgctcagcagcctgccaga

SEQ ID NO: 359766 - DNA, 201 bp, Homo sapiens
caggcccagggcagagagagctgtccacactgaagatttccaaggcctctgcatgttcccagtggagaagtctttccaggcccccagtgcacaacgcgttrtcacagagtcttaatggacagtccattcaccccgaaactgccaggtttcttttcctttatagaccatatgcttcatgggtgctacattacgcagctagaa

SEQ ID NO: 359767 - DNA, 201 bp, Homo sapiens
tcctgtgctgctggaaggaagcgggaagcaggatgcaggggtcagggaaagatgccccagaccacggggaagggttaagtagcgtgagcaggtggcggagstgaaggggagccccagagtctaactcccaagccatgtgctgatgtggaggcagcttggcttgtgtctgctgactgctcccgtggtcactgcttaatccct

SEQ ID NO: 359768 - DNA, 201 bp, Homo sapiens
atggagccaaagaactgcccacgccttcccactgcggtggggccatcagcgctcttggaaacactatgctgggcaaacctgtcggggtgatcctaagacaygaagaggaactaccttgtttgcaccccagaaatgagtgcacgctgttttaggaaaatggctttgataaagaggcttcaccttgggtgagtgctgggctca

SEQ ID NO: 359769 - DNA, 201 bp, Homo sapiens; identical to SEQ ID NO: 76853

SEQ ID NO: 359770 - DNA, 201 bp, Homo sapiens
aagtggggatcagggttagaatttccagagcccagctggtttctttggtgcccaggcctggtaggatctccatttattcctctgccaactcctgcatccamgttcctggggatgcctgtgagactgcacactgctgggggaaggactcaggaacgtacattgttaacaagccccacacaaggtgcctggttgcccaactcc

SEQ ID NO: 359771 - DNA, 201 bp, Homo sapiens
ggttctgagcttcaggttggttcttttaaattggtgtggttctaacttgttgacacgattcattgccacaagctaagttatctctgcccttcgaaattttratgagcccttccgaagtcctcgttctttcgtcacattgccggggctcccacaccaagggagttctctggccagagcaacaccaccttctggagatgctgc

SEQ ID NO: 359772 - DNA, 201 bp, Homo sapiens
caaataatcaaatgattaataatctttatatccaaggcacaggtttttctcaaattcctataaacattgaaaagtttacaaaatctacatcttaaagaacrtcagtgagcatagctatttttacttcagcgtgcgttatgttgccgtgaacacagacccgacagataaggttcaggagactggggatcagaatggctgtga

SEQ ID NO: 359773 - DNA, 201 bp, Homo sapiens
ggtggctggagggcacgagcacctctggaataatacctactctttggggccatttgccgtgtgctgggccctcagctaaagcacactatcaatactatccrttttcctcctcactgcaacccagggaagtaggcattactctgccgattttgcagctgaggcaactgagtatcaaagcataagtaaacagtcggtgagtgg

SEQ ID NO: 359774 - DNA, 201 bp, Homo sapiens
ccagtccaagtggccattggaaagtagagtgggaagggtttataagacaccggtcagtgccctgaaacacttgacaatttcaaagcctgtgaactttcatyacttgaggtggctggagggcacgagcacctctggaataatacctactctttggggccatttgccgtgtgctgggccctcagctaaagcacactatcaata

SEQ ID NO: 359775 - DNA, 201 bp, Homo sapiens
ctgtgttgggccaagtctgtggaattccaggcacaggctagaagccccagactcagagcccccttctcagcatctccccaggatccccctgaaggggcatrcttggttctgctggctcttgagccaagacagagcttcctacatggggcttgggtggcatgttcgtaaatgtgacatgatgcggatgttggtattcacgct

SEQ ID NO: 359776 - DNA, 201 bp, Homo sapiens
agaatagtgccaagagagaatgctttgtgctgtttttctttataaatgtttttattttggggtgactgcattaaaggggctgaatggggccaccaggggtraataagcagggtgagggacccggatcgccctggctgctcatgcagcggagccaggagtgaaggctcaggttccagtcctggctctgccttgaacttgctg

SEQ ID NO: 359777 - DNA, 201 bp, Homo sapiens
gtcacctaggacctgaacaagtcaagttctctctgtccgtctggttccaggtgttgcagaaaattgacgtccaggagtccttctgtatggaagaaaaacasaacaaattccaggtgtaccagctgcggtttcagttcctgccacatgcatattaccagcaggagaagtgcctgagacccgaggacatcctgcgcttcatgg

SEQ ID NO: 359778 - DNA, 201 bp, Homo sapiens
gaatcctttccttctttctccaagttcactcctcaagggcaaccccttgtggtcacagctgtccagagggacaggagggaaggatagaacttcctcccccrtctccttagcagctgactcttggccaggagtggcaggggcctgagttagcatgtgctcatgggagggacagagcggggaaagaggcaggctgcaggaaag

SEQ ID NO: 359779 - DNA, 201 bp, Homo sapiens
cccgtgaaggcatcttctgtcccctttgaatcctttccttctttctccaagttcactcctcaagggcaaccccttgtggtcacagctgtccagagggacasgagggaaggatagaacttcctcccccatctccttagcagctgactcttggccaggagtggcaggggcctgagttagcatgtgctcatgggagggacagag

SEQ ID NO: 359780 - DNA, 201 bp, Homo sapiens
aaacatacatactcatctaaccttgtgtgggtgcttttttttttcttgaagagccaacagaaaatgtgttttaagtgttttaattgctattttcaaactcygttcccaaaagactatgacaatttacagctcttaatttttgaagtgcaataaagtgttctctgagggcattgaactaactaagaacccttttctggctct

SEQ ID NO: 359781 - DNA, 201 bp, Homo sapiens
gagctcgaatagggtaaggaggatgttcatttggagataaaggcacagcttagagtgtgagagcccaaatcaggtgagagggtgcctgtgcagggtgaccyagcatgggatgtatgagcccaaatatgataaggaggggtccacaaggagggtgggctcatgtggagcttgagcccaatttgggtgagggctccacaccga

SEQ ID NO: 359782 - DNA, 201 bp, Homo sapiens
  misc_feature (1)...(201): n = A,T,C or G
actaaacatagttgtgtcctatgggagcacctttcaaaccaaacataaaatgtgatgaaaccttttttaaggtttgactaaatgtgtttaatgttgtcaanttgactatttctgcatacagggattgttgcatcacattcccttcattgaactgggtgggctttggagttaagtctattccatatcctgcctcccccacat

SEQ ID NO: 359783 - DNA, 201 bp, Homo sapiens
cacctcaagacactgacaggtttcttctcttatctgcccacactggaagacgtgggaccatctgtctccttgtgtcatacccagtcgattgggccagtagrtggccagacagtatcaataggtggtgctctaagccagctgaaggcttctgtgtatttctgtcccctgggtagggagtgggagagaggaggagacagggct

SEQ ID NO: 359784 - DNA, 201 bp, Homo sapiens
attaaggaatggatacaagatatggacaagactgtcaaaacttttttttttttttttttagagacagggtcttgctccattgcctagcctttagtgaagtrgtgcaattatagctcactgaacccttgaactcctgggctcaagtgaccctcctgcttcagcctcctgagtaactaggactacaggcatatgccaccatgc

SEQ ID NO: 359785 - DNA, 201 bp, Homo sapiens
agacactgggtctgggagatgcttcctgggatgttctgtgcagctggcagcagccttagtgtgagctctgggcttagggggcacctaggaacattaggggracacacatgggtctgagcatggaaaggtgtgggttctggtctagcttctacaccgaacgaccatgccaggtgaccctagttgagtcacttccttatacta

SEQ ID NO: 359786 - DNA, 201 bp, Homo sapiens
tagcatttgacattctccaatgcactctcttgaaactttcctttcttccagaaccttatttgtcttcaagttctcctatttttatgacaaatacttctacytccctctcttcctctatcgatctataacctcacaaacatttattgagcatccagttttttccaggcaccaagctaggcgttaatgacacattggtgagca

SEQ ID NO: 359787 - DNA, 201 bp, Homo sapiens
acccttggagaggttggtcccagttgtgctgctcatcagaggtgtacattactgtgataatggagttttcctctttgttttccagtttctggaagaaaatsccgatccctctgcctctgaaattcgggaggaattagaacaatacacaactgaaattgtgcagaacaacctcctggggtcccagggcgcacatgtgagtta

SEQ ID NO: 359788 - DNA, 201 bp, Homo sapiens
gggaacagctccgctattggctgaagcggaagaagacgaaagcaatcataaaatgggaggttgcaagctcatggtttgaaagacttcgtcacggaagctaraagctctatacacccgatttgcctcggaggaattttcctaaatgattattttgatgtcttatatatctttgattgttttcaaaacaaaagagcgagcaga

SEQ ID NO: 359789 - DNA, 201 bp, Homo sapiens
aaagtgcaacacagtagccatagtttctttttctcccttcaaatgaatcttttccacccttggagaggttggtcccagttgtgctgctcatcagaggtgtrcattactgtgataatggagttttcctctttgttttccagtttctggaagaaaatgccgatccctctgcctctgaaattcgggaggaattagaacaataca

SEQ ID NO: 359790 - DNA, 201 bp, Homo sapiens
catgtgctgatgtggaggcagcttggcttgtgtctgctgactgctcccgtggtcactgcttaatccctcctaattttacctcccgtttgacaggcatcgcrgtcgaccctcgccatctctccctggttgctgattatatgtgcttcgagggtgtttacaagccactgaatcgctttgggatccggtcaaactcttccccgc

SEQ ID NO: 359791 - DNA, 201 bp, Homo sapiens
ctttgcttactgctctgaccctaggctcagattcccaccaatgagagataagctgtctctgccaggtgctgagcagagatggatcaggaagcttttaagasagtcattagttccacagcatcctcctgtgcctgaaaaataaaccatttcctgagtttgcctacccgctctgctgaggccactcctaggaggttcaggcca

SEQ ID NO: 359792 - DNA, 201 bp, Homo sapiens
caaggaccagagggattttaacatgattgatctgaagttcaaggaggaagtgaaccattacagcaatgagattaacaaggttagcccagcattgcatgcayttatccccaccactatgaatgctgatttttaaaaaaattacattttgattctcacctgggccctacagagcaccttggctgttgaacagctgactaggtg

SEQ ID NO: 359793 - DNA, 201 bp, Homo sapiens
tctccttccatcctgaagccctttccgctgtggacaggaaaacaggtaattgggagagaacagccagtgtatgtaacaaaaggaaataggccactcatgtraaaggttttattctcagaagagtccagaccagagacagagaaatggctaagccagcaatagtctgactttctttcccctttgtttggggttcctgagtct

SEQ ID NO: 359794 - DNA, 201 bp, Homo sapiens
ctccctttgagctctctgcagagcagccgcttgagaaagcgcttctcttggcttcctgttagcagtgcttgttgggtggatgacccctctgagggatccarctggggccagggaaagattccttggcttttcagtagctataattaattccagtcatagtaaagaaatatctgagtatgtggcataaaatgaaaacaattt

SEQ ID NO: 359795 - DNA, 201 bp, Homo sapiens
actccagcctggcaacagagagagaccctgtctcagaaaaatagtacagcctagtgaggatccaaccacccctttcccatagacacacatacacacacacrcacacgcacacggagagagagagaagctgggttggtttttaaattgttttttttttttcatcatgtcacatgccacctgggttttttttttctttgctgt

SEQ ID NO: 359796 - DNA, 201 bp, Homo sapiens
tcttggccaagtcaaacagctcctccacatcttgggtgaaaagacagcctgttgagacagatttggggtccatcagacctttttttatccctgccctgaayttctacctccattcctcatttccaggtgtttgccacaaaactgacctacccacagccagttaccccatggaatgttcaggaacttaggcaagcggtcatc

SEQ ID NO: 359797 - DNA, 201 bp, Homo sapiens
tgcttgaacccaggaggtggaggttgcggtgagccgagatcgcgccattgcactgcagcctaaggcaacaagagcaaaactctgtctcaaacaaaacaaamcaaacaaacaaacaaaaaacagatgggggtcttgctacattgcccaagctggttttgaactcctgatgtcaagtggtcttcctactttggcctccaaaag

SEQ ID NO: 359798 - DNA, 201 bp, Homo sapiens
tggattcccattgctagctacagaagataaataataaacattgtgtattgaaacaagaaactaataagcctactggaattcttgttgaatgttttttatgrccttttttctccataaagatcctggagaagaaagaaggcctgttccgaaaacacatgatgggaaagcgagtggactacgctgcgcgctcagtcatctgcc

SEQ ID NO: 359799 - DNA, 201 bp, Homo sapiens
ggaatacctggttctcctcaccacgtgtttctctgctgcatttgggaggggccagcagaggcacagtgtgcaggcctctcaggcctgaggggaccctggcragcgcccagctcaggcctctcacatgggagagctgatgggaggggctgttttatgaggcagtgccccacaggcgcctcttgccttaggtggtcgtttttc

SEQ ID NO: 359800 - DNA, 201 bp, Homo sapiens; identical to SEQ ID NO: 76847

SEQ ID NO: 359801 - DNA, 201 bp, Homo sapiens
atcttactgggttttttctctcttcaatcacaactgtcctcctgcacaggaccgggcgatccgttgtccgaaaggaacacaacagcaagttgactatcacrtttccagccatggtgcacaggacagctggccagaaggactctgagcccctgggtgagcaggctgggtctggagaggagctccatgtgaggccagcagatg

SEQ ID NO: 359802 - DNA, 201 bp, Homo sapiens
actgtctttctcccatgctgttttgggcatcattttatcactttccctctgtgttgtcctttgcatatacttctggcttcccaaagtagacctgagtttgmatctgagctctgtctcttgtgagacctgcaacctcacaaattacacaactgtccctgagtgtccactatctaatctctaatgcctgcctgcaggaccaat

SEQ ID NO: 359803 - DNA, 201 bp, Homo sapiens
gcaatgagcatagcacttgttcaatatttctttctttaaaaataagtgaagaccttttttaaaatttacagaagcatcacatactcattataggaagaacratgctaagatgtaggaaagtagctgagtgtggtgactcatgcctgtaattccagcactttgggaggccaaggcgggaagatcgtttgaggctagaaggtt

SEQ ID NO: 359804 - DNA, 201 bp, Homo sapiens
ggctgtgttccaatcaaactttatttacagaagcaggtggccagcctgaggactgtagtctgctacccaccaaaacctgtcattttttttttttgattttwtttttttttgagacaaggtctcgctctgtctcccaggctaaagtgcagtggtataatcacagcttgcttcagcctccacctcctgggctcaggtgatcct

SEQ ID NO: 359805 - DNA, 201 bp, Homo sapiens
gacctggaggatgttgatctccaagaacatgccctggcggcggctgcagggcatttccttcgggatgtattcggctgaagagctcaagtaaggagttggtygggtagcgtgcccagcctggatcttgaggtcggcgccctaaactacgattcccagaagcgcttttgcccagtctatcctcttgagtccaggcttgtctgg

SEQ ID NO: 359806 - DNA, 201 bp, Homo sapiens
cagaagcgcttttgcccagtctatcctcttgagtccaggcttgtctggcgcttgtcctgctgggagccgtagttctgggaacgttcctgggccggcgtggmctgcctggataagaggccggtggtgctgggggaaagagtttgcgctgaggtaggggaatataagggtggggagggtcctggtctgcagcgttatcatctg

SEQ ID NO: 359807 - DNA, 201 bp, Homo sapiens
ccagaagcgcttttgcccagtctatcctcttgagtccaggcttgtctggcgcttgtcctgctgggagccgtagttctgggaacgttcctgggccggcgtgrcctgcctggataagaggccggtggtgctgggggaaagagtttgcgctgaggtaggggaatataagggtggggagggtcctggtctgcagcgttatcatct

SEQ ID NO: 359808 - DNA, 201 bp, Homo sapiens
atgtgtgcacctgcattcggcccttctgtagccaactctggttatctccagataaagctgtctccctttgagctctctgcagagcagccgcttgagaaagygcttctcttggcttcctgttagcagtgcttgttgggtggatgacccctctgagggatccaactggggccagggaaagattccttggcttttcagtagcta

SEQ ID NO: 359809 - DNA, 201 bp, Homo sapiens
actcagcctctagtattctctattctacttttacttctatgagatcaactttatttttggcttccacatatgagtaagaacttgcagtgtttaactttctsttcctggcttatttcacgtaatgtcctccagttccatctatgttgttgcaaatgacaggatttcatgctttattatggccaaatagtattccattatgta

SEQ ID NO: 359810 - DNA, 201 bp, Homo sapiens
gaagtcctcgttctttcgtcacattgccggggctcccacaccaagggagttctctggccagagcaacaccaccttctggagatgctgcaggttgtgggcargggaaggtcctagtcctgggtggggttcccctctcctacagtagattctgccttccttgttagaggacgaccacagcggcacctacaactgtccttcacc

SEQ ID NO: 359811 - DNA, 201 bp, Homo sapiens
agaagatagttttcgtggggcaaatgtccggcaggtaagtagcctttcaatgccttcaccaaacccattcttctaaagtcatctttcattgcagccacgcaaatatgatggtgcaaccaaaagtctgtgcattagaaacaagtagaccatagtcttctacagctccaggcttgggtattcagtatttagcacacatttatt

SEQ ID NO: 359812 - DNA, 201 bp, Homo sapiens
agatagttttcgtggggcaaatgtccggcaggtaagtagcctttcaatgccttcaccaaacccattcttctaaagtcatctttcattgcagccacgcaaatatgatggtgcaaccaaaagtctgtgcattagaaacaagtagaccatagtcttctacagctccaggcttgggtattcagtatttagcacacatttatttgt

SEQ ID NO: 359813 - DNA, 201 bp, Homo sapiens
acgtgtaccctgccttgtggtctttaaggacattaagagcagtgcagagtggatgtgaatctcaatgttgtcaccgacagctgtgaaaacaaccccactgyttccccctgaatctgggggactggagatggctgacctgtacacagttcagccatctccaatgttcagactacctgctggcttgcccagcaggaccacttt

SEQ ID NO: 359814 - DNA, 201 bp, Homo sapiens
tagttttcgtggggcaaatgtccggcaggtaagtagcctttcaatgccttcaccaaacccattcttctaaagtcatctttcattgcagccacgcaaatatgatggtgcaaccaaaagtctgtgcattagaaacaagtagaccatagtcttctacagctccaggcttgggtattcagtatttagcacacatttatttgttgg

SEQ ID NO: 359815 - DNA, 201 bp, Homo sapiens
cagtatattcaagcccttgtgagagtatgttgtggaacgctgactataacctctgtgtaataagcgcttacaaatgaacatgttgttaaagaggtatcagaaaaaaaaaaaaagcactggagttagtatgattgcttctgtggcaggccctagtacattttaatctttttctctaggcattttttaaagtaaccagaaacc

SEQ ID NO: 359816 - DNA, 201 bp, Homo sapiens
tgcccaggatgaggaattcctcaaccctttgagccagaagggcaggcttcactgaagtgacccaggctgtcatcctcctgaagcaatgctgagggacctgyggtggtggtccttgtcacccaggctcgggtgtgtctgtgtgtgtgcctacacaggtatactcagctatatagggtggcccctgtgacatgtgacttctgg

SEQ ID NO: 359817 - DNA, 201 bp, Homo sapiens
tgggatcttcctggctcggaggagacagatgccaggccgtcgacagagcctcgcctgccccaaggagggaaggggtggcaggcgggcctcgctcccctgckctaggcagggctgctgggggaggccacagcctcctccctgcttttgaccagccaggctgtccccaggacccgggggtgtggttgttcctggggcctcgct

SEQ ID NO: 359818 - DNA, 201 bp, Homo sapiens
tgtgccccagacgccgagttctccttggctaggcagcggctgtcctggctgacagggcagcgccctcgtcatgagctacttggtccctgcagggaggcctygagctgcagatctccccgaggtcctcgaggggaacggacaggggttgtccacagcaaggaagcctctgtggcccctttcctcgttttcctgttgacttaa

SEQ ID NO: 359819 - DNA, 201 bp, Homo sapiens; identical to SEQ ID NO: 76920

SEQ ID NO: 359820 - DNA, 201 bp, Homo sapiens
ctcttcccagccacactcgggtgtacgcgcccgcatcatcccctctgcaaagcgggcagttgagggagacacagaaagtagccactgctggggattgtgcygagccagctggcgacagagcctggccaggacctgcccatgctgccctctcctgggtgctcggcttggtgccagggtggtccttgctcttgtctctgcctg

SEQ ID NO: 359821 - DNA, 201 bp, Homo sapiens
cgttctccgtactgctgtctgtggacgaggccgacgccgtgctcatggaccgctggaccatcctgctggatgcccacgaggctggcagtgcagagaacgayacggcagacgcagagccccccaaggtacagggcagcccggcgtggggtgccttccaggctcctgcatatgaccccgctacacgcgtcacaacgggcgtcc

SEQ ID NO: 359822 - DNA, 201 bp, Homo sapiens; identical to SEQ ID NO: 76922

SEQ ID NO: 359823 - DNA, 201 bp, Homo sapiens
gcccccaaagggtcccatgaggaccccccaggtgtccatggctgttctacccctgaaccttgacccttgatcgtgaccccagtccaggcgaagcagaactsgagcagaatgagttgtctgtggctgggacgggagatgcctgtggctccctgctatgcctccctcctgtgcccctacacccggccttgcctggctcaggac

SEQ ID NO: 359824 - DNA, 201 bp, Homo sapiens
cagcccacgtctcttcctccaagaggctctggagcctctcgccctctgtggccgttccctgcggtgctcagcctctgcctctccctctccctctggggggycctgtacctccagggagctgggagtcctgctcctggagtggggcaggggtacttcctggggaggctgcctttggggtgagatgtcacccctggacaggcg

SEQ ID NO: 359825 - DNA, 201 bp, Homo sapiens
ggtgctgcctgtccccccttctctcggtggaccctggcctgcttccagagcttttctcttaagctgccaggagaagcttctcccggtcccatctggagacyggggtggctagggctgcagcaggtgaagggcggcaccagcggggccttctggaagagctccctgtcccagctggactgcctggggctccgtggcacaacc

SEQ ID NO: 359826 - DNA, 201 bp, Homo sapiens
tctgccctcctgaccagctccaccctgcatccccacgggccctgggggctccgggcagctgcttccaaggtgggcgaggagccgggtgctgacggcctgtsccctcacctctgcagtccagcggacgatgctgatggacgaacagcccctgctggaccggctacaggacatccggcaggtgagtgggtgtggacgccggcc

SEQ ID NO: 359827 - DNA, 201 bp, Homo sapiens
gacccaagcgtggggcgtggggtgagcaggccctgtctccatggcagaggagggacctgggtgctgcctgtccccccttctctcggtggaccctggcctgyttccagagcttttctcttaagctgccaggagaagcttctcccggtcccatctggagactggggtggctagggctgcagcaggtgaagggcggcaccagcg

SEQ ID NO: 359828 - DNA, 201 bp, Homo sapiens
ggtgcttggcgccctggaggagacacggtaccgactggcctgcccggagccttctgtggccatcctgcccctgggcacaggtgggctcagccgtgcagcckaggagggggcctcagggtctaccccttcctgtgcagcttttgccgaggcctgggctggctgtcctcgtggtggggtctgcacccagctgatgggcgggtg

SEQ ID NO: 359829 - DNA, 201 bp, Homo sapiens
gccaggacctgcccatgctgccctctcctgggtgctcggcttggtgccagggtggtccttgctcttgtctctgcctgccggcagagctgttggggagctcmgggggcctggtgagggcggccgggtcctgggagatgaacgccctgtccccagatcgtgcagatgagtaactactgtggcattggcatcgacgcggagctg

SEQ ID NO: 359830 - DNA, 201 bp, Homo sapiens
ggggagctcagggggcctggtgagggcggccgggtcctgggagatgaacgccctgtccccagatcgtgcagatgagtaactactgtggcattggcatcgaygcggagctgagcctggacttccaccaggcacgggaagaggagcctggcaagttcacaagcaggtaccggagccgcaggggctaccacctgtcaacggcat

SEQ ID NO: 359831 - DNA, 201 bp, Homo sapiens
gtaccggagccgcaggggctaccacctgtcaacggcatacctccctcaggtcccccagcaggaacaggcagaggggccggaacccggaggctgcctaaggyggggtagggcttcccctggtgatgggtgacctgccccgtcctgcaggctgcacaacaagggtgtgtacgtgcgggtggggctgcagaagatcagtcactc

SEQ ID NO: 359832 - DNA, 201 bp, Homo sapiens
gctgcccagtaggtgataccagctccgtggggcaccgtggggtcaggcccagcttccacgctgcacctgaggcctccacccagtagggaggcccacaggaygcagctcctggatgtgccgggccccgctgcggctgcctcgccaagggccagagcgtgtttgtgaccagctgtcaggatcccaggcatggccctcccggta

SEQ ID NO: 359833 - DNA, 201 bp, Homo sapiens
gggttgtccacagcaaggaagcctctgtggcccctttcctcgttttcctgttgacttaattcctgggagtgttcctgatgccctgttttgctgttttgcgrgtgaggagacagagggcctggtgcggtggtgccgttctccccggcccagcatccccgcccctctccctgcagatgtctgtgcggcaggtgagccagacgc

SEQ ID NO: 359834 - DNA, 201 bp, Homo sapiens
tgcaggtgcacaggccccacagccagactcgctgttttcatctggcatcacttccttgaattcactgggggcttgtaggtgccaccttgtttgtgcctcayaacagcaggaaggactctgttgcccgttttacagcaaggggcctgaggtcagagggtcagcgctcatccgaggctgcccagtaggtgataccagctccgt

SEQ ID NO: 359835 - DNA, 201 bp, Homo sapiens
tgaggcaggagaatggtgtgaacccaggaggcggagcttgcagtgagccgagatcacgccactgcactccagcctgggcgacagagcgagactccatctcaaaaaaaaaaaaaaaaggagatatatttaacaaaataaaagtcacccgccatcctggcatgctcacagctgctattctggaacacggtctttctgtgtatg

SEQ ID NO: 359836 - DNA, 201 bp, Homo sapiens
gactcgctgttttcatctggcatcacttccttgaattcactgggggcttgtaggtgccaccttgtttgtgcctcacaacagcaggaaggactctgttgccygttttacagcaaggggcctgaggtcagagggtcagcgctcatccgaggctgcccagtaggtgataccagctccgtggggcaccgtggggtcaggcccagc

SEQ ID NO: 359837 - DNA, 201 bp, Homo sapiens
gtggagctgcccagtattgaaggcctcatcttcatcaacatccccaggtgctcgcgggcggggctccccagaggctctgcccggcggggccatgggcaggmtcagccctcgtcctgcctgcacctacacctctgtgcccgctctcttatgcggcagctggggctcgggggccgacctgtggggctccgacagcgacaccag

SEQ ID NO: 359838 - DNA, 201 bp, Homo sapiens
tgaccccgaagagcacggcccgctctgtggtgctggaggtcctgccgctgctcggccgccaggtgcgtaccctgtgcctgctccccatgccggccagactyggtggggggtcgctgtccccaggaggccaggccaccatcccagcccaggcgtggctgtccccgcgggtgtcctgaggtggtgggggcctgcccagacccg

SEQ ID NO: 359839 - DNA, 201 bp, Homo sapiens
atgtccccgcacctggcgcacctgacctggctcccccaacctggcgcccctcacccacctggcctccccctccatgacctgccccccactgaaccccgccygaccccccacaacttggcccctctaacctggtgccctgcaggaggccgcactgcgggcccaccacatccccgaggaccctggccacctggagctgtgccg

SEQ ID NO: 359840 - DNA, 201 bp, Homo sapiens
cctgccctggggtgagtggtaagtggtgaccgcaggcggctctgcctgccaagtgggtcacgaagccccgagtgtgtccttgcccccagccacggccggcycctgtgccgctgcccaccctgtgtctgcacccagcctgtgtgtctcctgttgcccagccttccccgctgtgggggccccagcctcctgtcgtagggtccc

SEQ ID NO: 359841 - DNA, 201 bp, Homo sapiens; identical to SEQ ID NO: 76924

SEQ ID NO: 359842 - DNA, 201 bp, Homo sapiens; identical to SEQ ID NO: 76925

SEQ ID NO: 359843 - DNA, 201 bp, Homo sapiens; identical to SEQ ID NO: 76926

SEQ ID NO: 359844 - DNA, 201 bp, Homo sapiens; identical to SEQ ID NO: 76929

SEQ ID NO: 359845 - DNA, 201 bp, Homo sapiens
tccacactggcttgggcggcccctcgtcatgtggacggcccgaggctgccgctttttaaaattgattttaatgtcttctatactttgctaaattgggaaartataagtatgtatttcaactgtatgcatgataggaaatttagaagatgtatttaacggccgggcgctgtggctcacgcccgtaatcccagcactttggga

SEQ ID NO: 359846 - DNA, 201 bp, Homo sapiens
cagggacatgtaggaagggccaggcttattcctccctcagctgtcagcgtcgccgtcttcagactgaggccccccaagtccgcattccctgatgcgttcargctgcaggtggggcgcaggccgcgaggcaggcccgggtgtgcagcaggacgggaagccaggccagcaggcacacctgccactggcgggcatccggctgcg

SEQ ID NO: 359847 - DNA, 201 bp, Homo sapiens; identical to SEQ ID NO: 76914

SEQ ID NO: 359848 - DNA, 201 bp, Homo sapiens
ccccccaactccactgaggtcccccgggcgcccgggactcacggagcttacccggcccagggaagcaaacgctgaagatctttgatggcgacgacgcggtragaagaagccagttccgcctcgttacggtgtcccgcctggccggtgccgaggaggtgctggtaagggggaggctgggggaggtctgagccccctcccagg

SEQ ID NO: 359849 - DNA, 201 bp, Homo sapiens
gggctcctgggggggatggagatttcggcatctggcgtgacctcagtttgcaagatcacacacttaggggagctgacaaaggcttcagggggtctgttcartttcctcacagctatgtgtgaacccacaagcatctcaaggaagcttgaataaaaagcaaaggcaggaagcctgggtgcctgagggtgtcttggccaccac

SEQ ID NO: 359850 - DNA, 201 bp, Homo sapiens; identical to SEQ ID NO: 76916

SEQ ID NO: 359851 - DNA, 201 bp, Homo sapiens
cgggcgcccgggactcacggagcttacccggcccagggaagcaaacgctgaagatctttgatggcgacgacgcggtgagaagaagccagttccgcctcgtyacggtgtcccgcctggccggtgccgaggaggtgctggtaagggggaggctgggggaggtctgagccccctcccaggaccgcatgtccccgcacctggcgc

SEQ ID NO: 359852 - DNA, 201 bp, Homo sapiens; identical to SEQ ID NO: 76918

SEQ ID NO: 359853 - DNA, 201 bp, Homo sapiens
gagtaactactgtggcattggcatcgacgcggagctgagcctggacttccaccaggcacgggaagaggagcctggcaagttcacaagcaggtaccggagcygcaggggctaccacctgtcaacggcatacctccctcaggtcccccagcaggaacaggcagaggggccggaacccggaggctgcctaaggcggggtagggc

SEQ ID NO: 359854 - DNA, 201 bp, Homo sapiens; identical to SEQ ID NO: 76919

SEQ ID NO: 359855 - DNA, 201 bp, Homo sapiens
cggtggggggtcgctgtccccaggaggccaggccaccatcccagcccaggcgtggctgtccccgcgggtgtcctgaggtggtgggggcctgcccagacccratgccaagctctaccccaacaggccgagagtcccgagagcttccagctggtggaggtggcgatgggctgcaggcacggtgagtagacagcccgtgctggg

SEQ ID NO: 359856 - DNA, 201 bp, Homo sapiens
tcggccgccaggtgcgtaccctgtgcctgctccccatgccggccagactcggtggggggtcgctgtccccaggaggccaggccaccatcccagcccaggcrtggctgtccccgcgggtgtcctgaggtggtgggggcctgcccagacccgatgccaagctctaccccaacaggccgagagtcccgagagcttccagctggt

SEQ ID NO: 359857 - DNA, 201 bp, Homo sapiens
tgtgtccccacagggtgggcgtggcctacgtgtccgtgcgagtgaccccgaagagcacggcccgctctgtggtgctggaggtcctgccgctgctcggccgycaggtgcgtaccctgtgcctgctccccatgccggccagactcggtggggggtcgctgtccccaggaggccaggccaccatcccagcccaggcgtggctgt

SEQ ID NO: 359858 - DNA, 201 bp, Homo sapiens
cctgaggtggtgggggcctgcccagacccgatgccaagctctaccccaacaggccgagagtcccgagagcttccagctggtggaggtggcgatgggctgcmggcacggtgagtagacagcccgtgctgggcgtggcggtccctgcaccttttgggtttggacctgctgcccaggctttcctgcagggtggtgccggacatc

SEQ ID NO: 359859 - DNA, 201 bp, Homo sapiens
ctgctacgccatccgtgtcgccaccgccctcacgctgatgaccgggctttaccaggtgaggagccctgcttgggcacagggaggggcccagggcacccccscttaggttttggccatccacgagggcaaggctgggggcaagcacagggttggcagaggaggtgctggcccaagacagcaaggcttgggcagagctggggc

SEQ ID NO: 359860 - DNA, 201 bp, Homo sapiens
ggggctctgcagggacaagccgggagggggcggggcccgctttggggcggcgactccacacccctgcagcgtatcccagccacacaagacatggcgacackctgctgcgttcgttcctcacactgtggccacaggacagaagtcgaggctcaggcggggggcctggtaaagactttgggtttttcttgggaccccaaagtt

SEQ ID NO: 359861 - DNA, 201 bp, Homo sapiens
ggcccacgggggcaaggacccagactgctgccagcggcggggaggggtgacccgcgtggacgcggctctcaaaggacaccagcgccacctgaacaagaccygtggcgcgcacgaggcaggagagctgggcgctcggcgtgaggcccgggtgggggtcgcgagcggacagccccgggccgcaggcgggtcccccgttgcagt

SEQ ID NO: 359862 - DNA, 201 bp, Homo sapiens
ccacctgcaccaggtgcggggcctcggccggggccaccgggggtgcggccaggagcgaggccaggagcgccagcagcgctgcgcgggggcgcaggggacgyatggccacgcgtgctcggggactgcggggcttcgggctgcactgccggttccgcctccgggtcggagtctgggcgcgcaccccatgtgaccgccgccgcg

SEQ ID NO: 359863 - DNA, 201 bp, Homo sapiens
gctccggtctctgaagctctcacagtgcgcagtcagggggcgcccgagctctccccgtgcggccagggggtcccggaggccgcggagcgctcaccagaagyctgtgctcctccagaagcgccgcaggggccacagcgcgcgggccgcgtccacctgcaccaggtgcggggcctcggccggggccaccgggggtgcggccag

SEQ ID NO: 359864 - DNA, 201 bp, Homo sapiens; identical to SEQ ID NO: 76969

SEQ ID NO: 359865 - DNA, 201 bp, Homo sapiens; identical to SEQ ID NO: 76970

SEQ ID NO: 359866 - DNA, 201 bp, Homo sapiens; identical to SEQ ID NO: 76971

SEQ ID NO: 359867 - DNA, 201 bp, Homo sapiens
ctctgtttttgtgtgtttttgagacagagtcttgctttgtcgcccaggctgaggtgcagtggcgcgatctcagctcactgcaacctccatctccggggctycagcgattttctcaccccagcctcctgagtaaagcgtgcgctttagcaggaaggagaattaccccagaagagcacactgggccctccttacacttggctt

SEQ ID NO: 359868 - DNA, 201 bp, Homo sapiens; identical to SEQ ID NO: 76975

SEQ ID NO: 359869 - DNA, 201 bp, Homo sapiens
cggagctgagcctggacagggtgccgccacgccgcccctcagcactgctggcctcagcacaccccatggcatgggcttggtgtcgtaatcccatctcaccycacgatggattctggatccagcagggcccagcgtccatccataccgggcagggggctggggcccgcgctgccaggagaaggcccagcaccaatccccggc

SEQ ID NO: 359870 - DNA, 201 bp, Homo sapiens; identical to SEQ ID NO: 76978

SEQ ID NO: 359871 - DNA, 201 bp, Homo sapiens; identical to SEQ ID NO: 76977

SEQ ID NO: 359872 - DNA, 201 bp, Homo sapiens
gctttggggaaaaggggcttaggtttctacgacctgcctgggacaatgaggggccagagacaggaggcaggagaaggcctggcttccaaggccttcactcygggtgacattttctgaaccccaacaaaagcaacagaaacggtatattgtgtataaacctaatgaatcgtaaccgcataaaacaatcatgttacagggttt

SEQ ID NO: 359873 - DNA, 201 bp, Homo sapiens
ttggacgaaaggttaagacctgacaggctaacagactcctgggggagcccagcgaggcccatctgcttcggttcctggaggcctctctctgcagctctccytcctgctgggtgggggcacaacgccccggaataggggtctgaccacatacagtcaaacaaggcaggccagagaattcctttatggccagtttttacacag

SEQ ID NO: 359874 - DNA, 201 bp, Homo sapiens; identical to SEQ ID NO: 76962

SEQ ID NO: 359875 - DNA, 201 bp, Homo sapiens; identical to SEQ ID NO: 76963

SEQ ID NO: 359876 - DNA, 201 bp, Homo sapiens; identical to SEQ ID NO: 76964

SEQ ID NO: 359877 - DNA, 201 bp, Homo sapiens
gctttgacccctcccaggacggcctgcagcccggagccaacagcagcaccctcaacggctcggctgccatgctggactgcgggcgtgactgctacgccatycgtgtcgccaccgccctcacgctgatgaccgggctttaccaggtgaggagccctgcttgggcacagggaggggcccagggcacccccccttaggttttgg

SEQ ID NO: 359878 - DNA, 201 bp, Homo sapiens; identical to SEQ ID NO: 76966

SEQ ID NO: 359879 - DNA, 201 bp, Homo sapiens; identical to SEQ ID NO: 76967

SEQ ID NO: 359880 - DNA, 201 bp, Homo sapiens
gggctttaccaggtgaggagccctgcttgggcacagggaggggcccagggcacccccccttaggttttggccatccacgagggcaaggctgggggcaagcmcagggttggcagaggaggtgctggcccaagacagcaaggcttgggcagagctggggcgtgccggggcatcccagggcgaggcaccgacgcggagaggctg

SEQ ID NO: 359881 - DNA, 201 bp, Homo sapiens; identical to SEQ ID NO: 76968

SEQ ID NO: 359882 - DNA, 201 bp, Homo sapiens
acagcacttttttttttttttttttgagatggagtttcgctcttgttgcccaggctggagtgcagtggcgcgatcctggctcactgcagcctccacctccsgggttcaagcgattctcctgcctcagcctcccaagtagctgggactacaggcgcccgccaccattcctggctaatttttgtatttttagtggagagaggg

SEQ ID NO: 359883 - DNA, 201 bp, Homo sapiens
tccgggctaagggtccctctgtcttgcccgggctggtttagaactcctgacctcaagtgatcctcccacctcagcctcccaaagtgctgggattacaggcrtgagccaccacgcctggctggtttttatttggacgtaaaatttggaaacgaggaatatgttgccaccagaacccaaaaagaacgaaaagatactggactg

SEQ ID NO: 359884 - DNA, 201 bp, Homo sapiens; identical to SEQ ID NO: 76972

SEQ ID NO: 359885 - DNA, 201 bp, Homo sapiens
gccacagcgcgcgggccgcgtccacctgcaccaggtgcggggcctcggccggggccaccgggggtgcggccaggagcgaggccaggagcgccagcagcgckgcgcgggggcgcaggggacgcatggccacgcgtgctcggggactgcggggcttcgggctgcactgccggttccgcctccgggtcggagtctgggcgcgca

SEQ ID NO: 359886 - DNA, 201 bp, Homo sapiens
tcacgagaagccggtggatacagcttattccagagggaggcttggatcagcacctggggaaaaaaggcagcccctcaacctggccagcctgcagaggagaraagcctgagcaagcgtcctccaaatttcacaacaggctttaccatgtggatgatgtaaccagtcatcagtacatttctgtaaagcaaagcacacttttaa

SEQ ID NO: 359887 - DNA, 201 bp, Homo sapiens
accagaagcctgtgctcctccagaagcgccgcaggggccacagcgcgcgggccgcgtccacctgcaccaggtgcggggcctcggccggggccaccgggggygcggccaggagcgaggccaggagcgccagcagcgctgcgcgggggcgcaggggacgcatggccacgcgtgctcggggactgcggggcttcgggctgcact

SEQ ID NO: 359888 - DNA, 201 bp, Homo sapiens; identical to SEQ ID NO: 76973

SEQ ID NO: 359889 - DNA, 201 bp, Homo sapiens; identical to SEQ ID NO: 76974

SEQ ID NO: 359890 - DNA, 201 bp, Homo sapiens; identical to SEQ ID NO: 76976

SEQ ID NO: 359891 - DNA, 201 bp, Homo sapiens
gtgactgtgacattctgacggtaggcacatgtgcgtggtggcagcccagcctgttcctgccccgttggggaggtgagcttcaggaggctacagggtggttytcagccaggaaccgcagagccaataggccggagctgagcctggacagggtgccgccacgccgcccctcagcactgctggcctcagcacaccccatggcat

SEQ ID NO: 359892 - DNA, 201 bp, Homo sapiens
ccgcttcctggggtcctgcccggctgaaagggggcagaggaaggcaggagcagaggctaagccgctcatccccagggcaggtgtagacgcagtgctccccyggcccaggcttcctgaactactacgatgcctgctcggagggtctgcgcgccgccagccccgccctgcggctgggaggccccggcgactccttccacaccc

SEQ ID NO: 359893 - DNA, 201 bp, Homo sapiens
ctcccgggttcaagcgattctcctgcctcagccgcctgagtagttgggactacaggcgtgtgccaccacgcccggctaatttttgtatttttagtagagayagggtttcactatgttggtcaggctagtcttgaactcctgaccttgtgatccacccgcctcggcctcccaaagtgctgggattacaggcgtgagccaccg

SEQ ID NO: 359894 - DNA, 201 bp, Homo sapiens; identical to SEQ ID NO: 76982

SEQ ID NO: 359895 - DNA, 201 bp, Homo sapiens
ctggccgcacccccggtggccccggccgaggccccgcacctggtgcaggtggacgcggcccgcgcgctgtggcccctgcggcgcttctggaggagcacagrcttctggtgagcgctccgcggcctccgggaccccctggccgcacggggagagctcgggcgccccctgactgcgcactgtgagagcttcagagaccggagc

SEQ ID NO: 359896 - DNA, 201 bp, Homo sapiens
ggcatagggagtcctcttggcaccttggaggctgcatgatggcgggggacccttgttcaaataagatgtcaaccctgagcgtcaggtcaggcccatccctyctgagctgagggacggtgcattggggcccagccagcactgtgggccagcctgtctcggaggcagaggttcttgatttctgagtgtttgggtcctgcgtgt

SEQ ID NO: 359897 - DNA, 201 bp, Homo sapiens
accccattccctttccctcaggccagaagcatcactcacaactccagacccttgcacaccaatctcctcactcagttcaccctcagatgtccaactccacrtggccaaaaccgagaccagtctcactccaagctcatccacccgcctagctgcccaagctgaaatccacagttgccctgtacgaccccccgaccccccacc

SEQ ID NO: 359898 - DNA, 201 bp, Homo sapiens
tcctgggcttgaacgtgtgtgtcagccgcgctgccagccatgctgaggctcgggactgagccgcccctttgttgtccccagccccccgctgccacacagcyaggctgaccagtacgtcctcagctgggaccagcagctcaacctcgcctatgtgggcgccgtccctcaccgcggcatcaagcaggtccggacccactggct

SEQ ID NO: 359899 - DNA, 201 bp, Homo sapiens
tcagacgcccttcatcaccttgcaccctccctccgtgggagtcactgaggcgagattcacctgtgctggggggacagcaaggctcctctgcaggtaggtamggactggcgcatgtttccaagtggaacttcgagacgtggaatgagccagaccaccacgactttgacaacgtctccatgaccatgcaaggtgtgcaccgct

SEQ ID NO: 359900 - DNA, 201 bp, Homo sapiens
cgcctgtcccctcggaatgcaggcctcgtgggaattcagcccatccgcaagtgcagtggcagggcggcccccttcccccttgacgacgcctgtccccttgkaatgcaggcctcgtgggaattcagcccatctgcaagtgcagtggcagggcggcccccttctcccttgaggacgcctgtcccctcgtaatgcaggcctcgt

SEQ ID NO: 359901 - DNA, 201 bp, Homo sapiens
tcaccccccagctcacctcaaacctcatcagtccctctgctcacagcctgcacagccaccacccagtctgggcaccatacctctctgggcaacccccatgrcccccagccagtcttccagctcccaccctgactccagtgagctgccagagggatccttgaaaaatgctctggaagccaaggcgggcggatcacgaggtca

SEQ ID NO: 359902 - DNA, 201 bp, Homo sapiens
gacgcctgtcccctcggaatgcaggcctcgtgggaattcagcccatccgcaagtgcagtggcagggcggcccccttcccccttgacgacgcctgtcccctyggaatgcaggcctcgtgggaattcagcccatctgcaagtgcagtggcagggcggcccccttctcccttgaggacgcctgtcccctcgtaatgcaggcctc

SEQ ID NO: 359903 - DNA, 201 bp, Homo sapiens
agtgagctgccagagggatccttgaaaaatgctctggaagccaaggcgggcggatcacgaggtcaggaaatggaaaccatcctggctaacatggtgaaacyccgtctctactaaaaatacaaaaaaattagccgggcgtggtggcgggcgcctgtagtcccagctactcaggaggctgaggcaggagaatggtgtgaaccc

SEQ ID NO: 359904 - DNA, 201 bp, Homo sapiens
ttcccattccctgacgacgcctgtcccctcggaatgcaggcctcgtgggaattcagcccatccgcaagtgcagtggcagggcggcccccttcccccttgasgacgcctgtccccttggaatgcaggcctcgtgggaattcagcccatctgcaagtgcagtggcagggcggcccccttctcccttgaggacgcctgtcccct

SEQ ID NO: 359905 - DNA, 201 bp, Homo sapiens
ggatcctgcgcccgggcagtcctgggcttgaacgtgtgtgtcagccgcgctgccagccatgctgaggctcgggactgagccgcccctttgttgtccccagmcccccgctgccacacagccaggctgaccagtacgtcctcagctgggaccagcagctcaacctcgcctatgtgggcgccgtccctcaccgcggcatcaagc

SEQ ID NO: 359906 - DNA, 201 bp, Homo sapiens
accaaagattcccattccctgacgacgcctgtcccctcggaatgcaggcctcgtgggaattcagcccatccgcaagtgcagtggcagggcggcccccttcycccttgacgacgcctgtccccttggaatgcaggcctcgtgggaattcagcccatctgcaagtgcagtggcagggcggcccccttctcccttgaggacgcc

SEQ ID NO: 359907 - DNA, 201 bp, Homo sapiens; identical to SEQ ID NO: 77110

SEQ ID NO: 359908 - DNA, 201 bp, Homo sapiens
cactgaggcgagattcacctgtgctggggggacagcaaggctcctctgcaggtaggtacggactggcgcatgtttccaagtggaacttcgagacgtggaaygagccagaccaccacgactttgacaacgtctccatgaccatgcaaggtgtgcaccgcttcctggggtcctgcccggctgaaagggggcagaggaaggcag

SEQ ID NO: 359909 - DNA, 201 bp, Homo sapiens
tggggtcctgcccggctgaaagggggcagaggaaggcaggagcagaggctaagccgctcatccccagggcaggtgtagacgcagtgctcccccggcccagrcttcctgaactactacgatgcctgctcggagggtctgcgcgccgccagccccgccctgcggctgggaggccccggcgactccttccacaccccaccgcga

SEQ ID NO: 359910 - DNA, 201 bp, Homo sapiens
aggctcctcactccctgtcgtatccccttcaccaaagattcccattccctgacgacgcctgtcccctcggaatgcaggcctcgtgggaattcagcccatcygcaagtgcagtggcagggcggcccccttcccccttgacgacgcctgtccccttggaatgcaggcctcgtgggaattcagcccatctgcaagtgcagtggc

SEQ ID NO: 359911 - DNA, 201 bp, Homo sapiens
ggagctgtgtgggcaccctgcttcctgacgctgaccgtccttctgcagggggtccactggacggggcctgagctacaacttcacccacctggacgggtacytggaccttctcagggagaaccagctcctcccaggtgagctgtgggctctgccctcccagcccgcctgcacccccttgccctgcccaccctctccctcacc

SEQ ID NO: 359912 - DNA, 201 bp, Homo sapiens
ctgcctcagccgcctgagtagttgggactacaggcgtgtgccaccacgcccggctaatttttgtatttttagtagagacagggtttcactatgttggtcargctagtcttgaactcctgaccttgtgatccacccgcctcggcctcccaaagtgctgggattacaggcgtgagccaccgtgcccggccagttctgtctcaa

SEQ ID NO: 359913 - DNA, 201 bp, Homo sapiens
gcgccacccggtcccagctgccctggacacccgcaggtcatcgcgcagcatcagaacctgctactggccaacaccacctccgccttcccctacgcgctcckgagcaacgacaatgccttcctgagctaccacccgcaccccttcgcgcagcgcacgctcaccgcgcgcttccaggtcaacaacacccgcccgccgcacgtg

SEQ ID NO: 359914 - DNA, 201 bp, Homo sapiens
aggctcgggactgagccgcccctttgttgtccccagccccccgctgccacacagccaggctgaccagtacgtcctcagctgggaccagcagctcaacctcvcctatgtgggcgccgtccctcaccgcggcatcaagcaggtccggacccactggctgctggagcttgtcaccaccaggtgggcggcgggcagggtctgggc

SEQ ID NO: 359915 - DNA, 201 bp, Homo sapiens
gccggggattggtgctgggccttctcctggcagcgcgggccccagccccctgcccggtatggatggacgctgggccctgctggatccagaatccatcgtgrggtgagatgggattacgacaccaagcccatgccatggggtgtgctgaggccagcagtgctgaggggcggcgtggcggcaccctgtccaggctcagctccg

SEQ ID NO: 359916 - DNA, 201 bp, Homo sapiens
cgagcagcggggagagtgggggtggtggcgccaacctgcaggcagtggtctgtgccctggactctgtagttcaattatttacctacagattgctgagtcaygggtttctccagccatgttacctgatcggctgatccgggagttgaactgtaatcaggggcttgtagtagttagagctgtgtgggcctctgaggagctccc

SEQ ID NO: 359917 - DNA, 201 bp, Homo sapiens
agttcaattatttacctacagattgctgagtcacgggtttctccagccatgttacctgatcggctgatccgggagttgaactgtaatcaggggcttgtagkagttagagctgtgtgggcctctgaggagctcccagcctcccaggagcggctgcagctgtggctctgcggccctgccgggggggcttagggaccagcggga

SEQ ID NO: 359918 - DNA, 201 bp, Homo sapiens
tttgttgtccccagccccccgctgccacacagccaggctgaccagtacgtcctcagctgggaccagcagctcaacctcgcctatgtgggcgccgtccctcmccgcggcatcaagcaggtccggacccactggctgctggagcttgtcaccaccaggtgggcggcgggcagggtctgggcgtcccagagccccttacagagg

SEQ ID NO: 359919 - DNA, 201 bp, Homo sapiens
cgcccagggcgaggactgccggggtcaaggtgccgtgactggccaggagtcctggtctgactggacccagcaccgacccacagcgcctggtcaccctcacrgctcctctgccctcccctctaccacagaccaggaccggcagtgcctgcctcatagggctggggtgaagataaatgatttttttaagtgaactaaattagg

SEQ ID NO: 359920 - DNA, 201 bp, Homo sapiens
tggagcagggcagaggctgacagccggctcagcccaaggctgccggtgcgtgcatatgcgtgtgtgctcgcgtaagccctgtgtgtggtgctcaccgcccrgggcgaggactgccggggtcaaggtgccgtgactggccaggagtcctggtctgactggacccagcaccgacccacagcgcctggtcaccctcacggctcc

SEQ ID NO: 359921 - DNA, 201 bp, Homo sapiens
caggggctgagcacaggtaaaccttcagctctggggtctggggtcgagtgcagcagccttcaaacccaggcggggctgagggaggcttggtctccgtgtcsagtcgccggacaccctcctggtcctgcaaggagccagcctggtccaagctggagcagggcagaggctgacagccggctcagcccaaggctgccggtgcgt

SEQ ID NO: 359922 - DNA, 201 bp, Homo sapiens
agtaggcgatggcctgcggcaccaggatgatgccgatgaccagcccagacatgacgtcgcctgccaggtactcccgcgggcggtactgacgcagccagcgygtggcggggagcaggtcctgcaccagcgcccggacgcacagcacactgcacgagcagctgcaccacagcctggccttcagcatctcacgcagaccccggg

SEQ ID NO: 359923 - DNA, 201 bp, Homo sapiens
gcgcgtggcggggagcaggtcctgcaccagcgcccggacgcacagcacactgcacgagcagctgcaccacagcctggccttcagcatctcacgcagacccyggggtgctgggcgctgccgtcggaccggcaccggccctctgccctgctgcagaggctcaggggactcgtccatcctgttgcgtcaggtcccgtggccgac

SEQ ID NO: 359924 - DNA, 201 bp, Homo sapiens
tgtctcctcagagaggtccctcgctgaccatcaggctcctcactccctgtcgtatccccttcaccaaagattcccattccctgacgacgcctgtcccctcrgaatgcaggcctcgtgggaattcagcccatccgcaagtgcagtggcagggcggcccccttcccccttgacgacgcctgtccccttggaatgcaggcctcg

SEQ ID NO: 359925 - DNA, 201 bp, Homo sapiens
tgacgtcgcctgccaggtactcccgcgggcggtactgacgcagccagcgcgtggcggggagcaggtcctgcaccagcgcccggacgcacagcacactgcaygagcagctgcaccacagcctggccttcagcatctcacgcagaccccggggtgctgggcgctgccgtcggaccggcaccggccctctgccctgctgcagag

SEQ ID NO: 359926 - DNA, 201 bp, Homo sapiens
ccaaaacctaagggggggtgccctgggcccctccctgtgcccaagcagggctcctcacctggtaaagcccggtcatcagcgtgagggcggtggcgacacgratggcgtagcagtcacgcccgcagtccagcatggcagccgagccgttgagggtgctgctgttggctccgggctgcaggccgtcctgggaggggtcaaagc

SEQ ID NO: 359927 - DNA, 201 bp, Homo sapiens
ctcttccccaagttcgcggacacccccatttacaacgacgaggcggacccgctggtgggctggtccctgccacagccgtggagggcggacgtgacctacgyggccatggtggtgaaggtgggccggcccaacgccctgcgcgccccccggccaccttcctcccgagacgggacaggcgagcggtggccgcgccacccggtc

SEQ ID NO: 359928 - DNA, 201 bp, Homo sapiens
ggtcctcgccctgggcagggcctccctcaccgacccccgtctctgagcccccctccttcctcctggcagccatgcaccctgcgtccagccccgtgaggctrtagagtgaccgcaggaagaagtccttgttggcatagtacagcggccccccaaagcggaacacccgcacgccgggctcagggacgaggccctcgaactctg

SEQ ID NO: 359929 - DNA, 201 bp, Homo sapiens
acgccctgcgcgccccccggccaccttcctcccgagacgggacaggcgagcggtggccgcgccacccggtcccagctgccctggacacccgcaggtcatcscgcagcatcagaacctgctactggccaacaccacctccgccttcccctacgcgctcctgagcaacgacaatgccttcctgagctaccacccgcacccctt

SEQ ID NO: 359930 - DNA, 201 bp, Homo sapiens
cgggcaccagcgcagccctggtgctaaccgggcccaggtcctcgccctgggcagggcctccctcaccgacccccgtctctgagcccccctccttcctcctsgcagccatgcaccctgcgtccagccccgtgaggctgtagagtgaccgcaggaagaagtccttgttggcatagtacagcggccccccaaagcggaacaccc

SEQ ID NO: 359931 - DNA, 201 bp, Homo sapiens
ggagggggagcgagtggtgggaggcccggccctgggtcggggggcggctgggcaacgaccccacgcggcgacggcccccccccgccccgcagatgaggagyagctctgggccgaagtgtcgcaggccgggaccgtcctggacagcaaccacacggtgggcgtcctggccagcgcccaccgcccccagggcccggccgacgc

SEQ ID NO: 359932 - DNA, 201 bp, Homo sapiens
gagcgagtggtgggaggcccggccctgggtcggggggcggctgggcaacgaccccacgcggcgacggcccccccccgccccgcagatgaggagcagctctrggccgaagtgtcgcaggccgggaccgtcctggacagcaaccacacggtgggcgtcctggccagcgcccaccgcccccagggcccggccgacgcctggcgc

SEQ ID NO: 359933 - DNA, 201 bp, Homo sapiens
agtggtgggaggcccggccctgggtcggggggcggctgggcaacgaccccacgcggcgacggcccccccccgccccgcagatgaggagcagctctgggcckaagtgtcgcaggccgggaccgtcctggacagcaaccacacggtgggcgtcctggccagcgcccaccgcccccagggcccggccgacgcctggcgcgccgc

SEQ ID NO: 359934 - DNA, 201 bp, Homo sapiens
gctgcatcagcctgggctctgggacctgagggggcatgaaacccgtggggatgtcgccagccacgctcgagccaaagcgcttgtggagctgcccgaagtgygacacgagtgtggccaccacgatgaccagcagctccgtgggcagcggcaccctcaggcggtgtcggtagcggtctgagagctccttcgcggctagcagca

SEQ ID NO: 359935 - DNA, 201 bp, Homo sapiens; identical to SEQ ID NO: 77171

SEQ ID NO: 359936 - DNA, 201 bp, Homo sapiens
tggtcggatgaacacgtgggctccaagtgcgtgagtggggccgcccctccctctgcctggtcctaggcaggtccctgggtcccgaccccttcacccatgckgtcactcgggccacttgccgtggcccatcggctccctccctcgccgccctgcgtccctgcccttcaccccacacactgtgggccacgcgccaggccctgc

SEQ ID NO: 359937 - DNA, 201 bp, Homo sapiens
cagtccagtatcttttcgttctttttgggttctggtggcaacatattcctcgtttccaaattttacgtccaaataaaaaccagccaggcgtggtggctcaygcctgtaatcccagcactttgggaggctgaggtgggaggatcacttgaggtcaggagttctaaaccagcccgggcaagacagagggacccttagcccgga

SEQ ID NO: 359938 - DNA, 201 bp, Homo sapiens
gtctggtcggatgaacacgtgggctccaagtgcgtgagtggggccgcccctccctctgcctggtcctaggcaggtccctgggtcccgaccccttcacccakgcggtcactcgggccacttgccgtggcccatcggctccctccctcgccgccctgcgtccctgcccttcaccccacacactgtgggccacgcgccaggccc

SEQ ID NO: 359939 - DNA, 201 bp, Homo sapiens
ccggttggcacacatgtccccttgtctccagacacaggtgctgtctctggctcctaccgagttcgagccctggactactgggcccgaccaggccccttctyggaccctgtgccgtacctggaggtccctgtgccaagagggcccccatccccgggcaatccatgagcctgtgctgagccccagtgggttgcacctccaccg

SEQ ID NO: 359940 - DNA, 201 bp, Homo sapiens
cgggtgggggcaggttccggttggcacacatgtccccttgtctccagacacaggtgctgtctctggctcctaccgagttcgagccctggactactgggccygaccaggccccttctcggaccctgtgccgtacctggaggtccctgtgccaagagggcccccatccccgggcaatccatgagcctgtgctgagccccagtg

SEQ ID NO: 359941 - DNA, 201 bp, Homo sapiens
atgttacctgatcggctgatccgggagttgaactgtaatcaggggcttgtagtagttagagctgtgtgggcctctgaggagctcccagcctcccaggagcsgctgcagctgtggctctgcggccctgccgggggggcttagggaccagcgggaggcgggggctcaggggctgagcacaggtaaaccttcagctctggggtc

SEQ ID NO: 359942 - DNA, 201 bp, Homo sapiens; identical to SEQ ID NO: 77185

SEQ ID NO: 359943 - DNA, 201 bp, Homo sapiens
actgtaatcaggggcttgtagtagttagagctgtgtgggcctctgaggagctcccagcctcccaggagcggctgcagctgtggctctgcggccctgccggsggggcttagggaccagcgggaggcgggggctcaggggctgagcacaggtaaaccttcagctctggggtctggggtcgagtgcagcagccttcaaacccag

SEQ ID NO: 359944 - DNA, 201 bp, Homo sapiens
cggtggccgcgccacccggtcccagctgccctggacacccgcaggtcatcgcgcagcatcagaacctgctactggccaacaccacctccgccttcccctavgcgctcctgagcaacgacaatgccttcctgagctaccacccgcaccccttcgcgcagcgcacgctcaccgcgcgcttccaggtcaacaacacccgcccgc

SEQ ID NO: 359945 - DNA, 201 bp, Homo sapiens
gccgaggcctgagtgtcaggccccgcaagcctggtctacgtcacgcgctacctggacaacgggctctgcagccccgaaggcgagtggcggcgcctgggccsgcccgtcttccccacggcagagcagttccggcgcatgcgcgcggctgaggtaggtgggccgcggaggggcgaggggccgggccgggccggggtcccgggg

SEQ ID NO: 359946 - DNA, 201 bp, Homo sapiens
cggggagccgaggcctgagtgtcaggccccgcaagcctggtctacgtcacgcgctacctggacaacgggctctgcagccccgaaggcgagtggcggcgccygggccggcccgtcttccccacggcagagcagttccggcgcatgcgcgcggctgaggtaggtgggccgcggaggggcgaggggccgggccgggccggggtc

SEQ ID NO: 359947 - DNA, 201 bp, Homo sapiens
cggagggccctgggatgacgaggggctggcaagaccaccgaggaccgcagggccctctggctcccgcgagcagcggggagagtgggggtggtggcgccaayctgcaggcagtggtctgtgccctggactctgtagttcaattatttacctacagattgctgagtcacgggtttctccagccatgttacctgatcggctgat

SEQ ID NO: 359948 - DNA, 201 bp, Homo sapiens
gcccggggagccgaggcctgagtgtcaggccccgcaagcctggtctacgtcacgcgctacctggacaacgggctctgcagccccgaaggcgagtggcggcscctgggccggcccgtcttccccacggcagagcagttccggcgcatgcgcgcggctgaggtaggtgggccgcggaggggcgaggggccgggccgggccggg

SEQ ID NO: 359949 - DNA, 201 bp, Homo sapiens
ccttgtgatccacccgcctcggcctcccaaagtgctgggattacaggcgtgagccaccgtgcccggccagttctgtctcaaaaaaaaaaaaaaaattcctygggagcctcaggtccccccgactttgacagtgagtactgggtgggagcctgcacggggcacctgtggccggagggtgagtgtaacgaggggctgcagccc

SEQ ID NO: 359950 - DNA, 201 bp, Homo sapiens
gagggtctgcgcgccgccagccccgccctgcggctgggaggccccggcgactccttccacaccccaccgcgatccccgctgagctggggcctcctgcgccrctgccacgacggtaccaacttcttcactggggaggcgggcgtgcggctggactacatctccctccacaggaaggtgcgccctgcccctccgtccgccccg

SEQ ID NO: 359951 - DNA, 201 bp, Homo sapiens
gaatgcaggcctcgtgggaattcagccccatctgcaagtgcagtggcagggcggcccccttctcccttgacgacgcctgtcccctcggaatgcaggcctcrtgggaattcagccccatcggcaagtgcagtggcagggcggcccccttcacccttgacgacgcctgtcccctcggaatgcaggcctcatgggaattcagcc

SEQ ID NO: 359952 - DNA, 201 bp, Homo sapiens
gccccagctctgcccaagccttgctgtcttgggccagcacctcctctgccaaccctgtgcttgcccccagccttgccctcgtggatggccaaaacctaagsgggggtgccctgggcccctccctgtgcccaagcagggctcctcacctggtaaagcccggtcatcagcgtgagggcggtggcgacacggatggcgtagcag

SEQ ID NO: 359953 - DNA, 201 bp, Homo sapiens
aactttggggtcccaagaaaaacccaaagtctttaccaggccccccgcctgagcctcgacttctgtcctgtggccacagtgtgaggaacgaacgcagcagmgtgtcgccatgtcttgtgtggctgggatacgctgcaggggtgtggagtcgccgccccaaagcgggccccgccccctcccggcttgtccctgcagagcccc

SEQ ID NO: 359954 - DNA, 201 bp, Homo sapiens
accctgaggaccggccactgcgcccaggacccggtggccgcggcgccccgccccttacccgccggcggccgcctgaccctgcgccccgcgctgcggctgcbgtcgcttttgctggtgcacgtgtgtgcgcgccccgagaagccgcccgggcaggcaagtggcagtcccctaacccgcgccgcggcccggactccccttccc

SEQ ID NO: 359955 - DNA, 201 bp, Homo sapiens
ccctgccacagccgtggagggcggacgtgacctacgcggccatggtggtgaaggtgggccggcccaacgccctgcgcgccccccggccaccttcctcccgrgacgggacaggcgagcggtggccgcgccacccggtcccagctgccctggacacccgcaggtcatcgcgcagcatcagaacctgctactggccaacaccac

SEQ ID NO: 359956 - DNA, 201 bp, Homo sapiens
ggagggcggacgtgacctacgcggccatggtggtgaaggtgggccggcccaacgccctgcgcgccccccggccaccttcctcccgagacgggacaggcgascggtggccgcgccacccggtcccagctgccctggacacccgcaggtcatcgcgcagcatcagaacctgctactggccaacaccacctccgccttccccta

SEQ ID NO: 359957 - DNA, 201 bp, Homo sapiens
ggctttcgggtgggggcaggttccggttggcacacatgtccccttgtctccagacacaggtgctgtctctggctcctaccgagttcgagccctggactacygggcccgaccaggccccttctcggaccctgtgccgtacctggaggtccctgtgccaagagggcccccatccccgggcaatccatgagcctgtgctgagcc

SEQ ID NO: 359958 - DNA, 201 bp, Homo sapiens
gcgcagctccatctccatcctggagcaggagaaggtcgtcgcgcagcagatccggcagctcttccccaagttcgcggacacccccatttacaacgacgagrcggacccgctggtgggctggtccctgccacagccgtggagggcggacgtgacctacgcggccatggtggtgaaggtgggccggcccaacgccctgcgcgc

SEQ ID NO: 359959 - DNA, 201 bp, Homo sapiens; identical to SEQ ID NO: 77032

SEQ ID NO: 359960 - DNA, 201 bp, Homo sapiens
ttggccagggcggcgctggtggcgaagcagtggaggaaggcgggtagcacgttgcagcagcccacagccagcagctcctggttggcacgcacagagtagcygtgactgcgggcgaacatctccgccagcgagatggagaaggcggcagccacgagggccagggccacggcatccaaagccacacgctgcatcagcctgggc

SEQ ID NO: 359961 - DNA, 201 bp, Homo sapiens
gctgcagtgcccccatttggaggtgaaatgggagtggaatgtagttgggatggccagagagtaggagacatcctaagtgtgagatgtggacagggctgaaygctccagggtctcgtaccccagagtgtgagatgcgggcagggctgaacgctctggggtctcgtacccctgagtgtgagattcgggcagagctgaacaggc

SEQ ID NO: 359962 - DNA, 201 bp, Homo sapiens
gacaccctcctggtcctgcaaggagccagcctggtccaagctggagcagggcagaggctgacagccggctcagcccaaggctgccggtgcgtgcatatgcstgtgtgctcgcgtaagccctgtgtgtggtgctcaccgcccagggcgaggactgccggggtcaaggtgccgtgactggccaggagtcctggtctgactgga

SEQ ID NO: 359963 - DNA, 201 bp, Homo sapiens
tggtcctgcaaggagccagcctggtccaagctggagcagggcagaggctgacagccggctcagcccaaggctgccggtgcgtgcatatgcgtgtgtgctcrcgtaagccctgtgtgtggtgctcaccgcccagggcgaggactgccggggtcaaggtgccgtgactggccaggagtcctggtctgactggacccagcaccg

SEQ ID NO: 359964 - DNA, 201 bp, Homo sapiens
ctgtgtaaaaactggccataaaggaattctctggcctgccttgtttgactgtatgtggtcagacccctattccggggcgttgtgcccccacccagcaggarggagagctgcagagagaggcctccaggaaccgaagcagatgggcctcgctgggctcccccaggagtctgttagcctgtcaggtcttaacctttcgtccaa

SEQ ID NO: 359965 - DNA, 201 bp, Homo sapiens
ccagggcaggtgtagacgcagtgctcccccggcccaggcttcctgaactactacgatgcctgctcggagggtctgcgcgccgccagccccgccctgcggcygggaggccccggcgactccttccacaccccaccgcgatccccgctgagctggggcctcctgcgccactgccacgacggtaccaacttcttcactggggag

SEQ ID NO: 359966 - DNA, 201 bp, Homo sapiens; identical to SEQ ID NO: 76996

SEQ ID NO: 359967 - DNA, 201 bp, Homo sapiens
cggtcccagctgccctggacacccgcaggtcatcgcgcagcatcagaacctgctactggccaacaccacctccgccttcccctacgcgctcctgagcaacdacaatgccttcctgagctaccacccgcaccccttcgcgcagcgcacgctcaccgcgcgcttccaggtcaacaacacccgcccgccgcacgtgcagctgtt

SEQ ID NO: 359968 - DNA, 201 bp, Homo sapiens
cagcctctccgcgtcggtgcctcgccctgggatgccccggcacgccccagctctgcccaagccttgctgtcttgggccagcacctcctctgccaaccctgkgcttgcccccagccttgccctcgtggatggccaaaacctaagggggggtgccctgggcccctccctgtgcccaagcagggctcctcacctggtaaagccc

SEQ ID NO: 359969 - DNA, 201 bp, Homo sapiens
gggaagggcccctcgggaagccgggatcggagtcctgtgtggcaccttgcaggctcccacatgctccgttgtggccacggttccagcctggagcatggagytgtgtgggcaccctgcttcctgacgctgaccgtccttctgcagggggtccactggacggggcctgagctacaacttcacccacctggacgggtacctgga

SEQ ID NO: 359970 - DNA, 201 bp, Homo sapiens
agcaacgacaatgccttcctgagctaccacccgcaccccttcgcgcagcgcacgctcaccgcgcgcttccaggtcaacaacacccgcccgccgcacgtgcrgctgttgcgcaagccggtgctcacggccatggggctgctggcgctgctgggtgagccggggccgctggggtgggccggccagggccctccaggctgggga

SEQ ID NO: 359971 - DNA, 201 bp, Homo sapiens
acatgctccgttgtggccacggttccagcctggagcatggagctgtgtgggcaccctgcttcctgacgctgaccgtccttctgcagggggtccactggacrgggcctgagctacaacttcacccacctggacgggtacctggaccttctcagggagaaccagctcctcccaggtgagctgtgggctctgccctcccagccc

SEQ ID NO: 359972 - DNA, 201 bp, Homo sapiens
gggtgaggtgtccaccaggtcctgcctggctcctgacccctggcccctgctgctcgcgactggcctgcctcgtgccactgagcctcagagccattccgaayccccaccccaagttttccatctcttgatggtgtagggttggggggtctccatgtacagatactctagttcataccaggccttcatagggttattttccaa

SEQ ID NO: 359973 - DNA, 201 bp, Homo sapiens
aatgccttcctgagctaccacccgcaccccttcgcgcagcgcacgctcaccgcgcgcttccaggtcaacaacacccgcccgccgcacgtgcagctgttgcrcaagccggtgctcacggccatggggctgctggcgctgctgggtgagccggggccgctggggtgggccggccagggccctccaggctggggagcggctcct

SEQ ID NO: 359974 - DNA, 201 bp, Homo sapiens
gaactccagcccctgcctggccacctctgtcttcccagttgagggagacgccggtggctgcctgggttttctctgcaccggcctgggcagtgggcgggacwgtcctcgctgccgggtcgcttcccctctctccagcaccacggtcctcggtttcgtgagcccagtgccttacgtgctgttttcacacctatttttttggtt

SEQ ID NO: 359975 - DNA, 201 bp, Homo sapiens
gccggggctccatttccccaagacgaggacactgacattgatggggcacagccccggagggaggagaccctggacactcaccccaccaaaggtacctcctygtggaagccgtctgccaagcgctgctagttccccacagccctgggtgagcccagggaagactgggctgcagtgcccccatttggaggtgaaatgggagtg

SEQ ID NO: 359976 - DNA, 201 bp, Homo sapiens
gctgggggtgctgtggcatggggagactgacagacggggagctgtatagggccagattccggtccatggtggtaaccccatcccccaccactgcagatgcrgcacaaagccagctgccacaggaggtgcactgccccacgggcagctgtgctcacctgcgtggcgtccgcaggaagccctcagaccctggccagcctggtc

SEQ ID NO: 359977 - DNA, 201 bp, Homo sapiens
tcccgggttcaagcgattctcctgcctcagccgcctgagtagttgggactacaggcgtgtgccaccacgcccggctaatttttgtatttttagtagagacrgggtttcactatgttggtcaggctagtcttgaactcctgaccttgtgatccacccgcctcggcctcccaaagtgctgggattacaggcgtgagccaccgt

SEQ ID NO: 359978 - DNA, 201 bp, Homo sapiens
ctggggtcagggggctttcgggtgggggcaggttccggttggcacacatgtccccttgtctccagacacaggtgctgtctctggctcctaccgagttcgarccctggactactgggcccgaccaggccccttctcggaccctgtgccgtacctggaggtccctgtgccaagagggcccccatccccgggcaatccatgagc

SEQ ID NO: 359979 - DNA, 201 bp, Homo sapiens; identical to SEQ ID NO: 77047

SEQ ID NO: 359980 - DNA, 201 bp, Homo sapiens
aacctgctactggccaacaccacctccgccttcccctacgcgctcctgagcaacgacaatgccttcctgagctaccacccgcaccccttcgcgcagcgcaygctcaccgcgcgcttccaggtcaacaacacccgcccgccgcacgtgcagctgttgcgcaagccggtgctcacggccatggggctgctggcgctgctgggt

SEQ ID NO: 359981 - DNA, 201 bp, Homo sapiens
ctgccagccatgctgaggctcgggactgagccgcccctttgttgtccccagccccccgctgccacacagccaggctgaccagtacgtcctcagctgggacyagcagctcaacctcgcctatgtgggcgccgtccctcaccgcggcatcaagcaggtccggacccactggctgctggagcttgtcaccaccaggtgggcggc

SEQ ID NO: 359982 - DNA, 201 bp, Homo sapiens
gctactggccaacaccacctccgccttcccctacgcgctcctgagcaacgacaatgccttcctgagctaccacccgcaccccttcgcgcagcgcacgctcmccgcgcgcttccaggtcaacaacacccgcccgccgcacgtgcagctgttgcgcaagccggtgctcacggccatggggctgctggcgctgctgggtgagcc

SEQ ID NO: 359983 - DNA, 201 bp, Homo sapiens; identical to SEQ ID NO: 77010

SEQ ID NO: 359984 - DNA, 201 bp, Homo sapiens
agcagatccggcagctcttccccaagttcgcggacacccccatttacaacgacgaggcggacccgctggtgggctggtccctgccacagccgtggagggcsgacgtgacctacgcggccatggtggtgaaggtgggccggcccaacgccctgcgcgccccccggccaccttcctcccgagacgggacaggcgagcggtggc

SEQ ID NO: 359985 - DNA, 201 bp, Homo sapiens
agtgcagcccgaagccccgcagtccccgagcacgcgtggccatgcgtcccctgcgcccccgcgcagcgctgctggcgctcctggcctcgctcctggccgcrcccccggtggccccggccgaggccccgcacctggtgcaggtggacgcggcccgcgcgctgtggcccctgcggcgcttctggaggagcacaggcttctggt

SEQ ID NO: 359986 - DNA, 201 bp, Homo sapiens
agccgcccctttgttgtccccagccccccgctgccacacagccaggctgaccagtacgtcctcagctgggaccagcagctcaacctcgcctatgtgggcgycgtccctcaccgcggcatcaagcaggtccggacccactggctgctggagcttgtcaccaccaggtgggcggcgggcagggtctgggcgtcccagagcccc

SEQ ID NO: 359987 - DNA, 201 bp, Homo sapiens
ctgggcagggcctccctcaccgacccccgtctctgagcccccctccttcctcctggcagccatgcaccctgcgtccagccccgtgaggctgtagagtgacygcaggaagaagtccttgttggcatagtacagcggccccccaaagcggaacacccgcacgccgggctcagggacgaggccctcgaactctgtggcatcctc

SEQ ID NO: 359988 - DNA, 201 bp, Homo sapiens
tgctcagaatgtctctcacaggcgggctgcagcaggctagcagcaggctgatgcccagggccccgtagtctcggcgcaggtcctgcagcgtgctcacaccrgctgcgtctaggaacagcagcggggcgcagtcgatgaccactgtgtggaagccggccgctgcgggcaccagcgcagccctggtgctaaccgggcccaggt

SEQ ID NO: 359989 - DNA, 201 bp, Homo sapiens; identical to SEQ ID NO: 77014

SEQ ID NO: 359990 - DNA, 201 bp, Homo sapiens
actttgacaacgtctccatgaccatgcaaggtgtgcaccgcttcctggggtcctgcccggctgaaagggggcagaggaaggcaggagcagaggctaagccsctcatccccagggcaggtgtagacgcagtgctcccccggcccaggcttcctgaactactacgatgcctgctcggagggtctgcgcgccgccagccccgcc

SEQ ID NO: 359991 - DNA, 201 bp, Homo sapiens
gaaggtcgtcgcgcagcagatccggcagctcttccccaagttcgcggacacccccatttacaacgacgaggcggacccgctggtgggctggtccctgccayagccgtggagggcggacgtgacctacgcggccatggtggtgaaggtgggccggcccaacgccctgcgcgccccccggccaccttcctcccgagacgggac

SEQ ID NO: 359992 - DNA, 201 bp, Homo sapiens
atgccatggggtgtgctgaggccagcagtgctgaggggcggcgtggcggcaccctgtccaggctcagctccggcctattggctctgcggttcctggctgaraaccaccctgtagcctcctgaagctcacctccccaacggggcaggaacaggctgggctgccaccacgcacatgtgcctaccgtcagaatgtcacagtcac

SEQ ID NO: 359993 - DNA, 201 bp, Homo sapiens
agtccacggccaggccccgtactccagcactgtgggaggccaaggcgaggggattgcttgagcccaggagttcgagaccagcctgggcaacatggcaagakctctcctctacaaaaacttaaaaaaaaaaaaaaaaaaaaaagctgtgtatggtggcgcacacctgtggtcccagctacttaggaggctgaggtgggagga

SEQ ID NO: 359994 - DNA, 201 bp, Homo sapiens
ctcaggaaattgtcttctacaaagtgatcgactacatcctccacggcaaggaggagatcaaggtcattccgtaagtgcaggattttaccagaagcgtcccsgggggagggaccgcccctcagaccccggctcagcccccagggccgtcctcccagggcttcccacggtgcagtcagcagcaccggcctggcctggccccac

SEQ ID NO: 359995 - DNA, 201 bp, Homo sapiens
cagccccggattccgtccctgcccgccggccccgcgcaccccggatggggcctcgctcgggctccgcgcctccctgcagacgggcgcttggggcggggtctccacacttgctcccacctgcacctcccttgttccctgggttcaggaagagagcgatgtttcagaagatcgtggatgagtccaagaactaccaggacaaga

SEQ ID NO: 359996 - DNA, 201 bp, Homo sapiens
ggggagcacacaggccctgcattggtctgtagcccttggcagtaacttacttcattttgaccttccactttttcacctgtaaaatggtgattcacaaccakcccctccccaggctggtcccagggacccagtgagaaaatacacataaacccagcacttgggaggccgaggggagtggatcacctgaggtcaggagttcga

SEQ ID NO: 359997 - DNA, 201 bp, Homo sapiens
gtgggtggctcggacctgggtacagctgtggcttgggtgatgcttatgcagaggtgacgtcgttggcactggaggaaccagggccacccgctcatcaccargagcctctgggtccaggcagctctgcaggtgaaccccagcagggccgcgagccatgcaccaagaaagccctggggagggtgctggggcagagaacgcatg

SEQ ID NO: 359998 - DNA, 201 bp, Homo sapiens
gccaccctcctccctccttttctgccatcctccccctctcccttccttcctcctgcacacaatccccaagacaacttctcatccccaccctgtcccaaatmtgggctgtgtctttcttgcccccaggagtttgtcccccgctgccaccaccccttcacccctttgtccccacccggctgatggtgtctcttccctgctctg

SEQ ID NO: 359999 - DNA, 201 bp, Homo sapiens
tcacaccaggcaggagggaaggaatagggctggtgtgcacaggtggttccactcaccatcttctgtcttctcttgcagtaggcacagaaatttgcaatggyggcccagcacccaagtcttcaacctgctgtatcctgtgagcactgtcccatgggaccctatggctccctcaatcttcacccactaggatttgggttctgc

SEQ ID NO: 360000 - DNA, 201 bp, Homo sapiens
ggggcttgggcagttggaggtgctttggagaagccacagtgggtgtgaaggccccagagcgaggcccagctgctcggctatgtgagcacacacagcccccwggcctgctagaggcagagcaaatgcagggggttcccaggagcctgagagtccacagctgccacctgctcccagacaaggctcctggcatgtctgaccagg

SEQ ID NO: 360001 - DNA, 201 bp, Homo sapiens
caaatgcagggggttcccaggagcctgagagtccacagctgccacctgctcccagacaaggctcctggcatgtctgaccaggagcctctggggaagtaggraagcccagactggacagtggagaggaagagaccagcaggcaaggaccccccggccaggcatcactacaggggacacagaacccagagggcaccagagagg

SEQ ID NO: 360002 - DNA, 201 bp, Homo sapiens
tgagtcaccaccaccgagatgatccagcactgtcccaactccccccaagttctcctttgcaggcaccctctccctccattctgggcacaggcaaccatgamccactatctgtcaccgtagctttagtataaaatttcacatacatggactcagggagcatagagtctttcctgtctggcttctttccgctggcaaaatgct

SEQ ID NO: 360003 - DNA, 201 bp, Homo sapiens
ccccggttcaaacgatttcctgcctcagcctcccgagtagctgggatcacagacatgtgcctccaggcctggctaatttttgtatttctagtagagacggkgtttcaccatgttggccaggctggtctccaacttctgacctcaagtgatctgcccacctcagcctcccagagtgctgggattactggtttgaggcaccgc

SEQ ID NO: 360004 - DNA, 201 bp, Homo sapiens
ctacactcactcccttggtgacctcatctagtttctttctttctttccttctttctttcttccttcctttctttctttttctttccttccttccttctttyttccttccttccttccttccttccttcctttcctctttctttctttcattctttcaacatttgaaggttatttttttttctttagcttttaagttcaagg

SEQ ID NO: 360005 - DNA, 201 bp, Homo sapiens
atagcccagtgaagccgtaacattccaggctcaagcaattcacccacttctgcttcccaagtagctggaactacaggtgtacaccatcgcacccagctaatttttttttttttttgcagagatggggtctcactatgttgcccaagctggtctcaaactcctgggttcaaatgatccaccctccttggcctcccaaagtgc

SEQ ID NO: 360006 - DNA, 201 bp, Homo sapiens
gtctcgctctgtcgcccaggctggagtgcagtggcgctatctcagctcactgcaagctccgcctcccgggttcacgccattcttctgcctcagcctcccgrgtagctgggactacaggcacccgccaccacgcccgcctaattttttgtacttttagtagagacggggtttcaccgtgttagccagggtggtctcaatctc

SEQ ID NO: 360007 - DNA, 201 bp, Homo sapiens
gggagtggccacaggcccacaggtgtgcccctccctccaggtgctgctgtggtcggccaacaaggtgtttgaggagctgacggacatcgagaggcagttcmacaaggccttctacacggtgcgggcctacctcaactgcgagcggtactccgtgggcctcctggacatgaccaaggagaaggtgaggcttccgtggctcag

SEQ ID NO: 360008 - DNA, 201 bp, Homo sapiens
acccgccaccacgcccgcctaattttttgtacttttagtagagacggggtttcaccgtgttagccagggtggtctcaatctcctgacctcgtgagctgccygtctcggcctcccaaagtgctgggattacaggtgtgagccaccgcacccggcctattgggttcactttcctgcactttgcaaataccgcatgtttgactg

SEQ ID NO: 360009 - DNA, 201 bp, Homo sapiens
tttaggagagacagggtttcaccatgttgtccaggatggtcttgatctcttgaccttgtgatccacccacttcagcctctcgaagtgctgggattacaggygcgagccaccgcgcccggccagagtgatttatattcttttgagtatacacccattaatggggttgctgggtcgaatggtatttctgcctctacgtctttg

SEQ ID NO: 360010 - DNA, 201 bp, Homo sapiens
ttgaagttgggtagcatgatgcctccagctttgttctttttgcttaggattgtcttggctatttgggttcttttttggttccatgtgaactttaaaatagttttttttttttttctaattttgtgaagaatgtccatggtggttagatgggaatagcattggatctataaattactttgggcagtatggccattttcatga

SEQ ID NO: 360011 - DNA, 201 bp, Homo sapiens
tccagctttgttctttttgcttaggattgtcttggctatttgggttcttttttggttccatgtgaactttaaaatagttttttttttttttctaattttgygaagaatgtccatggtggttagatgggaatagcattggatctataaattactttgggcagtatggccattttcatgatattgattcttcctatccatgag

SEQ ID NO: 360012 - DNA, 201 bp, Homo sapiens
agtgacgcagccaggaaggcaggggacccaggagcagctgtgaaggagaaaagacggcagacgaacgggctgagagagcattttacagagtcctgagtgcrcttaaatcccaggatggggagagactatgaagaagagaaggtgacaaatagggtgaggttcttgggtggagggtaggccacaagagagaggcaggaaggc

SEQ ID NO: 360013 - DNA, 201 bp, Homo sapiens
acattgattttgtatcctgagactttgctgaagttgtttatcagtttaagagggtttggggctgagacaataggtttttctagatatagaattatgtcatmtgcaaacaaagataatttgacttcctttcttcctgtttgaatacgctttatttctttttcttgcctgattgccctggtcagaacttccagtactatgttg

SEQ ID NO: 360014 - DNA, 201 bp, Homo sapiens
ggtcagaacttccagtactatgttgatattgaacaggagcggtgagagaggacatacttgtcttgtgctgtttttcaaggggaatgcttcctgcttttgcrcattcagtgtgatattggctgtgagtttgtcatatatggcttttattattctgaagtatgttccttcaatacctagtttattgagagtttttaacatgaa

SEQ ID NO: 360015 - DNA, 201 bp, Homo sapiens
ttcttctgccttgggatcctgttgatctgtgaccttgcccccaaccctgtgctctctgaaacaagtgctgtgtccactcagggttaaatggattaagggcrgtgcaagatgtgctttgttaaacagatgcttgaaggcagcatgctcgttaagagtcatcaccactccctaatctcaagtacccagggacacaaacactgc

SEQ ID NO: 360016 - DNA, 201 bp, Homo sapiens
ttcaccctccaccaggacgctgtgaggggacggacagcccagggcactcggggtctgacactagaaacagctccagagcacgtctgtgtctgccccaggcragtgcacagcgaggtcctggtcagccgagtgtctgggcagtgcagcccagcccggctcagcactgtgtacagcccatccccctccccgcctctccccagc

SEQ ID NO: 360017 - DNA, 201 bp, Homo sapiens
tttcttgatagccagacatgatgtacagagtataaagacctgccgtaaagatgcctttagtgatgtggttgtaagatgtggggggaggggaagcattctaraaccttctaaccaggcctcagtctttagtgaaactgtgcattgggctgtgagcttcacaagggtttctcagccgcccacccctcactttcttagatgaga

SEQ ID NO: 360018 - DNA, 201 bp, Homo sapiens
tgtgtgtgtgtgtgtgagcccctcagagcttggccaggcagccccccgaccagtgtcttctgcttctcaggaaattgtcttctacaaagtgatcgactacrtcctccacggcaaggaggagatcaaggtcattccgtaagtgcaggattttaccagaagcgtccccgggggagggaccgcccctcagaccccggctcagcc

SEQ ID NO: 360019 - DNA, 201 bp, Homo sapiens
ggcagagctcagctgacctgttccttgaggggccggaacctaagagccaagagaggaggggctgctctaaatctggtgggagtgagggtaggagtgagggkgggtgggtaccccctgggagccagaggcaggcaaagttctcatcacggtgggccccagaccccagggggcagacccctgggagtgtgtgcctgggaggcc

SEQ ID NO: 360020 - DNA, 201 bp, Homo sapiens
gtgactctcccaaggcaaaatgaaaagacagggcacagagcagagttaaaatggagaaaagcagagccactttcaagaagcctcgaggtggacagggccayagtgcagggagagaggccacggcgggggagagtggcagctgactccacctcggtagcaaacccggactgaaaaatttcctctgttcctagccagtgaacc

SEQ ID NO: 360021 - DNA, 201 bp, Homo sapiens
taccactttctatttttttgcccttgttcttttttcctgtttttttttcccactctttttctgccttttatgattctaattgagcatcttatatgctcagwtccatttctctcctttcttagaatatgttagtgattgcactagaatttgcaatatcatccccaattaatccaagtctactttcaaacactccactgcttc

SEQ ID NO: 360022 - DNA, 201 bp, Homo sapiens
tttccctcatggattgtattttgtgttgtatctaaaaactcatcactaaacccaaggtcacctacattttctcttattgtctgctagaggttgtatagatktgtattttacgttagatgtgtgattcattttctgaaaggtgtgtaaggtctgcatctagattaattttttgtgttgttgttggcatgtggaagtccagtt

SEQ ID NO: 360023 - DNA, 201 bp, Homo sapiens
gtgaaaacgtgtggggcagagagaagtgacagagtcaggtctgagatccaggaagaaactggtagagacaaagctggcaagagaagtgaggctgaacattsatcaaccatagcctgtgtgactatggggcaccatctgagggtcactttgtgtggatctgtgtggctccatctaagagtcacattgtgtggatcctgtggc

SEQ ID NO: 360024 - DNA, 201 bp, Homo sapiens
acccaaggtcacctacattttctcttattgtctgctagaggttgtatagatttgtattttacgttagatgtgtgattcattttctgaaaggtgtgtaaggwctgcatctagattaattttttgtgttgttgttggcatgtggaagtccagttgatccagcaccatatgtagaaaaagcctaccttttctccgtcgtattgc

SEQ ID NO: 360025 - DNA, 201 bp, Homo sapiens
agggttatgttgcgtggatctgtgtggcaccatctgagggtcacattgtatggatttgtgtttgggaccatctaagggtcatgaggatcacgttgcgtggrtccatgtggctccatctgagggtcacgttgtgtggatttatgtgtgggaccatcaaagggtcatgagggtcacattgtgtgggtccatgtggcaccatct

SEQ ID NO: 360026 - DNA, 201 bp, Homo sapiens
aggcggtcagcgcaggagccaggtcaggctgggcagggggtccctgagtgcctgaggcctcaccttctccttggtcatgtccagggggctcaccaagtacygtcacagccacacttttaaaaccaaggtctattgggctgtgcggcaggggcaggccacctaggcgtcccagctcctgggggacccatgaggccctgacca

SEQ ID NO: 360027 - DNA, 201 bp, Homo sapiens
taattaccagtaccattaagttaccttggtacttttattgaaaatcaattgactctcagttctgacccatcgacttatatgtctgtttttttttgtttttttttttttttttgagatggagtctcactctgttgcccaggctggagtgcagtggtgctgtctgggctcactgcaacctctgctcccaggttcaagcgattc

SEQ ID NO: 360028 - DNA, 201 bp, Homo sapiens
aagggtcatgagggtcacattgtgtgggtccatgtggcaccatctgagggtcacattgtggggatttgtgtgtgggaccatcaaagggtcatgagggtcaygttgtgtgggtccatgtggcaccatctgagggtcacgttgtgtggatctgtgtgacaccatctgctatctcagggtcacattgcatggattcatgtgtca

SEQ ID NO: 360029 - DNA, 201 bp, Homo sapiens
aaaaatatttcctagtgatatttgtgatttcttctttgactcattggtgtttagaagtgagttaacttctagagacatttggggtcctttctagattagttgttgcagattcctaatttatgactgttgtggtctggaaacactctgcaagatattgatcttttgaaatctgttgagacaagcacgtggcctgtcctgacg

SEQ ID NO: 360030 - DNA, 201 bp, Homo sapiens
gctatctcagggtcacattgcatggattcatgtggcaccatctgagggtcatgttgtgtggatctgcatggcaccatctgaggtcatcctgtgtggatctrtgtgacaccatctgctatctcagggtcacattgcatggattcatgtggcaccatctgagggtcatgttgtgctctttccagaatcactggtatatgtcca

SEQ ID NO: 360031 - DNA, 201 bp, Homo sapiens
ctcagggtcacattgcatggattcatgtggcaccatctgagggtcatgttgtgtggatctgcatggcaccatctgaggtcatcctgtgtggatctatgtgrcaccatctgctatctcagggtcacattgcatggattcatgtggcaccatctgagggtcatgttgtgctctttccagaatcactggtatatgtccaggtgt

SEQ ID NO: 360032 - DNA, 201 bp, Homo sapiens
tcctgtgtggatctatgtgacaccatctgctatctcagggtcacattgcatggattcatgtggcaccatctgagggtcatgttgtgctctttccagaatcwctggtatatgtccaggtgtcacgctgtgatctgtgtggcaccatctgagtgtcacgttatgtgaatccatgtggtatcagctgagagacatgctgtgtgg

SEQ ID NO: 360033 - DNA, 201 bp, Homo sapiens
ccatctgctatctcagggtcacattgcatggattcatgtggcaccatctgagggtcatgttgtgctctttccagaatcactggtatatgtccaggtgtcaygctgtgatctgtgtggcaccatctgagtgtcacgttatgtgaatccatgtggtatcagctgagagacatgctgtgtggatccgtgtggcactgtctgggg

SEQ ID NO: 360034 - DNA, 201 bp, Homo sapiens
ctttccagaatcactggtatatgtccaggtgtcacgctgtgatctgtgtggcaccatctgagtgtcacgttatgtgaatccatgtggtatcagctgagagwcatgctgtgtggatccgtgtggcactgtctgggggtcacgttgtgtggatttgtgtgtggcaccatctaagggtcatcttgtgtgatgccatctgaggat

SEQ ID NO: 360035 - DNA, 201 bp, Homo sapiens
gtcacgttgtgtgggtccgtgtggcaccatctctggatcacgttgtgtggatccatgtggcaccatctctggatcacgttgtgtggatctgcatggtgcckagggtcacattgtgtggatctgtgtggtgccgtctgagggtcatgttgtgctctttccataatcactggtatatgtccaggtgtcatgctgtgaagatca

SEQ ID NO: 360036 - DNA, 201 bp, Homo sapiens
actcaccatcttctgtcttctcttgcagtaggcacagaaatttgcaatggcggcccagcacccaagtcttcaacctgctgtatcctgtgagcactgtcccrtgggaccctatggctccctcaatcttcacccactaggatttgggttctgcctgtggctatttgctacaagaggttaggaagcccaagaaaatgactgaag

SEQ ID NO: 360037 - DNA, 201 bp, Homo sapiens
ggaccccaggtgagggtgtcagtgaggttggcaagggatgggtaaaaggatgggctccaggtagaaagggagggaaacagtaacagagactctgaattcakcagggagcacacatggtggccactgtagcactgacggctggtggaggagacactgtccaaactgccacaggcacaacaggcaccacgacaagcaggcagg

SEQ ID NO: 360038 - DNA, 201 bp, Homo sapiens
atgatttcccagcagggtccacaatcactcaccacttccttggctggcagtggaggttcctttggctccgtgccactgctgagtgggccattgaccctccyaccacttcttttcattctccatgggtcgagttgtttgcctagttagtcccaatatgagaacctggatatttcagtcgaaggtgctgaattcactcacccc

SEQ ID NO: 360039 - DNA, 201 bp, Homo sapiens
ccactggggctgcctctgcccagtcacctccctcctccggccttcgttctgctcctttctacccaaggtcggccactcccctgccctataaaaacccaccyatgtccccgtcaagggcagcaggcaccccaggctgctaagacgtgcactctgagcgccttcccagcccagggactgtccccaaggtccagctgcccaggg

SEQ ID NO: 360040 - DNA, 201 bp, Homo sapiens
tccatttgcttggtaaatttttatccatccttttattttgagcctacatgtatctttgcatgtgaggtgggtctctttattttattattattatttatttwttttttttagatggagtctcactccgtcacccaggctggagtgcagtggcatgatctcagctcactgcaagctctgcttcccggttcatgccattctcct

SEQ ID NO: 360041 - DNA, 201 bp, Homo sapiens
ccaggcagcaaattctgtggcctccaacctcgacgtgcattggagcctgacggacccctgcatttctgacctgggtgctgaaggagccacccctcatcttmagtctattccaaaggagcagccacaattagccttcaaaattttaagtcaagtacatcatcctgtgctcaaaatggctttgggctcattcggagtaaaagc

SEQ ID NO: 360042 - DNA, 201 bp, Homo sapiens
cccatgcccaggtcatgcctacctggccatcgctctggcacagggagcccaaccctctgttccctccagggtcccagggaaaagctggcctggggtagctsctagctcttcagatggaagcacaaattcagtccaccactgtgataggaaacacgtgcaaagatttttactacaggtcctgggcaggaaaggcaccgtgat

SEQ ID NO: 360043 - DNA, 201 bp, Homo sapiens
gctcaacagatcctcctgcctcagcctcccaagcagctgggactacaggtgcaccccaccacacctgggtaattattttttttttagagacagggtcttgytgtgttgcccaggatggcagaagggcagttctgtgatgtttttcttggggtccacagttcacaggaggcagaaatggcaagtcaggcagagcaggggctc

SEQ ID NO: 360044 - DNA, 201 bp, Homo sapiens
agtgtgtcccgtggtgcccggtgggcccggacagagaccccagaggctctgtctgaaggaagctgcacccacagactccatccaggcagcgcgggcgcggkcctgtcgcctacctttctcggaagccatctgcccatgtgaatctatgtgaaggcccttcatgcgctcctggacatctgcgtgggatttacttcaactgct

SEQ ID NO: 360045 - DNA, 201 bp, Homo sapiens
gttagaacagagggccctccagacccagagtcagtgcctctcagcacatgggactgccgggcgggcgggagcctcggatggcaacggaccattgtttgcarggagctctgagggccacctcggggccaggccagggcggcaaggatgggggtactgcagtgtgtctacatggctcaaccggagccctgtgtggtggggacc

SEQ ID NO: 360046 - DNA, 201 bp, Homo sapiens
agatgaaggtgctgaccaggttccatttctggcgagggctctctccctggcttgctgtgtcctcgtcccataagggcacgtctcgtaggggccccaggctygtgacctcacctaaccctaatcatcccccagggccccacctccactcaccatcgcatctcgggtgagggcttcacagatgcatggggggaggggcacgca

SEQ ID NO: 360047 - DNA, 201 bp, Homo sapiens
aggtgctgctgtggtcggccaacaaggtgtttgaggagctgacggacatcgagaggcagttccacaaggccttctacacggtgcgggcctacctcaactgmgagcggtactccgtgggcctcctggacatgaccaaggagaaggtgaggcttccgtggctcagggaccccctgcctggcccgacccaggtcccgcagtgac

SEQ ID NO: 360048 - DNA, 201 bp, Homo sapiens
cccagcaccccttccctgtcccacctgctctccacactgagcccagccactccacgctcccttgggcaggtggcaaggcagagcctgaggtcagctgccayccccagccccaccccagggccctcatgcccccagcaaggcctctccagctctgcggtcccactcaagatgcgcttagctcatttcacacgcaggtgagtg

SEQ ID NO: 360049 - DNA, 201 bp, Homo sapiens
aagggggtggaggggagttgcgaggagtctgccctctgctgctgcagggccaccgtccctagaaacagcaggagatgtgaggcgcatcccaggagctcccrttcagctggcgcagtggctgagggcagagcctgttatttttgccccattgactggtgaggagaaggccacagaaccaccctgtgcccactgcaggtcgca

SEQ ID NO: 360050 - DNA, 201 bp, Homo sapiens
ccaggagctcccattcagctggcgcagtggctgagggcagagcctgttatttttgccccattgactggtgaggagaaggccacagaaccaccctgtgcccrctgcaggtcgcacaggtgggaagtcctgaccccagcagggctgactccggagccgtccacctgggtcactgccccagggcaccctggcctcatgtaaaca

SEQ ID NO: 360051 - DNA, 201 bp, Homo sapiens
ttatttttgccccattgactggtgaggagaaggccacagaaccaccctgtgcccactgcaggtcgcacaggtgggaagtcctgaccccagcagggctgacyccggagccgtccacctgggtcactgccccagggcaccctggcctcatgtaaacaaatgtcagaaccaggaagtaagaggagggtctggggtcacatccaa

SEQ ID NO: 360052 - DNA, 201 bp, Homo sapiens
atgtcagaaccaggaagtaagaggagggtctggggtcacatccaactctctgaaggacagaatcccagtcaccggggggtgtctggtctcagtaaccctcrctgtgtctgagctgaggcagagctcagctgacctgttccttgaggggccggaacctaagagccaagagaggaggggctgctctaaatctggtgggagtga

SEQ ID NO: 360053 - DNA, 201 bp, Homo sapiens
ccaagagaggaggggctgctctaaatctggtgggagtgagggtaggagtgagggtgggtgggtaccccctgggagccagaggcaggcaaagttctcatcayggtgggccccagaccccagggggcagacccctgggagtgtgtgcctgggaggccagaggggtggaggacagaccccaggagtgaaaggactcccaccccg

SEQ ID NO: 360054 - DNA, 201 bp, Homo sapiens
ggagagggtggcgggcaccaggaggcttcagggacaaggcgagcaggcaggctcaacaggcatccaggaagcccgacgtggccggagggcggcaggtgcgkgaggtgccaggcagggcggggccccccatgaggcctgtccaagtctgctggactgagcactggggggcaccagcatcctccgcacaggggtgcatggagc

SEQ ID NO: 360055 - DNA, 201 bp, Homo sapiens
cagggcggggccccccatgaggcctgtccaagtctgctggactgagcactggggggcaccagcatcctccgcacaggggtgcatggagccaggctggagcyacagggacaggcccagctttcaccgcccggtggccacatcccagtgcccagcagggcccctgggcacctcacacctggagggcagcagcccccacagagc

SEQ ID NO: 360056 - DNA, 201 bp, Homo sapiens
ggatagtgagtgggctgggggagggaggctctatgttggggctgggaagccgtccatgcaatggcctgggggctgagccacaaaggagaactgtgaagacrgcggtcacctcctgccttctccgtgtcttgttctgcctgcggatgctgcctggccctggtcacctgctgcgagcctgctgaacgtggcgagaggctgagg

SEQ ID NO: 360057 - DNA, 201 bp, Homo sapiens
cttacacgcttgccgccggagccctgtgtcctctcggctcccccaggtcctggtgcggttcctgttctccatcagcaaagggtaccggagaatcacctacyacaactggcgccacggcttcaacgtggcccagacgatgttcacgctgctcatggtacgtggctgccagaatcaccagggttgtgcaggccctcctggtac

SEQ ID NO: 360058 - DNA, 201 bp, Homo sapiens
ctggcaggtccagccctggttgagagagggtgcaggggcaggtccggccctgactgagagagggtgtaggggcaggtccggccctggctgagagagggtaygggggcaggtctggccctggccgagacgctggggagggaggcctgaggaccttaaggagtcaggtgtgccgaggtgcgtgggaaaacgcagggggatgac

SEQ ID NO: 360059 - DNA, 201 bp, Homo sapiens
aaggcgaggggattgcttgagcccaggagttcgagaccagcctgggcaacatggcaagagctctcctctacaaaaacttaaaaaaaaaaaaaaaaaaaaaagctgtgtatggtggcgcacacctgtggtcccagctacttaggaggctgaggtgggaggatcacttgagcccaggaggtcaaggctgtattgagccatgat

SEQ ID NO: 360060 - DNA, 201 bp, Homo sapiens
atcttctgtcttctcttgcagtaggcacagaaatttgcaatggcggcccagcacccaagtcttcaacctgctgtatcctgtgagcactgtcccatgggacmctatggctccctcaatcttcacccactaggatttgggttctgcctgtggctatttgctacaagaggttaggaagcccaagaaaatgactgaagatcattc

SEQ ID NO: 360061 - DNA, 201 bp, Homo sapiens
ccgctctggcgggacttacacgcttgccgccggagccctgtgtcctctcggctcccccaggtcctggtgcggttcctgttctccatcagcaaagggtaccrgagaatcacctaccacaactggcgccacggcttcaacgtggcccagacgatgttcacgctgctcatggtacgtggctgccagaatcaccagggttgtgca

SEQ ID NO: 360062 - DNA, 201 bp, Homo sapiens; identical to SEQ ID NO: 77445

SEQ ID NO: 360063 - DNA, 201 bp, Homo sapiens
caaggcgaggggattgcttgagcccaggagttcgagaccagcctgggcaacatggcaagagctctcctctacaaaaacttaaaaaaaaaaaaaaaaaaaaaagctgtgtatggtggcgcacacctgtggtcccagctacttaggaggctgaggtgggaggatcacttgagcccaggaggtcaaggctgtattgagccatga

SEQ ID NO: 360064 - DNA, 201 bp, Homo sapiens
tgcctgcccgcgtgttctgtgccacgcgtctgcctccctgcctgcctgcccgtgtgttctgtgctgtgcgtccacctccttacctgcctgcctgcctgccygcgtgttctgtgccacgcgtctgcctccctgcctgcctgcccgcgtgttctgtgctgcgcgtctgctgggctgctgggctccacgtgctcatctgcacat

SEQ ID NO: 360065 - DNA, 201 bp, Homo sapiens
aggggcagtctggaaaggcggtcagggcccctggggcatccagccatccagccagtggacacctgtgagaaaaccccccggagggaagtctcagccccaayccaagcaggcctctcacggccagggccgtgggaaccagggaccagggagagcatctgtgtaatgtatctggaattcttttgcgtgagagatttgtctctt

SEQ ID NO: 360066 - DNA, 201 bp, Homo sapiens
gttcaactgtttctttataatttcattcctttctaccagttcagtgattgtttctccagagagttgccattctttttttttttttttttttctttggggggacggagtcttgctctgttgcccaggctggagtgcagtggcacgatcccagctcactgcaagctctgcctcctgggttcacaccattctcctgccccagcc

SEQ ID NO: 360067 - DNA, 201 bp, Homo sapiens
tcctcttctgttcaactgtttctttataatttcattcctttctaccagttcagtgattgtttctccagagagttgccattctttttttttttttttttttctttggggggacggagtcttgctctgttgcccaggctggagtgcagtggcacgatcccagctcactgcaagctctgcctcctgggttcacaccattctcct

SEQ ID NO: 360068 - DNA, 201 bp, Homo sapiens
ttttgcgtgagagatttgtctcttctcctcatttactaatttattcaatcatttatttatgtcagtgtggacttatgagtattgtatgcttaggttataaytcaatatgattttatttattttcttgctcacgtgagtccagctttggccactggaagctcttttacttggcttctgtgccctttttacgtgaccccatca

SEQ ID NO: 360069 - DNA, 201 bp, Homo sapiens
agctgggattacaggcacccaccaccacacccaaccaattgttgtatttttaatagagacgggatttcaccacattggccaggatggtctcgaactcttgwcctcaggtgatccacccaccttggcttcccaaagtgctgggattacaggcacgcaccaccacacccaaccaatttctgtgtttttagtagagacggggtt

SEQ ID NO: 360070 - DNA, 201 bp, Homo sapiens
gtagttggatggttggataaatggatggatgggtgggtgggccaatggtagttggatggttggataaattgatggatgggtgggtgggtgggccaatggtmgttggatggttggataaatggatgggtgggtgggccaatggtagttggatggttggataaatggatggatgggtgagtgggccaatggtagttagatggt

SEQ ID NO: 360071 - DNA, 201 bp, Homo sapiens
gtccctttcttccttccttccttcctttcttctgcttctggtattatttgtgttacaccttttatgggtgtcctacagcttttgtatattctgttcttttwtttttttttttttttttagtgattgttctctttgcctttcacttttggaaatttctattgagctatcctcaagctcagaggctttttcctcagctgtgtc

SEQ ID NO: 360072 - DNA, 201 bp, Homo sapiens
tggtgggtctgaaagtccactgttgtgtgtgttacctcatggctgtgtgtgtgagcctacatgcgtgagtctgcacgtgtgtgcctgcatgtctgtgggtrtgcctgggtgctcatgtgtgtgcctgtgtgtccacaccggtgcctttgtattcatgggagtggccgtgtatccaggtgtgcctgtgtcacgtgtgtctgt

SEQ ID NO: 360073 - DNA, 201 bp, Homo sapiens
ggtgtctgtgtgtgcacaagtgtgtacgtgtgtgtgcatgtaggtgtgtgtgcacacgtgggtgtctgcacaggtgtgtacatgtgtgcacatgtgggtakgtgtgtgcacatgtgggtatgtgtgtgcgtgtgtgcattgtatgaatgtgcacatgtgtacacatgtgtgtgcacatgtgtgcccacgagtatgtgtgtg

SEQ ID NO: 360074 - DNA, 201 bp, Homo sapiens
gagtagctgggatcacagacatgtgcctccaggcctggctaatttttgtatttctagtagagacggggtttcaccatgttggccaggctggtctccaactyctgacctcaagtgatctgcccacctcagcctcccagagtgctgggattactggtttgaggcaccgcaccgagcctggcttggttttgaaatggatgcccc

SEQ ID NO: 360075 - DNA, 201 bp, Homo sapiens
gggtgtctgtgtgtgcacaagtgtgtacgtgtgtgtgcatgtaggtgtgtgtgcacacgtgggtgtctgcacaggtgtgtacatgtgtgcacatgtgggtrtgtgtgtgcacatgtgggtatgtgtgtgcgtgtgtgcattgtatgaatgtgcacatgtgtacacatgtgtgtgcacatgtgtgcccacgagtatgtgtgt

SEQ ID NO: 360076 - DNA, 201 bp, Homo sapiens
cgtgtgcgcagagctgcaaatgttcctgcacgtgaccatcgcgctcgagctgacgtctccaaccctggtccacgacagcgcgacacattctggcttcttcytcttgctgctgtgtgaattcccatgcaacagtgggatgcctgggagctgtcctccgcacaggcacttaattgtctgataccagcgcaggggaatagccgc

SEQ ID NO: 360077 - DNA, 201 bp, Homo sapiens
atgggtgtctgtgtgcatgtgtgtgcacatgtgggtgtctgtgtgtgcacaagtgtgtacgtgtgtgtgcatgtaggtgtgtgtgcacacgtgggtgtctkcacaggtgtgtacatgtgtgcacatgtgggtatgtgtgtgcacatgtgggtatgtgtgtgcgtgtgtgcattgtatgaatgtgcacatgtgtacacatgt

SEQ ID NO: 360078 - DNA, 201 bp, Homo sapiens
cgcacatgggtgtctgtgtgcatgtgtgtgcacatgtgggtgtctgtgtgtgcacaagtgtgtacgtgtgtgtgcatgtaggtgtgtgtgcacacgtgggygtctgcacaggtgtgtacatgtgtgcacatgtgggtatgtgtgtgcacatgtgggtatgtgtgtgcgtgtgtgcattgtatgaatgtgcacatgtgtaca

SEQ ID NO: 360079 - DNA, 201 bp, Homo sapiens
ccccatgctattcccctaccccatgctatccccctaccccatgctattcccgctatcctatgctacataaacaaggcgacttcaggactatggaaggccasgatgagcataatcagggcacagtgtcaacagaggctaaagcactaagaaaggctcagcccagctaatcggcttgggctggtcacagacccaggtgctgtc

SEQ ID NO: 360080 - DNA, 201 bp, Homo sapiens
gcttcctctccccttttctgtccccacagctaaggaggctgcaagaggcccaggcagcctccgctcttgctggatgagccttgggaattacccaccaggcygccagcccaggggcaggtgtggtccctccttcccaggcagctggggagtggcaatcctggtttgttttcgtttgtgggttttttttttttttgagacaga

SEQ ID NO: 360081 - DNA, 201 bp, Homo sapiens
atttttaaaaagactctgcaaaattacattagttctcctaatcatgagatgcttgcttcagagtttcaggatccacccaacatgggaagtcaaagcctctytgggatactacggggctaaggtgcacagtcgctcaggttgtgcacaacacaagggcaccccattcacatgaaaacatcttcattattttgaaaatctgca

SEQ ID NO: 360082 - DNA, 201 bp, Homo sapiens
ccgacatgttcatcacagaacaggtaaaatgcacacgggaagtaagcataaaacaaataattggatggctgggtggatggctggattgatggatggctggrtgggtgaaaagcagggaggaaggagggaggttaggaaggaaggaaggccaacaggcaagcagaaagaaacaaaggaagaataaatgaatggatgggtgga

SEQ ID NO: 360083 - DNA, 201 bp, Homo sapiens
tcactgaaggagggaagggcagggcctgttcatgcaaagcctgggctagggcagacgcttcccgaggacagaggcggtcctggcgggactggagaacaagmggggtgtgaggtgcctgccagactgggtgagggcagcggccagcagagacctggaaaggccctgaggagctgcccggcaagggggctctgaggaagaagg

SEQ ID NO: 360084 - DNA, 201 bp, Homo sapiens
catggctgtgtgtgtgagcctacatgcgtgagtctgcacgtgtgtgcctgcatgtctgtgggtgtgcctgggtgctcatgtgtgtgcctgtgtgtccacaycggtgcctttgtattcatgggagtggccgtgtatccaggtgtgcctgtgtcacgtgtgtctgtatccgtgtgtgtgtgtgtttcttttcatgtgcacacc

SEQ ID NO: 360085 - DNA, 201 bp, Homo sapiens
gctgtgtgaattcccatgcaacagtgggatgcctgggagctgtcctccgcacaggcacttaattgtctgataccagcgcaggggaatagccgcgtcaggaytgttcacccacaccccgtggagaacagtgttatcaagtagaatacggggttgatgaagagtttcttttgccttcagtcttactgaggccagaaggcggct

SEQ ID NO: 360086 - DNA, 201 bp, Homo sapiens
tggagaacagtgttatcaagtagaatacggggttgatgaagagtttcttttgccttcagtcttactgaggccagaaggcggcttgctctgttccttcctgscagtgacgagtgagcgttcctgctgctctgcaccctcaccagcgtttggtggaactgtagtctgatgggtgtatggtagcatctcattattgctgtaatt

SEQ ID NO: 360087 - DNA, 201 bp, Homo sapiens
agatgatgtcgcacgtctattcatttacatatttgccatctgtacatcttaatctttggtgaggtgtctgttcagatcttttgccctgtttgatggggttrtgttcttagcatttgaagagttttgtttttattttatttatttatttattggagacagggtcttactcttgtcattcaggtggagtgcaatagtgaaatc

SEQ ID NO: 360088 - DNA, 201 bp, Homo sapiens
cattgaggggtcacaggggtcatggctgtgcagcagaggcaggtcatccagggctcacccaggggtcatggctgtgcggtgggggcaggtcatccaggggycacggctgtgtggtgggggcaggtcgtccaggggtccatccaggggtcacccagaggtcatggctctgcggcgggggcaggtcaccaggggtcacagctg

SEQ ID NO: 360089 - DNA, 201 bp, Homo sapiens
tgcagggacacggggggtgggacatactcagataggggctgggaaggctgggagcttctgctgagggtggcaccagcagcagctccatgactgtgactgcrgccagggcggctccacgacggtgactgcggccagggcggctccacgacggtgactggggtcagggcaggagagtgtggaggccagtgaggagggtccaca

SEQ ID NO: 360090 - DNA, 201 bp, Homo sapiens
ggcctgggatgagggcctggaggcagaggccagagcccgtgcgaaggcgctgagttcggcaggagacagactgagtgtgggagggacgcagagggcgcagrgggtggggccgggcctccacctgcggctctgggtgaaccagtcacgcgaggagaatgcacctggcgattccacacatctacagcgagtctcctgagccgc

SEQ ID NO: 360091 - DNA, 201 bp, Homo sapiens
gccaggccttgggaggaggagggcctgggatgagggcctggaggcagaggccagagcccgtgcgaaggcgctgagttcggcaggagacagactgagtgtgsgagggacgcagagggcgcagagggtggggccgggcctccacctgcggctctgggtgaaccagtcacgcgaggagaatgcacctggcgattccacacatct

SEQ ID NO: 360092 - DNA, 201 bp, Homo sapiens
aggcaagagaatcacttgaacctgggagacagaggttgcagtgagctgagatcgcaccattgcaccccagcctggacgacagagtgagactccatcttggraaaaaaaaaatccaacttagcattttttttccctcatggattgtattttgtgttgtatctaaaaactcatcactaaacccaaggtcacctacattttctc

SEQ ID NO: 360093 - DNA, 201 bp, Homo sapiens
agctcactgcagcctcaaactcctgggctcaacagatcctcctgcctcagcctcccaagcagctgggactacaggtgcaccccaccacacctgggtaattwttttttttttagagacagggtcttgctgtgttgcccaggatggcagaagggcagttctgtgatgtttttcttggggtccacagttcacaggaggcagaaa

SEQ ID NO: 360094 - DNA, 201 bp, Homo sapiens
ctacgcccatgctattcccgctaccccatgctattcccgctaccccatgctattcccgctaccccatgctattcccgctacgccatgctattcccgctacsccatgctattcccgctaccccatgctattcccgctaccccatgctattcccgctaccccatgctattcccctaccccatgctattcccgctacgccatgc

SEQ ID NO: 360095 - DNA, 201 bp, Homo sapiens
tggggaagatcgggaagtccaggagacggtgtggggatgatggcacggagcagggcttccactgtgaagtcagccacaggtgccgctctggcgggacttasacgcttgccgccggagccctgtgtcctctcggctcccccaggtcctggtgcggttcctgttctccatcagcaaagggtaccggagaatcacctaccacaa

SEQ ID NO: 360096 - DNA, 201 bp, Homo sapiens
aatctcatgataaatttttttttttttttgagatcaagtcttgctctgtcgcccaggctagagtgcagtggcgcaaccatggttcactgcaacctctaccyataggttcaagtgagtcttgtgactcagccacacaagtagcttggattacgggcgcccaccactacacctggctaatttttgtatttttagtagagacgg

SEQ ID NO: 360097 - DNA, 201 bp, Homo sapiens
ctaccccatgctattcccactacgcccatgctattcccgctaccccatgctattcccgctaccccatgctattcccgctaccccatgctattcccgctacsccatgctattcccgctaccccatgctattcccgctaccccatgctattcccgctaccccatgctattcccgctaccccatgctattcccctaccccatgc

SEQ ID NO: 360098 - DNA, 201 bp, Homo sapiens
ttttccaaaaaattttagcatttccccagaatttgcaataatcatttatgactactctaagccctcttccaaatagcattatactgcttcacttagagtgyggctatcttaccacaatgtacctacaacttctcacttccacccttataaaatttctgccatttattttacttatccacgtgctataatcatgtaatacac

SEQ ID NO: 360099 - DNA, 201 bp, Homo sapiens
ttgaagcagcctctgggcgctcccccctccctctgtcccgggccctcacctggacaatcaggaactaccttctgtcccaggcaccctccagctggaggccyctgccattccctttctgaaaagcctctcggacactcccatcagagccaacagaggccgcaggaaagccatgggttaggccctacagagctcaggtttctc

SEQ ID NO: 360100 - DNA, 201 bp, Homo sapiens
gtccacagcacctccggagaaatttccattatctttcctcctgccacgcctcccttccagcctcaggaagacgggcctcccacctctcaaccccactgttmagtcttcccagctcctcctttctggatttccctcaggtctcctcccgtcccctccgtaatgcagggcagctcagctctgtcctcccagctcctgtcttca

SEQ ID NO: 360101 - DNA, 201 bp, Homo sapiens
tttcattgcttttcattcttgtttttttctgttcttgtctgcctatcttacttcagaaatatagtcttcaggctctaagattctttcttctacctggcctrttctgctatgggtacccgtggttgcattgagaagttctcaggttgttttcagctccatcaggtcagttgtgtttctctctaaaccgggtattctggctgt

SEQ ID NO: 360102 - DNA, 201 bp, Homo sapiens
caacaggagagcctggtcctgttcccaccatgagctgagtgccagggggtggaacttcagagggcctggcagggagagagctgggctaggacaccgcagcrgaggagagggagctggcaccatgcggtagaagacccagcggccgccgcgagtgtgaggaggcagggcctggtggggcctgggtctgggccttgaccaagg

SEQ ID NO: 360103 - DNA, 201 bp, Homo sapiens
cggcgtcctggaaccaatttccctgaggatgccgagggatgactgtattgtataccaaattgctagaaaatagacttgtaatgttctcaccacaaaaaaaacaagttggtgaggtgatggatatgttgattagcttaattgaatctttctgcaacaaatacttacatcagaacatcacgccaaaccccataaaacataaac

SEQ ID NO: 360104 - DNA, 201 bp, Homo sapiens
gagagggccatgaggctgagcagctcccttccagggcatatgcgtctctgtgccttctgccccccatgtcagtggatccctcatttctgagtacacggggyggccaccgctgtcaccctggtttcaccctggagcattaaacctgaccccagtcaatgcaggagggacacaacctcagcttccatgcagcccagaagccca

SEQ ID NO: 360105 - DNA, 201 bp, Homo sapiens
ggaacacaggctctgcctcctgctccgcatctcctcattacacacagaaacgtcctcggctcgaggacaaaagcccatctgtattctgatctgagcaggastgggtgccgccctcacatctggagggagcctgagactacccgacaggagccacaggtaccacacggtgaggacccccttccagacacccccctgcccagc

SEQ ID NO: 360106 - DNA, 201 bp, Homo sapiens
gctccagattcctgtttcctgtcttccaaagtaacattagggacagtgttatggcggttgtctcagactggcatcgcaggacatctgtgaagatggcacawtccctcccttctttgcctcgtgcctctgcaatgagactctgctgctctgttatcaagaggtgaagacttttctctgtcccttgaatccaggctgggctgt

SEQ ID NO: 360107 - DNA, 201 bp, Homo sapiens
aagaggtgaagacttttctctgtcccttgaatccaggctgggctgtgacttaccttgacccacagagagtggcagaggagccaggagggaccaccccaggraaggcctccaggctgctcagcttctgctcctgccttgcagaaccttccctgaaggctgtgaggcagccaggtctagccctctggagtagcagcagctgcg

SEQ ID NO: 360108 - DNA, 201 bp, Homo sapiens
cacacacgcccagtccatctgaccccagtacacctacatccagcgcagcctggcccctctgacccctgcacacacacgtgcagcccagaccagcccctctsacccctgcacacacacgtgcagcctagaccagcccctctcacccctgcacacagacatccagtccctctgactcctgcacgcgcacatccagcccggcgt

SEQ ID NO: 360109 - DNA, 201 bp, Homo sapiens
tcctgctctcggaggaggttggtatactcaccctcggtttctgctgtgggcgctggggacgcagcgtccgcaggacggcagggccgtatcctgcggagcasggttctgatgcagcgggtgagcactgggtgtgtgagcactgggggagggcggcagagaaggcggagggccgaggctgagggcaggtgcatcggaggccct

SEQ ID NO: 360110 - DNA, 201 bp, Homo sapiens
caacctccaacccgacgcctaggtcatcccaacccctcaccactccccaccctgctggagccaggaccggtgagcaaggtggccctgtctctacagaccgrcaaactgaagagctactacacggacctggaggccttcgccatggtgacagccggcctgtgccatgacatcgaccaccgcggcaccaacaacctgtaccag

SEQ ID NO: 360111 - DNA, 201 bp, Homo sapiens
tcctgcaggggttggtagaggtcacaccaggcaggagggaaggaatagggctggtgtgcacaggtggttccactcaccatcttctgtcttctcttgcagtrggcacagaaatttgcaatggcggcccagcacccaagtcttcaacctgctgtatcctgtgagcactgtcccatgggaccctatggctccctcaatcttcac

SEQ ID NO: 360112 - DNA, 201 bp, Homo sapiens
gcgcagcctggcccctctgacccctgcacacacacgtgcagcccagaccagcccctctgacccctgcacacacacgtgcagcctagaccagcccctctcamccctgcacacagacatccagtccctctgactcctgcacgcgcacatccagcccggcgtggcctatctgacccctgctctctgcccacagcacaccctcag

SEQ ID NO: 360113 - DNA, 201 bp, Homo sapiens
gttcaggaagagagcgatgtttcagaagatcgtggatgagtccaagaactaccaggacaagaagagctgggtggagtacctgtccctggagacgacccggwaggagatcgtcatgtgagcgcgggcggagggggcacgaggggtccttccctcgcagggaccgggcccactcaccagctggttaaccctgcagccctcccc

SEQ ID NO: 360114 - DNA, 201 bp, Homo sapiens
cccagaccagcccctctgacccctgcacacacacgtgcagcctagaccagcccctctcacccctgcacacagacatccagtccctctgactcctgcacgcscacatccagcccggcgtggcctatctgacccctgctctctgcccacagcacaccctcagccgatcactgggccctggccagcggccttccaagctacgtg

SEQ ID NO: 360115 - DNA, 201 bp, Homo sapiens
gtgcacaggtggttccactcaccatcttctgtcttctcttgcagtaggcacagaaatttgcaatggcggcccagcacccaagtcttcaacctgctgtatcstgtgagcactgtcccatgggaccctatggctccctcaatcttcacccactaggatttgggttctgcctgtggctatttgctacaagaggttaggaagccc

SEQ ID NO: 360116 - DNA, 201 bp, Homo sapiens
ctggggtggacaccagctgctcctccctccccccgttccctcctccctcctcccctcactctcctgccaccctcctccctccttttctgccatcctccccstctcccttccttcctcctgcacacaatccccaagacaacttctcatccccaccctgtcccaaatctgggctgtgtctttcttgcccccaggagtttgtcc

SEQ ID NO: 360117 - DNA, 201 bp, Homo sapiens
ctccacaactgcgagacgcgccgcggccaggtacccacacgctgagcacagctctgcccacgagggccagggtccctccgcccatctcgctgcctgcacasaggcgggtggtggcaggtggtcttgtgctcacctgggtaggtcctggggtgggcattgctcaggggagaggagggctccatggcttctgtggctgtgctg

SEQ ID NO: 360118 - DNA, 201 bp, Homo sapiens
tccctcgcagggaccgggcccactcaccagctggttaaccctgcagccctccccagacgctctggagcaggaagagcccgtcgcggcagcttgtcgagggctgtgaaacaaatgcgccgtccttatttccccccagctctcagggagatggtgcagagctggggagcacacaggccctgcattggtctgtagcccttggca

SEQ ID NO: 360119 - DNA, 201 bp, Homo sapiens
tcaggaaattgtcttctacaaagtgatcgactacatcctccacggcaaggaggagatcaaggtcattccgtaagtgcaggattttaccagaagcgtccccsggggagggaccgcccctcagaccccggctcagcccccagggccgtcctcccagggcttcccacggtgcagtcagcagcaccggcctggcctggccccacc

SEQ ID NO: 360120 - DNA, 201 bp, Homo sapiens
ctggtcactgttctcccgccctctgttcctcccaccagcctatgatggaccggaacaaggcggccgagctccccaagctgcaagtgggcttcatcgacttygtgtgcacattcgtgtacaaggcgagtggttcacgggtgttccgagctgactggggcagggtggctgggagcaggcaagggggcgcgggctggagtcgcg

SEQ ID NO: 360121 - DNA, 201 bp, Homo sapiens
aacatcttcattattttgaaaatctgcagagcactgtgtagacacattagggattaccttacatgaggctatactaatttatgatagcaattatttatgtsttgttatggaaaactgggagacaaaaatgaattactgttttgagatcttacgaagcttggaagacagattggccctggggaggcagcggtggccgcagtt

SEQ ID NO: 360122 - DNA, 201 bp, Homo sapiens
ccttgtggatgcagcaggtgtatcctgtaccggggtgctgggacgctgggcacgggctcggggcaggaggggcccccgctccctgaggaggggacaagtcyggaaaactccagggcgggcctccagccacaccttgaaaagggggtaggtcccacccagcactggatgtttggcttaacaagttcccaacattttaaagtc

SEQ ID NO: 360123 - DNA, 201 bp, Homo sapiens
ttccttcctttcttctgcttctggtattatttgtgttacaccttttatgggtgtcctacagcttttgtatattctgttcttttatttttttttttttttttagtgattgttctctttgcctttcacttttggaaatttctattgagctatcctcaagctcagaggctttttcctcagctgtgtccagtctcctaatgagcc

SEQ ID NO: 360124 - DNA, 201 bp, Homo sapiens
agaccttttatgtagacaacatagttttctgttggaagaagatgccatctgagacttttatagctggagagaagccagtgcctggcgtcgaagcttcatargacaggctgagcctcttgtgaggggctaatgcagctggtggcctcagattgaagccagtgttcattcaccattcagaaaatcctagagcccttaagaatt

SEQ ID NO: 360125 - DNA, 201 bp, Homo sapiens
ccactgccgttaaccacagtacacagggtgctcggtaagtgcagttctgcttccgaggatttatgatgtgggaaaagttttaaattaaaaataagaataakaatgtaaaacaatacagtagaacagccgttttcatggccttgccttgcactgggtgctaagtcatcggagatgatttgaagtcctgggggtgcgtgtgca

SEQ ID NO: 360126 - DNA, 201 bp, Homo sapiens
attcaatttatttaacagatatagggctattaaggttatttaatttttttcttgaatgagctttagtgtcctgtgtttttcaaggaatttttccattttayttaagtttttagatttgttggcataaagttatcccaatatttccttagaagttgtgacttttactgcatataaaacatacctcaataaagctaatacata

SEQ ID NO: 360127 - DNA, 201 bp, Homo sapiens
catgcagcccagaagcccaggctgctcgaaccatccccggggccttgtggatgcagcaggtgtatcctgtaccggggtgctgggacgctgggcacgggctyggggcaggaggggcccccgctccctgaggaggggacaagtctggaaaactccagggcgggcctccagccacaccttgaaaagggggtaggtcccacccag

SEQ ID NO: 360128 - DNA, 201 bp, Homo sapiens
gcaaggaggagatcaaggtcattccgtaagtgcaggattttaccagaagcgtccccgggggagggaccgcccctcagaccccggctcagcccccagggccrtcctcccagggcttcccacggtgcagtcagcagcaccggcctggcctggccccacctgtggtgctctgtgtgccgtggggcatagtggagttgggggtga

SEQ ID NO: 360129 - DNA, 201 bp, Homo sapiens
acatcagtttccggacccccacaggtgccccagcccatcctcaccctgctgtgcccctggaagctctgagccctttcccagcccagaatgtcctctgctarcctccaggcctaccccagaagttctccctcagtgccctccgccgtggccagcacactgttttgggggccttggctgcagctctgtgggttcatttgttcc

SEQ ID NO: 360130 - DNA, 201 bp, Homo sapiens
aggggcctgtgcagcgggatgtcctgagtggggtctggccaggacctcgtggagtgcgtcagcaatgcttcactctcagacgcttggcggaggccacaggsggcctgacgtgcggaaaccacggcccgatgttctcaaagccctgctcgccgcaggtggttctggagcagccgggcggaggaagggctggtcggatgtttg

SEQ ID NO: 360131 - DNA, 201 bp, Homo sapiens
aggtggagtgcaatagtgaaatcttggctcactgcaacctccgcctcccaggttcaagcgattctcctgcctcagcctccagagtagctgggattacaggygcccaccaccacgcccagctagtttttgtatttttagtagagacggggtttcaccatgttggccaggctggtctcgaactcctgacctcaaatgatcctc

SEQ ID NO: 360132 - DNA, 201 bp, Homo sapiens
gcacctttcacaggatcttctttcattcagtgggcagcctcgtgcctaattatccagccctcaaccaggggctcactcacacaggaaacttgttcatattrgcaggtgcctgaggcttgtgtctgacccatgcccaggtcatgcctacctggccatcgctctggcacagggagcccaaccctctgttccctccagggtccc

SEQ ID NO: 360133 - DNA, 201 bp, Homo sapiens
gagggggtcggggggctgggcggggccccaggagctgcctccctggtcactgttctcccgccctctgttcctcccaccagcctatgatggaccggaacaargcggccgagctccccaagctgcaagtgggcttcatcgacttcgtgtgcacattcgtgtacaaggcgagtggttcacgggtgttccgagctgactggggca

SEQ ID NO: 360134 - DNA, 201 bp, Homo sapiens
tggcctgtcctgacgaatgtttcacatacagttggagagagtgtgcgttctgaagttgttgctgattattttctctaagtgtcaattcagtttagttcgtmgtgtcatttgaatctcctgtatacctttttctttttgtctacttgttgtattactgagaacagcatgttaaaatctccagctattattgtagattttcta

SEQ ID NO: 360135 - DNA, 201 bp, Homo sapiens
atcttcaccatgttatttccaagaacaatcacgattgatctttcagttacacagccacggtgtgtgcctctctgtgtaactctgcacagctggtgatttaytgaaagaacttactctcataaaaccacagccagcgagttctcagagacacaataatgcaccttaattatgagtttaaaagctcttgtcttgtgaaatgta

SEQ ID NO: 360136 - DNA, 201 bp, Homo sapiens
tctcttgaccttgtgatctgcccgcctcaacctcccaaagtgttgggattacaggcgtgagccacagggcccggcctcgtgtgttctcttttttcttaatytggttagagatttatcagtgttattgatcatctcaaaaaactagtttttggtttcatcattatcttcatattttgttttctattcattgatttctgtact

SEQ ID NO: 360137 - DNA, 201 bp, Homo sapiens
attttatttaagtttttagatttgttggcataaagttatcccaatatttccttagaagttgtgacttttactgcatataaaacatacctcaataaagctahtacatacatatatatatatgaatcatttctggccaggtacagtggctcatgcctgtaatcccagcactttgggaggcagaggcaggtggatcacctgaga

SEQ ID NO: 360138 - DNA, 201 bp, Homo sapiens
cacatacagttggagagagtgtgcgttctgaagttgttgctgattattttctctaagtgtcaattcagtttagttcgtagtgtcatttgaatctcctgtayacctttttctttttgtctacttgttgtattactgagaacagcatgttaaaatctccagctattattgtagattttctatttttccctttggttttactag

SEQ ID NO: 360139 - DNA, 201 bp, Homo sapiens
gaataagaatgtaaaacaatacagtagaacagccgttttcatggccttgccttgcactgggtgctaagtcatcggagatgatttgaagtcctgggggtgcvtgtgcaacctctgtacaaactctaggccatttcacatccgggacttgaacatcctcggattttgttatcagagcggcgtcctggaaccaatttccctgag

SEQ ID NO: 360140 - DNA, 201 bp, Homo sapiens
gctggagtacagtggcatgatgtcagctcactgcaacctccgtctcccacgttcaagcgattctcctgccttggcctcctgagtagctaggactagaggtkcccgccaccacacccggctaatttttgtatttttaatagagacagagtttcgtcatgttggtcaggctgttctcgaactcctgacctcaggtgatcaacc

SEQ ID NO: 360141 - DNA, 201 bp, Homo sapiens
gtgaccgcggcccccacacacccctgcgaggccgtgaccgccgccccacacacatgcccatgaaaccactcctggtgggaaaacggcctctacctcctccrgtgggaaaatatcatgacacaaaaaccatggacacaaactccaaatgcagagagggagagagggaatgcagagagcagagacaggaacacgagcccagcc

SEQ ID NO: 360142 - DNA, 201 bp, Homo sapiens
ctcccagggcagaaggatggaggagggcaacgccctctgacaccgtgcaccgcgcaccccagccctgcggtggtcggaggtccaacctccaacccgacgcytaggtcatcccaacccctcaccactccccaccctgctggagccaggaccggtgagcaaggtggccctgtctctacagaccggcaaactgaagagctacta

SEQ ID NO: 360143 - DNA, 201 bp, Homo sapiens; identical to SEQ ID NO: 77482

SEQ ID NO: 360144 - DNA, 201 bp, Homo sapiens
gtgccatgcagcccgggggttgactgctgtgggggccccctctgctcttggggcctgtgtcctacagcttgcttttcccgcaggcactgattgtggggtaygcattccacttcccgcacctgctgagcccgcagatccagcgctctgcccacagggctctgtaccgacgacacgtcctgggcatcgtcctccaaggcccgg

SEQ ID NO: 360145 - DNA, 201 bp, Homo sapiens
gttttcataagtagaaatgcgggtggagcctggcccagtctgcagggagaccctgggcaccagcaggcagcaagcagcacaggcactgggaccccagagcygctcccgccctccctaggggggcagctgctcaggaaagctgcgtccccaccgaggcccatggggtgggcttggccaaatgcagtcgtgaggtactggcct

SEQ ID NO: 360146 - DNA, 201 bp, Homo sapiens
tgaaaccccatctctactaaaaatacaaaaattagctgggtgtagcagtgcatgcctgtgcacgcctgtagttccggctacttgggagcctgaggcaagakaattgcttgaacccgggaggtggagattgcagtgagctgagactctgtcacaaaaaaaaaaaaaaggaaactagaaaagtaagaggaaatgaaacccaaa

SEQ ID NO: 360147 - DNA, 201 bp, Homo sapiens
ccggcctctctcgtgacctccagggagtctcggagcctggaatctgtccacagctgggagctccttgaatgatctttccctccccatgggtcgccagcctrtatctcctcccagacacagccagggtgtgggggaccaggggcactgggttgggcacaggtgtaggggacagagaggatgagtgcccccatctggccctgc

SEQ ID NO: 360148 - DNA, 201 bp, Homo sapiens
caggcagagacaagagcaaggaccaccctggcaccaagccgagcacccaggagagggcagcatgggcaggtcctggccaggctctgtcgccagctggctcrgcacaatccccagcagtggctactttctgtgtctccctcaactgcccgctttgcagaggggatgatgcgggcgcgtacacccgagtgtggctgggaagag

SEQ ID NO: 360149 - DNA, 201 bp, Homo sapiens
ttttatatcctgtacttgatattctcgagtccaagtctcctgatgctcttctctgctgtcgtgtgcatttttaaaaacgggaagcaaacgttcattggcayctgatctctaaggcccaggtgccagggatgctccagggtgagctgcctgattgtgcaggccagctgaggctccccttgggagggacctgccgaagagagg

SEQ ID NO: 360150 - DNA, 201 bp, Homo sapiens
caattcaacgcaagtcatggcttttccagccagtgcgtttgtctggtcgactgtggaatagaaggatagagagctcaggaaagaatccctgctagagacasatatctgggcatcctcagcatagaggtggcagttggctctaggagctgaagagaggaccaacagagatggtgtactagacataaagaggttagaatcttc

SEQ ID NO: 360151 - DNA, 201 bp, Homo sapiens
ggacgcccgttgtgacgcgtgtagcggggtcatatgcaggagcctggaaggcaccccacgccgggctgccctgtaccttggggggctctgcgtctgccgtrtcgttctctgcactgccagcctcgtgggcatccagcaggatggtccagcggtccatgagcacggcgtcggcctcgtccacagacagcagtacggagaacg

SEQ ID NO: 360152 - DNA, 201 bp, Homo sapiens
tgtgttcctcttccacgtttaggtcggccttggggtctgtgatctctgtgcctttccttgtctctcccgtttcctgaggagaaactgaggcccagtccacscagatcagtgttcaccagtaacagggccgggcgtggcatctgttgttggcctctcagcctggaggccagaaatttgaggggcacctgggagaggacagag

SEQ ID NO: 360153 - DNA, 201 bp, Homo sapiens
aaacgcggccagcgccccgtctcagcggggacactcccaccccggctgctcctgcaggcctggaggtgagcgggaaagggtttacaagcagagtttccacyttgactgtttctgagctaaagagccaaacagcatcttagaaggggaatgactggagggcgtctggggcccacacctgcctggctctgtgtcctcatgaca

SEQ ID NO: 360154 - DNA, 201 bp, Homo sapiens
tccaggagcgccccacaggcacactcagacctgcctttcctcccaggctcctgtaaccgccaggcagcggccccgccatgtcccagccccggaccccagarcaggcactggatacaccgggggactgccccccaggcaggagagacgaggacgctggggaggggatccagtgctcccaacgcatgctcagcttcagtgacg

SEQ ID NO: 360155 - DNA, 201 bp, Homo sapiens
tcttgctatattgcccaggttagtctggaatgcctggactaaagtgatcctcccgccttagcctcccaaagtgctggattacagtgtgagccaccacgccrgcctttattttctttttttcttttttttttcttgagacggagttttgctgccaggctggagtgcactggcgcaatctcggctcattgcaacctctgcctc

SEQ ID NO: 360156 - DNA, 201 bp, Homo sapiens
tggaggtgagcgggaaagggtttacaagcagagtttccaccttgactgtttctgagctaaagagccaaacagcatcttagaaggggaatgactggagggcrtctggggcccacacctgcctggctctgtgtcctcatgacagggtcgtgcggcccaagcttcatgggtgcgcaaggcacagcagtgaccacgtagcccttc

SEQ ID NO: 360157 - DNA, 201 bp, Homo sapiens
ggtggtgccgtcagaaggcagcagccctgacaagggggttcccacagcctccctgtggagggagttggcctcctgagacccccatgtgcatctgagaaccrtggaggcaagccctctgcagatcttcagccagggtgttgtgtgggtggctccgagggctggaagctgggagggaacagacctcgctgccccacagcaggc

SEQ ID NO: 360158 - DNA, 201 bp, Homo sapiens
tgtgaacatagacaagaaaatgcatttaaaacattgtttagcaaattgaatccaacactatatacagaaaggatagtacaccgtgaccgagtgggatatcycaagagggcaaagttggcttagcatttgaaagtttatcaatgtaattcacactcttgagagtgaagaaacaaaatggatcatgtcaatagatacagagaa

SEQ ID NO: 360159 - DNA, 201 bp, Homo sapiens
agtaaagtgctcagtgttctgttgggagcgttcgtggagaaagcatgaaaaccttcccagggctggagggcgagggccccggtgcctccacgcccaccgcrgcccccagggcaggctgccttcggggtccctcgcagcttccacagagaccctttcccgtggctgctttggaattgcctacctaggcagtgccaggtgtga

SEQ ID NO: 360160 - DNA, 201 bp, Homo sapiens
aggttgcagtaagctgagactgtgccattgcactccaacctggacaacaagagtgaaactcgatctcaaaaaaaagaagactccaaacttagatagcttcwctgggaattctactaaacattgaaggaagaaataataccagttctatacaaactcggaaagttgaaggaaggaattatttcccacctcatcattccttac

SEQ ID NO: 360161 - DNA, 201 bp, Homo sapiens
gctcagtggcggccaagcccccccccataccagtccctgtccctgcaccagggctgaggctgcatggccgacctccaggagcgccccacaggcacactcaracctgcctttcctcccaggctcctgtaaccgccaggcagcggccccgccatgtcccagccccggaccccagagcaggcactggatacaccgggggactgc

SEQ ID NO: 360162 - DNA, 201 bp, Homo sapiens
acacagggaaggtggatttccctgcagtcagggcaccacaggctccacttcagaagcaacggcacgcagaacccaaaacaaagaacacacagcatacacctgccctgggcatctctgacatggttggtgctcctgataatctgccttttaaaaaagtgaagactagctaggtgcagcagcacatgcctgtaagcccagcta

SEQ ID NO: 360163 - DNA, 201 bp, Homo sapiens
ctcaaaatcataaatctaaatgtgagatctaaaactataaaactcatggaagaaaatgtgtgaaatgttctgtgagatttttagccatgacactaaaagcwtgatcccatgaaggaaacagataaactggatttcatcagcgtgaagaactttataatatgctgttgaaaatagcccatatgaacaataggtgaatagata

SEQ ID NO: 360164 - DNA, 201 bp, Homo sapiens
gtagtccgcccacctccgtgcggctgctccgcactgagggctgtccgtgggccgaggcccgtgtgcgtggtggtggctggggctcccccactccgcccctygggcgtccctgtcctgtctcctctcctggcctgcacattccaggcctcttcatggatgagggcggtgacagccacgcgggctctacctccacatgggggg

SEQ ID NO: 360165 - DNA, 201 bp, Homo sapiens
atgccgttgacaggtggtagcccctgcggctccggtacctgcttgtgaacttgccaggctcctcttcccgtgcctggtggaagtccaggctcagctccgcrtcgatgccaatgccacagtagttactcatctgcacgatctggggacagggcgttcatctcccaggacccggccgccctcaccaggccccctgagctcccc

SEQ ID NO: 360166 - DNA, 201 bp, Homo sapiens
tcaaaatcataaatctaaatgtgagatctaaaactataaaactcatggaagaaaatgtgtgaaatgttctgtgagatttttagccatgacactaaaagctygatcccatgaaggaaacagataaactggatttcatcagcgtgaagaactttataatatgctgttgaaaatagcccatatgaacaataggtgaatagataa

SEQ ID NO: 360167 - DNA, 201 bp, Homo sapiens
gtgtgataatgctacagtcaaaatgtctccgcaggccttttgtgataatcagaattctgggatagtctcctgtctggtcacagagcaggcacctggacagrctaaccctccagccctgagaggtaccagggagctggtgagggtgagggcttttgtgtcgcttcactccctctccctgtgccaatacagcagaatagagtt

SEQ ID NO: 360168 - DNA, 201 bp, Homo sapiens
cggcacaaatgcatctattcactgttctcagcgaagacaacgtcccggaccccaaggatgtgaaggagaggttcagcggcagcctcgtggccgccctgagygcgaccgggccgcgcttcctggcgtacttcggctccttcgccacagtgggactgctgtggttcgcccaccactcactcttcctgcatgtgcgcaaggcca

SEQ ID NO: 360169 - DNA, 201 bp, Homo sapiens
actgttcccggctttctgggtggtgccgtcagaaggcagcagccctgacaagggggttcccacagcctccctgtggagggagttggcctcctgagaccccyatgtgcatctgagaaccgtggaggcaagccctctgcagatcttcagccagggtgttgtgtgggtggctccgagggctggaagctgggagggaacagacct

SEQ ID NO: 360170 - DNA, 201 bp, Homo sapiens
gacaggcgctcagccaccctgctggggcctgtgtggccacggcaaggccggcacaaatgcatctattcactgttctcagcgaagacaacgtcccggacccyaaggatgtgaaggagaggttcagcggcagcctcgtggccgccctgagtgcgaccgggccgcgcttcctggcgtacttcggctccttcgccacagtgggac

SEQ ID NO: 360171 - DNA, 201 bp, Homo sapiens; identical to SEQ ID NO: 77494

SEQ ID NO: 360172 - DNA, 201 bp, Homo sapiens
tctcttagaacataggaggggaatgacatcaagagcataggtagagatatttgctttggacataggaaaaacactcaggaagaaaaatgggctgcagttgyaggtgaccttatgtatttattggaatgaaggtgaaggaattctctaatgacttctgttttcattgtgaatgaggaaagaaaaacatcaactgaaagtgag

SEQ ID NO: 360173 - DNA, 201 bp, Homo sapiens
caggctactcctcccaccctcatccgcgtggggatggcaggacttaccccaaacccagggcctgggacagtgtggatggtgcagtaggcggaggtgtggayggtgcagtaggtggaggtgtggatggtgcaataggtggaggtgtggacggtgtggatggtgcagtaggcggaggtgtggatggtgtggatggtgcaatag

SEQ ID NO: 360174 - DNA, 201 bp, Homo sapiens
acccaggatggcgtacagtggtgcaatctcagctcactgcaaccttcgcctcccaggttcaagcgattctcttgcttcagcctcctgagtagctgggactrcaggcgcacaccactacgtccagctaatttttgtatttttagtagagatggggttttgccatgttggccaggctggtcttgaacccctcatctcaggtga

SEQ ID NO: 360175 - DNA, 201 bp, Homo sapiens
atagctcccctgccctgagacagcctccggtgcttctgctgtgtcccaggaaacaagcctgaagcaagcactcaccatccctcaagaatgtgccctgaccyaccttcctcaccacggtggcatcagggccaggtgggctcccccttctccgtcaccccccacggcagcccccaatactcttaggagctgctttcccacatg

SEQ ID NO: 360176 - DNA, 201 bp, Homo sapiens
ggggtttggttttgtttttgttttaacagttttcgttaatggtgaccttccctgatgtgcctctgggcatcttcttgttctgtgtgtgtgtgatcgccatyggggtcgtgcaggtagggggcctggggggcctgcactgtgtgtgtgtgtgtgtgtgtgtgtgtgtgtgtgtgtgtgtgtgatcaccatcggggtcgtgca

SEQ ID NO: 360177 - DNA, 201 bp, Homo sapiens
ctcctggcgtgtccccaggccacagggagccctcggctcacccagtggaagtcttctcgtttgacctccacgagccactcagcaaggagcgcgtggaagcyttcagcgacggagtctacgccatcgtggccacgcttctcatcctggacatctggtgaggaccccgcgtcacctgccccagctatcaggtggccaatgtgt

SEQ ID NO: 360178 - DNA, 201 bp, Homo sapiens
tgttggcctctcagcctggaggccagaaatttgaggggcacctgggagaggacagagcagcgtggacccttcccctgctcagtggcggccaagcccccccscataccagtccctgtccctgcaccagggctgaggctgcatggccgacctccaggagcgccccacaggcacactcagacctgcctttcctcccaggctcct

SEQ ID NO: 360179 - DNA, 201 bp, Homo sapiens
gagagcgcagcccctgtaggagacagccccaggcatacgtgcacaggtgccgagactgagggagagcgcggcccctgtagagaacagacagccccaggcaygtgtgcacgggccccgagagcgagagcgggggagagcgcggccctgtagagaacagacagccccaggcacgtgtgcacgggccctgtagagaacagacag

SEQ ID NO: 360180 - DNA, 201 bp, Homo sapiens
tgcgtggtggtggctggggctcccccactccgcccctcgggcgtccctgtcctgtctcctctcctggcctgcacattccaggcctcttcatggatgagggyggtgacagccacgcgggctctacctccacatggggggtttggccagctccaccctcctggcgtgtccccaggccacagggagccctcggctcacccagtg

SEQ ID NO: 360181 - DNA, 201 bp, Homo sapiens
gggtctgtgatctctgtgcctttccttgtctctcccgtttcctgaggagaaactgaggcccagtccacccagatcagtgttcaccagtaacagggccgggmgtggcatctgttgttggcctctcagcctggaggccagaaatttgaggggcacctgggagaggacagagcagcgtggacccttcccctgctcagtggcggc

SEQ ID NO: 360182 - DNA, 201 bp, Homo sapiens
catgggtgcgcaaggcacagcagtgaccacgtagcccttcctgggccagtactgaggttgggcctccagtcctgactcgtgagctgagcctgggggacgcbgagaagtcatgggagctgcttagagttcggctttctcagctgtgcgaaggggatgatgagactttacatagggttttcataagtagaaatgcgggtggag

SEQ ID NO: 360183 - DNA, 201 bp, Homo sapiens; identical to SEQ ID NO: 77491

SEQ ID NO: 360184 - DNA, 201 bp, Homo sapiens; identical to SEQ ID NO: 77496

SEQ ID NO: 360185 - DNA, 201 bp, Homo sapiens; identical to SEQ ID NO: 77483

SEQ ID NO: 360186 - DNA, 201 bp, Homo sapiens; identical to SEQ ID NO: 77485

SEQ ID NO: 360187 - DNA, 201 bp, Homo sapiens
cctgggccgaggccagccccccctcacggtgctgtctcgactgccattcagggacactcatgtcacctgggctctgacagcagtgctcttgtattccagcmgttcgacagaagtgtacagaggcttctggcaacacggattgccgtctacctgatgacctttctcatcgtgacagtggcctgggcagcacacacaaggtgg

SEQ ID NO: 360188 - DNA, 201 bp, Homo sapiens
tctcctgcccccaacccccacccctcacccctcgccctctgcgtattgttctggaggacagaagtctgtctggggctgcatgaggaccactgtccttcacktcccgatgttgaaggacgacactgttcccggctttctgggtggtgccgtcagaaggcagcagccctgacaagggggttcccacagcctccctgtggaggg

SEQ ID NO: 360189 - DNA, 201 bp, Homo sapiens
ctagaacagtggacacctccttgtgaggagaggggactcctggggctgtgctcactctgatgaaaaataaaagacagttgtaactttgaaaacccatgattcgaaaagctaaatgggactcaattaagaagtgactgaaacactaagttattgacccagagacctgcctgcaagtgaagaaccaagggagacagtaaagtg

SEQ ID NO: 360190 - DNA, 201 bp, Homo sapiens
cctcgagacccttgcgtgcgtgtgccatgcagcccgggggttgactgctgtgggggccccctctgctcttggggcctgtgtcctacagcttgcttttcccrcaggcactgattgtggggtacgcattccacttcccgcacctgctgagcccgcagatccagcgctctgcccacagggctctgtaccgacgacacgtcctgg

SEQ ID NO: 360191 - DNA, 201 bp, Homo sapiens
gtaggagacagccccaggcatacgtgcacaggtgccgagactgagggagagcgcggcccctgtagagaacagacagccccaggcacgtgtgcacgggccccgagagcgagagcgggggagagcgcggccctgtagagaacagacagccccaggcacgtgtgcacgggccctgtagagaacagacagccccaggcacgcatg

SEQ ID NO: 360192 - DNA, 201 bp, Homo sapiens; identical to SEQ ID NO: 77530

SEQ ID NO: 360193 - DNA, 201 bp, Homo sapiens; identical to SEQ ID NO: 77529

SEQ ID NO: 360194 - DNA, 201 bp, Homo sapiens
ctgtaggagacagccccaggcacgcgtgcacgggcgccgagaccgagggagagcgcggcccctgtagagaacagacagccccaggcatgcgtgcacgggcrccgagaccgggggagagcgcagcccctgtaggagacagccccaggcatacgtgcacaggtgccgagactgagggagagcgcggcccctgtagagaacaga

SEQ ID NO: 360195 - DNA, 201 bp, Homo sapiens
ccctgcaccagggctgaggctgcatggccgacctccaggagcgccccacaggcacactcagacctgcctttcctcccaggctcctgtaaccgccaggcagyggccccgccatgtcccagccccggaccccagagcaggcactggatacaccgggggactgccccccaggcaggagagacgaggacgctggggaggggatcc

SEQ ID NO: 360196 - DNA, 201 bp, Homo sapiens
ttcaaggctgcagtgagtcgtgatcgctccactgcactcaacatgggcgacagagccagactcttttcaataaaagaaaatgatctcaagtgtaccctgcrgaggacacatggggccagcatgcggcctcccctgccactgagcccaccttggagacatggggccttcctgccactgagcccacctgggagggtttctgaa

SEQ ID NO: 360197 - DNA, 201 bp, Homo sapiens
ggcccctgtaggagacagccccaggcacgcgtgcacaggcgccgagaccgagggagagcgcggcccctgtaggagacagccccaggcacgcgtgcacgggygccgagaccgagggagagcgcggcccctgtagagaacagacagccccaggcatgcgtgcacgggcgccgagaccgggggagagcgcagcccctgtaggag

SEQ ID NO: 360198 - DNA, 201 bp, Homo sapiens
gagcgagagcgggggagagcgcggccctgtagagaacagacagccccaggcacgtgtgcacgggccctgtagagaacagacagccccaggcacgcatgcayggtcaagggccccgcagggtgctgtgttcctcttccacgtttaggtcggccttggggtctgtgatctctgtgcctttccttgtctctcccgtttcctgag

SEQ ID NO: 360199 - DNA, 201 bp, Homo sapiens
ggggaggacagcaggctactcctcccaccctcatccgcgtggggatggcaggacttaccccaaacccagggcctgggacagtgtggatggtgcagtaggcrgaggtgtggacggtgcagtaggtggaggtgtggatggtgcaataggtggaggtgtggacggtgtggatggtgcagtaggcggaggtgtggatggtgtgga

SEQ ID NO: 360200 - DNA, 201 bp, Homo sapiens
aggactaatggggtcggggaggacccaaggaagttggggaactcagactcttttcagtgtttaaaaagcagaggccccctcggaaggcataacaggcgagwctaacaatgcccctggagatcaacggcactaaggggtacctttgccccgctccaaggctccttgttccgccccctgccgccaagcaaggaatccggcgcc

SEQ ID NO: 360201 - DNA, 201 bp, Homo sapiens
caagggcccctgggactgtgaagagcctcatccaggattctagaggtccgttactttcgattccaaaacacaattgagtagaaagaagccaagagtcatasagtagggaggccataagctggctagagaaaagctgatgaaatttatccatttcttctcccttgtcagttgcctgctggtgagtaccataaggtgtatacg

SEQ ID NO: 360202 - DNA, 201 bp, Homo sapiens
cagcctgggtgacagagtgagacttggtctcaaaaaaaaaaaaaagtgacttgacctgccttgcctgttagaataacctagaaatgagctatatcctcaayagcaggaacacagtttgcctggtgattcctcctgctagaaatccatctggtaccaatagtcccttttatatgtctacctctgccattcttttcctttagg

SEQ ID NO: 360203 - DNA, 201 bp, Homo sapiens
atttgcagcctgcggcttctgaatgatgatgacattcgggaacactgcggttaggggactgtagtctgaggggttctgggacattaggggatcgtggagakggggctgcactgcagggatgtttcctatagtcagatcattgaggcaacctcattgagccgacccgggtgggcggaagctctgagctgttggtgcagtgat

SEQ ID NO: 360204 - DNA, 201 bp, Homo sapiens
gtcagatcattgaggcaacctcattgagccgacccgggtgggcggaagctctgagctgttggtgcagtgatttctttgatttgaggtggagcccacccccrcacacatattttctccatttattgattgcagataaagtacagaaagacaaggctgaactgatctcagggcccaggcaggacagccgaatagggaaactct

SEQ ID NO: 360205 - DNA, 201 bp, Homo sapiens
atgttggccaggctggtctttaactcctgacttcaagtgatccgcccgccttggcctctcaaagtgctgggattacaggcttgctgccgcacccggcttgtttttttttttttttttttttgagacggggtctcactgtgtcccccaggctggagtgcagtggtgcgatcacagctccctgcagcctcgaactactgggct

SEQ ID NO: 360206 - DNA, 201 bp, Homo sapiens
ggctgtgatgtccttagaacatggttttctttcctaaggatttttgaccctcgtgtggacatcgtgcaggccgcttggtcaccctttcagcgcacatcctsggtgcaaccactcttgatggacctgtctccctggagggccaagttacaggaaatcaagagcagcctagacaaccacactgaggtggtcttcattgcagat

SEQ ID NO: 360207 - DNA, 201 bp, Homo sapiens
agtgagcctgagcaacagagtgagaccccatctctaacaatttaaaaaacaatggcagaaagcttagatgagcaagattcacttattatagactgaaaatrttttaccatagcagtaatgcagtggagctcaaaaaacaagggcccctgggactgtgaagagcctcatccaggattctagaggtccgttactttcgattcc

SEQ ID NO: 360208 - DNA, 201 bp, Homo sapiens
tcattcccaaaggcaagttccatttttttctagccagaatgggcagcaggcagggatctcgttgtgccattggcagtgcatgacatgtcttggaagttgayaatgatgaggtgggactaatatgggggtttggggcaggtatttacacagagtcggcgatggaaggatcatgcagacatgctgaagcaatatgccacttgc

SEQ ID NO: 360209 - DNA, 201 bp, Homo sapiens
ctctacctcctggagcagctattcctgccctattctcattttctcacccaggtttgtaggggctgtggagtgtacagcaaaggctggacttagaaaggaayggatgacaatagttgggaaagaatggggctggttttgcagccccttcttggtaggggatggggtcagtgtgagaagcattgagctgattcccctctgtgc

SEQ ID NO: 360210 - DNA, 201 bp, Homo sapiens
ggagattcccatatatgcctgtgtgggaggagtgaggaccaggtgccttctaagggctttagctgaaattcttctggtgaaacaggagtttgaacttggtyggctttttcctgtttttcagcttcctgatgacttgtatctcacttcgaaatctgatattaggccgtccttccctggagcagctggcccaggaggtgactt

SEQ ID NO: 360211 - DNA, 201 bp, Homo sapiens
tggggtgagatgtctgatgctgacaatttactgttcttcagagcccccttgtgctttggggtctggttttgtcttacacacaccataaagcaaaacaaatktgagtctgctttgccttttctcaagagccagattgaactatcttttatgtgggttgagatagggcaatgcattcatttccttgaactgagattagattca

SEQ ID NO: 360212 - DNA, 201 bp, Homo sapiens
ttccatgagcgattcttccgcttcttgttgcgaaagctctatgtctttcgccgcaggtaagttcacaacaatatttgtcattgccatcatatgttggcaascttggtaactttcccctggggagagtaactctagagactgtcatacaggaaaggacagtttagctctaggtatcttttcctgccattcttcttgatttac

SEQ ID NO: 360213 - DNA, 201 bp, Homo sapiens
tgctgccttcccagggctataacaactggacaaatgggctgtatggctattcctgggacatgatggtgcactcccgctcccaccagcacgtgaagatcacytaccgtgatggccgcactggcgaactgggctaccttaaccctggggtgagatgtctgatgctgacaatttactgttcttcagagcccccttgtgctttgg

SEQ ID NO: 360214 - DNA, 201 bp, Homo sapiens
aagcattgagctgattcccctctgtgctgccttcccagggctataacaactggacaaatgggctgtatggctattcctgggacatgatggtgcactcccgytcccaccagcacgtgaagatcacctaccgtgatggccgcactggcgaactgggctaccttaaccctggggtgagatgtctgatgctgacaatttactgtt

SEQ ID NO: 360215 - DNA, 201 bp, Homo sapiens
aatacaagctgttagcaggaaccctcttatactggatcctggcacccaggtctatgaaatgttagtttatgttgtgtgttactctgctgttgagggttttsatttttttttaaagataatacaccgcatatttatttacacatacatagcttttcaaacactccatcaaattcctcccctttttcagtaattttctagtat

SEQ ID NO: 360216 - DNA, 201 bp, Homo sapiens
agcagttaagaaacagaagtgagtccaggtgttcatgactgcagagtccagtgctcttgaccacagtgtaagctgcccctttcccagcttctacttcttgraaacttgctttgcttctgcttccccagagtacatctggtgttagtagcctgggtctaatcagttctcttccagaatacaagctgttagcaggaaccctct

SEQ ID NO: 360217 - DNA, 201 bp, Homo sapiens
cttctcaggtagctactaacccccattatacccagtgctccagatctcttctgccttctttctctgccctggactggcaataacatgctgacacaggccatttcttcttctattccctgtccttaggaatgatgatgaaagggagagaactggaagttctggtgggtgggtggctgtgatgtccttagaacatggttttct

SEQ ID NO: 360218 - DNA, 201 bp, Homo sapiens
ttctcaggtagctactaacccccattatacccagtgctccagatctcttctgccttctttctctgccctggactggcaataacatgctgacacaggccatttcttcttctattccctgtccttaggaatgatgatgaaagggagagaactggaagttctggtgggtgggtggctgtgatgtccttagaacatggttttctt

SEQ ID NO: 360219 - DNA, 201 bp, Homo sapiens
ggagagggggctgcactgcagggatgtttcctatagtcagatcattgaggcaacctcattgagccgacccgggtgggcggaagctctgagctgttggtgcwgtgatttctttgatttgaggtggagcccacccccgcacacatattttctccatttattgattgcagataaagtacagaaagacaaggctgaactgatctc

SEQ ID NO: 360220 - DNA, 201 bp, Homo sapiens
ctcaggtagctactaacccccattatacccagtgctccagatctcttctgccttctttctctgccctggactggcaataacatgctgacacaggccatttcttcttctattccctgtccttaggaatgatgatgaaagggagagaactggaagttctggtgggtgggtggctgtgatgtccttagaacatggttttctttc

SEQ ID NO: 360221 - DNA, 201 bp, Homo sapiens
ttcacaacaatatttgtcattgccatcatatgttggcaagcttggtaactttcccctggggagagtaactctagagactgtcatacaggaaaggacagttkagctctaggtatcttttcctgccattcttcttgatttactggaagaataagtggcctatatctgatggcctgctttcttgttctgcctcagcttatctcc

SEQ ID NO: 360222 - DNA, 201 bp, Homo sapiens; identical to SEQ ID NO: 77568

SEQ ID NO: 360223 - DNA, 201 bp, Homo sapiens
ctccctgctttcctaggtatgttctcctacgtcatgctggccagcagccctctcttctgctcccctgagtggcctcggaagctggtgtcctactgcccccraaggttgcaacaactgttgcccctcaaggcagcccctcagcccagtgtttcctgtgtgtataagaggagccggggcaaaagtggccagaagccagggctg

SEQ ID NO: 360224 - DNA, 201 bp, Homo sapiens
tccatgttggtcaggctggtttcgaactcccaacctcaggtgatctgcccacctcagcctcctaaagtgctgggattacaggcgtgagccaccgtgcctgscctcccagagcactttctgaagctcaataggatggatctttatagctgtcaagaccctaacagtttttatagcattttgtgcatttctgtaatttaatcc

SEQ ID NO: 360225 - DNA, 201 bp, Homo sapiens
ttctctttcttcttccctgttattttccagttcctgaagtttgacttcattatgatgttagccaagcattcaccttttaaagtgtcctctcactcatgacytccgtggggaacgtcccttccacaacacacacacatctcagtcaaattttgtcctaggagatctgcccttgcttattacataggatatgttagaaaacat

SEQ ID NO: 360226 - DNA, 201 bp, Homo sapiens
tcaggtaggcttaggaccccgccctccggcggagagttcctaggagcgctggtctcagaggggcgggggcgggaggacgcccagtgtctcccggtgaggcggggggggggtcctctgtggggaagggggcgtgctgtgagacatttgcagcctgcggcttctgaatgatgatgacattcgggaacactgcggttaggggac

SEQ ID NO: 360227 - DNA, 201 bp, Homo sapiens
ttaggaccccgccctccggcggagagttcctaggagcgctggtctcagaggggcgggggcgggaggacgcccagtgtctcccggtgaggcggggggggggtcctctgtggggaagggggcgtgctgtgagacatttgcagcctgcggcttctgaatgatgatgacattcgggaacactgcggttaggggactgtagtctga

SEQ ID NO: 360228 - DNA, 201 bp, Homo sapiens
ttggttggatgtcaataaatgctgtttggatgaggcgaatttctgagatgaatgaatagaagatggggtctattcttccttgggccctggactcagatcaktatttattttattcatttaaaaaatatatataagtagattatttgggtcaaggactgtaatatttgggtcaaggactgtaactcaggagcatggattcaa

SEQ ID NO: 360229 - DNA, 201 bp, Homo sapiens
tgtgaaaaagctggatgcagactgggttgaaggctattccatggaatatttgtcccggcactggctcttcagtcccttcaagtgagtggcagtcatggtgkaggcctctttgaggcatgggtacagagcaggtgactcatctctctcagtaatggcacctgttcctactttgcctgaatttgccacatgccttcctttgtc

SEQ ID NO: 360230 - DNA, 201 bp, Homo sapiens
tataatcatgttagaatttgctcatataattctaaaaggtctcagaataaccagggaggatatgggagatgtgcccaggatagataggattatcgtgtatraaaggaaggatggagatgtagctgcattaagcagctcccccctcaatgtttacctccctcggtgtaggtctgtggacggtctgctgaatgcccataggag

SEQ ID NO: 360231 - DNA, 201 bp, Homo sapiens
ggtacagcattttaggacagagggaggagctccttgacagccatgtggtcagcatggccatcccactgccagactacactctccgctgcctccctggatcktctgtttttagtttttaccctttgctggaaagctaggctggcttctcattttttccaatcccttaatctctgaattatcttatttgtcaaggaaagacta

SEQ ID NO: 360232 - DNA, 201 bp, Homo sapiens; identical to SEQ ID NO: 77576

SEQ ID NO: 360233 - DNA, 201 bp, Homo sapiens
acaaggctgaactgatctcagggcccaggcaggacagccgaatagggaaactcttgggttttgagtggacagatttgtccagttggcggaggctggtgacmctgctgaatcgaccaacggaccctgcaagcttagctgtctttcgttttctttttggtgagtccagtttatgggtgggagcaatttggttgagagtggaga

SEQ ID NO: 360234 - DNA, 201 bp, Homo sapiens
ctactaaaaacacaaaaattagctgggcatggtgggtgcgtgcctgtaatcccagctactcaggaggctgaggcaggagaatcgcttgaaccagggagtcrggttgcagtgagccaagatcgtgccactgcactctagtggggcgacatagtgagactcggtctcaaaaaaaaaaaaaaaaaatgagtatccctgatgaag

SEQ ID NO: 360235 - DNA, 201 bp, Homo sapiens
agtctctagctggcagaagaggagttctaaggggagagagtgatccatctcagtgattcctcttttttctgtcttccgggcagaaacagggcctctacccmcagagctgcagcctctgttggaaggggaagtaaaagggggccctgagccaacacctctggttcagacctttcttagacgccaacaaaggctccaggagat

SEQ ID NO: 360236 - DNA, 201 bp, Homo sapiens
cttcttgttgcgaaagctctatgtctttcgccgcaggtaagttcacaacaatatttgtcattgccatcatatgttggcaagcttggtaactttcccctggrgagagtaactctagagactgtcatacaggaaaggacagtttagctctaggtatcttttcctgccattcttcttgatttactggaagaataagtggcctat

SEQ ID NO: 360237 - DNA, 201 bp, Homo sapiens
ctgaggagctgactagcctgctggtcgtgcactggggtgggctgctgcttgacctctcagctggtttcctgctcttttttgatgtctcaagatccattggmctgttctttgtgtcctacttccactgcatgaattcccagcttttcagcattggtcagtacctgtagcctgggaggaaacaggaaccacagttttgcagga

SEQ ID NO: 360238 - DNA, 201 bp, Homo sapiens; identical to SEQ ID NO: 77578

SEQ ID NO: 360239 - DNA, 201 bp, Homo sapiens; identical to SEQ ID NO: 77579

SEQ ID NO: 360240 - DNA, 201 bp, Homo sapiens; identical to SEQ ID NO: 77590

SEQ ID NO: 360241 - DNA, 201 bp, Homo sapiens
ctattctgttcattctctaaaaggtccgatggtttaggtatatttgatttcttcagcagtgtttagaattccagataattgctgtaaacagcaggtatttytaggacgtaaacaagatgttgtgttttttgcttataggttttgactacaagacttgtaacgtgctggtagccttggagcaacagtcaccagatattgctc

SEQ ID NO: 360242 - DNA, 201 bp, Homo sapiens; identical to SEQ ID NO: 77581

SEQ ID NO: 360243 - DNA, 201 bp, Homo sapiens
tttggctataagaaggggcatgaatttagaggtcagaccaggctcaaggccctagctccactactgatttgatgtgtgacatggacgaataacatgccagyttcttcatctgtaaaacaggaagagaaatagagctgttgtgagtagtagatattacaacagtgcctgtcacaataaagtgtagctattgtcatcatatta

SEQ ID NO: 360244 - DNA, 201 bp, Homo sapiens
tacgtgctttacaacacttcacattcaacaaattcattaacgataaacaggaaataaaccaacaatttctcctggtttagttcacccttaggacacgcatstatgaaatcagaaatcttattcctgtcagaacaggatggccatgtgcttccctgttaacaaagaagtcttaattttattaattacaatgcttacgactaa

SEQ ID NO: 360245 - DNA, 201 bp, Homo sapiens
tccttgttctgactccctaataaaataaccttctagttatattctggcttcccatatagatttttctgctgggagataatgcactgaccagcctacacacrcattttgttccagttgacaattttattacacattgtaagttaataaattggcattctcctttaaaaaataacaaaaaaatttaatagtcttatacagtta

SEQ ID NO: 360246 - DNA, 201 bp, Homo sapiens
tggcaggcctagccccactgtggagttggtagcacaggggtatcaggatttaatgagccaatcattgactttacgctccttgttctgactccctaataaawtaaccttctagttatattctggcttcccatatagatttttctgctgggagataatgcactgaccagcctacacacgcattttgttccagttgacaatttt

SEQ ID NO: 360247 - DNA, 201 bp, Homo sapiens; identical to SEQ ID NO: 77593

SEQ ID NO: 360248 - DNA, 201 bp, Homo sapiens; identical to SEQ ID NO: 77592

SEQ ID NO: 360249 - DNA, 201 bp, Homo sapiens
caactcctaacagcaaaatcagataattgccattttagtcagaaaatgcttttcatttaattgtttaatcgaattatcttgttgctcattataattggtgwtccttaagattagggaaactggcctacctgtggcctcagttctaccagactcccaggtgcagaggggtttggtacagttgtggaagtgaatatgatatag

SEQ ID NO: 360250 - DNA, 201 bp, Homo sapiens
ggagataagctgaggcagaacaagaaagcaggccatcagatataggccacttattcttccagtaaatcaagaagaatggcaggaaaagatacctagagctmaactgtcctttcctgtatgacagtctctagagttactctccccaggggaaagttaccaagcttgccaacatatgatggcaatgacaaatattgttgtgaa

SEQ ID NO: 360251 - DNA, 201 bp, Homo sapiens
attacacctacacactattcacaagtgagagaagtaggtaagcaactatgtacagctaaatctcatctccttggcaggcctagccccactgtggagttggyagcacaggggtatcaggatttaatgagccaatcattgactttacgctccttgttctgactccctaataaaataaccttctagttatattctggcttccca

SEQ ID NO: 360252 - DNA, 201 bp, Homo sapiens
tcatcgaggagggcacattccttttcacctcagagtcggtcggggaaggccacccaggtgaggggacggcctgaagcgaagcgtggggcggggcagaaggyagcgccaaggtccggctggctgcggccggccggtggtggggcccgcgcgggtcgtcctcgtccgccgggtgatggaagagcggcgaccgcgcgctttcct

SEQ ID NO: 360253 - DNA, 201 bp, Homo sapiens
cactccggccagggtaacagagtgagacttaaaaaaaaagccgtggaaatctgggtatggtagcttacacctgtaatcccagcactttgggaggctaatgcgggtggatcacctgaggtcacggtttgataccagcctggcaaactgaaaccccgtctctaccaaaaatacaaaaaagctgggtgtggtggcaggtgcttg

SEQ ID NO: 360254 - DNA, 201 bp, Homo sapiens
tctgggtatggtagcttacacctgtaatcccagcactttgggaggctaatgcgggtggatcacctgaggtcacggtttgataccagcctggcaaactgaarccccgtctctaccaaaaatacaaaaaagctgggtgtggtggcaggtgcttgtaatcccagctactcaggaggctggagaatcacttgaacccaggaggca

SEQ ID NO: 360255 - DNA, 201 bp, Homo sapiens
aaatctgggtatggtagcttacacctgtaatcccagcactttgggaggctaatgcgggtggatcacctgaggtcacggtttgataccagcctggcaaactkaaaccccgtctctaccaaaaatacaaaaaagctgggtgtggtggcaggtgcttgtaatcccagctactcaggaggctggagaatcacttgaacccaggag

SEQ ID NO: 360256 - DNA, 201 bp, Homo sapiens
taagcacattcaagggaacgaatagcccccacccaccaaaaaagaaatgttcgttccatattctcctgaacagaggattgaaacatcgattcccccccccktcaaaggaacaggaaggccacggggcaaggacggacttgggagcggcctcctttctctctggagggaaaggctggagcgctgcctccacttttaagtcca

SEQ ID NO: 360257 - DNA, 201 bp, Homo sapiens
aaattcagaaaaacgaacttgaattagggagatatttgttctccctcctaacaatagatgacaaagcagggagacatggattcggaatacgtttgagcatyttctacactgttgagcttttgtttcctgcgcaactcctaacagcaaaatcagataattgccattttagtcagaaaatgcttttcatttaattgtttaatc

SEQ ID NO: 360258 - DNA, 201 bp, Homo sapiens; identical to SEQ ID NO: 77580

SEQ ID NO: 360259 - DNA, 201 bp, Homo sapiens
cttaagattagggaaactggcctacctgtggcctcagttctaccagactcccaggtgcagaggggtttggtacagttgtggaagtgaatatgatatagggmaaattctgttctttaaaggatataggactaacagttcacctttctggtgattagatttataatgcaaactttgaattttaggaggaaagtgcaaacacaa

SEQ ID NO: 360260 - DNA, 201 bp, Homo sapiens
aagtcacctcctgggccagctgctccagggaaggacggcctaatatcagatttcgaagtgagatacaagtcatcaggaagctgaaaaacaggaaaaagccraccaagttcaaactcctgtttcaccagaagaatttcagctaaagcccttagaaggcacctggtcctcactcctcccacacaggcatatatgggaatctcc

SEQ ID NO: 360261 - DNA, 201 bp, Homo sapiens
atgctgtccttgatgcccaccttcagcaggatcctgatgccaaagtagcttgtggtaggttcagaatgtgcttatcaactggtggaaagatagcataaaarttatttttatagaagtgatgtttgagttgaatgtctctttttattagaaactgttgctaaaactggaatgatccttcttgctggggaaattacatccaga

SEQ ID NO: 360262 - DNA, 201 bp, Homo sapiens
ctaatcctaaactccagttgtatcttactatacactaagccctattctgttcattctctaaaaggtccgatggtttaggtatatttgatttcttcagcagygtttagaattccagataattgctgtaaacagcaggtatttctaggacgtaaacaagatgttgtgttttttgcttataggttttgactacaagacttgtaa

SEQ ID NO: 360263 - DNA, 201 bp, Homo sapiens; identical to SEQ ID NO: 77595

SEQ ID NO: 360264 - DNA, 201 bp, Homo sapiens; identical to SEQ ID NO: 77583

SEQ ID NO: 360265 - DNA, 201 bp, Homo sapiens
atctcctggagcctttgttggcgtctaagaaaggtctgaaccagaggtgttggctcagggcccccttttacttccccttccaacagaggctgcagctctgkgggtagaggccctgtttctgcccggaagacagaaaaaagaggaatcactgagatggatcactctctccccttagaactcctcttctgccagctagagact

SEQ ID NO: 360266 - DNA, 201 bp, Homo sapiens; identical to SEQ ID NO: 77597

SEQ ID NO: 360267 - DNA, 201 bp, Homo sapiens; identical to SEQ ID NO: 77584

SEQ ID NO: 360268 - DNA, 201 bp, Homo sapiens
tcctgtctctgtttttgtcttctgagaaagtctttaaatgatggcacttggtatggcttactgatggactgggaactcttccctttgtttctctgctgccsttctccactttctctttgcatcctctttttcctgtccattaccatctgaccaactgtaaagtgattgttctaaagtctgggtcagctgaggagagaggtg

SEQ ID NO: 360269 - DNA, 201 bp, Homo sapiens
acagagtgagactccatctcaaaaaaaaaaaaaaagtttaattgccagctgggcatgatggctcacaactgtaatcccagcactttgggaggccaaggctsgtgggtggcttgagcccaggagttagagaccagcctgggcaacatggcaaaaccccgtctatacaaaaaaaaaaaaaaaatacaaaaattaactcggcat

SEQ ID NO: 360270 - DNA, 201 bp, Homo sapiens
ctggggatgtaggtgctacaatcatccccatctcacaggcagggaaactgaggagcagggagatttagtaacctgcccagggtcaccagcggcagtacgtrgtgaagcccggcttgaattcagtggtgtggtttcagagtctgagctcctgaccactctgctctctgcctggttagggagtgtccacagagaagcccaaag

SEQ ID NO: 360271 - DNA, 201 bp, Homo sapiens
tttcatcacattcctggggatgtaggtgctacaatcatccccatctcacaggcagggaaactgaggagcagggagatttagtaacctgcccagggtcaccwgcggcagtacgtggtgaagcccggcttgaattcagtggtgtggtttcagagtctgagctcctgaccactctgctctctgcctggttagggagtgtccaca

SEQ ID NO: 360272 - DNA, 201 bp, Homo sapiens
tccttctcccatttactgcagctggggtgtgggatgaggtgggctcaacccaacaggctctagggctcctctcctggaattaatttgccctgatgctataragtaaacaacaaagaaattctttcttttttcttttctccctttttttttttttgagtcagggtctcgctctgcacccagggttgagtgcagtggcaagaa

SEQ ID NO: 360273 - DNA, 201 bp, Homo sapiens
gattacgcgtgagccactgtgcccagccaccactttactttcttaataaacttgcttttactttgcactgtggacttactctgaattgtttcttgcgtgasatcgaagaaccctctcttggggtctagatcgggacccctttcctgtaacacatgggccttgggctgatctccaagattaagagggcaagatactcagctg

SEQ ID NO: 360274 - DNA, 201 bp, Homo sapiens
acattgcttgtgtttggagtgtggatcctttatatcctcaagttaaattatactactgaagaatgtgacatgaaaaaaatgcattatgtggaccctgaccrtgtaaaggttagatatcccattggtgtggtttaaatgaaaacattgccaagcatatgctcaaactataatatcattagtctactgtgtgacaaatatatg

SEQ ID NO: 360275 - DNA, 201 bp, Homo sapiens
aaagaaatgagtgaaaacagtccagatggtgtcaaggtgatcatgactttcagctgataagccctggcttctccaagggatcatggagaggccactctgcygtttgtctgttgttcccagcttggcccttctcttgtgatgttgagggacgtggaatccacatggtcccttgcaaatcagaagaagtaatgcctgctgagc

SEQ ID NO: 360276 - DNA, 201 bp, Homo sapiens
gctgcttaggctgtgggtgaggtggactcgctccaggaattaaggcacagtctgatatgtgctacagacactgggcttgccttcacacccttttcttttattttttttttaaatcaaaataagggaagtgtatgcactgaatgtaacaccttttctggggctgaagagaagaataggtaatattaggttttcaagattgaa

SEQ ID NO: 360277 - DNA, 201 bp, Homo sapiens
gtaatagcatgggcaaccattatcctgtctcgccgccacccaggacatggcttctgttcgtaagtccccatcacacgtttctttctgagaaactggattcrtcagcctcttccttggcctttgggggtgggtttgcatatgcctgcccaccacagagcacatacctttaatagatatatcccaggaggtaactacatgtgt

SEQ ID NO: 360278 - DNA, 201 bp, Homo sapiens
atacactatggttttagtgatttacagaactgtgcaaccatcaccatgatctaagtttagaaggtttttagtatcccaaaaagaaactccatatccattcrtagtcactccctatttccccctccccacaaatcctaggcaaccagtaatctactttctgtctgtatagatttgcctattatggacatttcatgttattca

SEQ ID NO: 360279 - DNA, 201 bp, Homo sapiens
tccttgcttggctttcctgctgatttcctcatgaagatgccaattcgtatttaaacatttgttatcaatggtggtgtttgtgtgctgatttctataggtaraggctgttgttttaggagccaggtttgctgggccagctcagacctcttacaaagtgaagatactaatgatcgtcttgcaaggtgccatagtgtcgtgagg

SEQ ID NO: 360280 - DNA, 201 bp, Homo sapiens
ggtagatgcatcaaggagcaggaagcagattttaacaaatgatggcttcagtagatgttccctaatcccacctgaatctgtgaactctggagggtccactgttgttccactttacaaaaaagaagagttatatttatggcagccacaagctcaactaagatgaatgaaaagagaggcacatttttccatgaaaaactatac

SEQ ID NO: 360281 - DNA, 201 bp, Homo sapiens
gtagatgcatcaaggagcaggaagcagattttaacaaatgatggcttcagtagatgttccctaatcccacctgaatctgtgaactctggagggtccactgttgttccactttacaaaaaagaagagttatatttatggcagccacaagctcaactaagatgaatgaaaagagaggcacatttttccatgaaaaactataca

SEQ ID NO: 360282 - DNA, 201 bp, Homo sapiens
tctccttgtcatgtgattctcccaggttgtttcttcaagtttctgagccaaacttaactctaaaaagcaaatattctgtgttaaaagacagtaatcaacaygggagctacatcagacatcataggacaaattgtcatctagaagagtatatttttaatgcaggagagtttttaaaacccagattggtgtgatttcattcca

SEQ ID NO: 360283 - DNA, 201 bp, Homo sapiens; identical to SEQ ID NO: 77608

SEQ ID NO: 360284 - DNA, 201 bp, Homo sapiens
ccacttatccccttcctgagttcttgaagcagatctcatttttgctatttgatctgtagatatttctgtatgtagctctaaaaggtaaaaggtcctttttwaaaaaaataaactttaaagtttaggataattgtattcacatgcggttgtaaaacataatctggagagattttgtgtatgctttactcattttcccccatg

SEQ ID NO: 360285 - DNA, 201 bp, Homo sapiens
ttatgcttttggtgtcatatctaagaaactattgtttagtcccaagttttcttctagtatgtttataacatactacctcttacatttaggtctttgattcrttttgcattaatttttgtatatggtatattagtccattttcactactgataaagacatacctaagactgggcaatttacagaagaggtttaattgtagtt

SEQ ID NO: 360286 - DNA, 201 bp, Homo sapiens
cccagcttgttattaaaagacatcctcaagtaagtaccgcccctgggactgtagatccccctgctttgggtcaactgtgtagaactaggagaaaaattcartgagagccctcaagatggctaatgttggagaggcatgcttggtcaaaggatgcctcagacattcaaaggcacgtctgagtaaagactgagtgcacagccg

SEQ ID NO: 360287 - DNA, 201 bp, Homo sapiens
cagttttttttttcttttttttttttttgagacagagtctcgccgtcgcccaggctggagtgcagtggcacgatctcagttcactgcaggctccgcctccrgggttcacgccattctgcctcagcttcccgagtagctgggactacaggcgcctgccacctcgcccggctaattttttgtatttttagtagagacagggtt

SEQ ID NO: 360288 - DNA, 201 bp, Homo sapiens
taagaacacactctttgttctttggtttgctcctctagttcttccctgcttgccttgtgggactatttgcagcaatgaggggaatttatctagcaggttgkcctcgggaggcaatgaatgaaaagaggttggtgagtcctctgtgggagtccattccaggtcctggagggctgaggtgggtgtcttggagccagcagtttc

SEQ ID NO: 360289 - DNA, 201 bp, Homo sapiens
cccacctcggcctcccaaagtgctgggattacaggcgtgagccaccgcgcccgaccttattccagttttgaaatgatcacactggtagttcctcactgttygctgatgagggccacagttctaaggagactggggaaggaatcaggagtccttctggcagtcaggatcagtttctacctggctgtgtatggtgccagcaag

SEQ ID NO: 360290 - DNA, 201 bp, Homo sapiens
attacaggcgcctgccaccacgcccagttaatttttgtatttttaatagagatggggtttcaccatgttggccaggctggtctcaaactcctgacctcagragatccacccgcctcagcctccaaaagtgctgggattacaaacatgagccactgcacctggccctcttccagtggttcttgcacatgggcaggttggaga

SEQ ID NO: 360291 - DNA, 201 bp, Homo sapiens
caagtcctgtacccatgaattctttccttttttccttcaatttttaacatctgggattataacagttaagtatcatgtgataggataggatcagtttgatwaaaataacagattagaaaggtctgctttggtggaatagtacttctgtcttttgactgttaaggctgtttttaagaccatctctttttcataattcagagc

SEQ ID NO: 360292 - DNA, 201 bp, Homo sapiens
tctatactctagcagaaaagagtaggacaagtatggcctctgatactctcctctctttgcttgtcactttctgcagtccagttgttgtcacccaggacttrgggactgatgtgggcttcttgctcatccttcgtctagatcaccactgtccagtggaaacataacctgagccacttgtccaattttatattttctagtaac

SEQ ID NO: 360293 - DNA, 201 bp, Homo sapiens
tcatctattgtagacatgttatatatactaactaatgtaatgttcaccacagccctcagtgtttggtaccattgtcatccccattttataaaggagggtaytgaggaacagaggttaagaagccatagggggcagagctgggttcagactcaggcagtctggcctagaggtggtaaatgaggctgtcgtatccatgtcttt

SEQ ID NO: 360294 - DNA, 201 bp, Homo sapiens
tcgacctagggagaaatgctttaacaaagacgacgctgctagttaaatcaatctagaactgagtccagcctccagatctcctgattatttttttttctaasagttgatgggatgaaatctacataagatttaatcctttgaagcccattgtttgatgagtattaaaaacttatgcagccacgcctctgtcaccacaatccc

SEQ ID NO: 360295 - DNA, 201 bp, Homo sapiens
ctctttaagaagaatctgttacattttaatatgtgggtagagaaatataattttgaaagtcaggccttttctgcataaaggtggttgctgaagccatgatrcggaggctgttcctggcagcctgagtgagaagagtatcaaattgttaagccctggggatcctaactcttaggagatgaaaaaggagaacgaggagggagc

SEQ ID NO: 360296 - DNA, 201 bp, Homo sapiens
gtgtacgattatttatcattttaaaaagcacacaaaaaagaattatttcttcatatgggctctttaagaagaatctgttacattttaatatgtgggtagaraaatataattttgaaagtcaggccttttctgcataaaggtggttgctgaagccatgatgcggaggctgttcctggcagcctgagtgagaagagtatcaaa

SEQ ID NO: 360297 - DNA, 201 bp, Homo sapiens
ctcaccagggtaggcctcgggctcccctcctgcctggacaccacagtagggagggcccaggatcctgccttgtcgcccacccagcatgcagcagactaggmttgtctcctgctgtgctgggaagtccttctgctcttggaatcctcccaccccacagagtgtgctctgctggccatattagcctataagctgcacctgctt

SEQ ID NO: 360298 - DNA, 201 bp, Homo sapiens
gaaaattgctaataaaattatttcaaaagaataaataggcaggcacacaacatattttttaagaaaagtgtttttaaattgccatattctctctttttctytttttttttttgatgtaacacttctgcttttaatgtaactttctttttaaacttttttattatataaattttaaccatacacagaagtggggagaattgt

SEQ ID NO: 360299 - DNA, 201 bp, Homo sapiens
atcattccctgtttgaggggcgatgtgtacaaatttcactttggctcaactgtatacccagaagcatctccagtggagaaacccagcctgtgattagatgstccatgtgtgtttaccactctgcacttggctgcagggctcctcattgtttaattggccttctctccagtgactcttctctttagtgtaggcagcacatta

SEQ ID NO: 360300 - DNA, 201 bp, Homo sapiens
gatttcttctgaattgtaagccgtggcttgacgcgggtgtgcattcattgtacgccttgcgtgtgtaagtaacgcagggttttccgagagcatccccgagragccctgcccttgcctcacacccgcttggtgaccttggcagacactgatccccctgtggggctcgggctcatggtctctcctgagaagcttaccctgccg

SEQ ID NO: 360301 - DNA, 201 bp, Homo sapiens
ccattgaggaatgtctacctcaaacaaatacaagctggttctgcaattcatctctttgtccagtgccgcctgtgtgaagtggctatttcagagttactttwttgagttggagtgccggatttgcgtagcttttgcaatctataggagtagattgcttcagaaggcagtgcacagggccacatggggtcacacccacagcct

SEQ ID NO: 360302 - DNA, 201 bp, Homo sapiens
atggtgttagcaccattgaggaatgtctacctcaaacaaatacaagctggttctgcaattcatctctttgtccagtgccgcctgtgtgaagtggctatttyagagttacttttttgagttggagtgccggatttgcgtagcttttgcaatctataggagtagattgcttcagaaggcagtgcacagggccacatggggtca

SEQ ID NO: 360303 - DNA, 201 bp, Homo sapiens
atgaattttccagactgaacatgcccatgcactcagcacttagatcaacaaacagaactggccgggaccctgggagctccccttgtgttgtactccagtcrcggcctcccccaggatcagccttgaactcctggagtcaagcaatcctcctgccttagcctcctcagtagctgagactacgggcacacaccaccagaccca

SEQ ID NO: 360304 - DNA, 201 bp, Homo sapiens
ctatcgtcctagctacgggaggctgaggcagaaggatcacttgagcctaggagttcgaggttacactgagctgtgatcacgccactgcactccagcctggstgacagagcgagaccttgtctcaaaaacaacaacaaaaagatccgtttgccattttcttccatggtgggggggagacagtcattttatattgttccccta

SEQ ID NO: 360305 - DNA, 201 bp, Homo sapiens
attcagcctcccttgagtcaccaaccaatatttattgaggcccaccacgttcatgacgtcatgctgggcgccagccacaaggcagcaggggagatagacckgcgccctgtgctgcttaggctgtgggtgaggtggactcgctccaggaattaaggcacagtctgatatgtgctacagacactgggcttgccttcacaccct

SEQ ID NO: 360306 - DNA, 201 bp, Homo sapiens
cctttgaaatgtagatgagtgagaatcgtaacattttattggaggaaggagccatagaaatgttgtcacccaaccctgctttctacagattaccaaacatyctcaaagagattgagtgatttggctgttatcaaatagccaaacagttgagtatttcatctctttgctcttctctttaaaaaaaaaaaaaaaaaaaaaaat

SEQ ID NO: 360307 - DNA, 201 bp, Homo sapiens; identical to SEQ ID NO: 77607

SEQ ID NO: 360308 - DNA, 201 bp, Homo sapiens
accttctcccctgcgactcccctctttagccacctgaatttgttacacaggatgggtcttggctggcccagtgctataataatagcccctcctggcttggrcaccaagtcctgtggcaccttcctcctccacatctcttggttggccaccttccggcctttctggctgtggctcagctcctccgtcacccctcactgcact

SEQ ID NO: 360309 - DNA, 201 bp, Homo sapiens
gaccccagggggaggggcagttctaggggcaatttcttcagtttacccctagtgtcatgtcttgctccctctggcctctttctctttgagggacacccctrccttcaccattaaatcattttgagaaacagtaacatttgaagccttcttgcataccttctcccctgcgactcccctctttagccacctgaatttgttaca

SEQ ID NO: 360310 - DNA, 201 bp, Homo sapiens
ggatcgcttgaggccaggagtttgggaccagcctgggcaacagagagagaccccatctctacaaataaacagatagctgggtgcaatggcacatgcctatrgttccagctactgagaagaccaaagtgggagtatcgcttgagcccaggagtttgaaggtgcagtgagttatgatcacaccactgcactgttgccttggca

SEQ ID NO: 360311 - DNA, 201 bp, Homo sapiens
ctgcaatggtacacccgagctcaaagcaagatgagaaggcccagcttgttattaaaagacatcctcaagtaagtaccgcccctgggactgtagatccccckgctttgggtcaactgtgtagaactaggagaaaaattcagtgagagccctcaagatggctaatgttggagaggcatgcttggtcaaaggatgcctcagaca

SEQ ID NO: 360312 - DNA, 201 bp, Homo sapiens
tggtaatgtatggaattcaggtagtaaaaaaaaaaaaaggaatgcaaaaagaaataaactcacaattgcaccaccaggccatgcatggtggctcacgcccwtaaccccaacactttgggaggtgaggcgggaggatcgcttgaggccaggagtttgggaccagcctgggcaacagagagagaccccatctctacaaataaa

SEQ ID NO: 360313 - DNA, 201 bp, Homo sapiens
tgagggtgaactgaggcagtggctatgcatggtgtctgcagcagcgtttctgaggctccaagaatatcagttcctttttcagaaatggggccagattcttsggatgtagacagtgttctcttcacggatgctaacaacttatcaaagctataatatattaagtatctctgttataataggatagatgcattcctaaaaaaa

SEQ ID NO: 360314 - DNA, 201 bp, Homo sapiens
agcctgctataattatggtggaattgagggtgtcttattgtgttactagagaatttttttaagtaggtttttaacattttgaccttgttaaaatgctccayttttcaaaacggtcctgacaggatatcctgcttccttccacgcagaagaggtggtttgtgcagaagtgcaggcctcagaatgctttgcacatgagaggaa

SEQ ID NO: 360315 - DNA, 201 bp, Homo sapiens
tcattgctcactgcagcctcaacttcccaggctcaagcaatcctcccacctcagcctcctgagtagctgggactatagcatgcaccaccatacgtgcctawtttttttttttttttggtagaggcagggtcttaccgtgtttcccaggctagtcgcaaactcctggactcaagtgactcaagtgatcctcctgcctcagcc

SEQ ID NO: 360316 - DNA, 201 bp, Homo sapiens
tggctgaggtaaggcttcctgccttgtcttccgttctcctttgccaagtggaattcttcctctcaaacacaaaactccaacggtgacttgaatggctgttytctcccttccccacggatggtaggtccctgtctaggtgcacgggtaccaggtgcacagatggtaggtaccagtctaggtgcacgggagagggcagttcat

SEQ ID NO: 360317 - DNA, 201 bp, Homo sapiens
tcaagttgagatttgggtggagacagagccaaatcatagcattcctcccctggcccctccaaatctcatgtcctctcatttcaaaaccaatcgtgccttcycaacactcacccaaagtcttagctcatttcagcattaacccaaaagtccaccgaccaaagtctcatctgagacaagccaagtcccttctgcctatgggcc

SEQ ID NO: 360318 - DNA, 201 bp, Homo sapiens
gggagaaattggccaaaacaaaggggctacaggcaccatgcaagtccgaaatccagtggagcagtcaatttttttttttttttttttgagacagagtctcttctccgttgcacaggctggagtgcaatggcgtgcgatctcagctcactgcaacctccgcctcctgggttcaagtgattctcctgcctcagtctcccaagt

SEQ ID NO: 360319 - DNA, 201 bp, Homo sapiens
actgaaacaagtagatttgatgataaacaggatatttacttagtctgtaagtatctcccatcaagtcacttattaattacgaagggaaaatagtcaactcracagtggaagaacctggcatctaccaccttaacccttaatcaaatcaacatcacatgcctcctgagaagtgctttgagaagcgcacaggatcacttctgt

SEQ ID NO: 360320 - DNA, 201 bp, Homo sapiens
ggcaaaatgctgccagtctctttgctaaaacataaaagagtcacctttgcttcagttcccaacaagttcctcatctccatctgagaccacctcaacctggwtttttattgtccatgctactatcagcattttgggcaaagtcattcaacaagcctccagaaaattccaaactttcccacattttcctttctttttctgagc

SEQ ID NO: 360321 - DNA, 201 bp, Homo sapiens
tgggcttccctagacaaaatgatggtgttagcaccattgaggaatgtctacctcaaacaaatacaagctggttctgcaattcatctctttgtccagtgccrcctgtgtgaagtggctatttcagagttacttttttgagttggagtgccggatttgcgtagcttttgcaatctataggagtagattgcttcagaaggcagt

SEQ ID NO: 360322 - DNA, 201 bp, Homo sapiens
caaaatgctgccagtctctttgctaaaacataaaagagtcacctttgcttcagttcccaacaagttcctcatctccatctgagaccacctcaacctggatwtttattgtccatgctactatcagcattttgggcaaagtcattcaacaagcctccagaaaattccaaactttcccacattttcctttctttttctgagccc

SEQ ID NO: 360323 - DNA, 201 bp, Homo sapiens
atttgtatttccaaagctgattctatatcagtcatcatggtcttctggattttctattgggcagaagttctagttggaagatgaagcatatatgaaacgayttcatgggactaggaaatagagtaagtgagagaggatgcgaggtgagggcagtttcagcacttaatagccttaaattggacctattcacttgggcttccc

SEQ ID NO: 360324 - DNA, 201 bp, Homo sapiens
gccagccacaaggcagcaggggagatagacctgcgccctgtgctgcttaggctgtgggtgaggtggactcgctccaggaattaaggcacagtctgatatgwgctacagacactgggcttgccttcacacccttttcttttattttttttttaaatcaaaataagggaagtgtatgcactgaatgtaacaccttttctgggg

SEQ ID NO: 360325 - DNA, 201 bp, Homo sapiens
ccccaaatctgaaacatcatctgacactctgcccgcatgtccaacatagataagttaaaatagacctacttgtctgttttttaaaatgagattatgagagtttttttttttctttttagacagattcttggtctgtcacccaggctggagtgcagtggcaccatcttggctcactgcaacctcagcctcccaggagcaact

SEQ ID NO: 360326 - DNA, 201 bp, Homo sapiens
ttttggttgaaactttttagcttgcggtttgtgtcactggagaacttagtaaaaatgagatttctaaaactaagactagactcagctcttttctccaagtygtgtgtgtgtgtgtgtgtgtgtattaaactatataatagtgtgaatttatcagatctgtaaaaaatattttttaggtcatcttaagggtaactaatggtc

SEQ ID NO: 360327 - DNA, 201 bp, Homo sapiens
gcttcccaggcagaatataagttttaaaatatatttaaacacatttgagggtgtttatgcccagagatcagtgcacttcaccagggtgctttggtggaccycttggagggtgcattttacccaaatcctcagcatttgccagttaaagatgggtctctccactaccttgacagaactcaggttgtatgttttggcagaaat

SEQ ID NO: 360328 - DNA, 201 bp, Homo sapiens
tctctttggaagcccagtgaggcttccacagaaagggagcaacccagttcctgcccgctgaggcaaactggacttgctgagtgctgacatcctttattttkcacctccataaatctgtttttttccagttcagcaaacgtgtggtcctttcttagtgaagttcctcatgatttgtttctgctttttaagcctaaatgctta

SEQ ID NO: 360329 - DNA, 201 bp, Homo sapiens
aagggttgtccttaagatttcagagtggaaatgaaagtggggattttgctgaggaaaattactttgattgtttttaatacctttctgtgaatttcacatgmtgtttttatggcacactgccacagcattaacaattggcactaccagatgtctactttgtcttaattgtgggcaacctgcaagcgcagcctggaagatgtt

SEQ ID NO: 360330 - DNA, 201 bp, Homo sapiens
gtccgttgggattcactcaccatctctttggaagcccagtgaggcttccacagaaagggagcaacccagttcctgcccgctgaggcaaactggacttgctkagtgctgacatcctttatttttcacctccataaatctgtttttttccagttcagcaaacgtgtggtcctttcttagtgaagttcctcatgatttgtttct

SEQ ID NO: 360331 - DNA, 201 bp, Homo sapiens
ccctgttccggatttttaaaaaataataagtgcaatagaacattgccttttactaagaattatgccacttacttgtatttctgagaagggttgtccttaaratttcagagtggaaatgaaagtggggattttgctgaggaaaattactttgattgtttttaatacctttctgtgaatttcacatgatgtttttatggcaca

SEQ ID NO: 360332 - DNA, 201 bp, Homo sapiens
ggtgtgggaaatgaaagttccacaaggtcactgatgcccccagatcacgtgatccatggcagaattgagctccttcccacatctcattaatgccagacacragttttctttcaatctgaatgctctgccctgttccggatttttaaaaaataataagtgcaatagaacattgccttttactaagaattatgccacttactt

SEQ ID NO: 360333 - DNA, 201 bp, Homo sapiens
ctggaaggtctggtcttcacagtggtctcttgttaggaccgtggtgaatttgggttaactttgtgtggggatctagttgcaggccactgatcattcattcktctgttcattcactctgcaggtgcttgttaaatgccttttatatgcgaggtactttttaggttcctggattacagcagcgaacaaaatggacacagtccc

SEQ ID NO: 360334 - DNA, 201 bp, Homo sapiens
aaccccgtctatacaaaaaaaaaaaaaaaatacaaaaattaactcggcatggtggtgtgtgcctgtagtcccagctactcaggaggctgaggtgggaagayggcctgagcctaggaggttgaggccgcagtgagctgtgatcacaccactgtactccagccagggtgacagagcaagatcccatctcaaaccaaaaaacaa

SEQ ID NO: 360335 - DNA, 201 bp, Homo sapiens
gctttctacagattaccaaacatcctcaaagagattgagtgatttggctgttatcaaatagccaaacagttgagtatttcatctctttgctcttctctttaaaaaaaaaaaaaaaaaaaaaaatcaggcaagtgtggtaactcacgcctgcaaattccagtactttgggaggctgaggtgggaggattgcttggggccagg

SEQ ID NO: 360336 - DNA, 201 bp, Homo sapiens
aaattgtatgcatgtatccaaatatcacatgtattccataaacatgtaggattccagcactttgggcggccaaggcgggcggatcacctgaggtcaggagyttgagaccatggtgaaaccctgtctctactgaaaatacaaaaattagctgggcatggtggcgggcacctgtaatcccagctacgtgggaggtttaggcaa

SEQ ID NO: 360337 - DNA, 201 bp, Homo sapiens
atagcttaaatttcaatcgtagcttaaggatttcctccctaagtgaaaatagtttcagtttttcaaaaatagaactggtaatgtatggaattcaggtagtaaaaaaaaaaaaaggaatgcaaaaagaaataaactcacaattgcaccaccaggccatgcatggtggctcacgcccttaaccccaacactttgggaggtgag

SEQ ID NO: 360338 - DNA, 201 bp, Homo sapiens
cctccctaagtgaaaatagtttcagtttttcaaaaatagaactggtaatgtatggaattcaggtagtaaaaaaaaaaaaaggaatgcaaaaagaaataaahtcacaattgcaccaccaggccatgcatggtggctcacgcccttaaccccaacactttgggaggtgaggcgggaggatcgcttgaggccaggagtttggga

SEQ ID NO: 360339 - DNA, 201 bp, Homo sapiens
ccagaaaatggggtttccttttctgtcacataggctgcaaattttctcaacttttatgctctgttccccttttaaaactgaatgcctttaacagtacccamgtcacctcttgactgctttcctgcttagaaatttcttccaccagataccctaaatcatctctctcaacttcaaagttccacacatttctacggcaggggc

SEQ ID NO: 360340 - DNA, 201 bp, Homo sapiens
  misc_feature (1)...(201): n = A,T,C or G
gggtcttggggattaacattagtctccttgctacttatgcaaatttctgcagctggcttgaatttctccccagaaaatggggtttccttttctgtcacatnggctgcaaattttctcaacttttatgctctgttccccttttaaaactgaatgcctttaacagtacccacgtcacctcttgactgctttcctgcttagaaa

SEQ ID NO: 360341 - DNA, 201 bp, Homo sapiens
ccctgctccccatttaccctccatatttaaagataaccagtgtcaccggtttcttgtgtatatgagaaatattttgtgtgtgtgtgctctgccatgccccstgcccaaacccacttttacacaaattgatagcatcctgttcacttatcattatacataatcccaacttgtccaagttgtcatgggaagcctgttttaaat

SEQ ID NO: 360342 - DNA, 201 bp, Homo sapiens
agtagctgggattacaggtgtgtgccaccacatccggctaattttttttgtatttttagtagagatggggtttcaccatgttggccaggctggtcttgaaytcctgacctcaagtgatccacctcggcctcccaaagtgctaggattacaggtgtgagctactacacctggcccaaatcttaaagttccaaaatgatctcc

SEQ ID NO: 360343 - DNA, 201 bp, Homo sapiens
catccttcagtactcagagcctcagtcaaggttctggggccgagataaggtatttttgttgctactcaaagttaatcattccctgtttgaggggcgatgtrtacaaatttcactttggctcaactgtatacccagaagcatctccagtggagaaacccagcctgtgattagatgctccatgtgtgtttaccactctgcact

SEQ ID NO: 360344 - DNA, 201 bp, Homo sapiens
ggctcccactgtgttgtccaggctggtctctggcaactcctagcctcaaactattctcccacattgccctcccaaagcgctgagattacaggcgtgagcarttgcgcctggctggctagtgtatgccttctttccttaagcattgagtttctgagaatcactcatgatgctgcccatggttgaagcatgttcactctcatt

SEQ ID NO: 360345 - DNA, 201 bp, Homo sapiens
attatttcttaaattaatatatgcatttattataatagtaactagtgcctatattagttaagatataattttgcctttaattaaccattccttaaacaagrcagaagcttattcctctatcatagaccagtccagaagtagagtggcagctctctgccctatgggattgtcccaggggccccagctccttctcttgttgtt

SEQ ID NO: 360346 - DNA, 201 bp, Homo sapiens
ttgaaaattgctaataaaattatttcaaaagaataaataggcaggcacacaacatattttttaagaaaagtgtttttaaattgccatattctctctttttytttttttttttttgatgtaacacttctgcttttaatgtaactttctttttaaacttttttattatataaattttaaccatacacagaagtggggagaatt

SEQ ID NO: 360347 - DNA, 201 bp, Homo sapiens
gccaacatgatgaaaccttgtctgtactaaaaatacaaaaattagccaggtgtggtggcgcatgcctgtagtcccagctactcgggaggctgaggcaggasaattgcttgaacccgggaggcagaggttgcagtgagccaagatcacgccactgcactccagcctgggcgacagagtgagactccatctcaaaaaaaaaaa

SEQ ID NO: 360348 - DNA, 201 bp, Homo sapiens
actttcttccagatgcctctacgcctataattacctatggctacgtgaacactcttcccctgcagtctgatcgttttttgttggttaaaagtataattgcyggctgggtgcggtggctcacgcctgtaatcccagcacttcgggaggctgagacgggtggatcacctgaggtcaggagtttgagaccagcctggccaacat

SEQ ID NO: 360349 - DNA, 201 bp, Homo sapiens
gacttattcactatcatgagaataacatgggaaagaccggcccccatgattcaattacctcccccgggtccctcccacaacatgtgggaattctgggagayacaattcaagttgagatttgggtggagacagagccaaatcatagcattcctcccctggcccctccaaatctcatgtcctctcatttcaaaaccaatcgtg

SEQ ID NO: 360350 - DNA, 201 bp, Homo sapiens
agagccaaaccatatcacacatacaccccaaatctgaaacatcatctgacactctgcccgcatgtccaacatagataagttaaaatagacctacttgtctrttttttaaaatgagattatgagagtttttttttttctttttagacagattcttggtctgtcacccaggctggagtgcagtggcaccatcttggctcactg

SEQ ID NO: 360351 - DNA, 201 bp, Homo sapiens
gagtttctaaacctggtcatcagttgagagtagagttcttgtttttaaatgtagctgcctacattgtgccacagtgagctgggaatcaccaagctgagccrtgcagcgttgcccttggaaaatcaggcattggtgtgaggatggctccagctgttagctctctggacctgggtgtctcttcttgctgccactggacacttt

SEQ ID NO: 360352 - DNA, 201 bp, Homo sapiens
caatcatggtagagggcaaaaggcacttcttacatggcagcagcaagagagaatgaggaagcagcaaaagcagaaacccctgataaatgcatcagatctcrtgagacttattcagtatgagaatagcacaggaaagaccagcccccgtgattcaattacctcccctgggtccctcccacaacacgtgggaattctgggaga

SEQ ID NO: 360353 - DNA, 201 bp, Homo sapiens
tgaggcaggagaattgcttgaacccgggaggcagaggttgcagtgagccaagatcacgccactgcactccagcctgggcgacagagtgagactccatctcaaaaaaaaaaaaaaagtttaattgccagctgggcatgatggctcacaactgtaatcccagcactttgggaggccaaggctggtgggtggcttgagcccagg

SEQ ID NO: 360354 - DNA, 201 bp, Homo sapiens
gattcttggtctgtcacccaggctggagtgcagtggcaccatcttggctcactgcaacctcagcctcccaggagcaactggttctcctgtctcagcctccygagtagctgggactacaggtgcacgccaccaagcccagctaatttttgtatttttagtagagacagggttttgccatgttggtcaggctggtcttgaact

SEQ ID NO: 360355 - DNA, 201 bp, Homo sapiens
ccagaggttcagaccgcagaaggatgggcctgcccaggtggccttaatggcagagctctgtatagggatggcagccaatctcaaaggagaaaggtttgacrgtcccaggcatccaaagatgggataaacagaccacctttgtggtgactctctggggatctttaagaaagtcaggggtctgaccgggtgtgatggcgcaca

SEQ ID NO: 360356 - DNA, 201 bp, Homo sapiens
ggtcttgaactcctgacctaaggtgatccacccacctcagcctcccaaagtgctgggattacaggcatgagccaccatgcccagcctatgagagctttttsaaggagggacagtgcgtgtgtttcttgttgctatctccccaggcacatactcctatttgatcaaaaatgggttgtataattaaaaactgttatgtctgtt

SEQ ID NO: 360357 - DNA, 201 bp, Homo sapiens
gcggcattccaggcagagggaacaacttggctaaagatctggaggctggattgagtctagggttcactgtaactcaccaaatgccgacatgccccaccccycgccacaggtgggtttcattgactacattgctcacccactgtgggagacttgggctgacctggtccacccagatgcacaggacctgctggacacgctgga

SEQ ID NO: 360358 - DNA, 201 bp, Homo sapiens
gggccaggaaggagggtccaggaactccaagccctccttaggttggagggagaaccaagtcagctggaccagcatcccagatttcagtccaggctgagtgkccttggatgggttacttccctgctctggagcttggctttcttgcgtcctggtgcatggaccccctaggggccactggcttctgactccatcagcaagcct

SEQ ID NO: 360359 - DNA, 201 bp, Homo sapiens
atccagtcgcagtctttggatgttcggttgtaaccccctcaaagagctctcggggatgggctacatcacgcacatgttagaaacaggagaggccgggtgcrgtggctcatgcctgtaatcccagtactttggtaggccgaggcgggcagatcacgaggtcaggagttcaagagcagcctggccaacacggtgaaaccctgt

SEQ ID NO: 360360 - DNA, 201 bp, Homo sapiens
gcagttattggcccagcaagctgcactaaccagggacgtgccgaggaaggctgagtaagatccaggctctgagatcttaggggcagccctctaaagaagtrcagttgggcctggcgcaatggctcacacctataatcccagcactttgcgaggctgaggcaggaggatcacttgagtctgggagttcgagatcagcctggg

SEQ ID NO: 360361 - DNA, 201 bp, Homo sapiens
gaaggcaagacagctgtttctctgggcaccttgctttctgactccctcattctacactttttagcagttattggcccagcaagctgcactaaccagggacrtgccgaggaaggctgagtaagatccaggctctgagatcttaggggcagccctctaaagaagtacagttgggcctggcgcaatggctcacacctataatcc

SEQ ID NO: 360362 - DNA, 201 bp, Homo sapiens
gtcattgacatggtgaggccagggcagtaagcggggcgggaggggcagaggggagcggggcatccttctcatctgcagacagcagggtggggtgatattgscatggccggcggttcatccagacccaggcatgtcctcactctgtctgagcttcctcatctgtgaaatggaacagtggggccaggggcggtggctcatgcc

SEQ ID NO: 360363 - DNA, 201 bp, Homo sapiens
gctgaggcaggtgatcacctgaagtcaggagttcgagaccagcctgaccaatatagtgaaacctcgtctctactaaatacaaaaaaaaaaaaaaaaaaaaattagcttggcatggtggcacatgcctgtaatcccagctacttgggaggctgaggcaggagaattgcttgaacccaggaagcggaggtttcagtgagccga

SEQ ID NO: 360364 - DNA, 201 bp, Homo sapiens
tactaagtgccaagtactgagggaacagcagggaacatggcagacctggccttgctctccagggactcacaggcaaataatcatgacaataaatgtgaagytgtatccatggctggagggtgctctgaggcatttacctggctagtcagggagggcttctcggaggaggtgactctaactgtaacccaaaagacaaagcat

SEQ ID NO: 360365 - DNA, 201 bp, Homo sapiens
cctgtgggggaagtttgtgaccagctcaagcacccgaggtaaccctggggtgcttggatataaatacacacacacacgcacacacacacacacacacacacacaagtttttatttttgagacagagtctcattctgttgcccaggtacaagtgcagtgtctcgatcatggctcactgcatcctctgcctcccaggctcaag

SEQ ID NO: 360366 - DNA, 201 bp, Homo sapiens
agttgcatccttccatttcacagatgagtatgctgaggcccagagggctgagtctgagccagagtggcatctgggagttgggagtgagggttggggtgggyagggtcctcgcgcctgtcaccttcccttgcctgcccccaggtgctggccacagacatgtccaaacacatgaacctcctggccgacctcaagaccatggtg

SEQ ID NO: 360367 - DNA, 201 bp, Homo sapiens
tgagcctggtacacactgggtccccagcttgtggctctttactcagccctagaaactgttgggggaatgtgcttccccacagccccagatggatcacaggrgtatgggagggtctaagcattttgttgagaaggcatttaagcacctactgggtggcaggccctgtgttggagacgcaaccatggataagaagctgtgtcc

SEQ ID NO: 360368 - DNA, 201 bp, Homo sapiens
taggggtggagctgagggtgctggtgtcatcatggcttgtgggtctgtgtgaccgggtgtgcccacgtgcggttgggactgaaagagtgtgtgtgtgtgtgcgcgcgcgcgcgtgagactggggtgaccagatgtgtttggggtgctcctgtacgttcatgcttgggtatgattccatgtgtcccaggtagttgtgggtgt

SEQ ID NO: 360369 - DNA, 201 bp, Homo sapiens
gtaggggtggagctgagggtgctggtgtcatcatggcttgtgggtctgtgtgaccgggtgtgcccacgtgcggttgggactgaaagagtgtgtgtgtgtgtgcgcgcgcgcgcgtgagactggggtgaccagatgtgtttggggtgctcctgtacgttcatgcttgggtatgattccatgtgtcccaggtagttgtgggtg

SEQ ID NO: 360370 - DNA, 201 bp, Homo sapiens
cgtaggggtggagctgagggtgctggtgtcatcatggcttgtgggtctgtgtgaccgggtgtgcccacgtgcggttgggactgaaagagtgtgtgtgtgtgtgcgcgcgcgcgcgtgagactggggtgaccagatgtgtttggggtgctcctgtacgttcatgcttgggtatgattccatgtgtcccaggtagttgtgggt

SEQ ID NO: 360371 - DNA, 201 bp, Homo sapiens
acgtaggggtggagctgagggtgctggtgtcatcatggcttgtgggtctgtgtgaccgggtgtgcccacgtgcggttgggactgaaagagtgtgtgtgtgtgtgcgcgcgcgcgcgtgagactggggtgaccagatgtgtttggggtgctcctgtacgttcatgcttgggtatgattccatgtgtcccaggtagttgtggg

SEQ ID NO: 360372 - DNA, 201 bp, Homo sapiens
tgggaggttgaggcaggagaatcacttgaacccaggaggcagaggttgcagtgagccaagattgcgccactgcactccaccctgggcgacagagtgaaacygtgtctcaaaaaagtaaggccagggacagtggctcacgcctgtaatcccagcactttgggaggctgaggcaggtgatcacctgaagtcaggagttcgaga

SEQ ID NO: 360373 - DNA, 201 bp, Homo sapiens
gcatccagagacagggcctggggaatgtcagagcaggtgggggatcacgtggggagttgcgtggaggggtgctgggagagggggccctgagtttgggtctygctttctgcaacaaagacccatgcccgtgaccgcgtccatggaagcctcagtttccccacttggcaaaggattaagggtttgtagtttctggtgcgctgt

SEQ ID NO: 360374 - DNA, 201 bp, Homo sapiens
aaggccctgagccagggtctgtgatggaccaggagcgggacctgctgaagacattccagatcccagcagacacactggccacctacctgctgatgctggarggtcactaccacgccaatgtggcctaccacaacagcctacatgccgccgacgtggcccagtccacgcatgtgctgctggctacgcccgccctcgaggtac

SEQ ID NO: 360375 - DNA, 201 bp, Homo sapiens
ttggggctcactgtggaacctggggtgggaggatggaggctctagagtctggggaagttgggctggggttaattaagcttcagcccttcatatcttaggarctagaagacaccaacaagtggggacttgatgtgttcaaggtggcggagctaagtgggaaccggcccctcacagctatcatattcagcatttttcaggtac

SEQ ID NO: 360376 - DNA, 201 bp, Homo sapiens
acaggcaccaccacaccgggctaatttttgtatttttagcagagatggggtttcaccatgttggccaggctggtctcgaactcctgacctcaaggtcaagsagtgatcctcctgactcggcctcccaaagtgctggtattacaggcataaaccaccgcacctggccacatttttatttttatttgtctagtgtagacgata

SEQ ID NO: 360377 - DNA, 201 bp, Homo sapiens
tgtaatcccagcactttgggaggctgaggcaggtgatcacctgaagtcaggagttcgagaccagcctgaccaatatagtgaaacctcgtctctactaaatmcaaaaaaaaaaaaaaaaaaaaattagcttggcatggtggcacatgcctgtaatcccagctacttgggaggctgaggcaggagaattgcttgaacccagga

SEQ ID NO: 360378 - DNA, 201 bp, Homo sapiens
gtttctccatgttggtcaggctggtctcaaactcccgacctcaggtgatcctcccgccttggcctcccaaagtgctgggattacaggcacgagccacagcrcctggcctggaccaggcactatttatatccccccacgtttgagatccctacttcacagatgaggaaactgaggctcagagaggtaaattcactcaggaga

SEQ ID NO: 360379 - DNA, 201 bp, Homo sapiens
gaccaggcacttgtttttttttttttttttgagatggagtctcgctctgtcactcaggctggagtgcagtggcccgatctcagctcactgcaagctccacytcccgggttcacactattctcctgcctcagcctcttgagtagttgggactacaggcgcccgccaccacgcccggctaatttttttgtatttttagtcgag

SEQ ID NO: 360380 - DNA, 201 bp, Homo sapiens; identical to SEQ ID NO: 77616

SEQ ID NO: 360381 - DNA, 201 bp, Homo sapiens; identical to SEQ ID NO: 77617

SEQ ID NO: 360382 - DNA, 201 bp, Homo sapiens
atttatttttaaagacagtgtcttgctctgtcacccaggctggagtgcagtggcgcgatttcggctcactgcaacctctacctcccaggttcaagcgattstctagcctcagcctcccgagtagctgggattacaggcacacactaccatgcctggctaatttttgtatttttcgtagagacagggtttcgctctgttacc

SEQ ID NO: 360383 - DNA, 201 bp, Homo sapiens
aacttgggtccaggagtcctgggtggcccccgtgggaacagtttcagggtccagatgaagagacgaagtcgcgagaggcgtggggtccctgagcgggggggttgggcaggcccctgactgcctcggctcccagaggacacggggcagaagctggcattggagacgctagacgagctggactggtgcctggatcagttggag

SEQ ID NO: 360384 - DNA, 201 bp, Homo sapiens
tgggggaagtttgtgaccagctcaagcacccgaggtaaccctggggtgcttggatataaatacacacacacacgcacacacacacacacacacacacacamgtttttatttttgagacagagtctcattctgttgcccaggtacaagtgcagtgtctcgatcatggctcactgcatcctctgcctcccaggctcaagcgat

SEQ ID NO: 360385 - DNA, 201 bp, Homo sapiens
gacgctctgcctctccctcgctttctctgtatctctctccctctaccctaccttaccctacttttgtctcgcagttggtgactctgtctctctctgtctcygtctgtctccacccgccgcctggatataggcccaggggaccagccgtctgtctccttccagctgtgaggcccagagtgggacgggctgaggctcacgtct

SEQ ID NO: 360386 - DNA, 201 bp, Homo sapiens
ttgagcccaggaagttgaggctgcaatgagctaggactgtgccactgcactccagcctgggcaacacagcgagatcgtctcaaaaaaaaaaaaaaaaaaaaggagcagagagttgcgtctgactctgtgcctcagtttccccgtttgtcccgggggtcgtcagggagccgccggcctcgaggcggggccgatgcgcccttt

SEQ ID NO: 360387 - DNA, 201 bp, Homo sapiens
ccatttcacagatgagtatgctgaggcccagagggctgagtctgagccagagtggcatctgggagttgggagtgagggttggggtgggcagggtcctcgcrcctgtcaccttcccttgcctgcccccaggtgctggccacagacatgtccaaacacatgaacctcctggccgacctcaagaccatggtggagaccaagaag

SEQ ID NO: 360388 - DNA, 201 bp, Homo sapiens; identical to SEQ ID NO: 77612

SEQ ID NO: 360389 - DNA, 201 bp, Homo sapiens
agaatgaggaaggctgtgttctcagcagagggaaccccacgtgaggagggcttagagaaagccaaggcttggagtgagaaagaactaaacgtttggtgagrtggagttggggtcttgagtggtgggtacccacagggtggggagacagcatttgggacagatgagagatttgaggagaagttttgagacttttgtctgact

SEQ ID NO: 360390 - DNA, 201 bp, Homo sapiens
gctggggttaattaagcttcagcccttcatatcttaggagctagaagacaccaacaagtggggacttgatgtgttcaaggtggcggagctaagtgggaacyggcccctcacagctatcatattcagcatttttcaggtacctaccctgcccttggcttccaaggaaaaactcctggggtttccctcactgcttcctaccac

SEQ ID NO: 360391 - DNA, 201 bp, Homo sapiens
ctgtgaacagaggagaggggtaggtagctacaggcaagacaggatcttttttttttttttgatacagagtttcactttgttgcctaggcgggagtgcagtsgtgcaatctcagccactgcaacctccgcctcctgggttcaagcaattctcccacctcagcctcctgagtagctggggttacaggtgcctgccaccatacg

SEQ ID NO: 360392 - DNA, 201 bp, Homo sapiens
ctggaccctcagtccagccctggcctgggccggattatgcaggctccagtcccgcacagccagcggcgcgagtccttcctgtaccgctcagatagcgactrtgaactctcgcccaaggccatgtctcggaactcctctgtggccagcgacctgtgagtctggggctggtgggatgacaccgcctctaccctccctccttcc

SEQ ID NO: 360393 - DNA, 201 bp, Homo sapiens
tgcactccagcatggataactgcactccagtgcaggcaacagagcaatatttcgtctcaaaaaaaccccaaaaaacagaaaaaaaagaaatggggaggccrggtgcggtggctcactcctgtaatcccagcactttgggaggcggagctgggaggattgtttgaggccaggagttcaagaccagcctgggcaaaatagtga

SEQ ID NO: 360394 - DNA, 201 bp, Homo sapiens
atcggcttctctgagcttcaccctggcccatccgcagaccagcagaccgaggtggagctgcccaaggtgaccgctgaggaggccccacagcccatgtcccrgatcagtggcctacatgggctctgccacagtgccagcctctcctcagccactgtcccacgctttggggtccagactgaccaggaggagcaactggccaag

SEQ ID NO: 360395 - DNA, 201 bp, Homo sapiens
cgggcagaaagcacggcctgtgcaaagacccggaggtggaagataacaggcggaacgttcaggctgaagatgaagtggaggagtgggggagcctagggcargacccggctagctgggggcgtggtcggcggccgtggggcggagccttatgggctgagggtggagcctggaacgctgggggcgtggcaggtagccaagggt

SEQ ID NO: 360396 - DNA, 201 bp, Homo sapiens
ctggggttaattaagcttcagcccttcatatcttaggagctagaagacaccaacaagtggggacttgatgtgttcaaggtggcggagctaagtgggaaccrgcccctcacagctatcatattcagcatttttcaggtacctaccctgcccttggcttccaaggaaaaactcctggggtttccctcactgcttcctaccaca

SEQ ID NO: 360397 - DNA, 201 bp, Homo sapiens
cacatagccactttgaggaagatctggaactgaggtcctggagtccagtgtagactcaaagaccaaagtgtgaggggtgcagggttcctgagggtgtagcygggggcaggtgaacaagctggaaaccacacttgcctgactgccaagcagccccagggaggacgcaccagacaaggtggccacgacccggcacccagttgt

SEQ ID NO: 360398 - DNA, 201 bp, Homo sapiens
tcctggcctcagtttccctatttgtccacagacgcgcttttctggaacccttggggagagccgagagaggggtagggggtcgcgatccgcatgcctccccstcgaggggcagatctgggttatccgccgcctccagtccgcccctaagagcgtctcccattgcaccacagcgcccacggcgcaccccagacgggccaggga

SEQ ID NO: 360399 - DNA, 201 bp, Homo sapiens
ttccagaaacgactgtgacctcgtggggagggatgggggcaaggctggggttcggagtggggcttgtgggcgccgactgtggctggcatcctgcgcttggwccgcgccgaattggcacccacttggtaagtctggcacccaaaggctgagaggggaggtccctctccaaggtcatagctggggttggagggagaaggtatg

SEQ ID NO: 360400 - DNA, 201 bp, Homo sapiens; identical to SEQ ID NO: 77646

SEQ ID NO: 360401 - DNA, 201 bp, Homo sapiens
gagtctgtgcctccagctccagcagccggttgaccttgcgggcctcgtgcgggttggaggctgtgcccaccaggaagaggaggcgcagctgcaaaccccgwaccttgcgctcgcggccccacgtgcgccgcagcagctcgcggcgcacatagttgctaggggaggacttgatcaccagcagcaggaagaccggctgcgcgc

SEQ ID NO: 360402 - DNA, 201 bp, Homo sapiens
catgagccactgtgcccgggccaggctggtcttgaactcctgacctcaggtgatctgcccgcctcagcctcccaaagtgttgggattacaagcgtgagccrctgtgcctggcctttttacaaatattttaaattttattttaaaagtattgcattaaaatacttaccttgctggatgtggtggctcatgcctgtaatccct

SEQ ID NO: 360403 - DNA, 201 bp, Homo sapiens
gggctggttcagcgcatcccacatgagcagcatctcataaggtaggaagcggtgcaccagcagcaggtctcggtagaagcaggggtcaaaggaggacaggygttgcgatggagcccgcacgccagacgtgcggatgccgctgtgggaggcaggcttcagtccctcaagctccagacacatacccaggaagacatcatcaat

SEQ ID NO: 360404 - DNA, 201 bp, Homo sapiens
ttcagaacacagcatgttaagaggccatggcccctacccgcctcagcctcagtttcccctacagtaacctacacaggctgggtatctgtttgttgccgggygctgtgcttggtgcttaccctaccttgaatcctgaatgcacccttaggaggcagaagtggtcctctatcttatttacagatgagggaacagaggctctcc

SEQ ID NO: 360405 - DNA, 201 bp, Homo sapiens
tgtggagtcaactgcagaataaatcacaccctagccctggcttggaggatccccgctttcacagatgctggacactgacagccaaatgtcctcactccagrggagccccagacgctccgctccctgcatgtgtaacaccccttcttgctgtctcttagtaaataaacgacccaaagcagcttcctgcattttctctagaaa

SEQ ID NO: 360406 - DNA, 201 bp, Homo sapiens
tgtatgaattttgtttgtttctgagacagggtcttgctctattgcccaggctagagtgtagcgctatgatcatagttcattgcagcctcaaattcccgggmtcaggtgatccttccacctcagcctcccaagtagctggtactacagacacatgccgctacttactcctggctaataatttttttttttttaagagatggg

SEQ ID NO: 360407 - DNA, 201 bp, Homo sapiens
accacactctgctaatttttgtatttttagtggagacggggtttcgccttgtctaggctggtcttggtctcctgacttcaggtgatccgcccacctcggcytcccaaactgctgggattacaatcgtgagccaccatgcccagcctcattttatttttgaaacaaggtctccctctcacccaggctggagtgcagtggcat

SEQ ID NO: 360408 - DNA, 201 bp, Homo sapiens; identical to SEQ ID NO: 77647

SEQ ID NO: 360409 - DNA, 201 bp, Homo sapiens
aggtgggacctgagggcccttggggcctctcccaacttccccagggacccttgcccatgtagaaagggcctgttgtctaatgggtgggaggaagtggactytgggccaagctccctttgttcaaacaccagctgtgctgacttttgctgtgagtcacttggtctcagttttctcatctgtgtaacaggaataataacagct

SEQ ID NO: 360410 - DNA, 201 bp, Homo sapiens
ccagcctccaagtctcaccccatacatgaaaaaaggtggccccggtttcccgccacctcctccacagcaccatctctttgaaggtttcctcctgtttttgttttttttgttgttgctgttgagacagcgtctcactctgctgcccaggctgctggagtgcagtggtgtgatccaggtggctcactacttccgcctcccggg

SEQ ID NO: 360411 - DNA, 201 bp, Homo sapiens
tttctctgcaaactgctcaggggtctctccccactaggccttggcaatggtggtttcctctgccaggagcaccctttcccacaggtctactctatctggtragctcttatattacctccaaaacccaatcccattgtgcccttccccagcagagtcatgggttcaagcctcgactcaggggcactggggggcatttatgat

SEQ ID NO: 360412 - DNA, 201 bp, Homo sapiens; identical to SEQ ID NO: 77656

SEQ ID NO: 360413 - DNA, 201 bp, Homo sapiens; identical to SEQ ID NO: 77661

SEQ ID NO: 360414 - DNA, 201 bp, Homo sapiens; identical to SEQ ID NO: 77663

SEQ ID NO: 360415 - DNA, 201 bp, Homo sapiens
tagagacggggtttcaccatgttggtcaggacagtctctaactcctgacctcaggtgattcgcccgcctccacctctcaaagtgctgggactacaggcatragccaccgtgcctggcctttaaaaagttttattgagatatctgacattctgtttttcatcctaaatcttggcaatctagtgtgcattttaccctcagaag

SEQ ID NO: 360416 - DNA, 201 bp, Homo sapiens
acctcggctcactgcaacctctgagtcctgggctcaagtgatcctcctgcctcagcctcccaagtagctgggaccacaggtgtgtgccaccatgcctcgcyatatttttgtttttgtttttgtttttgttttttggtagaaactgggtttcactgtgttgctcaggcggtctcaaactcttggcctcaagcaatcctcccg

SEQ ID NO: 360417 - DNA, 201 bp, Homo sapiens
actgtgtaggatcatgggtcctgcctgctgagcccttatgggtggtgatctctgtgtcttgtgagtgtgcttgtgtgtgtgtgtgagagagaccctcatcyggtgtgccgatgcgctgatgacaaccgcagccccagggaactgcaggggcttctcggtttatttatgttccaattccctggtgggctgggcccgcgccct

SEQ ID NO: 360418 - DNA, 201 bp, Homo sapiens
agatgtttccaggctcacatattctaacacaatcacatccacacaccagaacaccaccgcatgaatccactagtgtgttctcacactcacatttgaatacrtcgtgctcacatgctagggcgttttcacagtcacactcaaacatgaccacactcacacacttggacgcttccaccttcattcaaaacactcactggctgg

SEQ ID NO: 360419 - DNA, 201 bp, Homo sapiens; identical to SEQ ID NO: 77671

SEQ ID NO: 360420 - DNA, 201 bp, Homo sapiens; identical to SEQ ID NO: 77649

SEQ ID NO: 360421 - DNA, 201 bp, Homo sapiens
ctttgcatctacccttcccccaaagcaaacagcatcctcccactaccctgcagctgggccccccccactggtccccgctttcccggtggagacggcgacgyggcccacacgcgagcccctcgccgaggatgaatcaccagccagctcgagttgccacactttatctcagtacagttatcgcgagagtcccggggccgcgcc

SEQ ID NO: 360422 - DNA, 201 bp, Homo sapiens; identical to SEQ ID NO: 77650

SEQ ID NO: 360423 - DNA, 201 bp, Homo sapiens
ggagggggggtcagtgggtgcagggggtgggagggagccccctaccctctctgtacccctgcaaacgaagacccttgctgggacgccaggcctagacggcwtctcgtctcactcccaggtcccaaatttccccaccctcttgctgagctgctcatgcaccctctctgggcggcactggggggcacgtacacactcacaccc

SEQ ID NO: 360424 - DNA, 201 bp, Homo sapiens; identical to SEQ ID NO: 77651

SEQ ID NO: 360425 - DNA, 201 bp, Homo sapiens; identical to SEQ ID NO: 77652

SEQ ID NO: 360426 - DNA, 201 bp, Homo sapiens; identical to SEQ ID NO: 77654

SEQ ID NO: 360427 - DNA, 201 bp, Homo sapiens; identical to SEQ ID NO: 77653

SEQ ID NO: 360428 - DNA, 201 bp, Homo sapiens
gtgtttaataactcacgtgtacacgcccaccacactcgactccgtctgggctcctcccgagcgtcccgcggcccccagcccgagtttacattccccctccyggctgcctagtgtggggcggcgtggagcctggcggccggccaggtgtaaacatttacaccgagcactgaaagccgggctggatgcgggtcagcacctccg

SEQ ID NO: 360429 - DNA, 201 bp, Homo sapiens
actttgggaggccgaggcaggcggatcacaaggtcaggagatcgagaccatcctggccaatatggtgaaacccgtctctactaaaaatacaaaaatttgcygggcgtggtggtgcatgcctgtaatcccagctacttgggaagctgaggcaggagaatcgcttgaaccagagagtcggaggttgcagtaagccgagatcgc

SEQ ID NO: 360430 - DNA, 201 bp, Homo sapiens
gggcaccagttacttggtgctgtgagtgcctggtggcatcctcctcactgcatacagtcggtgtttaataactcacgtgtacacgcccaccacactcgackccgtctgggctcctcccgagcgtcccgcggcccccagcccgagtttacattccccctcctggctgcctagtgtggggcggcgtggagcctggcggccggc

SEQ ID NO: 360431 - DNA, 201 bp, Homo sapiens
tggggcggcgtggagcctggcggccggccaggtgtaaacatttacaccgagcactgaaagccgggctggatgcgggtcagcacctccgggcctgggctcgrttcatggggttcccaggcgccccccaaatgcgtgcaccttgtacctccagccttgcaccacccagagatttatttgcatgggatttgcatttcatttgca

SEQ ID NO: 360432 - DNA, 201 bp, Homo sapiens
tagcggaacagcaccgtctcgtcggacgcgtagcccaggcccagctcgctcacgcgcacctccagctcgcgcagcccgcaaggccgcgcccccaaccgcgmacgcgcgcgccgccgccggggccccgcccgacggcgcggacctgggggccgcccagcccagggcgtcagctcgcgcagctccatcgcatccggggccccc

SEQ ID NO: 360433 - DNA, 201 bp, Homo sapiens
cttttggagatggagtctcactcttgtccctcaggctggagtgcagtggcgcaatctcagctcactgcaacctctgcctcccgggttcaagcgattctcckgcctcagccccctgagtagctgggattacaggcacctgccagcatgactggctaatttttgtatttttaatagagacagggtttctccctgttagctatg

SEQ ID NO: 360434 - DNA, 201 bp, Homo sapiens
tgcctctgttttccccaagtgctgatagctcgagggctcacagctgggcctgttcctagggcagcctcctggtctcctgttcctagatcgcccctaggagytccctgaggttccactggtggagaaactgaggccccatgaggggcaagacttggccaggggtctgggcctctcaaggcaagactcagtgattctgcaaaa

SEQ ID NO: 360435 - DNA, 201 bp, Homo sapiens
cgcttgaacccaggaggcagatgttgtagggagccatgatcgcaccactgcactccaacctgggcgacacagtgagactgtctcaagaaaaaaaaaaaaargggggagtgtccctttctgagtgtgcaattctgtgtggaaggtgactgtgtaggatcatgggtcctgcctgctgagcccttatgggtggtgatctctgtg

SEQ ID NO: 360436 - DNA, 201 bp, Homo sapiens
tcccagcactttgggaggccaaggcaggtggatcactttaggccaggagttcgagaccagcctggctaacatggtgaaactccatctctactgaaaatacaaaaaaaaaaaacaaaaaacaaattagccgggtgtggtggtgcactccaccagtcccagctactcaggaggatcaggcaggagaatcacttgaaccaagga

SEQ ID NO: 360437 - DNA, 201 bp, Homo sapiens
gaaggggaaagaagggaaatggactcagagagaggcaaagagcagcccaacgtcacacagctaggcaggcccttccaatcaaccaaagcaacagacagccrgcgcaagggtgtgtgtttctggcaccttccttggtgatgccaggaaatgttgctcattatctttatgcacaggcaacgccctggcacccccactcccctt

SEQ ID NO: 360438 - DNA, 201 bp, Homo sapiens
ccaggtccacctggacctcactctcctcacccccagagtggctcccccttcctagaaacccacatagcggggaactgattccacctggatctcaggctccycacccacagtgtctccccctttccccctctccagaagtccacacagcagagaggtgcagtcaggaacaagctggggaaactgggtccacctagacctcag

SEQ ID NO: 360439 - DNA, 201 bp, Homo sapiens
cccttccccagcagagtcatgggttcaagcctcgactcaggggcactggggggcatttatgatcggctgtgtcttctctccagattgaggaagagtctggkgacacaccagaaaaggacaggatcaaggtgggacctgagggcccttggggcctctcccaacttccccagggacccttgcccatgtagaaagggcctgttg

SEQ ID NO: 360440 - DNA, 201 bp, Homo sapiens; identical to SEQ ID NO: 77673

SEQ ID NO: 360441 - DNA, 201 bp, Homo sapiens
gggtgggaggaagtggactctgggccaagctccctttgttcaaacaccagctgtgctgacttttgctgtgagtcacttggtctcagttttctcatctgtgwaacaggaataataacagctcttctcaggactcatggcctggagctttggtaagcaggagattgtcatcaatgaccctcactcctctctccccacttccca

SEQ ID NO: 360442 - DNA, 201 bp, Homo sapiens
caggaataataacagctcttctcaggactcatggcctggagctttggtaagcaggagattgtcatcaatgaccctcactcctctctccccacttcccagakactctgacccatggatcccctgggcccggccaagccacagtggtcgtggcgctgctgtctgaccacgctgctgtttcagctgctgatggctgtgtgtttc

SEQ ID NO: 360443 - DNA, 201 bp, Homo sapiens
ctcacacctgtaatcccagcactttgggaggccgaggcaggcggatcacaaggtcaggagatcgagaccatcctggccaatatggtgaaacccgtctctaytaaaaatacaaaaatttgctgggcgtggtggtgcatgcctgtaatcccagctacttgggaagctgaggcaggagaatcgcttgaaccagagagtcggagg

SEQ ID NO: 360444 - DNA, 201 bp, Homo sapiens
ccttcatggctgggtgattctccctgggggcggtttccgatctgcgccctccagctttgcggggggtggggggatgcgggctgagcctgggaagggacacygtggttagagggtggtcctaagggcagacgtgtgggaaggaggggagggggcccagctaaggagaagggttgtagccttgggaacccccagtctgagggg

SEQ ID NO: 360445 - DNA, 201 bp, Homo sapiens
tctgaggccccgggcttttcagactccctccatccccactgccccgctgtgcagtggagcctcagtttccctatccaagaaatgaatcggggtgtttgggyttctcagaatgcagaggagcagcaggtaccgcagcctactgcatccgaagcctgtgtggggaccccactccatggagtggcagcagctactgtcaaggcc

SEQ ID NO: 360446 - DNA, 201 bp, Homo sapiens
tttttagtagaaacgaggttccaccatgttggccagactggtctaaaactcctgacctcaagtgatccgctcgcttcggcctcccaaagtgctgggattayaggcgtgagccaccgcgcctggccaaacttttatattttttagtagagacagggtttcaccatgttggccaggctggtctcaaactcctcacttcaggtg

SEQ ID NO: 360447 - DNA, 201 bp, Homo sapiens
gagctcttatattacctccaaaacccaatcccattgtgcccttccccagcagagtcatgggttcaagcctcgactcaggggcactggggggcatttatgaycggctgtgtcttctctccagattgaggaagagtctggggacacaccagaaaaggacaggatcaaggtgggacctgagggcccttggggcctctcccaact

SEQ ID NO: 360448 - DNA, 201 bp, Homo sapiens
agcaggactggagtggccaggactgtgctggggggttagggggcacacccaaccccagaggggtgcatcgaagcagacatttgtgggcttgcccgatacartacaggtgcccggctaaatctgaattccatataaacaatgaataatcttttttttttttttgagacggagtctcgctctgtcgcccaggctggagtgcag

SEQ ID NO: 360449 - DNA, 201 bp, Homo sapiens
agtctcactcttgtccctcaggctggagtgcagtggcgcaatctcagctcactgcaacctctgcctcccgggttcaagcgattctccggcctcagcccccygagtagctgggattacaggcacctgccagcatgactggctaatttttgtatttttaatagagacagggtttctccctgttagctatgctggtctcaagct

SEQ ID NO: 360450 - DNA, 201 bp, Homo sapiens
ggggcggcgtggagcctggcggccggccaggtgtaaacatttacaccgagcactgaaagccgggctggatgcgggtcagcacctccgggcctgggctcgaytcatggggttcccaggcgccccccaaatgcgtgcaccttgtacctccagccttgcaccacccagagatttatttgcatgggatttgcatttcatttgcat

SEQ ID NO: 360451 - DNA, 201 bp, Homo sapiens
ctggtctcaagctcctgaactcaagtgatccgcccaccttggcctcccaaagtgctgggattacaggcatgagccaccgcacccagcctcctctctctctttctcttctttctttcctttttctttctttcttctctctcttttctcttcctttctttcctttctttctttctctctctctctttctttttttttgagaca

SEQ ID NO: 360452 - DNA, 201 bp, Homo sapiens
tggtctcaagctcctgaactcaagtgatccgcccaccttggcctcccaaagtgctgggattacaggcatgagccaccgcacccagcctcctctctctctttctcttctttctttcctttttctttctttcttctctctcttttctcttcctttctttcctttctttctttctctctctctctttctttttttttgagacag

SEQ ID NO: 360453 - DNA, 201 bp, Homo sapiens; identical to SEQ ID NO: 77655

SEQ ID NO: 360454 - DNA, 201 bp, Homo sapiens
tcaagctcctgaactcaagtgatccgcccaccttggcctcccaaagtgctgggattacaggcatgagccaccgcacccagcctcctctctctctttctcttctttctttcctttttctttctttcttctctctcttttctcttcctttctttcctttctttctttctctctctctctttctttttttttgagacagggtct

SEQ ID NO: 360455 - DNA, 201 bp, Homo sapiens; identical to SEQ ID NO: 77657

SEQ ID NO: 360456 - DNA, 201 bp, Homo sapiens
tgatccgcccaccttggcctcccaaagtgctgggattacaggcatgagccaccgcacccagcctcctctctctctttctcttctttctttcctttttctttctttcttctctctcttttctcttcctttctttcctttctttctttctctctctctctttctttttttttgagacagggtcttgctctgtcacccaggctg

SEQ ID NO: 360457 - DNA, 201 bp, Homo sapiens; identical to SEQ ID NO: 77660

SEQ ID NO: 360458 - DNA, 201 bp, Homo sapiens
tccgcccaccttggcctcccaaagtgctgggattacaggcatgagccaccgcacccagcctcctctctctctttctcttctttctttcctttttctttctttcttctctctcttttctcttcctttctttcctttctttctttctctctctctctttctttttttttgagacagggtcttgctctgtcacccaggctggag

SEQ ID NO: 360459 - DNA, 201 bp, Homo sapiens; identical to SEQ ID NO: 77662

SEQ ID NO: 360460 - DNA, 201 bp, Homo sapiens
ccgcccaccttggcctcccaaagtgctgggattacaggcatgagccaccgcacccagcctcctctctctctttctcttctttctttcctttttctttctttcttctctctcttttctcttcctttctttcctttctttctttctctctctctctttctttttttttgagacagggtcttgctctgtcacccaggctggagt

SEQ ID NO: 360461 - DNA, 201 bp, Homo sapiens; identical to SEQ ID NO: 20689

SEQ ID NO: 360462 - DNA, 201 bp, Homo sapiens; identical to SEQ ID NO: 77665

SEQ ID NO: 360463 - DNA, 201 bp, Homo sapiens
cccaccttggcctcccaaagtgctgggattacaggcatgagccaccgcacccagcctcctctctctctttctcttctttctttcctttttctttctttcttctctctcttttctcttcctttctttcctttctttctttctctctctctctttctttttttttgagacagggtcttgctctgtcacccaggctggagtgca

SEQ ID NO: 360464 - DNA, 201 bp, Homo sapiens; identical to SEQ ID NO: 77666

SEQ ID NO: 360465 - DNA, 201 bp, Homo sapiens
accttggcctcccaaagtgctgggattacaggcatgagccaccgcacccagcctcctctctctctttctcttctttctttcctttttctttctttcttctctctcttttctcttcctttctttcctttctttctttctctctctctctttctttttttttgagacagggtcttgctctgtcacccaggctggagtgcagtg

SEQ ID NO: 360466 - DNA, 201 bp, Homo sapiens; identical to SEQ ID NO: 77667

SEQ ID NO: 360467 - DNA, 201 bp, Homo sapiens
gggttggcctccgtgccaggagtcacagggaaccgcccccatctgggggtcccggagtgccttcctgaggagccgatgacaaggtccagacttgaataaaygtaggagttggccaggcagaggagaatggcatcacaggcaggggacacagccagtgcaaaggccccgaggccagactgagtgtggcgtatcccaggaaca

SEQ ID NO: 360468 - DNA, 201 bp, Homo sapiens
cttggcctcccaaagtgctgggattacaggcatgagccaccgcacccagcctcctctctctctttctcttctttctttcctttttctttctttcttctctctcttttctcttcctttctttcctttctttctttctctctctctctttctttttttttgagacagggtcttgctctgtcacccaggctggagtgcagtggt

SEQ ID NO: 360469 - DNA, 201 bp, Homo sapiens; identical to SEQ ID NO: 77669

SEQ ID NO: 360470 - DNA, 201 bp, Homo sapiens
aactcctgggctcaagctatccttccactttggcctcccaaagagctgggattacaggcgtgagtcactgtacctagctctcactccccttgcaatctcascttggagggtgcctcctccagggagccttccatggctgcctaccctattcacttcaacctctggctggtgcaggggcgctagtgggcccccaggaatgcc

SEQ ID NO: 360471 - DNA, 201 bp, Homo sapiens
ctcttgccactgcccatgggtagaggatgccaggccgtgaagccagaacatgccagtggggaagtgcctgtgtgtgtgaacgccgcggcatacatgtgttygcgcgcctgtgcctctgttttccccaagtgctgatagctcgagggctcacagctgggcctgttcctagggcagcctcctggtctcctgttcctagatcgc

SEQ ID NO: 360472 - DNA, 201 bp, Homo sapiens; identical to SEQ ID NO: 77648

SEQ ID NO: 360473 - DNA, 201 bp, Homo sapiens
caggcgccaccatgccttgccctgaataatcttttaggatgtctgtccctgcctccctgcaagggggctggctggccctatctttaaaaaacctatgacamcccccccacctcccactccactgcctgaaattctaccccttacgttgggggtatctgaccccacacagaggaggagcttacactgggccaggcgggcaat

SEQ ID NO: 360474 - DNA, 201 bp, Homo sapiens
tgtctctgtctcccgagtagctgggactacaggcatgtgccaccatgcccagctaattgttgtatttttagtagacatgtgggttctccatgttgaccacrctggtctcaaactcttgacctcaagttatccgccctcctctgccttccaaagtgctgggaatacagtcgtgagccaatgcacccggccctgagtgcttat

SEQ ID NO: 360475 - DNA, 201 bp, Homo sapiens
gaagtccacacagcagagaggtgcagtcaggaacaagctggggaaactgggtccacctagacctcagtctcttcatcccagaagcgagaggtgcagtcagsgacaatctggggaaactgggcccacctagacttcagtgtcttcatcccagaagcccgcaccgcggagaggtgcggaagggaacaagctggggaaacgggg

SEQ ID NO: 360476 - DNA, 201 bp, Homo sapiens
gagccaccgcacccagcctcctctctctctttctcttctttctttcctttttctttctttcttctctctcttttctcttcctttctttcctttctttctttctctctctctctttctttttttttgagacagggtcttgctctgtcacccaggctggagtgcagtggtgtgatcacagctcactgcagcctccacctccta

SEQ ID NO: 360477 - DNA, 201 bp, Homo sapiens
tcttgctctgtcacccaggctggagtgcagtggtgtgatcacagctcactgcagcctccacctcctaggctcaagcgatcctcccacctcagcctcccaartagctaggactgactacaggcatgagccaccatgcctggctaatttttaattttttttgtttttgtttttgtttaatagagaggggaatctcacaacgtt

SEQ ID NO: 360478 - DNA, 201 bp, Homo sapiens
agccaccgcacccagcctcctctctctctttctcttctttctttcctttttctttctttcttctctctcttttctcttcctttctttcctttctttctttctctctctctctttctttttttttgagacagggtcttgctctgtcacccaggctggagtgcagtggtgtgatcacagctcactgcagcctccacctcctag

SEQ ID NO: 360479 - DNA, 201 bp, Homo sapiens
gtgtgatcacagctcactgcagcctccacctcctaggctcaagcgatcctcccacctcagcctcccaagtagctaggactgactacaggcatgagccaccrtgcctggctaatttttaattttttttgtttttgtttttgtttaatagagaggggaatctcacaacgttgcccaggctggtctcaaactcctgggctcaag

SEQ ID NO: 360480 - DNA, 201 bp, Homo sapiens
tttttttttgagacagagtttcactctgttgcccaggctggagtgtggagcacagtggtgcgatctcggctcactgtaacctccacctcctgggttcaagygattctcctgcctcagcctcccaagtagctgggattaaaggaatgtgccaccatgtctaagtaattttttttttttttttgagacggagtctcactctgt

SEQ ID NO: 360481 - DNA, 201 bp, Homo sapiens
caagtagctaggactgactacaggcatgagccaccatgcctggctaatttttaattttttttgtttttgtttttgtttaatagagaggggaatctcacaaygttgcccaggctggtctcaaactcctgggctcaagctatccttccactttggcctcccaaagagctgggattacaggcgtgagtcactgtacctagctct

SEQ ID NO: 360482 - DNA, 201 bp, Homo sapiens; identical to SEQ ID NO: 77659

SEQ ID NO: 360483 - DNA, 201 bp, Homo sapiens
ggattacaggcgagagccaccgtgcctggccatcatcccctttattcttaatgatcacctactttatgtccaaccccattttacaaacttaacacagatasagtcattccaaccttacaagcgtcctaagaagcaggtaatacccccacttttttttttctttcttgagacaggatctcactctgttgcccaggctggagt

SEQ ID NO: 360484 - DNA, 201 bp, Homo sapiens
tccgcctcccaggttcaagcaattttcctgcctcagcctcccgagtaggtaggattacagccataagccaccatgcctggttaatttttttgtatttttaktagaaacgaggttccaccatgttggccagactggtctaaaactcctgacctcaagtgatccgctcgcttcggcctcccaaagtgctgggattataggcgt

SEQ ID NO: 360485 - DNA, 201 bp, Homo sapiens
aacaaacaaacaaacataaaaagtacaggtgaagaagtagatttgcccatccaagatgttctgaaggtactcaaaagtttcccaattactgcctgtaataycagtcattgctttttttctttttgagtatctgtttcttgtgtgcttttttgtggtttttgttttctgtgtttttattttttgttgttatttatttattta

SEQ ID NO: 360486 - DNA, 201 bp, Homo sapiens
caaactcctcacttcaggtgatccgcccgcctctgcctcccaaagtgctggaattataggcatgaaccactgtgcccagcctccatctgtttttttttttwaattaaaaaaaattttttttaatagagacaaagtctcgccatgttacccaggctggtctcgaactcctggcctcaagcgatcctcccttctttgcctccc

SEQ ID NO: 360487 - DNA, 201 bp, Homo sapiens
cacctcccactccactgcctgaaattctaccccttacgttgggggtatctgaccccacacagaggaggagcttacactgggccaggcgggcaatccgggcrtccagggttcgaggcaggcggtgcagggggaccagcgcaggtccgaggcggtggctgagaagcaggccctctcgacacatccagatggacagcacggagc

SEQ ID NO: 360488 - DNA, 201 bp, Homo sapiens; identical to SEQ ID NO: 77668

SEQ ID NO: 360489 - DNA, 201 bp, Homo sapiens; identical to SEQ ID NO: 77670

SEQ ID NO: 360490 - DNA, 201 bp, Homo sapiens
tgagctttacccattcgggcaccagttacttggtgctgtgagtgcctggtggcatcctcctcactgcatacagtcggtgtttaataactcacgtgtacacrcccaccacactcgactccgtctgggctcctcccgagcgtcccgcggcccccagcccgagtttacattccccctcctggctgcctagtgtggggcggcgtg

SEQ ID NO: 360491 - DNA, 201 bp, Homo sapiens
gaatttgcaggggaagtcgattctcccccagggccagcccagctggttcagtggctcagagtaggcgctcatagacatttgctgaatgatgaatgaatgartgaatgaatgaatgaacacaaagaagctaggctgacgggtgcagtggctcatgcctgtagtaatcccagcactttgggaggctgaggagggcagatcacc

SEQ ID NO: 360492 - DNA, 201 bp, Homo sapiens
tgcagggggtgggagggagccccctaccctctctgtacccctgcaaacgaagacccttgctgggacgccaggcctagacggcttctcgtctcactcccagrtcccaaatttccccaccctcttgctgagctgctcatgcaccctctctgggcggcactggggggcacgtacacactcacacccctacgctggtccaaaacc

SEQ ID NO: 360493 - DNA, 201 bp, Homo sapiens; identical to SEQ ID NO: 77672

SEQ ID NO: 360494 - DNA, 201 bp, Homo sapiens
accctctctgggcggcactggggggcacgtacacactcacacccctacgctggtccaaaacccctttctgaaccctgagcctatattggctgcccagaacmtggtccatcctttctgggccgctttccagcccgtctcaccttgagctgagctgaccggggtctctaactcacctcctctgggcccctctctcaccccatt

SEQ ID NO: 360495 - DNA, 201 bp, Homo sapiens
aggttcaagtgatgctcatgtctctgtctcccgagtagctgggactacaggcatgtgccaccatgcccagctaattgttgtatttttagtagacatgtggrttctccatgttgaccacgctggtctcaaactcttgacctcaagttatccgccctcctctgccttccaaagtgctgggaatacagtcgtgagccaatgcac

SEQ ID NO: 360496 - DNA, 201 bp, Homo sapiens
ctctgcctccctgggttcaagtgattctcctgcctcagccacccgagtagcacaggtgcctgccaccgggtccatctaatttttgtatttttagtagagayagggtttcaccatgttggccaggctggtctcaaactcccaacctcgtgatcctcccgccttggcctcccgaagtgctgggattacaggcgtgagctgccg

SEQ ID NO: 360497 - DNA, 201 bp, Homo sapiens
agagggagataaacaagggaggtgacatctacagaccggttagctgagattacagtacattggggctccaagtgcacagaatctgaacatcatgttcatcytaggacaagtgttgcagaggcttcctgaagaggttcattctgaggcttaccttgaaggatcatcaggaattaatgatgagtgtattaagccattctcgca

SEQ ID NO: 360498 - DNA, 201 bp, Homo sapiens
ctaattcaaagtctggtacagtttgaaccaaaacaaaaaaggaatgatgtttcactttggagtcaagattcattcattttctaacattaatcattttcgtwatacagtaagtctatattcatgataaaaaatagaaaatatgaataagcaaaactaaattgaaaggaaaaccatctgtgatctgccaattagaaaatctct

SEQ ID NO: 360499 - DNA, 201 bp, Homo sapiens
taaagactgaaaagtagaaaagaaaggggaagaagagtgcctcaaggattgccattggaggttcttttgctggggctgattgccagctgagattattcaarccccagagcaaacattctgctcctgctcccttagagctgccctcccaccgctcagtattgcctcctgcgaggggcgggctggctgccgcagacaccagtg

SEQ ID NO: 360500 - DNA, 201 bp, Homo sapiens
tttaatttctgtgattatatgtattgaaaatgtgtaaatcagtagtacatggatacactttataaatacatatacatatattagagtagtgctcaaaaatkttttattatgcacatgcagttgtaagaatatgtacagagaccacatgtaccatttacccagtttcacacaaacttgcatcttgcaaaactatagtcataa

SEQ ID NO: 360501 - DNA, 201 bp, Homo sapiens
ggattggcatttttcactcaccatacttctcgggcaattcatctaaactgttgtatcaatagttggttcatttttattgctgagtggtattccacgtatgwaggtaccacaatttgtttaaccattcaccagctgaggacatgtagattctttgcagttaggagctattatcaataaagcaactaatgatgttgaatatta

SEQ ID NO: 360502 - DNA, 201 bp, Homo sapiens
tgctctttttaaatgggactcagattacaaccctttttcttaaaaccttgctatgttttctcattgccctatagttaaagcctgcatttctaaagcagtcycctggcttatctgaccttttcctactaccaggctgatctggggccacccctcctcattctgcttttccagaacagtgggttcctcaagcacacaccttat

SEQ ID NO: 360503 - DNA, 201 bp, Homo sapiens
catcttgatattgaaggagtattccatagtagagtaagaggggtagcaacctcacattgcttagagtaggggtgagggcaaggaagtagggggaaaacatratctatttcttttcttttcttttttccgatggaggagtcttgctctgcacccgcacctggccaatatgatttctttctttctttctttctttctttcttt

SEQ ID NO: 360504 - DNA, 201 bp, Homo sapiens
ccgatggaggagtcttgctctgcacccgcacctggccaatatgatttctttctttctttctttctttctttctttctttctttctttctttctttctttctttctctttctttctttctttctttctttctttctttctttctttcctttctttctttctttctttctttctctctttctctcctttcttccttccttcct

SEQ ID NO: 360505 - DNA, 201 bp, Homo sapiens
atggaggagtcttgctctgcacccgcacctggccaatatgatttctttctttctttctttctttctttctttctttctttctttctttctttctttctttctctttctttctttctttctttctttctttctttctttctttcctttctttctttctttctttctttctctctttctctcctttcttccttccttccttac

SEQ ID NO: 360506 - DNA, 201 bp, Homo sapiens
gctctgcacccgcacctggccaatatgatttctttctttctttctttctttctttctttctttctttctttctttctttctttctttctctttctttctttctttctttctttctttctttctttctttcctttctttctttctttctttctttctctctttctctcctttcttccttccttccttacttccttcctccct

SEQ ID NO: 360507 - DNA, 201 bp, Homo sapiens
tagaaggtgatggtaaaaataaatacaatgcaaacaaattaaaaagcattaaaggaaaattacaagtaacaaagtaatttttaaaacatgctaacaatcartctcagactttctctttgccttaattaggagaattaaaggagagctgaaatgggaatcatgtttttacgctgtgattcagtgctatttaaggctgtttcc

SEQ ID NO: 360508 - DNA, 201 bp, Homo sapiens
ctctgcacccgcacctggccaatatgatttctttctttctttctttctttctttctttctttctttctttctttctttctttctttctctttctttctttctttctttctttctttctttctttctttcctttctttctttctttctttctttctctctttctctcctttcttccttccttccttacttccttcctccctt

SEQ ID NO: 360509 - DNA, 201 bp, Homo sapiens
ctttctttctttctttctttctttctttctttctttctttctttctttctttctctttctttctttctttctttctttctttctttctttctttcctttctttctttctttctttctttctctctttctctcctttcttccttccttccttacttccttcctcccttccttcctttctgtctttctgtctttctttctttc

SEQ ID NO: 360510 - DNA, 201 bp, Homo sapiens
tttctttctttctttctttctttctttctttctttctttctttctttctttctctttctttctttctttctttctttctttctttctttctttcctttctttctttctttctttctttctctctttctctcctttcttccttccttccttacttccttcctcccttccttcctttctgtctttctgtctttctttctttct

SEQ ID NO: 360511 - DNA, 201 bp, Homo sapiens
ttctttctttctttctttctttctttctttctttctttctttctttctttctctttctttctttctttctttctttctttctttctttctttcctttctttctttctttctttctttctctctttctctcctttcttccttccttccttacttccttcctcccttccttcctttctgtctttctgtctttctttctttctg

SEQ ID NO: 360512 - DNA, 201 bp, Homo sapiens
taccttctgtcatcacttcccttggctaagaaaggggattccctgaccccttgcacttcctgggtgaggcgatgccctgccctagttcagctcacacttcrtgggctgcacccactgtccaacaagccccagtgcgatgaacgcggtacctcagttggaaatgcagaaatcacctgtcttctgcgttgctcatgctgggag

SEQ ID NO: 360513 - DNA, 201 bp, Homo sapiens
tttttggcttatatttttccttcttccccatatgccagccctactttcttctttcaattcttcaaagtcagtcatctctgagggtgcatatacccccagaraatgcccaagatgattcactgggatgaggaaaaaaaatactagaacttccttttatatttatttgtgattatatatttttaatttctgtgattatatgta

SEQ ID NO: 360514 - DNA, 201 bp, Homo sapiens
atgataacattaatagagatcctcctccagtgaatgtcaccagcctcccagttgctcaactgagaaaccttgaccttttcctcaacccctaacacccaaayaccaagtggtattgatttcacttcctaaatatctcctcctttcctcattggattaagctactgtaatttgtcttcatgtttatatcatttcccccatagc

SEQ ID NO: 360515 - DNA, 201 bp, Homo sapiens
ctgaggcaggaaaatcgcttgaacccaggagggggaggtggcagtgagccaagatcgtgccactgtactccagcctggtgacagagccagactctgtctcaaaaaaaaaaaagaaagaaagaaagaaagaaagaaagaaagaaagagcaggaggggagatagaaagcattgaggatgacagtttttagataagttggccag

SEQ ID NO: 360516 - DNA, 201 bp, Homo sapiens
gctaaagattggaccccaatcccttctggcttgtaaggtttctgctgaggggaagatttttatcaatgacataaatgtgtgatgatggaaacaatccagtrggaagagaaaattgatgcaggagagaagaaagaaagcttttttggagggctgctctttagtatatgagagtagatggaatctattcaacatgtaaaggag

SEQ ID NO: 360517 - DNA, 201 bp, Homo sapiens
tattgttttataggccctgtgagttttatgctttcaagaggttttattctgatgcatgtcaacttttggtttcaagatttagaagtccttttagaattttrtgtatggctggtctggtagttacaaattccttcatcatttgcttgtctggaaaagactttatttctctttcatttatgaaacttagttttgctggacaca

SEQ ID NO: 360518 - DNA, 201 bp, Homo sapiens
aaaggtggttttataatgaccttctttgtctttttcttttttttaactgttgttgctttaaagtctgttttatttaatataagaatagccactcctacccrggcacggtggctcacacctgtaaatcccagcactttgggaggctgaggcaggtatatcacctgaggtcaggagttcaagaccagccagacagagatggtg

SEQ ID NO: 360519 - DNA, 201 bp, Homo sapiens
accttcactgagatgggacattttggaaaatgcacgaagtgctgtgggaattcagagaggaagagagtatttcctgctggagagtgcagaaaaaaaacatmccgatgacatcgtaggtgggcagcatttcttgtcactggcaatgctgtaaaccctccttttccacatcttcaaaataaggtgctgggcctagaaactgac

SEQ ID NO: 360520 - DNA, 201 bp, Homo sapiens
caaactaggatggagatattactcaaatcaatctcatcaaaggcttgttggttaggggtttttcaaaggcagttttggggaagggattgggctgaccagaycaggtgcttgctgctgattgtttgggttggagatgaaatcatatggagttgaagctgtcctcttgtgctgagtcacttctgtggggccacaggagtggtt

SEQ ID NO: 360521 - DNA, 201 bp, Homo sapiens
tttctttctttctttctttctttctttctttctttctttctttctttctctttctttctttctttctttctttctttctttctttctttcctttctttctytctttctttctttctctctttctctcctttcttccttccttccttacttccttcctcccttccttcctttctgtctttctgtctttctttctttctgtct

SEQ ID NO: 360522 - DNA, 201 bp, Homo sapiens
ctttctttctttctttctttctttctttctttctttctttctctttctttctttctttctttctttctttctttctttctttcctttctttctttctttcyttctttctctctttctctcctttcttccttccttccttacttccttcctcccttccttcctttctgtctttctgtctttctttctttctgtcttgctctc

SEQ ID NO: 360523 - DNA, 201 bp, Homo sapiens
tctttctttctttctttctttctttctttctttctttctctttctttctttctttctttctttctttctttctttctttcctttctttctttctttctttytttctctctttctctcctttcttccttccttccttacttccttcctcccttccttcctttctgtctttctgtctttctttctttctgtcttgctctctct

SEQ ID NO: 360524 - DNA, 201 bp, Homo sapiens
ggagtgcagtggcacgatctcggctcactgcaaactctgcctcacgggttcacgccattctcctgcctcagcctccctagtagctggaactacaggcgccygccaccacgcccggctaattttttgtatttttagtagagatggggtttcactgtgttagccaggatggtcttgatctcctgaccttgtgatctgcccgcc

SEQ ID NO: 360525 - DNA, 201 bp, Homo sapiens
tctatactgaattgttttcataatcttcctgttgggacctaaattcttacagatatttgacagctttgtccacctctgaggttagagtcataaggaaaatktcaatgacaaaaatgtattcagtaaggatgaattagatggttaaataaacttggggaccactgaattaaacagacatttgtttgtgcgtgtggttttaaa

SEQ ID NO: 360526 - DNA, 201 bp, Homo sapiens
ctttctttctttctttctttctttctttctttctttctctttctttctttctttctttctttctttctttctttctttcctttctttctttctttctttctttctctctttctctcctttcttccttccttccttacttccttcctcccttccttcctttctgtctttctgtctttctttctttctgtcttgctctctctc

SEQ ID NO: 360527 - DNA, 201 bp, Homo sapiens
gaggcgatggtggagacaaggagagattgttgcttcttacagtgcgactcttaggtgattgatataagagaacctgcctattattttctttccttcttctraggcaagagtgacacttaaaaaaaaaaaaaaaacttaaccttcctcttgtccctaacaactgccacctctcacttacctccagtgctgggtaaatattta

SEQ ID NO: 360528 - DNA, 201 bp, Homo sapiens
tttctttctttctttctttctttctttctttctttctctttctttctttctttctttctttctttctttctttctttcctttctttctttctttctttctttctctctttctctcctttcttccttccttccttacttccttcctcccttccttcctttctgtctttctgtctttctttctttctgtcttgctctctctct

SEQ ID NO: 360529 - DNA, 201 bp, Homo sapiens
ttggcatctggccattgggctggatgccatgttccaggcagtagggctcccagcaggcattgccaacctggacaccagcctggccaatgagatggagatgyggtcacgcatgattactgcttcacggctgccgaggcgatggtggagacaaggagagattgttgcttcttacagtgcgactcttaggtgattgatataaga

SEQ ID NO: 360530 - DNA, 201 bp, Homo sapiens
ctttctttctttctttctttctttctttctttctctttctttctttctttctttctttctttctttctttctttcctttctttctttctttctttctttctctctttctctcctttcttccttccttccttacttccttcctcccttccttcctttctgtctttctgtctttctttctttctgtcttgctctctctctctc

SEQ ID NO: 360531 - DNA, 201 bp, Homo sapiens
ctttaaaaatggttagttagtgatttagggaattcaccctaaaaataaatcatatattggaaatactacaaccaaaaaaatgttcattgtcgtgttatttrtagtgtcgagaactagtaataacttatgggatccaatgatataggaatggtcaggtaaagcatatacactgggcagaagattccatagccatgagaaatc

SEQ ID NO: 360532 - DNA, 201 bp, Homo sapiens
agcagagatgacagggcatatgtgtccagacggaagtggatggggggataggccaccagcttggtctggaattctgtcagatcaacattcaggactccatsaaatctcagggaagcagtgatggaggacacaatttgacctatcaacctattcagtttagtataggttgggcgttcagtatcaaggttctatgccagatat

SEQ ID NO: 360533 - DNA, 201 bp, Homo sapiens
tttctttctttctttctttctttctttctttctctttctttctttctttctttctttctttctttctttctttcctttctttctttctttctttctttctctctttctctcctttcttccttccttccttacttccttcctcccttccttcctttctgtctttctgtctttctttctttctgtcttgctctctctctctcc

SEQ ID NO: 360534 - DNA, 201 bp, Homo sapiens
cagacaaaaataaatgtgtaaaatattcattgtattatgtagcgataagtgataagaaagaaaagagggccgggcgcggtcggtcacgcctgtaatcccarcactttgggaggccaaggtgggtggattatgagatcaagagatggaggccatcctggccgacatggtgaaaccacaattctactaaaaatacaaaaatta

SEQ ID NO: 360535 - DNA, 201 bp, Homo sapiens
acaaatgttttggaattcaccccatattgtctaatccaggatctcagaagggcagggctggaatgatctgtaaacatcataggttccaacattctcacttkccagtaaagatactgaacctagagagtggaaaagactggctcaaggtcacaaagacatttcgtgggaaagctgagactgtaaccatgttctgaccctgag

SEQ ID NO: 360536 - DNA, 201 bp, Homo sapiens
taggatgccctcatatgacatctcacattctaaatcctatccatacttcatgcccagcttggttctctctctctctctctcccccaccccccctctccgtktgtgtgtgtgtgtgtgtgtgtgtgtgtgtgtgtgtgagagagagagagagagagagagagagatgttcttcaatctcacatcagttatactgatattttg

SEQ ID NO: 360537 - DNA, 201 bp, Homo sapiens
ctatccatacttcatgcccagcttggttctctctctctctctctcccccaccccccctctccgtgtgtgtgtgtgtgtgtgtgtgtgtgtgtgtgtgtgtgagagagagagagagagagagagagagatgttcttcaatctcacatcagttatactgatattttgccttcagtaagatcccctagctcttattgcctctgt

SEQ ID NO: 360538 - DNA, 201 bp, Homo sapiens
aggaggtgattgtagagaagaggtctaagaactaagccttcaggtatccagcattgaaaaggaggctagggaggtgaaaaggaggctagggagatgaacasagctaaggagtcttaaatgaagtgacgagaagtaggaggaaagccaggagtgtgggttgtcctagaaaccaagtgaaaaaggtatttttaagaggaagat

SEQ ID NO: 360539 - DNA, 201 bp, Homo sapiens
tatccatacttcatgcccagcttggttctctctctctctctctcccccaccccccctctccgtgtgtgtgtgtgtgtgtgtgtgtgtgtgtgtgtgtgtgagagagagagagagagagagagagagatgttcttcaatctcacatcagttatactgatattttgccttcagtaagatcccctagctcttattgcctctgtg

SEQ ID NO: 360540 - DNA, 201 bp, Homo sapiens
ccttcctcccttccttcctttctgtctttctgtctttctttctttctgtcttgctctctctctctcccccttcctccctccctccctctcgagctcgctcyctttctttctttcctactttccttccttccttctttctttccttctttctatagtgaaaactgtctttatttttattgccttttattttcaacaatgatt

SEQ ID NO: 360541 - DNA, 201 bp, Homo sapiens
aggtctacttgttttagagtattgtttaagtcattgtttctttgttgactttctgcctcgatgatctgtctagtgctgtcagtggggtgttgaagtatccyactattattgggttgctcattatctctttccttaggtctagcagtaattgttttatgaattttggagctccatagttaggtacacatatattttggatta

SEQ ID NO: 360542 - DNA, 201 bp, Homo sapiens
gcccagtagattaacacttggttgtgtctttcttttttcccttccttcctgcctgccttccatccttccttccttccttttcttcctcccttcctttcttttccttccttccttccttcctttctttctgtttcttttttttttttttagacagagtcttcctctgtcacccaggatggagtgcagtggcatgatcttggc

SEQ ID NO: 360543 - DNA, 201 bp, Homo sapiens
cccagtagattaacacttggttgtgtctttcttttttcccttccttcctgcctgccttccatccttccttccttccttttcttcctcccttcctttcttttccttccttccttccttcctttctttctgtttcttttttttttttttagacagagtcttcctctgtcacccaggatggagtgcagtggcatgatcttggct

SEQ ID NO: 360544 - DNA, 201 bp, Homo sapiens
gtccctccaccagcctcattgccaccttgcagttcaatctcagactgctgtgctagcagtgagtgaggctccatgggcgtgggaccctctgagccaggtgygggatatgatctcctggtgtgccatttgctaggactgttggaagagcacagtattagggtgggagtgtcccgattttccaggtaccttctgtcatcactt

SEQ ID NO: 360545 - DNA, 201 bp, Homo sapiens
ccagtagattaacacttggttgtgtctttcttttttcccttccttcctgcctgccttccatccttccttccttccttttcttcctcccttcctttcttttccttccttccttccttcctttctttctgtttcttttttttttttttagacagagtcttcctctgtcacccaggatggagtgcagtggcatgatcttggctc

SEQ ID NO: 360546 - DNA, 201 bp, Homo sapiens
cagtagattaacacttggttgtgtctttcttttttcccttccttcctgcctgccttccatccttccttccttccttttcttcctcccttcctttcttttccttccttccttccttcctttctttctgtttcttttttttttttttagacagagtcttcctctgtcacccaggatggagtgcagtggcatgatcttggctca

SEQ ID NO: 360547 - DNA, 201 bp, Homo sapiens
ctaaggtcttactggccaaaactgtgtctcagagctatccctatctttgagggagaaagggaaactgggatcgccagctactataacagaaggcaaagaaaggagaagagagttagtagtgacgttgagtgagccaggctgcagtgatgtctgccacactatcacttattgatagggtggccatatgtcccagttcgtcag

SEQ ID NO: 360548 - DNA, 201 bp, Homo sapiens
ggttgtgtctttcttttttcccttccttcctgcctgccttccatccttccttccttccttttcttcctcccttcctttcttttccttccttccttccttcctttctttctgtttcttttttttttttttagacagagtcttcctctgtcacccaggatggagtgcagtggcatgatcttggctcactgcaacctccgcctc

SEQ ID NO: 360549 - DNA, 201 bp, Homo sapiens
taaggtcttactggccaaaactgtgtctcagagctatccctatctttgagggagaaagggaaactgggatcgccagctactataacagaaggcaaagaaaggagaagagagttagtagtgacgttgagtgagccaggctgcagtgatgtctgccacactatcacttattgatagggtggccatatgtcccagttcgtcagt

SEQ ID NO: 360550 - DNA, 201 bp, Homo sapiens
gttgtgtctttcttttttcccttccttcctgcctgccttccatccttccttccttccttttcttcctcccttcctttcttttccttccttccttccttcctttctttctgtttcttttttttttttttagacagagtcttcctctgtcacccaggatggagtgcagtggcatgatcttggctcactgcaacctccgcctcc

SEQ ID NO: 360551 - DNA, 201 bp, Homo sapiens
ttgtgtctttcttttttcccttccttcctgcctgccttccatccttccttccttccttttcttcctcccttcctttcttttccttccttccttccttcctttctttctgtttcttttttttttttttagacagagtcttcctctgtcacccaggatggagtgcagtggcatgatcttggctcactgcaacctccgcctccc

SEQ ID NO: 360552 - DNA, 201 bp, Homo sapiens
tgtgtctttcttttttcccttccttcctgcctgccttccatccttccttccttccttttcttcctcccttcctttcttttccttccttccttccttcctttctttctgtttcttttttttttttttagacagagtcttcctctgtcacccaggatggagtgcagtggcatgatcttggctcactgcaacctccgcctcccg

SEQ ID NO: 360553 - DNA, 201 bp, Homo sapiens
cgtaagcagtaaaattttatgcagtttcatgaaaagtcccatgtttcacatgcttaaattatggttcattgtctttacttgaaggttttgaaggtgggacsttcttctgaatctttctagtggttgaataaagtacatattctggggtgctactcacagtgaatttatggcttgtccaaataaatttactagcaataggtg

SEQ ID NO: 360554 - DNA, 201 bp, Homo sapiens
aaaaaaaaaaaaaaaaaaaaaaaagataactacatagctcaaaaaggtgtgattactgtcttattttaatacctctctctggacctaacaattaaaaggasttgcattcctcagataaaagttattttctttttttttaagttgaacaattttaattaagttactcgtaagcagtaaaattttatgcagtttcatgaaaag

SEQ ID NO: 360555 - DNA, 201 bp, Homo sapiens
aagcagatctcagaactttccttgaggctggatatttaactgcaagtctttgatctttgggggaaagggactagagatggttggaatcctgggtaaacacygaccttttagtattctagaggtgagatttaattcactgctaattagtgttggttttggctcccctagggaagtgtaaacataaagaaggcaaggagcagg

SEQ ID NO: 360556 - DNA, 201 bp, Homo sapiens
catttcaaccacttatttggtgcctgatatcattttttctaagtcctcctatttctggattcaaaactttgaaaaaaatctccattttctttctttctttytttctttctttctttctttctttctttctttctttctttctttctttctttctctttctttctttctttttctttcttgtttctttttctttcttgtttc

SEQ ID NO: 360557 - DNA, 201 bp, Homo sapiens
agtgaatattttctagtgtgacattttaattcctttagttattttaacagctttattgagatataattcagataccatacaattcactcatttaaagtatrcaactcaatggttttacatattcagagagttgtgcatacaccactactatcaattttagaacattttcattaccctaaaaagaaaccctgctttgcttag

SEQ ID NO: 360558 - DNA, 201 bp, Homo sapiens
taaatggtctggaatcagaaagttatatttaatccaaaaatgtggtcaaggtaggaaaaggattttgggagccgctggatggatggtttgcatgaagtgartattttctagtgtgacattttaattcctttagttattttaacagctttattgagatataattcagataccatacaattcactcatttaaagtatacaact

SEQ ID NO: 360559 - DNA, 201 bp, Homo sapiens
atctgaattccccagtaataactacagataggttatagagccctttatattcttggtttaaccctaggtttttagttgaaaaggtttaatttggggcaagyagtggtaccatttcaaatacttttatcagcaaatgttggtttctttaaagaaccgtaattcattacacatccacgatttctgagcttcaaattctaacat

SEQ ID NO: 360560 - DNA, 201 bp, Homo sapiens
atatttattcattctgttaggctggttggtgagctgatatagctgaaagagacaaagtaaagacatttggtcctagtctcatccctgccactgtctctttmcccctctgggtctgtttattccaatacaaaatgcgagattaaaaaatcctacaagcccctccccagtggactcctaaaagtcccctagtgtgcttgggta

SEQ ID NO: 360561 - DNA, 201 bp, Homo sapiens
aaggtcttactggccaaaactgtgtctcagagctatccctatctttgagggagaaagggaaactgggatcgccagctactataacagaaggcaaagaaaggagaagagagttagtagtgacgttgagtgagccaggctgcagtgatgtctgccacactatcacttattgatagggtggccatatgtcccagttcgtcagtg

SEQ ID NO: 360562 - DNA, 201 bp, Homo sapiens
gtgtctcagagctatccctatctttgagggagaaagggaaactgggatcgccagctactataacagaaggcaaagaaaggagaagagagttagtagtgacrttgagtgagccaggctgcagtgatgtctgccacactatcacttattgatagggtggccatatgtcccagttcgtcagtgcaaccccggtttacacctgtt

SEQ ID NO: 360563 - DNA, 201 bp, Homo sapiens
attctatgttcacccttcttattgagcacttgctatttattgtaggctctcattaagtagtagttattttattttattttattttttgagatggagtctcrctctgcctcccaggctggagtgcagtgacgcgatctcggctcactgcaaactccgcctcccaggttcacgccattctcctgcctcagcctcccgagtagc

SEQ ID NO: 360564 - DNA, 201 bp, Homo sapiens
ttgctatttattgtaggctctcattaagtagtagttattttattttattttattttttgagatggagtctcactctgcctcccaggctggagtgcagtgaygcgatctcggctcactgcaaactccgcctcccaggttcacgccattctcctgcctcagcctcccgagtagctaggactacaggtgcccgcctccatgccc

SEQ ID NO: 360565 - DNA, 201 bp, Homo sapiens
cgcgatctcggctcactgcaaactccgcctcccaggttcacgccattctcctgcctcagcctcccgagtagctaggactacaggtgcccgcctccatgccyggctacttttttgtatttttagtagagacggggtttccccgtgttagccaggatggtcttgacctcccgacctcgtgatctgcccgcctcagcctcccaa

SEQ ID NO: 360566 - DNA, 201 bp, Homo sapiens
tgctgctggctccatgtcctgagattttcaatggcgcctcacaattctcatcatctagacacaatctattgctggttgctcttcagctccagcctttcgaygactgttttgcttctgctggaatgtttgttggtagcctttagttttgctcctaaccgccttccaccatccccccagccccaccgccccgccatagctcct

SEQ ID NO: 360567 - DNA, 201 bp, Homo sapiens
ttgggggagaaaaaaagaaaatccaagaaagtaaattaggagggtcttgaaggctgaataagaaacgagcaagtgctagtcctggcctccctggtgcagckcactccctgcctgctgcagcctgactcggccccccagtctcccaaggccactcccccaggtatggcacagggcctcgcctcactaaggcagcagcacagc

SEQ ID NO: 360568 - DNA, 201 bp, Homo sapiens
ttttagtagagacggggttttactgtgttagccaggatggtctcgatcttctgaccttgtgatccgcccgcctcgacctcccaaagtgctgggattacagrcatgagcttccgcgcccggcctgcttgtttttactactactatttatttggtgcctaccatatcctaggttgcactacatactagggaatattgaaaata

SEQ ID NO: 360569 - DNA, 201 bp, Homo sapiens
ctgttacactgaataaaatgctagcaacactactctaacaccaactaaaacaatggctacttccatctgggtgtgatggctcatgcttacaatctcagcastttgtgaagccaaggtagtggggaccactggagcccaggagtcaagaccagcctgggcaacatagcaagactctatttctacaaaaaatacaaattaaaa

SEQ ID NO: 360570 - DNA, 201 bp, Homo sapiens
ctcaggaggctgaggcaggagaatcacttgaacccaggaggcaaaggttgcagtgagccgagattgcgccactgtactctggactgggtgatagagcgagwacctttctcaaaaaagaaaaagaaaagaaagaggaaagaaagaaagaagacttggatcctggcaaaagagattatgggaggggggtggaaaggaattctg

SEQ ID NO: 360571 - DNA, 201 bp, Homo sapiens
aactcaaaattcaagcaaagctaaccatataagactaacaaaaacaaaattcggatttttcttaggatgattacctagatgcattgagaaatatatatatkgaatataaaagtattttaagacttttatttccgcctctcttggatgcgcctggtctgctggtgccttaaagcatgtgcatctctacctactgtgggatcc

SEQ ID NO: 360572 - DNA, 201 bp, Homo sapiens
agggcccttcaagtggctcttctgtagccacctcctaaccccctataccctgtccctgactcctgccagccactaatccgttctccatttctataattttktcattccaagaaaattatatacaagaaatcatacagtagtaaccttttaggattggcatttttcactcaccatacttctcgggcaattcatctaaactgt

SEQ ID NO: 360573 - DNA, 201 bp, Homo sapiens
tatatcatattctggaatattggctgctaagccccaacaggatgtttgtgagacctcaagtacttggagacatctcaaatatagggcatatggagggcggyaagtgggaacaggggagatgagaaatgaagctagaaataaagccaagaactagatcttgaggagctttctagaccatgcaatggaaatctaattttatcc

SEQ ID NO: 360574 - DNA, 201 bp, Homo sapiens
caaatgatttcaaaatggtaaaatatactttcaaatgagatgaatttgctaattattctccctgagggtgcacctgcctgagaaggattataactgaggaytagctgtcttgaaccttgttgccacacacagagaatactcagcttttcttttaaggaaaccaatgcctggccttgccaaccaatgaaaaggttgcctaag

SEQ ID NO: 360575 - DNA, 201 bp, Homo sapiens
aaaaaaacacgaacaacaacaacaaaaaaacaaaaacaaggcatgtcaaagaatcttcctttctaattctcctgcctgctcttgctactgtcactgacttrtgccatcccaggctgatgctggacttcatggcagtggcctgtttcgtagtgttaggttccactgcacaccagagggaggcagcaagtggaattgggtgaa

SEQ ID NO: 360576 - DNA, 201 bp, Homo sapiens
atctaccatcacatcttgatgttacagaaagaatggggacttggagctgggtgtggtagctcacgcctgtaatcccagcactttgggaggccaaggcaggyggatcacttgaggtcgggagttggagaccagcctggctaacatggtgaaacccccatctctacacaaaatacaaaaattagccaggcatgatggcaggtg

SEQ ID NO: 360577 - DNA, 201 bp, Homo sapiens
atcattttttctaagtcctcctatttctggattcaaaactttgaaaaaaatctccattttctttctttctttctttctttctttctttctttctttctttctttctttctttctttctttctttctctttctttctttctttttctttcttgtttctttttctttcttgtttccttttcttttcttttcttttcttttctt

SEQ ID NO: 360578 - DNA, 201 bp, Homo sapiens
ctcctatttctggattcaaaactttgaaaaaaatctccattttctttctttctttctttctttctttctttctttctttctttctttctttctttctttcyttctttctctttctttctttctttttctttcttgtttctttttctttcttgtttccttttcttttcttttcttttcttttcttttcttttcttttctttt

SEQ ID NO: 360579 - DNA, 201 bp, Homo sapiens
tctttttgagacggagtctcgctctgtcacccaggctggagtgccgtggcacattctctgctcactgtaacctccacttcccaggttcaagtgattctccwgcctcagcctccagagtagctgggattacaggtgcctgccaccacgcccggcttatttttgtatttttttagtagagcttgggttttgccatattggcca

SEQ ID NO: 360580 - DNA, 201 bp, Homo sapiens
aagcaatccttccccctcaacctcttgagtagctggggctataggtgcacgctaccatgcccatgcccagctttttttttttttttttttttttggtaaaracaaggtttcactatgttgcccagcctggtctcaaactcctgggctcaagcaatcctctcactttggcctcccaaagtgctgggattacaagcatgagcc

SEQ ID NO: 360581 - DNA, 201 bp, Homo sapiens
gatcacagtagagatatatgcatatttttagcccttaaaccaagaaaatctctgttgtaattataagtaggcaaaacaatatcatcatcaacaataaaaacacacccagaagtatacatggtaaacttgaaagaacttgaattccccacttctaccccaatttcatttccctccttcctggcaacaactgggccttcattt

SEQ ID NO: 360582 - DNA, 201 bp, Homo sapiens
aaactgttaaggggaaaaaactgtaaggagaaagcagattaatagaaagaaagtaaaagcgaaaacatcaagtgaaaagagggttgcacagaaggaaaacraagttgcagaataggaaactaagaagaactccactcttcatcttccacagagaacactgatggttttccagaaagcagtcagtaccctatttagcaaaat

SEQ ID NO: 360583 - DNA, 201 bp, Homo sapiens
ctaaggcaccagaccaaatctggagcgtttgttacaagggcagaagaccggcgtgatctccccacgcgcgccggccggtgctgctggtggagggaactgayatctaacgcatgtggcccaggagaacaaaaccttccattgcaccccacgccgcgactctccccagcgaaaggtgcttcttttggaagaccgcacgaagta

SEQ ID NO: 360584 - DNA, 201 bp, Homo sapiens; identical to SEQ ID NO: 77763

SEQ ID NO: 360585 - DNA, 201 bp, Homo sapiens
tgagccaccgcgcctggccggattagttttaaatatgctaatggaatcattcactgttgctccatgaacactatgatttttcaatgtcattaaatatagatttttaaaatatatttatgtgtatatattatctatatatgtgtatttattatctatactctcatcttttaaagaggacatattgtttcacatatagctgtg

SEQ ID NO: 360586 - DNA, 201 bp, Homo sapiens
cccaggatggaaatgtaaaaggattggggtggtgtggaagtgggaggatcaacaggattgggtgaggggaaggtagaggacaggaatggcacctaggtttyctgcttggccaacggatcgcacatcatttctgggtttctgttccttatccttcccaacacatggcagaggtctcctcccagacaggaatggtcccaacct

SEQ ID NO: 360587 - DNA, 201 bp, Homo sapiens
cgatacaagtagctccttgaggacaggaactatgtcttatgcattttatgcccagcacagtgcttagcatgtagtagatgctcagtaaatgttgaataaayggatgaagcattctgtggttagtgcagatcttggaggaggaggcatgagagtttcagtccctttgctttccaagtggacagacactacctctggctcact

SEQ ID NO: 360588 - DNA, 201 bp, Homo sapiens
gaagttgtctgtctaagatccacacccaccaaggtctttgggaacgaccatggggactggggggaatgtcagtgagaccttgcggtttcttcagttcagcrtgtcaatatatcatattctggaatattggctgctaagccccaacaggatgtttgtgagacctcaagtacttggagacatctcaaatatagggcatatgga

SEQ ID NO: 360589 - DNA, 201 bp, Homo sapiens
caatatatcatattctggaatattggctgctaagccccaacaggatgtttgtgagacctcaagtacttggagacatctcaaatatagggcatatggagggsggcaagtgggaacaggggagatgagaaatgaagctagaaataaagccaagaactagatcttgaggagctttctagaccatgcaatggaaatctaatttta

SEQ ID NO: 360590 - DNA, 201 bp, Homo sapiens
ctgactccctgccacccatccaagtggtgtgggctgaggcagctgtcttttcgggtctcctgaactagctgctcattagatcttttctccctaatcctaargccatcaagaagctttctgtgtctctatttgttggaattatctagttgggataatatatggatacacttgattacataattgcactgaaatttttctttt

SEQ ID NO: 360591 - DNA, 201 bp, Homo sapiens
tagtagagatagggtttcaccatgttggtcagactggtcctgaactcctgacctcaagtgatctgcctgcctcggcctcccaaagtgctgggattacaggygtgagccaccgtgcccggcctcctctgtctatttttaattgggtgatatattagtatattttgcattgctataaaggaatacctgagactggataattta

SEQ ID NO: 360592 - DNA, 201 bp, Homo sapiens
aagcatccacctttgccagagggtgtattcaggcaactggtaactatgccaccatttcaaccacttatttggtgcctgatatcattttttctaagtcctcstatttctggattcaaaactttgaaaaaaatctccattttctttctttctttctttctttctttctttctttctttctttctttctttctttctttctttc

SEQ ID NO: 360593 - DNA, 201 bp, Homo sapiens
ttactttttaattaatcttatttcaaaaaggtatttaatgttattacaacaataaaaaccagtatcacttactatgaatagaaggtgatggtaaaaataartacaatgcaaacaaattaaaaagcattaaaggaaaattacaagtaacaaagtaatttttaaaacatgctaacaatcaatctcagactttctctttgcctt

SEQ ID NO: 360594 - DNA, 201 bp, Homo sapiens
tagcagctttcttggagcccaagagaaagtatgatacataaagatttgaggcttaacaaactctgggatgtagtgacatcttgggagtcctagttacaagstccttggtgtcagatactatatcacattgatccttaaagttcctccatgtgtgttataaataataaacactcgacaaatatttggtgagttaagttagta

SEQ ID NO: 360595 - DNA, 201 bp, Homo sapiens
tttaattcctttagttattttaacagctttattgagatataattcagataccatacaattcactcatttaaagtatacaactcaatggttttacatattcagagagttgtgcatacaccactactatcaattttagaacattttcattaccctaaaaagaaaccctgctttgcttagccagctttaccaatctctcccctc

SEQ ID NO: 360596 - DNA, 201 bp, Homo sapiens
gcctctcctccccgcgacccaaggaagaaaggaagccctgccacggggtgtctgcgaagtggggtcagaagaaggttaggcgctttctggggcgtaccccyacacctgcccaggccgatccgcaagcgagaggagggggcattagagccagggcgagagcgtgctcgcgcgtgtgtgcccgtgtcatgtgtggtgcccgtg

SEQ ID NO: 360597 - DNA, 201 bp, Homo sapiens
ttaattcctttagttattttaacagctttattgagatataattcagataccatacaattcactcatttaaagtatacaactcaatggttttacatattcagagagttgtgcatacaccactactatcaattttagaacattttcattaccctaaaaagaaaccctgctttgcttagccagctttaccaatctctcccctca

SEQ ID NO: 360598 - DNA, 201 bp, Homo sapiens; identical to SEQ ID NO: 77758

SEQ ID NO: 360599 - DNA, 201 bp, Homo sapiens
tttagtagagatagggtttcaccatgttggtcagactggtcctgaactcctgacctcaagtgatctgcctgcctcggcctcccaaagtgctgggattacargtgtgagccaccgtgcccggcctcctctgtctatttttaattgggtgatatattagtatattttgcattgctataaaggaatacctgagactggataatt

SEQ ID NO: 360600 - DNA, 201 bp, Homo sapiens
tggcatctgagggtcacagccgagagtatctccctagcaggagattagggagccagtgacaaagtggcaccaggggaaccgatgtatgccaggaatccagrcagagggtgacattagcacttctttctgcagaacctaaaccctgcccgactcacccggaggagctgtcacggtggtttgctggaaaccccctttctgttg

SEQ ID NO: 360601 - DNA, 201 bp, Homo sapiens
ctttagctcttacatttaggtctttaatgcatcttgaattaaattttgtttatggtctaaggtaaaggtctaactttattcttctgcatgtgggtatctctttttttttttttttttggagatggagtctcacccaggctatagtgcggtggcaccatctcagcacactgcaaccttcacctcccaggttcaagcgattct

SEQ ID NO: 360602 - DNA, 201 bp, Homo sapiens
gcatgagaattgcttgaacctgggaggcagaggttgcagtaagccaagactgcgccactgcactccagcctgggtgatgagtgagactgtctcaaaaaaaaaaaaaaaagaaaaggaaaaagatagaaaagaaaagaaaaaccttagatgaattaaatttaaagagtttaattgagcaaagaccaattctccaattgggca

SEQ ID NO: 360603 - DNA, 201 bp, Homo sapiens
tctgtagcagagcttcataaagatagcccaatggttttgtcgttttgctttttctagagatgaagtctcaactatggttatccaggccgttcaagaacttytgggctcaagcaatcctcctgcctcagtttcctaagtagcatgggggacagctatgcaccactgcacctgactgctcactggttttaaaaattgattccc

SEQ ID NO: 360604 - DNA, 201 bp, Homo sapiens
tgtgaatgtatgagccttttaaaacactaattaaagactgtccctcgtttgttttattgtgcaaaaatagcagcatcatgaaagattctttttgagggttaaaaaaaatccattgattagaaagatacagtagaaaggttgaatacattattttcacttttttttttgtctttttgttttttttttcctttttctggagaa

SEQ ID NO: 360605 - DNA, 201 bp, Homo sapiens
gcagttgtttcaggttctttcaattttctttccaatctcaaccgtcagtgcatggagctgtccaaggtttttatttcttgcccttcccgttcctgaccccyttaatcatcacacaaacaggcagcagagacaaagtaatgaagaacaccaactctggagtcaaacaaactgggttagagtcccagagccagcattcaacag

SEQ ID NO: 360606 - DNA, 201 bp, Homo sapiens
gtagagggttcatttgggtcaagtttaaggattacaactcgagagcacatattcaagttgccctgaaaatacattctgattaacagcaataacaagtgaattttttttttttttttttgagacagcttctcgctctgtcacccaggcttgggggcagtggcgcgatctcggctcactgcaacctctgcctcctgccttcaa

SEQ ID NO: 360607 - DNA, 201 bp, Homo sapiens
gaacccttgttctacataaatagatgaccactctcagaagccaaggaagcagttgtttcaggttctttcaattttctttccaatctcaaccgtcagtgcayggagctgtccaaggtttttatttcttgcccttcccgttcctgacccctttaatcatcacacaaacaggcagcagagacaaagtaatgaagaacaccaact

SEQ ID NO: 360608 - DNA, 201 bp, Homo sapiens
tagagaaccttcaaatatgactttctaggttgtctgaggggagaaagggaattgggctatgctatttcacaagtccatctagggtttattatgagtttttwaaaaatttattatttattatgggcttttattatttttatgggttttattaatctcatccatgtggatactacaaaggtccagaagggggcaatgtgacac

SEQ ID NO: 360609 - DNA, 201 bp, Homo sapiens
aataattagatgttggactttctgaattgattacccagttttcgtgtcttctatattgcttatctcttctcgatttttctttcacaattcttcaatttaatttttttttttttttttttttgagatggagtctcgctctgtcgcccaggctggagtgcagtggcacgatctcggctcactgcaaactctgcctcacgggtt

SEQ ID NO: 360610 - DNA, 201 bp, Homo sapiens
tgcccttatgtaggaatttaggttgcagttttcttccttgtctgcaaagttgcttatcactaattttcttgccatctctccatctccccaaaaatgtattgacatttctctgctgctatctcctctcttatttttatttatttatttttttaagttggagtttcactcttgttgcccaggctggagtgcaatggcacaatc

SEQ ID NO: 360611 - DNA, 201 bp, Homo sapiens
tgaactggatgagggtagacctgggctgagtagccccgctctgagaccaagtaggggagaggtggtgtcacagagcagaactgctgtcctagaaaccagckcatactgactgcttttctatttgctttggaatttcccccattgcactgcatggggatcttgacatgtgtgctgagaaataaagagctgagctaaaagcaa

SEQ ID NO: 360612 - DNA, 201 bp, Homo sapiens
ctatcatgacttaaggtgatcctcactgaatttgttattccaccatcattatctcactgtttcagagcaactgatacattttttattttgacattttactrtaaaaatgacttttctctatgtcttcttccacagcatgaaaaccaaattattcatagagatctgaaagcagaaaatgtattctataccagtaatacttgt

SEQ ID NO: 360613 - DNA, 201 bp, Homo sapiens
agagattactccccaaaggacagtagtttttcctaaagaggaactagatggaggacatggtgaagataaagtcatcttctgagtgtcaagtataatgcacwcagcatgatgcctgtgatggcaggtagagtgggtggatgaacccctcagtgcatggaccctgctctcaaggacagcttgtgaggaggcttaactcacaca

SEQ ID NO: 360614 - DNA, 201 bp, Homo sapiens; identical to SEQ ID NO: 77761

SEQ ID NO: 360615 - DNA, 201 bp, Homo sapiens
gcccttatgtaggaatttaggttgcagttttcttccttgtctgcaaagttgcttatcactaattttcttgccatctctccatctccccaaaaatgtattgacatttctctgctgctatctcctctcttatttttatttatttatttttttaagttggagtttcactcttgttgcccaggctggagtgcaatggcacaatct

SEQ ID NO: 360616 - DNA, 201 bp, Homo sapiens
cccttatgtaggaatttaggttgcagttttcttccttgtctgcaaagttgcttatcactaattttcttgccatctctccatctccccaaaaatgtattgacatttctctgctgctatctcctctcttatttttatttatttatttttttaagttggagtttcactcttgttgcccaggctggagtgcaatggcacaatctt

SEQ ID NO: 360617 - DNA, 201 bp, Homo sapiens
ggagtcatttgtattttctgtgaaatgtctgctcatgttcttcatcatttttcttttttgggaggatattggtatttttcttttctttttctttttttttwttttgagacggagtctcgctctgcctttaggctggagtgcagttgtgctatctcggcactcggcactgggttctcgcctccgcctcctgggttcaagtga

SEQ ID NO: 360618 - DNA, 201 bp, Homo sapiens
tgtaatcccaatactttgggaggctgaagcagaaggactgcttgagcccaggagttcgagaccagcctgggcaacatggtgagaccttgtctctataaaawttttttaaaaattagctgggtgtggtggtgcatgcctgtagtcccagctactggggagactgagggaggaggattgcttgagcctgggaggttcaaggct

SEQ ID NO: 360619 - DNA, 201 bp, Homo sapiens
cgatcaaagctcactgctgccttggactcctgggctcaagtgattcacccacctcagcctcccaaagcactgggattacaggtgtgagacaccatgactgrccttcattcctttatatatatatataatataatatataatgtaatatataatataatatataatataatatatgtgtgtgtgtgtgtgtgtgtgtgtgtg

SEQ ID NO: 360620 - DNA, 201 bp, Homo sapiens
tcactccctaaccaaaggtaggatccgacttcccaagggtcatccctggcagtattgggacctagtgtaggaaaggggttaggtggccagggccaaggaascaagtaaagtgacctcagcagagcccctgcaaggcccacatcctgtgccagccgccttctgtggtcttctcagttaattttcacagtaaccatgtgaggt

SEQ ID NO: 360621 - DNA, 201 bp, Homo sapiens
gattacaggtgtgagacaccatgactggccttcattcctttatatatatatataatataatatataatgtaatatataatataatatataatataatatatgtgtgtgtgtgtgtgtgtgtgtgtgtgtgtgtgtgtaagcacatgcctgataaggaacttacagcagtttaacagaggcagacaggaaaaaattgatgag

SEQ ID NO: 360622 - DNA, 201 bp, Homo sapiens
attacaggtgtgagacaccatgactggccttcattcctttatatatatatataatataatatataatgtaatatataatataatatataatataatatatgtgtgtgtgtgtgtgtgtgtgtgtgtgtgtgtgtgtaagcacatgcctgataaggaacttacagcagtttaacagaggcagacaggaaaaaattgatgagt

SEQ ID NO: 360623 - DNA, 201 bp, Homo sapiens
tgaggcaggaaaatcgcttgaacccaggagggggaggtggcagtgagccaagatcgtgccactgtactccagcctggtgacagagccagactctgtctcaaaaaaaaaaaagaaagaaagaaagaaagaaagaaagaaagaaagagcaggaggggagatagaaagcattgaggatgacagtttttagataagttggccagg

SEQ ID NO: 360624 - DNA, 201 bp, Homo sapiens
gaggcaggaaaatcgcttgaacccaggagggggaggtggcagtgagccaagatcgtgccactgtactccagcctggtgacagagccagactctgtctcaaaaaaaaaaaagaaagaaagaaagaaagaaagaaagaaagaaagagcaggaggggagatagaaagcattgaggatgacagtttttagataagttggccagga

SEQ ID NO: 360625 - DNA, 201 bp, Homo sapiens
aggcaggaaaatcgcttgaacccaggagggggaggtggcagtgagccaagatcgtgccactgtactccagcctggtgacagagccagactctgtctcaaaaaaaaaaaagaaagaaagaaagaaagaaagaaagaaagaaagagcaggaggggagatagaaagcattgaggatgacagtttttagataagttggccaggac

SEQ ID NO: 360626 - DNA, 201 bp, Homo sapiens
gacaaacacaaagccattttccaagagcccttgggactgaacaggtcaagggtcctctgaagattgtctggattcaggatgcaagggtgggagtggagcaygtgcccacaatccacagtgtgttctgtggctagatccttgccaaatgcaaccacctcccttcggctgaattctgtaaggataaaagagtccaccccaaaa

SEQ ID NO: 360627 - DNA, 201 bp, Homo sapiens; identical to SEQ ID NO: 77762

SEQ ID NO: 360628 - DNA, 201 bp, Homo sapiens
ttatcatttgatttttgcctgtctgtttatgatacttttgggcaaacagaaaattacaattttatgtagtcaaattcaatgttttctttaatggctttcgytgagatcataaaaaaatttctgattcttttctagtatttcatgattttgtttattttacatttacttagatgatttatttggaacttattttgaagtagg

SEQ ID NO: 360629 - DNA, 201 bp, Homo sapiens
ccgggttcaagcgattctcctgcctcagccttctgagtagctagaattacaggtgcccgccaccatgccgggttaatttttttgtatttttagtagagtcrgggtttcactatgttggccaggctggtctcgaactcctgacctcatgatccgcctgccttggcctcccaaagtgttgggattataggcgtgagccaccgc

SEQ ID NO: 360630 - DNA, 201 bp, Homo sapiens
attgccagtttcttttcaagaattataagatctggcgaaagtaaacctgcattctggcatggctgccctggctggagctgagcaagggctgcctcaccacrccaggcataggcactgcacttggtcactgacgtagaactcctgcactgttctaggcgtttgagtctgtggcattgatggcaaagggaacctcaagtgttg

SEQ ID NO: 360631 - DNA, 201 bp, Homo sapiens
tttcatagccatagatccacatcttattgagtttgtttatatgccaagaccatgctgagcactgttctcatcatacgtagttagcgtcatatatagttctyaccacagcctatggttatcagtatcccactttacagagaaggaaactgacattcacagtacccagctggtatagttgaacctagaattgaccagactgtc

SEQ ID NO: 360632 - DNA, 201 bp, Homo sapiens
ccatctttactcagatcccagttgaacggatctgtcagaaaagagacacttggctagggtctatattagttgagaggctatttccaattcacttctcagcstgcatggttgtaggagcaagaactgggatcagtgagccacagtgaacctcattacatgccaggcactgaaaaagtcagataaaacagtccatgctagcaa

SEQ ID NO: 360633 - DNA, 201 bp, Homo sapiens
ggcaggaaaatcgcttgaacccaggagggggaggtggcagtgagccaagatcgtgccactgtactccagcctggtgacagagccagactctgtctcaaaaaaaaaaaagaaagaaagaaagaaagaaagaaagaaagaaagagcaggaggggagatagaaagcattgaggatgacagtttttagataagttggccaggaca

SEQ ID NO: 360634 - DNA, 201 bp, Homo sapiens
aatcgcttgaacccaggagggggaggtggcagtgagccaagatcgtgccactgtactccagcctggtgacagagccagactctgtctcaaaaaaaaaaaagaaagaaagaaagaaagaaagaaagaaagaaagagcaggaggggagatagaaagcattgaggatgacagtttttagataagttggccaggacagccttact

SEQ ID NO: 360635 - DNA, 201 bp, Homo sapiens
acccattaactgatcatttacattaggtatatctcctaatgctatccctccccccttcccccacccgacgacaggcccggatgtgtgatgttccccaccckgtgtccaggtgttctcattgttcaattcccacctatgagtgagaacattcggtgtttggttttctgtccttgcgatagtttgctcagaatgatggtttcc

SEQ ID NO: 360636 - DNA, 201 bp, Homo sapiens
atcagggatattggtgaaaattctctttttttgttgtgtctcttccaggttttggtattaggatgttgctggcctcataaaatgagttagggaggattccytctttttctattgattggaatagtttcagaaggaatggtaccagctccttttgtacctctggtagaattcagctgtgaatctgtctgcttctgaactttt

SEQ ID NO: 360637 - DNA, 201 bp, Homo sapiens
tagtttatttgcagagtggtatttatagttttctctgatggtagtttgtatttctgtgggatcggtggtgatatcccctttatcattttttattgcctctrtttgattcttctctcttttcttctttattagtcttgctagcagtctatcaattttgttgatcttttcaaaaaaaaaacagctcttggattcattgatttt

SEQ ID NO: 360638 - DNA, 201 bp, Homo sapiens
tgtcttttaattggaggatttagcctatttacatttaaggttaatattgttatgtgtgaatttgatcctgtcagtatgatgttagctggttattttgcttkttagttgatgcagttttctccctagcatcgatggtctttacaatttggcatgtttttgcagtggctggtactggttgttcctttccatgtttagtgcttc

SEQ ID NO: 360639 - DNA, 201 bp, Homo sapiens
cttgcacttcctgggtgaggcgatgccctgccctagttcagctcacacttcgtgggctgcacccactgtccaacaagccccagtgcgatgaacgcggtacytcagttggaaatgcagaaatcacctgtcttctgcgttgctcatgctgggagctgtagactggagctgttcctatttggccatctttgaacctcccccctg

SEQ ID NO: 360640 - DNA, 201 bp, Homo sapiens
cgagagatctgctgttagtctgatgggcttccctttgcaggtaacccaacctgtctctctggctgcccttaacatttttgccttcatttcaactttggtgratctgacaattgtgtcttggaattgctcttttcgaggagtatctttgtgatgttctctgcacttcctgaatttgaatgttggcctgccttgctaggttgg

SEQ ID NO: 360641 - DNA, 201 bp, Homo sapiens; identical to SEQ ID NO: 77760

SEQ ID NO: 360642 - DNA, 201 bp, Homo sapiens
ttatttctttttactcttttttctctaaaattctcttctcacttcatttcattcatttgatcttcaatcactgataccttttcttccatttgatcgaattrgctactgaagcttgtgcatgcatcacatagttcttgtgccatggttttcagctccatcaggtcatttaaggtcttctctatgctttttattctagttagc

SEQ ID NO: 360643 - DNA, 201 bp, Homo sapiens
ttcatgtttatatcatttcccccatagcagccagaggtgatgttttagaaattacaagcctgatcatgtaactacctacttacaagcttccagcagcttctttttttttttcaagtggcagttttaagtttgtgggtttttaatttatatatgtgaaatacctttttataggcaaaaataataatagcatgcttcttactg

SEQ ID NO: 360644 - DNA, 201 bp, Homo sapiens
gagaatgcccaagatgattcactgggatgaggaaaaaaaatactagaacttccttttatatttatttgtgattatatatttttaatttctgtgattatatrtattgaaaatgtgtaaatcagtagtacatggatacactttataaatacatatacatatattagagtagtgctcaaaaatgttttattatgcacatgcagt

SEQ ID NO: 360645 - DNA, 201 bp, Homo sapiens; identical to SEQ ID NO: 77765

SEQ ID NO: 360646 - DNA, 201 bp, Homo sapiens; identical to SEQ ID NO: 77757

SEQ ID NO: 360647 - DNA, 201 bp, Homo sapiens; identical to SEQ ID NO: 77764

SEQ ID NO: 360648 - DNA, 201 bp, Homo sapiens
tcacttcgccagtgttttaaaaggagttaatctatactttaaaaattgagagttgacaggcatggttgttcacgcctgtaatcacagccactttgggaggycaaggagggtggattactcgagaccgggagttgcagatcagcctggacaacatggcaaaaccctgtctttacaaaaaataaccaggcatggtggtgtgta

SEQ ID NO: 360649 - DNA, 201 bp, Homo sapiens
catctgcttctgtagaggcctcaggaagctccaatcatggtggaaggtggaaggcacatcacactgtgaaagcaggagcaagagttgggggaacatgccayaagatcccatcacttttaaagaaccagatctcatgtgaactcagagcgagagctcacttatcactaaggagatggcccaagccattcatgagacatcagc

SEQ ID NO: 360650 - DNA, 201 bp, Homo sapiens
tgggattacaggcgtgagctgccgcgcccagccaaaattgagtaatttataagaaaaaaaggttttattagctcatgattctgcaggctgtacaggaagcrtggtggcatctgcttctgtagaggcctcaggaagctccaatcatggtggaaggtggaaggcacatcacactgtgaaagcaggagcaagagttgggggaac

SEQ ID NO: 360651 - DNA, 201 bp, Homo sapiens
ggtttcaccatgttggccaggctggtctcaaactcccaacctcgtgatcctcccgccttggcctcccgaagtgctgggattacaggcgtgagctgccgcgmccagccaaaattgagtaatttataagaaaaaaaggttttattagctcatgattctgcaggctgtacaggaagcgtggtggcatctgcttctgtagaggcc

SEQ ID NO: 360652 - DNA, 201 bp, Homo sapiens
aagtcctctgaacctgtgtttcctcctttgtttaaagagagctaattctttccaactcccagcattgccaggagaattaaggaggtgatactgtttcccaragtgtgacagaggagacgatcttaggcagcaaacacaggaatgttttcttgttcatgtgtttaagttaatgtggattctaaattaatgtgtattcgtgta

SEQ ID NO: 360653 - DNA, 201 bp, Homo sapiens; identical to SEQ ID NO: 77798

SEQ ID NO: 360654 - DNA, 201 bp, Homo sapiens
tatataccccattaccctgccctacaccagctccagagcccaggaggttgggtgctccagctggccatcctgggtcacaggccccaggtggagcagttggraggacagtccccaatagggagaaggtgcactggacaggcaaaaacaacagatgcccattgcagggagattagaccagggacataatcctgtgaataatta

SEQ ID NO: 360655 - DNA, 201 bp, Homo sapiens
gcactgagcaggaaaacttcccccaggagaatacttttgccctttaacaaatatgaaactgacaggccaacactgttgctgaagtggaaggattttttttkcttttttaataacaccttaaacgatagtcatggaagccggcatcctaaatgaaatacatgttgctctccgacacctgacaacctgacataatttaagagc

SEQ ID NO: 360656 - DNA, 201 bp, Homo sapiens
caaaaatggagacttactccaaggatccaggcaaatctctgtaatccaagcacaagaagtacagttgggcctcagacgggactgggactcggaagtaggamggtgttgagagtagaggtatgaggagcccgaagcccactgaaatcccaaggtcctttttatgtctctaacaaggggagatgtgagagaaataagtgtaaa

SEQ ID NO: 360657 - DNA, 201 bp, Homo sapiens
ttgccatgcaggtgtggatgtgtgggggccgcatggaggacatcccctgctccagggtgggccatatctacaggaagtatgtgccctacaaggtcccggcyggagtcagcctggcccgggtaaggtggtggctttccttggcgggtagaaggggttggcctaggaccatcagctgcactgaggcaccctggggccctagac

SEQ ID NO: 360658 - DNA, 201 bp, Homo sapiens
ccattatctcgagaccaatgttctgttctattgactggctggatttttttttctcccccaagatcagaatataattgcatttctccaggcagcacttccamtaattgcagccctgtgcacatcccctctcgggagggccagagtacatcagggctggggatggagacagcaggaagtagtgggggacaaaggaccttttag

SEQ ID NO: 360659 - DNA, 201 bp, Homo sapiens
cccgggagacgttcagaaatagagcagggtaaggtgtcccacctgctcagggccactgcaccacctgaaaggcagagggcagcccagcagcgacctgggcmatacccgccaggcaaaagcatcacttccacatcaatcactttgtataaaggaagagttattgttatgggatgctggcgcctgatcaatatctcctgcttt

SEQ ID NO: 360660 - DNA, 201 bp, Homo sapiens
tcttaaggggacctgaaggatgagtatgaggtagccaggcagagggaggagtctatgaggggagtcaatgggtgtggtgagcaagaagtgagtggaatgargtgagggtggagggctgcacggggctcttggtcaggccagaggacattctgaagtgatgggcgtggcctgcactgggatgctctcaaaggacccaggagt

SEQ ID NO: 360661 - DNA, 201 bp, Homo sapiens
aaaaatagccaggtatggtggcacacacctgtggccccagctacttgggaggctgaggcaggagggtcacttaagcccatgaggtcaaggcttcagtaagsagtgattgtgatactgttctctagcctgtgtgacagagggagaccctgtctcgaaaagaaataaatataaaagtgacaaaatcatcttaaactagccgta

SEQ ID NO: 360662 - DNA, 201 bp, Homo sapiens
aggggttggtaaggactcttaatgttaaaagtgacagaaaggctgggtgcaatggctcatgcctgtattcctagcactttgggaggtcaaggtgggaggaytgcttgagcccaggagttcaagaccagtgtgggcaacacagggagacccccatgtctacaaaaaaaaatagccaggtatggtggcacacacctgtggccc

SEQ ID NO: 360663 - DNA, 201 bp, Homo sapiens
acctcctctttcatgaccgagtgcctcttacgggcagagcactgtgctaggcactgggggtccaatggcaaatacaacagatgagactcctgccaacactkgccctgagtctggcagggcacagaggggttggtaaggactcttaatgttaaaagtgacagaaaggctgggtgcaatggctcatgcctgtattcctagcac

SEQ ID NO: 360664 - DNA, 201 bp, Homo sapiens
ctggctagcttccaggcagccatttcctcaacagagagaagctctgccccagcccctgccctctcgggttcccctccatggacaatcccttccactgcgcycttctttctgggtcccattgtgttttcccaatgcacatcaccactcgtttctttccccctcagtttaggagataagagcgggtaattgtcttttataggc

SEQ ID NO: 360665 - DNA, 201 bp, Homo sapiens
cgggtgccgtgccattcctggctagcttccaggcagccatttcctcaacagagagaagctctgccccagcccctgccctctcgggttcccctccatggacratcccttccactgcgcccttctttctgggtcccattgtgttttcccaatgcacatcaccactcgtttctttccccctcagtttaggagataagagcgggt

SEQ ID NO: 360666 - DNA, 201 bp, Homo sapiens
tgggacctcaattctaattccagaaccaagctcctaactgctaccctatgtgcctcctaagcacacagtgaatgctgaatgattggtggcaattattagtrtagtctttcccccaaatgcaactgattagggtttgaacttcataggggtcctcagctgagatgccaacggcaaaagccgtggccagctgccagtcttttc

SEQ ID NO: 360667 - DNA, 201 bp, Homo sapiens
gggctgtgttacactgtggagtgccgcagcactgggaattccaccttctcctggccaccgcctctgccttgagcctcagcaccttctgtgaaatgaggatrgaagccctgccttgcctgctccctggggctctggtgaaaatttggatgtgaaagtggtctgtgaatgtcagcctcatggttgagagggcaagctctgggg

SEQ ID NO: 360668 - DNA, 201 bp, Homo sapiens
cttaggctgtcttgaactcatgagctcaagtgatcctcctgcttcagcctcccaaagtgttgcgattacaggtgtgagccactgcacctggccacccccaraacttgttaccagtctctggagccccttcccttgatgctttttacttccaggctctcagattccagcatcgccagggatctgggagctaacatgagggaa

SEQ ID NO: 360669 - DNA, 201 bp, Homo sapiens
atcttggctcgctgcaacctcgtctgcctcccaggctcaaatgatcctcccacctcagcctcccaagtagctacaactacaggtgcccaccactacacccrgctaattgtttttttgttagtttgttttttttatttttgtagatgaggtctcactatattgcttaggctgtcttgaactcatgagctcaagtgatcctcc

SEQ ID NO: 360670 - DNA, 201 bp, Homo sapiens
tgaacttacaccatttgctggaaaatgacctataccgtggcctctgtaaagtggaaactaaatttacattccagatgctgtaccaggtgcattcacatatkgcacctcttttattccttgtgacagccttaacaggaaggatgtattttacccaagaggaaactaagtctcagggaggttatgactttcccaaggtgaccc

SEQ ID NO: 360671 - DNA, 201 bp, Homo sapiens
agagatctacagagtcctctcaaacactcagtggattattgatcagcacctgccgtgaggaagctatctgaggctgggaaaggaatcaccctaaagggctwtagggaacagtgcatagtgctcactcagggccaaaaatagttcctcttcccaccacccagactggaaaacctcctaattcataactcatggggaatcagg

SEQ ID NO: 360672 - DNA, 201 bp, Homo sapiens
caggaatgagagagatgacataactatagattctataactattaagagaataataaaggaatattctgaacaactttgtgccaaaacatctaacagcttcrctgaaatgacagattctttgaaagacacaaactgccaaaactcacttaaggagaaacgatcaacctgaatagtcctatatctattgaagagattgacagt

SEQ ID NO: 360673 - DNA, 201 bp, Homo sapiens
ggaaaccaaaagctggtcaaaaaacaacaacaacaacaaaaaaaacttaggagaaatttaaaaagccacaattatgaaattatgagatttcaacacctctstctcaataactggtaatacagatagacagaaaatcagcaaggatatagtagactctcacagcactgtcaaccaatataacctaattgatatttatagaac

SEQ ID NO: 360674 - DNA, 201 bp, Homo sapiens
tgaggcaggagaatcacttgaacctgggagccggaggttgcagtgaaccgagattgtgccattgtactccatcctgggcaacagagcaagactccgtctcaaaaaaaaaaaatacagcttaaatttagaagtaaatttaaaactaaagttgttcttttctactttttttttttttttaccagctgcatccagtaaacatcc

SEQ ID NO: 360675 - DNA, 201 bp, Homo sapiens
atttcagagcaaagaatattaccaggaataaagaaagttattcataataaaaaagtaattcataaggaagacatagcaatcctaaatgtttatgtacttartcagtgagcttcaaaatacatgaagcaaaaactgataaaactataaggagaggccgggcacagtggctctcacctgtaatcttagtactttgggaggcca

SEQ ID NO: 360676 - DNA, 201 bp, Homo sapiens
cgctttgtgtgatactgatatggttactgaaaggctagcccagtcccaggctacgtgaacagacttaaaaaaaaaaaaaaaaaactctgatttttttttttcccataaaactcagtgttatcaagaagactaagtgaaacaggacgtgtgaaaagaaggcaggacacacccagaagctgagcaagggtgatattgcaacct

SEQ ID NO: 360677 - DNA, 201 bp, Homo sapiens; identical to SEQ ID NO: 77801

SEQ ID NO: 360678 - DNA, 201 bp, Homo sapiens
cctcatctggatattgaagtgattggcctcaccagagagcactggctcttgaccctagccacacattgacatcacctggggagcttgtaaaaacacaaagscttccctcaagagcagttacactggagtctgggggtgggatgcaggtatcatcattttttaaagctcccaggtgatgcttatgtgtggccacggttggca

SEQ ID NO: 360679 - DNA, 201 bp, Homo sapiens
acaaataagttaaatgtaaaagacagaaaagatataccatgctaacaccagtcaaaagaaagctgcagaggcaatattaatatcagtcaaaatagatttcrgagcaaagaatattaccaggaataaagaaagttattcataataaaaaagtaattcataaggaagacatagcaatcctaaatgtttatgtacttaatcagt

SEQ ID NO: 360680 - DNA, 201 bp, Homo sapiens
ctgttggaagctcagccatcttcatgggcatggtgcatacccagggctcctgagaggaacccctaacactatgagccccagggcaggctcagaggtagaargagttgggttctttgaggaaatgaaaggtggccaggacaatggaccagcctgagccaagagtggagagcaagaatggattccatgtctccagcagcaggt

SEQ ID NO: 360681 - DNA, 201 bp, Homo sapiens
gaaataaagcatgttatatagagaggaacaatgataagaggagaattcttgttgtaaacagtacaaagaagaatatggtgtagcaacatctttaaagtacrgaaatgtcagtaaactatggttagtaagaaaaaaataaggtatggaaagagaaaactctgtcaacttagaattctgtacccagtgaaaatatctttttta

SEQ ID NO: 360682 - DNA, 201 bp, Homo sapiens
ttatcgaagattatactgctaagaggtgaaaaaaccaaccaggatttgaacctgggcattctgtccccaggtgggcacagtgccttagaacactgccttcygaagctaccttgacctcatgcctcccacaatcagccagcagccagcagggcactgtgtcctcagccccagccctccttggacatgaagtccgctgaacgg

SEQ ID NO: 360683 - DNA, 201 bp, Homo sapiens
agtcagtgcagggaggaaaggcgtgaatataaaatcgtttcctttctttcctggtctctctctagccttgtcatggtgtatttttacttgttagttagtgytctcagtgtagaaaaattaaaactttaagttattagcatgaattttacctttcatctttatattatgcagtgacaatttaaaattcagattaacagcatg

SEQ ID NO: 360684 - DNA, 201 bp, Homo sapiens
ggtcactaagagagttgtcacaagaatgaaatgaggccaggtacagtggctcatgcctgtaatcccagcactttgggaggccgaagtgggtggatcacttsagatcagaagttcgagaccagcctggccgacgtggcgaaaccccatctctacaaaaaatacaaaaattagccaggcatggtgatgcaggtctgtaatccc

SEQ ID NO: 360685 - DNA, 201 bp, Homo sapiens
gcatcaaactgcctgggttctagtgcaaattcaatgagctagctgctgtgtgactttgggaaagtgacttaacctctcctctttatattatttaggggatrgaataatctttacttcatagtgcagtcgtgagcatgatatgagccaaaatatattaaaagcttagctcagtgcctggaacataataaatgttcgctaaat

SEQ ID NO: 360686 - DNA, 201 bp, Homo sapiens
acacacctacctcatggtgccttggctctttcatccctaaaagtggtaataaaataacttcttcaaaagtttgttgtaagaactaaatgggatgatatgtmtatttggcctagagctaaccaaagaggaggcactcaataagtggcagctgttctgatcataaccctcaggtaaggaggcagaacagcacagtattacaca

SEQ ID NO: 360687 - DNA, 201 bp, Homo sapiens
ggcatgaacccaggaggcggaggttgcagtgagccgagatcgcgcccctgcactccagcctgggtgacagagcaagactccgtctcaaaaaaaaaaaaaaagagagagactcagtctcaaaaaaaacaaaaagaagaacttcatttttctattattctagcaggaaacatgggattctggttttgatcatttagagttcct

SEQ ID NO: 360688 - DNA, 201 bp, Homo sapiens; identical to SEQ ID NO: 77793

SEQ ID NO: 360689 - DNA, 201 bp, Homo sapiens; identical to SEQ ID NO: 77795

SEQ ID NO: 360690 - DNA, 201 bp, Homo sapiens; identical to SEQ ID NO: 77797

SEQ ID NO: 360691 - DNA, 201 bp, Homo sapiens
ctgaagggccctccatcctctcccatgattccttccagaagtctctcttctgctttttacttggacagaaccctaggaagtggccactagagaaattctgktcattttctgtacagcttcccaccttcccacttgatggtagagtgcccagcaagtgggcaatctacaggcacagcatggtgcaaggatgtttaaaagaca

SEQ ID NO: 360692 - DNA, 201 bp, Homo sapiens
gcctccaactttaaagccagaaggatagaatcttcagatctctgtttccttctccttgctttccttcatacctctgcttccttcatcacatctccttctgwctctgactttcctgcctccttctttcacttataagccctgtgattacattaatgatatgtgattccatcaggctcgccaagataacctccccaccacaag

SEQ ID NO: 360693 - DNA, 201 bp, Homo sapiens
aggacatccggcctggagacccccagcacaccaagaagttctgctttgatgccatttcccacaccagccctgtcacgctgtacgactgccacagcatgaarggcaaccagctgtggaaataccgcaaagtaagatgggatgcggggggagcagggcacctgcttaatttttttttaaggcaatacagtgcttcaccccttc

SEQ ID NO: 360694 - DNA, 201 bp, Homo sapiens
caggtattcaccttcacctggagagaggacatccggcctggagacccccagcacaccaagaagttctgctttgatgccatttcccacaccagccctgtcaygctgtacgactgccacagcatgaagggcaaccagctgtggaaataccgcaaagtaagatgggatgcggggggagcagggcacctgcttaattttttttta

SEQ ID NO: 360695 - DNA, 201 bp, Homo sapiens
cctcttttattccttgtgacagccttaacaggaaggatgtattttacccaagaggaaactaagtctcagggaggttatgactttcccaaggtgacccagcyactaagtgacagacatggattttgaacccagatctgagtgtctcttcagcctatccatttccctcaccacacctgtagttgcatcccaaggaagtgccct

SEQ ID NO: 360696 - DNA, 201 bp, Homo sapiens
agacagagctttgatttaaaaccatccattctgattctagaacctttactcctaagctttacatgctttttcccccatttattaggatcatactgtatacrttactttacaactatttttttaaaagacacatttattcagcgtcatgatcagactattacatttagcaatcaacagcatgggtgcaaaaaaaaatcaaca

SEQ ID NO: 360697 - DNA, 201 bp, Homo sapiens
gtaatcatcttaattggtgcacattttggagcggagtggggctttctcctgaagggctgtctcctccttcatgtaccattaacgccatggtaaacgcaccytcctaaccacagccatccgcagaggcagctttttgctagagcctcattttgcccctgaaatcttgggctgtgtgagttaaacaagccctctccactcaga

SEQ ID NO: 360698 - DNA, 201 bp, Homo sapiens
tgtgtctttccctgcaggacgtctgaatcttcaaggcatatcctgaaaggattttgtgccagcgtttatctgaaaaaaaaaaaaaaaaaaaaaaaaaaaasgctccaaacatctaacaacaatgacaaaatcagtgactgctttaggtcctgcccagtctgcctcagggcctttgcatttgctgcatgtgtgatattaaca

SEQ ID NO: 360699 - DNA, 201 bp, Homo sapiens
gtatctagaatatataaatgaaaggacttgtatcctctcaaactctcaaaagtcaataatttttttaattttaaagcgggcagatactttaccaaaaaaartatatgaatggcaaataaacatatttaaaatgctgaatttcattagttaatagagaaatagaacttgcaattacaaggaaattccagcacacacctatta

SEQ ID NO: 360700 - DNA, 201 bp, Homo sapiens
gcgatgaattattgataaatgctgttaggacatagatgattctcaacaaaattatgttgagtgaaagaatgacacaaaagagaatacatactgtatgattsctttatagaaaattctagaaattgcaaactaatctctagaaacagaaagcagatcagtggctgacctaaggacatgggggttggtggggacaggaggagg

SEQ ID NO: 360701 - DNA, 201 bp, Homo sapiens
gcttcaccccttctttcaacagagcccatccacttattcatttgtgccacaaacctaccatgccggattttgtagtcattcaagagtagtcagaaatctasacttcactgtgaaatcctcaagtcttaaatgttggcaactgattccatttaaaaagaaaagtgcagccgggcacagtggctcatgcctgtaatcccagca

SEQ ID NO: 360702 - DNA, 201 bp, Homo sapiens
agagtagtcagaaatctagacttcactgtgaaatcctcaagtcttaaatgttggcaactgattccatttaaaaagaaaagtgcagccgggcacagtggctsatgcctgtaatcccagcactttgggaggctgaggtgggtggatcacctgaggtcaggagttcgagactagcctggccaacatggtgaaaccccgtctcta

SEQ ID NO: 360703 - DNA, 201 bp, Homo sapiens
tgcagtctacccacttggccccttcttcccggccctgagtcagtgaccttcacctaaatcctaaaaggactctgtttctttctttaaaaaaaaaaaaaaaagagagagagagaaaagaaaaaacacttcctttttaaaaacttgtaaatcctatatcctttccccatcaccctaccagagattcttggggggccagggtat

SEQ ID NO: 360704 - DNA, 201 bp, Homo sapiens
aataaggtgacctcctaggagcaggggaccaccaagttgcctaaagaggagggaaccagcctgattggaaacaaagcaggtcaaaactcctgtgctgatcrgtagtgggattgtgcttatgaatagccactgcactccagcctaggcaacatagcaagaccccatctctgaaaaaaaaaaattttttttagctttcagtat

SEQ ID NO: 360705 - DNA, 201 bp, Homo sapiens
caacaatactttgaggttggcattaccatgatcatctctactttgtagatgtaaaagatgtgctgtcacctaggattgggcccttttcccaaagatgcctkacagcgagggaacagaggaggggcctcactgtgctttcccacgggctttgccatttgtttcatggttttcactgtcaaatcccagatttttttttttttt

SEQ ID NO: 360706 - DNA, 201 bp, Homo sapiens
tgtctggcctatttcacttagcataatgtcctccaagttcatccaggttgttacaagcagcaaatttccaccttttttttttttttttttttttttaagamagagtttcactctgttgcccaggctggagtgcagtgccccagtcatggctcactgcaaccttgacttctctgggctccagcaatcctcccacctcagcct

SEQ ID NO: 360707 - DNA, 201 bp, Homo sapiens
tcttggtaacatgtttggcagcttacaaaatgccttcattcccataacctcctttagttcctacaacaatactttgaggttggcattaccatgatcatctstactttgtagatgtaaaagatgtgctgtcacctaggattgggcccttttcccaaagatgcctgacagcgagggaacagaggaggggcctcactgtgcttt

SEQ ID NO: 360708 - DNA, 201 bp, Homo sapiens
tttgctacataaatccagcaaacacaaccagccgactcctctgcatgcatcgcattcaccatgcagaaggtaatatgttcttgtccaggagcagataaatwgcattcagcaaaattggttacagagatgagtttgatttctaagtggtgttggccttgaaagggtttaagcaaaaagaaaataatgactggaagataagag

SEQ ID NO: 360709 - DNA, 201 bp, Homo sapiens
ccctccaggttttagaagaccctgtttgtatcccagtccataagttccttccactacaaaataaatttctttctttctttctttcttttttttttttttttgagacagagtctcactctgtctgtcgcccaggctgaagtacagtggcatgatctcggctcactgcagcctccacctcctgggttcaagtgattctcctgc

SEQ ID NO: 360710 - DNA, 201 bp, Homo sapiens
cgcaaattctgccattcagggtgaagcaattctcatgctcagcctctcgagtagctgggactatgggcacacgccaccacaccaggctaatttttgtattkttagtagagatggagtttcaccatgttggccaggctggtctcaaactcctggccttgagttgatctgcccaccttagcctcccaaagtgctgaaattaca

SEQ ID NO: 360711 - DNA, 201 bp, Homo sapiens
tccctccaggttttagaagaccctgtttgtatcccagtccataagttccttccactacaaaataaatttctttctttctttctttcttttttttttttttttgagacagagtctcactctgtctgtcgcccaggctgaagtacagtggcatgatctcggctcactgcagcctccacctcctgggttcaagtgattctcctg

SEQ ID NO: 360712 - DNA, 201 bp, Homo sapiens
aaatggggacaccaatgctccaagaggctaagtaatttgcccaggttactaggtacaaatgcaggtctgtctgtctgcctctggagccaattttcccatcrtactgctatacccacttggaagtgtaaggaaaatagcagtttgtcccacagcagaagtttgcaggctaggggagggtgatgggctggactcacagcatcc

SEQ ID NO: 360713 - DNA, 201 bp, Homo sapiens
tttgaaattaaatgactcccttctgaacagtggtgtttcttccacgataacagttattgatccattggacctaatattgagatttaaaggtgctcatatascttaaaataaaatgcagccaataacatttcttacattgacttcttttctctaatttttaaaagagttcagtgaattcagccctgaagttgaaattgtgaa

SEQ ID NO: 360714 - DNA, 201 bp, Homo sapiens
tcatcttcccatggctccctccaggttttagaagaccctgtttgtatcccagtccataagttccttccactacaaaataaatttctttctttctttctttcttttttttttttttttgagacagagtctcactctgtctgtcgcccaggctgaagtacagtggcatgatctcggctcactgcagcctccacctcctgggtt

SEQ ID NO: 360715 - DNA, 201 bp, Homo sapiens
gattgaaagagttgagctgaattcttgcaaggagggccgtttgctcactgattacagcctagggtgccagtgagctgttaggggcacatagtctgctatgraggaaagtgctggggtgcctactgctttgggccgtaaatcaagctcaggacttggaatgaggagcctcgcaggactagagcaggggccttcccagaagga

SEQ ID NO: 360716 - DNA, 201 bp, Homo sapiens
ttattgtttaaatcttttaaaagataattgtggggtagaatgtagttggaaagggatttgttaccatggtttgccaaccattgcggcattcaaaacacccwgataaaatggtggggaatcagaaggagggagtggactgtgagggaatagcatcctgggcctagcagagctggtggctgaggtcctattcagggaccaccc

SEQ ID NO: 360717 - DNA, 201 bp, Homo sapiens
caatttctgatccaggaggcccggggtggagcctcacaagttgcatgtctacccagcttccagtgatgccagtgttgctggtccagggaccacactttgaraagcactggttagggaatgccaccattcaggggagaggacagaaagcagaacccacacaaacacacagaaagataatcccgcaaatctgtaacacagatc

SEQ ID NO: 360718 - DNA, 201 bp, Homo sapiens; identical to SEQ ID NO: 77796

SEQ ID NO: 360719 - DNA, 201 bp, Homo sapiens
acaaagaataaagatcactgcaaatagtagccacgtgggtaaatatatgctatttttcttattgtttaaatcttttaaaagataattgtggggtagaatgyagttggaaagggatttgttaccatggtttgccaaccattgcggcattcaaaacacccagataaaatggtggggaatcagaaggagggagtggactgtgag

SEQ ID NO: 360720 - DNA, 201 bp, Homo sapiens
cctcccctactagactgtctattttgattgcagggactaccacattggtcctgttcaccactgatcccagctccttaggcatacagtaggtgcttactacstgtttgatgaaccagagcctggttctccagttttcttagtacttccaccctggaagtactaacagtaagccttgagcacactatatgagatttatctgtg

SEQ ID NO: 360721 - DNA, 201 bp, Homo sapiens
cactacagaatgcttagggagcaaagagaactgaagtttagggcaaacttgagcgtgcatcagaatcacctgaaagactgtgaaaacacagatgctggccyctatccacaatttctgatccaggaggcccggggtggagcctcacaagttgcatgtctacccagcttccagtgatgccagtgttgctggtccagggaccac

SEQ ID NO: 360722 - DNA, 201 bp, Homo sapiens
gtgaaaatatcttccaaaaaaaaaaagataccagatagaaatagagatctttattcacaaagaataaagatctctatttctatctggtatcttttttttttattatttctgtctggtatctttattcacaaagaataaagatcactgcaaatagtagccacgtgggtaaatatatgctatttttcttattgtttaaatctt

SEQ ID NO: 360723 - DNA, 201 bp, Homo sapiens
gtttccttccttttccttaccacttatcacaggtggaattaaaatacatatttgtgtgaacattggtgtgttgtgtgcctcccctactagactgtctattytgattgcagggactaccacattggtcctgttcaccactgatcccagctccttaggcatacagtaggtgcttactacgtgtttgatgaaccagagcctggt

SEQ ID NO: 360724 - DNA, 201 bp, Homo sapiens
tcattctggagagaaaaatgaacttaagaaaggatgggtaagctctgcactacagaatgcttagggagcaaagagaactgaagtttagggcaaacttgagygtgcatcagaatcacctgaaagactgtgaaaacacagatgctggcccctatccacaatttctgatccaggaggcccggggtggagcctcacaagttgcat

SEQ ID NO: 360725 - DNA, 201 bp, Homo sapiens
ttttccccaaaattaaagaggacggggtactttccaactcactgtaaaaccagcattatcctgataccaaaatcagacaaagatattacaaaaaaagaatwttacagaccaatatccctcatgaatgggttgggcaggtggtatcatcgtcattattcacttttcttcaggtcagcaactagaagatcaaaggataaagag

SEQ ID NO: 360726 - DNA, 201 bp, Homo sapiens
gagattggaggtaggactttgggatgtcatgtagaagttcctgtgtgaccaaggtatccctggattttgctcattccctaaagactggagaggaagtgggrtttgcagttagccaaaccctgtgcctgagttctcttggcaggaggagagctgaccctgtcctctgcctccccttatgtttccctctagctgcaacagcaa

SEQ ID NO: 360727 - DNA, 201 bp, Homo sapiens
ccagccagtcctgtcccttcatttcacagagaagttaagactcagagaggcgaagtgacttacccaaagtcacacagcacatgagcatctagtgacatgayggctttcctcagatgacttcattttattgcaaagcaagcccgtgctgtttgctgttaatagccaaactgtgggggacatcatcatatcaacttagaagag

SEQ ID NO: 360728 - DNA, 201 bp, Homo sapiens
gggaacaggctttcacaattagatttgtacttgtctagaggcatggtgcttctatgagaagactgccacaggggcagtgaaagggtcctggaaacaagctrgcaggatatgtttgggaactcctgtgctgggaactcctgcggtggagcagcaagggacccagagcagacagctgcatccccctacaggggtgggagttga

SEQ ID NO: 360729 - DNA, 201 bp, Homo sapiens
ggagcccctcccacttggagggaggcaaactgcaatgagccagtgccagtggccccctcctgctgcagggagccatccataagccttcccttgcctgttcragatgcccccagcacaatgccaggtgccatgagggattcagaagttcaggagtgctcaaaattaaaatccagccagtcctgtcccttcatttcacagaga

SEQ ID NO: 360730 - DNA, 201 bp, Homo sapiens
gaaggccttaattggtcactctgtaatgactgtggccatctgcattcggggtgatttagcgatggggctttgcccaagcaggggcctcaatgattagagcyggccagggtgatatttatccctctgatgggagtagtggtgtgtggtacaggagattatctcattctcgttgtaatgacctatcagttgaacccagccaag

SEQ ID NO: 360731 - DNA, 201 bp, Homo sapiens
catgttgctgtgctgaagtaatcactgtgagcttcatggaatcatgcattcagctttggagatcttctaagtcatgcctgctacttggaatctgagtttgrgttttctgaagcagatcctgggacagtgcaaatagtttatttgggaggagatgccaggaaatatcagcaagaaagtacataagtaagaacagaaagaggg

SEQ ID NO: 360732 - DNA, 201 bp, Homo sapiens; identical to SEQ ID NO: 77799

SEQ ID NO: 360733 - DNA, 201 bp, Homo sapiens; identical to SEQ ID NO: 77780

SEQ ID NO: 360734 - DNA, 201 bp, Homo sapiens; identical to SEQ ID NO: 77782

SEQ ID NO: 360735 - DNA, 201 bp, Homo sapiens; identical to SEQ ID NO: 77783

SEQ ID NO: 360736 - DNA, 201 bp, Homo sapiens; identical to SEQ ID NO: 77784

SEQ ID NO: 360737 - DNA, 201 bp, Homo sapiens
attccaggccaaaagctcaagaccaccagcctctcctcctgcctggaaaaataagcctttgtgaaagactgatttaccatgtacaattgtgattgtgaacrttgttgagtaaacctccagactttctctaaagtggtctctgccttcttccttctcatgtgtcattcttcttttcatcattcttcacgtagaccacctact

SEQ ID NO: 360738 - DNA, 201 bp, Homo sapiens; identical to SEQ ID NO: 77787

SEQ ID NO: 360739 - DNA, 201 bp, Homo sapiens
ggggacagacagaggaacagtttaaaggataccacagagatgcaagcagcaaaatgcagactgcagggactcctataagataaatagcccagtttcttcamcaaacaaatcgaaggggaaaaaaaaaaaggagggcagaagcttatgtataaaagagacttaggagacgcatgagctgtatgcagtacgtggaccttgttt

SEQ ID NO: 360740 - DNA, 201 bp, Homo sapiens
cctcttcaccagttagctgacccctttctccactgccatcaccagatctgctgcctgcaagaatttgcctgccacctttattgggtgatagaaaatgtctycctcataaaggatattttgtattttatttttataggatagaaatgtctctcccttatgagattacaactaaaacaaggagcagtaataagagccagcatt

SEQ ID NO: 360741 - DNA, 201 bp, Homo sapiens
gttaaggcaggaacttttgtagaaaaccagatatcaccagtctttcttggccgcaaaggattcagctgagttaaggaaaggggatttttaagaaggggtgstttcatttatttgtgaaggccaacataatgaagttggagcagattcccagagaatgctggatgaaatgatcaaaaggattagagagaaggggaaagggca

SEQ ID NO: 360742 - DNA, 201 bp, Homo sapiens
ataacaacatgtaccatttgtcgagtgctcctatttatttatcgatgtaccgggcattgtgctgaacacattgccagttgtatcttacttgttcctattcrgaattgttgtgtgatgatgatttatttcttttatactcaacattgtcttctggtttacaaactgttacaactattttgtggtttagcctctctgcaattg

SEQ ID NO: 360743 - DNA, 201 bp, Homo sapiens
aagatgggagtgtcactggtgtgagtggcggctttctattttcttctgtgtcgtccccaggtcccctttgtctgctgtgatctgcagcctaataagaggcrgagaaaaggggctttgcttgggctctcaactggaaggtggcttgtgggcaggtctatagagccaggtaccctgctggatactggagagattaatttgagc

SEQ ID NO: 360744 - DNA, 201 bp, Homo sapiens
gtctatgacctggaagtccaggtttccatattagtggtacttctgaagtttagaaatcttaactctaaaagaatccaattattttcacaatcaaaaaaaaataaaaataattgattcagctgtagtacaacttttggatgcttactcttggttttttaatccagggaacagatttagagataggacagaattccttggctt

SEQ ID NO: 360745 - DNA, 201 bp, Homo sapiens
gtagaacaacaacagtgtgtcctagcagtctcagtgtctatgacctggaagtccaggtttccatattagtggtacttctgaagtttagaaatcttaactctaaaagaatccaattattttcacaatcaaaaaaaaataaaaataattgattcagctgtagtacaacttttggatgcttactcttggttttttaatccaggg

SEQ ID NO: 360746 - DNA, 201 bp, Homo sapiens
tgtagaacaacaacagtgtgtcctagcagtctcagtgtctatgacctggaagtccaggtttccatattagtggtacttctgaagtttagaaatcttaactctaaaagaatccaattattttcacaatcaaaaaaaaataaaaataattgattcagctgtagtacaacttttggatgcttactcttggttttttaatccagg

SEQ ID NO: 360747 - DNA, 201 bp, Homo sapiens
gcgctgagcctggggagaagaatagaataggattcctggagacagagaagcagacaaggatgctctgagctgacagatttgcaagagtaaaagagtgaaarcaaggaaattagtcgagcagtgtctgcagagaatgcaccaggggcagggctgagatgagagatggttctggaaaggttggttctggccatcctgagaagc

SEQ ID NO: 360748 - DNA, 201 bp, Homo sapiens
cactgggatgtgtgcatgtgtttgttcatgtttgtgtttgagcctgtgctaacaaatcgaatacctgggcatcgagcagctcatacataaccagaggaccraacagtctttctgtccatcactggtctgggttcagaatgcatagacctcccagcccacgttgcctcacatacaccacattgtggagttctctcggaggca

SEQ ID NO: 360749 - DNA, 201 bp, Homo sapiens
ggggagggcctgtagatggaatgatttgtaagctgggaaaggaaaaaatctaggtttttctttttttggaccatcactgggttttttttgtttttttttttgtttgtttgtttgtttgtttgtttgttttgtttttgagacagagtctcgctctgtcatccaggctggagtgcaggcgtgatctcggctcactgcatcctc

SEQ ID NO: 360750 - DNA, 201 bp, Homo sapiens
aattggtgcacattttggagcggagtggggctttctcctgaagggctgtctcctccttcatgtaccattaacgccatggtaaacgcaccctcctaaccacrgccatccgcagaggcagctttttgctagagcctcattttgcccctgaaatcttgggctgtgtgagttaaacaagccctctccactcagaccagctgggca

SEQ ID NO: 360751 - DNA, 201 bp, Homo sapiens
aggggagggcctgtagatggaatgatttgtaagctgggaaaggaaaaaatctaggtttttctttttttggaccatcactgggttttttttgtttttttttttgtttgtttgtttgtttgtttgtttgttttgtttttgagacagagtctcgctctgtcatccaggctggagtgcaggcgtgatctcggctcactgcatcct

SEQ ID NO: 360752 - DNA, 201 bp, Homo sapiens
cataaacttctggctttgaagagtttatgttcctttcaaggtgctggaaacagccccatcaacctccttatttggccttcaaaataattttttaaaatctrattgaattgccaatattgagaactcccataaaaatctgcttctccagttctcctgatatcatctctgagacctcattcccacgaggccacaggtgggttt

SEQ ID NO: 360753 - DNA, 201 bp, Homo sapiens
gaggggagggcctgtagatggaatgatttgtaagctgggaaaggaaaaaatctaggtttttctttttttggaccatcactgggttttttttgtttttttttttgtttgtttgtttgtttgtttgtttgttttgtttttgagacagagtctcgctctgtcatccaggctggagtgcaggcgtgatctcggctcactgcatcc

SEQ ID NO: 360754 - DNA, 201 bp, Homo sapiens
gaattactcctcctttgctctaggtcataaacttctggctttgaagagtttatgttcctttcaaggtgctggaaacagccccatcaacctccttatttggycttcaaaataattttttaaaatctgattgaattgccaatattgagaactcccataaaaatctgcttctccagttctcctgatatcatctctgagacctca

SEQ ID NO: 360755 - DNA, 201 bp, Homo sapiens
tgggaggggagggcctgtagatggaatgatttgtaagctgggaaaggaaaaaatctaggtttttctttttttggaccatcactgggttttttttgtttttktttttgtttgtttgtttgtttgtttgtttgttttgtttttgagacagagtctcgctctgtcatccaggctggagtgcaggcgtgatctcggctcactgca

SEQ ID NO: 360756 - DNA, 201 bp, Homo sapiens
agatgattgcaaggcaggggttaagtgcaggaaagccaaggctacagatggggatgtatatctgggcccattcctatgaaatatggaaaccaagcaacacstctctaactataggtatgtatgtggattttttaatgcttggaagtatatatatatcaaaatgttaatagtggtctgggtggtagaattacaggtggtttt

SEQ ID NO: 360757 - DNA, 201 bp, Homo sapiens
taccaacaccaggagtaactaacatttggcctgtgttggcaaagcaatttctactgaccattattgtgcatgatccttataataatgtaggatcctcaggyctaggtagaattaccctcatttgactgatggaggccttgaggttcagagaggaaacaagacttgtcctagttgacatgactgcagaagctgaggttagaa

SEQ ID NO: 360758 - DNA, 201 bp, Homo sapiens
gggctgggggagggagcctcaagtctcaggcctgtctgccacaaacttgctggtggcccaggaagccctgccctctctgattcataatttcaccatctgtratatgaagagaatggcttacatttgtgcttttcaagcttttttccttttttcaatagtaaaaacgtttttcaaaataaatcttacccaggagcctcatgt

SEQ ID NO: 360759 - DNA, 201 bp, Homo sapiens
gccgactgcatcaactccctctccctttgtgtgctagagacccttcagcatacgcagctctgggatgatgccaggattccatttggagacttctgcacccrttgcttttgtgtcttcccatctgcatgtgagaggaaatacatagggaactcttaaaagttgatgcttattttggggaaagcaaggagacagtgaagcagg

SEQ ID NO: 360760 - DNA, 201 bp, Homo sapiens
gaggacattgacgctcaggaaggatacatgagtaggctaaggtcacatggcaagtttgaggtaaggctcaccttacctggaagctaggtctacaccaaggyacctaccttccactctgtacctcccagcccctccctcttccaggtcatagaccgagtacctggctgccactgtcagacatttggctccatgacagagaga

SEQ ID NO: 360761 - DNA, 201 bp, Homo sapiens
gccgtggggaggctgcctggaacaacatgcaggtaagggccgcccctcagggactggcagccaggttctctgaaacatctgcagcctggggtgctgacacrgccagctgggagggagaggcatgggtcagtgataaatgacaagagtcagccccggggatgagttttaagatcttcctgaacaccgtggaaaggggattcc

SEQ ID NO: 360762 - DNA, 201 bp, Homo sapiens; identical to SEQ ID NO: 77786

SEQ ID NO: 360763 - DNA, 201 bp, Homo sapiens
ttcccataaaactcagtgttatcaagaagactaagtgaaacaggacgtgtgaaaagaaggcaggacacacccagaagctgagcaagggtgatattgcaacstggcccagagcggttaggtgactgggcagggtccctccaccggaaggtggcagtgccaaggctaaatcccagatgccctggctccaagcccagtgctcat

SEQ ID NO: 360764 - DNA, 201 bp, Homo sapiens
agtgagctgtgtgtgccactgcactccagcctgggtgacaaaacgagaccatgtctcaaagaaagtttgttgttgttgttgttgctgttgtttttttttttaaaaggcccacctgataaagagacattaccgcctcctgcttgttatagaaccattattatagattaattcagtggataagagctaactgtagtaatactt

SEQ ID NO: 360765 - DNA, 201 bp, Homo sapiens
gattgagaccatcctggctaacatggtgaaaccccgtctctactaaaaacacaaaaaattagccaggcgtggtggcaggcgcctgtagtcccagctactcrggaggctgaggcaggagaatggcgtgaacccaggaggtggagcttgcagtgagtcgagatcgcaccactgcactccagcctgggcgacagagtgagactc

SEQ ID NO: 360766 - DNA, 201 bp, Homo sapiens
gccttagtggcatctaatcagccctagactaaacagtgctctggaccagtctaaaaatatcataaattattacccaaaaggatcaaactgtttccaaatayataatgcacccagaacaaagcttgataatacttacatcaatacataaatattcactactaagcaatgtgaaacccaatcaaagattatcaggtatgcaaa

SEQ ID NO: 360767 - DNA, 201 bp, Homo sapiens
cacagtaaacagaagaaaggatgtgaaaaagggcaaagcagggatcaatgaaacagaaaatcaaggaaaccaaaagctggtcaaaaaacaacaacaacaamaaaaaaaacttaggagaaatttaaaaagccacaattatgaaattatgagatttcaacacctctgtctcaataactggtaatacagatagacagaaaatca

SEQ ID NO: 360768 - DNA, 201 bp, Homo sapiens
gagggaacagaggaggggcctcactgtgctttcccacgggctttgccatttgtttcatggttttcactgtcaaatcccagatttttttttttttttttttygagacagggtctcgccctatcacccaggctggagtgcagtggcacgatctcagctcactgcaacctctgcctcctgagctcaagcaatcctcccatctca

SEQ ID NO: 360769 - DNA, 201 bp, Homo sapiens
ctggcagatggacctctggcatcaataagctgtggaactcctgttccaggtgggtgggagtggagctaaggaggccttagatacctctgtcaccagcccayccacccagccagccagccagcatccaagttactaactgcaaaagatgtcactactgccagcgctcctgacaccccccttttttggagtcaccaagtgtgg

SEQ ID NO: 360770 - DNA, 201 bp, Homo sapiens
cgagggaacagaggaggggcctcactgtgctttcccacgggctttgccatttgtttcatggttttcactgtcaaatcccagatttttttttttttttttttcgagacagggtctcgccctatcacccaggctggagtgcagtggcacgatctcagctcactgcaacctctgcctcctgagctcaagcaatcctcccatctc

SEQ ID NO: 360771 - DNA, 201 bp, Homo sapiens
aacctctttttcatcgaagagtcctgggatccacagatgtgtccctcaatagaattcaggggagtctgtgaagttggatgagaaaaacgttgaattttttwaaaaaattaacctttatctgaaatttcgtgttcccttcagttgtgaatgtaggcaacaaagccctgtgatgtcccccaaggaaagcatttgctttcacat

SEQ ID NO: 360772 - DNA, 201 bp, Homo sapiens
gcgagggaacagaggaggggcctcactgtgctttcccacgggctttgccatttgtttcatggttttcactgtcaaatcccagatttttttttttttttttttcgagacagggtctcgccctatcacccaggctggagtgcagtggcacgatctcagctcactgcaacctctgcctcctgagctcaagcaatcctcccatct

SEQ ID NO: 360773 - DNA, 201 bp, Homo sapiens
gacatgctggggctaagtgacaaaacacatcagcctgcctccaggcaccatccatcatttgcactctcactacatccagtgaacacattttagagatgagracattgacgctcaggaaggatacatgagtaggctaaggtcacatggcaagtttgaggtaaggctcaccttacctggaagctaggtctacaccaaggcacc

SEQ ID NO: 360774 - DNA, 201 bp, Homo sapiens
gggacgctcagcgcgtaggtacggagggcaggattggccatgggtgggctctgtgaagggcatatgcacatatgcttgtgtgtgtgtgtgtgtgtgtgtgtgtgttcatgtgtgtgtttagcaggggtgtctggacctcctgttggctccctccctgtcagccaccatcccttcccctgattcccagatgcccctcttcac

SEQ ID NO: 360775 - DNA, 201 bp, Homo sapiens
ggctactcagaaagccccatcccatgccccagtgtagtgtgatgtttcatctgagtctccctgtgacctgattcaggtgagatgctggggcattcgggtgrgggggtatcgttggggagaggagacagttaaggacattgcagaaggcacacatctttgtgtctagtacgtctttatatcatgacactcacacatctgctg

SEQ ID NO: 360776 - DNA, 201 bp, Homo sapiens
agggacgctcagcgcgtaggtacggagggcaggattggccatgggtgggctctgtgaagggcatatgcacatatgcttgtgtgtgtgtgtgtgtgtgtgtgtgtgttcatgtgtgtgtttagcaggggtgtctggacctcctgttggctccctccctgtcagccaccatcccttcccctgattcccagatgcccctcttca

SEQ ID NO: 360777 - DNA, 201 bp, Homo sapiens
tctttccacctataagatctcaatcagtagaatgcagtgctaaagacttcatcttggtaacatgtttggcagcttacaaaatgccttcattcccataaccycctttagttcctacaacaatactttgaggttggcattaccatgatcatctctactttgtagatgtaaaagatgtgctgtcacctaggattgggccctttt

SEQ ID NO: 360778 - DNA, 201 bp, Homo sapiens
ctgacagtttatttggggaaggggagtgtgagcctgagacagcgatggtgaggataaaagggaaagtgattcaggaaacttcaaggggtgatgactgcagytttctcttcacagtagtgccaacacccagcaggtatgctcttgcagcatgggggcactgcttcagtagctcaccagggggaacagcatctcagaggagtc

SEQ ID NO: 360779 - DNA, 201 bp, Homo sapiens
gagggacgctcagcgcgtaggtacggagggcaggattggccatgggtgggctctgtgaagggcatatgcacatatgcttgtgtgtgtgtgtgtgtgtgtgtgtgtgttcatgtgtgtgtttagcaggggtgtctggacctcctgttggctccctccctgtcagccaccatcccttcccctgattcccagatgcccctcttc

SEQ ID NO: 360780 - DNA, 201 bp, Homo sapiens
gtaggcagatcttaatttgtttgctgccctaaaaacaaaaataaaatcaaagcatctttcatcatttatggcaattttgatttacttataaagtttgcctyatctacagtaatcatctttcctcgtgtttatgaggtgttttgtagtttacaaaaagctttcaaataggcaactctcatttgactctttcaagtgtgctgt

SEQ ID NO: 360781 - DNA, 201 bp, Homo sapiens
cagtggagttcaaggtgaattctgtttatgttttgggttgtggtggagctagtgaagccgcaattatgagcgaaaacagattgcaatgacaccaccccccscaaaacgaccttctaaatatcatcctaccatactcaatttaatcattaccaacccctggctaagcttctcacaggggaaacactttccacgccacccaga

SEQ ID NO: 360782 - DNA, 201 bp, Homo sapiens
ttcctcagtcacacaagccacatttcacatgctcaatagccgtatgtaactgagacagcacagatacagatcatcacagaaaattctgtcggacagccctrctctagagacaagtgtggaacacatgacacagccgtgaacatttagtccctggctgctctgcctatgcagtagccatttttttgtttctttacttctcta

SEQ ID NO: 360783 - DNA, 201 bp, Homo sapiens
ggtctaatccatgatgtcttatgaagcattacaagctgcagatgacagagacctgtttcttgcctgactggattggagtagtcagagcccttgggctccaygtctcagcttgcaccttcctggaaatctgactttgtcaatgtttactttgcagagtaaataggtgttgctcagtccacaagctccagaaggcaagatgat

SEQ ID NO: 360784 - DNA, 201 bp, Homo sapiens
ggagggacgctcagcgcgtaggtacggagggcaggattggccatgggtgggctctgtgaagggcatatgcacatatgcttgtgtgtgtgtgtgtgtgtgtgtgtgtgttcatgtgtgtgtttagcaggggtgtctggacctcctgttggctccctccctgtcagccaccatcccttcccctgattcccagatgcccctctt

SEQ ID NO: 360785 - DNA, 201 bp, Homo sapiens
tgacaaagattccaggtagaaaaagtagtctgggagttgtaatttaaattctgaaatatcagaatttccagacatttaaaaaatttctccgggcaaggtgrtgtgtgcctgtagtcctagctactccggaggctgaggcaggagaatagcttgagcccaggagtttggggctttagtgcactatgctgatcgggtatctgc

SEQ ID NO: 360786 - DNA, 201 bp, Homo sapiens
ctgagcaaacacttctggtctcctgcttactgtgtttgggtccctcatgttatctgtcctggggtctaatccatgatgtcttatgaagcattacaagctgyagatgacagagacctgtttcttgcctgactggattggagtagtcagagcccttgggctccacgtctcagcttgcaccttcctggaaatctgactttgtca

SEQ ID NO: 360787 - DNA, 201 bp, Homo sapiens
tacagcctttggtcacattgtccatttgtaataccatcttagatattaattaccccaattagagaaggccctttcaaatattacatcacctccaagtcgcrctattcataccataaagctataaatgccaactattgttttattcttcctttttgacacctgcttctctatggagaggtattctttcccagagtttgtcat

SEQ ID NO: 360788 - DNA, 201 bp, Homo sapiens
gaatttttttttttttgtattttttgtagagccagggtttcaccatgttgcccaggctagtcttgaactctggggctcaagtgatccacccacctcagccmcccaaagtgcctgggactacagttgtgcaccaccacacccgcctaatttttttttttttttttttttttgtattttttgaagagccagggtttcaccatg

SEQ ID NO: 360789 - DNA, 201 bp, Homo sapiens
tcatcctccccccacccccacatatgattgagggataattgacaagtaaaaattgtgtatatttaaggtgtacaatgtgatgatctgatatatatatacaytgtgaagtcataccacaatcaagctaattaatgtgttcatcacctcccatagctaccttttttgtagtgagaatatttaagatctattcttttagcaaac

SEQ ID NO: 360790 - DNA, 201 bp, Homo sapiens
catgagctgtatgcagtacgtggaccttgttttgatcctgtattaaacaaaccaactatagaaagacgtaacatcagggaaatttgcaaaccaactagatrtttgatgatattaaggaacaatgttaattcttctgggtgttataatggtatgaaagacgcacaaggggcagggccttccacccctaagcttaccgtgggg

SEQ ID NO: 360791 - DNA, 201 bp, Homo sapiens
cagagtaaatgggcaggttggttggcaggttggccaacaagttccaataccttcacccggctttcaaggctctgtatctttggtccacccttggcagttcrtttctgttccattttttccagcatggtttttagaacaaacctgaccaatgaccagatcatgtatgaatgaatgaatgaatgaatgaatgaattaggtaat

SEQ ID NO: 360792 - DNA, 201 bp, Homo sapiens
ggatgctcaggcgtgggtgtggaaggacagagtaaatgggcaggttggttggcaggttggccaacaagttccaataccttcacccggctttcaaggctctrtatctttggtccacccttggcagttcgtttctgttccattttttccagcatggtttttagaacaaacctgaccaatgaccagatcatgtatgaatgaatg

SEQ ID NO: 360793 - DNA, 201 bp, Homo sapiens
acacaaaggcttccctcaagagcagttacactggagtctgggggtgggatgcaggtatcatcattttttaaagctcccaggtgatgcttatgtgtggccayggttggcagtcactggtgtagatgctttctgaagggccctccatcctctcccatgattccttccagaagtctctcttctgctttttacttggacagaacc

SEQ ID NO: 360794 - DNA, 201 bp, Homo sapiens
ctttgactgggagatgtactacaagcggatcccgatccctccagaactgcagaaagctgaccccagcgacccatttgagtaagtatgaacaaccctggctkgtcccagtggctacccagtgaccactcccaacacgcacacaactcaggatcgccatctcccttaaaagcccaatgcagagggtccagcttcccagcccca

SEQ ID NO: 360795 - DNA, 201 bp, Homo sapiens
ctgaccccagcgacccatttgagtaagtatgaacaaccctggctggtcccagtggctacccagtgaccactcccaacacgcacacaactcaggatcgccayctcccttaaaagcccaatgcagagggtccagcttcccagccccacttagtaccaagtgtcagatatccccagccagtagcaccatccctcccagcttgta

SEQ ID NO: 360796 - DNA, 201 bp, Homo sapiens
ttaccttgtaaaatttagttgacttttaaaacaactaagtaaattgtagtaaagtagatgaatgtggcaaaaatctagatggtagtatatgattgtcagaractggggaaacacagctagaagaaggaaaccatcatgtttccacagcaaacccaggaatttactggccgtatgtctaatccttatgccttttctttttct

SEQ ID NO: 360797 - DNA, 201 bp, Homo sapiens
gagtgacaagatgcaatgtactgctgcttttaaagactgctcgaactgctacaaacagactagactacagaggggcgagccctagccagtgcagtaggccrtggagtgcagtgctccagaccaggctcagcagaggctgccagcaggctgtattcctgccatgtcactgtcacagtgccagtgtgtgagaatcttactgct

SEQ ID NO: 360798 - DNA, 201 bp, Homo sapiens
atcacctgaaatgcagcctgatatttagtattgttttttggttcattacaaatgcacttacaatcaatttcatgaccccacctatggaccgtgccttgcartttaggaaaaagcaaaaatgctgttttctttcctggaagaaaaatgtgctatcacttgatgaaggaagcttgggccccaggcagctgctggctgccctgg

SEQ ID NO: 360799 - DNA, 201 bp, Homo sapiens
agcttctgcctctaaagtttcctcccttcatgggtccaaaatttgaagactgatagttgtaattgccaaaatcattgtagcttccatcacctccagaatcrcttccatcattaccaaatccattatagccatccccaccgccaccatatccaccaccaccatggctgccaccaaagccaccacaaccactgaagtttcatc

SEQ ID NO: 360800 - DNA, 201 bp, Homo sapiens
cctgtgccaccacaccaggctaatttttgtaatttttgtatttttagtggagttggggtttcgctatgttggccaggctggtctcgaactcctggcctcargtgatctgcccacctcggccttccaaagtgctgggattacaggtatgagccaccatgcccagccggtgctgcttaaattaagaaagaaaacatttgggaa

SEQ ID NO: 360801 - DNA, 201 bp, Homo sapiens
tccaccccactggcagagtcatctttgtaagatgtaagtggattgtgtgtctccctcactgaagaccttctgtgaagactccttgttctgccccgtgaggsccctgcgggagccctgcccgcgtctctggcctcccctcccatccctcttcccctttctccctctgctcctgccctggctttctttttgattatgccaagc

SEQ ID NO: 360802 - DNA, 201 bp, Homo sapiens
gagacagagctttgatttaaaaccatccattctgattctagaacctttactcctaagctttacatgctttttcccccatttattaggatcatactgtataygttactttacaactatttttttaaaagacacatttattcagcgtcatgatcagactattacatttagcaatcaacagcatgggtgcaaaaaaaaatcaac

SEQ ID NO: 360803 - DNA, 201 bp, Homo sapiens
agttcaaaatctgggagaaagagcttttcaagctgtgtctggaagatacaattatgcaatattaattaaaatggtaattataattagaattaaaatatgaygttattcaatcctttaagaatgacactggtaaatttcagtatcattcttaaccagtctggccatggtcagagtgtccagacttgttttcagttggagtga

SEQ ID NO: 360804 - DNA, 201 bp, Homo sapiens
cactttctcctaaaatccatagtttatattagggttcactctggtgttgtacattctatggatttggacaagtgtaaaatgacatatatctaccatatgaygtatagcatcatacagagtagtttcactgccctaaaaatcctctgtgctccacctgttcatccctccctttccctaaaccctggcaaccaccaatcattt

SEQ ID NO: 360805 - DNA, 201 bp, Homo sapiens
ggatggagaatcatttgagccctggagttcgaggctgcagtgagccatcgtagtgccactgtactctagcctggccaacagagtgagaccttgtctcccaytccccatctccctaaaaaaaagaatgtaaaataccttaatcagtgtattacattgattgcatgttgaagtggtaatagtttaggtagagtacattattaa

SEQ ID NO: 360806 - DNA, 201 bp, Homo sapiens
accaccatgcccggctaatttttgcatttttaatagaaacagggtttcactatgttggccaggatggtctcgatctcctgaccttgtgatccgcccacctyggcctcccaaagtgctaggattacaggcatgagccactgcgcctggccaatacatttctaaaaaaggtggtggtagactgagttcaagaacagatattcc

SEQ ID NO: 360807 - DNA, 201 bp, Homo sapiens
aggacggatgtgtgggtgcaggtatgtctttcctttctgtagggaagaagatttttgcaaactgtaaaacactgagcaaacagtctctggtctcaacctcygcctaaaatatgtccctgtcccttcacccctctctttataatagcagcccccattttggggagaagctcaatatgccaggcccatatattctctcattta

SEQ ID NO: 360808 - DNA, 201 bp, Homo sapiens
aacatttgggacccctgcctgaccttctgctcctagagcaatccttcacactgaggtgcaaatgactgataacagcttaaactgctaactcccctttaacstttcagaggaaattttagattgcaatagggaaaaaacttacgaaggaggtaaaaccgaagagttaaaattggggtggggggacaacagccaggggttgaa

SEQ ID NO: 360809 - DNA, 201 bp, Homo sapiens
gacataggaaagctgatatcagggcaccccaggtcttagttcctttagttcagaatactcactggctcgggtttgctgccagtgtcctttgaggccaggtygctgatcctgatggctgcctctgtgctcctgtgtgtgtttgtcctgctgtgtcatgattaactggatagctaattcatattcatattacattagaatcac

SEQ ID NO: 360810 - DNA, 201 bp, Homo sapiens
ccttcctcatcccatagtcctgctgtttggcagagagcctggcaatatctatatctttgatcctggccctgctacatactatctctgtgaccttgacccastcacttcccctttctgagctttagttccctcatctataaaatgggatcacaatagtacctacgacctcttaggtggctgtgactgtcaaattagttaata

SEQ ID NO: 360811 - DNA, 201 bp, Homo sapiens
gtcctccattcctgggcttgttaatgaatgagatttattgggcattgttaataatctgcaatgaaggtgaaagcaggtggaattataaggctatgctttcygtccagtcttctcagaaattgtcttttttttcctatatgctgtcagaacatatggtttagaatattctaaataataacctcactccaggctctgttaata

SEQ ID NO: 360812 - DNA, 201 bp, Homo sapiens
gagatgcccaccttatttataagcaaccaggaatctcaaaataaccaataacttcctgtcatctcctatttgtcctccattcctgggcttgttaatgaatkagatttattgggcattgttaataatctgcaatgaaggtgaaagcaggtggaattataaggctatgctttctgtccagtcttctcagaaattgtctttttt

SEQ ID NO: 360813 - DNA, 201 bp, Homo sapiens
ataccacagagatgcaagcagcaaaatgcagactgcagggactcctataagataaatagcccagtttcttcaacaaacaaatcgaaggggaaaaaaaaaaaggagggcagaagcttatgtataaaagagacttaggagacgcatgagctgtatgcagtacgtggaccttgttttgatcctgtattaaacaaaccaactata

SEQ ID NO: 360814 - DNA, 201 bp, Homo sapiens
ctcatgttccttttgtgttggcctcatgctgaaggtatcaaaatggcttccagaagcttcaggctgaccaacccctactgcttggccaacccagcagaaartatatgcctctttcccagtataccagtaaaggtgcaggaatcaagtcttattcttggatcctgcacccatcactggggccatcggggaagacgaaaagca

SEQ ID NO: 360815 - DNA, 201 bp, Homo sapiens
cagcctccaagtaaacccattgcaaacagagatacttcagagcttcttcccaatttccttaaagaacttccagcccctgaagctttcaagaacatctttaycagacaaccacaactccagagttaattatgttttgatttgaatctggaggcacctttagagctgtttacatcagaggcttaaaatgctaccaattttcat

SEQ ID NO: 360816 - DNA, 201 bp, Homo sapiens
cagtctttgcaagcagacgagcatgccaccatgggatcctgggtctctgagctgagaggacctacccattcattgatggataggttggagcttggaaaagrggagcataagagttggggctctttcagaagaccaatttaaagtaaaaaaaaatggggggaatatattgtgtttgactcacatatgagcctggggtagcta

SEQ ID NO: 360817 - DNA, 201 bp, Homo sapiens
aaaaaaaaaatcaaataaatcgctcagattgcatctgaagaatcaaaagctccaatgttttggaaagagttgtttctgtagtggaaaatagctgcattatrttttcagaaaggtgatgcttctattgacgtgggtgaaccttctacattttaaaaacttggtgcagtaagagtgtggtaaatcacggatattctcctgatt

SEQ ID NO: 360818 - DNA, 201 bp, Homo sapiens
tgtgtgcccgatgattgatgtaattgaccatgacgactttcggtacgagacacaggcaggggatgccatgcggggagcctttgactgggagatgtactacwagcggatcccgatccctccagaactgcagaaagctgaccccagcgacccatttgagtaagtatgaacaaccctggctggtcccagtggctacccagtgac

SEQ ID NO: 360819 - DNA, 201 bp, Homo sapiens
ttcaaagataaaattattcagaatttcaagacagtggcagcagagctttaaatcaagccaggccctcctgagcatggggacctgtgaactgcgcatggtgyggcccgtgaggcccatgctggccgaggcagaccagtctttgcaagcagacgagcatgccaccatgggatcctgggtctctgagctgagaggacctaccca

SEQ ID NO: 360820 - DNA, 201 bp, Homo sapiens
catcctggtttctttcacttaactttttacagtcccttccccttgtcattgtgaaatgactacccatctcttcttctttgagacaatggtgacatagagamaggtgtcaagcaagaccagaatatcagctgtattgttgcagaggctgatccagagaacacaacatgaatctctttgtaccccttatcttctgaactgact

SEQ ID NO: 360821 - DNA, 201 bp, Homo sapiens
tccggtttgaagggaaagcagggcctctgggacccccagcgcccctatttattcagtgtcttcgcacatgctgcatgcagacagggcagagaggaacagcrtgcttctctgctcatgcacacgctccagtgtcccatcagatttcacttacaaaacagttcaaagataaaattattcagaatttcaagacagtggcagcag

SEQ ID NO: 360822 - DNA, 201 bp, Homo sapiens
ctgagatttgagacctcaggctctcatcagttgtttcaaagctcaaccctccaatgaaaagtgtcctcagctgctcgggctctttagcagactctgacttrgacatgatggcagtgggaggagactttaatggtgcttcctcagtggcgcccatgggcagaaagctacaattttttttttctgttaatgtatcacagccat

SEQ ID NO: 360823 - DNA, 201 bp, Homo sapiens
acttgttagttagtgttctcagtgtagaaaaattaaaactttaagttattagcatgaattttacctttcatctttatattatgcagtgacaatttaaaatkcagattaacagcatgtaactcatgttcagaatgggtgaaatgacatgatctgtatttcccacctgctgcatgcataagtatttctcaccagaacaatcta

SEQ ID NO: 360824 - DNA, 201 bp, Homo sapiens
tttttaaaagacacatttattcagcgtcatgatcagactattacatttagcaatcaacagcatgggtgcaaaaaaaaatcaacattaaaaccctttgttcraatgctttacactttccacagaacagggactaaagtaacctgttatacagttaatcacaaatacagtccttgagttttttgcccatacacatgaatattt

SEQ ID NO: 360825 - DNA, 201 bp, Homo sapiens
cctatgggccaactataagctgtgaagcccttaaaacatgcataatgataaatagaaacacagaaggcctaaactcacggtggggctgggatttttgatgsaacataaaataagaagggttgacctcgacctgccaggacccttttcaccccactgcctggctttggcttcttggaaagactgacccctccattgcttctt

SEQ ID NO: 360826 - DNA, 201 bp, Homo sapiens
aagaaagaatatacaggcttctgtaactggaaagtccaaggtagctctagcttcagacatggctggattctggtgttaaaaggcggaatgcattcctggayccagccctccgctctgcttcattctgggttgatttcatccttggacaggctctccttgtctctccttggaggccatatggcccagcagctctggctggca

SEQ ID NO: 360827 - DNA, 201 bp, Homo sapiens
agtagcagcaacctttgcacctcaaaggattattagaaattccagctgctgatggaattacaccttttggtttcaaattataatttgcctttatcacatarcttggtcaaaactctcagttgaaaatgacaaaaagccaaatcaaattggcttagcgaagaaagaatatacaggcttctgtaactggaaagtccaaggtag

SEQ ID NO: 360828 - DNA, 201 bp, Homo sapiens
cagtaaatgatgcttaaatgcctgtgcatttcacctgccaaaacccgtcctgatataaacatagctttccttctcaacttgtctttttaattttcctgctstttatatttacctgtctataagtttttcaagcaagggaaagccttagacatcctagaggactagggttggaaactggtatttgccaggcagaatagagag

SEQ ID NO: 360829 - DNA, 201 bp, Homo sapiens
tggaatccatactcctgatttgataacctttctcagtctcagattatcattctgtggaatgagaggtctcatgtccaccccgcagagctgctgtgattacmtgagaacaagatgtgcaaagtgtctgaataaatgcttgctcccctcctactctttgtacttccccctgcaaaaactgagctatgctctatatccaaatca

SEQ ID NO: 360830 - DNA, 201 bp, Homo sapiens
ttggggaaggtgtacaatctttctttaggttgcaagtcattccagccactcattttcagaaaaaaggccagagaaataaacttaacatgttaatctaagcmatcagtccaggaggccttgattgttaagggatggtgaaaagagactgacttagacttgaattccagagaagccaacatgagctgtttgatcttgggcagt

SEQ ID NO: 360831 - DNA, 201 bp, Homo sapiens
ttatgtccaaaaatggagaccacctgtatcaattttggtgtgtctttccctgcaggacgtctgaatcttcaaggcatatcctgaaaggattttgtgccagygtttatctgaaaaaaaaaaaaaaaaaaaaaaaaaaaaggctccaaacatctaacaacaatgacaaaatcagtgactgctttaggtcctgcccagtctgcc

SEQ ID NO: 360832 - DNA, 201 bp, Homo sapiens
acttaggagacgcatgagctgtatgcagtacgtggaccttgttttgatcctgtattaaacaaaccaactatagaaagacgtaacatcagggaaatttgcamaccaactagatgtttgatgatattaaggaacaatgttaattcttctgggtgttataatggtatgaaagacgcacaaggggcagggccttccacccctaag

SEQ ID NO: 360833 - DNA, 201 bp, Homo sapiens
acctccactgcccttggtccccctctccaaagttaatcctttcctagagagctgctgctgatctttgcatatgcttccactatgaaaggaaagcacagtakttaggagcacaggctctggagtcaacccggcctggattcagtccctgctctgtcacttaccagcaatgataagatcctccaactctccaaacctcgattt

SEQ ID NO: 360834 - DNA, 201 bp, Homo sapiens
gtgtaaacatatagaaaaagacacagaaggatatattccgaagtcccaacagtggttacctatgagacaggggagccaaaccagattaaagatcatggtcraaagaaacttcacccttttttgtatttataatgttttatttcctttcacaaggagaatatgtttatgtatttctcatttaattaaaaaacaatactatct

SEQ ID NO: 360835 - DNA, 201 bp, Homo sapiens
gctcaggagtttgacaacattttcctatgggaaacataggaagaccctgtctctacaaaaaaaaaaaaaaaaaagaaaaaattagccaggcgtaatggtaygtgcctgtagttgcagcaacttgggaggctgaggcaggagaactgcttgagcccaggaggtcgaggttccagtgagctgtgctcgtgccactgcactcca

SEQ ID NO: 360836 - DNA, 201 bp, Homo sapiens
cattgaatatgccttcgtcagagtgttgtattattttttcccctgttttctgcctgtgtgtgtatgagcctttgccacaagagccttattaatcattcggwgttgaaggttaccaagaaaaatatgccagagtgtgacaggccattagtatttgtgttgtaaggaaaccagtaatcatcttaattggtgcacattttggag

SEQ ID NO: 360837 - DNA, 201 bp, Homo sapiens
ttttggtagtaaggagggtttggtgtaagggaactaccgggaaacaacagcctgcaaagatgattgcaaggcaggggttaagtgcaggaaagccaaggctrcagatggggatgtatatctgggcccattcctatgaaatatggaaaccaagcaacacgtctctaactataggtatgtatgtggattttttaatgcttggaa

SEQ ID NO: 360838 - DNA, 201 bp, Homo sapiens
tctgattacacagagtagtgaagattcctgaacgaagcaaactatatctgagtcctatcttcagcacataacttgttagctgtgtagccttggacaagaartgttttctggaccttgtcttgaagtgaaggtgttgaactgggacctgcttccctcacagggttgtgaaaatcagatgagatgaaggttcgcagacgcctc

SEQ ID NO: 360839 - DNA, 201 bp, Homo sapiens
actctgcttaccatgcctggtttctggctggagacacaggtgggcagttgttctttctgagcctgcctggtcctcaggttccctcttctgggcctgggaarattccctatcctcccacaggagctgatgtcctcagccagagctcaccatgttggtacaattcctgagactccccctcctgcctggatcctggcctccctg

SEQ ID NO: 360840 - DNA, 201 bp, Homo sapiens
actctggcccagccctctcttccctggaggtcctggagcttgaatggttggcctctcgttatttgctccccctcccattccgggcctggccctgcctctcmagctcaggagggagccaaggaagggccagggccaggtccagcgggagtaggcatgccttagagctcactggtgatgtcagcactcgccaaaaaatgacat

SEQ ID NO: 360841 - DNA, 201 bp, Homo sapiens
tcagctccaagtccatgtgataaattggatattgcttttgcttatctaattctcattgccccagccagactgtcaagtcgttgtggtactgtttgtgcatygtactgaattatgacatccacatgatagatgtagaatgcccctttgaaatgtatcgcacacactctgtctgtcttgcacgctgtagagctggggtgggac

SEQ ID NO: 360842 - DNA, 201 bp, Homo sapiens
ttatctaggagtccaagcactaaaagctttcaaacaagagtcacttgacaatttttaaaatgataatttccttaaaaaaaaaagactgaaattgctgaagrgtaatttgccacaatgtgcagagcatagagatggtgaagtgctgtgaactacaagtaattgctcttaatgtcatgatggcccagttggttcagtgttgat

SEQ ID NO: 360843 - DNA, 201 bp, Homo sapiens
tctgattggcctttcaggttaaagctccgtatgtggcctgggaatggtagttggctttctgccttggtcctcaacccaaagagatgctggcgtctgcctayctgcctccccgcctcccacaacatacaaaccagctcccaaccagctccatctcgttaagggaaaatccaaaattgtcatctgcttggcaaaggggggtat

SEQ ID NO: 360844 - DNA, 201 bp, Homo sapiens
actcttattctgttagttttctctatttatcagtcagggaaattgggctccacctgcccaggaagtaaaacctaggttttcctaactctggaaccagaatrttccaagtcattaaactagactacctttcccattgatgagcattcattcattcattcagctggtatttttcaagggcctaagattagtcaggtattggcc

SEQ ID NO: 360845 - DNA, 201 bp, Homo sapiens
ttaggagcactgttacatagaagagaacatagttctttcttgattggaagcctccttctccacacctttcaggggaagaaatcaatagtccctctcccctstctatccccccactttacgctccaatcctaagtctgcctgggtaatgaattgtaacagtttagtagctttctatagttttttctttgcttatacagtata

SEQ ID NO: 360846 - DNA, 201 bp, Homo sapiens
tgatttctaagtggtgttggccttgaaagggtttaagcaaaaagaaaataatgactggaagataagagtgattatcagttctctcccttcattaagatggyatcaagggcagtgtgatgataagacaagcagaacagcttagcttaggagcactgttacatagaagagaacatagttctttcttgattggaagcctccttc

SEQ ID NO: 360847 - DNA, 201 bp, Homo sapiens
gaaatccattttgccccatccctctttgcatttcaacacatcactcttgacactgcccaataaacctctattccccatttcttgtcttctctccagcagcyttagtttgcttctgacaccaccacaacttgttagcatggccatttcccacttacagtttattgcttgggttctttcgcctttttgagttcttttgctgct

SEQ ID NO: 360848 - DNA, 201 bp, Homo sapiens
tcttagcaggtgtttgcagagctgttgaaaagttgttgcagtgattggtgctggaaggagtatagacaatgctgggcccgttagttcacatggtagtgagytcacctcacccatgaggccagggtcaatagtcctcttcccataacgggcttattaactctgacctgcactctcacaccatgccagtcatgggaacacatc

SEQ ID NO: 360849 - DNA, 201 bp, Homo sapiens
ctatggtatgatctcattgacagcattttctccagctcaactgcctttctacaaacaaacacatgtaggaaatggttcccagcagaagttcttagcaggtrtttgcagagctgttgaaaagttgttgcagtgattggtgctggaaggagtatagacaatgctgggcccgttagttcacatggtagtgagctcacctcaccc

SEQ ID NO: 360850 - DNA, 201 bp, Homo sapiens
ccaccgtgcctggccacatcactggttttttaggagacttaaatcagctcttctcctttgaaattaaatgactcccttctgaacagtggtgtttcttccamgataacagttattgatccattggacctaatattgagatttaaaggtgctcatataccttaaaataaaatgcagccaataacatttcttacattgacttct

SEQ ID NO: 360851 - DNA, 201 bp, Homo sapiens
tagattggcactgcctaggagaaggcattttcctctgaaatgaatctcctccaggatcctcagggcaactaattgtaattcagctaagggtcgagacctcrggtaggagacaaaattggagcaaatgaattctcgaaataagatccagagctttgtgcaggcagcatcaaggactcgagtggaagcagaagctgacaccag

SEQ ID NO: 360852 - DNA, 201 bp, Homo sapiens
acctgctcattttacagatgggaagcccgaggcctggagcagtaggcagacttaaccaggagcacacagccagctggttgcaagagagggacaagaccccrtatctgggccacagtgcagccttgtccccactcgccttgggtggttaagtgacacatctgcagaaacacgttattcctttctatttccaagggcacttct

SEQ ID NO: 360853 - DNA, 201 bp, Homo sapiens
agaacctcacaggcacatgtggggttcaggtgcctctcctggtgtggtctgtatttactttctgaaaaagtgttcactagggggagttacactgctaaaaraagtatatgaaaaccactgtgtaactcaacctgctcattttacagatgggaagcccgaggcctggagcagtaggcagacttaaccaggagcacacagcca

SEQ ID NO: 360854 - DNA, 201 bp, Homo sapiens
aggcagggaatatttgaaaattcagactggaattccaggccaaaagctcaagaccaccagcctctcctcctgcctggaaaaataagcctttgtgaaagacwgatttaccatgtacaattgtgattgtgaacgttgttgagtaaacctccagactttctctaaagtggtctctgccttcttccttctcatgtgtcattcttc

SEQ ID NO: 360855 - DNA, 201 bp, Homo sapiens
cttccaatggctggctcgcctcatcccatcatcatttaggctgcaccactaccattattcaccatgctgcatgcgcggttacatggctgtttgttgagctrtttattcattgtcggtcttcccccactagaccacttgtggtctggaaggaggtgattagtaaatgtttgtgaatgagtgaatagatgcatgaggagggag

SEQ ID NO: 360856 - DNA, 201 bp, Homo sapiens; identical to SEQ ID NO: 77778

SEQ ID NO: 360857 - DNA, 201 bp, Homo sapiens
ttcccagtctcctctcccagcctcatccttctcccagcatgagctgccacccacaggccaagggctcacagctgggcagcagaaagggaaaaaaatgagcraactgctcaagtgattgattttctgcagcataaacagcctccaccacctggggacaaacacctgagccttccctcaggtacgggctgcctgctctgagca

SEQ ID NO: 360858 - DNA, 201 bp, Homo sapiens
attattaaatttcaaattaaattttaaaattaaattaaaatcaaattaaaaactattgtgcctcaatgtacactattaagaaagtgaaaagaggccaggtkcggtggctcccacctataatcccagcactttgggagtctgaggtgggcagatcacttcaagtcaggagttcaagaacatcctgaccaacatggtgaaacc

SEQ ID NO: 360859 - DNA, 201 bp, Homo sapiens
agtatacagaggtgcatgtacaggacggatgtgtgggtgcaggtatgtctttcctttctgtagggaagaagatttttgcaaactgtaaaacactgagcaaacagtctctggtctcaacctccgcctaaaatatgtccctgtcccttcacccctctctttataatagcagcccccattttggggagaagctcaatatgccag

SEQ ID NO: 360860 - DNA, 201 bp, Homo sapiens
tgatgtttcatctgagtctccctgtgacctgattcaggtgagatgctggggcattcgggtgggggggtatcgttggggagaggagacagttaaggacattrcagaaggcacacatctttgtgtctagtacgtctttatatcatgacactcacacatctgctgtaccctgtgctttactgggtgggagaaaaagagatgcca

SEQ ID NO: 360861 - DNA, 201 bp, Homo sapiens
gaagccattaaaaatatgctgtaagccggtggttcttaaacttgagggtacaccagaatcaccaggagggctcgttaaaacctagtttgctgggtcccccsacttgtagtttctgattcagcaggtcaagtctggctgagaacttgcatttctaacaagttcccaggaaatgctgtgagaactactgttgtagaagaaact

SEQ ID NO: 360862 - DNA, 201 bp, Homo sapiens
ccagtgaccactcccaacacgcacacaactcaggatcgccatctcccttaaaagcccaatgcagagggtccagcttcccagccccacttagtaccaagtgycagatatccccagccagtagcaccatccctcccagcttgtaacaacctcagctcatggcccaccaggctggtctccaccttgcccacttctgcacagttt

SEQ ID NO: 360863 - DNA, 201 bp, Homo sapiens
gtcagctgttcatgttctcattgcagaaatgtcttcctcggacccgaacttggttacttggtttctgatcggctcatatcatccctgaaaaatactggagkctcagttaaatgttattttgtactgaactgtgcagtgaggaataaggaaggatgaccttttggtccataaggattttctgctaaaagaacgtgaaagcct

SEQ ID NO: 360864 - DNA, 201 bp, Homo sapiens
gtggtagaaaattccatgaagccattaaaaatatgctgtaagccggtggttcttaaacttgagggtacaccagaatcaccaggagggctcgttaaaacctrgtttgctgggtccccccacttgtagtttctgattcagcaggtcaagtctggctgagaacttgcatttctaacaagttcccaggaaatgctgtgagaacta

SEQ ID NO: 360865 - DNA, 201 bp, Homo sapiens
aattgataacttttcaatgtcttaatatcagttatatctttttctaaatcttctcccttactgcaaactcttagatgatgtttacttcttgtcacctccastgtgtctgtccctagaaggcttgtacgctttctaatttgccatttcaattcagctggaataagaaacccagttattagtttttcaagtattatctaaagt

SEQ ID NO: 360866 - DNA, 201 bp, Homo sapiens
aaggaagtctggaaggtcccaaagggagagaggctgacttttccatcagaactggactactggaatcaggggagtcctgttcacacagctggaatgagctstctgccagatgcaacggttaagtcagggcaaggacatatcttccctcccacagtttcccttggtgcctctagcagaggtacaatttgaaactaagaagtc

SEQ ID NO: 360867 - DNA, 201 bp, Homo sapiens
tgcctggacgttgcactgtgcacacattttctcatttaatcttcacaactcatgaagtgactgccatttttatcccctgcatatctgtttagaaatgtatwaactgcaaaaaaaaaaaaaaaacagaaaacttgataaacaataactcaaacaagtgtaaggattcattcacttatctgtctctatctatttattaaatat

SEQ ID NO: 360868 - DNA, 201 bp, Homo sapiens
cagtgtgtgtcaatcaacatccccaattgtgtgtctttgtccctgtgctgtacacctctcactaagctttgcgcattcagggttgaaacctaatcagaccrtaaaccaaaggatagtgaaagtgcttttgcaacagagaaaatgtttccaccaactctcagttgcaaaattctaaactccacagaagtctcttctttcaca

SEQ ID NO: 360869 - DNA, 201 bp, Homo sapiens; identical to SEQ ID NO: 77771

SEQ ID NO: 360870 - DNA, 201 bp, Homo sapiens
taaagaggacggggtactttccaactcactgtaaaaccagcattatcctgataccaaaatcagacaaagatattacaaaaaaagaattttacagaccaatrtccctcatgaatgggttgggcaggtggtatcatcgtcattattcacttttcttcaggtcagcaactagaagatcaaaggataaagaggtgtgccaaagtc

SEQ ID NO: 360871 - DNA, 201 bp, Homo sapiens
gacccggtgggcaccttaaggcacctcagtggtccacttcttccctctttccctttcagatccgaaatgtgggcacagggctgtgtgcagacacaaagcayggggccttgggctccccactaaggctagagggctgcgtccgaggccgtggggaggctgcctggaacaacatgcaggtaagggccgcccctcagggactgg

SEQ ID NO: 360872 - DNA, 201 bp, Homo sapiens
gcgacagagtgagactccatctcaagaaaaaaaaaaaaaagaaataattctatacaaatttttccccaaaattaaagaggacggggtactttccaactcaytgtaaaaccagcattatcctgataccaaaatcagacaaagatattacaaaaaaagaattttacagaccaatatccctcatgaatgggttgggcaggtggt

SEQ ID NO: 360873 - DNA, 201 bp, Homo sapiens; identical to SEQ ID NO: 77775

SEQ ID NO: 360874 - DNA, 201 bp, Homo sapiens
ttcattcacttatctgtctctatctatttattaaatattgcataacaagagatccaggactggtacaactggctgctcagcgctgtcatccaagaaccagrctgtttctttgtttctgcttcctcatcctcatggtcacaaaatggtacctctggcaagtctgcctttcaggcagggaaaagggtggagagcaaagggcac

SEQ ID NO: 360875 - DNA, 201 bp, Homo sapiens
agggcagtcctccacatgaaatcacaactattcaaactcagggaggtcttttatacatatccgcgtgtgctgtatatgcagagattggaggtaggactttrggatgtcatgtagaagttcctgtgtgaccaaggtatccctggattttgctcattccctaaagactggagaggaagtggggtttgcagttagccaaaccct

SEQ ID NO: 360876 - DNA, 201 bp, Homo sapiens
caagttttagaagctctgtgccaggaaccagggacaaagaccaaagtctatagttcttattataaatcacaatatcacagctggacagagaggccagagtrttactgtagggcagtcctccacatgaaatcacaactattcaaactcagggaggtcttttatacatatccgcgtgtgctgtatatgcagagattggaggta

SEQ ID NO: 360877 - DNA, 201 bp, Homo sapiens
agatcatgtatgaatgaatgaatgaatgaatgaatgaattaggtaattaatgtttgtttggggtttcaacagtcacagaaagaaaaattcacaagcccccrgggcagaaaagtgaatgcattgcggccagttgtcagcagcatccacatagggagtccagcgggtatggagagggtaggaggtgatagatgggagcaggtg

SEQ ID NO: 360878 - DNA, 201 bp, Homo sapiens
cctcacccccaatcttcagatgccatttgcaaatccagaccttgggtaattctgaccagccggctgtaaattggtggttcccctccttagatttgattatmtgccagagtgtctcacagaactcaggggaacacgtttaccagtttattatgaaggatattagaaaggatacaaatgaacagccagatgaagagctgcata

SEQ ID NO: 360879 - DNA, 201 bp, Homo sapiens
cactgcactccagcctgggcgacagagtgagactccatctcaagaaaaaaaaaaaaaagaaataattctatacaaatttttccccaaaattaaagaggacrgggtactttccaactcactgtaaaaccagcattatcctgataccaaaatcagacaaagatattacaaaaaaagaattttacagaccaatatccctcatga

SEQ ID NO: 360880 - DNA, 201 bp, Homo sapiens
gcatcatcatccccttccacaacgagggctggtcctccctcctccgcaccgtccacagtgtgctcaatcgctcgcctccagagctggtcgccgagattgtrctggtcgacgacttcagtgatcgaggtaggatccgtcccacccagcctcccaccctctgtgcttcatctggcgactcaccaaagggatggcaggttttcc

SEQ ID NO: 360881 - DNA, 201 bp, Homo sapiens
ttgaacctgagaggcagaggttgcagtgagccaagattgtgccactacactccagcctgggtgacagagtgagaacctgtctcaaaaaaattaaaaaaatwaaaaaaataaaagataaaaggaaagcacatacacacacacacacacacacacacacacacacacacacgataaggaccagtgaggtctgacaggaggtgg

SEQ ID NO: 360882 - DNA, 201 bp, Homo sapiens
cgtgaacccaggaggtggagcttgcagtgagtcgagatcgcaccactgcactccagcctgggcgacagagtgagactccatctcaagaaaaaaaaaaaaaagaaataattctatacaaatttttccccaaaattaaagaggacggggtactttccaactcactgtaaaaccagcattatcctgataccaaaatcagacaaa

SEQ ID NO: 360883 - DNA, 201 bp, Homo sapiens
cctgcttcttaggatgctgttgcccttcttagcacacccagagcgagttccggtttgaagggaaagcagggcctctgggacccccagcgcccctatttattcagtgtcttcgcacatgctgcatgcagacagggcagagaggaacagcgtgcttctctgctcatgcacacgctccagtgtcccatcagatttcacttacaa

SEQ ID NO: 360884 - DNA, 201 bp, Homo sapiens
agaggaacagtttaaaggataccacagagatgcaagcagcaaaatgcagactgcagggactcctataagataaatagcccagtttcttcaacaaacaaatygaaggggaaaaaaaaaaaggagggcagaagcttatgtataaaagagacttaggagacgcatgagctgtatgcagtacgtggaccttgttttgatcctgta

SEQ ID NO: 360885 - DNA, 201 bp, Homo sapiens
tcctgcttcttaggatgctgttgcccttcttagcacacccagagcgagttccggtttgaagggaaagcagggcctctgggacccccagcgcccctatttattcagtgtcttcgcacatgctgcatgcagacagggcagagaggaacagcgtgcttctctgctcatgcacacgctccagtgtcccatcagatttcacttaca

SEQ ID NO: 360886 - DNA, 201 bp, Homo sapiens
cctggtaaaatgggccaggggctcacatgcagccacatgggtgcagcctcttcctcactcctctgcctgtctcacctctttacaggtgaatctccccagartgcctcccaagaagccgtcaaaaaacaattttcacctcaagatctgttcccagggaacccaatatctaccagttatggatgtgaatattttggggtaatg

SEQ ID NO: 360887 - DNA, 201 bp, Homo sapiens
ggaggccgaggtgggcagatcacgaggtcaggagattgagaccatcctggctaacatggtgaaaccccgtctctactaaaaacacaaaaaattagccaggygtggtggcaggcgcctgtagtcccagctactcgggaggctgaggcaggagaatggcgtgaacccaggaggtggagcttgcagtgagtcgagatcgcacca

SEQ ID NO: 360888 - DNA, 201 bp, Homo sapiens
ttcctgcttcttaggatgctgttgcccttcttagcacacccagagcgagttccggtttgaagggaaagcagggcctctgggacccccagcgcccctatttattcagtgtcttcgcacatgctgcatgcagacagggcagagaggaacagcgtgcttctctgctcatgcacacgctccagtgtcccatcagatttcacttac

SEQ ID NO: 360889 - DNA, 201 bp, Homo sapiens
tggcaggaggggcagtgggcagctcacagctgtgcttcccactgggaattgccctagacagccttgctgaaggttatgccccctcccaatgactaattgaygcttggatataaaggccaggctgcttgtctcactctaggaccacttagaaaggccttctcagctgcagagttcctggtaaaatgggccaggggctcacat

SEQ ID NO: 360890 - DNA, 201 bp, Homo sapiens
tgtggtggttcacgcctgtaatcccagctttgtaatcccactttgggaggccgaggtgggcagatcacgaggtcaggagattgagaccatcctggctaacrtggtgaaaccccgtctctactaaaaacacaaaaaattagccaggcgtggtggcaggcgcctgtagtcccagctactcgggaggctgaggcaggagaatgg

SEQ ID NO: 360891 - DNA, 201 bp, Homo sapiens
gttcctgcttcttaggatgctgttgcccttcttagcacacccagagcgagttccggtttgaagggaaagcagggcctctgggacccccagcgcccctatttattcagtgtcttcgcacatgctgcatgcagacagggcagagaggaacagcgtgcttctctgctcatgcacacgctccagtgtcccatcagatttcactta

SEQ ID NO: 360892 - DNA, 201 bp, Homo sapiens
ccccaggctgctgagtcagaggctgccgtggagcccagccagctgtgtttcaacatgccctgcaggtgcttccgatgaggcccaaggttgaaaatcgcagstgtaatgaataggtgggaggttgtgcagagaggatgctcaggcgtgggtgtggaaggacagagtaaatgggcaggttggttggcaggttggccaacaagt

SEQ ID NO: 360893 - DNA, 201 bp, Homo sapiens
acagctgaagctgccctggtgtgaggctgtggtgagagctgaagtgtctggagagcacctgccccctagacagcacctgccccctagagaggggcacccamtgtcacctccagcccattgctgttgcatgagactctggggtcagtgttgcccaagtttaagaaaaaccagaaatgaggggttttgtatggaatcttccac

SEQ ID NO: 360894 - DNA, 201 bp, Homo sapiens
aagagcgttgtcctgtgacttacaaggaaagccgagaggctcaaagaggccgcgcgtctccctgagagccatcagtgggtgggagctgagctccgggaagygtcaggggccgcgtggagggaaaggagagccggcagtgccctccagtggtagcagagcctaacgacgccctcaccagccatccgcgctgcccacagcccc

SEQ ID NO: 360895 - DNA, 201 bp, Homo sapiens; identical to SEQ ID NO: 77794

SEQ ID NO: 360896 - DNA, 201 bp, Homo sapiens
ctggggattatcaagttaaatcagcaaagattattctagttgtaaatgacaaaaaacctaactcaaactgacttaagtaaagaaaatgtattggtttatayaactgaaaaggccaggaatagaccttggcttcagtcatagctcgatccgggtccccgactgatgccagtaggaatctctctctccaactcttggctctgt

SEQ ID NO: 360897 - DNA, 201 bp, Homo sapiens
ggcctaagtctgcagctcgagggaggatgggggaaagggaacagggacttttcacactctacccactaagactcagtttctgcctcttattctggtggagytgtctctgacttccacttagtcagtttcttgatggctccaagacgactggacatagtctttctgagaatgttatattttaagggactgtcctttttgcag

SEQ ID NO: 360898 - DNA, 201 bp, Homo sapiens
tttgtgccttgcacaccatattcatccattagagttcctctttcctgctgtcatccttggtttaaagcttgagtatgtggaatatattgcatgttacatckgtaggagggccaaaaattttatcatgtgggacagcagtgtgaagaaactgtcactagatttttttaaaatgttattgttaggctgggtgcggtggctcat

SEQ ID NO: 360899 - DNA, 201 bp, Homo sapiens
aagggggatgcctggaagggccttggattccctggaagacacttggactgtgttcagggagcagcatggaacaccgccgctgggggaatggcattatcggkccacatgagagcatgtggccaggacatctgcaccttcacaccatgttcttcttctctgacaggtctcccgtgatggccggtggactgttcgccgtggatc

SEQ ID NO: 360900 - DNA, 201 bp, Homo sapiens; identical to SEQ ID NO: 77788

SEQ ID NO: 360901 - DNA, 201 bp, Homo sapiens
ttaactgcttatcagcattccatagtttgaatttttcatcttttatttaatcttcccctattggtggacattcactgtttctgctcttttcactatttcartgtgtgtcaatcaacatccccaattgtgtgtctttgtccctgtgctgtacacctctcactaagctttgcgcattcagggttgaaacctaatcagaccgta

SEQ ID NO: 360902 - DNA, 201 bp, Homo sapiens
ttcttctctctatcttgtttcttcctctttgtaatgagaattatattccctacattgtaagattattttgacaattaaatgacttaatgcatattaagtgmctacagcactgtctggcatattggaaatcctcaacagatgttttctattattgtcattgtcactttctgccttattttttaactgcttatcagcattcca

SEQ ID NO: 360903 - DNA, 201 bp, Homo sapiens
tatagttttataagaaactgccaaattgtcttccaaagtggctgtaccattttgcatttccacctgcaatgaatgagagttcctgctgttccacctcctcrtcagcatttgatattgtcagtgttttggattttgtcaatagctgcttagtggtctctcacttttattttcacttgaattttctaatgacatatgatatag

SEQ ID NO: 360904 - DNA, 201 bp, Homo sapiens
tctcttgtattttgacttttgttttctagtgctccagcatcaagccctgatggtacatcttagtatattatatatgtctctgtgtcccaagagctcagaawcctttagggaatgttaaattaggagctgtttggtcacaagcaagctgagttatctccctttcctcccaatcccatcatggccctctgcccaggtcacttt

SEQ ID NO: 360905 - DNA, 201 bp, Homo sapiens
acttcagtctgtgcctttctaggctgttttcattttgctgtcacttcacagccatacacaggaaggcagaaagaaattatcataatttattactgtttatkttatttgcttgtcccccacaaccctgattagactgtgtatcccacgggacaggaacgacagcttgtttcctgccattttaattccaggtcttagcatagt

SEQ ID NO: 360906 - DNA, 201 bp, Homo sapiens
gtgcccgatgattgatgtaattgaccatgacgactttcggtacgagacacaggcaggggatgccatgcggggagcctttgactgggagatgtactacaagyggatcccgatccctccagaactgcagaaagctgaccccagcgacccatttgagtaagtatgaacaaccctggctggtcccagtggctacccagtgaccac

SEQ ID NO: 360907 - DNA, 201 bp, Homo sapiens
caccaagcagctcctctaagcctcactaccttacttggaaaacagaagggttggacgaggcaccttccaactccagttcaactcagcaactattcatggcstgcttgttgatggcaaggcacaggcctgggcatgaggctgtgccactaataacacttcagtctgtgcctttctaggctgttttcattttgctgtcacttc

SEQ ID NO: 360908 - DNA, 201 bp, Homo sapiens
tgttgggactaaactgaggagccaggtccacctcccagctggccacgttgtctgggatcaccaagcagctcctctaagcctcactaccttacttggaaaamagaagggttggacgaggcaccttccaactccagttcaactcagcaactattcatggcgtgcttgttgatggcaaggcacaggcctgggcatgaggctgtg

SEQ ID NO: 360909 - DNA, 201 bp, Homo sapiens
atacatgagtaggctaaggtcacatggcaagtttgaggtaaggctcaccttacctggaagctaggtctacaccaaggcacctaccttccactctgtacctyccagcccctccctcttccaggtcatagaccgagtacctggctgccactgtcagacatttggctccatgacagagagagccttcatttcctgaaagcctct

SEQ ID NO: 360910 - DNA, 201 bp, Homo sapiens
accacttggaacataacagcagacactggctcctttaaactgtgtctgatttagatttgttatttacatccagggtctccaaaagattttctctttgtgtkgggactaaactgaggagccaggtccacctcccagctggccacgttgtctgggatcaccaagcagctcctctaagcctcactaccttacttggaaaacaga

SEQ ID NO: 360911 - DNA, 201 bp, Homo sapiens
caggactccttcttcagccagggctgtgggcttggtcatttctgtcagaagggaaggcatgggcaaggtaggccccatgactgacctgatcagcatataarttccttgttggaccaagatggtacctgatgaccctcctgtttacagagcaccaacatgttcctttcttattcacttctcagctcaaacctacaagtccat

SEQ ID NO: 360912 - DNA, 201 bp, Homo sapiens
ctcagctaatggagtatcccatgcaaggaatcacgggcaatagagggaaatgggaatgttttctaggtggaatgtgagaaaggccacacagccaagccccscaggggaaggaggtggagccacggcacagacaggcctcttagtgcctgaaaggggaaatttttccaaggctggcctccaggttctcttatgatctcctca

SEQ ID NO: 360913 - DNA, 201 bp, Homo sapiens
gggttggcattagaccgcactgcctcctgtccagggcgctgcctcctcctccacttgacaaccttgacgtgtagaattgcagcccccgggacctagaagascgttgtcctgtgacttacaaggaaagccgagaggctcaaagaggccgcgcgtctccctgagagccatcagtgggtgggagctgagctccgggaagtgtca

SEQ ID NO: 360914 - DNA, 201 bp, Homo sapiens; identical to SEQ ID NO: 77779

SEQ ID NO: 360915 - DNA, 201 bp, Homo sapiens
atggcccagttggttcagtgttgatagggccttgcaaatcgtgtagaacaacaacagtgtgtcctagcagtctcagtgtctatgacctggaagtccaggtktccatattagtggtacttctgaagtttagaaatcttaactctaaaagaatccaattattttcacaatcaaaaaaaaataaaaataattgattcagctgta

SEQ ID NO: 360916 - DNA, 201 bp, Homo sapiens; identical to SEQ ID NO: 77781

SEQ ID NO: 360917 - DNA, 201 bp, Homo sapiens
tccttttattccagtcagactgtgttaaagagaaagctcatgtctgtctcatccccgagaggagggtagagaagggctggagagctgagcctgagccttgrgctgaggaaagaggcttacaatcagtatgtgtcaggagaaggcctaagtctgcagctcgagggaggatgggggaaagggaacagggacttttcacactct

SEQ ID NO: 360918 - DNA, 201 bp, Homo sapiens
aaatcgaaattctagaaatgaaatcaacaatgtctaaaatgagaaatatactgaatgggattaatggcatagatattgctggaaaaaaaagattaatgaayttgaagatgtagcaaaagaaactactcaaaacacagaaaaagattttaaaaattgaaaagaggttcaattacctgtgggtcaagtttaaaaattctaata

SEQ ID NO: 360919 - DNA, 201 bp, Homo sapiens
attgtcagattggataagaaaacaagattcaaatacatgctccctgcaagaaacacactttaaatgtagagatacaaataagttaaatgtaaaagacagaraagatataccatgctaacaccagtcaaaagaaagctgcagaggcaatattaatatcagtcaaaatagatttcagagcaaagaatattaccaggaataaag

SEQ ID NO: 360920 - DNA, 201 bp, Homo sapiens
cagaaggcacacatctttgtgtctagtacgtctttatatcatgacactcacacatctgctgtaccctgtgctttactgggtgggagaaaaagagatgccaytgtagctcttatagccccaggcatggaaactgtacgtgaccctgggtatatccgtgtgatcctgtcactccgtgaacatcatcagtcatatgtgttttca

SEQ ID NO: 360921 - DNA, 201 bp, Homo sapiens; identical to SEQ ID NO: 77776

SEQ ID NO: 360922 - DNA, 201 bp, Homo sapiens
gtgccaacacccagcaggtatgctcttgcagcatgggggcactgcttcagtagctcaccagggggaacagcatctcagaggagtccgtagacagagagaaraggaagtttttctacctgattgtctctcatctcctgcttcccattggtcatagtcccaactgacttcccagttgtgtcatccagttctgtggtggctact

SEQ ID NO: 360923 - DNA, 201 bp, Homo sapiens; identical to SEQ ID NO: 77792

SEQ ID NO: 360924 - DNA, 201 bp, Homo sapiens
ggataaaagggaaagtgattcaggaaacttcaaggggtgatgactgcagctttctcttcacagtagtgccaacacccagcaggtatgctcttgcagcatgrgggcactgcttcagtagctcaccagggggaacagcatctcagaggagtccgtagacagagagaaaaggaagtttttctacctgattgtctctcatctcct

SEQ ID NO: 360925 - DNA, 201 bp, Homo sapiens
gggatttttgatggaacataaaataagaagggttgacctcgacctgccaggacccttttcaccccactgcctggctttggcttcttggaaagactgacccstccattgcttcttgccccatagaaccttaagcgggtggccgaagtgtggatggatgagtacgcagagtacatttaccagcgccggcctgaataccgccac

SEQ ID NO: 360926 - DNA, 201 bp, Homo sapiens
gatagcaataagtgatgtggggaaaaaagattaacaggataaagggtagaaaaaataataagaatggggtagattttatttcaggggtcagggaagtgctktcagataagatggcatatgaacagagctatgaagtggtgagaggcctagcaggaaagttgaccaggggaagagcactgcaggcagaggaaacagcaaatg

SEQ ID NO: 360927 - DNA, 201 bp, Homo sapiens
cagtcctgacactttcatactgagccaggatacagcctcagaatctttcttaacagagctttaggtgtcccttccaaacccatcagtgtaggcactttggkgaaggcaggttgtcagccctgccttagggcttatgaagctggcgtaaatctgaggctggaaaaagctctgagctaggttataatcatgctgtgtcaagga

SEQ ID NO: 360928 - DNA, 201 bp, Homo sapiens
gctttgatgccatttcccacaccagccctgtcacgctgtacgactgccacagcatgaagggcaaccagctgtggaaataccgcaaagtaagatgggatgcrgggggagcagggcacctgcttaatttttttttaaggcaatacagtgcttcaccccttctttcaacagagcccatccacttattcatttgtgccacaaacc

SEQ ID NO: 360929 - DNA, 201 bp, Homo sapiens
ttgatgccatttcccacaccagccctgtcacgctgtacgactgccacagcatgaagggcaaccagctgtggaaataccgcaaagtaagatgggatgcgggrggagcagggcacctgcttaatttttttttaaggcaatacagtgcttcaccccttctttcaacagagcccatccacttattcatttgtgccacaaacctac

SEQ ID NO: 360930 - DNA, 201 bp, Homo sapiens
ccaggggttgaagaaagatgttttggagcggagaatttcccctgaaccctgaagttttgctctcagatatatcacatatcagaagttctcactgggtgggktctacactgcagatggaatcaggaattttcatcacatacataagaattccctcttcctctgtccccaagtctactcacaaacactttcctcacctgctgc

SEQ ID NO: 360931 - DNA, 201 bp, Homo sapiens; identical to SEQ ID NO: 77791

SEQ ID NO: 360932 - DNA, 201 bp, Homo sapiens; identical to SEQ ID NO: 77804

SEQ ID NO: 360933 - DNA, 201 bp, Homo sapiens
ttgatcatccccacaatgggctcagtaatcttaagaatcccacatctcaagtatcagtctccagggtgccttaccactaaggaaatctacaggctttctcrattctcttctcctttcatatctttgacatcctaaacgcttctccctcagactccaaaggagagaacagctaagaagattaaaactgttacagaatatcaa

SEQ ID NO: 360934 - DNA, 201 bp, Homo sapiens; identical to SEQ ID NO: 77805

SEQ ID NO: 360935 - DNA, 201 bp, Homo sapiens
gtcactggtgtgagtggcggctttctattttcttctgtgtcgtccccaggtcccctttgtctgctgtgatctgcagcctaataagaggcagagaaaagggkctttgcttgggctctcaactggaaggtggcttgtgggcaggtctatagagccaggtaccctgctggatactggagagattaatttgagcaggtcacacaa

SEQ ID NO: 360936 - DNA, 201 bp, Homo sapiens
tgcaccctctgtcttgagggggctgccccactacaccaacatctcctgaaggactctcattgacctcgagattcttccagcacctccctcacaactggcaygggatgaacaaactcattagagaatgaatgaatggagttaatcttatctcccagtttaactgaaaagacagagacagtggcttcttctgtaaacaccaca

SEQ ID NO: 360937 - DNA, 201 bp, Homo sapiens
tggattttgctcattccctaaagactggagaggaagtggggtttgcagttagccaaaccctgtgcctgagttctcttggcaggaggagagctgaccctgtsctctgcctccccttatgtttccctctagctgcaacagcaagcgctacctggagacacttcccaacacaagcatcatcatccccttccacaacgagggctg

SEQ ID NO: 360938 - DNA, 201 bp, Homo sapiens; identical to SEQ ID NO: 77790

SEQ ID NO: 360939 - DNA, 201 bp, Homo sapiens
tgggttttttttgtttttttttttgtttgtttgtttgtttgtttgtttgttttgtttttgagacagagtctcgctctgtcatccaggctggagtgcaggcrtgatctcggctcactgcatcctccacttcctgggttcaagcaattctcctgcctcagcctcccaagtagctgggattacaggcgcataccacccaccaca

SEQ ID NO: 360940 - DNA, 201 bp, Homo sapiens
ttttcatcacatacataagaattccctcttcctctgtccccaagtctactcacaaacactttcctcacctgctgcctctgcttgccaatcatgtggctgtmattttttaaaactgattatctttgtgcttcatgatgaaagtagcagcaacctttgcacctcaaaggattattagaaattccagctgctgatggaattaca

SEQ ID NO: 360941 - DNA, 201 bp, Homo sapiens
tcttaaccagtctggccatggtcagagtgtccagacttgttttcagttggagtgaaactaccctcattacctctgtgactcgagcaggttagacagtgagmcaaaagagcctggtggacatactggaaaaagcagaggaaatattgtgtttcagagtgttcatgtagacagtctctgttaggccttcaacttcctctagca

SEQ ID NO: 360942 - DNA, 201 bp, Homo sapiens
gggaggccaaagcaggaggatgacttgagctcaggagtttgacaacattttcctatgggaaacataggaagaccctgtctctacaaaaaaaaaaaaaaaaaagaaaaaattagccaggcgtaatggtatgtgcctgtagttgcagcaacttgggaggctgaggcaggagaactgcttgagcccaggaggtcgaggttccag

SEQ ID NO: 360943 - DNA, 201 bp, Homo sapiens
ggtagaagcagttcaggaaggatgagctgtccaccagcttgcctgcctcaggaacaagtagccagtcttacattgtttactaaacttgctgaaatctttcytatctttgcctctggaaaaaggatcttagggaaggcaataacagaaactactcaaacttggtgaaacaaaaatggagacttactccaaggatccaggcaa

SEQ ID NO: 360944 - DNA, 201 bp, Homo sapiens
aactgtagtaatacttataaaaattcccttcgagccaggcatgcaaagcattttacttatctcacttaattctcacttgtttttaaccccattttagggayggggaacatgaaacgtgatgttggcgatggaaacattaagtaactagtgccagaattcaaacctgtgtaggtctgacaggtacctggcacatagcaattg

SEQ ID NO: 360945 - DNA, 201 bp, Homo sapiens
atgtctcaaagaaagtttgttgttgttgttgttgctgttgtttttttttttaaaaggcccacctgataaagagacattaccgcctcctgcttgttatagarccattattatagattaattcagtggataagagctaactgtagtaatacttataaaaattcccttcgagccaggcatgcaaagcattttacttatctcact

SEQ ID NO: 360946 - DNA, 201 bp, Homo sapiens
gccactgcactccagcctgggtgacaaaacgagaccatgtctcaaagaaagtttgttgttgttgttgttgctgttgtttttttttttaaaaggcccacctsataaagagacattaccgcctcctgcttgttatagaaccattattatagattaattcagtggataagagctaactgtagtaatacttataaaaattccctt

SEQ ID NO: 360947 - DNA, 201 bp, Homo sapiens
cagccccatccgacacgggcggggggtaggttctaggttcagtcccttgaagcaggaatcgcgttcttctgaaaggccatttggcgatccctgaggagggwgccaggcaggaaaagcgcacgctctctcggtacgcccaagactgagactcttccggctacaagggaccatggggacactccaactccagaccaggagcaa

SEQ ID NO: 360948 - DNA, 201 bp, Homo sapiens; identical to SEQ ID NO: 77855

SEQ ID NO: 360949 - DNA, 201 bp, Homo sapiens; identical to SEQ ID NO: 77856

SEQ ID NO: 360950 - DNA, 201 bp, Homo sapiens; identical to SEQ ID NO: 77857

SEQ ID NO: 360951 - DNA, 201 bp, Homo sapiens
ttgtaattttataatacaggaaatcattctataagcacattttcccattaacacttaaaaaaaactatgtggttatttatagtaagtgtttaacagaatcmtgctgtgagaacatgaaccattgatattatttatattaattctggctattcatgctgtcttataattagcttctacatggttttaagattgttttcaata

SEQ ID NO: 360952 - DNA, 201 bp, Homo sapiens; identical to SEQ ID NO: 77858

SEQ ID NO: 360953 - DNA, 201 bp, Homo sapiens
acatgacatccataaacttcagtgttgcaacaatagatggagaaagtgagctttaattcagttgcagcagaatggtacagaaaggtggaatgatttgcttrtaattttataatacaggaaatcattctataagcacattttcccattaacacttaaaaaaaactatgtggttatttatagtaagtgtttaacagaatcctg

SEQ ID NO: 360954 - DNA, 201 bp, Homo sapiens; identical to SEQ ID NO: 77863

SEQ ID NO: 360955 - DNA, 201 bp, Homo sapiens
aaagaaaaggcaaggaagccagggaggaagcccatggggttggggctctggccatggtgaccaagaagggtctaggagagcaagatgggcttgggtttctsgaaagaggatgaatcttcagagactgtctcagattagactcaagagccctcagaggtactgtgactttttatgggggtgggggtggggggttattgcctt

SEQ ID NO: 360956 - DNA, 201 bp, Homo sapiens
tgaagcagcccagagacccaagcctgccttgctgccccccaggccatgacaccacagccagtggtctctcctgggtcctgtaccaccttgcaaagcacccrgaataccaggagcgctgtcggcaggaggtgcaagagcttctgaaggaccgtgagcctaaagagattgaatggtgagtgcaggtgctggtgccctgttcct

SEQ ID NO: 360957 - DNA, 201 bp, Homo sapiens
tgtgggacaaggtgctcctgacagaaggtgccagggtgggggtggtgggcctggggcatcctagcctgtgatggagatgggcactgggcaagggattgggygcacacataggggagccccagccttcccacattctccattgctgcccaaggcccaggcagctcctggttgctggcttggaggatgagtggttttctaact

SEQ ID NO: 360958 - DNA, 201 bp, Homo sapiens
tttctctccagattcacagctcggaggaaggtctcctatacacacaaagcctggcatgcaccttcggtgatatgtgctgctggtgggtggggccctggcasgcaatcgtccgcatcttccaccccacctacatcaagcctgtgctctttgctccaggtagacactgcactggccactccaggtagacactgcactggccac

SEQ ID NO: 360959 - DNA, 201 bp, Homo sapiens
gctgccccccaggccatgacaccacagccagtggtctctcctgggtcctgtaccaccttgcaaagcacccggaataccaggagcgctgtcggcaggaggtrcaagagcttctgaaggaccgtgagcctaaagagattgaatggtgagtgcaggtgctggtgccctgttcctgagcctgtctcattggctctgttccccagg

SEQ ID NO: 360960 - DNA, 201 bp, Homo sapiens
gctcggaggaaggtctcctatacacacaaagcctggcatgcaccttcggtgatatgtgctgctggtgggtggggccctggcacgcaatcgtccgcatcttycaccccacctacatcaagcctgtgctctttgctccaggtagacactgcactggccactccaggtagacactgcactggccacgccttgcccacagctggg

SEQ ID NO: 360961 - DNA, 201 bp, Homo sapiens; identical to SEQ ID NO: 77872

SEQ ID NO: 360962 - DNA, 201 bp, Homo sapiens
caaaatatacattttggaaaatgagtttgtttttaaatttgttctttgtctttaattgacaagttttaattatatatgtttagaggcacagtatgatgttrtgatatatgtatacaacctgaaattattaaatcaaggtaatgaacaaatccatcacttcatgtgtttatcatttttgtgttgagaacatttgaagtttac

SEQ ID NO: 360963 - DNA, 201 bp, Homo sapiens
gactacagtcaacagttctctgtgtattcttctagaaaatggctatcccgatgcccacatttatatgaactcacactgtgacttttatttatatgaacacwtactgtgcttttctttgtaagtgaaagtccataaaatagacacgggtctgcatattatctctgagatcttttgcttttctcaaaatatacattttggaaa

SEQ ID NO: 360964 - DNA, 201 bp, Homo sapiens
tatttttataatcaatttataactgcagatgaggaaacccaacatttattgagaactcacaatatgccagaaaaaatgccatgtgcccattccatgatacragtatatattgtctaatttgattttaacaactctgcaaaggagagattatgtatttctgccccatggtagatgatgaaactgcaggtctgagagattagg

SEQ ID NO: 360965 - DNA, 201 bp, Homo sapiens
gtaatgagttgactaatggcacacagagcacagaggacagagctggaacttgaacctaggtctcctgactcccaatcttgggtcttcatctcttaatagtracagcttttgcttgcaccataacctggtgctcccgggtaaagggtccctggggagaagatgaagaggcttattctggggcgtgcatattgattgttgggg

SEQ ID NO: 360966 - DNA, 201 bp, Homo sapiens
tctcctgactcccagtcttgcatctccatctcttaatattaacaacttttactctcgctgcaatttggttacccctggggagggattcttggggagaaaaygaagaggctggaatagtgtgccttggtggttgggtttgggaggggctcaaggaagccagggacaagcaccagctctgtccccatctctggctaggccaag

SEQ ID NO: 360967 - DNA, 201 bp, Homo sapiens
cacacagagcacagaggacagagctggaacttgaacctaggtctcctgactcccaatcttgggtcttcatctcttaatagtaacagcttttgcttgcaccrtaacctggtgctcccgggtaaagggtccctggggagaagatgaagaggcttattctggggcgtgcatattgattgttggggttggagagctgctcaaggg

SEQ ID NO: 360968 - DNA, 201 bp, Homo sapiens
tgtttgtgtctaagtctatgactttttccatgtgtttctgtgtctatgtctgtgtgtctatgtctttgtctatgtgtatgtctgttgtgacagaggcattwaatctctggatcagagcagctcatgtcttgcttatggcaatactatcagccagagtaggattgtggcactgactctccattcccaagtcaaattcctcca

SEQ ID NO: 360969 - DNA, 201 bp, Homo sapiens
ttctgtgtctatgtctgtgtgtctatgtctttgtctatgtgtatgtctgttgtgacagaggcatttaatctctggatcagagcagctcatgtcttgcttayggcaatactatcagccagagtaggattgtggcactgactctccattcccaagtcaaattcctccaagggcaatgcgatgttttcccctgtacgtgcagca

SEQ ID NO: 360970 - DNA, 201 bp, Homo sapiens
ccactgtagaatgtgggcaaatatctttgaagcaatacttaatctctaatttccaagacaaattgccatttaattatcctgtaacccaggttgccagtgatttttttctcagaaagttttcatcaagcagaaacatgaaagcattcatgggtcattgagtcttcccattagggaccaaagaaaaggcaaggaagccaggga

SEQ ID NO: 360971 - DNA, 201 bp, Homo sapiens
tctaactgaaaccaagcccctggcaacgtcctaatgattcaggctgggcctttctggactttaatcagtttctctgtctttctcaatctaagtgcttaccrggtaactggaggccacttggttgctggttttggctgggcctttctggactttacccctcagcccctgtttatccatccctgtttactcttactgttctat

SEQ ID NO: 360972 - DNA, 201 bp, Homo sapiens
ctcgcaggatatgcaagcccacatggggatccaggcacggatacccccttctctgttcctcaaactgctctaggtggggttgggtgtcccaggccaggttmccggcttgatggggccaggatggggctcctgggtgcagtcagagtttccacccctctccccaaggaactgcatcgggcaggcgttcgcgatggcggagat

SEQ ID NO: 360973 - DNA, 201 bp, Homo sapiens
aaagactttatgacaaaaatgaagttccttattaagctccaccttagcggtgactacagtcaacagttctctgtgtattcttctagaaaatggctatcccratgcccacatttatatgaactcacactgtgacttttatttatatgaacacatactgtgcttttctttgtaagtgaaagtccataaaatagacacgggtct

SEQ ID NO: 360974 - DNA, 201 bp, Homo sapiens
ttgagtcttcccattagggaccaaagaaaaggcaaggaagccagggaggaagcccatggggttggggctctggccatggtgaccaagaagggtctaggagwgcaagatgggcttgggtttctcgaaagaggatgaatcttcagagactgtctcagattagactcaagagccctcagaggtactgtgactttttatgggggt

SEQ ID NO: 360975 - DNA, 201 bp, Homo sapiens
tctttgctccaggtagacactgcactggccactccaggtagacactgcactggccacgccttgcccacagctggggtctctgtgctgcctccagcgggtcrcgtgcccatgtgcagacaggaggggctgtggtggagatgccactgcttccatctcccctggacttccatctgtctgacctctgttcctgtttgctcatgt

SEQ ID NO: 360976 - DNA, 201 bp, Homo sapiens
gatgagatgctgcttgaaattctcagggagagggcttccacctcttccctgcagatccttctctctcgcagcctaggagagcatgaattgggtcctgtgtstttctctccagattcacagctcggaggaaggtctcctatacacacaaagcctggcatgcaccttcggtgatatgtgctgctggtgggtggggccctggca

SEQ ID NO: 360977 - DNA, 201 bp, Homo sapiens; identical to SEQ ID NO: 77897

SEQ ID NO: 360978 - DNA, 201 bp, Homo sapiens
cagggagagggcttccacctcttccctgcagatccttctctctcgcagcctaggagagcatgaattgggtcctgtgtctttctctccagattcacagctcrgaggaaggtctcctatacacacaaagcctggcatgcaccttcggtgatatgtgctgctggtgggtggggccctggcacgcaatcgtccgcatcttccacc

SEQ ID NO: 360979 - DNA, 201 bp, Homo sapiens
gaagcattggagtggacgggtgtcttggactcagtgtcctcccgtccatgcctttgcccagcacagcagtcctgggaagggaagaaacatttttatgcttytaaaataaagaatatttttgcaattttattttttaaaacacatttttattgatgcataatagatgcacatagttttgaaatacatgtgataatctaatac

SEQ ID NO: 360980 - DNA, 201 bp, Homo sapiens; identical to SEQ ID NO: 77900

SEQ ID NO: 360981 - DNA, 201 bp, Homo sapiens
cagtggggacattctgaggctcaagccaggccaggggctggaggaaggagaggaagcattggagtggacgggtgtcttggactcagtgtcctcccgtccaygcctttgcccagcacagcagtcctgggaagggaagaaacatttttatgcttctaaaataaagaatatttttgcaattttattttttaaaacacattttta

SEQ ID NO: 360982 - DNA, 201 bp, Homo sapiens; identical to SEQ ID NO: 77901

SEQ ID NO: 360983 - DNA, 201 bp, Homo sapiens; identical to SEQ ID NO: 77902

SEQ ID NO: 360984 - DNA, 201 bp, Homo sapiens; identical to SEQ ID NO: 77903

SEQ ID NO: 360985 - DNA, 201 bp, Homo sapiens
agacattgtgctcccagacggccgggtcatccccaaaggtgccacagcctcagggggaggagcctcctgggtaggaagaggggcccctcaggcagggagcmttgtcctgactgcccccttctctcccacaggcattatctgcctcatcagtgtttttggaacccatcacaacccagccgtgtggccggaccctgaggtgcg

SEQ ID NO: 360986 - DNA, 201 bp, Homo sapiens
tctcgctgctgcacccaagacattgtgctcccagacggccgggtcatccccaaaggtgccacagcctcagggggaggagcctcctgggtaggaagaggggmccctcaggcagggagcattgtcctgactgcccccttctctcccacaggcattatctgcctcatcagtgtttttggaacccatcacaacccagccgtgtgg

SEQ ID NO: 360987 - DNA, 201 bp, Homo sapiens
actgagtttcaatgcaaagtcccatgatcactgtgctctctcccctccactcaagcacccagattctctctccagccatgaggccacttctgggagatggrgaagtgttagtgtaggcaatttaagactcttttggccaggcacagtgggttactcctgtaatcccagaactttgggaggccgaggcaggcagatcacctg

SEQ ID NO: 360988 - DNA, 201 bp, Homo sapiens
atcaggagaatccaacatcacctccctccaagacacacaccactgtctctccaaggctggcggactgggagaccccacccggcaacccttcttggtctcgyctccaggtctatgacccctttcgctttgacccaaagaacatcaaggagaggtcacctctggcttttattcccttctcagcagggcccaggtaagagcggc

SEQ ID NO: 360989 - DNA, 201 bp, Homo sapiens
agagagagagagagagagagagagagagagcagggtcaggacagaaaggaggagaaggggagaaagagggagagactgacttgtggtgagatgataaaacyggagatggtagcaggggctggctgtggaagccttggggaaaatgttaatggcttcagttttagcccaagggcaatagggagccatgagaagtgtttgaac

SEQ ID NO: 360990 - DNA, 201 bp, Homo sapiens
cgtctctgtttttgtccattccaaggctcctagaggagggggcagggttttgatcaggagaatccaacatcacctccctccaagacacacaccactgtctytccaaggctggcggactgggagaccccacccggcaacccttcttggtctcgcctccaggtctatgacccctttcgctttgacccaaagaacatcaaggag

SEQ ID NO: 360991 - DNA, 201 bp, Homo sapiens
gagatgataaaactggagatggtagcaggggctggctgtggaagccttggggaaaatgttaatggcttcagttttagcccaagggcaatagggagccatgrgaagtgtttgaacaggggagggacaagtcacatctgggtaccaggaagatctttctagggctagtgtggagggtgtactggagaggaccagctatagaat

SEQ ID NO: 360992 - DNA, 201 bp, Homo sapiens
aggggctggctgtggaagccttggggaaaatgttaatggcttcagttttagcccaagggcaatagggagccatgagaagtgtttgaacaggggagggacargtcacatctgggtaccaggaagatctttctagggctagtgtggagggtgtactggagaggaccagctatagaatgagagcgcagtggggacattctgagg

SEQ ID NO: 360993 - DNA, 201 bp, Homo sapiens
tgacctccagttccatccatgttgccacaaatgacaaaatttcagtcttttaaatggctgaatagtattccattgtgtatacacactacattttctttatmcattcatctattgatagacacttaagttgattccatattttcgttgttgtgaatagtgctgcaataaatacagaagtacagatgtctcttccatatattt

SEQ ID NO: 360994 - DNA, 201 bp, Homo sapiens
agtcttttaaatggctgaatagtattccattgtgtatacacactacattttctttatacattcatctattgatagacacttaagttgattccatattttcrttgttgtgaatagtgctgcaataaatacagaagtacagatgtctcttccatatatttattttctttctttgggatagaaatttcttctctttcttttcag

SEQ ID NO: 360995 - DNA, 201 bp, Homo sapiens
tttctgggttatatggcagttctagttttagtttcttgaggaacctctgtgctgttctctgcagtggctgcactaatttatattcccaccaacagtgtgtrtgagttcccctttctccatatcctcaccagcatctatcattgcctgtctttttgataaaagccattttaactgggatgagatgatatctcattgtggttt

SEQ ID NO: 360996 - DNA, 201 bp, Homo sapiens
ggcagttctagttttagtttcttgaggaacctctgtgctgttctctgcagtggctgcactaatttatattcccaccaacagtgtgtgtgagttcccctttmtccatatcctcaccagcatctatcattgcctgtctttttgataaaagccattttaactgggatgagatgatatctcattgtggttttgatttgcatttct

SEQ ID NO: 360997 - DNA, 201 bp, Homo sapiens
tttgtatgttttattttaagaaatgtctattcagatcttttgcccattttaaaatcagatatttggttacttttcctattgagttgtttgagctgcttatrtattctggttattaatcgcttgtcagatgagtagtttgtgagtattttctgccattctgtgggttgattcttcgctttgttgattgtttcctttgctgtg

SEQ ID NO: 360998 - DNA, 201 bp, Homo sapiens
agagcgcagtggggacattctgaggctcaagccaggccaggggctggaggaaggagaggaagcattggagtggacgggtgtcttggactcagtgtcctccygtccatgcctttgcccagcacagcagtcctgggaagggaagaaacatttttatgcttctaaaataaagaatatttttgcaattttattttttaaaacaca

SEQ ID NO: 360999 - DNA, 201 bp, Homo sapiens
ggaagcccagtgggggctcagcactgagagggagatgagatgctgcttgaaattctcagggagagggcttccacctcttccctgcagatccttctctctcrcagcctaggagagcatgaattgggtcctgtgtctttctctccagattcacagctcggaggaaggtctcctatacacacaaagcctggcatgcaccttcgg

SEQ ID NO: 361000 - DNA, 201 bp, Homo sapiens
cagcctaggagagcatgaattgggtcctgtgtctttctctccagattcacagctcggaggaaggtctcctatacacacaaagcctggcatgcaccttcggkgatatgtgctgctggtgggtggggccctggcacgcaatcgtccgcatcttccaccccacctacatcaagcctgtgctctttgctccaggtagacactgca

SEQ ID NO: 361001 - DNA, 201 bp, Homo sapiens
atggcagcatccccgtggctgctcctgctgctggttggggcctcctggctcctggcccgcatcctggcctggacctataccttctatgacaactgctgccrcctccggtgtttcccgcaacccccgaaacggaattggttcttgggtcacctgggcctggtgagtgtggcagcaggacgggtctggggtctcagggtggat

SEQ ID NO: 361002 - DNA, 201 bp, Homo sapiens
caactaatacaatacattgttcactaaaggcaccaggctgggcagcagatctcaaaaacttattcctgttgtctaactgaagcttctaccctttgaccaayatttcacccttctctgtccctcccccacccctggcctctggtaaccaccattctattcctatttctatgagctcaactattttaggtcccaagataagta

SEQ ID NO: 361003 - DNA, 201 bp, Homo sapiens
gtctatgacccctttcgctttgacccaaagaacatcaaggagaggtcacctctggcttttattcccttctcagcagggcccaggtaagagcggcctgtgtytgaggcggggacggggagataggtgcaggggtctgggcatgacagtggggaaaagggggacattgtagacggtccgagttccagctctccttccctcacc

SEQ ID NO: 361004 - DNA, 201 bp, Homo sapiens
tattatctatgtatctatctatatcatctatttatctatctatctatctatctatctatctatctatctatcatccatccatccatgatctatctctccaycatctatgaatcattcatttttataaatatatatccatatgcttcttgctgttttacatgtacatatgtatatatttgtcactttttttcactcaacagg

SEQ ID NO: 361005 - DNA, 201 bp, Homo sapiens; identical to SEQ ID NO: 77879

SEQ ID NO: 361006 - DNA, 201 bp, Homo sapiens; identical to SEQ ID NO: 77880

SEQ ID NO: 361007 - DNA, 201 bp, Homo sapiens
tccccttctctggctaggccaagtggcagctcctggcctcagagggtagtgcccgtctggacatgtttgagcacatcagcctcatgaccttggacagtctrcagaaatgtgtcttcagctttgacagccattgccaggagtaagttcttgcccagggtctgggatcctgggccgtggacacaaagttggtaggtggggggc

SEQ ID NO: 361008 - DNA, 201 bp, Homo sapiens
acattacagataagactagggttttccttgacaatcctgccacctgacctaatcctttctcattctccaaaggtgtttctagagccatagatttgtttatctatctatctatctatctatctatctatctatctatctatctatctatctatttctatcatctatcaatgtatctatcattgatctatctatcatctatca

SEQ ID NO: 361009 - DNA, 201 bp, Homo sapiens
tctgtatctatcatctatgtaactatgtctccatcatctattatctatctctctacttatttatctacctattatctatgtatctatctatatcatctatytatctatctatctatctatctatctatctatctatctatcatccatccatccatgatctatctctccaccatctatgaatcattcatttttataaatata

SEQ ID NO: 361010 - DNA, 201 bp, Homo sapiens
ctattatctatctctctacttatttatctacctattatctatgtatctatctatatcatctatttatctatctatctatctatctatctatctatctatcwatcatccatccatccatgatctatctctccaccatctatgaatcattcatttttataaatatatatccatatgcttcttgctgttttacatgtacatatg

SEQ ID NO: 361011 - DNA, 201 bp, Homo sapiens
tgtggccggaccctgaggtgcgggccccccgtctctgtttttgtccattccaaggctcctagaggagggggcagggttttgatcaggagaatccaacatcrcctccctccaagacacacaccactgtctctccaaggctggcggactgggagaccccacccggcaacccttcttggtctcgcctccaggtctatgacccct

SEQ ID NO: 361012 - DNA, 201 bp, Homo sapiens
tattatctatctctctacttatttatctacctattatctatgtatctatctatatcatctatttatctatctatctatctatctatctatctatctatctwtcatccatccatccatgatctatctctccaccatctatgaatcattcatttttataaatatatatccatatgcttcttgctgttttacatgtacatatgt

SEQ ID NO: 361013 - DNA, 201 bp, Homo sapiens
actgcccccttctctcccacaggcattatctgcctcatcagtgtttttggaacccatcacaacccagccgtgtggccggaccctgaggtgcgggccccccstctctgtttttgtccattccaaggctcctagaggagggggcagggttttgatcaggagaatccaacatcacctccctccaagacacacaccactgtctct

SEQ ID NO: 361014 - DNA, 201 bp, Homo sapiens
attatctatctctctacttatttatctacctattatctatgtatctatctatatcatctatttatctatctatctatctatctatctatctatctatctaycatccatccatccatgatctatctctccaccatctatgaatcattcatttttataaatatatatccatatgcttcttgctgttttacatgtacatatgta

SEQ ID NO: 361015 - DNA, 201 bp, Homo sapiens
ctacttatttatctacctattatctatgtatctatctatatcatctatttatctatctatctatctatctatctatctatctatctatcatccatccatcmatgatctatctctccaccatctatgaatcattcatttttataaatatatatccatatgcttcttgctgttttacatgtacatatgtatatatttgtcact

SEQ ID NO: 361016 - DNA, 201 bp, Homo sapiens
ccttaatgctatctttttctgagtgctgtatattttattccatattttattcagctcatttctatgttgaagaggacattaaacattttcaattatagtcratatttccaatttgccttccagagtgtctgtactgatttaccttctagcctgcagtatgtggtgagactagtgatccctatttccttcttttgtgtaact

SEQ ID NO: 361017 - DNA, 201 bp, Homo sapiens
tcaatatttccaatttgccttccagagtgtctgtactgatttaccttctagcctgcagtatgtggtgagactagtgatccctatttccttcttttgtgtarctgtatagtattccattgtgtggctgtttatctaaacattttcccattaatgtatatttggcttgtctccaaacttttgctaaactggacatgaagctgt

SEQ ID NO: 361018 - DNA, 201 bp, Homo sapiens; identical to SEQ ID NO: 77894

SEQ ID NO: 361019 - DNA, 201 bp, Homo sapiens
taactgtatagtattccattgtgtggctgtttatctaaacattttcccattaatgtatatttggcttgtctccaaacttttgctaaactggacatgaagcwgtcagcacgtgtgcacagtgaccattccttacatgcataggcatctctgcaggacaaattctctgaagtgcaattgctgaatcaaagaccatttgcactg

SEQ ID NO: 361020 - DNA, 201 bp, Homo sapiens
cagctatagaatgagagcgcagtggggacattctgaggctcaagccaggccaggggctggaggaaggagaggaagcattggagtggacgggtgtcttggaytcagtgtcctcccgtccatgcctttgcccagcacagcagtcctgggaagggaagaaacatttttatgcttctaaaataaagaatatttttgcaattttat

SEQ ID NO: 361021 - DNA, 201 bp, Homo sapiens
agttggggagcagtgctgtaggtcaagaagaccacctggggtcttcgggggaggaagagagagaggagagagagagagagagagagagagagagagagagwgagagagagagagcagggtcaggacagaaaggaggagaaggggagaaagagggagagactgacttgtggtgagatgataaaactggagatggtagcaggg

SEQ ID NO: 361022 - DNA, 201 bp, Homo sapiens
aacttcccctccactctcttccttttctccaagaaatatttttttgaatgtcttcacttgttgaatgtttgctcttctgttccctaattcctacccttccrtccagtccagggatttataagggagacctgggggtaaaattcatccattcttgtccagaacacctgcatcattcatccatccagtcctcgttcagcaaat

SEQ ID NO: 361023 - DNA, 201 bp, Homo sapiens; identical to SEQ ID NO: 77904

SEQ ID NO: 361024 - DNA, 201 bp, Homo sapiens
tgggccccatcttccccgtcatccgtttttgccaccccaacatcatccggtctgtcatcaacgcctcaggtaccacctggaatacttggtggtgggtgctrtggtgcatttgaggcctgcaagtccctctatccccaagccgtgtgtggcccctgcagtactctggtctctcctttccttctctctcagccatcttcatct

SEQ ID NO: 361025 - DNA, 201 bp, Homo sapiens
agtagggatgtttgaaaggagagtgcagggtgatgcaattgggcatcgttagtgttcaaggccccttgccaggtctagcgtcaccttgcctgtcacaaagsttagaacaatgaggacttgtggctggtggaggatctggactgttatttctgtgatgtccatctctggtgtgggtcaagtccttttaccccatcctgtagt

SEQ ID NO: 361026 - DNA, 201 bp, Homo sapiens
ttgtgaacacatgtcagtgtcatgtctcatgtctaggtccatgtcagaagatgccatgtgagaatatgtcagagagtgctgggacagacagggtgtcctargtccttgtgaaggcattctgtagagtgctgagcgtgttcagggtttgcagaacatgttggatcatgtaggaggcatgtcaaggcatgctggagccctgac

SEQ ID NO: 361027 - DNA, 201 bp, Homo sapiens
gacccctttcgctttgacccaaagaacatcaaggagaggtcacctctggcttttattcccttctcagcagggcccaggtaagagcggcctgtgtttgaggyggggacggggagataggtgcaggggtctgggcatgacagtggggaaaagggggacattgtagacggtccgagttccagctctccttccctcacctcctct

SEQ ID NO: 361028 - DNA, 201 bp, Homo sapiens
agtgttcaaggccccttgccaggtctagcgtcaccttgcctgtcacaaaggttagaacaatgaggacttgtggctggtggaggatctggactgttatttcygtgatgtccatctctggtgtgggtcaagtccttttaccccatcctgtagtttgtctgccctaagttcattgcttttctgctctaggccctgggaatctcc

SEQ ID NO: 361029 - DNA, 201 bp, Homo sapiens
gacccaaagaacatcaaggagaggtcacctctggcttttattcccttctcagcagggcccaggtaagagcggcctgtgtttgaggcggggacggggagatrggtgcaggggtctgggcatgacagtggggaaaagggggacattgtagacggtccgagttccagctctccttccctcacctcctctggagtttatgggaaa

SEQ ID NO: 361030 - DNA, 201 bp, Homo sapiens
atcaaggagaggtcacctctggcttttattcccttctcagcagggcccaggtaagagcggcctgtgtttgaggcggggacggggagataggtgcaggggtytgggcatgacagtggggaaaagggggacattgtagacggtccgagttccagctctccttccctcacctcctctggagtttatgggaaaaggcccacagag

SEQ ID NO: 361031 - DNA, 201 bp, Homo sapiens
gggatcctgggccgtggacacaaagttggtaggtggggggctggggaggactgagcagggaaatcagacaaaccttcttggaggagttgttatacctgatygttgaaggactggtatgaattttatcttgaggtttccagggactcattaaaagggtttgaactggtgggtgtggtcaaagtgggtctctctcagggactg

SEQ ID NO: 361032 - DNA, 201 bp, Homo sapiens
tgatggagatgggcactgggcaagggattgggcgcacacataggggagccccagccttcccacattctccattgctgcccaaggcccaggcagctcctggktgctggcttggaggatgagtggttttctaactgaaaccaagcccctggcaacgtcctaatgattcaggctgggcctttctggactttaatcagtttctct

SEQ ID NO: 361033 - DNA, 201 bp, Homo sapiens
ggactaggggggtatagaaagtgtctcagttgaaagcctgaataatgatcagtagataattgggtacagttggggagcagtgctgtaggtcaagaagaccrcctggggtcttcgggggaggaagagagagaggagagagagagagagagagagagagagagagagagagagagagagagagcagggtcaggacagaaagga

SEQ ID NO: 361034 - DNA, 201 bp, Homo sapiens
cacttggttgctggttttggctgggcctttctggactttacccctcagcccctgtttatccatccctgtttactcttactgttctatctccagcactgccygtctctgcctctctccactgtccctggagctccctgggcccttccctgggcctcaggacctcactcaccaccccatctgccctgcaggatgccacagctg

SEQ ID NO: 361035 - DNA, 201 bp, Homo sapiens
gatccaggcacggatacccccttctctgttcctcaaactgctctaggtggggttgggtgtcccaggccaggttaccggcttgatggggccaggatggggcwcctgggtgcagtcagagtttccacccctctccccaaggaactgcatcgggcaggcgttcgcgatggcggagatgaaggtggtcctggggctcacgctgct

SEQ ID NO: 361036 - DNA, 201 bp, Homo sapiens
tgttcctcaaactgctctaggtggggttgggtgtcccaggccaggttaccggcttgatggggccaggatggggctcctgggtgcagtcagagtttccaccyctctccccaaggaactgcatcgggcaggcgttcgcgatggcggagatgaaggtggtcctggggctcacgctgctgcgcttccgcgtcctgcctgaccaca

SEQ ID NO: 361037 - DNA, 201 bp, Homo sapiens
ttcctcaaactgctctaggtggggttgggtgtcccaggccaggttaccggcttgatggggccaggatggggctcctgggtgcagtcagagtttccaccccyctccccaaggaactgcatcgggcaggcgttcgcgatggcggagatgaaggtggtcctggggctcacgctgctgcgcttccgcgtcctgcctgaccacacc

SEQ ID NO: 361038 - DNA, 201 bp, Homo sapiens; identical to SEQ ID NO: 77864

SEQ ID NO: 361039 - DNA, 201 bp, Homo sapiens
acttggatatctccattccaggaacagggtgggtggacccctcgcacttcccatcccccttcccccatcctccctgaggtcctcaatgcaaggttgctgtmcaccctcgggtgctgaagcagcccagagacccaagcctgccttgctgccccccaggccatgacaccacagccagtggtctctcctgggtcctgtaccacc

SEQ ID NO: 361040 - DNA, 201 bp, Homo sapiens
caggagcgctgtcggcaggaggtgcaagagcttctgaaggaccgtgagcctaaagagattgaatggtgagtgcaggtgctggtgccctgttcctgagcctstctcattggctctgttccccaggtagggaggggagaaggggttgtttttgttgattctgccactattgcttagtgggaataggagcagaggaccacaggc

SEQ ID NO: 361041 - DNA, 201 bp, Homo sapiens; identical to SEQ ID NO: 77866

SEQ ID NO: 361042 - DNA, 201 bp, Homo sapiens
atcttaactgttcctgaatatctgacaggtgggatataggggagggtaatgagttgactaatggcacacagagcacagaggacagagctggaacttgaacytaggtctcctgactcccaatcttgggtcttcatctcttaatagtaacagcttttgcttgcaccataacctggtgctcccgggtaaagggtccctggggag

SEQ ID NO: 361043 - DNA, 201 bp, Homo sapiens; identical to SEQ ID NO: 77870

SEQ ID NO: 361044 - DNA, 201 bp, Homo sapiens; identical to SEQ ID NO: 77871

SEQ ID NO: 361045 - DNA, 201 bp, Homo sapiens; identical to SEQ ID NO: 77873

SEQ ID NO: 361046 - DNA, 201 bp, Homo sapiens; identical to SEQ ID NO: 77875

SEQ ID NO: 361047 - DNA, 201 bp, Homo sapiens; identical to SEQ ID NO: 77877

SEQ ID NO: 361048 - DNA, 201 bp, Homo sapiens
gaacttcccctccactctcttccttttctccaagaaatatttttttgaatgtcttcacttgttgaatgtttgctcttctgttccctaattcctacccttcyatccagtccagggatttataagggagacctgggggtaaaattcatccattcttgtccagaacacctgcatcattcatccatccagtcctcgttcagcaaa

SEQ ID NO: 361049 - DNA, 201 bp, Homo sapiens
agagaattgttgatgatatgtgaggacagataacgccacttagcatgtgttcagcaaatgaacttcccctccactctcttccttttctccaagaaatattkttttgaatgtcttcacttgttgaatgtttgctcttctgttccctaattcctacccttccatccagtccagggatttataagggagacctgggggtaaaat

SEQ ID NO: 361050 - DNA, 201 bp, Homo sapiens
gtccatgtttatgtctatgagtatttgtgtctgtgtctatgtccatgtctatgtttatgtgtatttgtgtgtctgtgtttgtgtctaagtctatgactttytccatgtgtttctgtgtctatgtctgtgtgtctatgtctttgtctatgtgtatgtctgttgtgacagaggcatttaatctctggatcagagcagctcatg

SEQ ID NO: 361051 - DNA, 201 bp, Homo sapiens
caggacttagtacccatcctgactgtctgggcaaaggttataggcccttaggacagaaagacctgggcttctgagagaattgttgatgatatgtgaggacwgataacgccacttagcatgtgttcagcaaatgaacttcccctccactctcttccttttctccaagaaatatttttttgaatgtcttcacttgttgaatgt

SEQ ID NO: 361052 - DNA, 201 bp, Homo sapiens
ggggtaaaataggctctgtctattattgggagttgctgaaaaagcacattgcaaagggtgtggatatggggagaagggaagaattggggcgaaggttttgygaagtgtttagaattttttaactttaaaattgatgttaagctagttactgtttcataaattattctggaagaacaagaaactcctgggtcagagacaaag

SEQ ID NO: 361053 - DNA, 201 bp, Homo sapiens
cctatattatgagtctcagcacattttctatagagagagagagagaggaagaaagagagagggcaccagctttgtgagagattatgtgctttgttctggawgccatattccatagacttacaactcaaatgtctccagggagataagattcatttaccactgtagaatgtgggcaaatatctttgaagcaatacttaatct

SEQ ID NO: 361054 - DNA, 201 bp, Homo sapiens
cagcagggcccaggtaagagcggcctgtgtttgaggcggggacggggagataggtgcaggggtctgggcatgacagtggggaaaagggggacattgtagasggtccgagttccagctctccttccctcacctcctctggagtttatgggaaaaggcccacagagtaggattgggttggtcctagaaggatccctagtgagc

SEQ ID NO: 361055 - DNA, 201 bp, Homo sapiens
cttccctcacctcctctggagtttatgggaaaaggcccacagagtaggattgggttggtcctagaaggatccctagtgagctcagagctccctcctacccsaccttggtctaggctggggggttggagctcggctaggctcgcaggatatgcaagcccacatggggatccaggcacggatacccccttctctgttcctcaa

SEQ ID NO: 361056 - DNA, 201 bp, Homo sapiens
ccagggatctattttccaggtgctcccagcctggtgggggaactgtccctgggcaggacagtcccagcccacgtgggcagggatggggtttacagtaaggraagcaggactaggggggtatagaaagtgtctcagttgaaagcctgaataatgatcagtagataattgggtacagttggggagcagtgctgtaggtcaaga

SEQ ID NO: 361057 - DNA, 201 bp, Homo sapiens
gagctccctcctaccccaccttggtctaggctggggggttggagctcggctaggctcgcaggatatgcaagcccacatggggatccaggcacggatacccscttctctgttcctcaaactgctctaggtggggttgggtgtcccaggccaggttaccggcttgatggggccaggatggggctcctgggtgcagtcagagtt

SEQ ID NO: 361058 - DNA, 201 bp, Homo sapiens
gatcaggagaatccaacatcacctccctccaagacacacaccactgtctctccaaggctggcggactgggagaccccacccggcaacccttcttggtctckcctccaggtctatgacccctttcgctttgacccaaagaacatcaaggagaggtcacctctggcttttattcccttctcagcagggcccaggtaagagcgg

SEQ ID NO: 361059 - DNA, 201 bp, Homo sapiens; identical to SEQ ID NO: 77883

SEQ ID NO: 361060 - DNA, 201 bp, Homo sapiens
tactcattcctctgcttactcatttctgtgaggtgccaacccaagcccttctcacctccctgttctcccactcttggcctgtgttgaatccttttcctgcstgtctttccacattaatgcacctctgcggggctcttgggcagggggttgggtgcacagaaaggtgaacccctggcgttcccacattctccattgctggac

SEQ ID NO: 361061 - DNA, 201 bp, Homo sapiens
ggaacacgcttttaaggtcatgttagaccatctcatgtgcatgttagagcataccatctcatgttaggaattgtcatgtattttgtggccatgtcaggacwtgtgaacacatgtcagtgtcatgtctcatgtctaggtccatgtcagaagatgccatgtgagaatatgtcagagagtgctgggacagacagggtgtcctaa

SEQ ID NO: 361062 - DNA, 201 bp, Homo sapiens; identical to SEQ ID NO: 77886

SEQ ID NO: 361063 - DNA, 201 bp, Homo sapiens
ctgcggggctcttgggcagggggttgggtgcacagaaaggtgaacccctggcgttcccacattctccattgctggactcgaggcctcctgtacccactgtycagggtcctctccctacctggcctatttcctcttatgagggtataggtgggccagaggagaggtgtgggctgtctctcacctccaccacatccggaggca

SEQ ID NO: 361064 - DNA, 201 bp, Homo sapiens
gccttaatgctatctttttctgagtgctgtatattttattccatattttattcagctcatttctatgttgaagaggacattaaacattttcaattatagtmaatatttccaatttgccttccagagtgtctgtactgatttaccttctagcctgcagtatgtggtgagactagtgatccctatttccttcttttgtgtaac

SEQ ID NO: 361065 - DNA, 201 bp, Homo sapiens
cttctccatgggaggaactggaacctgtgtggctggtggaggaaccagccagggcatgaagggatgtggggaccagccttagggacatgtcctgagtccayactgctccccacaaacctcccctgtgaggacctcctcatatgcccacctctgggctgaaatgactcccagaacaaggaaatctttcctctcaagctaagt

SEQ ID NO: 361066 - DNA, 201 bp, Homo sapiens; identical to SEQ ID NO: 77887

SEQ ID NO: 361067 - DNA, 201 bp, Homo sapiens
accttgcaaagcacccggaataccaggagcgctgtcggcaggaggtgcaagagcttctgaaggaccgtgagcctaaagagattgaatggtgagtgcaggtrctggtgccctgttcctgagcctgtctcattggctctgttccccaggtagggaggggagaaggggttgtttttgttgattctgccactattgcttagtggg

SEQ ID NO: 361068 - DNA, 201 bp, Homo sapiens
tctcgcctccaggtctatgacccctttcgctttgacccaaagaacatcaaggagaggtcacctctggcttttattcccttctcagcagggcccaggtaagrgcggcctgtgtttgaggcggggacggggagataggtgcaggggtctgggcatgacagtggggaaaagggggacattgtagacggtccgagttccagctct

SEQ ID NO: 361069 - DNA, 201 bp, Homo sapiens; identical to SEQ ID NO: 77888

SEQ ID NO: 361070 - DNA, 201 bp, Homo sapiens; identical to SEQ ID NO: 77890

SEQ ID NO: 361071 - DNA, 201 bp, Homo sapiens; identical to SEQ ID NO: 77892

SEQ ID NO: 361072 - DNA, 201 bp, Homo sapiens
gggagaaggggttgtttttgttgattctgccactattgcttagtgggaataggagcagaggaccacaggcaggacttagtacccatcctgactgtctgggsaaaggttataggcccttaggacagaaagacctgggcttctgagagaattgttgatgatatgtgaggacagataacgccacttagcatgtgttcagcaaat

SEQ ID NO: 361073 - DNA, 201 bp, Homo sapiens
aggcagggagcattgtcctgactgcccccttctctcccacaggcattatctgcctcatcagtgtttttggaacccatcacaacccagccgtgtggccggaycctgaggtgcgggccccccgtctctgtttttgtccattccaaggctcctagaggagggggcagggttttgatcaggagaatccaacatcacctccctcca

SEQ ID NO: 361074 - DNA, 201 bp, Homo sapiens
agaagctgacacctttatgtttgagggtgagggccccagtgtggggctagagtggggacttggatatctccattccaggaacagggtgggtggacccctcrcacttcccatcccccttcccccatcctccctgaggtcctcaatgcaaggttgctgtacaccctcgggtgctgaagcagcccagagacccaagcctgcctt

SEQ ID NO: 361075 - DNA, 201 bp, Homo sapiens
atgtactcctgctgagcaaggtgggcctctctgggatctgaattcaagaagtagaagggagcttcatgtgaaatgtcagatgaaagaatttgaacttgacycagagggcactggggagccatggaaggtgattgaggaagggagggacaggtcagagataggttttggagatagctctgtggactagcacctaccagggga

SEQ ID NO: 361076 - DNA, 201 bp, Homo sapiens
ggacatgtcctgagtccacactgctccccacaaacctcccctgtgaggacctcctcatatgcccacctctgggctgaaatgactcccagaacaaggaaatytttcctctcaagctaagtgggcctctgtgagtggacagtgtgtcttttccttctgccttgggatgcgctcttgggacttgggggtggccccaagagagat

SEQ ID NO: 361077 - DNA, 201 bp, Homo sapiens
tttgttcttgtcgcaggtgctgtttgacactgccgttttctcctgctggtcacatctgggccatgtttgggggttgtgtgaggtctgggacccagggtccstaagtgaactgtctgagacattatttgagtcttgtctgaggcatgtgttgtagtatgtttgggtcatacgtgaggaacagtctgggtcacgtgttggcta

SEQ ID NO: 361078 - DNA, 201 bp, Homo sapiens
ttttcacccagtccctgtgtttctgattgcctagtctcggcaggcctgggccttctagagctactgttttgggggcacaaagaagtttgatggttaaggamtcaggccatgggtgcagatagacccagtctcaggcctcaggtttgccatggtctgggactatgggcaaattactttatcatttagagcctcagtctcttc

SEQ ID NO: 361079 - DNA, 201 bp, Homo sapiens
cctccatggcccctgattgtcctcatttatgtcagctgccattgtaccaaaggacaaggtcttctacagcttcctgaagccctggctgggtgagtatctgyaggtgaacagggttgggaacaacctggggggccaggggagggagatgcccttgcccatggcccttggctgccctgccaggggatgggctcctgctgagtg

SEQ ID NO: 361080 - DNA, 201 bp, Homo sapiens
ggcaccaggctgggcagcagatctcaaaaacttattcctgttgtctaactgaagcttctaccctttgaccaacatttcacccttctctgtccctcccccasccctggcctctggtaaccaccattctattcctatttctatgagctcaactattttaggtcccaagataagtaagatcatgtgtgtttgtctcttctgcac

SEQ ID NO: 361081 - DNA, 201 bp, Homo sapiens
attgatgcataatagatgcacatagttttgaaatacatgtgataatctaatacattcatataattgataaagatcaaatcagtgtacttgggatatccatygcctgaaatatttgtcttttctttatgctagaaacataactaacataagcaaactactttctaatgtacagtacatattgtaaactacagtgaacctact

SEQ ID NO: 361082 - DNA, 201 bp, Homo sapiens
tggatagataggtagagtggatatgtaggatggatagattagatggatggatagatagctagatgattgatagataataggataaatggatgagtggatgwatgtacagataagatggatggatggatggatggatgggcagatagatatatagatagaaaagttagataggatgaatagattagatagataaatgaatag

SEQ ID NO: 361083 - DNA, 201 bp, Homo sapiens
agatagatagattagatagatagatagatagacagatagatacatacatacatacatatatagatacatagataggtagatatgtagagatatatataggtaaatagatagatagatagatagatagatagatagatagatagatagatagatagacagacaggcagacagacagatagatagatagaagagggagtttat

SEQ ID NO: 361084 - DNA, 201 bp, Homo sapiens
gatagatagattagatagatagatagatagacagatagatacatacatacatacatatatagatacatagataggtagatatgtagagatatatataggtaaatagatagatagatagatagatagatagatagatagatagatagatagatagacagacaggcagacagacagatagatagatagaagagggagtttatt

SEQ ID NO: 361085 - DNA, 201 bp, Homo sapiens
atagatagattagatagatagatagatagacagatagatacatacatacatacatatatagatacatagataggtagatatgtagagatatatataggtaaatagatagatagatagatagatagatagatagatagatagatagatagatagacagacaggcagacagacagatagatagatagaagagggagtttattt

SEQ ID NO: 361086 - DNA, 201 bp, Homo sapiens
tagatagattagatagatagatagatagacagatagatacatacatacatacatatatagatacatagataggtagatatgtagagatatatataggtaaatagatagatagatagatagatagatagatagatagatagatagatagatagacagacaggcagacagacagatagatagatagaagagggagtttatttc

SEQ ID NO: 361087 - DNA, 201 bp, Homo sapiens
gttgcaaaatattgccttttaacttttggagggtacttttgattaatttttatgacgttaagtaggtccacatttttctttcacagctgtaaaatccatcmacttcccaggattttgtttagggtgggtgggggcccctttaccaaatgtgaagttttctcttattctcatgtctttttctgagctctttatgctgttcca

SEQ ID NO: 361088 - DNA, 201 bp, Homo sapiens
gatagattagatagatagatagatagacagatagatacatacatacatacatatatagatacatagataggtagatatgtagagatatatataggtaaatagatagatagatagatagatagatagatagatagatagatagatagatagacagacaggcagacagacagatagatagatagaagagggagtttatttcgg

SEQ ID NO: 361089 - DNA, 201 bp, Homo sapiens
tgcaaaatattgccttttaacttttggagggtacttttgattaatttttatgacgttaagtaggtccacatttttctttcacagctgtaaaatccatcaayttcccaggattttgtttagggtgggtgggggcccctttaccaaatgtgaagttttctcttattctcatgtctttttctgagctctttatgctgttccatg

SEQ ID NO: 361090 - DNA, 201 bp, Homo sapiens
atagattagatagatagatagatagacagatagatacatacatacatacatatatagatacatagataggtagatatgtagagatatatataggtaaatagatagatagatagatagatagatagatagatagatagatagatagatagacagacaggcagacagacagatagatagatagaagagggagtttatttcggg

SEQ ID NO: 361091 - DNA, 201 bp, Homo sapiens
agattagatagatagatagatagacagatagatacatacatacatacatatatagatacatagataggtagatatgtagagatatatataggtaaatagatagatagatagatagatagatagatagatagatagatagatagatagacagacaggcagacagacagatagatagatagaagagggagtttatttcgggaa

SEQ ID NO: 361092 - DNA, 201 bp, Homo sapiens
attagatagatagatagatagacagatagatacatacatacatacatatatagatacatagataggtagatatgtagagatatatataggtaaatagatagatagatagatagatagatagatagatagatagatagatagatagacagacaggcagacagacagatagatagatagaagagggagtttatttcgggaatt

SEQ ID NO: 361093 - DNA, 201 bp, Homo sapiens
tacttggtggtgggtgctatggtgcatttgaggcctgcaagtccctctatccccaagccgtgtgtggcccctgcagtactctggtctctcctttccttctytctcagccatcttcatctttctttcatgtattcactaattcccatctcagcatctcctctctccattgccatctgaccccctgtcctggtgttctgggct

SEQ ID NO: 361094 - DNA, 201 bp, Homo sapiens
atcttcatctttctttcatgtattcactaattcccatctcagcatctcctctctccattgccatctgaccccctgtcctggtgttctgggctgccctgggrccccaagagacctcaacccaaggccctatcctggaggaacccccaagcttaaggaggtggatgtggacagagacatccccaacttcatggggtcaagaaa

SEQ ID NO: 361095 - DNA, 201 bp, Homo sapiens
ggtctcctatacacacaaagcctggcatgcaccttcggtgatatgtgctgctggtgggtggggccctggcacgcaatcgtccgcatcttccaccccacctrcatcaagcctgtgctctttgctccaggtagacactgcactggccactccaggtagacactgcactggccacgccttgcccacagctggggtctctgtgct

SEQ ID NO: 361096 - DNA, 201 bp, Homo sapiens
tatctatctatctatctatctatctatctatctatctatctatttctatcatctatcaatgtatctatcattgatctatctatcatctatcaatgtatctrtcatctatctctattatctgtctatctatctatcatctatgtatctctgtatctatcatctatgtaactatgtctccatcatctattatctatctctcta

SEQ ID NO: 361097 - DNA, 201 bp, Homo sapiens
gccctgccaggggatgggctcctgctgagtgctggtgaaaagtggagccgccaccgtcggatgctgacgcctgccttccatttcaacatcctgaagccctrtatgaagattttcaatgagagtgtgaacatcatgcatgtgagttatttgaagccaaggtcccagctgcagcctttggttggggggaaccacagacagatc

SEQ ID NO: 361098 - DNA, 201 bp, Homo sapiens
attctgtagagtgctgagcgtgttcagggtttgcagaacatgttggatcatgtaggaggcatgtcaaggcatgctggagccctgacatagctcctacgtgycatgttaggcagtgtcattgctgtgctgtgctgccgtagcctggtctggtcttccctcccctcccccatcctgccttcttcctctccccttgaccctctt

SEQ ID NO: 361099 - DNA, 201 bp, Homo sapiens
cagtctgcagaaatgtgtcttcagctttgacagccattgccaggagtaagttcttgcccagggtctgggatcctgggccgtggacacaaagttggtaggtrgggggctggggaggactgagcagggaaatcagacaaaccttcttggaggagttgttatacctgatcgttgaaggactggtatgaattttatcttgaggtt

SEQ ID NO: 361100 - DNA, 201 bp, Homo sapiens
tgtctctatggtggctgttatatggtcaagtctgctgtacggctacgtcttgtcacctgtatatttacacctgggtcctggttacacctgaaatatgttayacccggttacatctggtatatcattccaactgaggtcatgtagagctggtcatgtgtggagttcatgtgtggccaaggacatttggggcatgtgaggggc

SEQ ID NO: 361101 - DNA, 201 bp, Homo sapiens
gtgggacaaggtgctcctgacagaaggtgccagggtgggggtggtgggcctggggcatcctagcctgtgatggagatgggcactgggcaagggattgggcrcacacataggggagccccagccttcccacattctccattgctgcccaaggcccaggcagctcctggttgctggcttggaggatgagtggttttctaactg

SEQ ID NO: 361102 - DNA, 201 bp, Homo sapiens
catcagcctcatgaccttggacagtctgcagaaatgtgtcttcagctttgacagccattgccaggagtaagttcttgcccagggtctgggatcctgggccrtggacacaaagttggtaggtggggggctggggaggactgagcagggaaatcagacaaaccttcttggaggagttgttatacctgatcgttgaaggactgg

SEQ ID NO: 361103 - DNA, 201 bp, Homo sapiens
ggggcatgtgaggggctgttttgttcttgtcgcaggtgctgtttgacactgccgttttctcctgctggtcacatctgggccatgtttgggggttgtgtgargtctgggacccagggtccctaagtgaactgtctgagacattatttgagtcttgtctgaggcatgtgttgtagtatgtttgggtcatacgtgaggaacagt

SEQ ID NO: 361104 - DNA, 201 bp, Homo sapiens
gagctgctcaagggagcaagggacctgccccagctctgtccccttctctggctaggccaagtggcagctcctggcctcagagggtagtgcccgtctggacrtgtttgagcacatcagcctcatgaccttggacagtctgcagaaatgtgtcttcagctttgacagccattgccaggagtaagttcttgcccagggtctggg

SEQ ID NO: 361105 - DNA, 201 bp, Homo sapiens; identical to SEQ ID NO: 77885

SEQ ID NO: 361106 - DNA, 201 bp, Homo sapiens; identical to SEQ ID NO: 77891

SEQ ID NO: 361107 - DNA, 201 bp, Homo sapiens; identical to SEQ ID NO: 77889

SEQ ID NO: 361108 - DNA, 201 bp, Homo sapiens; identical to SEQ ID NO: 77893

SEQ ID NO: 361109 - DNA, 201 bp, Homo sapiens; identical to SEQ ID NO: 77896

SEQ ID NO: 361110 - DNA, 201 bp, Homo sapiens; identical to SEQ ID NO: 77895

SEQ ID NO: 361111 - DNA, 201 bp, Homo sapiens
aattcccatctcagcatctcctctctccattgccatctgaccccctgtcctggtgttctgggctgccctggggccccaagagacctcaacccaaggccctrtcctggaggaacccccaagcttaaggaggtggatgtggacagagacatccccaacttcatggggtcaagaaagggccagagggagatggatgacagccca

SEQ ID NO: 361112 - DNA, 201 bp, Homo sapiens
ttgaaaggagagtgcagggtgatgcaattgggcatcgttagtgttcaaggccccttgccaggtctagcgtcaccttgcctgtcacaaaggttagaacaatraggacttgtggctggtggaggatctggactgttatttctgtgatgtccatctctggtgtgggtcaagtccttttaccccatcctgtagtttgtctgccct

SEQ ID NO: 361113 - DNA, 201 bp, Homo sapiens
agtttggggccctctccttgacccctgtgcttcccttcttggacaggccaggctgagcagggaaacaggcagcatcctacagagaccatggctctggcctmaaaatgctgagtgactctgggctggttcccagctgtctctggttactgaggtctctttcagttgtgagtggtggaaatccaacctggtgtagtctaagca

SEQ ID NO: 361114 - DNA, 201 bp, Homo sapiens; identical to SEQ ID NO: 77899

SEQ ID NO: 361115 - DNA, 201 bp, Homo sapiens
ccaacctggtgtagtctaagcaaagaaagagaatctattgattttaaagtccagggaggatggccttcaggcatggctggatccaggtctcacacagtgtyacttcctctcttggctttagctttctccacgccacttttggcttgtcttcctttcttggctttagctttttccacgccacttttgctttcaagacagtct

SEQ ID NO: 361116 - DNA, 201 bp, Homo sapiens
gggagatgagatgctgcttgaaattctcagggagagggcttccacctcttccctgcagatccttctctctcgcagcctaggagagcatgaattgggtcctrtgtctttctctccagattcacagctcggaggaaggtctcctatacacacaaagcctggcatgcaccttcggtgatatgtgctgctggtgggtggggccct

SEQ ID NO: 361117 - DNA, 201 bp, Homo sapiens
ctcatgttaggaattgtcatgtattttgtggccatgtcaggacttgtgaacacatgtcagtgtcatgtctcatgtctaggtccatgtcagaagatgccatrtgagaatatgtcagagagtgctgggacagacagggtgtcctaagtccttgtgaaggcattctgtagagtgctgagcgtgttcagggtttgcagaacatgt

SEQ ID NO: 361118 - DNA, 201 bp, Homo sapiens
catgttaggaattgtcatgtattttgtggccatgtcaggacttgtgaacacatgtcagtgtcatgtctcatgtctaggtccatgtcagaagatgccatgtsagaatatgtcagagagtgctgggacagacagggtgtcctaagtccttgtgaaggcattctgtagagtgctgagcgtgttcagggtttgcagaacatgttg

SEQ ID NO: 361119 - DNA, 201 bp, Homo sapiens
taggaattgtcatgtattttgtggccatgtcaggacttgtgaacacatgtcagtgtcatgtctcatgtctaggtccatgtcagaagatgccatgtgagaakatgtcagagagtgctgggacagacagggtgtcctaagtccttgtgaaggcattctgtagagtgctgagcgtgttcagggtttgcagaacatgttggatca

SEQ ID NO: 361120 - DNA, 201 bp, Homo sapiens
aaggtgatgtagtggagtcatgtctctggcgcatagtaggtgcccagaaggtgtctgtttctatgttcgcgtcacccgaaccctgtaaactcaagagggtmatgacaacaattgcataatagctgttgctgataagaaacaacctgaaaactcattggtttaaaccaataaaggtttatgaatcctgataagtctgtggga

SEQ ID NO: 361121 - DNA, 201 bp, Homo sapiens
caacttcatttgaagtttgaaattcagctgcatgaagtactaggaattttgttttgaagagatgttgtggctttttagtaactggtgctatgtcctgtacraactataaacacttactgattgtccacattatctgcctggagtatgctcagtaccgcacaaaaatgcatttgaactacttttattgagagcaaacactga

SEQ ID NO: 361122 - DNA, 201 bp, Homo sapiens
agcctacatttataatgcacttattgaattcattagggtaagtcatatttattgctttcttctttagatttaggatatgtgatcattttattaaataaggyctactaaaaggaaagataatctgtatttgagaagaaatatataagacgataagtaaaagtagaagtctgtggcctcataaatcatccctaatagttgatt

SEQ ID NO: 361123 - DNA, 201 bp, Homo sapiens
ttattgctttcttctttagatttaggatatgtgatcattttattaaataaggtctactaaaaggaaagataatctgtatttgagaagaaatatataagacrataagtaaaagtagaagtctgtggcctcataaatcatccctaatagttgattttgcccatatacacatagaaactggtgagcttgaagggggacctgtgg

SEQ ID NO: 361124 - DNA, 201 bp, Homo sapiens
gtacattggtttaatcttacacattactgtcatttcagttttatttgaacttggttacttcagaaattaggacagtttctcattctgatcaatgatacaasataatctctagatttctcaaagtcagataaaatgtgagacacattctctgcaaggtatttcaagaattaagggagtcctcagctaattgctctgctaaac

SEQ ID NO: 361125 - DNA, 201 bp, Homo sapiens
cataatcagaagacatatttggatagtgttttatgtacacttgtatattttattgtatttgttttaagagatgggatctttctcttgccccaactggagtrcagtagtacagtcatggctcactgtaacctcaaactcctgggctcacgcagtcctcccaccttggcctcccgagtagcagtgactacaggcaggagccac

SEQ ID NO: 361126 - DNA, 201 bp, Homo sapiens
cccaggtcaaccagagattgctggttttactcatgatacttaagtagagtatgatagttactatttcaccttcagctgtacttaagatgttttcctggaaraattcattctgctttctgaccaggatttccagaaactctgacccttctaagaggtctgggtggaattgtgatggtgattctgctagtagacagtgtaact

SEQ ID NO: 361127 - DNA, 201 bp, Homo sapiens
tttatactcattgttaatttgttctaatctaaattacttttagactattaaatattattctattttaaagttaagggactaatgcctctgataacctgatwaaaaaaaaaaactttctgatactcagaagttaagatttattcagttgaagatcatttctttcaggtgttgatcgtgtgatatttttcacatctgtaatct

SEQ ID NO: 361128 - DNA, 201 bp, Homo sapiens
caagaatgaagacgcattgcttttaaacacatctattggattactttctcaagataatgccttatgtgggattacttgaaaaaagatattcatgatgtttrgggttttattatttggttgttacgttgtctagattgactccataagcacagtagttttagatattgcaaagagtttcttttaaatatcaacacatggtca

SEQ ID NO: 361129 - DNA, 201 bp, Homo sapiens
agtgctgggattacaggcatgagccaccgcgcccagccgcaatttttctttttacccagtatacttgatcagttacatcacttctgcagtataacaaaggmtctattgaatctaaatgaacctttaaagtttattaaatccagacttctggagtaggggggattttagctcagcatgaaattaggagtcatattttaaaat

SEQ ID NO: 361130 - DNA, 201 bp, Homo sapiens
tttctatagagatggtttcatcatgttgcccaggctggtatcaaactcctggataaaagagacccacctgcctcagtctcccaaagtgctgggattacagktgtgagccaccacgcccagcctaaaaagcaacatcttgtcagtgctataatctcaaatagcttgtttgcaaggtgtgatggttaatactaagtgtcaact

SEQ ID NO: 361131 - DNA, 201 bp, Homo sapiens
caaatgggcaagttacttctttgagccagtgttcttgtttgtaaaatggagccgtatttagaaccagaaaacctttgtggtgattccctctctctctctcyctctctctctctctctctctctctctctctctctctctctcactacccctgttcatttggcaaatggtcaaaaccaaaataatcttatcagaaatataaa

SEQ ID NO: 361132 - DNA, 201 bp, Homo sapiens
cccagcttgtccaagtttgggtggttaagtatacattttgcccggcactgatctgggcggtgcatgtgggaagatgaatagggcccagttccccgactttgagggcctcacaggctgatgtgtaagagacaggaaaacagccctagtgctttgtgatcaaccttgtggtattacagaagaggaagtttaggaaggcacttt

SEQ ID NO: 361133 - DNA, 201 bp, Homo sapiens
aaaatggattctattatgacatgtacctcgaagaagggtaagccatcaactagataaagaaaactgaagtcaatgactatggatccataagttattcttargagttctcagtaagggaggaatgatatagatctcactgcttcttcatcaggtatgcccattatcagtacttgaagtgttgcaatttacctgaagtaatag

SEQ ID NO: 361134 - DNA, 201 bp, Homo sapiens
acagttttctgccacgtgtggggtgatttgaatgtaaaatgcccaactctcatagcaggctgaacagaaacattttttatactcattgttaatttgttctratctaaattacttttagactattaaatattattctattttaaagttaagggactaatgcctctgataacctgattaaaaaaaaaaactttctgatactca

SEQ ID NO: 361135 - DNA, 201 bp, Homo sapiens
aaccctctagtttcactgactcatttaaaatgtggaaacagagtcccacaaagattaacctacttgttgcccaaggtttagcagcatgtcgcacatggatsctgtgctatcatttcctctacccattatctctgttactgctgaatgtcctctaaactggaagttaggctagataaaacattcccccttaaaataggcact

SEQ ID NO: 361136 - DNA, 201 bp, Homo sapiens
tgtaaaaattacttatgaaaaatgttttgtttagaattctaagatacgatgcaatagtctaattttttaatattaaaacccttgaagtattccaaatactrtttccaaatgaacatttttcgaagccatggtgtgattcgaatggaatgaaaagattatactttcttctccttcaggggtgtgtctagcaatgatttctct

SEQ ID NO: 361137 - DNA, 201 bp, Homo sapiens
tagtgagaaaggtctccatggatgaccaaggtagaagctactgaaaatataaaatgtaaaaattacttatgaaaaatgttttgtttagaattctaagatamgatgcaatagtctaattttttaatattaaaacccttgaagtattccaaatactatttccaaatgaacatttttcgaagccatggtgtgattcgaatggaa

SEQ ID NO: 361138 - DNA, 201 bp, Homo sapiens
tgtgttcagtaaaatcatgtgagatcaaaatataattctgattttagatctgacaaattctgtatctctgttacaataggtacgacaacaattccacgatkccaaattcatggcagacattgatctggatccaggctgtacattgaataaaaagattcgaaatgcacagttagcacagtataacttcattttaggtaagaa

SEQ ID NO: 361139 - DNA, 201 bp, Homo sapiens
acttccccatttccctttgcgggtaggtggcattccagattatgtggtggtaagcttttcttttgcggggagagaagacagggcagtactcctgatacctrataactatagagcagacatgttaaacaccctgtaattatcaggccacttccccaactgcagaattgcccatctcacgtgcacacacaggacccatgttga

SEQ ID NO: 361140 - DNA, 201 bp, Homo sapiens
aaaataaatgaaatttgaggagttaaacatcgttagtaactccttcctactttttaaagacttgcctttattgtaagttgttaacctgtctttgccagtgwtgaaattgttcagtctttcaatatcagatttccattttttttaaattaaataacaaatactaaaataacattctcaacacttcctggggcatcacaggat

SEQ ID NO: 361141 - DNA, 201 bp, Homo sapiens
gcagtggatagttaaagaactgaagggacccttattccctgccactgttggggaaacttgactggattgaggaatataacaggcagggcatgtgttacacrtctgccaaattgtaaatcagctgcaattctataacatcagaaacactgacatggtttctttgattcaggagtggcactgattgaaatatgggacatcatg

SEQ ID NO: 361142 - DNA, 201 bp, Homo sapiens
tccctgccactgttggggaaacttgactggattgaggaatataacaggcagggcatgtgttacacgtctgccaaattgtaaatcagctgcaattctataamatcagaaacactgacatggtttctttgattcaggagtggcactgattgaaatatgggacatcatgaccatattctgagctcaagaacactgaaatttatg

SEQ ID NO: 361143 - DNA, 201 bp, Homo sapiens
gtgcttttactgctgtatgtagcccagaatttgagaaatgttgcttggatggacagctagaatcagtggctttttgacaacctttcgtgtaattaaatatrgcattacagaagcagttttattcttaagtgtccgtggacttttctttttctcttcagccttatgtttgatcatcggccaaggtcctggcgagaactgcct

SEQ ID NO: 361144 - DNA, 201 bp, Homo sapiens
aaattgcgatgaaaaaaataaaaatcattttgctttatcctcagcaacttgaaaacagtctgaatgaatttggtgaaaagtgggagttaaactctggagayggagctttctatggcccaaaggtgagcactaaagtacatttgggtaatatgattttcacttgtggatgaagaagatacgacttcgaaaaaagttggaaaa

SEQ ID NO: 361145 - DNA, 201 bp, Homo sapiens
gattccaacaggatgatgctcacatattctgtgccatggagcaggtatgagaccctgggaataaaatacttagaaagaagagtcaagaaagtcaaggaaartaactactgtttctttttttgttttttaatttgaagattgaagatgaaataaaaggttgtttggattttctacgtacggtatatagcgtatttggatttt

SEQ ID NO: 361146 - DNA, 201 bp, Homo sapiens
atcctaaaatgttgaaagagtgggagaagttccaagaggaagctaaaaaccgagatcataggaaaattggcagggtatgttcaagaacaatgatgtgtctwgactgagttttcttcaacttcatttgaagtttgaaattcagctgcatgaagtactaggaattttgttttgaagagatgttgtggctttttagtaactggt

SEQ ID NO: 361147 - DNA, 201 bp, Homo sapiens
ccccaactggagtgcagtagtacagtcatggctcactgtaacctcaaactcctgggctcacgcagtcctcccaccttggcctcccgagtagcagtgactayaggcaggagccaccatacccagttacacttgtatattttagtatttagtattttaaaaaaccagattagcagatatcaggtacttcagtatggtaggtaa

SEQ ID NO: 361148 - DNA, 201 bp, Homo sapiens
tgtgaagaaaattgttgattgtgaattttaaaatttgcaagccaatggaaaaatgcatatgttccctaatttcttttttatactttcaatacaaacatacrtgctgttccatcacagcttgagaaatgacctggaaataagacaaagagtataattagaagactcttctgaacagagaattttaagtgggacatgtgatta

SEQ ID NO: 361149 - DNA, 201 bp, Homo sapiens
ttgaacttggttacttcagaaattaggacagtttctcattctgatcaatgatacaagataatctctagatttctcaaagtcagataaaatgtgagacacaktctctgcaaggtatttcaagaattaagggagtcctcagctaattgctctgctaaacctgttttaggtggggaaaagtccatgattagggtagaatttagt

SEQ ID NO: 361150 - DNA, 201 bp, Homo sapiens
caagcacaaaaacagtttggggaaccaacgtggctgattcttggtaagcgtattatacaactagtagaagcagaaccagttaggcctatgagccatgagcrtctactgtaccacagacattagttagtactttttacaaagtgaatggagtgtttccattcatttgacaagtgcttctacctacaagttcttctaccttac

SEQ ID NO: 361151 - DNA, 201 bp, Homo sapiens
atttgtgtggccttttacagaaaaagcttgccaatcttggtcttaaacacttcaacttaaaatatgtgaatatgtatgtattcactaactttatatacatacataaaacagtgaatatatatatgtatggcaaggtttgggggatagcgagtgctaattagagttcttacattatcttaacacatacgagaagtagtctga

SEQ ID NO: 361152 - DNA, 201 bp, Homo sapiens
ctctttacagatgaggaaacagaccttgagtgagcgacttgttcagagcctcacatctacagtagttagacgcggagacagaatcagaatcttaggcttgrggcttccaaacttgcgtttatggcttactgtaagcgggaaacacattgcagagccttatttaatcaatctcctaagatcctgcgggggtaaagagctcca

SEQ ID NO: 361153 - DNA, 201 bp, Homo sapiens
cagtgaataatattatctaagacagttttgccagctttaaattcctggaagttcatccaagaagtcctgatccctgtgttcagtaaaatcatgtgagatcmaaatataattctgattttagatctgacaaattctgtatctctgttacaataggtacgacaacaattccacgatgccaaattcatggcagacattgatctg

SEQ ID NO: 361154 - DNA, 201 bp, Homo sapiens
tttttttcttgattgtccactcgagattgaatggagaaactgcatacgggcacattctaactatgtaaatttaattctagatgataaatggtgactatacrtagatttttttcacataaaatgatatttttactgttttgtaacttttttttttttttttttttttgcttaatagaatgtggtcaacaactttccatgtcc

SEQ ID NO: 361155 - DNA, 201 bp, Homo sapiens
attcctgagaaaggtaattctgtagcttctcttcacaatccggttctgtttcccaacttttgggttgagattttagattacttgtatgtagatgtacatamcatatatactcagggaaatagagaacagttgcctactctcttcccagtgttgtagaaaaggggtcataggcctcagggttccagagagacctgttgtaat

SEQ ID NO: 361156 - DNA, 201 bp, Homo sapiens
aatcagccctaatccaactattgagctccactttagtatcactggcattttataataacccagtctttgcttcttagattgacatacagattaaagatgcrattgggcggtaccaccagtgtgcaaccatccagctggatttccagttgcccatcagatttaatcttacttatgtaaggtgagtttctggtgtctgctctg

SEQ ID NO: 361157 - DNA, 201 bp, Homo sapiens; identical to SEQ ID NO: 78032

SEQ ID NO: 361158 - DNA, 201 bp, Homo sapiens
tttgaagatgatgaatgctgtagatgttagtttgactgttttgttaccacagattcactgcctttttgaaatgttccatagattatagagtgacagtagargaagtcagctctctgattgctgtctctttttctttctttgccaaacctctagaaacctaagtgggtgttttatatagaatatttttgttaattttatctg

SEQ ID NO: 361159 - DNA, 201 bp, Homo sapiens
ttgttttagttgttggtgaaaaagagaaaatcagtggcactgttaatatccgcacaagagacaataaggtccacggggaacgcaccatttctgaaactatsgagcggctacagcagctcaaagagttccgcagcaaacaggcagaagaagaattttaatgaaaaaattacccagattggctccatggaaaaggaggaacag

SEQ ID NO: 361160 - DNA, 201 bp, Homo sapiens
ttttaaacacatctattggattactttctcaagataatgccttatgtgggattacttgaaaaaagatattcatgatgtttggggttttattatttggttgytacgttgtctagattgactccataagcacagtagttttagatattgcaaagagtttcttttaaatatcaacacatggtcacttgtaccttttaatgtatc

SEQ ID NO: 361161 - DNA, 201 bp, Homo sapiens
cctccacgtactgggaaggcaaagcagatatggagactctccagagaatttatggcatttcattcccagatcctaaaatgttgaaagagtgggagaagttycaagaggaagctaaaaaccgagatcataggaaaattggcagggtatgttcaagaacaatgatgtgtcttgactgagttttcttcaacttcatttgaagtt

SEQ ID NO: 361162 - DNA, 201 bp, Homo sapiens
cttggatggacagctagaatcagtggctttttgacaacctttcgtgtaattaaatatagcattacagaagcagttttattcttaagtgtccgtggactttkctttttctcttcagccttatgtttgatcatcggccaaggtcctggcgagaactgcctctgcggctagctgattttggggtacttcataggaacgagctgt

SEQ ID NO: 361163 - DNA, 201 bp, Homo sapiens
ttattttatcatctttccattttaaacctgcacagacctgcaatttttctttctttttttttttttttttgttgtcgttgttgttgttgaaatggagtctygctctgtctcccaggctggagtgcagtggcgcgatctctgctcactgcaagctccgcctcccgggttccagccattctcctgcctcagcctcccgagtag

SEQ ID NO: 361164 - DNA, 201 bp, Homo sapiens
cttttttttttttttttgagacggaggagtctcgctctgtcgcccaggctggagtgcattggcgccatcttggctcactgcaagctccgcttcctgggttracgccattctcctgcctcggcctcctgagtagctgggattacaggcgcccgccaccacgcctgcctaatttttgtatttttagtagagacggggtttcac

SEQ ID NO: 361165 - DNA, 201 bp, Homo sapiens
acctaagtgggtgttttatatagaatatttttgttaattttatctgctatagaaagtagtagtgtgttgttttatatagttgctaattacatactccaagstgatcatggcatctttgaattcagtaaatactttccttgaaggggagaccttaagtcaaagaaatttgtgattggttgtgagtggacatataggctgacc

SEQ ID NO: 361166 - DNA, 201 bp, Homo sapiens
gccaccacgcctgcctaatttttgtatttttagtagagacggggtttcactgtgttagccaggatggtcttgatctcctgacctcgtgatccacccgcctyggcctcccaaagtgctgggattacaggcgtgagccactgcgcctggccgttttgttacaaatcttaaagattattttacccttctttgaaaaattgaaat

SEQ ID NO: 361167 - DNA, 201 bp, Homo sapiens
gcaagagatatgccagaagggttaaaggaacagtaatcagaaggatcttaggcaacaaggatgtttgaaacttgtattctatacatgaaggatcttaagcrggaagattgtatttgtaaaagtcacgctggcattgggatagaaggttaggccacatgcagaaggctgttgtaatagtccaagtgagaagtggtgacgtct

SEQ ID NO: 361168 - DNA, 201 bp, Homo sapiens
catgtgtaatctacattttcagagtaactctattcttagaatcttggggctccatattggatcataagataaaagtcatgttcttcccaaagaatatagasaatatgattatcctttttatcagttctttaatctcctgaaaactgttttacaccaatatgatgaaatacatttctctctgccaaattcatgttatgtttt

SEQ ID NO: 361169 - DNA, 201 bp, Homo sapiens
gaagttatttagtaggccttttttttttcctttggagtctacatagcttagctttgtagaaagagaaaggtgggtgtattaagagaaaactcggtgtggtsacttgtgccagttgtcccagctactctagaggctgatgttggaggattgcttcaggccaggaggccagcctgcgcaacatagcaagaccctgtcgctaaa

SEQ ID NO: 361170 - DNA, 201 bp, Homo sapiens
gctgatgttggaggattgcttcaggccaggaggccagcctgcgcaacatagcaagaccctgtcgctaaaaaattaaaaaaaaaaaaacttatttgttggaraaattaagattattcaaaccattggaaattgatagtgcttatttatcagagttgccatatctgcttaaacaggaggcattcaatgtcaaatgataatgtt

SEQ ID NO: 361171 - DNA, 201 bp, Homo sapiens
ttcagagaacaaagtctatgtcatttaattagtgatgccaagtttagtttaatttgtttgaaaacagctaaaccagatgatttccaaaataaaaatacactagtaattggaagccttttgaattactttggctatggatagaaacagtagtttatagatttagaaatttaggattttatatattgggtttacttgtagtaa

SEQ ID NO: 361172 - DNA, 201 bp, Homo sapiens
ttttattcatgcaagtgcttttactgctgtatgtagcccagaatttgagaaatgttgcttggatggacagctagaatcagtggctttttgacaacctttcrtgtaattaaatatagcattacagaagcagttttattcttaagtgtccgtggacttttctttttctcttcagccttatgtttgatcatcggccaaggtcct

SEQ ID NO: 361173 - DNA, 201 bp, Homo sapiens
agaacaatgatgtgtcttgactgagttttcttcaacttcatttgaagtttgaaattcagctgcatgaagtactaggaattttgttttgaagagatgttgtrgctttttagtaactggtgctatgtcctgtacaaactataaacacttactgattgtccacattatctgcctggagtatgctcagtaccgcacaaaaatgca

SEQ ID NO: 361174 - DNA, 201 bp, Homo sapiens
gattcaggagtggcactgattgaaatatgggacatcatgaccatattctgagctcaagaacactgaaatttatgtatatatacacacacgtatacgtgacrtacataaacattcttttgcttttcttttacccaggaccaagaactatatttctttcatgaactcagccctggaagttgcttttttctgccaaaaggagcc

SEQ ID NO: 361175 - DNA, 201 bp, Homo sapiens
gaggccaagtcccgggcgctagcccacctcccacccgcctcttggctcctctcctctaggccgtcgctttcgggttctctcatcgcttcgtcgttcgccartgtttgaggagaaggccagcagtccttcagggaagatgggaggcgaggagaagccggtgagcaaacttggtgggacccagagaccagcctgggactctag

SEQ ID NO: 361176 - DNA, 201 bp, Homo sapiens
cgggtacgaagattccaacaggatgatgctcacatattctgtgccatggagcaggtatgagaccctgggaataaaatacttagaaagaagagtcaagaaartcaaggaaaataactactgtttctttttttgttttttaatttgaagattgaagatgaaataaaaggttgtttggattttctacgtacggtatatagcgta

SEQ ID NO: 361177 - DNA, 201 bp, Homo sapiens
gaagttatttcaattaactgagaattagatgcatattttgtaataggggagaggctttcttaatctgatatgattgggatcaataattggtcagtttatcmaaataagagttggtaaaacatatatatgtgtatatatatacgcgtatatatacacgtgtatatatatatatcttaaactgggtattgggaaactctagtc

SEQ ID NO: 361178 - DNA, 201 bp, Homo sapiens; identical to SEQ ID NO: 78036

SEQ ID NO: 361179 - DNA, 201 bp, Homo sapiens
taaaataaaataaatgaaatttgaggagttaaacatcgttagtaactccttcctactttttaaagacttgcctttattgtaagttgttaacctgtctttgscagtgatgaaattgttcagtctttcaatatcagatttccattttttttaaattaaataacaaatactaaaataacattctcaacacttcctggggcatca

SEQ ID NO: 361180 - DNA, 201 bp, Homo sapiens
cccggcactgatctgggcggtgcatgtgggaagatgaatagggcccagttccccgactttgagggcctcacaggctgatgtgtaagagacaggaaaacagmcctagtgctttgtgatcaaccttgtggtattacagaagaggaagtttaggaaggcactttagaatttagtttggaagaatgatttcaccaggtaaacagg

SEQ ID NO: 361181 - DNA, 201 bp, Homo sapiens
acaaatactaaaataacattctcaacacttcctggggcatcacaggatggaggtgtcacattagattaaaatataaaacgttttttgcttatttagattgrtgctggtgaagagaagcaaaaggaaggaggcaaaaagaagaacaaagaaggatctggagatggaggtcgagctgaggtaaaagttatcatcacagagggc

SEQ ID NO: 361182 - DNA, 201 bp, Homo sapiens
tttgatcatcggccaaggtcctggcgagaactgcctctgcggctagctgattttggggtacttcataggaacgagctgtctggagcactcacaggactcayccgggtacgaagattccaacaggatgatgctcacatattctgtgccatggagcaggtatgagaccctgggaataaaatacttagaaagaagagtcaagaa

SEQ ID NO: 361183 - DNA, 201 bp, Homo sapiens
aacaagttcaaatgccggatattgaatgaaaaggtgaatactccaactaccacagtctataggtaagaatattagatgtcattaaatgtatctggtatgtrtgtcattttgtctttgttaaaattcctttcattttatctttagatgtggccctttgatagatctctgccggggtcctcatgttagacacacgggcaaaat

SEQ ID NO: 361184 - DNA, 201 bp, Homo sapiens
atatattttaatatataataactataaaaataggctcatgcatacatactgggtttttttttttttcacttaaatcatggatgtctgtgagaaaatatttkgctattataacaagaatgaagacgcattgcttttaaacacatctattggattactttctcaagataatgccttatgtgggattacttgaaaaaagatatt

SEQ ID NO: 361185 - DNA, 201 bp, Homo sapiens; identical to SEQ ID NO: 78029

SEQ ID NO: 361186 - DNA, 201 bp, Homo sapiens
aacctaagtgggtgttttatatagaatatttttgttaattttatctgctatagaaagtagtagtgtgttgttttatatagttgctaattacatactccaarctgatcatggcatctttgaattcagtaaatactttccttgaaggggagaccttaagtcaaagaaatttgtgattggttgtgagtggacatataggctgac

SEQ ID NO: 361187 - DNA, 201 bp, Homo sapiens
atttgaagattgaagatgaaataaaaggttgtttggattttctacgtacggtatatagcgtatttggattttcttttaaactaaacctttctactcgcccrgaaaaattccttggagatatcgaagtatgggatcaagctgagaaagtaagtggtgtttttcagcgtgcttttgaatactgtttgaaattggcttgttctg

SEQ ID NO: 361188 - DNA, 201 bp, Homo sapiens; identical to SEQ ID NO: 78052

SEQ ID NO: 361189 - DNA, 201 bp, Homo sapiens; identical to SEQ ID NO: 78053

SEQ ID NO: 361190 - DNA, 201 bp, Homo sapiens
tctacagcacagtgttaggccaagcacatatcctatttcagttttagtttgacttacaaggttgtctctgggttctgagtataaagcattggaggttgtttctctccccttctctctaataagaagtcagcattttggtgcagaaagggggcttagtgtgttatcctactgctgtgtgctgaggtcctggagtatacacaa

SEQ ID NO: 361191 - DNA, 201 bp, Homo sapiens
gcgcccaccaccatgcccagctaatttttgtatttttagtagagacggggtttcaccatgttggccaggctggtgtcgaactcctgacctcaggcgatccrcctacctcggcctcccaaagtgctgggattaaacgggtgagccaccacacctgggatttttatttggaaaaatcccttggggattccaatgtgcaacaca

SEQ ID NO: 361192 - DNA, 201 bp, Homo sapiens; identical to SEQ ID NO: 78079

SEQ ID NO: 361193 - DNA, 201 bp, Homo sapiens; identical to SEQ ID NO: 78080

SEQ ID NO: 361194 - DNA, 201 bp, Homo sapiens
ctacagcacagtgttaggccaagcacatatcctatttcagttttagtttgacttacaaggttgtctctgggttctgagtataaagcattggaggttgtttctctccccttctctctaataagaagtcagcattttggtgcagaaagggggcttagtgtgttatcctactgctgtgtgctgaggtcctggagtatacacaat

SEQ ID NO: 361195 - DNA, 201 bp, Homo sapiens
gctaattttttaagtttttgtacagatgggggtcttgttatgttacccaggctggtcttgaactcctggcctcaagctatcctcccacctcagcttcccaragtgctgggattacagatgtgatccacctcaacaagcctgtttttcatttttagaaaaatgtttttcacagattcttgaattctgagtgcattcctccta

SEQ ID NO: 361196 - DNA, 201 bp, Homo sapiens
ttttaaagctgcatgtttgatccccaacagggaagtgtttgtattcaaagggtctgaaagctcccgagggtttttttttttttttttttttttttgagacrgagtctccctctgtgcccaggctggagtgcaatggcgcaatctcagctcactgcaagctccacctcccgggttcacgctattctcctgtctcagcctctc

SEQ ID NO: 361197 - DNA, 201 bp, Homo sapiens
tgtgtctgctcctagcagcagggaggaagtgtgtaactagagaggagcctattcagcaggtgtcatgactgtggcttggcgtgggtgacgcaccctcatcyggggtgagttaaccatcttatgatggaccagcgattaaaggagactcaaacaccactacacccccctggttgaggacagagctcacttgtgttgctttgt

SEQ ID NO: 361198 - DNA, 201 bp, Homo sapiens
gtagccgaggagtgttgagaaattgcttttgagtagttgcatttgtgtaaccctagctagcgtacaggagatgttgcctggctgaggctggggaaacctastgcaggagaataagaaccacaggattaccaaactcgttttggggtggcagttctttcctctccttgacagtagcggactctcaagttcctctaaagagga

SEQ ID NO: 361199 - DNA, 201 bp, Homo sapiens
gaagttttccagagcctcttctggggaagcagaagtggtgctgagtgagtccttggaaacacggcaccccacgatcagggaggctattgtgtgagccaagmacggggtgtcccccagaaatatggtaacggcagagggctgctctgcattttctgcttctaagctcagcatgtccctgcccccagctttcaggaggagatc

SEQ ID NO: 361200 - DNA, 201 bp, Homo sapiens
ggcctggtccctttaagcacaagggatattttaaaatgggtctatatttatgcacgagtttatacttcctgtctccaggcgacttttctggtgagctgtgyagagctgaaggtaggagagagaggggaactaggagagccaatgacggcacagaacatcgtgcaagctggggctctggggttttttacagactcttccagc

SEQ ID NO: 361201 - DNA, 201 bp, Homo sapiens; identical to SEQ ID NO: 78056

SEQ ID NO: 361202 - DNA, 201 bp, Homo sapiens
agagagagcttcctaaagaattagactctgaaaacaaggcacggccccaaaccagaaccttcattgtctgaggttgaaaaaggcagctggtaccaaggctstctcacctgagcccccacagcagcatgcctaaggggccacatgggcagccatgcttagtgtagcagccttgagggcagctggagcaatggcagcccacca

SEQ ID NO: 361203 - DNA, 201 bp, Homo sapiens
ttgctcaactttatcaacagtacttcttgctttggtttcactgccacagcacccccgtgccgtctgtacagcctgccattcagctcccgttaggggtaccrttcactgatacgatttatggcagttttgcagttgtccagactagaggatgggtgtgagggtaaaggagcctttcgcttctttgccagacactgagcacaa

SEQ ID NO: 361204 - DNA, 201 bp, Homo sapiens
taagattgttaatttccttcaatctctagtgacaacacttaatttcttttctaataaaaaaaacctatagatgattcagtgatttttgtccaattcatttscatgttctcaagacattaaggaatgttatgcgaaatacactaacttaaaactgtgtttatatttggccctgccattataaataaagacacgtgctgctgt

SEQ ID NO: 361205 - DNA, 201 bp, Homo sapiens
gcaggtgcaccctatgtctgtctgagttcacttcctggccttaccactggtactaaaagcactcaaacccaattaatggtggtaccaaatatttcctattmtgggacatgtttagcaatttaggcttagattaagaatgagagaagatgggaaatgttatttctccaactgcttctattttggtgtgggcattagagtccc

SEQ ID NO: 361206 - DNA, 201 bp, Homo sapiens; identical to SEQ ID NO: 78057

SEQ ID NO: 361207 - DNA, 201 bp, Homo sapiens; identical to SEQ ID NO: 78081

SEQ ID NO: 361208 - DNA, 201 bp, Homo sapiens; identical to SEQ ID NO: 78058

SEQ ID NO: 361209 - DNA, 201 bp, Homo sapiens; identical to SEQ ID NO: 78059

SEQ ID NO: 361210 - DNA, 201 bp, Homo sapiens; identical to SEQ ID NO: 78061

SEQ ID NO: 361211 - DNA, 201 bp, Homo sapiens; identical to SEQ ID NO: 78060

SEQ ID NO: 361212 - DNA, 201 bp, Homo sapiens
tttcaaataaaactccccctcacaccacccaactggaagtcattcctgatgtgctgtgagcagaatgggcctgcgattttgcaagtaaggaatatcctgtrggtttgggagctgtcctaccgtgcatcccgtgacactctctttgacacctaaattaagcagacgcgttgcctgacagaaacccgacttttgcgggactga

SEQ ID NO: 361213 - DNA, 201 bp, Homo sapiens
ggaaagggtatgtttgccaagacaagaatgagtatttgtgtggcaaagacatggtcattgaattagtgaattcctgcatcacatttttgtctgtgctcacytctgagcaagaatttggtgggctagttggtttaagggaatggcccactgagtttctgtctgcctgcacttcaaaactgtttaagtctttaggatcatatc

SEQ ID NO: 361214 - DNA, 201 bp, Homo sapiens
tttacagagacactgtagcaaagtgttaagagcaaaggcaatggggccttctcacctgggtgcggatccaggctccaatagacagtctggggacactgggmaatttagtcaatccctttgtgctttaatttcttcaaatgtgaaatagaaataatatttttagtagccgtcttacaaaaaacaggttgttataaaaaaatg

SEQ ID NO: 361215 - DNA, 201 bp, Homo sapiens
caaggtgaggtagaagcaggtaacccttgtctgcagctatgctgaggctgaattgcacaaattaagaattaggcctaggtctgcagcttaatctagccctracacatacatacagagccacaagctaagaaagagttcatgttgtaacctagtcaccaaaactggacagatctccaaaagcaaactaaatactagcagaca

SEQ ID NO: 361216 - DNA, 201 bp, Homo sapiens
gtacaaatactgttaaatttatttgacataaaactgataataaacataggtttgggtataaacactgttagtttgtgtaagtgaaaggacaagagactatsaactttatgaatatataaccaagtaatctacaactgcttaggggcttttatgaaaatctctaaatcttttgatcaagacctttacagagacactgtagca

SEQ ID NO: 361217 - DNA, 201 bp, Homo sapiens
gaagtcatcctaaagagtgacagggaagctgctagctcttgtgtgctgccaccacacctggccccctaacttgttttttgaagcaaaaatattgacaccarcacgtgacaagaccatgtggggaaacaaaaatttcaggacaatttcagaaatgatcatagatgcaaaattccaaagtatcaacaaatccaacctagcaat

SEQ ID NO: 361218 - DNA, 201 bp, Homo sapiens
aataaggagagttaagagggctcaatgcagatgctgagcaggtttagccattgtgaaaaagcaacaggaataaaagctaaggaggcagcagctagagcaayaagtccaaggtcttagagatagagcagttttgaaggaagacaaattaaaggtgtttctgtataagtgggtgaatgaagcagagcagagatgaaggcaata

SEQ ID NO: 361219 - DNA, 201 bp, Homo sapiens
tgactcatgcatttatttattccacaaacaggtatcccatcccattgtgttataataatctattaattgtttttcccagtagatactgagattcttaaaartaggaactgtcacctgggtagccctagtgcctagcacagtgctgagcacacgtatggttttattcctaatatgaattcaaggaaggaaggtacaagtgaa

SEQ ID NO: 361220 - DNA, 201 bp, Homo sapiens
gcctgagatatgattttattaagtgaattataaaacctgtctcagctgggctcagtggctcatgcctgtaatcccagcacttgggaggctgaggtgggcaratcacttgaggtcaggagtttgagaccagcctggccaacatggtgaaaccccatctctactaaaaatacaaaaattagccaggtatggtggtgggtgcct

SEQ ID NO: 361221 - DNA, 201 bp, Homo sapiens
tttgattaaatttattcctaagtattttattctttttgatgctattgtaaatggaattgtttgtaaattttatttaaaaattaacggctagcgtatagaayattgctgattttcaaaataccttgtatcctttgaaggttttaatagtttcatttgtagatatcttagggtgtcctatatacaagattgtgtcatctgtga

SEQ ID NO: 361222 - DNA, 201 bp, Homo sapiens
tagtttctttctattttccataagtgtcggctggctgagaaataaagggagacagtacaaagagaagaattttacagctgggccgccaggggtgacatcaygtatcagtaggaccatgatgcccgcctgagtctcagaccagcaagtttttattaagggtttcaaaaggggagggggtgtaagaacagagagtaggtacac

SEQ ID NO: 361223 - DNA, 201 bp, Homo sapiens
agacggggtttcaccatgttggccaggcgggtctcaagctcctgacctcaggtgatctacccacctgggcttcccaaagtgctgggattacaggtgtgagmcactgcacccagccaacacttttagtttcttaagccaattaattagagctctttcatacattttcagtagtgaaacagtgtgtacacaacatgtaaatac

SEQ ID NO: 361224 - DNA, 201 bp, Homo sapiens
tgcatcttagccaggccgaccttaacctgaccaaattgtagaatcatgtttctaaacctctattagcaaaactctgccctatgtttgtaacctcagttcaygatggatataattgttttatacaaatggtgcaaaaaagagaaatagatctaaaaatgccaaacttccaatcattctgtgtcatttaatagcctgtcactt

SEQ ID NO: 361225 - DNA, 201 bp, Homo sapiens
agccaatgttttaaacatgaaatagaatagaataaaatggaataggatagaaaatacctgagtacattgcatgtaacaagggtattatttcatgaaacttycgtttcataggtacccttggtagggggactccagggtcctaatgtaaaatgtagtctttactgggatgataggcaaaatgtttgaaagcccctgctcttc

SEQ ID NO: 361226 - DNA, 201 bp, Homo sapiens
cggcagccaggctcggagaaaggccccagaagccagtgcagggaatttgtcctgtgagtgaggggagctgcagaaagttataaagcaaagaagggacattrctgagtttttatttagaaaaaccatttcagctttgcagagaatggactggggaacaggtagaaccactggagtaagggagagtggttgggagggtgtggc

SEQ ID NO: 361227 - DNA, 201 bp, Homo sapiens
aactccttctgtgtgcaagtcatcatcccagatacagaggatacagctgtgaagaggcttttgccctcatgaagccatctgtcttcctaagtagagggctkgtgagtgaaagcagaggaaaagggtgagataggcggcagccaggctcggagaaaggccccagaagccagtgcagggaatttgtcctgtgagtgaggggag

SEQ ID NO: 361228 - DNA, 201 bp, Homo sapiens
tggaataagtggaggaagattggaaagtgaaaatgtggagaaaataaaacaaaaatctgtactcatcagaccatgcacctgagaataaactttcttacatrggaatgcttttatttctcaggtacatcaaggaaacaaacaccaaaaatgacccaaatgaactcaacaatcttatcaagaaaaactctgatgtgataacat

SEQ ID NO: 361229 - DNA, 201 bp, Homo sapiens
agaggctgaggcaggagaattgcttgaacaagggaggcagaggttgtagtgagccgagattatgccattgcactccagcctgggagacgagcaaaagtccrtctccccacccccaccatcagaaaaaaaagtaaatcagtagtgcatccagtccagagtccatagaacctttggcctggttgaggtaaacatacagccaat

SEQ ID NO: 361230 - DNA, 201 bp, Homo sapiens
aaaccacgtctctactaaaaatacaaaaattagccaggcatggtggtgcttgcctataatcacagctactcaagaggctgaggcaggagaattgcttgaayaagggaggcagaggttgtagtgagccgagattatgccattgcactccagcctgggagacgagcaaaagtccatctccccacccccaccatcagaaaaaaa

SEQ ID NO: 361231 - DNA, 201 bp, Homo sapiens
gttgtatataggattccaaacacggctccagcgggatcctgacatataccatcacctgtaagtctggaagcacctggcgcccccaggccattgctgaggaygctgtggatatgcataagcagtcagtgactgccgaagcccccagattctgactaatgtgtgagattccaccattagagcttcattcctttgttagtttgt

SEQ ID NO: 361232 - DNA, 201 bp, Homo sapiens
tatctctcttacaggttttggaatcattttcaaataaaactccccctcacaccacccaactggaagtcattcctgatgtgctgtgagcagaatgggcctgygattttgcaagtaaggaatatcctgtaggtttgggagctgtcctaccgtgcatcccgtgacactctctttgacacctaaattaagcagacgcgttgcctg

SEQ ID NO: 361233 - DNA, 201 bp, Homo sapiens
cctctgccatcatgggcagctgctcctcccagggacaggagggatccatactctgcttcctgggttgcccctgctagtggttccatgtctatttcagatcyatagccgggtggatgtcatcagacacgtggtgaagaatggtctactctgggatgagttgtatataggattccaaacacggctccagcgggatcctgacat

SEQ ID NO: 361234 - DNA, 201 bp, Homo sapiens
atacatacttttctacctgtgtgtttatcaacgcgattttccacagtattgtattttcctacatcatttttaatgcctgcttacctgataccacatacctrtattagcactttatttaacctctttgacctgtaagtcatttctaacttttcactatttgaaacaatggcaaataatcatgtggatgtgtcttgcacacat

SEQ ID NO: 361235 - DNA, 201 bp, Homo sapiens
gaggcttagcaagcttaaggtcacataattagtaagtgcagggctgagactcaagaccatctctgcttgtctcctaatcctgtgctgctttggctcttcarcagtttaaaagttgggattctttaaggataaggatcttgaccacttgatttaaagtaatcctgttctatgacaggccagaaactatagactgttgtgagc

SEQ ID NO: 361236 - DNA, 201 bp, Homo sapiens
ctcccaggcctgtttctggacatagcaacatttctctacatatatttgttttcaataagatgtcccacatagttggtagtgagggagtgttattgttgccrttgtttttatttttttttaattttggcaaagcacacaccacctttgggatgttgctattgtttttaaatgaaatcctagtacagatattctgcaacttgc

SEQ ID NO: 361237 - DNA, 201 bp, Homo sapiens
tggtcattgaattagtgaattcctgcatcacatttttgtctgtgctcacctctgagcaagaatttggtgggctagttggtttaagggaatggcccactgaktttctgtctgcctgcacttcaaaactgtttaagtctttaggatcatatctagaatatttgcactgaaattcagaaagggcaatttgccatttttatattt

SEQ ID NO: 361238 - DNA, 201 bp, Homo sapiens
aaccctttccacttgatgtcctaaacgaatgaatgaatgaatgaatgagttcatcatatgtgccttctttaatatgtatagcattaccatccattctttgrcactgacaaatttttgctcccactgactggtttatgagcgtgccttttctccccataccttaccagctcagaacattcttagtctttcagactgttctca

SEQ ID NO: 361239 - DNA, 201 bp, Homo sapiens
ttgacacattagtcctcccctcttagctctcctgcccatgaggaagcaggttctgccagctttattcccagatgcagctcaccaagcatttgcacgttgaractgcatttctgtgttaacttatgctctgtattctcccatccacttctctgagttcagtaaattatagttggattctcttcgtagctatttatctgaaga

SEQ ID NO: 361240 - DNA, 201 bp, Homo sapiens
ttaaaacctttaaaggctcctccagtgtcagattcgaatccaacatttctgcgctttgctttctttatggctctattcttcaagacttcctcactggccayggagaatgttcccacctcttaagcttcatcttcttgatcccaattcctatctgtcagttccttctcggcatttcttttggccgtgttttcgaacctcctc

SEQ ID NO: 361241 - DNA, 201 bp, Homo sapiens
caaaattttctggataggtatagtttatctctctagatgtgaaaattttatgatttaggtataattgtcttctcagaaagagtattagaacataattgatmttttcttgatatcatggattcatcatttcaaagttttagaatgtaatgtaacagcttgatgttcctacagttcactggaggatgttataacaggatgtgt

SEQ ID NO: 361242 - DNA, 201 bp, Homo sapiens
aagccactgtgcccggcccggaaaaaggcaatttaatggagaaagggtagtcttttcaacaaatgttactggagaaattgcacacccatacacacacacamaaaaaaacctacctcgatctgaaccaaaaaaaaaacctacctcgatctgaaccttatgtcacatgcaaaaagtaagtaaaaatggattatagatataaat

SEQ ID NO: 361243 - DNA, 201 bp, Homo sapiens
tcccagcctctggttgcctcagacactccttggcttgtagatgaccatctttactctgtctcttcacatggcattttccctgtgtgcctatctgtgtccamattttcctttttttataaagacatcagtcagattgttttagagcccacctacatgacctcattttcacttgattacctccataaggaccctgtctccaaa

SEQ ID NO: 361244 - DNA, 201 bp, Homo sapiens
ctgtctaacagtgtggcagaaaatgccctgctttgcaatatgaagataacctttgtcccgttctttgctttcttctctaagtctatattcattgcctcccrgagtgtgtaaccacatgagaaatagagggaaggttctgtccttaagaagttaaaagtgtgactgggaaggtaaaacatacttattaagggttaactagca

SEQ ID NO: 361245 - DNA, 201 bp, Homo sapiens
tctagctcaaaacatgatggagcatgaaggaaatgttgagatctgagagcacctcaggaggagccaagaaagagaatcatctggattcaccatgtagaccrtagagcagaacaggaaaggcctgaagtgggtcatccaggcttaggtgctcttggaatatggttcctaatggggtgtgtgcagcctcaatgtagacacatc

SEQ ID NO: 361246 - DNA, 201 bp, Homo sapiens
taacatatgtaagatgaacattggttcggtttggaaaagcaggacaacttgaagcagggagggggcttccaggtcataggtagataagagataattggttgcattcttttgagtttctaattagcctttccaagggaggcaatcagatatgcatttatctcagtgtgagcagaggggtgactttgaatagaatgtgaggca

SEQ ID NO: 361247 - DNA, 201 bp, Homo sapiens
gaatatggcagcaggtcagaaatctgctttctttccatgctttccagttatgctttctgtgatgaatgttaggtgagatagtcaccgtaagattaaggaaraaatgggtcaatgtggtatgtccctgatactgcataaacacaacctctatttgtgattcaaatgttaggcagactgtcctgggcaaagatgattttcttt

SEQ ID NO: 361248 - DNA, 201 bp, Homo sapiens
gatcttcatttctttcctctacagcatgactttttctcgtctgtgcctactgttagaactacccctccttcaagcagcatcactgtggaaaatggaacttrcctacctggttgatgtccacaccatgagcatttgatatgttctaacaacaaagatgaatcccctcagaatctcccgtcactttcacagtcatccttgaac

SEQ ID NO: 361249 - DNA, 201 bp, Homo sapiens
cagggaagtgtttgtttttgtttttgtttttgttttgtttttttgaattaactgatttagtaacaaattgcctgcaacatatttcttaactgatcacaacsccctaggatactgtggtactacaactaaaattctactttatatgatacctttgtcccacactacctcctggaactatacttgcataatttcaggattaca

SEQ ID NO: 361250 - DNA, 201 bp, Homo sapiens
ttttcatgtattacaaaatatcattgtccttttgattttctttacaaccatttaaaaaggtaaaaaccatctcctcagctgtgggcaagcttcaaaagaaraaagaagccactcttagcttgcaaggttgtacataaacaagtagcagcaggttggattcggcccacacatggtttgccaagccctgatttatagtatcct

SEQ ID NO: 361251 - DNA, 201 bp, Homo sapiens
cacttcccaccctaaggcagaacacattttctataaagggccagagtgtaaatattttaggctttgcaagccatacagtgagagttgcaaccactcaaccrtgctgttgtaacccaaaggcagccatagatggtcctgaataagactgactgtgttccaatcaaattttatttatggataatgacatgtgaatatcatata

SEQ ID NO: 361252 - DNA, 201 bp, Homo sapiens
caatcaaaaatttatttttctgtgtatttaggaagtttatgtatatttgggcagctaattttaaggaaacaaatgagaacctgcccggaatagacataatraaaactaatctatgccttgacctttcctcacccactttgttgccttttcacatgacgttcccgctatctcatctctgcttctcaatacattccttttcca

SEQ ID NO: 361253 - DNA, 201 bp, Homo sapiens
gagtgcccctgcccccaaagatatgttcacccggaacctctgaatgtgaccttatttgggaaaagggactttgcagatataattaggctaggaatctcagratgaaatcaccctggagtatctgggtgggccctaaatccaatgacaagtgtgcatccttatataagaggagaagagacagacaggaaagaaaaaaaaaca

SEQ ID NO: 361254 - DNA, 201 bp, Homo sapiens
ccaaattatttttgatattggagaaagattgaagaaagaaggaaaatcatttatataatactttaaatttacataatatttcatcatagaagtatctttttcacattataaagctaatatacacttataataaaagcatttaaatgatacaaaaatgtaaaaagtagaaagtgtaattcctccagaattttacatcctccc

SEQ ID NO: 361255 - DNA, 201 bp, Homo sapiens
cctctacctcccgggttcaagcaattcttctgcctcagcctccctagtagctgggactatgggcacgtgctgccacgcctgtctaatttttttgtatttttagtagagacagggtttcaccatgttggccaagatggtcttgatcttctgaccttgtgatctgcccaccttggcctcccaaagtgctgggattacaggagt

SEQ ID NO: 361256 - DNA, 201 bp, Homo sapiens
ttaatactagatggtaacagtaagtaaagaaagaattgtagttttacagtttttttgtttatttgtttgtttgttttttgaggcagagtctcactctgtcrccaggctagagtgcagtggcatgatcttggctcactgcagcctctacctcccgggttcaagcaattcttctgcctcagcctccctagtagctgggactat

SEQ ID NO: 361257 - DNA, 201 bp, Homo sapiens
cctcaggaagaatgcttttggtggaatgacgagggtgaaatccatagtgtgtggcttaaggagtgaatggaaagaagaggaggagagagaggtggagagamtacacctctttccagaagtttggctctgaaagtaaagagaaagggttaatactagatggtaacagtaagtaaagaaagaattgtagttttacagtttttt

SEQ ID NO: 361258 - DNA, 201 bp, Homo sapiens
caaacttttccacttcctaattttgtctaagataagaagattctaaaaacaaacttttccactttctcattttgtctaagtccagccctgcttgcatccartggaagataaaagattaaaactagagattattttcaacaagcatgaattgaggacctactataattggtttattgagcaatcttgcttcactggacaatg

SEQ ID NO: 361259 - DNA, 201 bp, Homo sapiens
aagttatatgaaccatattatctggctatattgtaataatcatataagaaataagagacttaacttacctatactgttataggttaaaaaaaattgtgagkcatttacattaacagtgaagaagggaaacattgatattttcttttcataaaaacaccacactacttcttttagcatctgagatagaaacagaagctaata

SEQ ID NO: 361260 - DNA, 201 bp, Homo sapiens
agtttctgtatatgaggcctagcattaaactcagatttgtagggaaagtctgattcatggcatggaaattggaaaagaccttatactgttgtaggtcttgytgggaatatctgcaaggcatggcctgattagaactccaatctgtaagctgccatttacttgctatgcctcattttatgacccagttgctgctacttcatc

SEQ ID NO: 361261 - DNA, 201 bp, Homo sapiens
ttgtaggtcttgctgggaatatctgcaaggcatggcctgattagaactccaatctgtaagctgccatttacttgctatgcctcattttatgacccagttgytgctacttcatctcatgaatttgttggtgctaaagctattggggtggttataactaccctgtagcttgagttgagaaccaaggaatgttactgcttatga

SEQ ID NO: 361262 - DNA, 201 bp, Homo sapiens
tcttcaaaatcaatgtttaagtttttcctagtcttgtattaggtcattattattattatatggaaggaaacttgcaggatctccacaaagtgtcaggttcwtttgctgagatggatcaatagattcatgtttgaagacattgcctttttgcatttggcacaatattatcttgctgattactggcttcactcatagatgcat

SEQ ID NO: 361263 - DNA, 201 bp, Homo sapiens
cttgtattaggtcattattattattatatggaaggaaacttgcaggatctccacaaagtgtcaggttcatttgctgagatggatcaatagattcatgtttkaagacattgcctttttgcatttggcacaatattatcttgctgattactggcttcactcatagatgcatttaaaaagctctttcaaagggtgcagtatttg

SEQ ID NO: 361264 - DNA, 201 bp, Homo sapiens
ggcgcggttcagttcatacatctctgatgttgacatcagaagcagaaacgccggagaatattgtatagtagaaacacaaaagatttatagggataactaayaccaagccattcggagcctgatatgtgaagtttccttccgtgttcaggctttctgagttttgctctatggtattctggcctctatttctgttagctggga

SEQ ID NO: 361265 - DNA, 201 bp, Homo sapiens
gatgttgacatcagaagcagaaacgccggagaatattgtatagtagaaacacaaaagatttatagggataactaacaccaagccattcggagcctgatatrtgaagtttccttccgtgttcaggctttctgagttttgctctatggtattctggcctctatttctgttagctgggaaggattttaatgtaacgttaagaaa

SEQ ID NO: 361266 - DNA, 201 bp, Homo sapiens
ggtgttcatcttaagtcatagtctctgcagatattgcttgatctaagggagtggcaccctttgttttgattttcctttgatctttggaagaccatgcatthctatttcagtgatgcttttaaaaagccatttttgtcattaatccagatttgttctcatttgattctagttgttgaaatggatgaaaacaacggacttttg

SEQ ID NO: 361267 - DNA, 201 bp, Homo sapiens
tggtttctactgaatgtgtgtcatttttgcagatcagatgcccctccctgtgcattcccatagcgcctcgaagtcatctctatcaatcattcatttagtcktaaggaagtcttgtttgtatatgtgtatccctgacatgactgagacctcataagttctctaagtgccatatgaataaagaaatgaattggtgttcatctt

SEQ ID NO: 361268 - DNA, 201 bp, Homo sapiens
gccaggagaaaagccaaaccaggttctctcccagagcctctggaaggagccaaccctactgccaccttgatttcatattcaggcctcttgaactgtgagaraataaatttctgttgttttctaaaggcactccatttgcggtcatctgctatggcagcttcaggaaatgaatctacaaatttataaattttctttgcccca

SEQ ID NO: 361269 - DNA, 201 bp, Homo sapiens
tttaaaagtcctctcatatttgatattctattttatacattttcatggcttggtcgttttgtgtccttaatcaactagaatacttagagaactaattgccrcagcaccatgttagatggtccacatatttatgataccttctttagaataaacagttaacataattaggatccactttttggctgacctaatgtcaataat

SEQ ID NO: 361270 - DNA, 201 bp, Homo sapiens
gagaaagacagtaagaccatttgtttttgcctatcctttctctgcttcttaacaagaaccagattcccctccaccaccttaccccaattcctgccaaagayctctgttgctcttcttcagatcctacccctcccactcaaagctgcaaactgtccagggccaatcagtagcttcacaggcgcattctatccctgtacttcc

SEQ ID NO: 361271 - DNA, 201 bp, Homo sapiens
tttctaaaggcactccatttgcggtcatctgctatggcagcttcaggaaatgaatctacaaatttataaattttctttgccccaggaatttttaaaagttkgcaatctagttttccatcaagcatgaccaaagaatgacaggtagatgagagaactggattagaacgtctctggaggttggatttcaagagtttcctggtt

SEQ ID NO: 361272 - DNA, 201 bp, Homo sapiens
caaaccagaagtggcttaggagctccatggagggaacacaagagggcagcttttataggatgaacatagaagtaaagcaaagaaaatatttgatgggttayaattatacagttgccttgtttggtctatccctttggaaagtccctagttacataagtttattggctacttctgattggttgagcttaagttctgttttta

SEQ ID NO: 361273 - DNA, 201 bp, Homo sapiens
atgtgccactgtacctggcttctgatgaggtttatgaacatactaggatccataaatcctgctcttgtttatacctcaaagaaattctgttgtgacagaayctaggagtctacccctgggagagtgaatttgtaaaatgtggtagacatgaaccgtggaatactcaactgcagttagatgtgggctagatgtacacatggc

SEQ ID NO: 361274 - DNA, 201 bp, Homo sapiens
gcaaggttatgatgaggcataaccaattttgtctgctcaagaattcttcaggcctggttttcattttgttttctttaacattttagtacctataaatttayttctttaactgctgcatagtattccacagaagaatgtaccataatgtatttgctcattcctctgttgatgttaccaatattttgttgcaatggacaactt

SEQ ID NO: 361275 - DNA, 201 bp, Homo sapiens
acaggcatgtgccactgtacctggcttctgatgaggtttatgaacatactaggatccataaatcctgctcttgtttatacctcaaagaaattctgttgtgrcagaacctaggagtctacccctgggagagtgaatttgtaaaatgtggtagacatgaaccgtggaatactcaactgcagttagatgtgggctagatgtaca

SEQ ID NO: 361276 - DNA, 201 bp, Homo sapiens
tcattagaaaaattatactagaatagaagtagaattggtgaatcaaaggatattcacatttaaaagttattatatagattacagatggtcctgacttacartggttcaacttatggtttttcaactttatacaatgatgtgaaagtgatgcacatttaatagaaactgctttgaatttgaattttggtctttttccagagc

SEQ ID NO: 361277 - DNA, 201 bp, Homo sapiens
gtagtaatcagaaaactgcaagtgaagcaagcaagtttcactttacatcatttagagtagtaaaaagctagaagctaagatgatgccaaacgtcagagacrtagaagtcctcatccatgtgatgggagtgtggctgttgcagccattctgaagagtaatctggcagtaactagccagatgagttttttgtttgttgttctt

SEQ ID NO: 361278 - DNA, 201 bp, Homo sapiens
attactaagaatacagatgaagaaacacatagggagagacataggggaagggatgcagagttccatgccctccctgggctccaccctccaggagcctccakgtgttcagctatctagaagctccctgaacccagtcctcttggatttttatggaaacttcgtgacatcagcattccttcccccagggtatgaggcgaggcc

SEQ ID NO: 361279 - DNA, 201 bp, Homo sapiens
taatatatttagccatttttctgttagaatttaagatcatcatagttttatttaaaattaaaactggtatttttgcgtttaagagcttctctgtatttggwgttgtttcataaggtagttgaattactggtaaaatagtatggcaattaaagcattcaccaccaaccttcatatacttcagcctgaaggtgggcttcacat

SEQ ID NO: 361280 - DNA, 201 bp, Homo sapiens
catgatgcagaagatatatatatctatatatctatatagatagatgaaaacaaatatgtatattttctataatgttctataacacaagaagtttcccaaayatttatttacattgtttgtttattcccaaatatttatatttcccaaatacgacagcagggagactgagaaatcacaaaggacagatgagagcgatgttac

SEQ ID NO: 361281 - DNA, 201 bp, Homo sapiens
atcttgtgaatattatgatattagacataatgtcagattctatgcacatataattttatgttcacattaaatattaactaatatatttagccatttttctkttagaatttaagatcatcatagttttatttaaaattaaaactggtatttttgcgtttaagagcttctctgtatttggagttgtttcataaggtagttgaa

SEQ ID NO: 361282 - DNA, 201 bp, Homo sapiens
tggcccaaggtaaagtgttctctgtatgtctattaggtacagtcagtttatggtgttgttcaagtcttctattccctgttaatcttccatctaactgttcygttctctagttttcttgttagacttaatttttcaaacagttattttatgtaaaccatttttgcatcttgtgaatattatgatattagacataatgtcaga

SEQ ID NO: 361283 - DNA, 201 bp, Homo sapiens
gagcccaagctggggctgaggacagtagagctgaacgaagacgcacctgagacggtctacaccagcggtgtcgctgcccgaaagtgagagaaggctgataytgctagctggaatccaggcctgggtgctgcatggtggcgcccctccccgtgaccaccgctgcgttttctcggggtgagaaaggcgcccccaccatgcccc

SEQ ID NO: 361284 - DNA, 201 bp, Homo sapiens
agggatgaatctatatgtagatacatacatatattcctcagctctgtccactgagagggcctaggagtatctgcaacactccaatagccgtgagcacaccmggtacccagatataggtatttaaatatcacactccattaaaaggaaccagggctttctagagaaatggctgatctcaagacagtcacagggaaagtgatc

SEQ ID NO: 361285 - DNA, 201 bp, Homo sapiens
tggccgttcaggttagttcttcttccctcctctcccacaccatggagacacaggaagagaaggaagatacgtgtttttctctagtgctgacattagagccygagactccggccttgcatgaggccagatgggctaaggtttctatgctgggtttttcgagatctccccagacccttccagcaaattcctctttttactcga

SEQ ID NO: 361286 - DNA, 201 bp, Homo sapiens
gcctagcacagtgctgagcacacgtatggttttattcctaatatgaattcaaggaaggaaggtacaagtgaatttctctttcccattgtcagcatgagtcrcctcttaaaataggcttcaatgtctttagcagtaaaattaaggtttgaattagaatatcttttacatactttccagttgtaaagttacttgttccatatt

SEQ ID NO: 361287 - DNA, 201 bp, Homo sapiens
ttgtgttataataatctattaattgtttttcccagtagatactgagattcttaaaaataggaactgtcacctgggtagccctagtgcctagcacagtgctkagcacacgtatggttttattcctaatatgaattcaaggaaggaaggtacaagtgaatttctctttcccattgtcagcatgagtcgcctcttaaaataggc

SEQ ID NO: 361288 - DNA, 201 bp, Homo sapiens
attgtgttataataatctattaattgtttttcccagtagatactgagattcttaaaaataggaactgtcacctgggtagccctagtgcctagcacagtgcygagcacacgtatggttttattcctaatatgaattcaaggaaggaaggtacaagtgaatttctctttcccattgtcagcatgagtcgcctcttaaaatagg

SEQ ID NO: 361289 - DNA, 201 bp, Homo sapiens
tctaagaaatattttttaaattgcctaatccaaggtgatgaaaatttattcctattgttttaagagttttatagttccagctcttatatttaggtctttgrttcattttgcgttaatttttgtacattgtgtgatgtaggggcccaaattcattcttttgcatgtggatgaattgcagcaccattttctgacagactattc

SEQ ID NO: 361290 - DNA, 201 bp, Homo sapiens
tctaaatcttttgatcaagacctttacagagacactgtagcaaagtgttaagagcaaaggcaatggggccttctcacctgggtgcggatccaggctccaayagacagtctggggacactgggcaatttagtcaatccctttgtgctttaatttcttcaaatgtgaaatagaaataatatttttagtagccgtcttacaaaa

SEQ ID NO: 361291 - DNA, 201 bp, Homo sapiens
gtattttatctcacatatatgctgtaaaatcttaaactataagatcttttctctttgaaatatgtaacctttggttgactattctaggggtcaaggatttyagagtgatgtaaattatagatatatatttactactacagtttttccttgtattggccccagttggatcttatccagcttggcttttataaaagaggtgtt

SEQ ID NO: 361292 - DNA, 201 bp, Homo sapiens
acttttgctcaaaaaaaaaaaaaaaaaaagacaaggtcccaggagaaaaacaaaaacatgaagtccttttaaatacaaacacacacatatgcgtgcgcgcrtgcgcacacacacacacgcacgcatcttggatgttaggttttaattaagctgacttttaaccattgagctccttaaaaaaaaacttttaaaatctcatta

SEQ ID NO: 361293 - DNA, 201 bp, Homo sapiens
tcaatgcagatgctgagcaggtttagccattgtgaaaaagcaacaggaataaaagctaaggaggcagcagctagagcaataagtccaaggtcttagagatrgagcagttttgaaggaagacaaattaaaggtgtttctgtataagtgggtgaatgaagcagagcagagatgaaggcaatagaaattaagagatcactgtgt

SEQ ID NO: 361294 - DNA, 201 bp, Homo sapiens
tcaaagacccaagcctcctatgggtctccttcctctctctcccataagtgtgtgtgtgtgtgtgtgcgcatgctcctgtgtgtgtgcatgtgtgtataggrgggctcttttccaaagcctgctggacagcagatagaattttcccgggaggctagttgtgattactaaacaaaaatagcagggccccgactgttcctgccc

SEQ ID NO: 361295 - DNA, 201 bp, Homo sapiens
atttaaaatgtataagcaaaagtttgtactctgagcttgcaagcagaggcatttattaaaatttcttttttacttatttccttttgaatgtttttaaatgwtatgaaaaagcttaagaatgtggagctatgtaaaataaaaaggaagtaaccccaccaagcacctctcaggaaaccctgtttcctgcccttccctccaccc

SEQ ID NO: 361296 - DNA, 201 bp, Homo sapiens
cactggagtgcagtggtgtgatctcagctcactgcaacctctacctcccgggttcaagtgattctcctgcctcagcctcccgagtagctgggactacaggygtgcaccaccacgcctggctaatttcttgtatttttagtagagatggggttttgtcatgttggccagcctggtctcgaactcctggactcaagtgatccg

SEQ ID NO: 361297 - DNA, 201 bp, Homo sapiens
tcatcgactgtgccagatggagctgagatgtccaggaaggggctgactacactagaatgcattatttgaatatcatgatgtggaagattttttgggggggkgggcagactcttgctctgtcacccacactggagtgcagtggtgtgatctcagctcactgcaacctctacctcccgggttcaagtgattctcctgcctcag

SEQ ID NO: 361298 - DNA, 201 bp, Homo sapiens
tgtaacctcagttcacgatggatataattgttttatacaaatggtgcaaaaaagagaaatagatctaaaaatgccaaacttccaatcattctgtgtcattyaatagcctgtcacttatggaaagtttgcctctactgatattagcatgatatttaccgggagaaaatttgttgcagacactgaaagggctcctctaaactc

SEQ ID NO: 361299 - DNA, 201 bp, Homo sapiens
aaaaaggacccccacacagaaacccaatccaaaggtcatcagcctcaaagatcaaaggtagataaatccacgaagatgaggaaaaaccagcacaaaaacamtgaaaattcccaaaaccagaatgcctcgtctcctccaaatgatcgcaactcctccagaaagggcacaaagctggatagagaatgagtttgatgaactgac

SEQ ID NO: 361300 - DNA, 201 bp, Homo sapiens
ccagtgtcagattcgaatccaacatttctgcgctttgctttctttatggctctattcttcaagacttcctcactggccatggagaatgttcccacctcttmagcttcatcttcttgatcccaattcctatctgtcagttccttctcggcatttcttttggccgtgttttcgaacctcctcggcggccgccgctgcactcgc

SEQ ID NO: 361301 - DNA, 201 bp, Homo sapiens
ggtaagaaatccaacatgtctctcactggactaaaatcaaggtgttggcaaggctgtattactttctagagatcctaagggaataattcatttccttgccwttctagcgtctagagactgcccatactccttggatcacggcccttcctctattatcatagccagcaatgaagggtcaaatccatctcacatggcatcatt

SEQ ID NO: 361302 - DNA, 201 bp, Homo sapiens
tgtttaaaatgaaggacaaaagtgattggcgtaggtagttgcagtgactttcctcagtggtctgtagatctgtttccataacagcaagaagagagctgttmcattgtgggttggtgagccggtgggttgggcatgctcatacacaaactgctcggtagggaaaggagaaggcacatgagcaagggatggccctggtggcca

SEQ ID NO: 361303 - DNA, 201 bp, Homo sapiens
cacttgagtcaccatttggctgtagaattctccctcagaattctgtaaacatcactccattgggtctcctggcattttatttccaaataagagagcaatgwccactggtttctttgcacttggcagacacctgattttggtgaaggtgttggagtgtcttttgttgggagaagtgagtgtgaggagggtgggggagtgttc

SEQ ID NO: 361304 - DNA, 201 bp, Homo sapiens
ttaaaatgaaggacaaaagtgattggcgtaggtagttgcagtgactttcctcagtggtctgtagatctgtttccataacagcaagaagagagctgttacawtgtgggttggtgagccggtgggttgggcatgctcatacacaaactgctcggtagggaaaggagaaggcacatgagcaagggatggccctggtggccaggg

SEQ ID NO: 361305 - DNA, 201 bp, Homo sapiens
caatggttgaactaatttatactcccaccaacagtgtaaaaacattcctatttctccacagcctcgccagcatctgttgtttcctgaattttaaatgatcrtcattctaactggtgtgagatggtatctcattgtggttttgatttgcatttctctaatgaccagtgatgatgagctttttaaaaatatgtttgttggctg

SEQ ID NO: 361306 - DNA, 201 bp, Homo sapiens
ttatgaaaactttcaaatacataccaagcttcaacttttgtcaactgatggtctaccttgttttagctctacctgtactcgttccttcattttccctaccyccactgttttgaggaaaatctcaaacattaaatatttttgttcataaatgttaacatgcatctctaaaacgtgaagattgcttatgaatttttgattgtg

SEQ ID NO: 361307 - DNA, 201 bp, Homo sapiens
ccactttgcatttgggaaagaggctgactgaaggaatgtgatttttgttttttctttgagacagagtttcactcttgctgcccaggctggagtgcaatggmatgatctcggctcactgcaacctctgcctactgggttcaagcaattctcctgcctcagcctcccgagtagctgggattacagacgtgtgccaccataccc

SEQ ID NO: 361308 - DNA, 201 bp, Homo sapiens
tcttgtatttttagtggagacaagatttcgctattttgcccaggctggtcttgaactcctgggctcaagcaattcttctgcctcagctccctaaagtgctrggattgctggtgtgagccaccatacccagcttgtttcttttattctcagaatattcttaatattctcaagaacattcttggcctcccttccctgccattt

SEQ ID NO: 361309 - DNA, 201 bp, Homo sapiens
tacagtgttataatgttctacagaagagggatgtacaccaagaatgccagcctggacctctggtgtgtcttggaagacttaaccaggaaggggacgattcrtttctatttgacccaagactgatgctgcgtggtgaaggagaggaactgcgttccaggcagaggaagtccagatgcgcaagagcagagatgggagggacag

SEQ ID NO: 361310 - DNA, 201 bp, Homo sapiens
tctaaaaaaaaaaactgtctcctcatgcttctgattgaagggaccacataatatgactgcaaagacagtaaactccttgactcatgcatttatttattccwcaaacaggtatcccatcccattgtgttataataatctattaattgtttttcccagtagatactgagattcttaaaaataggaactgtcacctgggtagcc

SEQ ID NO: 361311 - DNA, 201 bp, Homo sapiens
acaagattttgctctcctttttctcatataatatctaagtaactgtctttcttgctattgtgtgtgtgtatatatatatatatagctactatatatatatacagctactatatatatgtgtatatatatatatagctactatatatatgtgtgtgtgtgtgtgtgtatatatatatatatatatatatatatatatataca

SEQ ID NO: 361312 - DNA, 201 bp, Homo sapiens
agaacatgtacattagcctgcagttgggcacaatcacctggcaacatggtccactgtagagtatctggtgtttacccttgtgattgcacatggctgactgrgagctgcacccgctaccgctgcccagcatcttactgtgtatcactagcccagaaaagataaaaattcagagtatggtttctactgaatgtgtgtcatttt

SEQ ID NO: 361313 - DNA, 201 bp, Homo sapiens
ttggctcttcaacagtttaaaagttgggattctttaaggataaggatcttgaccacttgatttaaagtaatcctgttctatgacaggccagaaactatagwctgttgtgagcttccaggctctgctttgcctctgaatgttcaggtggagacttgaacactcggcttttagaatgacgataacagcaaagatttcttgagt

SEQ ID NO: 361314 - DNA, 201 bp, Homo sapiens
cacaagattttgctctcctttttctcatataatatctaagtaactgtctttcttgctattgtgtgtgtgtatatatatatatatagctactatatatatatacagctactatatatatgtgtatatatatatatagctactatatatatgtgtgtgtgtgtgtgtgtatatatatatatatatatatatatatatatatac

SEQ ID NO: 361315 - DNA, 201 bp, Homo sapiens
aaacaatacacagaaaagcatgtatataggtgcacatatttttttcttttgccttctgctccaatgtgactttcacgtggaactgaggacaaaagtgtggytgagtgaacctgttctacatggttgtgatataagttgaaatctaacagagaactttggctatatgaattcattcaatggaacaacaaaaatctagagagg

SEQ ID NO: 361316 - DNA, 201 bp, Homo sapiens
tttttggaggtattaattgcctttcaaactcatcatttctatcacactaactctccattcttaaatgcatggctcctgtagctctccatcctcctgctccracctggaagggctcctctctagctctgctgcaaatctgctacctttcactgcctccagaccccacccatgcctttcccttccttgcttcacttctatgtg

SEQ ID NO: 361317 - DNA, 201 bp, Homo sapiens
gtacttgctattgaagaaatcctatatggaaacttcagtaaaagtaataatctgctacctgatttataggtaataataataaaaaaactggcactgggcayggtggctcacacctgtaatcccagcactttgggaggccaaggcaggtggatcccctgaggtcgggagtttgagaccagcctggccaacatggtgagaccc

SEQ ID NO: 361318 - DNA, 201 bp, Homo sapiens
gcatggcaggaacagctatttaaactgtggggctagaaggtaggatccacccaaagaggtaatcgcccggagcaaggtgaggtagaagcaggtaacccttrtctgcagctatgctgaggctgaattgcacaaattaagaattaggcctaggtctgcagcttaatctagccctaacacatacatacagagccacaagctaag

SEQ ID NO: 361319 - DNA, 201 bp, Homo sapiens
gttttttgttgtttgtgtttgtgagtgtttttggcatggcaggaacagctatttaaactgtggggctagaaggtaggatccacccaaagaggtaatcgccyggagcaaggtgaggtagaagcaggtaacccttgtctgcagctatgctgaggctgaattgcacaaattaagaattaggcctaggtctgcagcttaatctag

SEQ ID NO: 361320 - DNA, 201 bp, Homo sapiens
ttagtagagacggggtttcaccatgttggttaggctggtcttgaactcctgacctcatgatctgcccacctccacctcccaaaggactgagattacaggcrtgagccactgcgcctggcctacctcactttttaaaaatggaagtcttcccatttaaataaaatgaactatccaataagtatgtcacaaatctaggggaaa

SEQ ID NO: 361321 - DNA, 201 bp, Homo sapiens
tgctacttgagaggctgaggcagggagaactgattgaacccgggaggtggaggttgcagtgagccaagttgtgccattgcactccagcctgggcaacagarcaagactctgtctcgaaagaaagaaattagatctcagagcccaggagtagtcaagaccagcctcagcaacaaagtgagaccccatctctacaaaatgtca

SEQ ID NO: 361322 - DNA, 201 bp, Homo sapiens
ctgcatcctctgcctcccaggttcaagggattctcctgcctcagcctcctgaatatctgggactacaggcatgcaccaccatgcccagctaatttttttawattttttgtatttttagtagagacagggtttcatcatgttggccagactggtctccaattcctgacctcaaatgatcctcccaccttgacctcccaaagt

SEQ ID NO: 361323 - DNA, 201 bp, Homo sapiens
taaatagtaaaacctctctggggtatgtgtgtgtgtgtgtgtgtgtgtgtgtgtgtgtgtgtgtgtgtgtttgggtgtgcataggtaaagcacacatttasctggtttggtattcaaagacccaagcctcctatgggtctccttcctctctctcccataagtgtgtgtgtgtgtgtgtgcgcatgctcctgtgtgtgtgca

SEQ ID NO: 361324 - DNA, 201 bp, Homo sapiens
aaatcctgctcttgtttatacctcaaagaaattctgttgtgacagaacctaggagtctacccctgggagagtgaatttgtaaaatgtggtagacatgaacygtggaatactcaactgcagttagatgtgggctagatgtacacatggcaacatcatgggtgtcaaaatcatagtgttgagtgaaaaacagtaagaaacaga

SEQ ID NO: 361325 - DNA, 201 bp, Homo sapiens
ttggctactttttgtttggagtcaaatataaaactaaacaacatgtgcccagatttcctaccatggatttgcaaaagctattttgaaacctttcttggcaraaatcatattctgttatgattcagtgttgcactgtaaacagagtgtttagaaattggggtttgagaagtgtaacggctagtttccttaaaagaaaaaaaa

SEQ ID NO: 361326 - DNA, 201 bp, Homo sapiens
taagttaacatgcaaagagaattttggctactttttgtttggagtcaaatataaaactaaacaacatgtgcccagatttcctaccatggatttgcaaaagmtattttgaaacctttcttggcagaaatcatattctgttatgattcagtgttgcactgtaaacagagtgtttagaaattggggtttgagaagtgtaacggc

SEQ ID NO: 361327 - DNA, 201 bp, Homo sapiens
gcattgctgtatcaggttgtatgtacagggcagggtgaggtgtatactcatagaaggcactaaaatggaaatcaaaagaacttgctcctttttttttttttgagactgggccttgctctgtcacccaggccagagtgcagtggtactatcatgactcactgcagccttgaattcctgggctcaaggtacctcccacttcag

SEQ ID NO: 361328 - DNA, 201 bp, Homo sapiens
agagggtcctaggaaaccaactccttattttgaaaaataattaaagaaaaatattatgtattcttttctttgcaaactgtacaactgggtaagcaagttgyaggtaaagggaaatttatcttaccaaaggattatagttaatgtatgaaaaagaagtgatggagttttgcccttttgcaagcccctgatgaaatgataaat

SEQ ID NO: 361329 - DNA, 201 bp, Homo sapiens
  misc_feature (1)...(201): n = A,T,C or G
ctttaggatttggtaaattttttttttttttttttttttttttttttacagaaaccagtacatctgtagctttgggcatataaaagtatagttttgagaanaaggtcagctactgccacgtctttatgagatgggcacctatttccctccttatattttctttatccagatcacatcctattccattcttgggatttaaaa

SEQ ID NO: 361330 - DNA, 201 bp, Homo sapiens
tgcactcgctgggtcttgggtgcggcgaaacccagggcgcagcggcgcaggggtctggagcccgcaggggtcgccgggctgagcgcgctcggccgcttccrgtgctgcgctgcggaactcagaggacttggtgttcggcaagcccagagactcaaacaccatgtccatggagggggggtcctcacgctgtgttcagcaggg

SEQ ID NO: 361331 - DNA, 201 bp, Homo sapiens
aagctttaggatttggtaaattttttttttttttttttttttttttttttacagaaaccagtacatctgtagctttgggcatataaaagtatagttttgaraagaaggtcagctactgccacgtctttatgagatgggcacctatttccctccttatattttctttatccagatcacatcctattccattcttgggattta

SEQ ID NO: 361332 - DNA, 201 bp, Homo sapiens
atagcgcctcgaagtcatctctatcaatcattcatttagtcgtaaggaagtcttgtttgtatatgtgtatccctgacatgactgagacctcataagttctmtaagtgccatatgaataaagaaatgaattggtgttcatcttaagtcatagtctctgcagatattgcttgatctaagggagtggcaccctttgttttgatt

SEQ ID NO: 361333 - DNA, 201 bp, Homo sapiens
attcccaaagattgacttctctgtctgctcacttccaaacacctgctcaacctaagctgttattagacctgtgagcattgatctctaccttcattttcctstgcccctcccaatgggtgtctctggaaagggagttagatcaacatgaagcaacacatattttattgaattcaagttctgaacaaatccctcgccagtggc

SEQ ID NO: 361334 - DNA, 201 bp, Homo sapiens
caagcatttgcacgttgaaactgcatttctgtgttaacttatgctctgtattctcccatccacttctctgagttcagtaaattatagttggattctcttcrtagctatttatctgaagaaactgtcttttctagtttctaggttccagccaagaacagagacctacctgttctacccaccattattcagccatttttcttc

SEQ ID NO: 361335 - DNA, 201 bp, Homo sapiens
agaaatggaggttttagccaaggaaactgcttgtctggttcctgcttttagggggaaaacagctgtcaggttttcttagatgcctttttttttttttttttgacggagtctggctctgttgcccaggcagaagtgcagtggcgcaatatctgctcactgcaacctccgcctcccaggttcaagagattctcctgcctcagc

SEQ ID NO: 361336 - DNA, 201 bp, Homo sapiens
gaaccatgtagagactaaaggctggaagaagatgagacaaggtggtgactgtaacagtgggaggatattaatgtgtgtaaaaagagaaaagctactgacgyctttggtgcagtgacagcgttctcacctgtgtctacaaaattgattccaagatcataaatgtgtcaccttggtgctatagaaatacaaatgattatgtac

SEQ ID NO: 361337 - DNA, 201 bp, Homo sapiens
gaggaagtgcgtaggggtcattacatatgcttcacctcctaggctatgttaggaattttgctgtttctcctaggaacaatgacaggagactgacgtggaawaaaaggttgatagggtggaattattttaaatttccatttaatctatgttattctgcctcattcttcatgacattattatgcgttgcgtgcttgtgtcaaa

SEQ ID NO: 361338 - DNA, 201 bp, Homo sapiens
tgctgtgactggaccacttccacctcttggtagccgttgctttaattgtgctttgtcttcaggatcatactggtaaggccatgtttaatcttctgttacartgcttcgaagaaatgcttcaagatcttgatcccactcgtttaaaatttccactgagagctctgctcttgtctgcagctgatctggatggttttggcagcc

SEQ ID NO: 361339 - DNA, 201 bp, Homo sapiens
cacaaacaggtatcccatcccattgtgttataataatctattaattgtttttcccagtagatactgagattcttaaaaataggaactgtcacctgggtagmcctagtgcctagcacagtgctgagcacacgtatggttttattcctaatatgaattcaaggaaggaaggtacaagtgaatttctctttcccattgtcagca

SEQ ID NO: 361340 - DNA, 201 bp, Homo sapiens
cattgaggaaatgaaagaagaccagctatcattaggaggaagaacatagtacaaaataagctggaggaagtgcgtaggggtcattacatatgcttcacctyctaggctatgttaggaattttgctgtttctcctaggaacaatgacaggagactgacgtggaaaaaaaggttgatagggtggaattattttaaatttccat

SEQ ID NO: 361341 - DNA, 201 bp, Homo sapiens
tgtgcgtgagtgtgtgtgtgtgtgtgtgtgtgtgtgtgagagaatttagccacttcagaggccttgttccccataatttggaatttcctttggatttgatsaagttggatagagttgatcaaacccaatgggaaaaagtccaaaacaacagtgaaaacaggaatgaacaacaacaacaacaaaaacagttaagcaaaacaa

SEQ ID NO: 361342 - DNA, 201 bp, Homo sapiens
aaaaaaattaaagacatttctaagtgtctaagccacattcttccttaaaaacccaagagtaacctctgttgcaataactattttagtcaaaaaaaaaaaaagtaacacaatacaaaagtaagctgttcgagaactgagacaaacttgtctgtttacattcttgaaaaaatttgttttccctggaaagggagtctggtgcct

SEQ ID NO: 361343 - DNA, 201 bp, Homo sapiens
gtgttacaaaagcaaactagttaatacttccaagaaatgaatatgctaagatattgtttgctgatcaacatttattaaacatttactgtgtaccactgatmtaggctcttggccagatatgagcaacaaaaagaagatagtgtagtgcttgccttccaaaatctagcacagtcctagaaagaattcaggtttcactaaggc

SEQ ID NO: 361344 - DNA, 201 bp, Homo sapiens
tgggcagagcccatactgaatcctgggtctccaaaaagggagaattaatatgagattaggctacgtggtgcttttacagtgcactcagaaaaaaaaaaaaattaaagacatttctaagtgtctaagccacattcttccttaaaaacccaagagtaacctctgttgcaataactattttagtcaaaaaaaaaaaaagtaaca

SEQ ID NO: 361345 - DNA, 201 bp, Homo sapiens
taggcagttcttaagaagggagagtgcggttttttgacacttaacatttaaaggttttattggccacattaatctttctcacaaaagttttaggttatctrtaagttcttagaatgtcaaagaagagaagaaaaactgactaactttaaggggcggtggaagaagcagcaacttggcaataattccgcagccaacttcgcg

SEQ ID NO: 361346 - DNA, 201 bp, Homo sapiens
gttacatcataaggtacagagaggaaaaagtctggtggtgttagagggagattaaaaatggatgccaaattaaacataaaattatagaagtctagcatagrattctataaggagactaattttatttaggtagggaatgactacctatcttttaactggatctctgagctctgggcagagcccatactgaatcctgggtct

SEQ ID NO: 361347 - DNA, 201 bp, Homo sapiens
ttcaagatgttgctattttaattaaactaatatcagtgtcttatttatgaaagattacacaagtaaagatcattctgtcttgggctgaatttatagttttrtaacccctgtgccaaagtttgacaccttatagtatttggcagggataataactatgaaactgcttgattaataaatgtaaacaaaaaatgtatgctggca

SEQ ID NO: 361348 - DNA, 201 bp, Homo sapiens
aggctggagtgcaatggcacgatctcagctcactgcaacctccgcctcccgggttcaagtgattctcctacctcagcctcctgagtagctgggattacagrtgcacaccaccatgcctggctaatttttgtacttttagtagaagcagggtttcgccatgttggccaaactagtcgcgaactcctgacctcaggggatcca

SEQ ID NO: 361349 - DNA, 201 bp, Homo sapiens
ttgggacatgagaatcacttgaactcagaggctgtgcactccagcgcaactgcactccagcctgggtgatagaggaagatgctatctcaaaaaaaaaaaaatggaaagaaaaagctgtgttcaaacttcaaactgagactataaaagtttgggcagttactgtaatctccttaaaaatttggccagaatgtacagaccaca

SEQ ID NO: 361350 - DNA, 201 bp, Homo sapiens; identical to SEQ ID NO: 78096

SEQ ID NO: 361351 - DNA, 201 bp, Homo sapiens
cggtcctgcttttgcccgtggatggtggttgctccatgagcctccatctgattggctggagaggctgtgccaggcagacctcatttacatcagtcatctgmactcagaccacctgaggtaatgaagtcctgagcacacaactcctaagctcatgctgcaggaaaggcatcaaatgttctccgattcttttgcaatcactgc

SEQ ID NO: 361352 - DNA, 201 bp, Homo sapiens
gatctcactctcttttaacagataacatatctcactcatgcctgcatggacctcaagttaggagacaagagaatggtgtttgacccttggttaatcggtcytgcttttgcccgtggatggtggttgctccatgagcctccatctgattggctggagaggctgtgccaggcagacctcatttacatcagtcatctgcactca

SEQ ID NO: 361353 - DNA, 201 bp, Homo sapiens
ccaaatgaactcaacaatcttatcaagaaaaactctgatgtgataacatggacccctcgaccgggagccacccttgatctgggaagaatgctgaaggatcsaacagacaggtttggcttaaatatttttagaggataaaaatgttttataattttttttcaatactattagaaaataaatggctcacctctggcctcttga

SEQ ID NO: 361354 - DNA, 201 bp, Homo sapiens
ggaatgtatttgagtccaagattttgcctgatcatgcttagaagcaaagtactccagcctgtgtactatgtcagccacccaaaccaaacatttcagttcaytgttgctgaccagtaatgaacgattcagtaatagggatctcactctcttttaacagataacatatctcactcatgcctgcatggacctcaagttaggaga

SEQ ID NO: 361355 - DNA, 201 bp, Homo sapiens
ctgggtcttgggtgcggcgaaacccagggcgcagcggcgcaggggtctggagcccgcaggggtcgccgggctgagcgcgctcggccgcttccggtgctgcsctgcggaactcagaggacttggtgttcggcaagcccagagactcaaacaccatgtccatggagggggggtcctcacgctgtgttcagcagggaggcgaga

SEQ ID NO: 361356 - DNA, 201 bp, Homo sapiens
atagatgttgaccatatcagccccatgaaataaacaggaataccatgtggcccacagtcagttggtaaatccttaagacttgggaggagggtcatattccmgttcacattccagttttagattctcgcttatcttaaagcattatagaccttgaactaaataagaataaaaatttgccccagtgcagtaagaaaatgaaaa

SEQ ID NO: 361357 - DNA, 201 bp, Homo sapiens
ttagtctagctagcagtccatctattttgttaatcttctcaaaaaaaaaaaaaaacagctcttggattcaatgatttttttaagggttttttatgtctctmtctctctcagttctgttctgatcttagttatttcttgtctcctgctagcttttgaatttgtttgctcttgcttctctagttcttttaattatgatgttag

SEQ ID NO: 361358 - DNA, 201 bp, Homo sapiens
ttggcctcccaaagtgctgggattacaggcatgagccactacgcctggcctattagttttctgagtgtgttttatgacaacaggatgttggatttttttcraatgccctttctgtgtcaattgagatgatgatgtggtttccttctttgttctgttaatgcagtgtgttacattgaatgattttcaaatgttgaatcagcc

SEQ ID NO: 361359 - DNA, 201 bp, Homo sapiens
ggctgtggccacactgcttctctagattcctcttcactgggcagggcatctctaaaaggcagaagccccagtcagggacttatagataaagctcccatctyccctgcgacagagcacctgggagaaggggtggctgtgggcacagcttcagcagacttaattcctacctgccggctctgaacagagcagcgaatctcccag

SEQ ID NO: 361360 - DNA, 201 bp, Homo sapiens
tttattaaatagggactcctttccccactgcttgtttttgtcaggtttgtcaaagatcagatggttgtagttgtgtggtgttatttctgaggtctctgttmtgttccattggtctatatatatgttttgataccagtaccatgctgttttggttactgtagtcttgtagtatagtttgaagtcaggtagtgtgatgcctcc

SEQ ID NO: 361361 - DNA, 201 bp, Homo sapiens
gatatattaagttctccttaatattttctcctctgacactacattcatgtatctgcaaaaacatacatgtgctttcagacacacatagtatgaacacacayacacacacacacacacacacacacacacacacacacacacccttcatactcctgtgctggtggggaattcggagtttatctaaagtacacacttcatact

SEQ ID NO: 361362 - DNA, 201 bp, Homo sapiens
ccatagatcctgctgtattttatagcacttcagaataacaatcattcttttaaaacccttctacacacctttgctgtttctgtaaatacacctgtcctttrcaagcatctggctctttctatgcattcttcctccagaaatcatagtattatagatttggaaaatgcttggccttcattttcctgttacagactggtttag

SEQ ID NO: 361363 - DNA, 201 bp, Homo sapiens
cactggccatatgtatatcttttatgatgaaatgtctattcaaatctttggcctgttttttaaaaacttgtgttgcttatatttttattcttgagttgtargaattctttgtatatctcccgccttttaaaatatgtaatcagtttagtaatcaatttattatacagattagctccagggagcaattagatttttaaatct

SEQ ID NO: 361364 - DNA, 201 bp, Homo sapiens
ttgcctgttcactctgatgatagtttcttttgctgagaagaagctccttagtttaattagatcccatttgtcaattttggcttttgtcacagttgcctttrgcatttgagtcaggaagtctttgcccatgcctatgtcctgaagggtattgcctaggttttcttctattgtttttatggttttgggttttacatgtaaatc

SEQ ID NO: 361365 - DNA, 201 bp, Homo sapiens
tgactaatgatgttggatacttttttatatgtgcccactggccatatgtatatcttttatgatgaaatgtctattcaaatctttggcctgttttttaaaamcttgtgttgcttatatttttattcttgagttgtaggaattctttgtatatctcccgccttttaaaatatgtaatcagtttagtaatcaatttattataca

SEQ ID NO: 361366 - DNA, 201 bp, Homo sapiens
tgcaacataaattcatctactataacatatgttctctcagaacatgctactggccagagttattagattttgttcacaccatagatcctgctgtattttayagcacttcagaataacaatcattcttttaaaacccttctacacacctttgctgtttctgtaaatacacctgtcctttacaagcatctggctctttctatg

SEQ ID NO: 361367 - DNA, 201 bp, Homo sapiens
gagttctctttggagctttggtgggaggcaagtggtgctccctccaacccctggggccaggacgaggacagggaaggggtgggcgagggagcctgaggccrcctcatgatcacccaccagcgggagaaaatgcggcgttggggtgagcgggtctggggagacaggatgagcgctggggctgcctgctgagtggccgccgtg

SEQ ID NO: 361368 - DNA, 201 bp, Homo sapiens
tcccctgaccttgggcattctcccacacacatgcactgatcagcacttagctgaatgtttgagggggaccttctgtaggtcttcaagttttcccagggcarctctcatgtctttggtgctctgccctaggcactctagccaccttactctccagactctcagctgtctcctcagttccaggatacctccacaaaggtgcct

SEQ ID NO: 361369 - DNA, 201 bp, Homo sapiens
cctgggttcaagtgattcttctgcctcagcctcccaagtagctgggactacaggcgcaccccaccacacctgcctaatttttgtattttcagtagagatgsgtttccacacattggccaggctggtctcaaactcctgacctcgtgatctgcccgccttggactcacaagtactaggattacaggcatgagccactgtgcc

SEQ ID NO: 361370 - DNA, 201 bp, Homo sapiens
tattgaagtttacagaatcaaaagttacagataattaggaggcattgaaatacagacctgttttcttttttctttctttcttttttttttttttttttgakacggagtctcactctgttacccaagctggagtgcagtggtgagatctcggctcactgcaacctctgcctcctgggttcaagtgattcttctgcctcagcc

SEQ ID NO: 361371 - DNA, 201 bp, Homo sapiens
tcgctgctattttcttctgaagctcaagttgtttagcttcatttcacagggctttatgaaagcacatcttagtttccagtgactccaaatttggaaaaatkgaggaaaaaaagaaggaaaaaaattgaaaacattattttgaagacatgtagctaagaaaaattagaattcagtccaaactgtagaaaataataaaaattg

SEQ ID NO: 361372 - DNA, 201 bp, Homo sapiens
tgagaaatcacaaaggacagatgagagcgatgttacttaatgccacagaacaggacatcatttaaaggagttactcaaagtgtttcagttactgccattakgaactcctaagcccctcggcagtgtgggtggtacggggtaggtgttgaggttagcagcacccacaggcttctcttcacgcaggatatgctatatagtgaa

SEQ ID NO: 361373 - DNA, 201 bp, Homo sapiens
ttttaaaaatctgttggagaacgcattttagaagaaaatgagtctctggcctcaggtttcgtctgatctctcatggctaggatggtttattcctagatagrtaggtcctgagttattaggaaagctcctttttagaaggttgtgaagtctcatgtcctgtgaagagaaaatagggggaggacaacaacaaacaaaagaaca

SEQ ID NO: 361374 - DNA, 201 bp, Homo sapiens
cagcagaaagctataatagatgaggcactggagaaagacagtaagaccatttgtttttgcctatcctttctctgcttcttaacaagaaccagattcccctycaccaccttaccccaattcctgccaaagatctctgttgctcttcttcagatcctacccctcccactcaaagctgcaaactgtccagggccaatcagtagc

SEQ ID NO: 361375 - DNA, 201 bp, Homo sapiens; identical to SEQ ID NO: 78086

SEQ ID NO: 361376 - DNA, 201 bp, Homo sapiens
ataggtaaagcacacatttacctggtttggtattcaaagacccaagcctcctatgggtctccttcctctctctcccataagtgtgtgtgtgtgtgtgtgcycatgctcctgtgtgtgtgcatgtgtgtataggggggctcttttccaaagcctgctggacagcagatagaattttcccgggaggctagttgtgattactaa

SEQ ID NO: 361377 - DNA, 201 bp, Homo sapiens
agtgctgagttgtttcattaagaatggaagacagggagggaaggaagacaaagtaggaaaagcagaaggaagacagaaataaagaagggggaaaaggacawgagaaaaaagatgaagaaaaaaaatcattagtatcatgcttagtagctgctcgacatatacagtgttctgaaccaccagcccatttctccatcccatctt

SEQ ID NO: 361378 - DNA, 201 bp, Homo sapiens
tataagatcttttctctttgaaatatgtaacctttggttgactattctaggggtcaaggatttcagagtgatgtaaattatagatatatatttactactayagtttttccttgtattggccccagttggatcttatccagcttggcttttataaaagaggtgtttctgaagacttctttattctgctgtctctgttctcta

SEQ ID NO: 361379 - DNA, 201 bp, Homo sapiens
cataggtaaagcacacatttacctggtttggtattcaaagacccaagcctcctatgggtctccttcctctctctcccataagtgtgtgtgtgtgtgtgtgygcatgctcctgtgtgtgtgcatgtgtgtataggggggctcttttccaaagcctgctggacagcagatagaattttcccgggaggctagttgtgattacta

SEQ ID NO: 361380 - DNA, 201 bp, Homo sapiens
agacccaaggggagataagatgaaagttatcagtggtgcctaatgaagaagaactgttctgtgagacaaggactgagaatgttcctcatgaggacatcatygatgaccttggtgagaacagtcagcagaagtttgagaaattattgggaggtgctgaagctgccacaagtacagaccaagcttctgagagagttggatgat

SEQ ID NO: 361381 - DNA, 201 bp, Homo sapiens
aacttccgccagcacttcaaggtgttggagttttctcttccaactattacagctttgggactctgtctctgggtttcctctcctagttttttaacttagcrggccatttcacagagtgccacttagccagccatttaaggaggccttaaagtttactgattaagagcatcatctctccttatagactacctggtttagaag

SEQ ID NO: 361382 - DNA, 201 bp, Homo sapiens
tgtcagttccttctcggcatttcttttggccgtgttttcgaacctcctcggcggccgccgctgcactcgctgggtcttgggtgcggcgaaacccagggcgmagcggcgcaggggtctggagcccgcaggggtcgccgggctgagcgcgctcggccgcttccggtgctgcgctgcggaactcagaggacttggtgttcggca

SEQ ID NO: 361383 - DNA, 201 bp, Homo sapiens
aaactctagtataatttttaattttttgaattgtagattgtctttttcttttttatcatagacactctgaaagctaattgggatgacagagaagaaaaagrgaaaagaaagaatctcgaataagaggcccagtggcctcactagaaggatgagaagataagacttgctctagaggaggaaaaatggcagcttccttgccca

SEQ ID NO: 361384 - DNA, 201 bp, Homo sapiens
ccaatcccgcacggagcagttcaaggcggccaactgcttgtgataggcatttccgacacaagctttactggaagcaaggccagaggaggagggctgctgastgtccccattagttttgggatttgaaactttatcaaccaaggcggtagggccatttgcagcaagagaaccaaaggctaccttgggctctgccgctgcctt

SEQ ID NO: 361385 - DNA, 201 bp, Homo sapiens
aggcttgctccctcatgcttctctttgtgtcccctgccacatctgtacctgtggtttcagatccatcttgtggcaccacagtgcgaatctcagccttctcrccagtttctacacaaacactcatgttaatggtaatctattgagttaacaatttaacaaggaactttaaggtagtttggaggtgctcctggagaggggtta

SEQ ID NO: 361386 - DNA, 201 bp, Homo sapiens
taaaacagtttacactttttggagtaaaaagcatcttcttttacttcggtaactactactttgggcggctcatcattctcttcttcatctccacctttgcrttcaccactgtcaccttccgcttggccctccaatggtttagtgggaaatggtgaagagactggtttactctgggtagtatctttgccaaataaactggag

SEQ ID NO: 361387 - DNA, 201 bp, Homo sapiens
tgagcctgcgagggggaggttgcagtgagctgagatcgcaccagtgcactccaacctgggtgacagagcgagactcagagggtctcaaaaaaaaaaaaaaaggtattaggagacaatgactatgtatgtaggtatagtttttcttgtttacatatgaatttgagaccatgttatatgtatggctaaaatatatttagaatt

SEQ ID NO: 361388 - DNA, 201 bp, Homo sapiens
aaccacatgtagttataacaacagaatattggacaacgtgggggctatagaatgggtgtaacaatgttgtatttcagttcttctaccagttcttcggattygttttcttgaacagagtccaagatggaatattttaccatgaattctgggttggaataggtaggattacagtgaaactctagcatttagtcacatgaataa

SEQ ID NO: 361389 - DNA, 201 bp, Homo sapiens
gctacatcaacagctggaacagtacagaaacactatctctcagggaggacagagtaccaggtaccaaatagatcctggcaaaggaacaggcatggaagttyccagagcacattcccatgctttatctctcttacaggttttggaatcattttcaaataaaactccccctcacaccacccaactggaagtcattcctgatgt

SEQ ID NO: 361390 - DNA, 201 bp, Homo sapiens
gtttgtagacagccatcatcttgctgtgttctccaatgggagaagggacaaggcaactctctgggatctcttgtaagaaggatactgattccactcatgakagttctgccctaatgacctaaccatctcccaaaagccccacctcctaatacatcaccctggtagttaggtttcaacgtaagaattttgaggggacattca

SEQ ID NO: 361391 - DNA, 201 bp, Homo sapiens
gtgatatattaagttctccttaatattttctcctctgacactacattcatgtatctgcaaaaacatacatgtgctttcagacacacatagtatgaacacayacacacacacacacacacacacacacacacacacacacacacccttcatactcctgtgctggtggggaattcggagtttatctaaagtacacacttcata

SEQ ID NO: 361392 - DNA, 201 bp, Homo sapiens
tggaaatgcacctcctcaatccctaacactgacatttaagcagcagaaagaagaggagcagcccatggtgaaggcaactggaaaggtcagagacccaaggrgagataagatgaaagttatcagtggtgcctaatgaagaagaactgttctgtgagacaaggactgagaatgttcctcatgaggacatcatcgatgaccttg

SEQ ID NO: 361393 - DNA, 201 bp, Homo sapiens
tttaatggttattttcaagaatattaatgtatttgaaaaaatattgaaatgttaaaaagtaggtgtattaaaattcattttagttttttttttttttttttccaaaaattgcattcaaatgtattttacactttaggcagttcttaagaagggagagtgcggttttttgacacttaacatttaaaggttttattggccaca

SEQ ID NO: 361394 - DNA, 201 bp, Homo sapiens
aaagcagtggtgagagacgacatccttgccttgtccttatcttagtaagaaagcttctactttctcattttttgtagatgttttaattaattaattaattaatttatttatttatttaagatacagggtcttgctctgtctcccaggctggagtccagtggtgtgatcataggtcaccccagctttgaactgggggctcaa

SEQ ID NO: 361395 - DNA, 201 bp, Homo sapiens
agaaaagcagtggtgagagacgacatccttgccttgtccttatcttagtaagaaagcttctactttctcattttttgtagatgttttaattaattaattawttaatttatttatttatttaagatacagggtcttgctctgtctcccaggctggagtccagtggtgtgatcataggtcaccccagctttgaactgggggct

SEQ ID NO: 361396 - DNA, 201 bp, Homo sapiens
tttattgtggaatataacatacagaacagctcaaaaaccataaatgaagaacacttagaaaatgaacaccagtttaacctaggttaaaaaaaaaaaaaaaagaaaatgtaatattacctgtgagcaccccagaaatctctcatatgctgctttctttctttctttttaaaatagctttatagataatatgatttaaatacc

SEQ ID NO: 361397 - DNA, 201 bp, Homo sapiens
ttttattgtggaatataacatacagaacagctcaaaaaccataaatgaagaacacttagaaaatgaacaccagtttaacctaggttaaaaaaaaaaaaaaaagaaaatgtaatattacctgtgagcaccccagaaatctctcatatgctgctttctttctttctttttaaaatagctttatagataatatgatttaaatac

SEQ ID NO: 361398 - DNA, 201 bp, Homo sapiens
cattattggagtttatacctggacataagagaggcagcacaagagagagagaattccctgactgaagccagtagggctttttttttttttttttttttttttaaattaggcaaagcatgggaattgacttcaggggtagggtatgcaggatgggctgggaaagtgtgaagggtagggtatgccagtcagcatatctggtta

SEQ ID NO: 361399 - DNA, 201 bp, Homo sapiens
cgatgggttcgaacttcttcctttagctcggaaaagtttgatcgtctgaagacctcttctcgcaacttgtcaaagtcattctccgtccagctttgttccgytgctggtaaggagctgtgttcttttggagggggagaggtgctctgatttttagaattttcagcttttctgctctgttttttccccatctttgtggtttta

SEQ ID NO: 361400 - DNA, 201 bp, Homo sapiens
gcaatcacagtatgtgtaatatgctggataaataaatgttcagtttttgtgttcatggattctgcatgccacataagctatttccaaataaacaatgggtkaatggtttcaaaagagaagaaaatcaaaaaggaaacatttcattccacttgctcttttaggagctcctgagttctgcatcagaaacaagttgagccttgt

SEQ ID NO: 361401 - DNA, 201 bp, Homo sapiens
gcgatgggttcgaacttcttcctttagctcggaaaagtttgatcgtctgaagacctcttctcgcaacttgtcaaagtcattctccgtccagctttgttccrttgctggtaaggagctgtgttcttttggagggggagaggtgctctgatttttagaattttcagcttttctgctctgttttttccccatctttgtggtttt

SEQ ID NO: 361402 - DNA, 201 bp, Homo sapiens
aaagttctgagctacatcaacagctggaacagtacagaaacactatctctcagggaggacagagtaccaggtaccaaatagatcctggcaaaggaacaggyatggaagtttccagagcacattcccatgctttatctctcttacaggttttggaatcattttcaaataaaactccccctcacaccacccaactggaagtca

SEQ ID NO: 361403 - DNA, 201 bp, Homo sapiens
cacattcttagaatttttaaagaccttgaccacttgattgatattcttctctttaccatgttgtcatttgcacagatgattgagacagatgaggacttcartccttttcctggaggatatgactatttggttgactttttagatttatccttcccaaaagaaagaccacaacgagaacatccctatgaggaagtaagcagc

SEQ ID NO: 361404 - DNA, 201 bp, Homo sapiens
aggttttattggccacattaatctttctcacaaaagttttaggttatctataagttcttagaatgtcaaagaagagaagaaaaactgactaactttaaggrgcggtggaagaagcagcaacttggcaataattccgcagccaacttcgcgtgttcaggcatcctttttctccagtaaaattttgtgcaactcgtctgcatc

SEQ ID NO: 361405 - DNA, 201 bp, Homo sapiens
aagtaatcctgttctatgacaggccagaaactatagactgttgtgagcttccaggctctgctttgcctctgaatgttcaggtggagacttgaacactcggsttttagaatgacgataacagcaaagatttcttgagtgcttactatgtgccaggctttaagtattttatatacatcctcacaacaatcctatgaggcatgt

SEQ ID NO: 361406 - DNA, 201 bp, Homo sapiens
cctcacctgcaaatttatggtgggatttgatgtctcattactaatagtacttcagatagcgataaccagctgtatacatttgatgttagtgacatgaagcrgttttgctaatatagactaggatttgaatgttgcagttcaggtgagagaagagactcttaatttcccattcattcctatcatctatcatctaagagcatt

SEQ ID NO: 361407 - DNA, 201 bp, Homo sapiens
tccatatattaacattaaacacaggagtgtgcaattcccacctattttcagtagtcagtcttgctacatctaacttcaattccaatcaccatgcaattatrcttaaaaacaaagtataagtacaaccttctttgactgacacttcttctctaattagggacattagcccaaatatagtctttatttttccatggaataagt

SEQ ID NO: 361408 - DNA, 201 bp, Homo sapiens
ctatgacaggccagaaactatagactgttgtgagcttccaggctctgctttgcctctgaatgttcaggtggagacttgaacactcggcttttagaatgacrataacagcaaagatttcttgagtgcttactatgtgccaggctttaagtattttatatacatcctcacaacaatcctatgaggcatgttctattattgtct

SEQ ID NO: 361409 - DNA, 201 bp, Homo sapiens
cttctcatatttttgaaactcatttctggtcatttcttttagcatctaaagcctgatttttctcattcaatgaatatgttctgagtgtctagcatgttacraactttgggccagggactggtgaagaagaggttatggtttttaaactccgagtctcagaaagggcacagatacaaaagcacttataaaaagcaagagatc

SEQ ID NO: 361410 - DNA, 201 bp, Homo sapiens
ttccagcagaggagactccaatctaaatcctgtcatttcagaggaatggaaagcccaattcattaaaacagaaaggaagaagctcctgaactacaaggctyggctggtgaagaacctgcaaccccgaatttattgtccctttgctgggtattttgtggaatctcacccatcagacaagtatggctagacactttgtacatt

SEQ ID NO: 361411 - DNA, 201 bp, Homo sapiens
aaaaatcttcgattcatgatcttgatggacggtgttcatcctgagatggacacttgcattattgtggagtacaaaggtatgtttttatccccattgataaygaaaaatggaaaacattcttaataggaaggatggtaatatctatatgaaatttcatcacatgttcatcttttagctccattttgaaagaatatagcgtgt

SEQ ID NO: 361412 - DNA, 201 bp, Homo sapiens
cggtgtgaacccgggaagcggaggttgcagtgagctgagaccacgccactgccctccagcctgggtgacagagcaagattccatctcaaaaaaaaaaaaaatcagtttgaaagtgatgagagagaaagtgatgtgaggctgtgtcacggtgggatttgaccttatatggggagtcagggaattcccagtggggctactgat

SEQ ID NO: 361413 - DNA, 201 bp, Homo sapiens
cacgtagttcttgtgcctggttttcagctccatcaggtcatttaaagacttctctacactggttattctagttagccattcatctaatcctttttcaaggyttttagcttctttgcgatgggttcgaacttcttcctttagctcggaaaagtttgatcgtctgaagacctcttctcgcaacttgtcaaagtcattctccgt

SEQ ID NO: 361414 - DNA, 201 bp, Homo sapiens
atcttccatcactgataccctttcttccagttgatcgaatcagctaccgaagcttgtgcatttgtcacgtagttcttgtgcctggttttcagctccatcargtcatttaaagacttctctacactggttattctagttagccattcatctaatcctttttcaaggtttttagcttctttgcgatgggttcgaacttcttcc

SEQ ID NO: 361415 - DNA, 201 bp, Homo sapiens
aatctgacaattatgtgtcttggagttgctcttctcgaggagttatctttgtggcattctctgtatttcctgaatctgaatgttggcctgccttgctagaktggggaagttctcctggataatatcctgaagaatgttttccaacttggttccgttcttcctgtcactttcaggtacaccaatcagacgtagatttggtat

SEQ ID NO: 361416 - DNA, 201 bp, Homo sapiens
tggtcaattttggaataagtgtgatgtggtgctgagaagaatgtatattctgttgatttggggtggagagttctgtagatgtctattaggtccacttggtrcagagctgagttcaattcctggatatccttgttaactttctgtctcgttggtttgtctaatgttgacagtggggtgttaaattctcccattattattgtg

SEQ ID NO: 361417 - DNA, 201 bp, Homo sapiens
aaatgtgtcccagagattctggtatgttgtgtctttgttttcattggtttcaaagaacatctttatttttgccttcattttgttatgtacccagtagtcaytcaggagcaggttgttcagtttccatgtagttgagtggttttgactgagtttcttaatcctgagttctagtttgattgcactgtggtctgagagacagtt

SEQ ID NO: 361418 - DNA, 201 bp, Homo sapiens
gagattcaacttcttcctggcttattcttgggagggtgtatatgcccaggaacttatccatttcttctagattttctagtttatttgtgtagaggtgtttrtagtattctctgatggtaatttgtgtttctgtgggattggtggtgatatcccctttatcattttttattgtgtctatttgactcttctgtcttttcttct

SEQ ID NO: 361419 - DNA, 201 bp, Homo sapiens
tccttccaaaggcttccctccagcgccactaccaaatccaggaaagcgtcctcctccagaaggtaccaccaaacctttaaaacctttaaaggctcctccastgtcagattcgaatccaacatttctgcgctttgctttctttatggctctattcttcaagacttcctcactggccatggagaatgttcccacctcttaagc

SEQ ID NO: 361420 - DNA, 201 bp, Homo sapiens
aaacaagggaaaaggccagtgtactttggtggattgccagtaagaattattagcaattgaaaaatccaaagcaatgaacatccattttaaaataacttacygtaactcccaaagtcctttaaaatgcaggatttcgttgctgaacccagagattgaaggtacattcaaagaatcattgattttttgaatcttttgtttttt

SEQ ID NO: 361421 - DNA, 201 bp, Homo sapiens
tccatgagcatggaatgttcttccatttgtttgtgtcctcttttatttccttgagcagtggtttgtagttctccttgaagaggtccttcacatcccttgtwagttggattcctaggtattttattctctttgaagcaattgtgaatgggagttcactcatgatttggctctttgtctgttattggtgtataagaatgcttg

SEQ ID NO: 361422 - DNA, 201 bp, Homo sapiens
tttttggttccatatgaactttaaagtagttttttccaattctgtgaagaaagtcattggtagcttgatggggatggcattgaatctataaattaccttgrgcataatgcccattttcatgatattgatacttcctatccatgagcatggaatgttcttccatttgtttgtgtcctcttttatttccttgagcagtggttt

SEQ ID NO: 361423 - DNA, 201 bp, Homo sapiens
gggctctgttctgttccattggtctatatctctgttttggtaccagtaccatgctgttttggttactgtagccttgtagtatagtttgaagtcaggtagcrtgatgcctctagctttgttcttttggtttaggattgtcttggcaatgcaggctcttttttggttccatatgaactttaaagtagttttttccaattctgt

SEQ ID NO: 361424 - DNA, 201 bp, Homo sapiens
tcaattttgacttttgttgccattgcttttggtgttttagacatgaagtccttgcccatgcctatgtcctgaatggtattgcctaggttttcttctagggyttttatggttttaggtctaacattgaagtctttaatccatcttgaattaatttttgtataaggtgtaaggaagggatccaatttcagctttcgacatatg

SEQ ID NO: 361425 - DNA, 201 bp, Homo sapiens
cagctgccttattactaggagctggttatgtgtgctgtacaaatactgttaaatttatttgacataaaactgataataaacataggtttgggtataaacaytgttagtttgtgtaagtgaaaggacaagagactatgaactttatgaatatataaccaagtaatctacaactgcttaggggcttttatgaaaatctctaaa

SEQ ID NO: 361426 - DNA, 201 bp, Homo sapiens
taaaaactccggggaaatcctccactaatgacatggagccttgttctatttctgccttagttacctatcaattttatctcctgaaagagttccaatctgcyagaatatgtgtttttctgtgatttttccagcagaggagactccaatctaaatcctgtcatttcagaggaatggaaagcccaattcattaaaacagaaagg

SEQ ID NO: 361427 - DNA, 201 bp, Homo sapiens
tccgaatgaattgccatatacaaggagaaagctcagtgcctttggctggcttggtaacattttcctagtaaccaattgaaatttccaagataaaaactccrgggaaatcctccactaatgacatggagccttgttctatttctgccttagttacctatcaattttatctcctgaaagagttccaatctgctagaatatgtg

SEQ ID NO: 361428 - DNA, 201 bp, Homo sapiens
cttactgtttgtttttcctttgatataatcaattcttctataatcaaataagttcaattatacagactgtatacagaagtccttgtcttggaattcaaacyatgggtgttcaagatttcaccttgaatatctatacctctttgtttctccacaggtcataaaatactcaatatagtagactgcaccagacccaatggggga

SEQ ID NO: 361429 - DNA, 201 bp, Homo sapiens
tgagatcaaattttaagtgttctcaccacaaaaaaagtatgtgaggtaacatatatgttaattagctctattcagccattccacaatgtatgcatatatcrtaacatcatgtatactctaaatatacacactttatttgccagttaaaaaataggcttctcactgaccaaaatgggatgatatgagcactaatacaagtaa

SEQ ID NO: 361430 - DNA, 201 bp, Homo sapiens; identical to SEQ ID NO: 78105

SEQ ID NO: 361431 - DNA, 201 bp, Homo sapiens
gatcccatttgtcaattttgacttttgttgccattgcttttggtgttttagacatgaagtccttgcccatgcctatgtcctgaatggtattgcctaggttktcttctagggtttttatggttttaggtctaacattgaagtctttaatccatcttgaattaatttttgtataaggtgtaaggaagggatccaatttcagct

SEQ ID NO: 361432 - DNA, 201 bp, Homo sapiens
attagatcccatttgtcaattttgacttttgttgccattgcttttggtgttttagacatgaagtccttgcccatgcctatgtcctgaatggtattgcctargttttcttctagggtttttatggttttaggtctaacattgaagtctttaatccatcttgaattaatttttgtataaggtgtaaggaagggatccaatttc

SEQ ID NO: 361433 - DNA, 201 bp, Homo sapiens
gatgagtagattgcaaaagttttctcccattctgtaggttgcctgttcgctctgatggtagtttcttttgctgtgcagaagctctttagtttaattagatmccatttgtcaattttgacttttgttgccattgcttttggtgttttagacatgaagtccttgcccatgcctatgtcctgaatggtattgcctaggttttct

SEQ ID NO: 361434 - DNA, 201 bp, Homo sapiens
aaatggatgaaaacaacggacttttgcttttagaactgaatcctcctaacccttgggacttacagcccagatctcctgaagagttggcttttggagaagtrcaggtaaggaaatattaaaaggataatattattaaaaacaaaaacgtgaccaagatgtccatttaacatctatatctgtaaacatcctatattaccttga

SEQ ID NO: 361435 - DNA, 201 bp, Homo sapiens
tatatacccagtaatgggatggctgggtcaaatggtatttctagttctagatccttgaggaatcgccacactgtcttccacaatggttgagctagtttacrgtcccaccaacgtgtaaaagtgttcctatttctccacatcctctccagcacctgttgtttcctgacattttaatgatcaccattctaacaggtgtgagat

SEQ ID NO: 361436 - DNA, 201 bp, Homo sapiens
tcttaattttctttcataacttctctgttttttaggagattccttaaattggttatctgtttcacagttgccaggtttggtttttggcatattattctgctacttaagatctccactatttttttgttttgttttggcgcccatgattttactggaaaaatccttttgttctctccttttttgttaccccttttcatttat

SEQ ID NO: 361437 - DNA, 201 bp, Homo sapiens
atttgtcattcactgagcagcactgtgctaagtactggagaactagagataaaatgattgtctgttctcagagtgatggtctattagaagagaagaacaaytggaatacagaatgatcaatgcaggcaaggggatacagacgcaggagaggagacgaacactggatgagtctatgaatgctgcattttaaagaaggagtag

SEQ ID NO: 361438 - DNA, 201 bp, Homo sapiens
ttcttaattttctttcataacttctctgttttttaggagattccttaaattggttatctgtttcacagttgccaggtttggtttttggcatattattctgctacttaagatctccactatttttttgttttgttttggcgcccatgattttactggaaaaatccttttgttctctccttttttgttaccccttttcattta

SEQ ID NO: 361439 - DNA, 201 bp, Homo sapiens
tttcttttcaatgtggcagtttattcctgtataattgctttgcaacattttagttggatctggaaatgcagaggagataggttatgcacgcaatttgtccrtcattgtgaaccaatagtcttctccttagcccagtgacagtacctccttgttttcctgaatattcttttgcattcttttggagttcctctttccccagcc

SEQ ID NO: 361440 - DNA, 201 bp, Homo sapiens
tttcttaattttctttcataacttctctgttttttaggagattccttaaattggttatctgtttcacagttgccaggtttggtttttggcatattattctgctacttaagatctccactatttttttgttttgttttggcgcccatgattttactggaaaaatccttttgttctctccttttttgttaccccttttcattt

SEQ ID NO: 361441 - DNA, 201 bp, Homo sapiens
attttcctttgatctttggaagaccatgcattcctatttcagtgatgcttttaaaaagccatttttgtcattaatccagatttgttctcatttgattctarttgttgaaatggatgaaaacaacggacttttgcttttagaactgaatcctcctaacccttgggacttacagcccagatctcctgaagagttggcttttgg

SEQ ID NO: 361442 - DNA, 201 bp, Homo sapiens
cttgtttgtatatgtgtatccctgacatgactgagacctcataagttctctaagtgccatatgaataaagaaatgaattggtgttcatcttaagtcatagyctctgcagatattgcttgatctaagggagtggcaccctttgttttgattttcctttgatctttggaagaccatgcattcctatttcagtgatgcttttaa

SEQ ID NO: 361443 - DNA, 201 bp, Homo sapiens
caaacacactacctgcccttgttctccccctaccccaaaattgattctatgtattgagagaactgtagaaatatatttgacctgggagccatatataggggtagagaaggggccagctatctcatggacataacttttgtgcttgccctcctgtcatccgcagtacctacttctcttccctccacatctgaacacccctcc

SEQ ID NO: 361444 - DNA, 201 bp, Homo sapiens
acacctgcctaatttttgtattttcagtagagatgggtttccacacattggccaggctggtctcaaactcctgacctcgtgatctgcccgccttggactcmcaagtactaggattacaggcatgagccactgtgcccagctgacccagtttctacgaccagtttagccacaaagtagacatgtaaccagaggaaagtgact

SEQ ID NO: 361445 - DNA, 201 bp, Homo sapiens
agtccatatttactgataaaaagacttttttcagctgatttggggctcttatgtataggtgtaggatctgtcatccagtaggctctacttacagagggctygcacactggtgcaaggcacatctcataaactggtgaagctggggcagactgcatcaagtagaatgcgggatgagaagggggcaggcctgctgagctccgg

SEQ ID NO: 361446 - DNA, 201 bp, Homo sapiens
ggattttcactcctggccttagtccaggggtgcagagctttggattcttaaggtcgctgactcatcagaagaaaataaaacgaggacataagtttttaatyttaaaaatttaaaaaaaattgtttttaagacaccgagagcactaactttgaaaatttaagaaattaagagagaaatcacaggatttgaatcactaagtaa

SEQ ID NO: 361447 - DNA, 201 bp, Homo sapiens
tagcttgatcctcctttctttgtgggtgacttttaagaattacaggattagtccatatttactgataaaaagacttttttcagctgatttggggctcttaygtataggtgtaggatctgtcatccagtaggctctacttacagagggctcgcacactggtgcaaggcacatctcataaactggtgaagctggggcagactg

SEQ ID NO: 361448 - DNA, 201 bp, Homo sapiens
taatactctcaacatttgtatattgtgaaaattttcataataagttgaaaagcaaggaaaaaaacaacttagtttcaacggctaattgtttctactggggyggagagaagtaatgaaaatgccagagggaaaagggtgtttttttttcagggctgactaatcttagtaatggattttcactcctggccttagtccaggggt

SEQ ID NO: 361449 - DNA, 201 bp, Homo sapiens
aatcatgatgcctgctctgcacatggtactgttagactgtggcttgagggcttttatctcccaggattttagggagagttctatatgctgaggtttggttmaagaggttatgcctatgtgtggaagagctccttttcttgctacccggagacttctcatattgcctccctcctgccacctttttggaggtattaattgcct

SEQ ID NO: 361450 - DNA, 201 bp, Homo sapiens
aaaacttaaaagaatgccatatggtggtatatggcaagcacctcaaaaaagtgaattatagttactatttctctgcaatgagcttcttgtgtagcttatayagagggacttttttacaggaactcagattgtttttgtatctaatatgctcatctaagtatagtgattgctttcccacagactagcctttctcttcttcat

SEQ ID NO: 361451 - DNA, 201 bp, Homo sapiens
tgtgggcagagatgaattgttgaagctggctcaaggagtttcattatataatactctcaacatttgtatattgtgaaaattttcataataagttgaaaagsaaggaaaaaaacaacttagtttcaacggctaattgtttctactggggcggagagaagtaatgaaaatgccagagggaaaagggtgtttttttttcagggc

SEQ ID NO: 361452 - DNA, 201 bp, Homo sapiens
atatttaaatacaccatggggcaaaatcatgatgcctgctctgcacatggtactgttagactgtggcttgagggcttttatctcccaggattttagggagmgttctatatgctgaggtttggttaaagaggttatgcctatgtgtggaagagctccttttcttgctacccggagacttctcatattgcctccctcctgcca

SEQ ID NO: 361453 - DNA, 201 bp, Homo sapiens
cctgggtctccaaaaagggagaattaatatgagattaggctacgtggtgcttttacagtgcactcagaaaaaaaaaaaaattaaagacatttctaagtgtytaagccacattcttccttaaaaacccaagagtaacctctgttgcaataactattttagtcaaaaaaaaaaaaagtaacacaatacaaaagtaagctgttc

SEQ ID NO: 361454 - DNA, 201 bp, Homo sapiens
aagagattcacctttgaaaatttttaaataacttcatttaaaatatttaatttggaaaaaaaatcactttttcacagctttccataatgcatctgctggawaaagcaagcagcagctctgttgcatatttaaatacaccatggggcaaaatcatgatgcctgctctgcacatggtactgttagactgtggcttgagggctt

SEQ ID NO: 361455 - DNA, 201 bp, Homo sapiens
tgctcttagccactgtgtagcctttcaaatctgaatttacaaaacctataaattgaggtttcttagcctcaagagattcacctttgaaaatttttaaatamcttcatttaaaatatttaatttggaaaaaaaatcactttttcacagctttccataatgcatctgctggataaagcaagcagcagctctgttgcatattta

SEQ ID NO: 361456 - DNA, 201 bp, Homo sapiens
tgcagctggccctgatttgcatgtgaccagcaacttttcatctatgtctcaactcaaatgtcacctcttcactgaccatcctgtctaatgattccctccayctcatcccactcaccccagccactctctgttccattgccctgttttattttcttcacggtgcatcattctttgcaatgactttatttacttgttcattat

SEQ ID NO: 361457 - DNA, 201 bp, Homo sapiens
gggctttaactcaagcagtctagctcaaagtctatgctcttagccactgtgtagcctttcaaatctgaatttacaaaacctataaattgaggtttcttagsctcaagagattcacctttgaaaatttttaaataacttcatttaaaatatttaatttggaaaaaaaatcactttttcacagctttccataatgcatctgct

SEQ ID NO: 361458 - DNA, 201 bp, Homo sapiens
ttttttttttttttttttttttttttacagaaaccagtacatctgtagctttgggcatataaaagtatagttttgagaagaaggtcagctactgccacgtytttatgagatgggcacctatttccctccttatattttctttatccagatcacatcctattccattcttgggatttaaaattccatgttttatgcaaggat

SEQ ID NO: 361459 - DNA, 201 bp, Homo sapiens
cagtgttaaacactttggaaatgttaagacatttaatccaacaacaaccctgtgaacagatactactatctgcccccattttgtgggggaagaaactgggrttataagagttagaataacttgcccatggttatacagctaatgaatggtgatgcggggctttaactcaagcagtctagctcaaagtctatgctcttagcc

SEQ ID NO: 361460 - DNA, 201 bp, Homo sapiens
tggaggagcatcaggctttccaatgactttcagtggtggaaaatttacgggtaatattttgtatgaaagtgataccaagtatcacgcatggcacattgctraatgctgtaagagtaaatacaaatgtaattgagacatgatccctccccacaagaagcatgcaatcttattgggaaaccagatttgtaagttgcagattac

SEQ ID NO: 361461 - DNA, 201 bp, Homo sapiens
acagaagtccttgtcttggaattcaaactatgggtgttcaagatttcaccttgaatatctatacctctttgtttctccacaggtcataaaatactcaatayagtagactgcaccagacccaatgggggaaggctgcctatgaaggttgctctaatgatgagtgattttgctggaggagcatcaggctttccaatgactttc

SEQ ID NO: 361462 - DNA, 201 bp, Homo sapiens
acatataaggattccttaaagcaaggaacatcatagtacaataaaaataagacaaaatctcgttcaaggagctgtctgtattcaacaccctgaaagttctragctacatcaacagctggaacagtacagaaacactatctctcagggaggacagagtaccaggtaccaaatagatcctggcaaaggaacaggcatggaagt

SEQ ID NO: 361463 - DNA, 201 bp, Homo sapiens
caaagatttcttgagtgcttactatgtgccaggctttaagtattttatatacatcctcacaacaatcctatgaggcatgttctattattgtcttcattttwtagatgagaaagccaaggcacagaacggtgaccaagatcacacagctagagtctggatttgaacccatgaatctgcagtttgtgctctcagtcagatgct

SEQ ID NO: 361464 - DNA, 201 bp, Homo sapiens
tgacttctctgtctgctcacttccaaacacctgctcaacctaagctgttattagacctgtgagcattgatctctaccttcattttcctgtgcccctcccartgggtgtctctggaaagggagttagatcaacatgaagcaacacatattttattgaattcaagttctgaacaaatccctcgccagtggcagcattatgtaa

SEQ ID NO: 361465 - DNA, 201 bp, Homo sapiens
atcaagaagttacagaactttgtgaccaccacacattatgttttaggaagagtaatgaatagtaacatagttggaggcagggaaacctgttagtgaaccaygtagagactaaaggctggaagaagatgagacaaggtggtgactgtaacagtgggaggatattaatgtgtgtaaaaagagaaaagctactgacgcctttgg

SEQ ID NO: 361466 - DNA, 201 bp, Homo sapiens
aatgtgatgctgtcatttaaagcaattaaaagctgtactgttgcatgtaagcagttggcaaatactttcacttcccacaataccccatctagatactgatyttatttttattttatagagagacaaagacacatcaagaagttacagaactttgtgaccaccacacattatgttttaggaagagtaatgaatagtaacata

SEQ ID NO: 361467 - DNA, 201 bp, Homo sapiens
cctggccttagtccaggggtgcagagctttggattcttaaggtcgctgactcatcagaagaaaataaaacgaggacataagtttttaattttaaaaatttwaaaaaaattgtttttaagacaccgagagcactaactttgaaaatttaagaaattaagagagaaatcacaggatttgaatcactaagtaattgtgataata

SEQ ID NO: 361468 - DNA, 201 bp, Homo sapiens
tcttagatctcacaactagctgagtgccaacgccagatctttccttttttatgttcattactataactttattgacctgcagtagctttttttttttttttaggaaatagaaacaacagtcaattgtaatacttaaatataattatctcacagatcagaagtctcatttcagtcattctccaagatttaatgtatgtatca

SEQ ID NO: 361469 - DNA, 201 bp, Homo sapiens
tccagcgccactaccaaatccaggaaagcgtcctcctccagaaggtaccaccaaacctttaaaacctttaaaggctcctccagtgtcagattcgaatccamcatttctgcgctttgctttctttatggctctattcttcaagacttcctcactggccatggagaatgttcccacctcttaagcttcatcttcttgatccca

SEQ ID NO: 361470 - DNA, 201 bp, Homo sapiens
gatttttcctcttttcacctccctcctttgaatggccaacaacagaatatttccacttcctaagtttggctcttttacttttttctttctttctttctttytttttttttttattttttttttgagactgggtgtcactctgttgcccagactggagtgcagtggcgcaatctcggctcactgcaacctctgcctccgggg

SEQ ID NO: 361471 - DNA, 201 bp, Homo sapiens
ttttctagcagttttgttttagaatccaaaagcaatatatacttacagcaggggggaccttcaaccaatttaaaagtgaatcaattaaatataaaagttayttctttctatcccatccatcctcttaaagaaataatcacaatgaacaatttgatgtgtattcctctcactttttaaatacatgcacaaatatatacagtt

SEQ ID NO: 361472 - DNA, 201 bp, Homo sapiens
cagccttgtgtcccagggatgaagccgacttgatcatggtggataagctttttgatggctgctggattaggtttgccagtattttattgaggatattcacrtcaatgttcatcagggatattggcctataattttctttttttgttgtatgtcttccaggtgatggtatcaggatgatgctggccttataaaatgagtaag

SEQ ID NO: 361473 - DNA, 201 bp, Homo sapiens
ccttcatgtcccttgtaagttatattcttaggtactttattctctttgtagcaattgtgaatgggagttcactcatgatttggctctctgctggtctgttmttggtgtatgcttgtgatttctgcacattaactttgtatcctgagactttgttgaagttgcttatcagcttaaggagattttgggctgagacgatggagt

SEQ ID NO: 361474 - DNA, 201 bp, Homo sapiens
aaaaaacaaacaaaaaaactggatttttacaggtaagaaaatcctgtgtgaggcaccgtatagatgataaataggcttacatctttttagacaaaataaakctttacatttattgctttatatatcaaatacttaccaagcttgctttatgccaagcacagtgttaaacactttggaaatgttaagacatttaatccaaca

SEQ ID NO: 361475 - DNA, 201 bp, Homo sapiens
tatatatgttttgataccagtaccatgctgttttggttactgtagtcttgtagtatagtttgaagtcaggtagtgtgatgcctccagctttgttcttttttgcttaggattgtcttggctatatgggctcttttggttccatatgaaattgaatgtagttttttctaattctgcaaaggaagtcaatggtagcttgatgcg

SEQ ID NO: 361476 - DNA, 201 bp, Homo sapiens
ttaaatgacataatatatgtgagcatgcattgtaatttaaaattgtctatgaatgtaagaatcattagttatgaggatatacggtctgcccttaaacttaytgtatgtgccatttaaatgtgtgatgtcctaaatgtagaggtttaaatataccttcacctaatagatgtaataaatgtgctcttgaactacattttaata

SEQ ID NO: 361477 - DNA, 201 bp, Homo sapiens
aatgggtagattgcaaatttctctcctattctgtaggttgcctgttcactctgatgatagtttcttttgctgagaagaagctccttagtttaattagatcycatttgtcaattttggcttttgtcacagttgcctttggcatttgagtcaggaagtctttgcccatgcctatgtcctgaagggtattgcctaggttttctt

SEQ ID NO: 361478 - DNA, 201 bp, Homo sapiens
gctgatcatgattcctgattaggaggctttgagcagttatttaagctgtctgagctttaggggtttttgtttttgtttgcttgcacagggcttgctccccscttgccagtttgtcgtgatagttaaatgacataatatatgtgagcatgcattgtaatttaaaattgtctatgaatgtaagaatcattagttatgaggata

SEQ ID NO: 361479 - DNA, 201 bp, Homo sapiens
ttgttgccatgaaacaaaaacgttgactcttgctgtaattttgttgagccaaaaagggaaggagactgtgtttcagccgccactttgttagattcactttyagaattcctgccactgttcccgtgttgctgttcaatgtttgctaaatatttctcatagtccttaaagataggtgtcagatcacagagggggtttgtattc

SEQ ID NO: 361480 - DNA, 201 bp, Homo sapiens
actgaaattcagaaagggcaatttgccatttttatatttgcaaaataatcaccaaaggaaagagtactttttctcattaccacagatcctctgaaaaaaaatgcagaaatttaattttaaaattctaattatttaaaatgtataagcaaaagtttgtactctgagcttgcaagcagaggcatttattaaaatttctttttt

SEQ ID NO: 361481 - DNA, 201 bp, Homo sapiens
tgccagcatttggtgttaaagtcttcaattttaaccattctgatgggtgtgtaatagtaccttattgtagtttaaatttgtgggttttttgggctctgatmattaatctctgacggctaatgatattgaatactttttcatgtgtttatttgccattagtagattttcatttgtaaaatatctgttcaaatatattgcccc

SEQ ID NO: 361482 - DNA, 201 bp, Homo sapiens
ttctggcactttccgggtgaagtgacacttcagcttgcttctgcttgctgtctgtgggttgcacccaatacctaaccagtcccagtgaaatgaactgggtmcctcagttggaaatgcacctaccttctgcattggtctcactgggagctgcagactggagttatttctatttggctatcttggcccctccctaaacacatc

SEQ ID NO: 361483 - DNA, 201 bp, Homo sapiens
ttatctttttaatgtccataagttccatagtgttgtcccttctttcatttctgatattgtattttttgtttttgtagacacagggtctgttttttttttttcctttgagagagggactcgctctgtcacccaggctagagtgcagtggcacgatctcagctcactgcaacctctgctttctgggctcaagtgattctccag

SEQ ID NO: 361484 - DNA, 201 bp, Homo sapiens
gagactctgtctccaaaacaaagcaagaaaaaacaaacaagacacaaaccttaaaactccccaaactcctattcctgaggcaaataggcaagatactaaartatgataaaacacaatggaggttcagggatgttcgttgcattatattcttttttcttttttctttttgagacggagtctcactctgtcgcccaggctgga

SEQ ID NO: 361485 - DNA, 201 bp, Homo sapiens
gacatgaagcggttttgctaatatagactaggatttgaatgttgcagttcaggtgagagaagagactcttaatttcccattcattcctatcatctatcatytaagagcatttgagtcttacacattcttagaatttttaaagaccttgaccacttgattgatattcttctctttaccatgttgtcatttgcacagatgatt

SEQ ID NO: 361486 - DNA, 201 bp, Homo sapiens
tagctgctatatgacaatgagaaacatctcacatttatttcctcacctgcaaatttatggtgggatttgatgtctcattactaatagtacttcagatagcrataaccagctgtatacatttgatgttagtgacatgaagcggttttgctaatatagactaggatttgaatgttgcagttcaggtgagagaagagactctta

SEQ ID NO: 361487 - DNA, 201 bp, Homo sapiens
ttagctgctatatgacaatgagaaacatctcacatttatttcctcacctgcaaatttatggtgggatttgatgtctcattactaatagtacttcagatagygataaccagctgtatacatttgatgttagtgacatgaagcggttttgctaatatagactaggatttgaatgttgcagttcaggtgagagaagagactctt

SEQ ID NO: 361488 - DNA, 201 bp, Homo sapiens
attcatagctttttgataagaattgactaacatagtatgtaaaactgccccagcaccaagtttgaaatataatagatgtgtaatcatttgtttgtttattmaactttctaccacaccctacagtggtataataactctgttatataatgaatgctcaataaataaaagccgacttaatatgtctagatagtcaaaaatact

SEQ ID NO: 361489 - DNA, 201 bp, Homo sapiens
ttgatatgcagatttttaaaatacttttcctatgattatatatcttattttacctgatcttatactctgtgtacaagtctgattcttaaaccagataataygttcattaaagttagaaactttcttcttatagaagaagcactaggtttagaatcaaaaacccaaatttgaataccagtttactgtgtgttgtatatttct

SEQ ID NO: 361490 - DNA, 201 bp, Homo sapiens
ttatcaacatttagtacttgcagttgttttaattttagttgttctggtaagtatagtggtacttcattgtggtttttattttcacttccccattgctagtraggctgagctctgtttatacagttagtcacaatttggatattctattttatgaagtacctattcaaacctttttgcccatttttcttatagattgtcttt

SEQ ID NO: 361491 - DNA, 201 bp, Homo sapiens
aagtgattggcgtaggtagttgcagtgactttcctcagtggtctgtagatctgtttccataacagcaagaagagagctgttacattgtgggttggtgagcyggtgggttgggcatgctcatacacaaactgctcggtagggaaaggagaaggcacatgagcaagggatggccctggtggccagggtaaggattttactttg

SEQ ID NO: 361492 - DNA, 201 bp, Homo sapiens
ccttcattccagacatagttatctaatgacttagttatctaatgaccacagggtgtggttttacaatcaagtccagttcttgcatctgtgcctgagtttgrgggcctgtaggacttgcaattttaattggtggcaaggaagtatgcagttcatgcatgtggcttgaataataagattttgctctcctttttctcatataat

SEQ ID NO: 361493 - DNA, 201 bp, Homo sapiens
cttgtgaatgcttcacacagttctcatgctgtgtttttcagctccatcaggtcaatttatgttcttctttagactggttattctagttagcagttcctgtratcttttatcaaggttcttagcttccttgcattgggttagaacatactcctttagctcagaggagtttattacccaccttctgaagcctacttctgtcaa

SEQ ID NO: 361494 - DNA, 201 bp, Homo sapiens
tgttagttttgggtttttcatgggttcccttaattagattgagaaaattactttctactattagtttgtaaagtgtgtcgttgtgagggggtgggagttastcatgaaagggtattttttttcaaaatttttttctgcattataatttcttttgagactattatgtggtttttaccttttattctcttaatgtggtatatt

SEQ ID NO: 361495 - DNA, 201 bp, Homo sapiens
ggaagtggtgagagcagatatccttatcttcttcttgattttagggaaaaagtatccagtcttttgctattgagtataatgttagttttgggtttttcatrggttcccttaattagattgagaaaattactttctactattagtttgtaaagtgtgtcgttgtgagggggtgggagttagtcatgaaagggtatttttttt

SEQ ID NO: 361496 - DNA, 201 bp, Homo sapiens
attttttgagatgcatctatgttgtagcatgtattgtaatttattcctttttattgccaaatagtatttcattatatggatgtatacatttatccactaaytgatagacatttaggttgtttgtactttcgggctgctatgagtagtagcaaagtgaacatttatatacaggtttgtgtgtgtgtgtggacatatgctttc

SEQ ID NO: 361497 - DNA, 201 bp, Homo sapiens
ctgtgaggaagggatcaaaaaagaatattctgggtatagggttgtacattgaggaaatgaaagaagaccagctatcattaggaggaagaacatagtacaarataagctggaggaagtgcgtaggggtcattacatatgcttcacctcctaggctatgttaggaattttgctgtttctcctaggaacaatgacaggagactg

SEQ ID NO: 361498 - DNA, 201 bp, Homo sapiens
ctatttcagtgatgcttttaaaaagccatttttgtcattaatccagatttgttctcatttgattctagttgttgaaatggatgaaaacaacggacttttgmttttagaactgaatcctcctaacccttgggacttacagcccagatctcctgaagagttggcttttggagaagtacaggtaaggaaatattaaaaggataa

SEQ ID NO: 361499 - DNA, 201 bp, Homo sapiens
ggacaattggtatgaaaaagagaaaaacttttgacagttttttataaaacattttcagtgaaaccatttctatttagctgctatatgacaatgagaaacakctcacatttatttcctcacctgcaaatttatggtgggatttgatgtctcattactaatagtacttcagatagcgataaccagctgtatacatttgatgtt

SEQ ID NO: 361500 - DNA, 201 bp, Homo sapiens
ttgctattctcaaaagcaatgatccccagaaacctagctggggcccatggccagtctgtgacaaagtttttgctggcaaatagtgaaataagtaagagagyaggtatgtatatcaactctcttttcttgggatgaattgttattattccatgactaagtcctttctatttgggggtattaaaacattatttcttcaatgaa

SEQ ID NO: 361501 - DNA, 201 bp, Homo sapiens
agcaggtaacccttgtctgcagctatgctgaggctgaattgcacaaattaagaattaggcctaggtctgcagcttaatctagccctaacacatacatacaragccacaagctaagaaagagttcatgttgtaacctagtcaccaaaactggacagatctccaaaagcaaactaaatactagcagacagagggtgcaagaca

SEQ ID NO: 361502 - DNA, 201 bp, Homo sapiens
caccttaagccttggtagttaaggcaagcatattgggttttttgtttgtttgtttgtggggtttttgtttttttgttttggttttggtagaaacagagtckagctctgtcaacccaggctggagcgcaatggctgaatctcagctcactgcatcctctgcctcccaggttcaagggattctcctgcctcagcctcctgaat

SEQ ID NO: 361503 - DNA, 201 bp, Homo sapiens
cacaccaccacgcccagctaattttttgcattttcagtagagatggggtttcaccatgctagtcaggatggtctcaatctcctgacctcacaatccacctrccttggcctcccaaagtgctgggattacaggcatgagctgcaagccactgtgcccggcccggaaaaaggcaatttaatggagaaagggtagtcttttcaa

SEQ ID NO: 361504 - DNA, 201 bp, Homo sapiens
ggtgaaggaatagacacagacatcaatggaacagaatagagaatccagaaatagatccacacaaatatggccaattgatttttggcaaagatgcaatttgrggaaatgtgaatgaaaaaaaggcttttttttggggggtggggaaggattctcactgtgtcgcccagcctggagtgtggtggcgtgatctcggctcactgc

SEQ ID NO: 361505 - DNA, 201 bp, Homo sapiens
ggttggaataggtaggattacagtgaaactctagcatttagtcacatgaataaaagctgaatgaggacaaagcatttcaaagaaggatcatatgtctacaragaaagataatctggcccaataaaccaggtaaattgtgtgttttggaacgctctagtgtattttattgctaacgcccatttagtgaatggattgattttc

SEQ ID NO: 361506 - DNA, 201 bp, Homo sapiens
gaaggaaagtgattagtaggtgtctggaactttttaacaagctgctggagaacccagagcatgaataaaagttacacttggcagccaggaactctttcagragataaaataacagatagatattctccgaaaggatcccaggaaagaggatggcaactgccatttattatgtgaagtgaactggggacttttaactaagcc

SEQ ID NO: 361507 - DNA, 201 bp, Homo sapiens
gtcagatctgaagttcctcattctgctgattgtatttgatatcttcaaaatcaatgtttaagtttttcctagtcttgtattaggtcattattattattatrtggaaggaaacttgcaggatctccacaaagtgtcaggttcatttgctgagatggatcaatagattcatgtttgaagacattgcctttttgcatttggcac

SEQ ID NO: 361508 - DNA, 201 bp, Homo sapiens
ctagatagtgacaggagcaaagatttctttcataaggcaatagatattttacattccacctatagtgatttcttcaaaactacatttattaaataaatgtmttttattactttcacctagaaatatcatgtaatataatcatgcactgcttttcatatgaaaagatggccttactgccccaacaatcatttgaatatgagc

SEQ ID NO: 361509 - DNA, 201 bp, Homo sapiens
ataattttatatagcttgtgtagggacaacagcacataaatgatatgatcgctttatagtgtctaagatacaattacctaaagtcttaatgagagacattmtatgggaacacactaaatttaagaagggtaagaactttcagggagggtaagaactcatttagttgagttattctgtaactactgtcctgaaaaccaattt

SEQ ID NO: 361510 - DNA, 201 bp, Homo sapiens
catgaatttgttggtgctaaagctattggggtggttataactaccctgtagcttgagttgagaaccaaggaatgttactgcttatgacctgaatacacgamggtagacttgtaaaataatcttggatataagttaggattttatctgttatgcctagtagataaaatccttaccagaaagtcagatctgaagttcctcatt

SEQ ID NO: 361511 - DNA, 201 bp, Homo sapiens
gctttccagttatgctttctgtgatgaatgttaggtgagatagtcaccgtaagattaaggaaaaaatgggtcaatgtggtatgtccctgatactgcataawcacaacctctatttgtgattcaaatgttaggcagactgtcctgggcaaagatgattttctttctattaacccatactattatagtacaactctacagaac

SEQ ID NO: 361512 - DNA, 201 bp, Homo sapiens
atacacgaagaacatggaatatcttgttatatgagaggcaaggaaatatcaaatactattggggtcatctcaaaatgactcacaagggccagcttgaaaascttcctacttaccacttcgcacctgttagagcagctattatcaacaagatgaaagataataatgttggtgaggatatagaagaaagggaacccttaaatt

SEQ ID NO: 361513 - DNA, 201 bp, Homo sapiens
ggggtcatctcaaaatgactcacaagggccagcttgaaaaccttcctacttaccacttcgcacctgttagagcagctattatcaacaagatgaaagataayaatgttggtgaggatatagaagaaagggaacccttaaattgctggtgaaagtataaaatagcactgctgctatggaaaacactatgaagtttccccccaa

SEQ ID NO: 361514 - DNA, 201 bp, Homo sapiens
gcctcctgagtagctgggattacagatgcacaccaccatgcctggctaatttttgtacttttagtagaagcagggtttcgccatgttggccaaactagtcrcgaactcctgacctcaggggatccacccgccttggcctctcaaagtgctgggattacaggcttgagccactgcacctggctgaacatccttctttcttaa

SEQ ID NO: 361515 - DNA, 201 bp, Homo sapiens
gattcttaaaccagataatacgttcattaaagttagaaactttcttcttatagaagaagcactaggtttagaatcaaaaacccaaatttgaataccagttyactgtgtgttgtatatttctgaatgtttcctcatctacaaaaacaaaaaattcatagctttttgataagaattgactaacatagtatgtaaaactgcccc

SEQ ID NO: 361516 - DNA, 201 bp, Homo sapiens
ctgtgaaaggcagtgggctaagtggtagggggagaaggaagatacagagtgctttcaaaagtgcctaaatgtaagtcaacagggcagtgtgccaattacartgttataatgttctacagaagagggatgtacaccaagaatgccagcctggacctctggtgtgtcttggaagacttaaccaggaaggggacgattcgtttc

SEQ ID NO: 361517 - DNA, 201 bp, Homo sapiens
gtttgccttttaaactcttagactaattattccaggaattgcctcagtgcttatgttagcttggtgtcagatatctgtactcgtaagaacaaagtcaaaaragaagtcatgaaatttagaatggcttcttcctgtcaaatacatttagaacatatttttggaataatttcaagtccattgggaacacaattactaggaatt

SEQ ID NO: 361518 - DNA, 201 bp, Homo sapiens
tttaatgttttatagcaaaacaagaatttgctacagttttatttttctgattttgatagaagcaaattcattgatatctttaaaaatactttggggaaaarctaatcatttaaacaatacacagaaaagcatgtatataggtgcacatatttttttcttttgccttctgctccaatgtgactttcacgtggaactgaggac

SEQ ID NO: 361519 - DNA, 201 bp, Homo sapiens
gacacagcctgaatacaggcactaagtttctgtatatgaggcctagcattaaactcagatttgtagggaaagtctgattcatggcatggaaattggaaaasaccttatactgttgtaggtcttgctgggaatatctgcaaggcatggcctgattagaactccaatctgtaagctgccatttacttgctatgcctcatttta

SEQ ID NO: 361520 - DNA, 201 bp, Homo sapiens
tttcctgactcttctcttctgcattacagctcaggactgccacccagtggcctgttagcatagagctctggaaatgctgatttttttctttaatacagccrcagaataagacaataagaaaatatttgcttccttgttggggaaagtaaaatgcagaacttcctatttaccagccaaacaaaagaagaatgcattctctca

SEQ ID NO: 361521 - DNA, 201 bp, Homo sapiens
ttttacttgcatttttctgtcaaatatgatgctaatatttcactaaatatagtttggcaaaatgtgtttgctaaattgttttggtgttagaagtttttcaytttacatttgtatctattcagattttccactgggattatttccattgctattaaatttaaaagtcctctcatatttgatattctattttatacattttca

SEQ ID NO: 361522 - DNA, 201 bp, Homo sapiens
tgtctgcccgcaccaaaagctgtgtcttctgatttgctgtaggttttaaatgcagagtacctatgcctttctctttaaactcattgtctttcttgtaaaayagtttacactttttggagtaaaaagcatcttcttttacttcggtaactactactttgggcggctcatcattctcttcttcatctccacctttgcattcac

SEQ ID NO: 361523 - DNA, 201 bp, Homo sapiens
gataaatcagctcattctgtcttttgctaacttcccatattaaacgagttatcaaatctggtcaattctccttcataaagcactcacaaatccatcactcrtctccagcctcttctgccctggccttaattctgcctctcaaaatttctcacttagactcctgcagtgccccccaacttgtatctgtgcctcccccacaac

SEQ ID NO: 361524 - DNA, 201 bp, Homo sapiens
ttcctattcagccatcttggaaccacctgacacgttttgtcttgataaacatcttaaacaacagaaaacagggttcaagagcaaagaaccggtctgaccayaaatttaccagggtggaattttcccaaccctagtaagcctaagggttctgcaggagaccagggcatatttcagtccttatctcaactgcacaagacagac

SEQ ID NO: 361525 - DNA, 201 bp, Homo sapiens
gtttttctgtgatttttccagcagaggagactccaatctaaatcctgtcatttcagaggaatggaaagcccaattcattaaaacagaaaggaagaagctcytgaactacaaggctcggctggtgaagaacctgcaaccccgaatttattgtccctttgctgggtattttgtggaatctcacccatcagacaagtatggcta

SEQ ID NO: 361526 - DNA, 201 bp, Homo sapiens
ttctatttctgccttagttacctatcaattttatctcctgaaagagttccaatctgctagaatatgtgtttttctgtgatttttccagcagaggagactcyaatctaaatcctgtcatttcagaggaatggaaagcccaattcattaaaacagaaaggaagaagctcctgaactacaaggctcggctggtgaagaacctgc

SEQ ID NO: 361527 - DNA, 201 bp, Homo sapiens
cctcccaaagtgttaggattacaggtgtcagccattatgcccagcctaaaaggactttctctttcagagtgcccctgtctttatttgtagaggttattcartttctttaattacctggcatactttgagtccatccctgagctattctgctatacttttctctatcctttctgtagatctcagcaacctcattcactagaa

SEQ ID NO: 361528 - DNA, 201 bp, Homo sapiens
cagtaacagctctctgaccttctaccctgtatgttctgcgtcctgtctaattcctcaagttccttcactgcctgtcactctgatgcttgctatatatcagyccatcctgctttttgtttcttagacccaaagtgtcaagtgcacacctgccctgggtctttgtgtttgctgtttccatttcctggagtgcagctggccctg

SEQ ID NO: 361529 - DNA, 201 bp, Homo sapiens
agttccacatagtcttttcaggtggaactagttcttgctctactttacttaaggtatattttctttctgtgcaccatttttcttttcttttttttttttttgacagagtcttgccatctcaaaagtgagatggagtgcagtggtgccatctcagctcacagcagcctctgcctcctaggctcaagctatcctcccacctca

SEQ ID NO: 361530 - DNA, 201 bp, Homo sapiens
tctcaaatactgaattaaaaaccaaactgaaattcacagttgttggttttgttgttaaattccaggtggacaaaaatcttcgattcatgatcttgatggayggtgttcatcctgagatggacacttgcattattgtggagtacaaaggtatgtttttatccccattgataacgaaaaatggaaaacattcttaataggaag

SEQ ID NO: 361531 - DNA, 201 bp, Homo sapiens
actccggggaaatcctccactaatgacatggagccttgttctatttctgccttagttacctatcaattttatctcctgaaagagttccaatctgctagaayatgtgtttttctgtgatttttccagcagaggagactccaatctaaatcctgtcatttcagaggaatggaaagcccaattcattaaaacagaaaggaagaa

SEQ ID NO: 361532 - DNA, 201 bp, Homo sapiens
ctttaaggggcggtggaagaagcagcaacttggcaataattccgcagccaacttcgcgtgttcaggcatcctttttctccagtaaaattttgtgcaactcrtctgcatcctcgctggtttttacccgaatcaacatggtgactggcatggtggcattcttctcgtcaattggtggatttggaacacagacgataagaacgt

SEQ ID NO: 361533 - DNA, 201 bp, Homo sapiens
tttgaaaattggtataaattcttctttaaaattatagtagaattcaccagtacacccttctgggcctgatgctttctgttttagaaggttcttagttaccrattcaatttatttaatatatatagtactactcagatagtctatttctttttgtacaagttttggcagattgtgtctttgaatggattggtctgtttcacc

SEQ ID NO: 361534 - DNA, 201 bp, Homo sapiens
gtttgacccttggttaatcggtcctgcttttgcccgtggatggtggttgctccatgagcctccatctgattggctggagaggctgtgccaggcagacctcrtttacatcagtcatctgcactcagaccacctgaggtaatgaagtcctgagcacacaactcctaagctcatgctgcaggaaaggcatcaaatgttctccga

SEQ ID NO: 361535 - DNA, 201 bp, Homo sapiens
agaacgttattcttccctgttcgcgtacatggcatattgggtggaatcagaacattcagcaatatgttgcctaaattggtgtctgcccgcaccaaaagctrtgtcttctgatttgctgtaggttttaaatgcagagtacctatgcctttctctttaaactcattgtctttcttgtaaaacagtttacactttttggagtaa

SEQ ID NO: 361536 - DNA, 201 bp, Homo sapiens
tgtttgtttttcctttgatataatcaattcttctataatcaaataagttcaattatacagactgtatacagaagtccttgtcttggaattcaaactatggrtgttcaagatttcaccttgaatatctatacctctttgtttctccacaggtcataaaatactcaatatagtagactgcaccagacccaatgggggaaggct

SEQ ID NO: 361537 - DNA, 201 bp, Homo sapiens
gtgcagtattagggtgggagtgacatgattttccaggtgccatctgtcaccccttcccttggctaggaaagggaattccctgaccccttgtgcttcccagktgaggcgatgcctcgccctgcttcagctcacacttggtgggctgcacccactgtcctgcccccactgtctgatgagccccagtgagatgaacccggtacc

SEQ ID NO: 361538 - DNA, 201 bp, Homo sapiens; identical to SEQ ID NO: 78102

SEQ ID NO: 361539 - DNA, 201 bp, Homo sapiens
aaataagaataaaaatttgccccagtgcagtaagaaaatgaaaaggcattgaaatgagattcatactgttgttcattaataatatcttcatttcacaggartgcaaaaccacatgaaaatttcaagaattcactgatctgatgcaaaataaaaatttatcattacatcttgaacccaggaagcttacagcaaagagactat

SEQ ID NO: 361540 - DNA, 201 bp, Homo sapiens
gtataagtgggtgaatgaagcagagcagagatgaaggcaatagaaattaagagatcactgtgtgcatttggacattgctgtctcaaggagacttggagtcygaccttttgagttaaaactccagctctgtcacctaccatatgaccttggacaaattattggatctctttgtgttccagatttccatctgtaaaatgaatg

SEQ ID NO: 361541 - DNA, 201 bp, Homo sapiens
tgcacccgctaccgctgcccagcatcttactgtgtatcactagcccagaaaagataaaaattcagagtatggtttctactgaatgtgtgtcatttttgcakatcagatgcccctccctgtgcattcccatagcgcctcgaagtcatctctatcaatcattcatttagtcgtaaggaagtcttgtttgtatatgtgtatccc

SEQ ID NO: 361542 - DNA, 201 bp, Homo sapiens
gctagtctactttgttaaggaaaaccagcttgcacggaggttacagtggacctgtttcttgtttgagtttccagtagttcagtgtcatcccccaggatttrtgtggtttttgcagtggtcaaactggtgaattaaatggagatacgatagagaccatcccctgtgtcctccagctttttaaggatgtcatttctctcagga

SEQ ID NO: 361543 - DNA, 201 bp, Homo sapiens
gacgtgcaccaaactgttagaaccctaaaaattgtgctggcactgcaggccctttaattgcatagggcatgggtcttaccaaagaccgcactgtcctggcyactcctcgttgctcattcagtctgatagcacgatgcccctgatagagtaggctagtgtggtgctttgcaggtgttccacatttattcagactcttataac

SEQ ID NO: 361544 - DNA, 201 bp, Homo sapiens
acatacatgcatcccatgaagacagcgggaaagccctggctcctaaggtaagaaattagtaccttaacctcagcattgttaactcatactctttgtttcaytagaaaaaacagtgttgtctcacccacatcattcattactatcataagaaaatttatgctgttcttgaattttaaaatctctattgcaagagcagaaaac

SEQ ID NO: 361545 - DNA, 201 bp, Homo sapiens
tcttgatttccccaacacagaaacataccacattgttaattgtggttatttatatggctggtgtacctttctttctatatcaggagtcagtaaactctatraaggtccagatagtaaatattttaggctttgcaggcctactcaacgctgctgttatgaataatatgtacacaagtggacttgactgtcttttaataaaac

SEQ ID NO: 361546 - DNA, 201 bp, Homo sapiens
taaaatctctattgcaagagcagaaaactgtttacttccatgtactctttaactagtgtgtgtattttctgaatgtataaagcatgaattttatatagtayggtctttgcttgtcctattcatggaaaagaagaccttttatgttgatattcttggtacattggcctggggaggggtggagaactgtctaggaagtattta

SEQ ID NO: 361547 - DNA, 201 bp, Homo sapiens
tacatgcatagaattactcaaggaaaataaaatgtgaagctctgcattattactccatccataagagcatgaaatagtattattttagatattttatttasctagtctttgtgtccttaaatttaaactttattgtgcattaattatgtatttgggttctctaggtctcggtgattcagaatacacctacttttgcaatgg

SEQ ID NO: 361548 - DNA, 201 bp, Homo sapiens
tgtccttcggacagttattttatttcgttttaattttttccttaagcaaaagcataatcacagatgtctctgtctcatcagtgtgttcaccatttcgtagrcactttacacattctgcctttaacagccctgagccacttttccatagtacaagttcatttattcataaaattgctattaatgttattgaatgtagagctc

SEQ ID NO: 361549 - DNA, 201 bp, Homo sapiens
acattgcataatagctaatttctccccacaggcagtgtatggtaccctgaagtttttctaacctgcttaaaataagtttccagagcaggcagtctttgaaygcagggctaagccctctttctgttgagtggctgtttggagttccacatggacttttcttacaaaaaccacacccttactgcagctattaccagttttaat

SEQ ID NO: 361550 - DNA, 201 bp, Homo sapiens
aagatggaaaatatttcaagcctaagcattttcagtaattcttgaaagagtagcctttaatctttttgggatcatgactttattttaaatctgaaaactgsgcacctccctgcagaaaactgcacatatacctagtaagggtttgctgagctcctcacctctgaagccaacttatggacccattcctagaagcctttgctt

SEQ ID NO: 361551 - DNA, 201 bp, Homo sapiens
acgagatgcctgtgcctgcttgttggatctcctcctcgctttcccttcttgccagccaccactcagtctcctgctcggtgagtagtcgctttcacaagcaycttggtggctgttcgtgcactggtaggcgggccacctttctgtagtaaagaaaatttgctgctcttgtcttaccctttgtatcctatgcctaaagaatat

SEQ ID NO: 361552 - DNA, 201 bp, Homo sapiens
ggccagtggactggagctgatggtgagagtgtggctctaaggttcagggtcctgtgtgttggccgcacagatgcctggggctcagctgcgcatcaaggtcygggaacacaggcatacgctggtattgctagtttcttaactttcatgttaattgcactgaataagaagataatggatgttctaattattggacatttgtgg

SEQ ID NO: 361553 - DNA, 201 bp, Homo sapiens
gtactcaaccactgagtgtacaattctaattctcagactttttcagcttgacaaccttttagtgatccattatatattatatttcagaaaagagctcagayatttccttaagcatgggatcttaactcatctaaaggtttccttctcaagagatgctcctgttggggaggaggaagccccagcaaagtatgtgcaagacaa

SEQ ID NO: 361554 - DNA, 201 bp, Homo sapiens
taatccactagatgtcagtattgtaccaggaactgtttttttaaaactacttgtaactgatttcttctaaccagctcccggaagtggccattaatggatamaatttttcaaatgtgccttgccacacttgtattgtcagtgagcataaagagtgttgtaattaggccgccatctccccagtgtggttttcgtgtcgtttta

SEQ ID NO: 361555 - DNA, 201 bp, Homo sapiens
gaaaataattgaaatgagtgaatagcacgttttccagctttctaaataaagcagaggcatttggtggcaaataattgagtttcccaaatggttccattaasgcagaaatctgacgaggtgaaaatttttctgtttggcaaacaaaagtttctgccactgcattgaggatgggttttgaaagaatcagttctctactgcagt

SEQ ID NO: 361556 - DNA, 201 bp, Homo sapiens
gtcgttttattaatgtgtttattgcatttctagtcttgggtgagtaaagtactttagagagaggctcagctctctaaataaatatatgtatatttatatawatatagatttatatatatatatattccatcttcctttcctggtaatcagctcgagatgtaatttgagtatttagaattaatttactgtaatgaaagctta

SEQ ID NO: 361557 - DNA, 201 bp, Homo sapiens
aaagagttttaatggatactatggatacaccattatttgttgatgtaattatgggcaattgagtcattttcgctttttcactattaaaaaaggcaaacttycttgtactgtattaatttttgaacacttacttgaagtatatttgtaaaacaaattccttggagtagaattgctgttttaaaaatatttacattttaaatt

SEQ ID NO: 361558 - DNA, 201 bp, Homo sapiens
ttgggtgcatccctaggcagacatttaactgaatattctaatagctctacccacaaattgtgtcacaatttaaggcgggctcctttttgtaggcatttttrcgagcccttgtggactataccagtgacagtgctgaaaagcgcaggctacaggagctgtgcagtaaacaaggggcagccgattatagccgctttgtacgag

SEQ ID NO: 361559 - DNA, 201 bp, Homo sapiens
gtaggcatttttgcgagcccttgtggactataccagtgacagtgctgaaaagcgcaggctacaggagctgtgcagtaaacaaggggcagccgattatagcygctttgtacgagatgcctgtgcctgcttgttggatctcctcctcgctttcccttcttgccagccaccactcagtctcctgctcggtgagtagtcgctttc

SEQ ID NO: 361560 - DNA, 201 bp, Homo sapiens
cctgtcgcagtcagatacttgagagaacactggtccaccgagtggatgaaggtcatttccatttttcgaatgaaactttttacaatgggcatgatggaatytgaccccgaaaggctcaggttgtcgtgaacacaaccaagggcacagacgctccttgactaccttgtgaacatgatttagaggtttattttttaaagcagc

SEQ ID NO: 361561 - DNA, 201 bp, Homo sapiens
tctcggtgattcagaatacacctacttttgcaatggggggaagataattgataaacgacttcaagagcttggagcccggcatttctatgacactggacatrcagatgactgtgtagggtaagggcagtgttctctgtttactccaataagccctctatacatgatggaagttgatttgtaaaacatgtcagcttttcactt

SEQ ID NO: 361562 - DNA, 201 bp, Homo sapiens
atccatctctcctcgaacaacaaattctttccacttaccagatgacccctcaatccccatcataatggtgggtccaggaaccggcatagccccgtttattrggttcctacaacataggtatgttctttttttggctaatgggaaaatgtattcctgagtaaccgtttttgtttctttagtcattttgaggataattggact

SEQ ID NO: 361563 - DNA, 201 bp, Homo sapiens; identical to SEQ ID NO: 78162

SEQ ID NO: 361564 - DNA, 201 bp, Homo sapiens
agacatgggccttctttgacattggtgtttgaattagcagctcactgccacacccatcatttccttatcctgtgtaattttgcttcctaagacattgggamgtcattacccatcattctgtggatatatgtgataatgtgtatgtttattttcttttccttccactagaatgtaagttccgtaaagacaggggcgttgttt

SEQ ID NO: 361565 - DNA, 201 bp, Homo sapiens; identical to SEQ ID NO: 78169

SEQ ID NO: 361566 - DNA, 201 bp, Homo sapiens
cagaatagcaaatacagcaccattatctggaatatttggagcagcccctcaatttctttttaaggtgcctgacttttatttaaaatttttcaacctcatcrtgatgctaatctttattgtcttcatatttagggtacatttctccataatatatactattgtctgcccaccagaaagcagatcttatccatagaccaagaa

SEQ ID NO: 361567 - DNA, 201 bp, Homo sapiens
agtttaaagttgtccacaagaatggttgaaataaagcaacatttcaggctttatcatgaagtcctctttcttcatagtaatgaagaaatcagtgattcacktggagtgttgtcttaggagaagtttggtttctttattagagttgaaaggttcatagacctcaatagtggggattaggacttcttgggatatacttgagag

SEQ ID NO: 361568 - DNA, 201 bp, Homo sapiens
ctctctcccttgctggcaagaaatgtgagcttgtgtcattgtgagaggctcctccccagagccctggcctgcatctgtatcactctggggcttagaggcartgggcctagtaatagacttgacttgggaagtggtgactttttcagcccatgtttgctcacaaccagtatcgagccagatagtgtaatgttttatacttaa

SEQ ID NO: 361569 - DNA, 201 bp, Homo sapiens
tttctcattttttcttgggtaattgggtgcatccctaggcagacatttaactgaatattctaatagctctacccacaaattgtgtcacaatttaaggcggrctcctttttgtaggcatttttgcgagcccttgtggactataccagtgacagtgctgaaaagcgcaggctacaggagctgtgcagtaaacaaggggcagcc

SEQ ID NO: 361570 - DNA, 201 bp, Homo sapiens
tagtacagttattcacagattaaccctgccactgatgttcagcctggctgtgtgaacagaaggacatctgccacatctaagcaggagcactaagcctgtgrgcgtggtgtagcttggctctcttcttcctatctgccatgatattctctccacatagaccctcaagtgaagcagtcccacagccttcgaggaagagagccc

SEQ ID NO: 361571 - DNA, 201 bp, Homo sapiens
gctgcaggcataaggatagggattatctattcaggtattgtacaattccagtattgtactcaaccactgagtgtacaattctaattctcagactttttcascttgacaaccttttagtgatccattatatattatatttcagaaaagagctcagacatttccttaagcatgggatcttaactcatctaaaggtttccttct

SEQ ID NO: 361572 - DNA, 201 bp, Homo sapiens
ctccccagtgtggttttcgtgtcgttttattaatgtgtttattgcatttctagtcttgggtgagtaaagtactttagagagaggctcagctctctaaatawatatatgtatatttatatatatatagatttatatatatatatattccatcttcctttcctggtaatcagctcgagatgtaatttgagtatttagaattaa

SEQ ID NO: 361573 - DNA, 201 bp, Homo sapiens
tgaatgaatcctttacatgaagatccttagggcatattagattttataaatatcatctagtcctagtgcaagcaaataaaattggaaactttcttgaatawcaaaatgtagggtgtgagagtgtgaaggttgggggcagtttttaattacgtaataatggctttcctctgtgaggatttggaaggtagattagagcctata

SEQ ID NO: 361574 - DNA, 201 bp, Homo sapiens
ttatttaggattgattaaacaaatttagaatatgccctttgcagtcttaaaaaatgtgatcttgatagcatgtttttaatattagttcccaagggtgtgtrctatcatcgtaactatcatctatgaatctttttatgttgtatttgcatttaaatttttgttttctattgaaatgagggcttaaatagggctttttcttag

SEQ ID NO: 361575 - DNA, 201 bp, Homo sapiens
atgaaatagtattattttagatattttatttacctagtctttgtgtccttaaatttaaactttattgtgcattaattatgtatttgggttctctaggtctyggtgattcagaatacacctacttttgcaatggggggaagataattgataaacgacttcaagagcttggagcccggcatttctatgacactggacatgcag

SEQ ID NO: 361576 - DNA, 201 bp, Homo sapiens
caaataaaattggaaactttcttgaataacaaaatgtagggtgtgagagtgtgaaggttgggggcagtttttaattacgtaataatggctttcctctgtgmggatttggaaggtagattagagcctataaggaaatatttctaaactgaataaaaggattggtttgacccatatgtgtagtagtactgatatcgagttcaa

SEQ ID NO: 361577 - DNA, 201 bp, Homo sapiens
tcatttttaggataaaggagctgtggtacggatcatttggggagcttgtctacagggttgcacttaggaaacacagattcaagcccaagtagtttcgagcsgatcatctgatttctgagccatggaattagagtttcattcgtacactctccttaatttgatgaattcttatttaggctcatttgagattagtgctgaaaa

SEQ ID NO: 361578 - DNA, 201 bp, Homo sapiens
aaaaatgtgatcttgatagcatgtttttaatattagttcccaagggtgtgtgctatcatcgtaactatcatctatgaatctttttatgttgtatttgcatktaaatttttgttttctattgaaatgagggcttaaatagggctttttcttagtctaaatagggctttttctttgtcttacttttactagttattaactacg

SEQ ID NO: 361579 - DNA, 201 bp, Homo sapiens; identical to SEQ ID NO: 78146

SEQ ID NO: 361580 - DNA, 201 bp, Homo sapiens; identical to SEQ ID NO: 78147

SEQ ID NO: 361581 - DNA, 201 bp, Homo sapiens; identical to SEQ ID NO: 78148

SEQ ID NO: 361582 - DNA, 201 bp, Homo sapiens
catagtagagtcttgtctgacacttcgcttcattcagcaaacacctgagtgctggctaagtgcttggggcatattcagatgtcgatagatacgaggatatrttagtttttctgttgaggaatacctgagactaaagaaaagagatttaatgggctcacggtttaggctgtagaggaaacatggtgccggcacctgcttctg

SEQ ID NO: 361583 - DNA, 201 bp, Homo sapiens
gtgctttacttgtcacatttgtgaaatgcacttggaagcattaatagcagtggtcagagggctcagaaggaaaccctggggcacttgaacattgatcgtcygtcagggaagcaggaacaaagtagacagaaggaacagccactgaagaagcaaaattgtcccaaagccaagagggtgctgtttcagagagggagcctgtac

SEQ ID NO: 361584 - DNA, 201 bp, Homo sapiens
tcggtggtcaaatacaggctggagttttagagatgcacctctaaatagtagaggcagagttcattgtacagatcacagatatctggtcattgagaacttgragaatatcttaaatgtccagactcctaaaacattattccagaaatagctcctcccaatcactggtgctttacttgtcacatttgtgaaatgcacttggaa

SEQ ID NO: 361585 - DNA, 201 bp, Homo sapiens
cattcctaggatttaacacattctctaagtcaggttcttttttttttcaactgtaatgtagaagacaaaatactggcatcgtgacccagaacatatggatraagataattgaaacaagtttcatgaaacaaagcaacgttttctgtttagtttttataacacattctgatcatttctcttccattttatttagtttgcttt

SEQ ID NO: 361586 - DNA, 201 bp, Homo sapiens
atctaaaggtttccttctcaagagatgctcctgttggggaggaggaagccccagcaaagtatgtgcaagacaacatccagcttcatggccagcaggtggcragaatcctcctccaggagaacggccatatttatgtgtgtgggtgagtcattatcgtgcctaagtcgggtaggagagggccatcagtgatgtctgtagaag

SEQ ID NO: 361587 - DNA, 201 bp, Homo sapiens
agctcagacatttccttaagcatgggatcttaactcatctaaaggtttccttctcaagagatgctcctgttggggaggaggaagccccagcaaagtatgtrcaagacaacatccagcttcatggccagcaggtggcgagaatcctcctccaggagaacggccatatttatgtgtgtgggtgagtcattatcgtgcctaagt

SEQ ID NO: 361588 - DNA, 201 bp, Homo sapiens
ttttttttccacttagagagaaactccaagaacaacacccagatggaaattttggagcaatgtggttgttttttggctgcaggcataaggatagggattayctattcaggtattgtacaattccagtattgtactcaaccactgagtgtacaattctaattctcagactttttcagcttgacaaccttttagtgatccatt

SEQ ID NO: 361589 - DNA, 201 bp, Homo sapiens
tccttcggacagttattttatttcgttttaattttttccttaagcaaaagcataatcacagatgtctctgtctcatcagtgtgttcaccatttcgtagacrctttacacattctgcctttaacagccctgagccacttttccatagtacaagttcatttattcataaaattgctattaatgttattgaatgtagagctctc

SEQ ID NO: 361590 - DNA, 201 bp, Homo sapiens
tagatactatttgtcagatagtagagtcctgtccttcggacagttattttatttcgttttaattttttccttaagcaaaagcataatcacagatgtctctstctcatcagtgtgttcaccatttcgtagacactttacacattctgcctttaacagccctgagccacttttccatagtacaagttcatttattcataaaat

SEQ ID NO: 361591 - DNA, 201 bp, Homo sapiens
tgatatgaaataagtaaaataaaattgtacttctgtttatatttgtgaagtaatgagcaagtcttagatactatttgtcagatagtagagtcctgtccttyggacagttattttatttcgttttaattttttccttaagcaaaagcataatcacagatgtctctgtctcatcagtgtgttcaccatttcgtagacacttta

SEQ ID NO: 361592 - DNA, 201 bp, Homo sapiens
tttctccccacaggcagtgtatggtaccctgaagtttttctaacctgcttaaaataagtttccagagcaggcagtctttgaatgcagggctaagccctctwtctgttgagtggctgtttggagttccacatggacttttcttacaaaaaccacacccttactgcagctattaccagttttaatttcttgttttttttaatg

SEQ ID NO: 361593 - DNA, 201 bp, Homo sapiens
agctttatttaggattgattaaacaaatttagaatatgccctttgcagtcttaaaaaatgtgatcttgatagcatgtttttaatattagttcccaagggtrtgtgctatcatcgtaactatcatctatgaatctttttatgttgtatttgcatttaaatttttgttttctattgaaatgagggcttaaatagggctttttc

SEQ ID NO: 361594 - DNA, 201 bp, Homo sapiens
tttgcagctcaagtttatttcacccaggaaagctccattttgtcttcaacattgtggaatttctgtctactgccacaacagaggttctgcggaagggagtrtgtacaggctggctggccttgttggttgcttcagttcttcagccaaacatacatgcatcccatgaagacagcgggaaagccctggctcctaaggtaagaa

SEQ ID NO: 361595 - DNA, 201 bp, Homo sapiens
ccacaacagaggttctgcggaagggagtatgtacaggctggctggccttgttggttgcttcagttcttcagccaaacatacatgcatcccatgaagacagygggaaagccctggctcctaaggtaagaaattagtaccttaacctcagcattgttaactcatactctttgtttcattagaaaaaacagtgttgtctcaccc

SEQ ID NO: 361596 - DNA, 201 bp, Homo sapiens
cagccaaacatacatgcatcccatgaagacagcgggaaagccctggctcctaaggtaagaaattagtaccttaacctcagcattgttaactcatactcttkgtttcattagaaaaaacagtgttgtctcacccacatcattcattactatcataagaaaatttatgctgttcttgaattttaaaatctctattgcaagagc

SEQ ID NO: 361597 - DNA, 201 bp, Homo sapiens
acactgggaaccacattttaacataaagatttggagagggcacacatccaaactggatcagaggataagtgagttacacttcctaccctcaaacaacttaytccctggtgagaaagctacatataaacagacgtttctaacgtcggaagtgttccagagaggactgcaagagcacccaggaggggtaccgcccccttcttg

SEQ ID NO: 361598 - DNA, 201 bp, Homo sapiens
gtaaggtggagttttttactgtattcattttggggaatttttttggctgaataaacattgccacaagtcatgttgcactttgatgcgctgtaaagtactamagtaattgtgttttggggagtgtgtaaaacattttattcttcatcttctatgtcatgaacccctttcccgtctttacctgaaaaggagctaccttacccc

SEQ ID NO: 361599 - DNA, 201 bp, Homo sapiens
aatactgagtagccaggaagttttgtaagcccctgtggatcttgcgtagtcactaattgaaagaagggtataattgaaaattgcacttacgttttgtcacrtttgtttttcaaggaggaaagccaagtatctgtgacttcagcagatccagtttttcaagtgccaatttcaaaggcagttcaacttactacgaatgatgcc

SEQ ID NO: 361600 - DNA, 201 bp, Homo sapiens
ttgcatttaaatttttgttttctattgaaatgagggcttaaatagggctttttcttagtctaaatagggctttttctttgtcttacttttactagttattractacgtagcacattccacagtgatggaggtgactgcagttgaccttgtgttacccagctacacattgctgctccttctttaattggtgacagaaagcta

SEQ ID NO: 361601 - DNA, 201 bp, Homo sapiens
gttcctacaacataggtatgttctttttttggctaatgggaaaatgtattcctgagtaaccgtttttgtttctttagtcattttgaggataattggacttygtaaaatttttatttaaaaaattattattcaatgtgcgataacataatttgtcaccatgggaaaagtaaacacaatgttgtagagattgtgctttgtact

SEQ ID NO: 361602 - DNA, 201 bp, Homo sapiens
ccaggaaccggcatagccccgtttattgggttcctacaacataggtatgttctttttttggctaatgggaaaatgtattcctgagtaaccgtttttgtttytttagtcattttgaggataattggactttgtaaaatttttatttaaaaaattattattcaatgtgcgataacataatttgtcaccatgggaaaagtaaac

SEQ ID NO: 361603 - DNA, 201 bp, Homo sapiens
cgtcattacttcctacagtcgtccttgagttaaaagttaaaatgtatacagttacaccaccatgcaaggtggaggggaatcctgtcattcttaaatcttgrtatcagtatgacttttgcatatgacagtgaaactggaagtgaaacatactcagattgattcagaaatatcttttgaaattttaacaaaaagattttgata

SEQ ID NO: 361604 - DNA, 201 bp, Homo sapiens
gatatgaaggatataatttaaaactatctgaaattacctgtgcttgtgttgtgttttattacaaattatacagaatgttgacttttgcaagacctatcacmcaccctgccctactatggcggatagtacagttattcacagattaaccctgccactgatgttcagcctggctgtgtgaacagaaggacatctgccacatct

SEQ ID NO: 361605 - DNA, 201 bp, Homo sapiens
ttgactggatggcattcattaagtgaacatgaatgaagaagtttcaataatgatttgggtggaaaataattgaaatgagtgaatagcacgttttccagctktctaaataaagcagaggcatttggtggcaaataattgagtttcccaaatggttccattaacgcagaaatctgacgaggtgaaaatttttctgtttggcaa

SEQ ID NO: 361606 - DNA, 201 bp, Homo sapiens
aacagtttaaagttgtccacaagaatggttgaaataaagcaacatttcaggctttatcatgaagtcctctttcttcatagtaatgaagaaatcagtgattsacttggagtgttgtcttaggagaagtttggtttctttattagagttgaaaggttcatagacctcaatagtggggattaggacttcttgggatatacttga

SEQ ID NO: 361607 - DNA, 201 bp, Homo sapiens
cctaaggtaagaaattagtaccttaacctcagcattgttaactcatactctttgtttcattagaaaaaacagtgttgtctcacccacatcattcattactrtcataagaaaatttatgctgttcttgaattttaaaatctctattgcaagagcagaaaactgtttacttccatgtactctttaactagtgtgtgtattttc

SEQ ID NO: 361608 - DNA, 201 bp, Homo sapiens
gccttcattccattgcacagcctctaccgttttcccgtctggctctctgttttgcctttcagtaataatacaagaaggtgcaccattcttttggttgaaargggaattaagaatgaactcaagttctttcgcattatttaccgtgtaatgtgaaaagaaatctacttttgtagggatgtcttttaaagatgtttttacttt

SEQ ID NO: 361609 - DNA, 201 bp, Homo sapiens
ctctcaggaagggattgaaaatgcttgctaggggtgaagactaagcgctttataggacttcaaagcctttattactttcttgtgcttgtaactttgtcatstcctttcccatagtggtaagtagttatgcctttaacatttgcatttttctttggtgacaccaaaatgtatattgtcctttttactcttgggccagcaaga

SEQ ID NO: 361610 - DNA, 201 bp, Homo sapiens
gggcttttgtaaaaaatgtgtcatggtgcccaaaatatatgaacgcctccaagactctcctaagctcctcgttagtgaaatgtgggacatgcctcacgacrtatttgcccaattttataatcagaggaaatgcttgactttgatcaagaaccaccagggcagtgagcatttggctaatcaatttaggactcaggttggaaa

SEQ ID NO: 361611 - DNA, 201 bp, Homo sapiens
atttaaactttattgtgcattaattatgtatttgggttctctaggtctcggtgattcagaatacacctacttttgcaatggggggaagataattgataaaygacttcaagagcttggagcccggcatttctatgacactggacatgcagatgactgtgtagggtaagggcagtgttctctgtttactccaataagccctct

SEQ ID NO: 361612 - DNA, 201 bp, Homo sapiens
atatgcttagctttatttaggattgattaaacaaatttagaatatgccctttgcagtcttaaaaaatgtgatcttgatagcatgtttttaatattagttcscaagggtgtgtgctatcatcgtaactatcatctatgaatctttttatgttgtatttgcatttaaatttttgttttctattgaaatgagggcttaaatagg

SEQ ID NO: 361613 - DNA, 201 bp, Homo sapiens
tgtgtcacaatttaaggcgggctcctttttgtaggcatttttgcgagcccttgtggactataccagtgacagtgctgaaaagcgcaggctacaggagctgygcagtaaacaaggggcagccgattatagccgctttgtacgagatgcctgtgcctgcttgttggatctcctcctcgctttcccttcttgccagccaccact

SEQ ID NO: 361614 - DNA, 201 bp, Homo sapiens
gtatctttgcagctcaagtttatttcacccaggaaagctccattttgtcttcaacattgtggaatttctgtctactgccacaacagaggttctgcggaagrgagtatgtacaggctggctggccttgttggttgcttcagttcttcagccaaacatacatgcatcccatgaagacagcgggaaagccctggctcctaaggt

SEQ ID NO: 361615 - DNA, 201 bp, Homo sapiens
tgggcgtcgtgggcctccgtagcaaacgcggggcgggagcacgactcagggcggcgcaatgtgattggcccaggtccccttcggagctttctattggtccygggtaccgagcatgggcgctgcgtcagtgcgcgctggcgcaaggttggtggaagtcgcgttgtgcaggttcgtgcccggctggcgcggcgtgggtaagct

SEQ ID NO: 361616 - DNA, 201 bp, Homo sapiens
cttctttaattggtgacagaaagctaatgagagcgtaggattccccccaaccaccacttgccacttcctacagttgttaagatctactttgtgtaatactmcataactatttattgctgtaacagaaagcttcaggaaaaatggaagggttttggtaggtaataatcaattattatgtgaacttggaggtagaataatcca

SEQ ID NO: 361617 - DNA, 201 bp, Homo sapiens
tgccctaacagtgattctgaggtacaaagcctactccaaagactgcagcttgaagataaaagagagcactgcgtccttttgaaaataaaggcagacacaargaagaaaggtaacagccctgatgctgtgacgttggggtgttgtgggccagtggactggagctgatggtgagagtgtggctctaaggttcagggtcctgtg

SEQ ID NO: 361618 - DNA, 201 bp, Homo sapiens
gaattgagcttctcttctgaaaagctagctccatatatctgccctcattcatttaccttggaaatgaatactgagtagccaggaagttttgtaagcccctrtggatcttgcgtagtcactaattgaaagaagggtataattgaaaattgcacttacgttttgtcacatttgtttttcaaggaggaaagccaagtatctgtg

SEQ ID NO: 361619 - DNA, 201 bp, Homo sapiens
taaatcaagaatctgtatatttcaggatggaaagagttttaatggatactatggatacaccattatttgttgatgtaattatgggcaattgagtcattttygctttttcactattaaaaaaggcaaacttccttgtactgtattaatttttgaacacttacttgaagtatatttgtaaaacaaattccttggagtagaatt

SEQ ID NO: 361620 - DNA, 201 bp, Homo sapiens
tcctgtgaccatctacacacatgttgcattcttaaacatctgtcacattcttcaagatctctccttcctgaaacatttgcagacattctgtttcccttgaygtagtttattaggaaaactactagatctttacatgaacatgccagtatttttattttctatttgtatttcagaaattctaatgtctaatagataaagcgt

SEQ ID NO: 361621 - DNA, 201 bp, Homo sapiens
aaggaggtgtgggcaggggtaaggtgtgacctaagaatgctgaagtgtttctttcaggtggcagaggtagtcattgtcagcactgccatagcctttgcagraggcagtcttcttaggggtacatctcagtacccccacattatggctcccagacacccagaactgaccttcatcccagctttcccatatagccacttatcc

SEQ ID NO: 361622 - DNA, 201 bp, Homo sapiens
ttttatttcgttttaattttttccttaagcaaaagcataatcacagatgtctctgtctcatcagtgtgttcaccatttcgtagacactttacacattctgsctttaacagccctgagccacttttccatagtacaagttcatttattcataaaattgctattaatgttattgaatgtagagctctctctagatctcacagt

SEQ ID NO: 361623 - DNA, 201 bp, Homo sapiens
cttcagagttgtcctgagttggaacgaagaggctggacctttgtagtctttgatgagacattggatgtgggttgcctctgaaaggaggtgtgggcaggggyaaggtgtgacctaagaatgctgaagtgtttctttcaggtggcagaggtagtcattgtcagcactgccatagcctttgcagaaggcagtcttcttaggggt

SEQ ID NO: 361624 - DNA, 201 bp, Homo sapiens
ggctttctctgccttcactgtcatgggctgcatgagatgactgtgtctttctaagctcctgaggatgtcccctggcttagttctattttagttttacttasttcttaattggtgatttgtcctttaagctttttgcattttttttcaagtgcgagtgaattttagcagtagccccccaagtcccaccagtcttctcttctg

SEQ ID NO: 361625 - DNA, 201 bp, Homo sapiens
catgtgccttgctgtcatagatgagctatgctgatgctttgggtccctgggtaacaacattcatttgaaccccctcttaacagaccctggaatgtttgcayattccccttagcccagtgtacatttcccctttgggagaaggactgcagaagccattgtcaagtacagtttctatagtgtctcacagtccctcctcctagg

SEQ ID NO: 361626 - DNA, 201 bp, Homo sapiens
ctcccaggtatggaatgtgctacccacagatcctgaagagacttagcagtggttctgcttctctctagaagtgaggtacaaggtgcactagtgtggccttyacttgggaggggatgtcctgacgtgcaccaaactgttagaaccctaaaaattgtgctggcactgcaggccctttaattgcatagggcatgggtcttacca

SEQ ID NO: 361627 - DNA, 201 bp, Homo sapiens; identical to SEQ ID NO: 78165

SEQ ID NO: 361628 - DNA, 201 bp, Homo sapiens
ttctctgacacctaggaaatccttggcctactgtcgggacctggagcctgtggaggattgggagctgtagaaccgtgtggtcagctctgtctcctagaacrgtcactgtaggcaaaggcctggcctgggcatgagtgaggctgggagatctgtgtgagatgttctgagaagacggagggaagaactatggtggtacagtca

SEQ ID NO: 361629 - DNA, 201 bp, Homo sapiens
tacttttttccaactgtcagaatttataaccaactcaccttgcagccgttgaaggaaaagaggcttgaatatttttgccagaaagttgactggatggcatycattaagtgaacatgaatgaagaagtttcaataatgatttgggtggaaaataattgaaatgagtgaatagcacgttttccagctttctaaataaagcaga

SEQ ID NO: 361630 - DNA, 201 bp, Homo sapiens
ggcaagagagggagcaagaggcagggggaggtgccacacactcaaatagccagatctctcaggaactcagagggagaactcactcattacagcgagcatarcatcaagccattcatgaggcatctgcccccatgacccagacgcctcccaccaagccccacttctaacactgggaaccacattttaacataaagatttgga

SEQ ID NO: 361631 - DNA, 201 bp, Homo sapiens
tctttttaaggtgcctgacttttatttaaaatttttcaacctcatcgtgatgctaatctttattgtcttcatatttagggtacatttctccataatatatrctattgtctgcccaccagaaagcagatcttatccatagaccaagaaacatgatttgattatctatttagagttctacctcaaagacaccatgcctatcat

SEQ ID NO: 361632 - DNA, 201 bp, Homo sapiens
ctcaccctcttcagtgaagtcttcgagaaccatcagcaggaataggatgacagaacacagggtggggagttctaagtagtattagaaagttctcttatcgyatactaatttatttcaattcttttcgtagattttttgttaccttttagaatgttagaatgtttgtaacaataccacattacgtagttatataaaaaaatt

SEQ ID NO: 361633 - DNA, 201 bp, Homo sapiens
cgatgcccagtacaattaaaggcacccttctttgcaagtcagggcctgatttctcctcctttttcttagtgttttttccacttaggacctccccaaaatgstaagaccgtgttgctgaatgaggctgctcttctcaccatcctgtcctcaggctggccctctcaccctcttcagtgaagtcttcgagaaccatcagcagga

SEQ ID NO: 361634 - DNA, 201 bp, Homo sapiens
acctttctgtagtaaagaaaatttgctgctcttgtcttaccctttgtatcctatgcctaaagaatatatctaaatgaatggtggtgattggtaagtaaacrtcttatatcttgtcttcagggtgctgtgacatctgtgtgcccttccagaagtcacagaattccccttccagacttttggttttcttttttttccttccag

SEQ ID NO: 361635 - DNA, 201 bp, Homo sapiens
tactatagtatactattgatatctctggtatctgaattatctttcagaactatgaagtgtgatcatataggttttgtctttcttatgtaaatattatgtatatgtatatataaatgtatgtaatgtgctaccttttctgaatcttccccagactttaccccagagccacacctctgcagaacctcttgagtagcattttaa

SEQ ID NO: 361636 - DNA, 201 bp, Homo sapiens
ctatagtatactattgatatctctggtatctgaattatctttcagaactatgaagtgtgatcatataggttttgtctttcttatgtaaatattatgtatatgtatatataaatgtatgtaatgtgctaccttttctgaatcttccccagactttaccccagagccacacctctgcagaacctcttgagtagcattttaatt

SEQ ID NO: 361637 - DNA, 201 bp, Homo sapiens
tatagtatactattgatatctctggtatctgaattatctttcagaactatgaagtgtgatcatataggttttgtctttcttatgtaaatattatgtatatgtatatataaatgtatgtaatgtgctaccttttctgaatcttccccagactttaccccagagccacacctctgcagaacctcttgagtagcattttaatta

SEQ ID NO: 361638 - DNA, 201 bp, Homo sapiens
atagtatactattgatatctctggtatctgaattatctttcagaactatgaagtgtgatcatataggttttgtctttcttatgtaaatattatgtatatgtatatataaatgtatgtaatgtgctaccttttctgaatcttccccagactttaccccagagccacacctctgcagaacctcttgagtagcattttaattaa

SEQ ID NO: 361639 - DNA, 201 bp, Homo sapiens
tctctagaatacagacttttcctatcagcctggagatgccttcagcgtgatctgccctaacagtgattctgaggtacaaagcctactccaaagactgcagsttgaagataaaagagagcactgcgtccttttgaaaataaaggcagacacaaggaagaaaggtaacagccctgatgctgtgacgttggggtgttgtgggcc

SEQ ID NO: 361640 - DNA, 201 bp, Homo sapiens
atactattgatatctctggtatctgaattatctttcagaactatgaagtgtgatcatataggttttgtctttcttatgtaaatattatgtatatgtatatataaatgtatgtaatgtgctaccttttctgaatcttccccagactttaccccagagccacacctctgcagaacctcttgagtagcattttaattaaggatg

SEQ ID NO: 361641 - DNA, 201 bp, Homo sapiens
actattgatatctctggtatctgaattatctttcagaactatgaagtgtgatcatataggttttgtctttcttatgtaaatattatgtatatgtatatataaatgtatgtaatgtgctaccttttctgaatcttccccagactttaccccagagccacacctctgcagaacctcttgagtagcattttaattaaggatgca

SEQ ID NO: 361642 - DNA, 201 bp, Homo sapiens
ctattgatatctctggtatctgaattatctttcagaactatgaagtgtgatcatataggttttgtctttcttatgtaaatattatgtatatgtatatataaatgtatgtaatgtgctaccttttctgaatcttccccagactttaccccagagccacacctctgcagaacctcttgagtagcattttaattaaggatgcac

SEQ ID NO: 361643 - DNA, 201 bp, Homo sapiens
tattttgtttcattatatctgctacttttatattgtaaaatagaagaaaactgcctacatgcatagaattactcaaggaaaataaaatgtgaagctctgcattattactccatccataagagcatgaaatagtattattttagatattttatttacctagtctttgtgtccttaaatttaaactttattgtgcattaatta

SEQ ID NO: 361644 - DNA, 201 bp, Homo sapiens
ctgttcgagtcaatgttaggcctaagcgtggaaccactcatttctcacccttttgtagagaaagaacatggagatgcctgcacaactgagggatttaagctttttttttttttttttttttacaccatgagacatagaagcaattcttgatttccccaacacagaaacataccacattgttaattgtggttatttatatgg

SEQ ID NO: 361645 - DNA, 201 bp, Homo sapiens
tacctttctgccatgtggaagtattacctctaataaccagagggtcttctgggttgtgtggtagagcggcaggacctgttaacgagcactgtcacttggayctgctgtagagccctctcctgctctgggccccacgcaaagctggtggccttttctgtcacctggtatttgggtctcagcagtcctcccaggtatggaatg

SEQ ID NO: 361646 - DNA, 201 bp, Homo sapiens
ctcaacgctgctgttatgaataatatgtacacaagtggacttgactgtcttttaataaaactttatttacaaagaaaggcagtgcatggtatttgtcccaraagctatggttggctgacccctgctcagtatcagaaaaaatgtacagatgacagatattgtggttttgcaacctgtctgatccttgttttaagatttcta

SEQ ID NO: 361647 - DNA, 201 bp, Homo sapiens
aacaaaggcctcagtcagctcctctccatatggtacctttctgccatgtggaagtattacctctaataaccagagggtcttctgggttgtgtggtagagcrgcaggacctgttaacgagcactgtcacttggatctgctgtagagccctctcctgctctgggccccacgcaaagctggtggccttttctgtcacctggtat

SEQ ID NO: 361648 - DNA, 201 bp, Homo sapiens
tatatatatatatatatatatatatatatatatatatatatatgggtttttttcaaaaatagtatgctcattggaaaaattctggatacagaaataacccrggaaaccaaagtattttataatcaaaccctctgagttaacacttgaattttgttttcctgaggaaaatatgggtatccatattatatgtgctgttccata

SEQ ID NO: 361649 - DNA, 201 bp, Homo sapiens; identical to SEQ ID NO: 78157

SEQ ID NO: 361650 - DNA, 201 bp, Homo sapiens; identical to SEQ ID NO: 78159

SEQ ID NO: 361651 - DNA, 201 bp, Homo sapiens
ctttgagtcctcacttacccgttcggtacccccactctcacaagcctctctgaatattcctggtttacccccagaatatttacaggtacatctgcaggagwctcttggccaggtaaggaagtttttctttatgctatagatgctatttaatcatggatgtttgctttgggcttttaaattattattacattagaagagagg

SEQ ID NO: 361652 - DNA, 201 bp, Homo sapiens
tatcttcttaaaataaagtttaccaattctggaatattaggaggaattctattcctgtcatcctattactagaatatcttcctatccctcttcatttcttytacctttatacatactcatgttttcagctacggtgctaatgaacacataatatatcctgcttgttaaaacttaatcatgaagtattttttgtattccgaa

SEQ ID NO: 361653 - DNA, 201 bp, Homo sapiens
accatattcgtgtgcaaggtactactatttattcacgtaatatatagcattgtttctccaaaatcttagactcaggcttccagatcattagagtttactartttattcagtgaaaacttacctgctttatggaagacagtaccaggcataataaagcagaagaagaatcatagagctcctgtcctctgggacttcatagaa

SEQ ID NO: 361654 - DNA, 201 bp, Homo sapiens
gcattaatccatagtgatttcttggtgatattttaatctgtaggaaacagatcagtagatcagtaaattggctaggcaaaaaaaaaaaaaaaaaaggtgcwtttgatggatggaatgagcatttgcagcattatggtagccttggattttggttaagttctgttagcattagtatgcctatttaaaattatatcttcttaa

SEQ ID NO: 361655 - DNA, 201 bp, Homo sapiens
acttgagtccaatacctgggttcaaatccttgatcccccacttactgactgagatcttggttgaattagttaagctttttgttccttggtttttgcctctrtgcaatagataacagtaatctatttactgtgtaagcttcgtaggagggtcaaacggattaatacatgtcgtcctcttagaagagtgcctgtcgtcatgta

SEQ ID NO: 361656 - DNA, 201 bp, Homo sapiens
accagatgacccctcaatccccatcataatggtgggtccaggaaccggcatagccccgtttattgggttcctacaacataggtatgttctttttttggctratgggaaaatgtattcctgagtaaccgtttttgtttctttagtcattttgaggataattggactttgtaaaatttttatttaaaaaattattattcaatg

SEQ ID NO: 361657 - DNA, 201 bp, Homo sapiens
ttatgtgaacttggaggtagaataatccactagatgtcagtattgtaccaggaactgtttttttaaaactacttgtaactgatttcttctaaccagctccyggaagtggccattaatggataaaatttttcaaatgtgccttgccacacttgtattgtcagtgagcataaagagtgttgtaattaggccgccatctcccca

SEQ ID NO: 361658 - DNA, 201 bp, Homo sapiens
tatgaatctttttatgttgtatttgcatttaaatttttgttttctattgaaatgagggcttaaatagggctttttcttagtctaaatagggctttttcttwgtcttacttttactagttattaactacgtagcacattccacagtgatggaggtgactgcagttgaccttgtgttacccagctacacattgctgctccttc

SEQ ID NO: 361659 - DNA, 201 bp, Homo sapiens
tgtagaaccgtgtggtcagctctgtctcctagaacggtcactgtaggcaaaggcctggcctgggcatgagtgaggctgggagatctgtgtgagatgttctsagaagacggagggaagaactatggtggtacagtcaaaaggaattagacttgtgaattaaggaggatttactaaaaatgcctgtttgtaagcagtcatctt

SEQ ID NO: 361660 - DNA, 201 bp, Homo sapiens
tgccacatttaaaaaatctatttatgatgaattcaactttcccaaaggagggttgctttttttttctcctgttgtcagcctccctgggaattttactaaartaaaaaaataaataaaggctttaactatttatttagtccaaggacttggcattaatccatagtgatttcttggtgatattttaatctgtaggaaacagat

SEQ ID NO: 361661 - DNA, 201 bp, Homo sapiens
tgtcaggatgtgcagaaagagttgtgtggtgcttggttatatatgctgagtggtgtgctgcttggttacatatgctgagttgtgtgcggcttggttacatrtgctgagttgtgtggtgcttggttacatatgctgagttgtgtggtgcttggttacatatgctgagttgtgtggtgcttggttacatatgctgagttgtgt

SEQ ID NO: 361662 - DNA, 201 bp, Homo sapiens
ttttctgagttcacatattaaaatcataatattgaaaactatatttttgttaccctacagcttaaactatgtaacacgtataatgtatttttttttttttcattttggctcttctctagaatacagacttttcctatcagcctggagatgccttcagcgtgatctgccctaacagtgattctgaggtacaaagcctactcc

SEQ ID NO: 361663 - DNA, 201 bp, Homo sapiens
taattttcctttcttttatttggcctatcttgaatttatagtcttcttatgtttttgtaaggtggagttttttactgtattcattttggggaatttttttggctgaataaacattgccacaagtcatgttgcactttgatgcgctgtaaagtactacagtaattgtgttttggggagtgtgtaaaacattttattcttcat

SEQ ID NO: 361664 - DNA, 201 bp, Homo sapiens
gatgtcagtattgtaccaggaactgtttttttaaaactacttgtaactgatttcttctaaccagctcccggaagtggccattaatggataaaatttttcaratgtgccttgccacacttgtattgtcagtgagcataaagagtgttgtaattaggccgccatctccccagtgtggttttcgtgtcgttttattaatgtgtt

SEQ ID NO: 361665 - DNA, 201 bp, Homo sapiens
taaacttgttttcacaaaggctcctcagggcagctctaatgtgtaaccacattttgagtagtgtaccacatgagcacctcccgagcacagtgaaatgacarcctgagtcataatgacacacgggcctgaaatctgcctcctcttggtattcatttcgctttaggaattagaatttaattgatcctcctttgagctgtgatt

SEQ ID NO: 361666 - DNA, 201 bp, Homo sapiens
gccggaggcaggggagacagaaaagttccactataaaacatttgatgagtccgggcgtggtgactcactcctgtaatcccagcactttgggaggccgaggygggcggatcatgaggtcaggagatcaagaccatcctggctaacacggtgaaaccccgtctctactaaaaatacaaaaaattagccgggcgtggtggcagg

SEQ ID NO: 361667 - DNA, 201 bp, Homo sapiens
agacagtctcattttatgtttaagatgtatactgcctctcaaataagtagttttacattgggagtctgagggcaactaaagattaattttatattgtccarttttggctagtagggtccccgcatccctgtttttctgcttttgttatctgtggtgtctgacatctgaacttgtgccattattgagaagacatatggctgt

SEQ ID NO: 361668 - DNA, 201 bp, Homo sapiens
tgaacccgggaggcggagcttgcagtgagccaagatcgagccactgcactccagcctgggcgacagtgataccctgtctcaaaaaaataaaaaaaaagaayatttgatgagcactggcttataggattctccctgtggccttcattccattgcacagcctctaccgttttcccgtctggctctctgttttgcctttcagta

SEQ ID NO: 361669 - DNA, 201 bp, Homo sapiens
agtgtggctctaaggttcagggtcctgtgtgttggccgcacagatgcctggggctcagctgcgcatcaaggtccgggaacacaggcatacgctggtattgstagtttcttaactttcatgttaattgcactgaataagaagataatggatgttctaattattggacatttgtggacatgaaaactgagtgtaaatgtagtt

SEQ ID NO: 361670 - DNA, 201 bp, Homo sapiens
gattttcaacctaactaccttacttgaatttttcctttttctgaaatgaagatattttcaagacattcttgcttgatgtgccaccacactaaatggggttrcgaatgcacacttgagtccaatacctgggttcaaatccttgatcccccacttactgactgagatcttggttgaattagttaagctttttgttccttggtt

SEQ ID NO: 361671 - DNA, 201 bp, Homo sapiens
cctttaacatttgcatttttctttggtgacaccaaaatgtatattgtcctttttactcttgggccagcaagatccttttcgatgcccagtacaattaaagrcacccttctttgcaagtcagggcctgatttctcctcctttttcttagtgttttttccacttaggacctccccaaaatggtaagaccgtgttgctgaatga

SEQ ID NO: 361672 - DNA, 201 bp, Homo sapiens
aatgtaatgcttgtgtcatccattaggcccatcactcatccatatttcacttctcttcaaaggctttcattttctctgttgatttattggtgtaagtattraaatgcttgactgtatatttcagtagactatagtgcttagattttcaacctaactaccttacttgaatttttcctttttctgaaatgaagatattttcaa

SEQ ID NO: 361673 - DNA, 201 bp, Homo sapiens; identical to SEQ ID NO: 78156

SEQ ID NO: 361674 - DNA, 201 bp, Homo sapiens
actgaataatctgtttatgagaaaattacaaattcagcaaatgtcttgcttttcggcatactgtatttctgctgaactcacccctgtgcccacttcttccrtctttcccttcagctctgatgccatgggttttttccatatcgccagcacacatattcttcctgattgtgacaaagctttgtgacatttccttgggaattc

SEQ ID NO: 361675 - DNA, 201 bp, Homo sapiens
gccaggcagagaaccatcatcccatttcagatgaagagtaacccatttttttgcccagagtgactcttctagtcctcatactccaacagaagagacctcarcattgtccctgagcagtcgatgtcctaggacctctctgtggctctcaggaagggattgaaaatgcttgctaggggtgaagactaagcgctttataggact

SEQ ID NO: 361676 - DNA, 201 bp, Homo sapiens
tgttaatttaattttcactcactatgttactgaataatctgtttatgagaaaattacaaattcagcaaatgtcttgcttttcggcatactgtatttctgcygaactcacccctgtgcccacttcttccgtctttcccttcagctctgatgccatgggttttttccatatcgccagcacacatattcttcctgattgtgaca

SEQ ID NO: 361677 - DNA, 201 bp, Homo sapiens
agggagcctggtgagccacacttcgctgttagagaacacaggtctgtgggccttcgctgcaggctgcattgcttggcgtgctcttaccgtctgaacggccrtttgccaccatgccaatcagacgtttacagacgcatactttatcttttcattacttttatttttgtttttacaagtcagtatttcacccattgtgccacc

SEQ ID NO: 361678 - DNA, 201 bp, Homo sapiens; identical to SEQ ID NO: 78164

SEQ ID NO: 361679 - DNA, 201 bp, Homo sapiens
catttttcagtttcactgttacatgccttgaagtgatgaggaggtttctgttactatatgctacacagcagggacaggcaaaggccatcgcagaagaaatrtgtgagcaagctgtggtacatggattttctgcagatcttcactgtattagtgaatccgataaggttagagccgttacagtggattttaccgttttgtgct

SEQ ID NO: 361680 - DNA, 201 bp, Homo sapiens
tattgtttattcactcattcagataacttatcgagtaccagtttcatgccaggtgccgttctgggcggttcattcaccgaaagccaagcttttggtttggrtttcagtttaaatctgtctctgcaaattgacagcccaccaattttagccgttagatgagtatggaaaaaaatctgtgagtgtcgtttgttttactactgc

SEQ ID NO: 361681 - DNA, 201 bp, Homo sapiens; identical to SEQ ID NO: 78168

SEQ ID NO: 361682 - DNA, 201 bp, Homo sapiens
gtagtgttttcatattgtttattcactcattcagataacttatcgagtaccagtttcatgccaggtgccgttctgggcggttcattcaccgaaagccaagmttttggtttgggtttcagtttaaatctgtctctgcaaattgacagcccaccaattttagccgttagatgagtatggaaaaaaatctgtgagtgtcgtttg

SEQ ID NO: 361683 - DNA, 201 bp, Homo sapiens
aaaagaaaagaaatagaacccagacaggcaggttagggttaattcctcagagcagtggttttgatttcttgagaatctggaaaaaattatggactctcccraaaaatgattacacttgtcccttagtatcttcgaaggatttgtcccaggacccctttcagatacccaaatcctcaaagctcaagtcccttatgtaaaatg

SEQ ID NO: 361684 - DNA, 201 bp, Homo sapiens
tcttttttcccccatttttcagtttcactgttacatgccttgaagtgatgaggaggtttctgttactatatgctacacagcagggacaggcaaaggccatygcagaagaaatatgtgagcaagctgtggtacatggattttctgcagatcttcactgtattagtgaatccgataaggttagagccgttacagtggatttta

SEQ ID NO: 361685 - DNA, 201 bp, Homo sapiens
tgctattttgtttctcttgttctatcttggtgtttagggaggaggatggcgtcaaattcagagacttcttcttggccctccccatgatgatagatcttaaygtcataggccaataattcggtgttgccctgtgccagctgctgagtggccactggaggtcctgggccaggacgccatttaccgcctggcccccatgtgcct

SEQ ID NO: 361686 - DNA, 201 bp, Homo sapiens
cattaggccattgctgttcctctctgagccttgagttcctcatctgtaaaatggggatgataatccctacttaaaaggtggtaagataatgcaaacgaatyatgtccctagcacatagtagatactcagaaggtgtcagattccatgttcctttcacagaagccaggtaaatgcaaaagtaaagacaaagattgcatagta

SEQ ID NO: 361687 - DNA, 201 bp, Homo sapiens
cactcaattctgcctatcttccccctccctccatcctccctgagggcctcaatgcatggacgctgtccaccctctggtgctgaagcagcccagagacccamgcctgcctgcttccccttcaggccatgacaccacagccagtggtctctcctgggtcctgtacaacctcgcgaggcacccagaataccaggagcactgccg

SEQ ID NO: 361688 - DNA, 201 bp, Homo sapiens
cttttccaagatgatgaattggaggcaatgtcagtgtgtctctcccctgtggaaggacaaaaaagtatgtagagattcacactgtgaactttctttccccmaaaaacaacacagaggcttaacaggaaacccaaaagaatccatagacccttcaaaagaagctgcaggctgcatcctactctgtgagacaggtgaaaaact

SEQ ID NO: 361689 - DNA, 201 bp, Homo sapiens
agggtttgtcttgctttcccttcaggatgaagatgggaaggtgttgtcagatgaggatgtaagagcagaggctgacaccttcatgtttgcaggtgaggctsccagtgtgggactacagtgaggacaggggtcctttcatctcaggaacatggtgggtgggccctggatcactcaattctgcctatcttccccctccctcca

SEQ ID NO: 361690 - DNA, 201 bp, Homo sapiens
caacacagggatatttttgaaatgactttgtaacaatggagaagagtgaagagaacatttactgagcactcaccataggcctaaaacaatgtcatgtcccmgttccatgacatatgtgtctaatttaattttaataaccctgtgagttatggttatttttgcccaattgcagatgatgaaactgagggccagagaggttag

SEQ ID NO: 361691 - DNA, 201 bp, Homo sapiens
tggggcagaggaccaggaggctggttgtgggggagtccatcctgatgtttgggactggggaggggcacaaaggaggcagggcccagctctagccgtcttcmcttctctggccaggacaagtggcagcacctggcctcagagggcagcagtcgtctggacatgtttgagcacatcagcctcatgaccttggacagtctacag

SEQ ID NO: 361692 - DNA, 201 bp, Homo sapiens
gcagagtgctcagaatcccctcctccatctgctggtctgagctgggagctggagtctggcccaggctctgggggacatgcaaacccacaggggggtcccasgcatgctcagcccctctctatctctcaggctgatctgggtgcggttgaggatcccgggccaggtttccggcgtgatggggcccaaatgcggatcctgggc

SEQ ID NO: 361693 - DNA, 201 bp, Homo sapiens
gagtctctgtactgattcaccttctagcctgcattgtgtgacaggactagtgatccttatttcctccttttgtgtagctgtatactattccattgtgtggrtgtttatctaaatatcttcctatccatgtatatttggctcattttagccttttgctaaattaaacctgttgcaattggcatgtgtgtacagtgaccactg

SEQ ID NO: 361694 - DNA, 201 bp, Homo sapiens
ggatggggtgataggtgcgagggtcgaaaaagggggaagtttgcagatggtcccagttccagttctctttccctccattccttcacagtttatgggaaaaygtccatagaatgggggtgagtaggtcctagagggtccgcagagtgctcagaatcccctcctccatctgctggtctgagctgggagctggagtctggccca

SEQ ID NO: 361695 - DNA, 201 bp, Homo sapiens
aacagaaacaaatcagtgggacctaactgaattaaaaagcttctgcacagcaaaagaaacaatcatcagagtaaacagataacttacagagtggaagaaartatttgcaaactgtgcatctgacaaaggactagtatccagaatctacaagaaacttaaatcagccagaataagacaaataattccatcaaaaagtgggca

SEQ ID NO: 361696 - DNA, 201 bp, Homo sapiens
gcttatagtagcacaattcacaattgtaaagatatggaaccaacctaagtgtccatcgaccaacgagtggataaagaaaatgtgacatatatatatatataccatggaatactactcgtccgtaaaaaggaatgaaataatgtcttttgctgcaacttggatggagctggaggccattattctaagtgaagtaactcagga

SEQ ID NO: 361697 - DNA, 201 bp, Homo sapiens
tgcttatagtagcacaattcacaattgtaaagatatggaaccaacctaagtgtccatcgaccaacgagtggataaagaaaatgtgacatatatatatatataccatggaatactactcgtccgtaaaaaggaatgaaataatgtcttttgctgcaacttggatggagctggaggccattattctaagtgaagtaactcagg

SEQ ID NO: 361698 - DNA, 201 bp, Homo sapiens; identical to SEQ ID NO: 78214

SEQ ID NO: 361699 - DNA, 201 bp, Homo sapiens
acattataggaatccatcacaacccaactgtgtgaccggatcctgaggtgctgcctttcccatccacccccgaccccctgccctctttgtcaattccaagkttcctagaggaggaggcagggttttgatcaggaaaatccaacatcacctcgccccaacacacacacaactgtctttccaaggctgctggacctgggagac

SEQ ID NO: 361700 - DNA, 201 bp, Homo sapiens
tgctcagcccctctctatctctcaggctgatctgggtgcggttgaggatcccgggccaggtttccggcgtgatggggcccaaatgcggatcctgggcgcaktcacagtccccactcccacccgcaggaactgcatcgggcacgcgttcgccatggcgaagatgaaggtggtcctggcgctgacgctgctgcgcttccgctt

SEQ ID NO: 361701 - DNA, 201 bp, Homo sapiens; identical to SEQ ID NO: 78216

SEQ ID NO: 361702 - DNA, 201 bp, Homo sapiens
caggagtgagatcagtcttgccaactgcatgggagccggatgaggcttactgccacctgctactctccactccctttgcaagctcttttgcaaggcagagrcagttatactcacctctggaacattaccccagtgacctaagaactgccctctgactcacacagctgccaaaaaaatagttccaaagataaaatacctagg

SEQ ID NO: 361703 - DNA, 201 bp, Homo sapiens
tcttcactggggagtctgaaaagccagaccacagggggaggccttaactctacccagagctggaactgatttagggagtggtaagaaatataaaaatagargcagcagcagaaagtgccttgcaggcattcccaatctccagcatggactgagggaagccattccttattatatctcacaggagaccttgcagaagccagc

SEQ ID NO: 361704 - DNA, 201 bp, Homo sapiens
ccacccgcaggaactgcatcgggcacgcgttcgccatggcgaagatgaaggtggtcctggcgctgacgctgctgcgcttccgcttcctgctggaccacacsgagccccgcaggaagccggagctgatcatgcgcgctgaaggaggactttggctgcgagtggagcccctgaacgcgggcttgcagtgaccctctgacccat

SEQ ID NO: 361705 - DNA, 201 bp, Homo sapiens
gacagagaatgagagagggagaaactgggtcatgctgagataataataatggaggtggcagcagagcctggctgtggaagacatggaaaaaatgttaatgrcttccattttaacccaaaggcaattaggagccataggaagtgggtgagcaggggaggggtaggccagatctgggcagaaggaagatcctttcaggactac

SEQ ID NO: 361706 - DNA, 201 bp, Homo sapiens
aaagaaggaagagggagggaaagtgagggacagagagagataaagagaggagggaagagaaaacgagacagagaatgagagagggagaaactgggtcatgmtgagataataataatggaggtggcagcagagcctggctgtggaagacatggaaaaaatgttaatggcttccattttaacccaaaggcaattaggagccat

SEQ ID NO: 361707 - DNA, 201 bp, Homo sapiens
aagggagaaagaaggaagagggagggaaagtgagggacagagagagataaagagaggagggaagagaaaacgagacagagaatgagagagggagaaactgrgtcatgctgagataataataatggaggtggcagcagagcctggctgtggaagacatggaaaaaatgttaatggcttccattttaacccaaaggcaattag

SEQ ID NO: 361708 - DNA, 201 bp, Homo sapiens
cccctcctccatctgctggtctgagctgggagctggagtctggcccaggctctgggggacatgcaaacccacaggggggtcccacgcatgctcagcccctstctatctctcaggctgatctgggtgcggttgaggatcccgggccaggtttccggcgtgatggggcccaaatgcggatcctgggcgcagtcacagtcccca

SEQ ID NO: 361709 - DNA, 201 bp, Homo sapiens
gagacctgggggtaaaagtcatctatctctttctagaatacctgcatcattcatccattcagtcttcattcagcaaactcttccacatgtctttccaatgycagttctgtttccagcacctttctgttccctggatacctggaaagaacactgtccagggatgtgtctttcaggtactcccagcctagtgggaagagtctc

SEQ ID NO: 361710 - DNA, 201 bp, Homo sapiens
gtaaaagtcatctatctctttctagaatacctgcatcattcatccattcagtcttcattcagcaaactcttccacatgtctttccaatgtcagttctgttyccagcacctttctgttccctggatacctggaaagaacactgtccagggatgtgtctttcaggtactcccagcctagtgggaagagtctcaggtaggactt

SEQ ID NO: 361711 - DNA, 201 bp, Homo sapiens
caaaggattcataactaagaccccaaaagtaaatgcaacaaaaacagaaacaaatcagtgggacctaactgaattaaaaagcttctgcacagcaaaagaarcaatcatcagagtaaacagataacttacagagtggaagaaagtatttgcaaactgtgcatctgacaaaggactagtatccagaatctacaagaaacttaa

SEQ ID NO: 361712 - DNA, 201 bp, Homo sapiens
tttctagatactcagtttcctgatgggaggtagctcctggctgctggtgggaggtgttcctgggctttgcatatgttacattgttgcctccctttctgccyttggcctgcaggaggcccagtgaatatattgctaccatcttggagctcagtgcccttgtagaaaaaagaaaccagcatatcctccagcacatggactttc

SEQ ID NO: 361713 - DNA, 201 bp, Homo sapiens
tgacagccattgtcaggagtgagttccttcccagggcctgggatgtgaatccatggaccaaagggagtaagttggggagggaggaaggagcaaagtaaccmgaagtacctttcgggaggatttgtatcatagctgggcttttaaggtcaaggaaggggagaaagtgttgtctttccaggtaggtagaaatatttgagtaac

SEQ ID NO: 361714 - DNA, 201 bp, Homo sapiens
ggggcagaggaccaggaggctggttgtgggggagtccatcctgatgtttgggactggggaggggcacaaaggaggcagggcccagctctagccgtcttccyttctctggccaggacaagtggcagcacctggcctcagagggcagcagtcgtctggacatgtttgagcacatcagcctcatgaccttggacagtctacaga

SEQ ID NO: 361715 - DNA, 201 bp, Homo sapiens
ttcccttctctggccaggacaagtggcagcacctggcctcagagggcagcagtcgtctggacatgtttgagcacatcagcctcatgaccttggacagtctrcagaaatgcatcttcagctttgacagccattgtcaggagtgagttccttcccagggcctgggatgtgaatccatggaccaaagggagtaagttggggagg

SEQ ID NO: 361716 - DNA, 201 bp, Homo sapiens
gtctacagaaatgcatcttcagctttgacagccattgtcaggagtgagttccttcccagggcctgggatgtgaatccatggaccaaagggagtaagttggrgagggaggaaggagcaaagtaacccgaagtacctttcgggaggatttgtatcatagctgggcttttaaggtcaaggaaggggagaaagtgttgtctttcc

SEQ ID NO: 361717 - DNA, 201 bp, Homo sapiens
aagtctgagttgtgtggacagttttggtaaggaatatgatcagtactggatactggatgggagatgagagaaacatggtgtccaagctacactccgggtasctaggtgcatggagacagctctcagagataggatgcagggagggaagagagtctagagagtcaatctcaggacagatacccatcatgtatctctaggacc

SEQ ID NO: 361718 - DNA, 201 bp, Homo sapiens
ctgatctgggatggcctcagctgtgacacctggactttcccccatgtgattctctgcctccagaaggcaccctgttgttcacatggcagagactgggttcygagaaactgagaggaggctgcaatatttctggacattgtctctgcaatcttcaaagttcaaccagccttggggctattcgagttattacatcatcatgtt

SEQ ID NO: 361719 - DNA, 201 bp, Homo sapiens
ggatactggatgggagatgagagaaacatggtgtccaagctacactccgggtacctaggtgcatggagacagctctcagagataggatgcagggagggaakagagtctagagagtcaatctcaggacagatacccatcatgtatctctaggaccatctgtttctagatactcagtttcctgatgggaggtagctcctggct

SEQ ID NO: 361720 - DNA, 201 bp, Homo sapiens; identical to SEQ ID NO: 78220

SEQ ID NO: 361721 - DNA, 201 bp, Homo sapiens; identical to SEQ ID NO: 78219

SEQ ID NO: 361722 - DNA, 201 bp, Homo sapiens
ttgattcctcccaccagggaccaaagacaaggcaaaggagctggggggaagaccttggaatgggggctctggtgatggtgaacaagagagatctagacatkcagagtgggtttgagtttctggaagaagatcggaccttcagagattgtctcaggtgagactcgggagtctcagagatagtaaatttgggggagggtttgt

SEQ ID NO: 361723 - DNA, 201 bp, Homo sapiens
cctgaggtgctgcctttcccatccacccccgaccccctgccctctttgtcaattccaaggttcctagaggaggaggcagggttttgatcaggaaaatccarcatcacctcgccccaacacacacacaactgtctttccaaggctgctggacctgggagaccccacccagcagccctcttggtcttacctccaggtctacaa

SEQ ID NO: 361724 - DNA, 201 bp, Homo sapiens
tgctgggtagcattaggccattgctgttcctctctgagccttgagttcctcatctgtaaaatggggatgataatccctacttaaaaggtggtaagataatrcaaacgaatcatgtccctagcacatagtagatactcagaaggtgtcagattccatgttcctttcacagaagccaggtaaatgcaaaagtaaagacaaaga

SEQ ID NO: 361725 - DNA, 201 bp, Homo sapiens
tgcatcttcagctttgacagccattgtcaggagtgagttccttcccagggcctgggatgtgaatccatggaccaaagggagtaagttggggagggaggaakgagcaaagtaacccgaagtacctttcgggaggatttgtatcatagctgggcttttaaggtcaaggaaggggagaaagtgttgtctttccaggtaggtaga

SEQ ID NO: 361726 - DNA, 201 bp, Homo sapiens
atataaagatcttcaacaggagtgtgaacatcatgcacgtgagttccttgaactctgggtcccagcaggagtcttggggtggagggaccatggacagatcwggtctggaattttggctctgctgggtagcattaggccattgctgttcctctctgagccttgagttcctcatctgtaaaatggggatgataatccctactt

SEQ ID NO: 361727 - DNA, 201 bp, Homo sapiens
aaatccataaatttatgataaaaaatgagcttccttcttaagtctcacactagcggtttctaccatcaatggttttctgtgtgtccttccagtaaaatggytatcttgatgcccactttatatgaacacagactttttctatacaaataggagtatataaaatagacacaacatttcttttccaagatgatgaattggagg

SEQ ID NO: 361728 - DNA, 201 bp, Homo sapiens
taggagaggggcccccacattatgagtcttatatcttatataggacagttagttcatatgctccttcttttttacagggtgaaagagagagagagagagaraatgctttgttcaggagtataaactactactctccagtgagatggcaatttctataggtttataatccaaatatcttctggaaagataagattctctgag

SEQ ID NO: 361729 - DNA, 201 bp, Homo sapiens
ctgcggttgcatccccctgttccgtacacctcccgccactgcatctgggacattgtgctcccagatggtagggtcatccccaaagatgctcacagcctcawggggaggagccccccgggtaggaagaggggtccttcagggggatccttgtcctgactgccaccttctctcccacaggcattatctgcatcatcaacatta

SEQ ID NO: 361730 - DNA, 201 bp, Homo sapiens
ttaataaatcatatttaaatcctatctggggcctgtcaggtacacagaagtcatgcaagactatcttaggtccatgtcagacgatgtgtcatttagggctyatcatgtatgctgtggccatgtcaggcatgttaacattggagacatgccccaggtcccaggtccatttcaggagatgacagagagtgctggggcagacag

SEQ ID NO: 361731 - DNA, 201 bp, Homo sapiens
gtgttgccttaggtacgacctggcccagctgcccttcctgaccatgtgcgtgaaggagagcctgcggttgcatccccctgttccgtacacctcccgccacygcatctgggacattgtgctcccagatggtagggtcatccccaaagatgctcacagcctcatggggaggagccccccgggtaggaagaggggtccttcagg

SEQ ID NO: 361732 - DNA, 201 bp, Homo sapiens
cttggacagtctacagaaatgcatcttcagctttgacagccattgtcaggagtgagttccttcccagggcctgggatgtgaatccatggaccaaagggagwaagttggggagggaggaaggagcaaagtaacccgaagtacctttcgggaggatttgtatcatagctgggcttttaaggtcaaggaaggggagaaagtgtt

SEQ ID NO: 361733 - DNA, 201 bp, Homo sapiens
attctgtctcaaaaaaaaaaaagatgcagaatactagtgtatagtagatggtgtgctcctatataattttttaatatactaaatattagcacaggaaggayacattaaaaaaataataacctgggcaacatgtggggagaagtagatggcattgggccataggagtggattatattttacagttttcaaattctgaatcag

SEQ ID NO: 361734 - DNA, 201 bp, Homo sapiens
agaacaaagccaagtcctagactttggatttcattgatgtgcttctgctgagcaaggtgggtttctctacgatctgaattacagtgatagaatggagcttkatgtcaaatgtcagatgaaataaattggacttcatccagagggcactgggagccatggaagatgcttgagaaagggaaggtcacagataggttttagaga

SEQ ID NO: 361735 - DNA, 201 bp, Homo sapiens
catgcaaacccacaggggggtcccacgcatgctcagcccctctctatctctcaggctgatctgggtgcggttgaggatcccgggccaggtttccggcgtgwtggggcccaaatgcggatcctgggcgcagtcacagtccccactcccacccgcaggaactgcatcgggcacgcgttcgccatggcgaagatgaaggtggtc

SEQ ID NO: 361736 - DNA, 201 bp, Homo sapiens
ctgcactccagcctgggcaacagagtaagattctgtctcaaaaaaaaaaaagatgcagaatactagtgtatagtagatggtgtgctcctatataattttttaatatactaaatattagcacaggaaggatacattaaaaaaataataacctgggcaacatgtggggagaagtagatggcattgggccataggagtggatta

SEQ ID NO: 361737 - DNA, 201 bp, Homo sapiens
ctaatgagtctgtgagacatttagctggttcttccggatgtagatgcgatcaactttggtacatgagcagctgtggggcatgtaggcagctttgctgatcytggtccagttcattcacatgtttagggcttcactagcttcaggctgatctgggatggcctcagctgtgacacctggactttcccccatgtgattctctgc

SEQ ID NO: 361738 - DNA, 201 bp, Homo sapiens
tcttcttacctctaatgcatgtatgtatggagacagaaagagacagagagaatttattatgggaattggataatgtgatgatggaggccaggaattcccakgatataccatctgcaagccagaaaccagggacgctggtggtgtaaattcagcctgagtccaaaacggcctgagaacctggagttctgagggcaggagaag

SEQ ID NO: 361739 - DNA, 201 bp, Homo sapiens
tgtccaccctctggtgctgaagcagcccagagacccaagcctgcctgcttccccttcaggccatgacaccacagccagtggtctctcctgggtcctgtacracctcgcgaggcacccagaataccaggagcactgccggcaggaggtgcaagagcttctgaaggaccgcgatcctaaagagattgaatggtgagtgcaggt

SEQ ID NO: 361740 - DNA, 201 bp, Homo sapiens
attcccttctctgcgggacccaggtaagggccacctgtgtctggtatggggatggggtgataggtgcgagggtcgaaaaagggggaagtttgcagatggtyccagttccagttctctttccctccattccttcacagtttatgggaaaatgtccatagaatgggggtgagtaggtcctagagggtccgcagagtgctcaga

SEQ ID NO: 361741 - DNA, 201 bp, Homo sapiens
tgtaaaggagacctgggggtaaaagtcatctatctctttctagaatacctgcatcattcatccattcagtcttcattcagcaaactcttccacatgtcttwccaatgtcagttctgtttccagcacctttctgttccctggatacctggaaagaacactgtccagggatgtgtctttcaggtactcccagcctagtgggaa

SEQ ID NO: 361742 - DNA, 201 bp, Homo sapiens
accttccttgccctttcccagcttctagtggttgcctatgcttggcattccttggtttgtgtatgcatcactcccatctctacctcttttgtcatacagcrttctccctatgcctcttgtatctgtctgtctgtgtccaaatttctctcttcttgtaaagatgccagtcattaggttaggtcccaacataatccagaatga

SEQ ID NO: 361743 - DNA, 201 bp, Homo sapiens
ttaacagttggtttttgtagatgatgtttttctaaacttgacatttttaatatgatttaaaatatgaaacttaccctttgataataaaaaatggtaaaacrtttcaatccctacatatacatgttcctctgtatatcttctcttaattgttgccatattggtcttgagctcattaactggtaactttatttttaacacctg

SEQ ID NO: 361744 - DNA, 201 bp, Homo sapiens
tttctgttccagtgttccagtatataaattttctttcacaaatataatatacttgaaatgtaaatagcttattgcttatctgagcttcctgaggagagagsctctctggggatattggccttgctaaggagaaagttcttcacatttgaatttggatgcaactaagggaatctccacaggaaacttcagctgtcacaactg

SEQ ID NO: 361745 - DNA, 201 bp, Homo sapiens
ggtgagccgaggttgcaccatggcactccagcctaggcaacaagagcaaaactccgtctcaaaaaaaaaaaaaagcgaaagaaccaaatcacaacaaaaartctccaatcttggccgggcatggtgacttaccctataatcccagcactttgggaggccgaggtgggtggatcccctgaggtcaggagtttgagaccagcc

SEQ ID NO: 361746 - DNA, 201 bp, Homo sapiens
tgttccctttagtttatctccttccttcactgtctttgccttagcaaacaataattgataattttgcctttctaatgccagaagaagaaagttaggaaatrtagtatattaatgaaagagaaaaatatttttaagctttcatattgaggagttttaactacaggtaaacataaatggaatttcgggggctattagtaaaat

SEQ ID NO: 361747 - DNA, 201 bp, Homo sapiens
tttgaggcaatcaatttattaattaaaaaactcctaaaaaatggattttctttcatgactgtgttatgctcagtgccaatagctaacacagtgcttagtayattgactgctgaataaattattataacaatatttctcacagatataaggtatagcatgataaatatatagcttataaaacattttcttatctctataaaa

SEQ ID NO: 361748 - DNA, 201 bp, Homo sapiens; identical to SEQ ID NO: 78235

SEQ ID NO: 361749 - DNA, 201 bp, Homo sapiens
ctactgtggacaataaccaagtgtttccagtaactgggacataagataatctgtcttccaaaatatctccagtattccaaaatgaagacctattatgtagsaaattttctttttaccacctcttacagaaattcagaactgggtagtgaaacaaccgcttgtgttgtcatcatagcaaccaggggaagtagcctaatcctc

SEQ ID NO: 361750 - DNA, 201 bp, Homo sapiens
gaatatcataatatgcaattgactgctaaggatttttttccctgttaattggaacttttaaaaattgaaataagtagctatgtgacgaatctgattattcyctacaggcatgaaagagaaggttattttaagggactgcaagcacattctggttacacagattcagaactcagaggttatctttggggctgtttgagagca

SEQ ID NO: 361751 - DNA, 201 bp, Homo sapiens
tcactgtgaacaagtttatgaattaggggtgcatttggctgcgagtaatagcaaccagaaacagaataaatcctgtcctgcttatttttatgtcatatgaraaaaatctgtagacaactggttctggtatggcagctctgcagtgtcatcaggcattcaggcccttctttctcctctgccatagtagggggaatctgagag

SEQ ID NO: 361752 - DNA, 201 bp, Homo sapiens
ttggttctgttgtcacatagtcttcttctctgttggatcgtccctctaataaggacccttgtaaatacattgggcccacctagacagccccgaatgagctycccataccgtgagctgtaatttaatcacatctgcaaagtcttttctgccatataaggtagcattcataggttatggaattaggacatggacatcttgggg

SEQ ID NO: 361753 - DNA, 201 bp, Homo sapiens
ctgtagacaactggttctggtatggcagctctgcagtgtcatcaggcattcaggcccttctttctcctctgccatagtagggggaatctgagagcatgctrtcaacaatagatcgaatgtgtatatagttacaaactggaaagcaagaatacatcatagcatatttggagattaattctaatcatggcatgaaaaaaatga

SEQ ID NO: 361754 - DNA, 201 bp, Homo sapiens
aatagtgtaacctggtatattagtttcctgttgctgctataataaattaccaacaaacttaattctactaaaaaatacacacaaatttattatcttatagwtttgggggtcagaagttcaagaccattttcactggattaacaaaatattggtagggctggttccttctggcggctctgaggggagaatcatttctttgcc

SEQ ID NO: 361755 - DNA, 201 bp, Homo sapiens
ttctttctcctctgccatagtagggggaatctgagagcatgctgtcaacaatagatcgaatgtgtatatagttacaaactggaaagcaagaatacatcatrgcatatttggagattaattctaatcatggcatgaaaaaaatgaattagattgggacaatgtttgtaatagtcagcttaaaagtattaatagataatgtgg

SEQ ID NO: 361756 - DNA, 201 bp, Homo sapiens
gtatgaagttttgccggtttttttttttttttttggtcgttcacaattactgtttcctcaaactgccatgcttcttctagaactgatagtgctttgtttcytttgtgatgagaagcctttcccttcagggtgaggacttcggggctgaagatgtactttgcagcagttcccttctgtttcttcataccacagatgtagagg

SEQ ID NO: 361757 - DNA, 201 bp, Homo sapiens
cttctataattgctagttggcattctactaaagagaagagctttccttcttattttctgtttatttatttatatcagtatgggctcatggttaatattcamtgggttataatgcattatttattttcacacctcagttgtcccagatttggccattagaagcctctttggtcttttcctgagttattttaatatgccccca

SEQ ID NO: 361758 - DNA, 201 bp, Homo sapiens
aataattgataattttgcctttctaatgccagaagaagaaagttaggaaatatagtatattaatgaaagagaaaaatatttttaagctttcatattgaggmgttttaactacaggtaaacataaatggaatttcgggggctattagtaaaatgattgctttttgatatttctttttaaatagtttttatttaaatagtata

SEQ ID NO: 361759 - DNA, 201 bp, Homo sapiens
ggaaaatgacctactgccagtagcatttgagctaggaattgcactagagggaatctgtcctgcagaaataatcagatatggaggtggagagaactctggamaaggacgtgcatttcagctttgtttatcatgtgaacaaatattttaaaagacttaaatgtttatcagtaatgaattggtcaaatattctacatgtgtaag

SEQ ID NO: 361760 - DNA, 201 bp, Homo sapiens
ctaaactaatagctaaaaattggaggtggagagagtgaaaattatgagaaaaagtcatgtaatcattaggcaattaaataatttatccatagtgatgaacmcttatgggaaaagttttgatttagaatcatctcgcattcattgttttcttctttaaaggtgaagttttttgtacttgttggctttcctttgttacccaat

SEQ ID NO: 361761 - DNA, 201 bp, Homo sapiens
atatgagttagatgtgtgctgtttattttcttttattgcttacaactaaacttggtagtttatggagtattttctaagactgttatttataaaatgtaatraaaccaaattattcatatatttttatattaaaccctctcagataattctgttaatatgatgagaactggaaatatagacctcttaaacatttttgttttt

SEQ ID NO: 361762 - DNA, 201 bp, Homo sapiens
tccctacatatacatgttcctctgtatatcttctcttaattgttgccatattggtcttgagctcattaactggtaactttatttttaacacctgaaaacartacagtgttttgattttatgaaatggaaattatattaaatacgactttcagttaatagaccacacacatatatggggcctgcttccttaaatatagcctg

SEQ ID NO: 361763 - DNA, 201 bp, Homo sapiens
aagaagaaaagaagtcggtcagttatccttctctccttagccacataacttcttctctcatgaatcatccagtcattccaatggcaaataagttctcctcrcctacccttgagctgcaaggtgaattctctccattacagtcatctttgccttgtgacattcatctggttaatttgagaacaatacagtcaaaggtatgtc

SEQ ID NO: 361764 - DNA, 201 bp, Homo sapiens
ttcagttaggataaacaatgaacatgggaagaaactagattttacgtagagttagggagctttatatgtatgcattttatacagacacaaaacctctagcygtatgggaaaaatagattttccactggaccatttttctccttaactttcagccctttaaaaaacaaatctttctcactcttgactataaaggtagtaata

SEQ ID NO: 361765 - DNA, 201 bp, Homo sapiens
cctcaaaattaatagacagaatagtctttaacctttaagtacagataagaattcagtctttgatgaaagtagcatcccaggcatcatggaggaaaaatggrttattaacaaatggagctgggaaaattagttactgtatatactgtaattcttggctggttgactttcttgaagaccattgatgcctgtgggacaggaatt

SEQ ID NO: 361766 - DNA, 201 bp, Homo sapiens
tttttcacatgtaaatggatttaccactggcctcctttgcaggtggtgcctttggaagtccagagaaattaaatgctttttccaagagcagagaagactcyaaatttgaccctgtcctatgttcttgctggtgcacttcattggcttcagtgaggagtccggagagctgggactttaccaatgattttttttttcttttaa

SEQ ID NO: 361767 - DNA, 201 bp, Homo sapiens
ttattgaggatttttgcatcattgttcatcaaggatattggtctaaaattctcttttttggttgtgtctctgtcaggctttggtatcaggatgatgctggyctcataaaatgagttagggaggattccctctttttctattgattggaatagtttcagaaggaatggtaccagttcctccttgtacttctggtagaattcg

SEQ ID NO: 361768 - DNA, 201 bp, Homo sapiens
tgagaacataggatatttgtctttctgtgcctggcttattttgcttaatagaatgacctccagtttcattcatgttgctacaaatgatatgatttcatagktttttatgactaaatagtattccattgtttatatatataccacattttctttttccattcatctaaatcaacacttaggttgattccgatctttggtgtt

SEQ ID NO: 361769 - DNA, 201 bp, Homo sapiens
aaatggtaatgaggtcatttagagaaatgttttagaattccgctaattattcctaacttgtaattaaggtaggtgggagaaaacggaacacagggtgagcrtgagggtcctaaaatgtagacaaactatatagtggcagacatgctaacatctccttaatacaacaaccataacagcaaactaagaaactgtgattcccaa

SEQ ID NO: 361770 - DNA, 201 bp, Homo sapiens
gataatttagttgcagcatttttttttttgtggggattggagaggggggtgtatttccaaagacttattttgaaggagtgtgttacttttcttaatatctygatttcatgattactgtcagaagcactggtaacctaataatttgaaggtttttttctttgcttccagcattcatttatcttctacttacattttttcccc

SEQ ID NO: 361771 - DNA, 201 bp, Homo sapiens
ggttttttgtccttgcgataatttgctgagaatgatggtttccagcttcatccatgtccctacaaaggacatgaactcatccttttttatggctgcatagkattccatggtgtacatgtgccacattttcttaatgcagtctatcattgttggacatttggattggctccaagtctttgctattgtgaatagtgccgcaat

SEQ ID NO: 361772 - DNA, 201 bp, Homo sapiens
agttacatatgtatacatgtgctatgctggtgtgctgcacccattaactcgtcatttagcattaggtatatcacctaatgctatccctcccccctcccccmaccccacaacagtccccagagtgtgatgttccccttcctgtgtccatgtgttctcattgttcaattcccacctatgagtgagaacatgtggtgtttggtt

SEQ ID NO: 361773 - DNA, 201 bp, Homo sapiens
cttcttattttgaaggacaaactcacatacgactcttactctcctgataccttcctggagatggttagtaatttcatctatggtcatcataaaaatgtgtrattccattgttcttgcattagcaaagaggatgagaagcttaatgaaaaaagacattgaaatataattttttgtacattatttgaaagaatttttatcact

SEQ ID NO: 361774 - DNA, 201 bp, Homo sapiens
tgcttctaaggaattgaataatgaacagcttttgggaacaaatgcctgtattttgcagaattctacctctcagtgttcatatttatggtgtaattaccttrttggtctgctgaaagcttttaggtatagtttatacttgcaatctcttttttcttagtttaacttatttaatgggtgaagaattttagatgtggcatgaga

SEQ ID NO: 361775 - DNA, 201 bp, Homo sapiens
aatttgcctaactttcttgctaaataaatgtgcttttggatgctgacatcgagagagtggtgtgtgaagtaccataaatatttgctttattgtctgcgcgktgtgactgcattctgctcatttgcaggtgggcaatgggcactccaatgaggcagccttgatcctccacagaaaagggtttgattgtcggttctctagcaa

SEQ ID NO: 361776 - DNA, 201 bp, Homo sapiens
cttgctgattaatgataagcagttagaaataaaagcaacctgcatgtcttttaaagcaagtatggagaatgattccttttccttttcataatgtctacccscaaggctttcaaattctggtattatatcaactagaaaagtgaacaaatatttttctattggaagagtgctacttttgaggctattaggaagttaggtagc

SEQ ID NO: 361777 - DNA, 201 bp, Homo sapiens
agatgtgtgtctgaatgtgctgcttcacagagtccagccacctcagaaggaaactgggtctgctgctggctgcttgtggtcaggtgaggccagccatgctkggctctctcccagcatggcttcattaaggagactgcctctgcagcagtcacagtgcatgggcagagagacttctgcagagggggactcacacaagtgcca

SEQ ID NO: 361778 - DNA, 201 bp, Homo sapiens
tttttggaaaatgattatatgccgtatatttgtattcagatgaaaaggggaacaaacatctctggaagccctgcctcacagcatgctgcgtggccttgcccattccagccactatctacaaacttacccattagctttcctattctgttggcctgtctttcaactcttttccttgatcacacccttcccctacactatgaa

SEQ ID NO: 361779 - DNA, 201 bp, Homo sapiens
tatatcaatttttggaaaatgattatatgccgtatatttgtattcagatgaaaaggggaacaaacatctctggaagccctgcctcacagcatgctgcgtggccttgcccattccagccactatctacaaacttacccattagctttcctattctgttggcctgtctttcaactcttttccttgatcacacccttcccctac

SEQ ID NO: 361780 - DNA, 201 bp, Homo sapiens
gacttcctgtatttcctgggtctagcctatacacatccaccctgttctctttctgccgtatgtctgttcttaacccagaaggcagaatggttttttttttkgttttttttcaaagccacatctaactttattgcttcctgttgaaccctctgatatcttctcattgctatcagtataaaagtcaaaatttcttaccacggc

SEQ ID NO: 361781 - DNA, 201 bp, Homo sapiens
ggactttgctgggatatgagtgaggttcttttttgtcgtttttcccaagttgttgcctctcactcctataactggttgagtgtggtgagagtggtgtatgrtttatgagtatattccttggaaaagtatactttgcatttcaaaatagctagaataaaatgatctggagaggtggagagggttgagctaactctgagattc

SEQ ID NO: 361782 - DNA, 201 bp, Homo sapiens
gccgggccggggctgccccccacctccctcccggacggggcggctggctgggtgggggctgtcccccacctcctggagggggcggctgccgggcggagggrctcctcacttcccagacggggcggctgccgggcggaggggctcctcacttctcagatggggcggcagggcagagacgctcctcacctcccagacggggtg

SEQ ID NO: 361783 - DNA, 201 bp, Homo sapiens
ggccgggccggggctgccccccacctccctcccggacggggcggctggctgggtgggggctgtcccccacctcctggagggggcggctgccgggcggaggsgctcctcacttcccagacggggcggctgccgggcggaggggctcctcacttctcagatggggcggcagggcagagacgctcctcacctcccagacggggt

SEQ ID NO: 361784 - DNA, 201 bp, Homo sapiens
tactatttgcagaaggagatagggacaagctgatctggaaagtcaagttcatttcatttatgatgacgtggatgttagtggaaataatcaagtgggctggmaagccagtgagagatcagggaagggagatgctgatctggtagtcatcagcatagccgagaatgaatgagctcacttggggactgtgcttagtgagggcag

SEQ ID NO: 361785 - DNA, 201 bp, Homo sapiens
tgggacgatactttgaagggagaaagaaaattgctagtgtaaagtacggtgcttatgaaggctttgaatcctggaggagattggcttgatttagaatcttyggtgcctgtgaagagtagttgggaaaacactgtaggtagttcaggatcagattgcaaattgccctgagagtttgtctgaagagttatgagttagatggta

SEQ ID NO: 361786 - DNA, 201 bp, Homo sapiens
tgtacgtttttgcttggccgttttagtagtctgccttgtggtgctatgtttgcacctgttggtgttaaaaatgtttcttatagccaaattgcaactatctytagataaaatttccaggatatttggaaagtagaggaaaaaacaggagaagcaaactgtcaacatctacagttctctttttgaaaaattttacctatatgc

SEQ ID NO: 361787 - DNA, 201 bp, Homo sapiens
ctttgtgccgtacatgactcttgagccactcatttttaaacactgccttaaattctcaaagctgtgccctaaatagaggactagacagtaagactcaagcygtggttaacaaagcagcattatctcacttcctggaaatgtgatgtacatttcctaataaacctcataagcatttttgattccaaatggtgctactaaaag

SEQ ID NO: 361788 - DNA, 201 bp, Homo sapiens
aaaaaattagccagatgtagtagcatgcactacacctgctactcccagctactcaggagactgaggtgggaggattgcttgagcccaggaggttgagactkcagtgagctataatctccccactgcactccagcctgggtgacagagtgagacgctatctcaaaaatatatatgtatatgtatatctacatgtatatgtat

SEQ ID NO: 361789 - DNA, 201 bp, Homo sapiens
cagtagggagggttagagacttgagcaaactgaagagcatgttcccgatgtgcagtggggcagcattgttgctgtgtggttaggggcccagtgttgctaaattcaatttttttttgaagaagagtccagaagtctggaattttacgtgaagttgttcaatctgtaaaatattgatacaattttttaaaaaacactatgttg

SEQ ID NO: 361790 - DNA, 201 bp, Homo sapiens
tttgaggttgcttttttattatgaattttttattaaagagttggcttaaaaacaaaaaaaaaaaaacattttaataccatacagacctaccaaaatgtgtkatctacaaatctgccccacagtcttcagctacagatacttacctccaaatgttatgattcaatgtattattcttcattttctctcctccttcctctttgt

SEQ ID NO: 361791 - DNA, 201 bp, Homo sapiens
ttagcattctacaatgtatgcatttttcaaaatgatatacttgataaatatatacaatttttatttgtcagttagagctcgtttggaggttccagcagggragtgcagctccttgtatacccttgaccgaagacccgtcctccatcagggatggtcatcctctacgactgagcatgcagcttcaggaggggctcacataga

SEQ ID NO: 361792 - DNA, 201 bp, Homo sapiens
taacataaaatttactattttaacaatttttaagtgtacagtagcattacaacatttacatcattgtgcagctgttactaccatccatctctagaactttrtcatcaccccaaatgcaaactttgtacctgttgaacagtaattcccgttcctcttgctcctggcaaccactgttctgttttctgtctctacaagtttgac

SEQ ID NO: 361793 - DNA, 201 bp, Homo sapiens
gaacttatatatgtatatttaataacatatatgtatatttaatccacccttttttcctcaaaagagaacttcaacatactgttttattccttctcatactrattttcacagaatatgtagttgtgctgctaatcttcaaagttgatctaaatatgtaaattttatcatttacttttcagatattggtacagaaacttttaa

SEQ ID NO: 361794 - DNA, 201 bp, Homo sapiens
cccaggctcccagccactgagttgtcttgcctcttaggaatctgttgcctactgtttaggctgccatttgcttatggaaagatctgatgtaaaatatagarcagtgatcctcaacctttttggtaccagggactggtttcctggaagacagtttttccacagacaggggtggggatggggggagtcgggggtttcggggga

SEQ ID NO: 361795 - DNA, 201 bp, Homo sapiens
tgtagttgtgctgctaatcttcaaagttgatctaaatatgtaaattttatcatttacttttcagatattggtacagaaacttttaaacaagtttattgtcraaagtctcacaccttcatcactatccttgatgcattcacctcccggcactcagaatataagtgagatcaacttgagtccaatggaaatcagcacattccg

SEQ ID NO: 361796 - DNA, 201 bp, Homo sapiens; identical to SEQ ID NO: 78240

SEQ ID NO: 361797 - DNA, 201 bp, Homo sapiens; identical to SEQ ID NO: 78241

SEQ ID NO: 361798 - DNA, 201 bp, Homo sapiens
gtcttgactctttatccaattttccagtctgtgtcttttaattggagcatttagtctatttacatttaaagttaatattgttatgtgtgaatttgatcctrtcattttgatgttagctggttattttgctcgttagttgatgcagtttcttcctagcctcgatggtctttacaatttggcatgattttgcagtggctggta

SEQ ID NO: 361799 - DNA, 201 bp, Homo sapiens
tggccgggccggggctgccccccacctccctcccggacggggcggctggctgggtgggggctgtcccccacctcctggagggggcggctgccgggcggagrggctcctcacttcccagacggggcggctgccgggcggaggggctcctcacttctcagatggggcggcagggcagagacgctcctcacctcccagacgggg

SEQ ID NO: 361800 - DNA, 201 bp, Homo sapiens
accgccatcgtcatcatggcccgttctcaatgagctgctaggtacacctcccagacagggtggcggccgggcagaggggcccccccacttccctcccggayggggcggctggccgggccggggctgccccccacctccctcccggacggggcggctggctgggtgggggctgtcccccacctcctggagggggcggctgcc

SEQ ID NO: 361801 - DNA, 201 bp, Homo sapiens
ttgctagaatgatatatgattttattcttaatttttatttatataaatatcagtgcaaaggaaagttgttcacataaataagtagctggtaatggaaggakttttctttttttttttttttttttttttttagtatttattgatcattcttgggtgtttctcggagagggggatttggcagggtcataggacaatagtgga

SEQ ID NO: 361802 - DNA, 201 bp, Homo sapiens
ctcatctttggcacaaatgataagactaaattattttttttctgggttaagacagaacataaattgtgtgtgtgtgtgtgtgtgtgtgtgtgtgtgtgtgkctgtgtgtgtagggaggatgggcagccaggtggtggagagggagagagagatttattaaggatcaaaatgcaacaccccaaatagggggctgaagtttga

SEQ ID NO: 361803 - DNA, 201 bp, Homo sapiens
gcggaggttgcaatgagccgaaatagcgccactgtactccaacctgggcaacagagcgagactctgtctcaaaaaaaaaaaaaagaaaaaaagaaaaaaaatttctaatgaaatatattgttttgcccatgtcaggtttaataaatccattttatagcacccataatttaatgaaatgcaatttatttcatttgtagaaaa

SEQ ID NO: 361804 - DNA, 201 bp, Homo sapiens
tctcatctttggcacaaatgataagactaaattattttttttctgggttaagacagaacataaattgtgtgtgtgtgtgtgtgtgtgtgtgtgtgtgtgtgtctgtgtgtgtagggaggatgggcagccaggtggtggagagggagagagagatttattaaggatcaaaatgcaacaccccaaatagggggctgaagtttg

SEQ ID NO: 361805 - DNA, 201 bp, Homo sapiens
ggcggaggttgcaatgagccgaaatagcgccactgtactccaacctgggcaacagagcgagactctgtctcaaaaaaaaaaaaaagaaaaaaagaaaaaaaatttctaatgaaatatattgttttgcccatgtcaggtttaataaatccattttatagcacccataatttaatgaaatgcaatttatttcatttgtagaaa

SEQ ID NO: 361806 - DNA, 201 bp, Homo sapiens
aggcggaggttgcaatgagccgaaatagcgccactgtactccaacctgggcaacagagcgagactctgtctcaaaaaaaaaaaaaagaaaaaaagaaaaaaaatttctaatgaaatatattgttttgcccatgtcaggtttaataaatccattttatagcacccataatttaatgaaatgcaatttatttcatttgtagaa

SEQ ID NO: 361807 - DNA, 201 bp, Homo sapiens
ctgtgagattaggtaggaatcagggtattagttgtatggagctcattcttttaaacagatgaataaaaccgtatttatataagtctttttctggggtacakaaaagctttattacacatctatgaatatcttccatttgtaaagcattaattctttagaaagggcttctgaatcattatttaattaccctttgtactgtgt

SEQ ID NO: 361808 - DNA, 201 bp, Homo sapiens
gaggcggaggttgcaatgagccgaaatagcgccactgtactccaacctgggcaacagagcgagactctgtctcaaaaaaaaaaaaaagaaaaaaagaaaaaaaatttctaatgaaatatattgttttgcccatgtcaggtttaataaatccattttatagcacccataatttaatgaaatgcaatttatttcatttgtaga

SEQ ID NO: 361809 - DNA, 201 bp, Homo sapiens
tgatcagaaggaaggatttcaaagaagcgttttagtagagtttaaaaaagacccttctcatctttggcacaaatgataagactaaattattttttttctgsgttaagacagaacataaattgtgtgtgtgtgtgtgtgtgtgtgtgtgtgtgtgtgtctgtgtgtgtagggaggatgggcagccaggtggtggagagggag

SEQ ID NO: 361810 - DNA, 201 bp, Homo sapiens
cgcaggaggcggaggttgcaatgagccgaaatagcgccactgtactccaacctgggcaacagagcgagactctgtctcaaaaaaaaaaaaaagaaaaaaagaaaaaaaatttctaatgaaatatattgttttgcccatgtcaggtttaataaatccattttatagcacccataatttaatgaaatgcaatttatttcattt

SEQ ID NO: 361811 - DNA, 201 bp, Homo sapiens
tttttctgttggtgtgtcctgatgatctctgagcactctatatgtggtaaaattaatccttttccctatatgttgtaaaatttttcttattgtgtcatttrgtttgttaattattttattgtatttctcatttatagtggttttaaatttttgtgtagtcatttcttttttttctgtagagtttcttcctttgcttttata

SEQ ID NO: 361812 - DNA, 201 bp, Homo sapiens
caatcccatgaaaaccattgccaacatttggatgtatttcttattgtcttttattttatgcatatccttttctccccgttctcaagtcttgacttattgcrtgtacatattttgtttttcatttgtgacagtgctcacaatctgatggtatgttttttaaaaatccaattttaatatatactgttgtgtttaagatgttgc

SEQ ID NO: 361813 - DNA, 201 bp, Homo sapiens
tttttataaaatactatatttctggttggtctcatgttaatatacaattgtagtttttacagtaatttagaaaacgaaagaaccaattcagtgtaaaaggraatacttgattactctgttgtataagagcaataaaagctaatttactgttatattactcagtactgaaagctgcaagaggctatctttcagttcattctt

SEQ ID NO: 361814 - DNA, 201 bp, Homo sapiens; identical to SEQ ID NO: 78231

SEQ ID NO: 361815 - DNA, 201 bp, Homo sapiens
atcagtttgcaactcagtgtcctaagattattaaatctagaggtaggaatataattttatgtcatgaaaattcatcccctaccactttttataaaatactrtatttctggttggtctcatgttaatatacaattgtagtttttacagtaatttagaaaacgaaagaaccaattcagtgtaaaagggaatacttgattactc

SEQ ID NO: 361816 - DNA, 201 bp, Homo sapiens; identical to SEQ ID NO: 78233

SEQ ID NO: 361817 - DNA, 201 bp, Homo sapiens
atggctgagagctcaaaattttaaaaataaattgtgatttgtgaacagttactaggtgcttaattgttcatgaacattgaatgtagacaatagagtttccrgctttattggctttttttattttagaacttaaaaaaaaatagtggtatcgaatttgggtttatgcctgctttgtggaacttgtaattatgcactctttgt

SEQ ID NO: 361818 - DNA, 201 bp, Homo sapiens
gacttcacacattacagatataaagtaaaattcctctggcatctgtgtctgtctccatccactcttcaggagaggaattcagatatatgtgcaagcatacrtgcaccacacggtcttacaactgtagaaaagtatagtattgtgtttgtgtcgattttcagcatagtttatcatgctatacaaatgctacatttagctttt

SEQ ID NO: 361819 - DNA, 201 bp, Homo sapiens
aatctgatttttttcttcattttgatttacttaattttgttggtttttgcccaccttaccctcctagaacctgtttatattttaccagtttttactcttgwcctatctgctttcatctttcctaattccttctactcactttcactaatgctaaatgagccagtccacttaataagttcatctgtgtgtttaccttttagc

SEQ ID NO: 361820 - DNA, 201 bp, Homo sapiens
cttagcatgataaggacgcatgtcttcctgcctgaccaactccttcagcaccatgatagagagtgcccttgcttggccctctgggccgctgtctaaaggtktctcaattctaaacctcagttggttttcttgactcctgggataaggggttatagattcgaagaacagtgagggaggcgagttgcaggctgcaggtatgac

SEQ ID NO: 361821 - DNA, 201 bp, Homo sapiens
cacttctaaattcagcattctctaggtacttcttcttacctattgaggaaagtctgacctgatggtcaaatgttttagtagactattgcctaacaaactamtctaaaacttaatgtcttaaatacaatttattatatttcccacgtttttgtagaactgctggtcagttcttgcttggggtctctcataccattgcaggca

SEQ ID NO: 361822 - DNA, 201 bp, Homo sapiens
attttgaaggacaaactcacatacgactcttactctcctgataccttcctggagatggttagtaatttcatctatggtcatcataaaaatgtgtaattccrttgttcttgcattagcaaagaggatgagaagcttaatgaaaaaagacattgaaatataattttttgtacattatttgaaagaatttttatcacttaatat

SEQ ID NO: 361823 - DNA, 201 bp, Homo sapiens
acaggcattccagctcattggcccctttcaagctccccactttttttgagacaggttctctttctgtcacccaggctgaagtacaatgacacaatagctcmctggagcctccatcacctgggctcatgcaattctcccacctcagcctcctgagtaactgggaccacaggtacatgccacaatgctcgactaattgtttta

SEQ ID NO: 361824 - DNA, 201 bp, Homo sapiens
gacattacttatgaatctaatgaatgggacactgaaccccttcaagtctttgtggtgcctcattcccataacgacccaggtaaaatttgcacttcaaaaakacaggaggttattaagtttctttaggcctagagtcttttaatgagaatctggtagaggccacttctcaaatttttgagacattattctctgacttttaac

SEQ ID NO: 361825 - DNA, 201 bp, Homo sapiens
ctggtattcaatctctgtggctgggctttaggaagtcattggtaccccacttattatatgccaagttggtacatgaccatatttctccaaagataatccaytggaaacctatgagtttttccttctgataagaatttatgaatatttttaaaggataatgaaaattagtatgatagttttaaaaaaatctgtctttaaatt

SEQ ID NO: 361826 - DNA, 201 bp, Homo sapiens
ttcctgcagaagggcaggggttacctgagacaccgggtgctatcatgaggtcttgaagttgaaattcattcactggtttaaacacattttttgacaactartatacatactggttatatttaaaggctgttcttaatgtttatgcttgtttagtttttcatttgaacttttcttaacatttattaatgtagactcttgtta

SEQ ID NO: 361827 - DNA, 201 bp, Homo sapiens
tttcttagtcaaattcatatttgctgtttttttgtgtttgttttttttgtagggctcggatgctactagatcagtaccgaaagaagtcaaagctttttcgwaccaaagttctcctggctccactaggagatgatttccgctactgtgaatacacggaatgggatttacagtttaagaattatcagcagctttttgattata

SEQ ID NO: 361828 - DNA, 201 bp, Homo sapiens
atctttgaggctgtatgggagtttatacccatgtggaaggaacctccagaatgacctgcgtggcttttcctgcagaagggcaggggttacctgagacaccrggtgctatcatgaggtcttgaagttgaaattcattcactggtttaaacacattttttgacaactagtatacatactggttatatttaaaggctgttctta

SEQ ID NO: 361829 - DNA, 201 bp, Homo sapiens
aacaatacatcctggaaatgtccaaagcaggtatgaaaatgcgtatttcataagacaacatcttgaataaagtagccacttagctgctagttgctgaaggkttgaacaaatgggctttattagccaacattatccttgtttgaagtattcattcaaaccagatctaaagcaacttaaaaatgccagagccttgactatgcc

SEQ ID NO: 361830 - DNA, 201 bp, Homo sapiens
atgtttgcgagagtcatccattctgttgcaggtagcagtagttcattcctttttagtactgtgtagtatctctagtattcattttttgatgaatataccasagtttattcattgtattgttattgggtatttgggattgttcccagtttttgtctatcacaaataagtctgctttgaatattttgtccatgttttggttac

SEQ ID NO: 361831 - DNA, 201 bp, Homo sapiens
agcaccatttattgaaaagaccatactttcttccacagcaccacagtgtcatctttgtcattaatcatgaatgagactgcatttgtgtgtgggtctgtgtytacactctctattcacttttgttggtctgtttgactcatctcacactgtcttaattattaacactacagttttataataggttttaatatctgatagtaa

SEQ ID NO: 361832 - DNA, 201 bp, Homo sapiens
tgaaacaaaatagaacctagttcatagcttattataaaaagtgatttaatagggtgcaaaaccaaatatatggttaaaattattgtttgcattaagtatgrgtacttttttttcatagaaggaattagtgttctggatgcttattatctaatttattgcttggacacacattatagtatcacagtcttcatgacctttggc

SEQ ID NO: 361833 - DNA, 201 bp, Homo sapiens
tagccatgtgtggctatggctaccatattggagagcatggtcctaagtaactaacggaggctggttgttgataaagttaaaactactccagaggctcccaragttttctctatgtatagaccagtaaagtaattcattttcatgatgaatcttgatgtttgagttagattgtacttaccgtcttttatatactagtggaca

SEQ ID NO: 361834 - DNA, 201 bp, Homo sapiens
tatttctgttgatttataagagcactttacaagttttactattttttttttttttagtttttgttctttaatctcatttttaagatagaaaaatttttagktttttgttaccaaatctgtcagccttttacttcattgtatttttcagttatggctagaaagaccttttgtaccacagattatatatttattttttctact

SEQ ID NO: 361835 - DNA, 201 bp, Homo sapiens
tcacttacatctctgaaggaaatattaatgctctgcaaaaaagaagttaacttcttttataggttttcttgttgttgttgcatgacaacaaaaatgtcttyaaggcatagatccaaagttgctttctgtattggaaaaaataatataattgaaaacgtgattagcgaggagtttctacgtacttctccaatatgaatttgc

SEQ ID NO: 361836 - DNA, 201 bp, Homo sapiens
gtttagatatttacattgcttagctgtggaaatagtttaaatattttttgtttactatatttctgtttttctccttacactaattttttttttttttttttgagacagagtctcaccctgtcacccaggctggagtgcagtgatacagtctcggctcactgtaacctccacctcctgggttccagtgattcttgtgcctca

SEQ ID NO: 361837 - DNA, 201 bp, Homo sapiens
aaatgatggggaggaaaaacaggtgctcatatatatagaattatgatgaggtattttgatatattaaaatatgaaggcagaattgtcatggaaagtaccaygtataatggataaaggattataataatttctagttaagatatttggaaatacataactgtatgtaactgaagaaaaactttgaaaagaagacgaggtggt

SEQ ID NO: 361838 - DNA, 201 bp, Homo sapiens
tagatccaaagttgctttctgtattggaaaaaataatataattgaaaacgtgattagcgaggagtttctacgtacttctccaatatgaatttgcctatggwtgcctggtctgtagagccttcaagaaacgtaactgaattaggaaaaaaaaaaaaaaaatcttcaagcaagttctttttccatgagtaatgcttcagcagt

SEQ ID NO: 361839 - DNA, 201 bp, Homo sapiens
cacttgaacccatgaggtggaggttgtggtgagccgaggttgcaccatggcactccagcctaggcaacaagagcaaaactccgtctcaaaaaaaaaaaaaagcgaaagaaccaaatcacaacaaaaaatctccaatcttggccgggcatggtgacttaccctataatcccagcactttgggaggccgaggtgggtggatcc

SEQ ID NO: 361840 - DNA, 201 bp, Homo sapiens
ggcttttgacattaagaatctttgaggctgtatgggagtttatacccatgtggaaggaacctccagaatgacctgcgtggcttttcctgcagaagggcagrggttacctgagacaccgggtgctatcatgaggtcttgaagttgaaattcattcactggtttaaacacattttttgacaactagtatacatactggttata

SEQ ID NO: 361841 - DNA, 201 bp, Homo sapiens
gtagcttacttattaaaatgatttattacagagaccagatgaaaattttttaaaaaaaagaggacctggaactctcaaaaagttttgagttataatctctgagaaatatgaaacaaggtgaaacactgaaacaaaaagatgacaaaaaatgaaaatgaaaatatttggaagaggagaggagtgagataaggagagattgtt

SEQ ID NO: 361842 - DNA, 201 bp, Homo sapiens; identical to SEQ ID NO: 78229

SEQ ID NO: 361843 - DNA, 201 bp, Homo sapiens
taaaaaatcattttacaactcattatgcaccaacattttggtcccttgtgcctactcaggattgaaagtatgaagttttgccggtttttttttttttttttggtcgttcacaattactgtttcctcaaactgccatgcttcttctagaactgatagtgctttgtttcctttgtgatgagaagcctttcccttcagggtgag

SEQ ID NO: 361844 - DNA, 201 bp, Homo sapiens
tgtagcttacttattaaaatgatttattacagagaccagatgaaaattttttaaaaaaaagaggacctggaactctcaaaaagttttgagttataatctctgagaaatatgaaacaaggtgaaacactgaaacaaaaagatgacaaaaaatgaaaatgaaaatatttggaagaggagaggagtgagataaggagagattgt

SEQ ID NO: 361845 - DNA, 201 bp, Homo sapiens
cagtttgttctccttcccaaaattgcattggttactgttagtcctttgtaattctacataggtgtaggtcatcttttaaatttctaccaaaaaaaaaaaaattgaaggggattttgagtgggattgcattgaatctttggtttgatttgagcacaaataactacaattattgggccatctaatcgatgaacgtggtgtatt

SEQ ID NO: 361846 - DNA, 201 bp, Homo sapiens
atttgctctctatatttggcgggtattaataggtaatccccgaggtcacatccagttaacatttggttttcttgtctaagtattaatcatttataaagcawtcatttggataaacaccaggaaaggaagttttgaggaagaaactactgtggacaataaccaagtgtttccagtaactgggacataagataatctgtcttc

SEQ ID NO: 361847 - DNA, 201 bp, Homo sapiens
atttttatcagattatgaactcggatcctaggggtatgtttaaattatccgtgtattttcctgagagatgatgctcatacatgaatatgtgatcagaggargggatatatatatgagtatcttatctgtaattacatcttactaggaagtgattttggttcatagaagcatctggtctcctgtctgactgaaaaaattaga

SEQ ID NO: 361848 - DNA, 201 bp, Homo sapiens
tagatgtatgtgagggttcagaattctttttaattttaggaaagtactgtgcatatgtggcatattattgcacagtctcctttgaaatttctgaatgttcygatcaaaaaataaagattctataaagcttcatgtcagttctgtttagatttactaccaaatgagttataaaaaagcttttgattttttcagagctttttg

SEQ ID NO: 361849 - DNA, 201 bp, Homo sapiens
tcaaataaccaagctctgtttggggaagacttactatgcctgaagtattgtcagtcagtgttagatgctcatagatgggatcattaatgagggaggggagragctttagcacagatttagaaattatcttggagattgatcacacaattgcagctatgagaaaaagtatgcaggtcttctaaggggcacttagaaaagcaa

SEQ ID NO: 361850 - DNA, 201 bp, Homo sapiens
caagagggaagggaaatattctagagctgtactttccagtatggaagcccctgtctgcgtgtggctactgagcacttgaaatgtgactaatgtggcttgakatgtgctgtaagtgtaatgtacacacacagtgtttcaaacttagtgtgcaagatatcttaattcatttatatattgattatgagttaagataatattttg

SEQ ID NO: 361851 - DNA, 201 bp, Homo sapiens
tgcaagttcttgggtgggatacactgttgacagattctgtcagagtgctaagcataagaatataaattaaaaataagttttagaagtaaagtcggtgtggyttttaaaaaaaaatcctgcaaagaatagtgttccatagaacagattgggaagtgctgaattaaagaaagagttctgttagtcaacagttaatatgtttag

SEQ ID NO: 361852 - DNA, 201 bp, Homo sapiens
gaaagctgatggtgaactatagtttagtaagaattcaagtttattaaataaacctaagtaatatcaaatagataaataaacctaataaaatatcaagtttwttcaggattgttacagctgaatttttatcagattatgaactcggatcctaggggtatgtttaaattatccgtgtattttcctgagagatgatgctcatac

SEQ ID NO: 361853 - DNA, 201 bp, Homo sapiens
ggaggctgaggtaggaggatcaactgaacccaagaattggaggctatagtgagctgtgatcatgcccctgcactccagcctgggtgactgggcaagaccgsaactctaaaaaaaaagttttttttaggtctttaggtgttaccttacttcttgagcatgaaaaatatttcgtattttctaagaaaataattttatagttac

SEQ ID NO: 361854 - DNA, 201 bp, Homo sapiens
gggaggctgaggtaggaggatcaactgaacccaagaattggaggctatagtgagctgtgatcatgcccctgcactccagcctgggtgactgggcaagacckgaactctaaaaaaaaagttttttttaggtctttaggtgttaccttacttcttgagcatgaaaaatatttcgtattttctaagaaaataattttatagtta

SEQ ID NO: 361855 - DNA, 201 bp, Homo sapiens
tgtaagacagattaccaacatagaccagcaaccattgcctatatgatgtgttaacaacatgaccctgtttagctagctgagaattgttaaggcctgaaagyatatcacatgaaccttcatgcaagttcttgggtgggatacactgttgacagattctgtcagagtgctaagcataagaatataaattaaaaataagtttta

SEQ ID NO: 361856 - DNA, 201 bp, Homo sapiens
cccttctgtttcttcataccacagatgtagaggaatgtggcatttatgggtcctggccttggtggtaacattttacctgtagagcatcggaacattgaagmctgagaatgtgaatcattcttagaatcattttctacataaagtcctgaattggtgtttttagaatccagtgaagcagtcattcttttaacagtcaccagc

SEQ ID NO: 361857 - DNA, 201 bp, Homo sapiens
gtaatcctagcactttgggaggccgaggcaggcggattttctgagctcaggagtttgagaccagcctgggcaacatggtaaaaccccatttctatggcggmgtgtgcctgtaatcccagctactcaggaggctgaggtaggagaactaatagaacctgggaggcagagcttgcagtgagccgagatctctccactgcactc

SEQ ID NO: 361858 - DNA, 201 bp, Homo sapiens
tgtaatcctagcactttgggaggccgaggcaggcggattttctgagctcaggagtttgagaccagcctgggcaacatggtaaaaccccatttctatggcgragtgtgcctgtaatcccagctactcaggaggctgaggtaggagaactaatagaacctgggaggcagagcttgcagtgagccgagatctctccactgcact

SEQ ID NO: 361859 - DNA, 201 bp, Homo sapiens
aagtcctagaaggccattttcattacattctattggtcaaggaagtcattaaggttagccaagattcaaggggagggaattactctccatttcctgatgtraggagcatgtataggaagcagtgggaatgatggtagtcatcttcggagactagctatcacagttcacctataggctacctcagttcacatacctttcatg

SEQ ID NO: 361860 - DNA, 201 bp, Homo sapiens
gctgccagtttgattttaaacgtcttcctggaggcagatttggttgtccctggggagtccccccagaaacaatacatcctggaaatgtccaaagcaggtaygaaaatgcgtatttcataagacaacatcttgaataaagtagccacttagctgctagttgctgaagggttgaacaaatgggctttattagccaacattatc

SEQ ID NO: 361861 - DNA, 201 bp, Homo sapiens
tattctgagcattagagcaagtggagtctcttatattccagctggtgagaatcatgctatatttcagtttccttaacttctggaccatgacttcctgatakgtagtttttgttttttctgtctatttctaattcctttccctttttgttagcgtcagaggaaatagaagttattgattcctgtctcttgaatctcattatt

SEQ ID NO: 361862 - DNA, 201 bp, Homo sapiens
ttttctttcttgaaactggtcggctatattttttaattatcctaaagaattcaaggcaataatagaatacaggatttgacatcctggaccctctccagctwctgttattttgagaaaagctgagatatttttaccttttaaataaagctgttttgaacttttcttttggtgagggaattagtaactgatggtcctagagac

SEQ ID NO: 361863 - DNA, 201 bp, Homo sapiens
ctcggatgctactagatcagtaccgaaagaagtcaaagctttttcgtaccaaagttctcctggctccactaggagatgatttccgctactgtgaatacacrgaatgggatttacagtttaagaattatcagcagctttttgattatatgaattctcagtccaagtttaaagttaaggtaaggagaaaatatttatgattcc

SEQ ID NO: 361864 - DNA, 201 bp, Homo sapiens
gaagattatcacatgtttggttatgcagaaaatatgaaaactccaattactggttccatagtcaaaggatttgcatattttgaatatgatacatgtatatwtttcatggtaaagtaaaatattaagaataacacatacatatcataatgatcttctactttaacttttattttcagctcaactttaactctttctgttaat

SEQ ID NO: 361865 - DNA, 201 bp, Homo sapiens
tgtggctgggctttaggaagtcattggtaccccacttattatatgccaagttggtacatgaccatatttctccaaagataatccattggaaacctatgagwttttccttctgataagaatttatgaatatttttaaaggataatgaaaattagtatgatagttttaaaaaaatctgtctttaaattatactaaccttgcag

SEQ ID NO: 361866 - DNA, 201 bp, Homo sapiens
aatactgtgatattctttgttgaagaaagaagccttccctttgttcagaatcagagctggtatagaagactgaataccaatcaggcacagccaccttggayattaaaccttttggaaacttgcgatcaggctggatccatgcatgtgagcctattattcacccactctttttctccatcactgaatcctctttacatcctt

SEQ ID NO: 361867 - DNA, 201 bp, Homo sapiens
tataatgatcaaatcagggtatttaggatatctaccacttcaaacttttatcatttgtttgtgttgggacaacaggcttttaaagtcttttttttttttttctttttaaatgtgtcttagagactctacataagaagattaattattcagcatgtttattatttcacatattgacatgtaaaagtagaacatctgtgaaaa

SEQ ID NO: 361868 - DNA, 201 bp, Homo sapiens
tggtcccaagctctttcaattttagagtgaccagatatgacagttttttcactattagcctctttcactctcaaaattagtttggacaataaattatgggsctaccctgatcatcttgtcttttttactttcaactcgtatccaaacacatgctagaccttttcattctgtgttttgtttgtttgttttgttttgttttgt

SEQ ID NO: 361869 - DNA, 201 bp, Homo sapiens
cattctcctgcctcagcctcctgagtagctgggactacaggcacccgccaccacactgggccaattttttttgttgttgttgtatttttagtagagactgkgtttcaccgtgttagtcaggatggtctctatctcctgacctcatgatccgcccacctcagcctccaaaagtgctgggattacaggtgtgagccatcgcac

SEQ ID NO: 361870 - DNA, 201 bp, Homo sapiens
gctacccctctggatccaacggttttgatgtggaaaagattaccagtgatgttataattgttaaattgaatggacactataaactctttgacatcactgcrgtgtttgatactgatttttatctttttttgtaagcttattctgtccttgttatttggacaatacatactccttttttaattttataacttaattttgata

SEQ ID NO: 361871 - DNA, 201 bp, Homo sapiens
cagcctcattctgttttttaaatgtgtctcaaatttgtcctcttcatcttcaatgctactaccctgcttcagactgctactgtccctccactgggtgatgrtaataaccctgtgacagatgtccctgcctcacacatttgttggcggagtttaatacagttatgtgtatgaacttcatagtatgggacctagcgcttagca

SEQ ID NO: 361872 - DNA, 201 bp, Homo sapiens
gttttgttgtgcttattggccagtggtataccctattttcaagtttctaagtcttttacccattctttttatttgaattgttgctatatatatatatatawgatagatagatagatagatagatagatagatagatagatactttaagttctgggatacatgtgcagaacatgcaggtttgttacataggtttacaacatg

SEQ ID NO: 361873 - DNA, 201 bp, Homo sapiens
tccctctcagttgacactgcagactgtctgtttgcttcacaaagtggaagtcacaattcagatgtgcaggtaatgtatacattcgttaataatcactggcstttttttttttttgttctttttaagatttgacctgatgtctgttctgacttggtaagttgcttaaactctttggattctagtttctctttttgtaaagta

SEQ ID NO: 361874 - DNA, 201 bp, Homo sapiens
tgttttgttgtgcttattggccagtggtataccctattttcaagtttctaagtcttttacccattctttttatttgaattgttgctatatatatatatatatgatagatagatagatagatagatagatagatagatagatactttaagttctgggatacatgtgcagaacatgcaggtttgttacataggtttacaacat

SEQ ID NO: 361875 - DNA, 201 bp, Homo sapiens
attcttggccttaagctattctcctgcctcagccttccaaagtgctgggattataggtgtgattcactgctcccagttgccttttgtgtttttttttttttaacttactgtaatacacatacagaaatgtgcttacatactttacatcagtagtacttaagagtccagcatagtagatgttattaatgaaagttgactcat

SEQ ID NO: 361876 - DNA, 201 bp, Homo sapiens
cctctgtggtgctctgcctttccacctccctttcctgtgacatccagttagtccctaaactctgtgacttctgcctcttcagtgtctccagactctgaccyctgcttttcgtctccattgctcttgtctcgtactattgtgaaaacctccaaatggcctttccatttccagctgtgccacttctaagtgtctgccatttca

SEQ ID NO: 361877 - DNA, 201 bp, Homo sapiens
atgttttgttgtgcttattggccagtggtataccctattttcaagtttctaagtcttttacccattctttttatttgaattgttgctatatatatatatatatgatagatagatagatagatagatagatagatagatagatactttaagttctgggatacatgtgcagaacatgcaggtttgttacataggtttacaaca

SEQ ID NO: 361878 - DNA, 201 bp, Homo sapiens
ctttatctttttgcctatgtaacatttatcaagtgagaaagtgagaatgcctttaaataagcatttgattgaaagccattagaaggtgagaacttgtatasctttttttttttttctttgggatagggttttgctctgtcatccaggctggagtgcagtgatggaatcacagcttactgcagtggccttgaattcttgggc

SEQ ID NO: 361879 - DNA, 201 bp, Homo sapiens
cacagctccttagggtcatggctctccagctctgatgatggagatttgggcaagaatttctctaaaaaggactaagcataagaatataagctttatttttrtagggccaactatttgctaagtatattagtttcttattgctgctatcaccacaaacttagtggcgtaaaacaagaaaaatgtgttatcatacagatcttt

SEQ ID NO: 361880 - DNA, 201 bp, Homo sapiens
gagtatgttttgttgtgcttattggccagtggtataccctattttcaagtttctaagtcttttacccattctttttatttgaattgttgctatatatatatatatatgatagatagatagatagatagatagatagatagatagatactttaagttctgggatacatgtgcagaacatgcaggtttgttacataggtttac

SEQ ID NO: 361881 - DNA, 201 bp, Homo sapiens
tgagtatgttttgttgtgcttattggccagtggtataccctattttcaagtttctaagtcttttacccattctttttatttgaattgttgctatatatatatatatatgatagatagatagatagatagatagatagatagatagatactttaagttctgggatacatgtgcagaacatgcaggtttgttacataggttta

SEQ ID NO: 361882 - DNA, 201 bp, Homo sapiens
catttgttgtttgattagtgttactttgtgcttctaaggaattgaataatgaacagcttttgggaacaaatgcctgtattttgcagaattctacctctcaktgttcatatttatggtgtaattaccttattggtctgctgaaagcttttaggtatagtttatacttgcaatctcttttttcttagtttaacttatttaatg

SEQ ID NO: 361883 - DNA, 201 bp, Homo sapiens
ctgagtatgttttgttgtgcttattggccagtggtataccctattttcaagtttctaagtcttttacccattctttttatttgaattgttgctatatatatatatatatgatagatagatagatagatagatagatagatagatagatactttaagttctgggatacatgtgcagaacatgcaggtttgttacataggttt

SEQ ID NO: 361884 - DNA, 201 bp, Homo sapiens
tttatctatatttttattggttttgggattattttaattgtatgttaagacttgatgacaagaggcaaaaacctaattatggtagcttaagttttttttttcagcaaaaaaaggaaagaaagatattcattatgtcactgagtgttccagagatatggtagcttcaggtattgctgtatccagggatccaggggacttaaa

SEQ ID NO: 361885 - DNA, 201 bp, Homo sapiens
gatgtaatgcatatgttaattagcttgatttagcattctacaatgtatgcatttttcaaaatgatatacttgataaatatatacaatttttatttgtcagwtagagctcgtttggaggttccagcaggggagtgcagctccttgtatacccttgaccgaagacccgtcctccatcagggatggtcatcctctacgactgag

SEQ ID NO: 361886 - DNA, 201 bp, Homo sapiens
gaatcatccctgttgaaactgtgttggctgtggcctcttctttatacccagtacatgtcgttagcacttctgtgttttaggaaggattgatcaaaaggccsaagctcaaaaagccaattagcattttttgatgggtgaactctattctttctcaggatgcctgaaattcacttacacatttaggattctagattgtagtat

SEQ ID NO: 361887 - DNA, 201 bp, Homo sapiens
taaaataatgtcctttggctttggcttgatgatcacttgaaaatggtttatgcaaacatctggacctgggttttctggcaaccttgacattttctctgttyagaatctaaagacatgagtgactcattcagttactgagaaatcttaggcaaagctaattccagtattgtaatatctatccttagtcctcaatgagaggct

SEQ ID NO: 361888 - DNA, 201 bp, Homo sapiens; identical to SEQ ID NO: 78242

SEQ ID NO: 361889 - DNA, 201 bp, Homo sapiens
actaccctgcttcagactgctactgtccctccactgggtgatgataataaccctgtgacagatgtccctgcctcacacatttgttggcggagtttaatacrgttatgtgtatgaacttcatagtatgggacctagcgcttagcaggcacttaactaatattagcaatgatgtaacttagctcaaaacccttcttttttcca

SEQ ID NO: 361890 - DNA, 201 bp, Homo sapiens
atgtatatgtatatctacatgtatatgtatatgtaagaagtaaaaatattttgagatcccaataatgaagcagctgtttttgcaggtaccttgtggtctayaatcctttagaacaagaccgaatctcgttggtctcagtctatgtgagttccccgacagtgcaagtgttctctgcttcaggaaaacctgtggaagttcaag

SEQ ID NO: 361891 - DNA, 201 bp, Homo sapiens
ggctttctatcaataaaggagaaagagataatggttgttgggtaggaaggagcagcatctgcaaattagattcattaactagatcaaaaagcagctaccasattttctgtcagctactcttccttgcccacttcggctcagggactggagttgtgttctgaatactctaggagcaggtctatactgaataaatcagtaatg

SEQ ID NO: 361892 - DNA, 201 bp, Homo sapiens
attctttcttgctcagaacctacacaggcaaggtctcttttctaagtgacctgtgatttatactgtactgtgtagactgcccataagacaaaccctcagtrccttacctgaaatcttcaggggtagatgtatgtgagggttcagaattctttttaattttaggaaagtactgtgcatatgtggcatattattgcacagtct

SEQ ID NO: 361893 - DNA, 201 bp, Homo sapiens
acttcggtttgatcaaactggacttatgaaggtatgttctgaatagttctaaaattcatagaatgcttatcatttttgctacaatgtgtgtagattaattrggcaaaaggggaaaaaagtcttaagtagagctgtatcaaatactcttgagtaaaaggaagcatgagctttttgcaccttcattgaccacttgctgctcac

SEQ ID NO: 361894 - DNA, 201 bp, Homo sapiens
cacgtataatggataaaggattataataatttctagttaagatatttggaaatacataactgtatgtaactgaagaaaaactttgaaaagaagacgaggtkgtgtcaaagaatagctggtgttagttttggtgtgtttgctagataatataaattttgaatgattctgttttgctattgctgtagcaccaacacttgaagt

SEQ ID NO: 361895 - DNA, 201 bp, Homo sapiens
tccaccagataagtacagaaattatttttttaaattgtcatatacatagaaccagatgcaacatgcttaacatcttagtggtgagttgcttattattattwtttttaatctttagcaaatgatgactaaagaagatggtaaacaccatgaagtaaatgtgcaattttcatggtatggaaccacaattaaaagagacaaaag

SEQ ID NO: 361896 - DNA, 201 bp, Homo sapiens
aagaatagctggtgttagttttggtgtgtttgctagataatataaattttgaatgattctgttttgctattgctgtagcaccaacacttgaagttgtatamagtactgtgaaaatgttaaagtaaactaaatatctggagtatgagtgatttttaaaaaatgatttctattggggtgggagtaattgatggttacgtgaga

SEQ ID NO: 361897 - DNA, 201 bp, Homo sapiens
acatccagttaacatttggttttcttgtctaagtattaatcatttataaagcaatcatttggataaacaccaggaaaggaagttttgaggaagaaactackgtggacaataaccaagtgtttccagtaactgggacataagataatctgtcttccaaaatatctccagtattccaaaatgaagacctattatgtagcaaat

SEQ ID NO: 361898 - DNA, 201 bp, Homo sapiens
acagaaatccttagcttctttgtcctacatcacagtgcttcttagaatatataattcttgtgtaaaatataatccattaggaagaaaattattatatgctrtagttccatatctaaagttgtcccgttcctaacactccttgaggattaaagaggaatttacttttatgtgattgaaaatatgtacctaccaagttgtgat

SEQ ID NO: 361899 - DNA, 201 bp, Homo sapiens
tcccctcccccagcagcattattattcaactctataagcttttaaaagtgaaaatctagttaactaaagagagatctacgtaaacaacatctatattttcygtttttttgtgtgatctgaaataatttaatcaattataatcatagtacctactggtaatacatatccagtggatttaaaagaagctgccttccattaaat

SEQ ID NO: 361900 - DNA, 201 bp, Homo sapiens
tgtttccagtaactgggacataagataatctgtcttccaaaatatctccagtattccaaaatgaagacctattatgtagcaaattttctttttaccacctsttacagaaattcagaactgggtagtgaaacaaccgcttgtgttgtcatcatagcaaccaggggaagtagcctaatcctcacctccaggaaaactccttta

SEQ ID NO: 361901 - DNA, 201 bp, Homo sapiens
ctaaccatatactttcagtttccttgctgtgggtactagttattactggctgaccagcatccacttcacctgatttccttttgggaagtggtctctcaccyaaggaagtcagctcctcttccttgttgcctagcccagacaagtcagctgtgacctgagctcagttaatcagcatattatttcccagggctttgaatcttt

SEQ ID NO: 361902 - DNA, 201 bp, Homo sapiens
cttagcgttgaatttttttttcttgtaagagcaggccatatttgttacttaaccagctagtagcttccagaaaccatcatttaaaatttttcccttgtgawtacaggagagagggcaaagggctagacccacttcatttaatctttgcttggtcccagttccaaggaccccaagctcttcttgcttgttactctttgccca

SEQ ID NO: 361903 - DNA, 201 bp, Homo sapiens
tatgtgttctgtacttactgatttactactgcttttgtttcatttgttttagaattcaagtacgttgttattgtgtctctagtctctctttttcatatgcrtttttaatttgttgtatttactgtgttttgggagatttttcccaagagtcttccctgccactccctcggttcagtactctggtattgagtcttttctggc

SEQ ID NO: 361904 - DNA, 201 bp, Homo sapiens
tcatacctggaaatctgatttttaaatttccagtggaaaaatggatctatctgtcttcacctttcctgcctaagctatcaacttgaagctatctacttcgycgtcctgctttgagccttcaccccttaagttctttctctgcctggcaactagaaataggtattaaaaaggaaaatttgaccatgttaaaccttttccatc

SEQ ID NO: 361905 - DNA, 201 bp, Homo sapiens
ttgttggtttaaagtctgttttatcagagactaggattgcaacccctgcctttttttgttttccatttgcttggtagatcttcctccatccttttattttkagcctatgtgtgtctctgcacgtgagatgggtttcctgaatacagcacactgatgggtcttgactctttatccaattttccagtctgtgtcttttaattg

SEQ ID NO: 361906 - DNA, 201 bp, Homo sapiens
tgatctttgttggtttaaagtctgttttatcagagactaggattgcaacccctgcctttttttgttttccatttgcttggtagatcttcctccatcctttyattttgagcctatgtgtgtctctgcacgtgagatgggtttcctgaatacagcacactgatgggtcttgactctttatccaattttccagtctgtgtcttt

SEQ ID NO: 361907 - DNA, 201 bp, Homo sapiens
gcatccttttaaggtcattccactcttctctgtcacatgtacagaatttgcttatgagggtgttcatttcaagaatttcacctgtttggagggagactttrttccaccgcataatataattttaaaaatgatgttctttagaccattgtgtgcatatatccctaggccataattttctccatgtacttaattcagtacaga

SEQ ID NO: 361908 - DNA, 201 bp, Homo sapiens
gtgcctaggtatgcctcagggctactacagaattaggagattggccaaagttttcaggcaccattttctcaagttctttaaatactagctctgtaagcctytgggaacatgggtttcagtagtaaatcactcatttctggggttctgctttgaacatctttggtacagagaatgagtgatccaccactgtttttcttcccc

SEQ ID NO: 361909 - DNA, 201 bp, Homo sapiens
ttggtctattcagagattcaactttttcctggtttagtcttgggagggtgtatgtgtccaggaatttatccatttcttctagattttctagtttatttgcrtagaggtgtttgtagtattctctgatggtagtttgtatttctgtgggatcggtggtgatatcccctttatcattttttattgcgtctatttgattcttct

SEQ ID NO: 361910 - DNA, 201 bp, Homo sapiens
ttgttgaattttgtcaaaggccttttctgcatctattgagataatcatgtggtttttgtctttggttctgtttatatgctggattacatttattgattagygtatattgaaccagccttgcatcccagggatgaagcccacttgatcatggtggataagctttttgatgtgctgcttgattcggtttgccagtattttatt

SEQ ID NO: 361911 - DNA, 201 bp, Homo sapiens
atcagtgtttgaccagctatctggatattcattaatctagtcaagttgaaccccaaattaaccatcacatggggttaagcacaggagggtggaagcacaggagtttgacttttttagatgtatatagcatataataaatattaagttcaaccttacgaaattggtgatatttgactatgttttacctatgagaatggcatt

SEQ ID NO: 361912 - DNA, 201 bp, Homo sapiens
tagtgagtgtcttcttcctgccaggcgttacaggctggttacttggctttcccagtgttgacactttctggacaggcttgagagttaggatagatgtgaartgttaaaggcatgccattaacgtttgtgatttcttttctttatatgtgctttacacatatgtatacaagatactctatatctaatagtaaaccctttttt

SEQ ID NO: 361913 - DNA, 201 bp, Homo sapiens
tgttgttgaattttgtcaaaggccttttctgcatctattgagataatcatgtggtttttgtctttggttctgtttatatgctggattacatttattgattwgcgtatattgaaccagccttgcatcccagggatgaagcccacttgatcatggtggataagctttttgatgtgctgcttgattcggtttgccagtatttta

SEQ ID NO: 361914 - DNA, 201 bp, Homo sapiens
ctgtgttctgttccattgatgtatatctctgttctggtaccagtcccatgctgttttggttactgtagccttgtagtatagtttgaagtcaggtagtgtgmtgcctccagctttgttcttttggcttaggattgacttggcgatgcgggctcttttttggttccatatgaactttaaagtagttttttccaattctgtgaa

SEQ ID NO: 361915 - DNA, 201 bp, Homo sapiens
tggagtgagatggtatctcattgtggttttgatttgcatttctctgatggccagtgatggtgagcattttttcatgtgttttttggctgcataaatgtctwcttttgagaagtgtctgttcatgtcctttgcccactttttgatggggttgtttgtttttttcttgtaaatttgtttgagttcattgtagattctggatat

SEQ ID NO: 361916 - DNA, 201 bp, Homo sapiens; identical to SEQ ID NO: 78238

SEQ ID NO: 361917 - DNA, 201 bp, Homo sapiens
acttgcatttccttatgagtgagattaaatttcttgtcatttttatgagccagttatttctgaaatatctgcattgtatcttttgccttttttttttttttgcattatcagtacccatttcttacaattttatgctaataggaacaatcagtgttaaatgatgaacaaaactgatgtgattcctgcgctcatggtacttac

SEQ ID NO: 361918 - DNA, 201 bp, Homo sapiens
ctaacaaggaaccttagaacataatcttacctggctcagtacaagtaggagagaatggtagcaggtgaatgggcagtgagcatggacctgaggagaaatgratttgcctaactttcttgctaaataaatgtgcttttggatgctgacatcgagagagtggtgtgtgaagtaccataaatatttgctttattgtctgcgcgg

SEQ ID NO: 361919 - DNA, 201 bp, Homo sapiens
attgaagtgcatttttttaaaactagatacagtttggaactttatcagatttttttgatgcgctggataaagcagatgaaactcagagagacaagggccartcgatgttccctgttttaagtggagattttttcacttatgccgatcgagatgatcattactggagtggctattttacatccagacccttttacaaacgaa

SEQ ID NO: 361920 - DNA, 201 bp, Homo sapiens
ctgagtagctgggactacacacacgcaccaccatgctggctaatttttgtatttttagtagagacaggatgtcgccatgtttgccaggctggtctcgaackccttacctcgggtgatctgcctgcctcggcctcccaaagtgctaggattacaggcatgagccaccacatctggcctccttacactaaatttctaaaagta

SEQ ID NO: 361921 - DNA, 201 bp, Homo sapiens
tattattttctttctgcctgaagacttaacgtttctttcagtacaagtttgctggtaacccatacactcagtttttgtttctctgaaggcatttttatcaytttctaaggatatttttgctggatatagatttttaggctggcagtatttttttgtttcctcaccacctcaaatatataattccattttctcctggctttc

SEQ ID NO: 361922 - DNA, 201 bp, Homo sapiens
tatcctatttcacatattagatcttttcactgagttccctgtgtccctaacgttcttttctatattgcatattctttttttcaccacttccatttgtatgktttttattgacttctcttttgctgagttaaatatatttattctgctattgttaaagatatctttggagtttttaactgtaaatatttatccttttagaat

SEQ ID NO: 361923 - DNA, 201 bp, Homo sapiens
actttacaagttttactattttttttttttttagtttttgttctttaatctcatttttaagatagaaaaatttttagttttttgttaccaaatctgtcagycttttacttcattgtatttttcagttatggctagaaagaccttttgtaccacagattatatatttattttttctactaactttgtatcttttttatgttt

SEQ ID NO: 361924 - DNA, 201 bp, Homo sapiens
tgtgctaggtaggtaggcatcagggtacagtacattgagtaaaacagctatggtgcctgttgtcaatatagggattcatttagtgaggaaaagagggaagyaatacatgaataaaatagataattgtaataacactgtggaggaaacaagaaataaattgagataaaccataacatgaggaggcctgttttagactggctg

SEQ ID NO: 361925 - DNA, 201 bp, Homo sapiens
tcattgaccacttgctgctcacatgtatagtctgtgggtggcgctactccatggtctgtgtgtcactggtccaccagataagtacagaaattatttttttwaattgtcatatacatagaaccagatgcaacatgcttaacatcttagtggtgagttgcttattattattttttttaatctttagcaaatgatgactaaaga

SEQ ID NO: 361926 - DNA, 201 bp, Homo sapiens
gggaagtgaaataacttgtccaaagcctctgaaactctaagtgacatggtggggatttgagtttgaatgtgtctgactcaagagcccaggaatcacacaaytgtgatttttgaagatctagtataactcaaaaagacactcttagtttttaaggtcttgaattttttcctgtcaatatggtaagcattatattttaaacct

SEQ ID NO: 361927 - DNA, 201 bp, Homo sapiens
cctgaggaatcgccacactgacttccacaatggttgaactagtttacagtcccaccaatagtgtaaaagtgttcccatttctccacatcctctccagcacytgttgtttcctgactttttaatgattgccattctaactggagtgagatggtatctcattgtggttttgatttgcatttctctgatggccagtgatggtga

SEQ ID NO: 361928 - DNA, 201 bp, Homo sapiens
tctttccttcctttttttctcccaataaatacctaaggtcctgctgtgtgctaggtaggtaggcatcagggtacagtacattgagtaaaacagctatggtrcctgttgtcaatatagggattcatttagtgaggaaaagagggaagcaatacatgaataaaatagataattgtaataacactgtggaggaaacaagaaata

SEQ ID NO: 361929 - DNA, 201 bp, Homo sapiens
tttaaaaatctggacaagttctacctttcccacctaaaagttgttttctaatatccttgtggtttttcttcatattgttttaaataatgttttaatttttwaattatttcttccactgaataaaaaggaagctttgtctttttctcttgggaagaaaaatcacctgtcctcaagtttttaaaagaacatatgtaaatatca

SEQ ID NO: 361930 - DNA, 201 bp, Homo sapiens
cactgagcaaattgcctcttcaagcaaatgtctatcccatgaccacaatggcctatatccaggatgccaaacatcgtttgacactgctctctgctcagtcwttaggggtttcgagtttgaatagtggtatgtattgcttacactcttttccactctgaaaggtttcaattccaactgtatactttttctgttggtcagatg

SEQ ID NO: 361931 - DNA, 201 bp, Homo sapiens
tcttgaattttttcctgtcaatatggtaagcattatattttaaacctagaaaacaaaatggtatatatcaaaagaacttcaaatctagatattgcaacttytgttaacatgtaaattcatgtttccatattcagaatactgtataaagcttaatgtttttctttaggttatattccactaatgaggctacttagagaagat

SEQ ID NO: 361932 - DNA, 201 bp, Homo sapiens
atagtattccatggtgtacatgtgccacattttcttaatgcagtctatcattgttggacatttggattggctccaagtctttgctattgtgaatagtgccrcaataaacatacgtgtgcatgtgtctttatagcagcatgatttatagtcctttgggtatatacccagtaatgggatggctgggtcaaatggtatttctag

SEQ ID NO: 361933 - DNA, 201 bp, Homo sapiens
gcccatgaaaaccaccctattaattagctctttccttcccattcttacctactttttgggatgcagtgaagacttcttttggattttctttcttcaaaaayggtgtgttttgtttttatttgtattatttttggtgtgggtttgtatgccaaaacattgaatacttagaaaaaaatgttacatgccatttttctttctttc

SEQ ID NO: 361934 - DNA, 201 bp, Homo sapiens
gctgcatagtattccatggtgtacatgtgccacattttcttaatgcagtctatcattgttggacatttggattggctccaagtctttgctattgtgaatartgccgcaataaacatacgtgtgcatgtgtctttatagcagcatgatttatagtcctttgggtatatacccagtaatgggatggctgggtcaaatggtatt

SEQ ID NO: 361935 - DNA, 201 bp, Homo sapiens
ggattcgttgctctttgtaaatatgtttgtgactatgtggtttcatctgttcatctcttgtatacatatggaatctcagtgaacataagtaatacaagttrggtcctgttatcctgatgcatactgtaagcctaataggaattagagacattcttaatgtcattatcacctttggtatctcagaatgttgctttaacataa

SEQ ID NO: 361936 - DNA, 201 bp, Homo sapiens
tgagaacatgtggtgtttggttttttgtccttgcgataatttgctgagaatgatggtttccagcttcatccatgtccctacaaaggacatgaactcatccwtttttatggctgcatagtattccatggtgtacatgtgccacattttcttaatgcagtctatcattgttggacatttggattggctccaagtctttgctat

SEQ ID NO: 361937 - DNA, 201 bp, Homo sapiens
gtgagaacatgtggtgtttggttttttgtccttgcgataatttgctgagaatgatggtttccagcttcatccatgtccctacaaaggacatgaactcatcsttttttatggctgcatagtattccatggtgtacatgtgccacattttcttaatgcagtctatcattgttggacatttggattggctccaagtctttgcta

SEQ ID NO: 361938 - DNA, 201 bp, Homo sapiens
cacaacagtccccagagtgtgatgttccccttcctgtgtccatgtgttctcattgttcaattcccacctatgagtgagaacatgtggtgtttggttttttktccttgcgataatttgctgagaatgatggtttccagcttcatccatgtccctacaaaggacatgaactcatccttttttatggctgcatagtattccatg

SEQ ID NO: 361939 - DNA, 201 bp, Homo sapiens
gctctcggacggcaatgatcacctcctgggagccacctcgcccgggcgcgccaagttaacaaagtgctgggcggcgtgcggcggcggcggcggcatcatcscgctcaggaaagtggccatgttccggcattcgcacccggcctgttggggtggcttcgggcacctgctggcgggggaacgggcgcggcgtgaggcaccccc

SEQ ID NO: 361940 - DNA, 201 bp, Homo sapiens
gaggtcacatccagttaacatttggttttcttgtctaagtattaatcatttataaagcaatcatttggataaacaccaggaaaggaagttttgaggaagaractactgtggacaataaccaagtgtttccagtaactgggacataagataatctgtcttccaaaatatctccagtattccaaaatgaagacctattatgta

SEQ ID NO: 361941 - DNA, 201 bp, Homo sapiens
tgttagtaaggcaactggggcattataactagttgttttgcttggctttaattagaaaccccttgatatttaactttttataagtccttaatctgttcctsctaaacttgaatttgaatggtcttctggtttcaggatgagtccatggagtgttaagtaaaattaaaaaattactgttcatttttataggatttgaaacaa

SEQ ID NO: 361942 - DNA, 201 bp, Homo sapiens
caaactttgtacctgttgaacagtaattcccgttcctcttgctcctggcaaccactgttctgttttctgtctctacaagtttgactactctattaggtgcyttatgtacgtagaatcatataatttttgtccttttctgtctgccttacttcattcagcatagtatcttcaaggctcattcatgttgtagcatgtatcaga

SEQ ID NO: 361943 - DNA, 201 bp, Homo sapiens
tcccctttcgtcttttcatggagaatcacttgtaaccaatgttgatgtgcacttacaaagaagggtgtaaaggtttataggacgatactactcgacagctytgaggatctggaatctacatggttcaactagcttctctatttgagccctgaactagtgttgcactcatctcccatttcctttgctttgccatttccagtt

SEQ ID NO: 361944 - DNA, 201 bp, Homo sapiens
tcctctttctttttcttcatttttcctgttgtcttttttccctttagttttggcccctgtaggtattcattttatttcttaatgaacactttgtaatgcarttaaagcaaaaatatatagaacacatatacaggatggaagaatactggtaagcttggtgctaccatctatagctacaatgtattgggggagaggtggttg

SEQ ID NO: 361945 - DNA, 201 bp, Homo sapiens
gtgttcctgcggttacaaaattgtataggaaaacaaaaatatttcagatcatgaaaatatgcactagtgaatcagtgagttatattattagtccaacatcstctttgaaatactcttcatttgaagacaatatgatgcaaattgattataaattataaaatcataaaccttgcagaggatgcagatttcatgaagtctgca

SEQ ID NO: 361946 - DNA, 201 bp, Homo sapiens
aaaatcaaggctgttgggtacctcaactgagaattatttgaacatcagaactgggagaggattttaggaaaaataaagtccttaaatattttttcaaatayagtttactaataaaaccatcatgtaaaaattaaatgttatgtgaaggatgtcataatatgctggtataaaatattggaaaaattgtgtcccaaatttcag

SEQ ID NO: 361947 - DNA, 201 bp, Homo sapiens
gctgtaagtgtaatgtacacacacagtgtttcaaacttagtgtgcaagatatcttaattcatttatatattgattatgagttaagataatattttggatayactggattaatgaaattttaaaattaatttcaactgctttgttttactagaaaattaaaaatttggtttgtattatatttctcttggacagcgctattat

SEQ ID NO: 361948 - DNA, 201 bp, Homo sapiens
gaccagaaactggattttgggggaaggatcctaaggggtaaatattttaaagttggacaaaattatttggcttctggcctcgttttcgaatatgtactttscactaactgctgagggcagagaacatgatatgatcttgaggtcgtggctcacaggccaagctggaagctggggacagtggagctggccaggtcttgcacc

SEQ ID NO: 361949 - DNA, 201 bp, Homo sapiens
tttctggagatacagccataaactaggaactctaagaattgtttctgcttgacagaagctattgctagctacttttattattattattattatttttgagrcagaatttcgctcttgttgcccaggctggagtgcaatggcgcgatctcggcgcaccgcaacctctgtctcccgggttcaagtgattctcctgcctcagcc

SEQ ID NO: 361950 - DNA, 201 bp, Homo sapiens
tgagcccaggaggttgagactgcagtgagctataatctccccactgcactccagcctgggtgacagagtgagacgctatctcaaaaatatatatgtatatrtatatctacatgtatatgtatatgtaagaagtaaaaatattttgagatcccaataatgaagcagctgtttttgcaggtaccttgtggtctataatccttt

SEQ ID NO: 361951 - DNA, 201 bp, Homo sapiens
atgtatggcacaacagtagctgctatcattattgttactgcatatgatggcgtttatttattgggaccacagattcctcccttcccccacccctgacccckccctgccaagatgaggggaagttgtttcaattataatgggacataggatttgatatacatatttgttggtttgagtacccagtcacagataatttagttg

SEQ ID NO: 361952 - DNA, 201 bp, Homo sapiens
aggctggagtgcaatggcgcgatctcggcgcaccgcaacctctgtctcccgggttcaagtgattctcctgcctcagcctcctgtaactgggattacaggcmtgtgccaccacgcctggctaattttgtatttttagtagagaaggggtttcaccatgttggttgggctggtctcaaactcctgaccccgtgatccaccttc

SEQ ID NO: 361953 - DNA, 201 bp, Homo sapiens
agcattttttttgtgcgtgtgtgctgcttttggatgtgagaggtagtctgcaagcttggatattgaaatgcttggatttctagactacagtgcaatatttrgtgtgcactgacatgtaaaatatatgaaatcaatattctggaaatttgtgatgagcagttattacacctcaccttctgacttgatttccctatctttgat

SEQ ID NO: 361954 - DNA, 201 bp, Homo sapiens
tgtctcccgggttcaagtgattctcctgcctcagcctcctgtaactgggattacaggcatgtgccaccacgcctggctaattttgtatttttagtagagarggggtttcaccatgttggttgggctggtctcaaactcctgaccccgtgatccaccttctagctactcttaaatatgcatcatcttttagatagaaaggta

SEQ ID NO: 361955 - DNA, 201 bp, Homo sapiens
ctgtttttgatcatctgtttgtactcttgtgtaagccattatttaatacccctgagagctctaagttacatcttcaactttatagcattaccccacagaasatatgctgatctatttttaagtttgctttaaactattgttttttagtggaaaagtttttcctggagtacaacatggcacacactttggcacaaacttgtg

SEQ ID NO: 361956 - DNA, 201 bp, Homo sapiens
ctgtgtgagtcttttttcttagaaccatgctagtgggtatatagtgatatttcactgttattttaacatgcatttctatgaggactaatgatgctgagtawgttttgttgtgcttattggccagtggtataccctattttcaagtttctaagtcttttacccattctttttatttgaattgttgctatatatatatatata

SEQ ID NO: 361957 - DNA, 201 bp, Homo sapiens
ttaatgtctttatcttttcctacatatacctgttagtgttatgttttcctcatatatattttagattgtctttctccttaatcttagcctgtaccttttamatcaaaactcagggaaggctgggcatcatggaaggacttcagggatttggagctaggcagaatgaggcaggtatcttggctctgcggtgtattgcctgtg

SEQ ID NO: 361958 - DNA, 201 bp, Homo sapiens
tctgcgcagcctcagtatttggcacttgtcgtaatgaaaaaatcaactgtgtacctgaagcctcccaaagtctccacaaaatgctcttttgatctctttgktccccagtgatttcttccagactttccactaggttttgcatggaactcacagcctctcccttgctgagaattggcatgccccagagtgaaaatgactgca

SEQ ID NO: 361959 - DNA, 201 bp, Homo sapiens
atcatggaaggacttcagggatttggagctaggcagaatgaggcaggtatcttggctctgcggtgtattgcctgtgtgtccttgggcacattgatttgtgyatctgtaaaatggagatcatacaggtggagtaacatcttaagccagggttagttataaagtaattataaaaggtgatgaaaattacatgtaatccaaatt

SEQ ID NO: 361960 - DNA, 201 bp, Homo sapiens
attgaaagagtattgaggaaaaagataagtgagtgtcattattttatcatctgttgatttattagggatagatgaacttttggttgcagtattatctatcrccttattgatacttagcaatttgtagtcgaaagttagataaatggttgggcgcagtggctcacacctgtaatcccagcattttgggaggccaaggagggt

SEQ ID NO: 361961 - DNA, 201 bp, Homo sapiens
ttgccttttttaaaatttgtagatattctttgtatgttctaaatatgagcactttgtcacatatatgctatatgaatatttttaccagtttatggttattygtttgtttttagtggtatctttttcatttctcttaatcatttaataccagtatataagaaaatttttcatatgcatgtgtatatgtgtggtctaaagttg

SEQ ID NO: 361962 - DNA, 201 bp, Homo sapiens
atagttctaaaattcatagaatgcttatcatttttgctacaatgtgtgtagattaattaggcaaaaggggaaaaaagtcttaagtagagctgtatcaaatmctcttgagtaaaaggaagcatgagctttttgcaccttcattgaccacttgctgctcacatgtatagtctgtgggtggcgctactccatggtctgtgtgtc

SEQ ID NO: 361963 - DNA, 201 bp, Homo sapiens
agcccgtgggctgcaggttggacaaacttgatgagaggtggtggagacttagaagtctggttgctaaaggaactttactgatcagaatgagatggtcatcrgaaggagaagttgtacgtgaacactgtttggagagtactttatttggtttagctactgcaggataaagtggattgtttgattttggctgccatgatggga

SEQ ID NO: 361964 - DNA, 201 bp, Homo sapiens
ttactgatcagaatgagatggtcatcggaaggagaagttgtacgtgaacactgtttggagagtactttatttggtttagctactgcaggataaagtggatygtttgattttggctgccatgatgggaaattttagtttctggagctaaaatcgtatgcggaacaactgagttctggcatttattgcctgtacggcatcagg

SEQ ID NO: 361965 - DNA, 201 bp, Homo sapiens
ctgtacggcatcaggggagttgcaggtctttgttattttttactttgtgtgattttttaaccctgaaaagtggtaaatgaagccacatttaacaggtgagkgcagcgaggctaagttagggtaatttgttcaaagtcagttaatttaattataaattctcagaggttggtgaattgaagctcaggattgcctgattgtaaa

SEQ ID NO: 361966 - DNA, 201 bp, Homo sapiens
gctggagtgcagtggtgcaatctcagttcactgcaacttctgcctcccaggttcaagcaattctcctgcctcagccacctgagtagctgggattacaggcrcacgccacagtgcctagctatttttttgtatttttagtagagatggggtttcaccatgttggccaggctggtctagaactcctgacctcaagtgatccgt

SEQ ID NO: 361967 - DNA, 201 bp, Homo sapiens
tatggtttttctcatgtttccgtggatgtgacagcagtttgttcagttaaaaagtcattgacttcctggaataaatcccttttggttttggtactattgartttaatttatttagtggttttatgattttatatccattttcatgagtaagattagttttcttttttaatgtactacatttgtattttttttattggtttg

SEQ ID NO: 361968 - DNA, 201 bp, Homo sapiens
tcttctttatagttttctgtagggcatttttatttgactgttagtctgtgttatttattttttaaagagcaggttaaaattttttaagctaaaaggtattytgtgtttcttcatactaccttatctttattttcctctttctttgctccttttgtctgttttttgtttctttttctctcaaggagttggcaacaggtgcat

SEQ ID NO: 361969 - DNA, 201 bp, Homo sapiens
ccctcgtgtaccctaagagtaacccaccaaagaaagtcacttttctttctaacagtgtctgtcatattttagacagttttctcattatttcaaataaccawgctctgtttggggaagacttactatgcctgaagtattgtcagtcagtgttagatgctcatagatgggatcattaatgagggaggggagaagctttagcac

SEQ ID NO: 361970 - DNA, 201 bp, Homo sapiens
ttcatctgtgactgtcttcttaccctctcttggaaacttagtcgattactaagttctcttcattttgtctccttgacctcttatttccctctgtttatttmaactgcagtccataaccattttttacagaattttgcagtggtctcattttctgtttctctgcttctactttgcctttttagtcttcacactcttagtaca

SEQ ID NO: 361971 - DNA, 201 bp, Homo sapiens
tgagcatcagagtgagactcactacatgttccataaagctgagaaaagccaggttcagggagattttcccttggcccagttactttctttttaaatataakgaacatatctgaggatatgacatttctttgtattgtagctttggctgcatcttatgaattagtgtccttggttttgttttcttttttttttatttttaag

SEQ ID NO: 361972 - DNA, 201 bp, Homo sapiens
ttatcagggaggaaaagcaagcttaacttataatagaagtgttggaattaaaattaatcagcagcgtatttgagtaatagtaataccatttaagattgtawgttaccccataagtatatgactagaagttgcagttgaatattgaaggattaaggagtgatggaagaaacctgttcgtcattttttcatagaaaatacctt

SEQ ID NO: 361973 - DNA, 201 bp, Homo sapiens
atttttagttgtttaatctttggctattaatgtctgcttttaactttattataaaaattgaccattataactttttttttttttttgagacggagtctcaytctatctcccaggctggagcacactggcgccatctcagcttactgcaacctccgcctgctgggttcaagtgaccctcctgcctcagcctccctagtagct

SEQ ID NO: 361974 - DNA, 201 bp, Homo sapiens
caatcaaaaccatagcagtgtaacagtgctttgtggagcggggtgccttcttagggatgggtgttttaatcatcttagggctcacagatcctcttaaaatrtaagtattttggaaacttaaagataatggacaatgattattaggtatagcatcagaacagagagtgaacatattaaagctaatatggttgtattatttta

SEQ ID NO: 361975 - DNA, 201 bp, Homo sapiens
gctattaatgtctgcttttaactttattataaaaattgaccattataactttttttttttttttgagacggagtctcactctatctcccaggctggagcayactggcgccatctcagcttactgcaacctccgcctgctgggttcaagtgaccctcctgcctcagcctccctagtagctaggattacaggtgcttgtcacc

SEQ ID NO: 361976 - DNA, 201 bp, Homo sapiens
gcatttcactatttatagttctttagctagtagccagataattaggaattagtttgaacctttaaatttaggtaaaagatatcatgtgatatcttaaagaygataattctaatagaaccatttcatttacatggtccttgttgcacgtgtataataaaagcacggtacagaaatagatttacttacgtacatttgaattta

SEQ ID NO: 361977 - DNA, 201 bp, Homo sapiens
cgtgtccggcctattataacttttttgagcttttaaagttgtcttttgactaccatatccatattacaaatatatttcctgattcctcttaaactatagtrttaaatatacttagaataatccagttttattaggtactattcgtattactaatgttctaatttttaaacctattaggtttgccaaaaattgactgatgtt

SEQ ID NO: 361978 - DNA, 201 bp, Homo sapiens
cttatacagcgcttactgtattagtccctgttctaagcactttacaaattgtaactaataatcttctaaacaattctgtgaaataggtacaattgttatcmttgttttacacataaggacactgagtcgtccaggatcacagggcagcctggcattccatgtagtccaggctgtccacctccagaggctgtcttctttgca

SEQ ID NO: 361979 - DNA, 201 bp, Homo sapiens
ctatttcttttcttcttgtgttgtaggcattagctaatttaacacatttatctggactttgggttattaatagggttgtcagatttagcaaacaaaaatayagaatgctcagttaaacttgaattttcaataacaatgaatagtttgtgtgtgtgtgtttgtagtttgtgtgtgtgtgtttgtgtgtcccaaatatcacat

SEQ ID NO: 361980 - DNA, 201 bp, Homo sapiens
ctgaatcatttgagagtaagttggaggtaccctgtacccttatctctaaatacttcattgcatatttcctaagaaataaggacacttttatacgtaaatakaataaagttatcaaatcaggaatgttaacagtgatacagtaggacagtgtagtccacaggctgtattcagattttgtcaattatttcaataatgtctttt

SEQ ID NO: 361981 - DNA, 201 bp, Homo sapiens
tgtgtctcaccttgcccttgtagaccagttgttacagatggatttttataaagaaaggcaataggaaagaatttgtaaaactttagagtctgtagtgcttrtataaagagtagtttggaaattcagaatttataataattcagatgagacttgcctaaatacctgtcccctgtcaataagaaatagaagggacttattcag

SEQ ID NO: 361982 - DNA, 201 bp, Homo sapiens
tcaggaatgttaacagtgatacagtaggacagtgtagtccacaggctgtattcagattttgtcaattatttcaataatgtcttttataaaagccgcttttycccccacccagtcaagaatggaatccatggtcgtacattgcatttagttgtcatgtctctttagtttccttttatttgaaactgttccttagtctttttt

SEQ ID NO: 361983 - DNA, 201 bp, Homo sapiens
agaaatttgtatccttaactcatctttgataaccaatggtatgatatttagaagtttgctattaatgtatttttatgtattatgttatgtcttactactgsatttgttgcttctgtgtctcaccttgcccttgtagaccagttgttacagatggatttttataaagaaaggcaataggaaagaatttgtaaaactttagag

SEQ ID NO: 361984 - DNA, 201 bp, Homo sapiens
tatttgactttgtcagtttcttgatgatgggattcaagttatttatgtattcttcctatctacctgtttgtctgtctagttacaatatcactgcagtaatrtgatgtcccattgtcctcactgcatcatatcaggaggcatgtgatgtctctgtcctagtactggtaatactgggaacaactagttaaggtttgtctgcta

SEQ ID NO: 361985 - DNA, 201 bp, Homo sapiens
cgggcgcggcgtgaggcaccccccgccagcccggggcccgcgtatcccggtggggtcgttctcggctctcacagggttaagccgcccgcaccagcccagascccctgagcgcacggagtcgcggaaatggatcaaaccgaacccacctaggcttttttttctttttcttccccgctgcctctgaagagagagaagtttatt

SEQ ID NO: 361986 - DNA, 201 bp, Homo sapiens
tatagttcaacctacttttgtttttggtttggtatttaacttttgtttctctatctgcattctctccagattctgaaaatgatcagaagtgcagttgaagsgctctctctttcttaacatcttttaaactaataaaagaacactctgttttccttttcattatcgttcagacatcgcattcaaaaggtttctaaaaatact

SEQ ID NO: 361987 - DNA, 201 bp, Homo sapiens
tgctaacttgtttaatatttatattatgtttatcatttttattaaccgaaatatcataatattgcaaaaaaaattaataattaggaaatggcattgttgtraagcccttacattcatggaaaatttccttctctaggcattctagagtacagccaaacaattgagaatgatcatacaggttcacatattggataaaaacat

SEQ ID NO: 361988 - DNA, 201 bp, Homo sapiens
gcctactaggctacttatctaaactgctctgggacattgccaagaaggaagtatttttatcttggctcataccaaaaactaattgaaatattttcaaaggstatactttattgttaatactaattctgtagcatgctatagatttctaaactttgaagttcaaaatggtttttattgtctaaataaaatcctttgttttat

SEQ ID NO: 361989 - DNA, 201 bp, Homo sapiens
aacacctgttaaatttaaaaatatgtctatgaatgaaaattctaacgatgtccaaagtaatgcaatggaatgtgactgagttgaaatcagccatacgaatwagacctttgtggtatatttgtgtcttgatttaggttggttgaagactttcaatgactactttagagacaagactcagtatatttttaataacatggtcct

SEQ ID NO: 361990 - DNA, 201 bp, Homo sapiens
cagttcaagcggttctcctccttcagtctcctgagtagctgggattaaggcacctgccaccatgcctggctaatttttgtatttttagtagagacagggtwtcaccatgttggccaggctggtcttgaactcctgacacctgccttgaactctggtcttgaactcttgaacacctgcctcagcctcccaaagttctgggat

SEQ ID NO: 361991 - DNA, 201 bp, Homo sapiens
acacttcccgaacgtctactatgggacagggactgcaaggtgggcactcctagactaagatttatttttcttcattgtaaactgtatgtatcatcattgayaccatcttttctcttttttataattaatattgttatactaccactcttttgttgttcgtttgcttgagtttgctgtcctttttacttgaaggacagtcag

SEQ ID NO: 361992 - DNA, 201 bp, Homo sapiens
ggttttattgcatctaggtccttcaagtgcactgagttggaaaatttgtgtatgtttgtgaatatacatacagatacctgtatctatatttttatatttcytcatgaaaaaccataagttagtaccgatatctcctgttgtaatgcaatatcatagggtacattccagtcttccacatttgtagttacttatcttactgtg

SEQ ID NO: 361993 - DNA, 201 bp, Homo sapiens
tatgcatttttaatttgttgtatttactgtgttttgggagatttttcccaagagtcttccctgccactccctcggttcagtactctggtattgagtctttyctggctttgagtatttggttctaactttacttctgtgctttttgtattgttgtccgtaagtccaagtatttccctccttttttatttatccgtgagcagc

SEQ ID NO: 361994 - DNA, 201 bp, Homo sapiens
aaaatttgtgtatgtttgtgaatatacatacagatacctgtatctatatttttatatttcctcatgaaaaaccataagttagtaccgatatctcctgttgkaatgcaatatcatagggtacattccagtcttccacatttgtagttacttatcttactgtgaaaattctggctcccttgttctcatttgttcaatcttaga

SEQ ID NO: 361995 - DNA, 201 bp, Homo sapiens
tggcccttcagtttaggagctgttgaccgaatctctcagaatcttcttatttatgctgggattccatgctgatttttcatgcagggcagttgcaggtcagyacttgaattatttcagttttacttttaccatatctgtcagaaatgctgccaattttatggcctgcggatggcctgtttctcctgactctacctggatgca

SEQ ID NO: 361996 - DNA, 201 bp, Homo sapiens
gttatgaactcatgccactgtgggttttgttcactgtcagtcttgaaaaatcaggtggcctaaagatagtcactctcgtaattatttttcccatgtgcctstgtcaagattcttttaagtaataatgcagatatttatagagcataggagaatctttttatgtttaaagaaagtagataaatataaggagttagtattttg

SEQ ID NO: 361997 - DNA, 201 bp, Homo sapiens
tgttggttatttttcttaggttgaaccatataaaattgccaatatttgactacttttgatatacaaaaatggcaatttcatgcatcagtccaatattacayataaaatatggtaagatattggaggggactgcagattagaatctagtgctcaatctttgtctcactcagatttgtctcactcagattccttctgagtgag

SEQ ID NO: 361998 - DNA, 201 bp, Homo sapiens; identical to SEQ ID NO: 78234

SEQ ID NO: 361999 - DNA, 201 bp, Homo sapiens
tgacatagccatggtcattcatctaccaattgtctctgaccactttcacacaacagtggcatagtttagtagttaagacagaaactggctcacaaaacctraaatatttactctctggcccttttcagagtttgccaatccctagtttaaactatatttctctattgttaatattggaggcaaatagtattgttagatctg

SEQ ID NO: 362000 - DNA, 201 bp, Homo sapiens
agaatctttttatgtttaaagaaagtagataaatataaggagttagtattttgccaataatgctttcacttgcttctgttttagaaagcacgttttatcasaaatttgaacatgcattagaactgatatccagtcatatatcttatattcagccagtgttccttccttctgtctctcgtctctacatcttgtaagaattgc

SEQ ID NO: 362001 - DNA, 201 bp, Homo sapiens
agaatctagtgctcaatctttgtctcactcagatttgtctcactcagattccttctgagtgagaacagcttttttggcattggaaaatattctggaatacrggcttgatcgtgaacagtatcattttgcttgaaggaaaaatggttttatagccagattagtgcagatgaattctgtttctggtcaagatttgctaaagtt

SEQ ID NO: 362002 - DNA, 201 bp, Homo sapiens
gaatctgtcctgcagaaataatcagatatggaggtggagagaactctggaaaaggacgtgcatttcagctttgtttatcatgtgaacaaatattttaaaakacttaaatgtttatcagtaatgaattggtcaaatattctacatgtgtaagttatatagaaagatttttaaaagatgcctaaattagcatttctttttgta

SEQ ID NO: 362003 - DNA, 201 bp, Homo sapiens
gtattctgagaaaaacattagggtcaggtcattgtaaatagatcatcttttactttcttccagctgaattacaggttggcacttatccagatttattcctsttagcataggaagataagatatattgattaataaggtagtataaaaattgtctgcaaaaatgttttgaaatgtctgcagttttctcaggcagactgttta

SEQ ID NO: 362004 - DNA, 201 bp, Homo sapiens
gagagcagagatttgaatgtagttctgtgtagttcctgaagcccaggctcctaacctctgtcattgtgttctcagtaaactttcatctgaaagaaatattktgtttataaaacagtgtttgagaaattactgcattacattatacttgttttcttgtgtaatctagaccccttaagtgtttcagaaaaatcatttgtaaat

SEQ ID NO: 362005 - DNA, 201 bp, Homo sapiens
aaattattgagtacttttatgtatttcagtattgtgctaggaagaaatgttgaaaacatccttgcttatagggaaattccagtctaatttgataaaatacrgatacagccaaatgtagcagataaaattaagtatgcaaattagctgcaaaagagtagcgcataaggagaattagtggggtatggagtatgtccttatcca

SEQ ID NO: 362006 - DNA, 201 bp, Homo sapiens
ccacttacttgaacaaaacattcttagtgttagttgcttaaatgtatgtttttggaggaaaacttaatagatatttaagtttgctcctgttatttaaattstgagcttgtactaagtggcattactaatagatttttttgtgtgacttctagtgtaatgcttatgcagtggcttttctctttttgaagatgagctatggat

SEQ ID NO: 362007 - DNA, 201 bp, Homo sapiens
gcagataaaattaagtatgcaaattagctgcaaaagagtagcgcataaggagaattagtggggtatggagtatgtccttatccataggagagaagagtttyaggacttgtgacaaccttttgtggcgactatatgctcatagcaagcattagtgaccagcatctacagtgtcaccgttgtgaatatgattcagtgaaacag

SEQ ID NO: 362008 - DNA, 201 bp, Homo sapiens
agcccattaaataaattaaataaatttatttttgcactattaaatcagtttattttcaaaagagaagtcacttaaaaaaaagtgtgtgaggaagaaggtgraatgagatctttttaccttcaatgagtccttagaatcacaaagattttctttgtgagcctctcactgtggcagacatgaaggtgttttagcatggcagcc

SEQ ID NO: 362009 - DNA, 201 bp, Homo sapiens
agatctctccactgcactccagcctgggtgacagagtgagacttcgtctctaaaataaacaaacaaacaaacttcttacaagtattgaaatgttaactctrctggttacctcagatccatatatcaccttcgttttgacctgatgatgaattgagatcaaacacaggcattccagctcattggcccctttcaagctcccca

SEQ ID NO: 362010 - DNA, 201 bp, Homo sapiens
gatgaaacctgagaagggagataatatttgatgatgcacaacatataatctatgtacagcccaatccttgtactttgagagttttgtgataggttgagaaytttcataaaaaggtatgccttgtcctgaaatgtttgtaggaaatgttttcagtatttttagtattaaatcaatggaagatatattttaaacatatgagtt

SEQ ID NO: 362011 - DNA, 201 bp, Homo sapiens
cagagtgagacttcgtctctaaaataaacaaacaaacaaacttcttacaagtattgaaatgttaactctactggttacctcagatccatatatcaccttcsttttgacctgatgatgaattgagatcaaacacaggcattccagctcattggcccctttcaagctccccactttttttgagacaggttctctttctgtcac

SEQ ID NO: 362012 - DNA, 201 bp, Homo sapiens
gctctctggtaccttagcttatgactaaaggaacttttattttgaagccataatgaatatggtcctttttctgaaacatttactgctagagatttatacccttcccagaatgtctttgagctcatttcagagctaaacattataatgaaaaccattgtgtagtccagcatccagaacttgagttgattcttttttttttca

SEQ ID NO: 362013 - DNA, 201 bp, Homo sapiens
gagcttctgggacaagcctcttttctccctcttaaaaaggggagagcatcttactctcgcatgaccgtgttcaaagacagcattgggtaagtgttgatgcyggagctgctgcagccattttgtaaccctgcagggaaagcctgaggacagaagtcaactggataagtagagccttggtccctgatgatgctgagctggtga

SEQ ID NO: 362014 - DNA, 201 bp, Homo sapiens; identical to SEQ ID NO: 78223

SEQ ID NO: 362015 - DNA, 201 bp, Homo sapiens; identical to SEQ ID NO: 78225

SEQ ID NO: 362016 - DNA, 201 bp, Homo sapiens
tcccttccaagcgtagtctgtatgttcaagcatgtatatatgtatatttaattcacccttttttctgtaaaagagaacttatatatgtatatttaataacrtatatgtatatttaatccacccttttttcctcaaaagagaacttcaacatactgttttattccttctcatactaattttcacagaatatgtagttgtgct

SEQ ID NO: 362017 - DNA, 201 bp, Homo sapiens
taaggccttgagtcataagggggttatacgatccagagagacagataacatggcagcggtgagggaaatactttccaaatgacctgtccacctctatagastgggactcaatgacataatgatccctccttgtagtgagcctgtgtgctctctcttaactctgttggaacaggaaaaagtggttgaggactaccattgtta

SEQ ID NO: 362018 - DNA, 201 bp, Homo sapiens
tttattatactgtatttgcactctattgtattgttgatgatctaagtttacttggttctgagcattctgacattaaggccttgagtcataagggggttatacgatccagagagacagataacatggcagcggtgagggaaatactttccaaatgacctgtccacctctatagactgggactcaatgacataatgatccctc

SEQ ID NO: 362019 - DNA, 201 bp, Homo sapiens
tgtgtgtggggtccaaaaagataagaaaaatgtggtaggagccctgaacctacttagatagattagcttctacatttcttttaccctaccctgcttggagytggtgccaagaaagcactgatatttttattacttttttattatactgtatttgcactctattgtattgttgatgatctaagtttacttggttctgagcat

SEQ ID NO: 362020 - DNA, 201 bp, Homo sapiens
gttcctcttgctcctggcaaccactgttctgttttctgtctctacaagtttgactactctattaggtgccttatgtacgtagaatcatataatttttgtcyttttctgtctgccttacttcattcagcatagtatcttcaaggctcattcatgttgtagcatgtatcagaatttctttcctttttaaggctacatgatatt

SEQ ID NO: 362021 - DNA, 201 bp, Homo sapiens
ctttctctgtactctacttaaaatgtacatagataggagttcgtgtgtcagataaatttgttctgtgatgcacataaaaaacatgctgtgaatctctaatyatgttaaaaattattttcttagtgcaacattatactcattatatactctacacatttagtctttgaatagattcctggcatgataattacataatcattc

SEQ ID NO: 362022 - DNA, 201 bp, Homo sapiens
agaacctaagaacagtttatatattcaccaaagtcttgaccagtttctctttgtggatcttttagtgtgaaaaggggctccaaatgtgtgctgagatgaargtaccatcagttagtatagattttttatcttcaccaaattggtgggtttcattgctttagcaagaatgcaaactctttatttatataatctttgtactat

SEQ ID NO: 362023 - DNA, 201 bp, Homo sapiens
tttaagtgtacagtagcattacaacatttacatcattgtgcagctgttactaccatccatctctagaactttgtcatcaccccaaatgcaaactttgtacstgttgaacagtaattcccgttcctcttgctcctggcaaccactgttctgttttctgtctctacaagtttgactactctattaggtgccttatgtacgtag

SEQ ID NO: 362024 - DNA, 201 bp, Homo sapiens
actgttctgttttctgtctctacaagtttgactactctattaggtgccttatgtacgtagaatcatataatttttgtccttttctgtctgccttacttcaytcagcatagtatcttcaaggctcattcatgttgtagcatgtatcagaatttctttcctttttaaggctacatgatattcccctgtatgtattgaaagtag

SEQ ID NO: 362025 - DNA, 201 bp, Homo sapiens
tgtatgtgtgcttcttgtatttttgttatatttttatgtcatgcttttttgcaaaatacattataaacatttatgaatttcactagttttctgtgatatcrtttttaatggctgaataatgttctgtcactgtatggatgagttaacttgactaatctcttacttttggagatctaggtaattttttaacttttatctttg

SEQ ID NO: 362026 - DNA, 201 bp, Homo sapiens
cagcaatgcacagatttctagtttcctcacatccttatcaacacttatttgctgttttattattttaagtaataggcatccctaatgggtgttgtaccgtrctttttaaacatgtatcttggagaatcttttagtaaagtctgttatgtgaatgggacttgttatttaactactcccgattttctggcctcttggtaatat

SEQ ID NO: 362027 - DNA, 201 bp, Homo sapiens
atccctaatgggtgttgtaccgtgctttttaaacatgtatcttggagaatcttttagtaaagtctgttatgtgaatgggacttgttatttaactactcccrattttctggcctcttggtaatatatttagtgtatcttttgtctttagtatatataatgctcttattttaaaatacaatattttctgacttattttcagtg

SEQ ID NO: 362028 - DNA, 201 bp, Homo sapiens
gtttttgaatttttcatttaaaatttttttaaaatttaagaatgaaatactgtatgtcatcttgtattatttcctgtttctccagatgtgtcattagaaaktcagctggttttctcatgtgaaattaatttgtgattctttgaagcttgctaaatgatgcattgtttgctactaagttgtctgtaacaatttccccattag

SEQ ID NO: 362029 - DNA, 201 bp, Homo sapiens; identical to SEQ ID NO: 78236

SEQ ID NO: 362030 - DNA, 201 bp, Homo sapiens
ctttctccactaatattcccctgcttgtcagagaaatagttcaattgatacctgttgaacactgtgaatggaaagacttggaagtgcctgtattcattctragtaaatttttttatagatacgggtatttctcattacttttaaaaaattgttagtcttgaatgtacagctacaatccatcttcatcttatttttatcatc

SEQ ID NO: 362031 - DNA, 201 bp, Homo sapiens; identical to SEQ ID NO: 78237

SEQ ID NO: 362032 - DNA, 201 bp, Homo sapiens
gctctacagactgattaaaaaatagggtgcagcatgaagactcagaagtgtagcttacttattaaaatgatttattacagagaccagatgaaaattttttwaaaaaaagaggacctggaactctcaaaaagttttgagttataatctctgagaaatatgaaacaaggtgaaacactgaaacaaaaagatgacaaaaaatga

SEQ ID NO: 362033 - DNA, 201 bp, Homo sapiens
atagatacgggtatttctcattacttttaaaaaattgttagtcttgaatgtacagctacaatccatcttcatcttatttttatcatcactaacaacagtgrctttaagtatggtccttttttaggttaacatagcttttctgttattgcttgtaaatattttttaaagtatttccagacatattgtttctgttaagacttt

SEQ ID NO: 362034 - DNA, 201 bp, Homo sapiens
accctaccctgcttggagctggtgccaagaaagcactgatatttttattacttttttattatactgtatttgcactctattgtattgttgatgatctaagwttacttggttctgagcattctgacattaaggccttgagtcataagggggttatacgatccagagagacagataacatggcagcggtgagggaaatacttt

SEQ ID NO: 362035 - DNA, 201 bp, Homo sapiens
actacacccagctaatttttgtatttttagcagagacacggtttcaccatgttggccaggctggtctcgaactcttggactcaagtgatctgcccacctcrccctttcaaagtgctgggattgtgggcatgagccactgtgcccggtctgtttttgtattagcccactctcacactgctatagcgaaatacccaagactgg

SEQ ID NO: 362036 - DNA, 201 bp, Homo sapiens
gactttttcatatgtatatttaaacacagtataagtttttttccacaaggataggatagtattttaaaacaaatttattagagatagtaaagtgtttaaasctatcttctctacaacttttgtatctatcttctttatagttttctgtagggcatttttatttgactgttagtctgtgttatttattttttaaagagcagg

SEQ ID NO: 362037 - DNA, 201 bp, Homo sapiens
tgttatgctagagcaaatggcttgaatttaattgagattaaagtaaaaactttactggaattattgtgaaagtgaaaaaagacccttttatggatgctgtcatcaatacagagcactcaacatgttttgtcggtgagaggttttaaaaatcttgctgcagagagatgtatcaaaattttaaaagcctctgcttcccctagg

SEQ ID NO: 362038 - DNA, 201 bp, Homo sapiens
cagccttcttatcaacattttaattacttggagtataaagtaagaattgtatatagtattctttgttttaaacagtattttattaaataacatgcagtcartgtgggaaaataggaaaaaataatatactagcagaaagtaaggagaaatccttctgtaccctttagagataacctgttttgtgatatataacattatagc

SEQ ID NO: 362039 - DNA, 201 bp, Homo sapiens
taggatttgaaacaaaaatcacaagattctctgccacaaaaaaatataataaggctgagtgcggagccaaggtaaattcataatttcttacaaatgtttascactttctggcttaatagtttttggttttatggttctggtttttagttagcgtatattttgaggcaatcaatttattaattaaaaaactcctaaaaaatg

SEQ ID NO: 362040 - DNA, 201 bp, Homo sapiens
taattttcagaatggctcaaatcctatttgaagtggggtgaatggataggtggataggtggtagatggaaggaaattacaatttccaaagcttggtttctraattgatatattttttgataagttatagttttatctctgctggaaccatcagtcaatactctcctttttcagccataaattggaggggttacctccttta

SEQ ID NO: 362041 - DNA, 201 bp, Homo sapiens
ttttggtttccttcagagataaggaacttatgcttggctatgcaggcaaacatatatgacttataataatgactacaagcaaatgctcgaggcgtgtgtgygtgtgtgtgtattgaaaggctttttaaaatcattatcagtgaacttgcaggatttatttcctacccactacatgtcagttactgccataaaacacacaaa

SEQ ID NO: 362042 - DNA, 201 bp, Homo sapiens
atgtgtgtataattttcagaatggctcaaatcctatttgaagtggggtgaatggataggtggataggtggtagatggaaggaaattacaatttccaaagcwtggtttctgaattgatatattttttgataagttatagttttatctctgctggaaccatcagtcaatactctcctttttcagccataaattggaggggtta

SEQ ID NO: 362043 - DNA, 201 bp, Homo sapiens
aggataaatttatgggaagagtgaagtctgctcctagatgctctggcactgctgtctcttagctaattagcaagccttgtaaaggggcctgtctttagacwagaaaaggcagagaggaagggatgaagacctcttgtatttgtaaattgctgtcctgccatcaagcaggcagaagaagggacagaatggccccctggtttt

SEQ ID NO: 362044 - DNA, 201 bp, Homo sapiens
tgctgcgtggccttgcccattccagccactatctacaaacttacccattagctttcctattctgttggcctgtctttcaactcttttccttgatcacaccyttcccctacactatgaagatcttgagatactaaaaagaagcttctgtaaaggtttgaaacctagggaacatgaacaccactgaaatacactacatgcaaa

SEQ ID NO: 362045 - DNA, 201 bp, Homo sapiens
tctcctgcctctgtcactgaaagggccatgactcagagaaggcagctgggctgatttaggtacacaggcaggtctgcctcaccaggcagctcagctgaccsagctttcctccaaaacctcataaataatgctgtagaccagactcaagtgattcagttccaaccctacaaattagcatgtgtgtggggtccaaaaagataa

SEQ ID NO: 362046 - DNA, 201 bp, Homo sapiens
tggagggcatcaaatactctgggcttgaggttaccaccacccagcatagatggtagaggacatcagcgacctgaagaacccagaggcttctggggaggatrggcggtcaccatcccttagcctcacttctaggtggctcctccactgtagttgttttaaatgtgattgttttctggaagcagctggagctgactagagtca

SEQ ID NO: 362047 - DNA, 201 bp, Homo sapiens
aaaacaaaaaaaaaaaaacattttaataccatacagacctaccaaaatgtgttatctacaaatctgccccacagtcttcagctacagatacttacctccaratgttatgattcaatgtattattcttcattttctctcctccttcctctttgtcttttttactccacccttcctctctagtgttcttctttcatttattta

SEQ ID NO: 362048 - DNA, 201 bp, Homo sapiens
gagaattttcataaaaaggtatgccttgtcctgaaatgtttgtaggaaatgttttcagtatttttagtattaaatcaatggaagatatattttaaacataygagttagatgtgtgctgtttattttcttttattgcttacaactaaacttggtagtttatggagtattttctaagactgttatttataaaatgtaataaaa

SEQ ID NO: 362049 - DNA, 201 bp, Homo sapiens
ctctcaagattgtgtagatttgggataggacccaagaatctatgttgattagaggtgccccaactcattctgttgtgtggttaatttggggaaacaccaayggttaggaagaactaatttggtttggaggattggtatatatgcacgttattgcttctggagtatagaagattaatcaggaagtgttctggctactcactg

SEQ ID NO: 362050 - DNA, 201 bp, Homo sapiens
ttaagtgcttatcatgtatgttctagaattcagggcaaatttgtgtccttctgatgtttttgggttttgttgttgttaatggcaagtgtttttgctcaacrcagtaaatattttatatcagaccaaatcttcctgcttgtaagaatcttctggtttattatctgtttttctattcttgtggatggattagagggtaatacc

SEQ ID NO: 362051 - DNA, 201 bp, Homo sapiens; identical to SEQ ID NO: 78232

SEQ ID NO: 362052 - DNA, 201 bp, Homo sapiens
caacttcctattctgactcactgatgtgtttatttctaagtcacagttatggtagctttttaatggcttacaccaactggaaggacagattgctctttatyactcttctctagactgtttcaggctaaattcagatttattatttttgtcatttaacatttcttatctccatttctcttatattttccttcagcttgatct

SEQ ID NO: 362053 - DNA, 201 bp, Homo sapiens
tatctaaaataaaactgaattttgacagaaaatttcgggttctacagttagaagaaatatttgggagaccatttttttagaacatctttttgtaaggatttatttgttcaaagggtaaatttggtgaccactatgaatgttaaatatcttgatgctaaaaaatatatatatgaatttatctaccagaaaggaaacataatt

SEQ ID NO: 362054 - DNA, 201 bp, Homo sapiens
ttgactagagaggaaatttagagcaatacatcatgactgctacttaagtgatgctcaatgaatgtcagtattaaattattctggtcagttttgcttgtttktttgtttgtgtgttaggtcagattgaagttatcatggatcgaagactcatgcaagatgataatcgtggccttgagcaaggtatccaggataacaagatta

SEQ ID NO: 362055 - DNA, 201 bp, Homo sapiens
aggctggagtgcagtggcgtaatcatagctcactgcagcctcaaactcacaggctcaagcaatcctcccacctcagccttccaagtagctgggactacagrcatgcaccaccacacctggctaactttttaattttattttgtaaatatgggatctccttatgttgcccaggctggtctagaattccttacctcaagcaat

SEQ ID NO: 362056 - DNA, 201 bp, Homo sapiens
catgtgagcctattattcacccactctttttctccatcactgaatcctctttacatccttcatgacattattaacaaactggccatgtcatttattccttrttgtgtgtctcacttggtagactagcagctccatgagggtagagagcttgtttggttttgcatcccctggcaaatacctggcacacagtaggtgttcaac

SEQ ID NO: 362057 - DNA, 201 bp, Homo sapiens
ttatcctaaagaattcaaggcaataatagaatacaggatttgacatcctggaccctctccagcttctgttattttgagaaaagctgagatatttttacctkttaaataaagctgttttgaacttttcttttggtgagggaattagtaactgatggtcctagagactcttaaacacataaaaactaagctattctgtattcc

SEQ ID NO: 362058 - DNA, 201 bp, Homo sapiens
gtggctcacgcctgtaatcccagcactttgggaagctgaggcgggcaaatcacctgaggctgggggttcaagaccagcctgaccaacatggagaaaccacrtctctaccaaaaatacaaaattagccaggcatggtggcgcatgcctgtaatcccggttactcgggaggctgaggcaggagaatcgcttgaacctgggagg

SEQ ID NO: 362059 - DNA, 201 bp, Homo sapiens
gtgaaaatgtggtatcctggtatatattctcctcaggtggttctttggtctcatatttggaggttgggtgccagagtgcttctaagtaaactttaagaccrttacaaataaagataaaccataattcaataaagcttggaatttgtataactgtccatttaagattttagttttataccatgagacctgaaaaatttcaga

SEQ ID NO: 362060 - DNA, 201 bp, Homo sapiens
tctctaccaaaaatacaaaattagccaggcatggtggcgcatgcctgtaatcccggttactcgggaggctgaggcaggagaatcgcttgaacctgggaggyggaggttgcagtgagccgagattgcaccattgcacttcagcctgggcaacaagagtgaaactctgtctcaaataaataaataaataaaccaaccagatgt

SEQ ID NO: 362061 - DNA, 201 bp, Homo sapiens
tatgcaacatagcaagagtaattacagattcattgaaatacatttaaatattgactgaagagaatattaagcttcagacaccagatatgcatagaagaacrtggttcacattctatgtgaaaatgtggtatcctggtatatattctcctcaggtggttctttggtctcatatttggaggttgggtgccagagtgcttctaa

SEQ ID NO: 362062 - DNA, 201 bp, Homo sapiens
gctggaaaataatataggtatgtattggtatattctttatttgggctattttggacagttaattttcgggatgtgaagtgaggctctgttcttttttcgagtaactattttccctgttagtcattattgttgaataatttattcttcattaatttatgatatttcttagctcataaactgagttacagagatttactatag

SEQ ID NO: 362063 - DNA, 201 bp, Homo sapiens
atatataacaatggcccagttaattttggatcctttgaaaaagtatacttaaagttgcaaattatatctaaaataaaactgaattttgacagaaaatttcrggttctacagttagaagaaatatttgggagaccatttttttagaacatctttttgtaaggatttatttgttcaaagggtaaatttggtgaccactatgaa

SEQ ID NO: 362064 - DNA, 201 bp, Homo sapiens
gccaccatgcccagctaatttttgtatttttagtagagacggggtttcaccatgttggccaggatggtctcgatctcctgatctcgtgatctgcccgcctygacctcccaacatgttgggattacaggcgtgagcctctgcgcctggttggtatctcttaaatatcttaatgttaaatttctaaatctaacatactgtttt

SEQ ID NO: 362065 - DNA, 201 bp, Homo sapiens
atacaattaaagtagaatgacagaaactagtaaacacttgaggcttatccaaatgaatgtttgatatgttagggactttttaaagctgtcctctgttttayataacaaaggacaaaatggatcatttcataacaaggagtcctaagagataactaaactcaactaaaattgatttaacttctggagagctttccagattat

SEQ ID NO: 362066 - DNA, 201 bp, Homo sapiens
gagtgttccagagatatggtagcttcaggtattgctgtatccagggatccaggggacttaaattatgttgtctgggcactgtatctttgggctctgcttgwtttgctgggtttcttcacaaggtgagtaagatggctctaggcagccgagactaatttttccaacctagcaaccaggaattctctttaatactttatctag

SEQ ID NO: 362067 - DNA, 201 bp, Homo sapiens
ttaggattctagattgtagtatgttacaaaaaatttcaaggatagattatgttcataggtaagttgaaggaaaaaatggaagattcttataatggaacgtraaaaaattcttttccaattggacgtgtgtattctgagaaaaacattagggtcaggtcattgtaaatagatcatcttttactttcttccagctgaattaca

SEQ ID NO: 362068 - DNA, 201 bp, Homo sapiens
tctccagtctcatggaggtcgctgcaaatgccattaattcattcctttttatctcatacacccttgatctgtattaagtgtgttggatttcctcttctctrtctatgaaattgacccaaggcctcactgaggacctgaagatacaattaaagtagaatgacagaaactagtaaacacttgaggcttatccaaatgaatgtt

SEQ ID NO: 362069 - DNA, 201 bp, Homo sapiens
actgagcatgcagcttcaggaggggctcacatagagtggtgagggaggaaggggacacccgcctagccagccagatcagccgaatcaaccctggcgatcartggggtgacagatttcgcagccagatcgccctcacatcctatttgtcagttaaagaaataaaaaatgttaaaaaaaagaaaaccagtacatagtgttttc

SEQ ID NO: 362070 - DNA, 201 bp, Homo sapiens
ctagttggcccaacttgagtcagttccttatgtctgagccagttactgtgtccagaggtataggagttcaaatcactaaggtctagtcattttggtggaartggtcttgggggaaagggaattgtggagagcagggtcagctgcacctaaaggcatgagaatgggtcctccatatgagtggcctcatggaatgggtccagt

SEQ ID NO: 362071 - DNA, 201 bp, Homo sapiens
aaaatcaatgttaaaaaattgactcacgacttatattactaattgtagtaaatgttaattaaatttttagttacaatattttgactggctttctagaaatygggggaaaaagatattcttgggttttcattagttgatttcagtccttaaaaaatgcattcaaagtagtatcttgaatatcttctccattttttaatggca

SEQ ID NO: 362072 - DNA, 201 bp, Homo sapiens
ttgactaaaggagagggtaaagaagctaagctttccctatgggacgatactttgaagggagaaagaaaattgctagtgtaaagtacggtgcttatgaaggytttgaatcctggaggagattggcttgatttagaatctttggtgcctgtgaagagtagttgggaaaacactgtaggtagttcaggatcagattgcaaattg

SEQ ID NO: 362073 - DNA, 201 bp, Homo sapiens
taatacaagcattacctccattttacaggcaagaaaatagatatttaggaagaagaaattactatcctaaggtttcacagttggcacatgatagagtcctstttcttattcttttggagatctaatgataccataaatgaagggttttcctatgtgttatttttatagtacatgggcagggtgttttaaatgtattgaaat

SEQ ID NO: 362074 - DNA, 201 bp, Homo sapiens
ggagacattttgtaaagagaaagaccaaagctttttaacaggtttgatcaagggtaatgatgagtggcttgaatcagaaaatttctcctacctttttccaytggggtgttggagactggttgtactatttgcagaaggagatagggacaagctgatctggaaagtcaagttcatttcatttatgatgacgtggatgttagt

SEQ ID NO: 362075 - DNA, 201 bp, Homo sapiens
gccgtcaaaagtccaggctgcttttacctgttagctctaccactgttagcctgtggctcttgttcttgtgaactcaggatggttcctgcttctacatacaktacatctgtgtttcgtccagaaagagggatgagcaaaggaggaaggtcatggcagttgggataaactggggactcagtaactttgtcagaatttccacat

SEQ ID NO: 362076 - DNA, 201 bp, Homo sapiens
agacattttgtaaagagaaagaccaaagctttttaacaggtttgatcaagggtaatgatgagtggcttgaatcagaaaatttctcctacctttttccattkgggtgttggagactggttgtactatttgcagaaggagatagggacaagctgatctggaaagtcaagttcatttcatttatgatgacgtggatgttagtgg

SEQ ID NO: 362077 - DNA, 201 bp, Homo sapiens
gcactgaggcacggagagattaattagcttgcccaagatcacacagctgcaagctgagatttgaacaggtagcctttgtagcccaggctcccagccactgrgttgtcttgcctcttaggaatctgttgcctactgtttaggctgccatttgcttatggaaagatctgatgtaaaatatagagcagtgatcctcaacctttt

SEQ ID NO: 362078 - DNA, 201 bp, Homo sapiens
ttttttttctttgggatagggttttgctctgtcatccaggctggagtgcagtgatggaatcacagcttactgcagtggccttgaattcttgggcccaagcyattctcccacctcagccttctgagtagctgggactacaggtgtgtatgccactgtgcccagccagttttaaaatttttattttgtggagacggggtctta

SEQ ID NO: 362079 - DNA, 201 bp, Homo sapiens
gacggctttaggatttgtttctttgacggtttatccttacccctttcctgctactggttggttaatgaggcactgagctaggaaccctgtaagtgttcaartgttaaaattgtgttgttgtacctttaaatataaggagaagaaattgggagagatcagattaaaatattaaatacttatatggtttagaaaagtgacagc

SEQ ID NO: 362080 - DNA, 201 bp, Homo sapiens
ccagtgccatgctcttggaattcccagcctccagaactgtgagctgaataaacttcttttatagataaattatccagtctgtggtattctgttatggcagsagaaaatggactaaaaacaggcattgacggctttaggatttgtttctttgacggtttatccttacccctttcctgctactggttggttaatgaggcactg

SEQ ID NO: 362081 - DNA, 201 bp, Homo sapiens
ccagatgccagtgccatgctcttggaattcccagcctccagaactgtgagctgaataaacttcttttatagataaattatccagtctgtggtattctgttrtggcagcagaaaatggactaaaaacaggcattgacggctttaggatttgtttctttgacggtttatccttacccctttcctgctactggttggttaatga

SEQ ID NO: 362082 - DNA, 201 bp, Homo sapiens
ctggcagaggacatgcctaatatatgtcatatgaatgaatatcgaaatgcatagatgaatgagctgttagagtacattttgccactgtatttattgcaatktctgcctattaccttgtcttcatatgcatgttgcattcctcctactagattccagggacttgttgccttcattttcatttgtccttatatttggtagaca

SEQ ID NO: 362083 - DNA, 201 bp, Homo sapiens
gccttagagactcttggtgatagttccggttagtgcttacttcatcagctgcttctggaccaggttaaaagcccttcccctatgctgcctccaaactgtgyatctcaccttcctgcaagtgtgcgattatttgatcctgtcttctcccctcctttggaccataaactccatgagagtggggaatgtgcctttctttgcttc

SEQ ID NO: 362084 - DNA, 201 bp, Homo sapiens
ccctaaaatgttaatttctttgttagtatatatattgtatcttattatatgttgttcatatgtatattgtatatctttgtaaggatgcatactgtttattytaaggtaatgcagtaattattactcataaaattttgaatgttttgctctaagtgaatttaatgataattatgcatatcgaaagtgagataaataccaccc

SEQ ID NO: 362085 - DNA, 201 bp, Homo sapiens
cacttgtccttggaacttactctcttcacccacctcagcatccttttactgttcattctctccctctctctttctcccttgctcctcatatccaacacttmctgggagattctttctgttagcttttgaacactctgttttcttctattaaaagtagaaatggaatacagccttccttcagactcttatttccatttcctg

SEQ ID NO: 362086 - DNA, 201 bp, Homo sapiens
tggtatttctttaaacagcaaggtatctgtttttaataaccaaatatttgttggtcatttcctagttgacccaggcacacagtggttattttttgtaatayaacctttaactgtcagaatcaagatatttagtacctcctcttgccaattataggataaaacaataatttcaaagagtaattcattatttcaactaaatat

SEQ ID NO: 362087 - DNA, 201 bp, Homo sapiens
aagacttttaagcatttttattctgaatttaaataggaatgcctattttaaaaatctggacaagttctacctttcccacctaaaagttgttttctaatatscttgtggtttttcttcatattgttttaaataatgttttaatttttaaattatttcttccactgaataaaaaggaagctttgtctttttctcttgggaaga

SEQ ID NO: 362088 - DNA, 201 bp, Homo sapiens
ttttgaggatggaacgtttgactaaaaaagaaaatattacttttaagtctgtaatatttctgcttttaaaattgaccattttttaagctttggatatagtrgtacttgggcaaaactaggtatctagctccaccagtggggaatcggggtagcaacaacacgattgtggtagttttacattttttaaaataagtttacatt

SEQ ID NO: 362089 - DNA, 201 bp, Homo sapiens
tttctcttctatgatttcctgcaaaagttaaatttaaactttttccaaaacataaaaattgcagcatacattctgaattagcatgttaattcgactacagycatttggattccagataaaatctcaacttcatggtgattcatttttttatgtacaaaagaaagtattttcttaaaattatacaaaaccagttatttgtat

SEQ ID NO: 362090 - DNA, 201 bp, Homo sapiens
ttgacaaataaattattctgtgaaaaactgaattattcacatcatgaaaagccattcttttttaatagaggaaaaagagaaaagtgtgttcacatacactscaagtcaaaatgtgacactataatgggaaatctttgtataatactcctaaatgaatgtgcaattaggcagtgttctttctaaatgagatttatagagatt

SEQ ID NO: 362091 - DNA, 201 bp, Homo sapiens
ggcagggattgccctcgatttttagattttttgtttgtttgtttgcattactattcctgcttagttagtaggtcatcttctgagtagacatccctagtaartattcctgactataatctcttttggtatcctagtaactatagctgaatctttttgtcttagtaaaagatgttaatgaccctgactctcaaacccttctcc

SEQ ID NO: 362092 - DNA, 201 bp, Homo sapiens
cacttagaataatagtctccagtctcatggaggtcgctgcaaatgccattaattcattcctttttatctcatacacccttgatctgtattaagtgtgttgratttcctcttctctatctatgaaattgacccaaggcctcactgaggacctgaagatacaattaaagtagaatgacagaaactagtaaacacttgaggctt

SEQ ID NO: 362093 - DNA, 201 bp, Homo sapiens
tttatgatgacgtggatgttagtggaaataatcaagtgggctggaaagccagtgagagatcagggaagggagatgctgatctggtagtcatcagcatagcygagaatgaatgagctcacttggggactgtgcttagtgagggcagggccaagtacatttctgataaccaaaagctgcacatcttacattaagaatattttg

SEQ ID NO: 362094 - DNA, 201 bp, Homo sapiens
ttacctaagaaaagataagatgatcagaaggaaggatttcaaagaagcgttttagtagagtttaaaaaagacccttctcatctttggcacaaatgataagwctaaattattttttttctgggttaagacagaacataaattgtgtgtgtgtgtgtgtgtgtgtgtgtgtgtgtgtgtctgtgtgtgtagggaggatgggca

SEQ ID NO: 362095 - DNA, 201 bp, Homo sapiens
aggctctgagaagagcaacatcattttgagagtggtgctaaaaccctgtaagcctgagtgttctgtcctcccaaagctgtgatacggctcagcctcctgayggtgacctacttggttttatttcttcttgctgtctcagaaaatattctaaagatgcttaatattattttacaaatacaggtataaataatatatatgtgt

SEQ ID NO: 362096 - DNA, 201 bp, Homo sapiens
aggaatatttatacttaaatacatttaaataaaaatcaaaggtatgaatcatttctttagaagaaaattgtgctaatgatggaagcatctcattaaaccamcttacatgtagtttctaatattggtacttttaaagtttaatttcttcacttaaaaattagtagtgtattaaaatgaaacattgtggtgtaatataaaaac

SEQ ID NO: 362097 - DNA, 201 bp, Homo sapiens
ccaaagtactggaattacaggcatgagccaccgcaccggcatgccctccagtttttctctccccacacgagggagcacgctttttggtttccttagactgrtgctaagcaacagttaaaagggtgatgccttttgttttctgttctctctctcctgatccacccagtgggggaaggctctgagaagagcaacatcattttg

SEQ ID NO: 362098 - DNA, 201 bp, Homo sapiens
taggatatttcttgctacttttaggtagaagatccaaccaataattgttttaaacaaaagagatttgagaagaactccagaaatttgtatccttaactcawctttgataaccaatggtatgatatttagaagtttgctattaatgtatttttatgtattatgttatgtcttactactgcatttgttgcttctgtgtctcac

SEQ ID NO: 362099 - DNA, 201 bp, Homo sapiens
acaagggatgttgggcttggagtcccagcttttcccttcacagtcatttggcactcttacctgcatctgagcagcctctgttactgtcatacctaggcagrtgtgagatttatgaaaaatgatttgcctgggcaaagagtatattgcttctgcaatttggtaaggtattctgtagctacgtattttttgtgctcacatcgt

SEQ ID NO: 362100 - DNA, 201 bp, Homo sapiens
gttaggctctgagtctggaaaataccattaaaaggttatttataactggcttgtggctcattgacagacaggtggagatacatacagaatcgtggccacarccccagttcacactctttttggcctcagcactacacatcttaaggggtggagtgggcgcttggagggttacctgtcattttatcaagcccaaaagccttc

SEQ ID NO: 362101 - DNA, 201 bp, Homo sapiens
gacttctctcttgagttccagacttgcatgttcactgacaccaccattcagctatctaatagtttcagaatataacatttgcccttctgtctcctccccartaactggcttgtgggcctgttcctctaaaatgccacccataatcctcccccttgccctagcaaaaaactcaatgccaattttttttcctttcctgcccct

SEQ ID NO: 362102 - DNA, 201 bp, Homo sapiens
gggctagccacatccactctaggcatgtgctgctactggaaccagagttgtcaggatatccctccagttactcaagacaaactagaattccaaaatattaygtaaaatacctagagtttttacactgaaatgttagctattaatttagattaatataccaggatatgcacacatatgcatgcataaacacacacacacaga

SEQ ID NO: 362103 - DNA, 201 bp, Homo sapiens
catggctctccagctctgatgatggagatttgggcaagaatttctctaaaaaggactaagcataagaatataagctttatttttatagggccaactatttsctaagtatattagtttcttattgctgctatcaccacaaacttagtggcgtaaaacaagaaaaatgtgttatcatacagatctttaggtcagaagtctgaa

SEQ ID NO: 362104 - DNA, 201 bp, Homo sapiens
gtcattttgctcttttcacaggaggtaactactatgaccaggctcttatttattttatggatgtatgggaaaacatatgcacatgtacataaaggcatagrcatatatattatacaatgatagcatgccatgcacattgtgctggttttttttttttttttttgagtgggtctattttttaaattgtaaataagcataaca

SEQ ID NO: 362105 - DNA, 201 bp, Homo sapiens
atcattccctattttctcttttgttaatagttctttgaaacttaactttttaattggccccttttcttaaacttactcttctttttcacttaactcctttyggatgtcacactgtcatcaaaaagccctgtccaaatttgtatgcattactacaaagtgacttcctttctcaacgcaattgcactgtttgtgtattaatac

SEQ ID NO: 362106 - DNA, 201 bp, Homo sapiens
taattttggtttctgataaagactgtgatggatagatagaatggggggtacagtgggagtgttagtttagcttgggtgcacatgaagacatctctgagctsagctatgagggcagttgagaccagccagactgggaaagatagggtagaagaaaatagataaatgctggaaaacattttaataagtgggaagtttttcatg

SEQ ID NO: 362107 - DNA, 201 bp, Homo sapiens
gagatttgggtggggatacaaagtctatattagttgtcctcataaggaattgatccatacctattaagtttgttccctatatattggtttaatgtatgatmtaataatgggcccttgtaaatttcaggaaaactcttcctctatatgtgtgtgtgtgtataccattatacatacacagacacacatgtatacatatacata

SEQ ID NO: 362108 - DNA, 201 bp, Homo sapiens
ggaaagatagggtagaagaaaatagataaatgctggaaaacattttaataagtgggaagtttttcatgcctcctcaaaattaatagacagaatagtctttmacctttaagtacagataagaattcagtctttgatgaaagtagcatcccaggcatcatggaggaaaaatggattattaacaaatggagctgggaaaattag

SEQ ID NO: 362109 - DNA, 201 bp, Homo sapiens
catgcctcctcaaaattaatagacagaatagtctttaacctttaagtacagataagaattcagtctttgatgaaagtagcatcccaggcatcatggaggaraaatggattattaacaaatggagctgggaaaattagttactgtatatactgtaattcttggctggttgactttcttgaagaccattgatgcctgtgggac

SEQ ID NO: 362110 - DNA, 201 bp, Homo sapiens
aatatgagtgtgcagatatctgtccaggtcccttctttccatctccagaaatggaactgctggatcacataataattctatgtttaatttttttttaatcwctgtcatttaggtgtatttttttggcagagtaaaacatttaaatattttacatagacataaatatgagcatgataagcattgacatgaaaatggcagtaa

SEQ ID NO: 362111 - DNA, 201 bp, Homo sapiens
atctttgcaggtccttgtaataattgtcatcaggaaatgtacatgtgtaggtaactggcaggggttagtggttcagactatggccattaaaaaaaaaaaaaggcattagctgggtgcagtggcacatgcctgtagtcccagctactcaggaggctgaagtgggaagattgcttgagcccaggagttcgaggccagcctgaa

SEQ ID NO: 362112 - DNA, 201 bp, Homo sapiens
ttacagatataaagtaaaattcctctggcatctgtgtctgtctccatccactcttcaggagaggaattcagatatatgtgcaagcatacatgcaccacacrgtcttacaactgtagaaaagtatagtattgtgtttgtgtcgattttcagcatagtttatcatgctatacaaatgctacatttagcttttttcttctgatg

SEQ ID NO: 362113 - DNA, 201 bp, Homo sapiens
ttttggaatatcataatatgcaattgactgctaaggatttttttccctgttaattggaacttttaaaaattgaaataagtagctatgtgacgaatctgatyattctctacaggcatgaaagagaaggttattttaagggactgcaagcacattctggttacacagattcagaactcagaggttatctttggggctgtttga

SEQ ID NO: 362114 - DNA, 201 bp, Homo sapiens
tcattgcgacatagctgccacccttcactcagcatacgtttaccacccttcactcagtatacgtttattgtacatgtctacgtgctgggaacatgaagatwaataagacatggtctctagccttagggaacttatattctaacatgcatgtaacatatatgtaaaatgaaagttcttattctctcatctttccagctactt

SEQ ID NO: 362115 - DNA, 201 bp, Homo sapiens
attgctagaatgatatatgattttattcttaatttttatttatataaatatcagtgcaaaggaaagttgttcacataaataagtagctggtaatggaaggwgttttctttttttttttttttttttttttttagtatttattgatcattcttgggtgtttctcggagagggggatttggcagggtcataggacaatagtgg

SEQ ID NO: 362116 - DNA, 201 bp, Homo sapiens
ttttgaggaggatgatttttggacttaagtttgaaagccaatttgaggcatcaggcaggtatttgaatatatgggtctgtttttcaggggtgaggtttcarcgggagatacaaatatgggagacatcatggaatttaaatcatggagtggatgagatcatgtaagagagtatagagaggtaagaggctcaagaagctaacc

SEQ ID NO: 362117 - DNA, 201 bp, Homo sapiens
cattgctagaatgatatatgattttattcttaatttttatttatataaatatcagtgcaaaggaaagttgttcacataaataagtagctggtaatggaagkagttttctttttttttttttttttttttttttagtatttattgatcattcttgggtgtttctcggagagggggatttggcagggtcataggacaatagtg

SEQ ID NO: 362118 - DNA, 201 bp, Homo sapiens
gatgaaagtagcatcccaggcatcatggaggaaaaatggattattaacaaatggagctgggaaaattagttactgtatatactgtaattcttggctggttractttcttgaagaccattgatgcctgtgggacaggaattatgttgtaaattaaaactaatatagatgaaaaaagttctatcattggagtaaattttttcc

SEQ ID NO: 362119 - DNA, 201 bp, Homo sapiens
ggagtctaaaggctggagaacctggagttctgacatccaatggcaggagaggaaaagcggccaggctcttagagaggatgagaatttgccctttctctgcmttttaattccatctgggctcccagttgattggatggtgactaccacatttagggcacatcttctccacttagtccactcacacaccgtctcctctggaaa

SEQ ID NO: 362120 - DNA, 201 bp, Homo sapiens
tggtgactaccacatttagggcacatcttctccacttagtccactcacacaccgtctcctctggaaacactctcacagatacacctggggcagctcaatarttctaatcaattgctaaaccacctgggtttcactttgagtagataaaggatgggcccagtgcctactgaagccctgaagaataatcagtgtttgaccagc

SEQ ID NO: 362121 - DNA, 201 bp, Homo sapiens
cctgcctcagccttccaagtagctgggattataggcgcctgccaccatgtccagctaattttgtatttttagtagagacggggtttctccatgttggctakgctagtctcaaactcccgaactcaggtgatccgcccgcttcggactcccaaagtgctgggattacaggcgtgagccaccgcgctcagccgctaatttttg

SEQ ID NO: 362122 - DNA, 201 bp, Homo sapiens
ttcttagggactcagtttcttaatctataaaaaaggtagatgttcaattaggtataactgtcaaagagtcttcatacaacttagtttcacataaaatctcytgtgcctgactccctgcttctaaattcatcttctacacttggtcttagccaaaaggccaagaagtgattaaattcatcttctaagaatgcctgaatctgg

SEQ ID NO: 362123 - DNA, 201 bp, Homo sapiens
tgagtttattttgatgaaatccatgcatagttttttcatgatatgcattttccatgaaacttttgaagacccctcttataagggaatcacattgggatttrgagatccaaatccttagttttgcctctaagcaaactagaggagtatgggtttgtcctttaatttcttagggactcagtttcttaatctataaaaaaggta

SEQ ID NO: 362124 - DNA, 201 bp, Homo sapiens
ttggcctcctgtaaatcagacacctggatgattgatcaaaatgcatagacaaaatgtggcttttcattttagatgcaaaggaaacgtcagccaacttccatgctgttgtagattggcttttagctagtattgcataaaataacaaaaaatatttattcttgaatttaatttactaaactagttttggatatatgctacttt

SEQ ID NO: 362125 - DNA, 201 bp, Homo sapiens
tcccaaagtgctggtattataggcatgagccactgcacctggcttgattttcttttttcatgtgtttcctttctagattatttgtcttctcttccttggtrttctcgggcatatgaaaaaaataataaatgatggataaataagtgtaatgcaaacttagagcgcctcactgatgagttttacagtagttgcctggattaa

SEQ ID NO: 362126 - DNA, 201 bp, Homo sapiens
cttcctaggtagctgggactacaggtgtacaccaccacgcctggctaatttttctatttttagtagggatggggtttcgccatgttggtcaggctggtctygaactcttgacctcaggtaatccacccgccttgtcttcccaaagtgctggtattataggcatgagccactgcacctggcttgattttcttttttcatgtg

SEQ ID NO: 362127 - DNA, 201 bp, Homo sapiens
ttccaaagacttgcacatttaggttggttgatttagaattcattgtttgtagaatggtgtgcttttccaactacagatttaatcctaataaccagggtatktaccatattatcaacactcttagaaaaagacctcataaaaatgccatttaaatttatctttgctgttagctaagttgaacaaattagaaaagaaaaaata

SEQ ID NO: 362128 - DNA, 201 bp, Homo sapiens
taatgcttcagcagtagcggatgtatttcagaattggtctggaatcagtagacttttgattccttagacataaaaatacaatttgaatatagttagtaattcagtgaccaaaaaatttaacagggataaagacaatttcattattcacatctgtcaaaaactcttgttctggttctcttgaacaagaacatgaaactaaat

SEQ ID NO: 362129 - DNA, 201 bp, Homo sapiens
atgaccagtgatgatgagctttttttcacgtttgttggctgcataaatgtcttcttttgagaagtgtctgttcatatctttcgcccactttttggtgatawcccctttatcattttttattgtgtctatttgattcttttctcttttattctttattagtcttactagctatactagtaaagggttgttgccttttttaaa

SEQ ID NO: 362130 - DNA, 201 bp, Homo sapiens
cttagtttcacataaaatctcttgtgcctgactccctgcttctaaattcatcttctacacttggtcttagccaaaaggccaagaagtgattaaattcatcktctaagaatgcctgaatctggggcttccatccctggagtctgccccacttgtaaacaaggtctcagagcttcactgaagttctttttattttcataaaaa

SEQ ID NO: 362131 - DNA, 201 bp, Homo sapiens
gttgcagcttatgtgaactttgaaagagttttccaaagtggtggtgctattttatattccaccaacaacgaatgagagttctgattgttccacatttttgycagtgtttgctgtgtgagtcttttttcttagaaccatgctagtgggtatatagtgatatttcactgttattttaacatgcatttctatgaggactaatga

SEQ ID NO: 362132 - DNA, 201 bp, Homo sapiens
aattattttttttctgggttaagacagaacataaattgtgtgtgtgtgtgtgtgtgtgtgtgtgtgtgtgtgtctgtgtgtgtagggaggatgggcagccmggtggtggagagggagagagagatttattaaggatcaaaatgcaacaccccaaatagggggctgaagtttgaaagttgttctgaaagtcagacagatttc

SEQ ID NO: 362133 - DNA, 201 bp, Homo sapiens
aattgctgggctataggataagtttatgttgcagcttatgtgaactttgaaagagttttccaaagtggtggtgctattttatattccaccaacaacgaatkagagttctgattgttccacatttttgccagtgtttgctgtgtgagtcttttttcttagaaccatgctagtgggtatatagtgatatttcactgttatttt

SEQ ID NO: 362134 - DNA, 201 bp, Homo sapiens
tatgtctttgtcttggtctgtatttgtctatgtctttgtgtcttttctgtgtctatgcttttgtttacatctctgtctatgtttatagctttgttcatgcmaatatctatgtgtatatctgtgtctatctctatctttttgcctttttctgtgtctgagtctttgtctatgtctatgtgtatttgtgtgcctgtgtctgtt

SEQ ID NO: 362135 - DNA, 201 bp, Homo sapiens
agctggaagagcaggaattctgagctttgtggatagtttcaggaaggagaagggacagaactctataatgggggcaggggagagcgaataagagcatgatrttcaagttgtggtctgagtgcccaggggcatggaggaagctcctagagatggaaatcagggagataagagagtttggagagtgaatctcatgggtgatcc

SEQ ID NO: 362136 - DNA, 201 bp, Homo sapiens
ccttaaattattattttttgagagaggagacttactttcctaaataataagccctaataagggacaaggtatggggccagtttctcaatcttataaacaarcttcaatcatcttgaccataagatataatttatataagccagatgctggtcttgcttcagtgtgcctttaacattaatgtttaagttatagagaaactct

SEQ ID NO: 362137 - DNA, 201 bp, Homo sapiens
cccacataccccaaatactcttggccacagctgagccctagacataaccatctccatatgatcccagggatgtgcctcatgtctggaacccagggtctgtktgtaaacattctgagacattgtttgagtattgtttgagacaggcttcagggtatatttgagtcatgactatggaacatttgggaccagacatgggctatt

SEQ ID NO: 362138 - DNA, 201 bp, Homo sapiens
aagggtgggaaaaaccttgggggatgggtaagaagagggagatacccttgcccatggcccttgactgcctctactaggggatgggctcctggtaaatgccrgtgacaagtggagctgccaccgtcagatgctgatgcccgccttccatttcaacatgctgaagccctatatgaagtttttcactgacagtgtgaatatcat

SEQ ID NO: 362139 - DNA, 201 bp, Homo sapiens
tgtcatgacggggccctacctggctcagcagggcccagggtcagcgtcctctgcccgcttaatggtcaacatgtatgcgtgcaatttgtctgtgtatgtgrggatgcatgtgtgtgggtgaacacgtctctcctccagctgggcctggctgctccactcaggtgtgcacctggatccctgtcactgtcacccccgggcctg

SEQ ID NO: 362140 - DNA, 201 bp, Homo sapiens
cttgggggatgggtaagaagagggagatacccttgcccatggcccttgactgcctctactaggggatgggctcctggtaaatgccagtgacaagtggagcygccaccgtcagatgctgatgcccgccttccatttcaacatgctgaagccctatatgaagtttttcactgacagtgtgaatatcatgcacgtgaattcttt

SEQ ID NO: 362141 - DNA, 201 bp, Homo sapiens
gatgggtaagaagagggagatacccttgcccatggcccttgactgcctctactaggggatgggctcctggtaaatgccagtgacaagtggagctgccaccrtcagatgctgatgcccgccttccatttcaacatgctgaagccctatatgaagtttttcactgacagtgtgaatatcatgcacgtgaattctttgaaccca

SEQ ID NO: 362142 - DNA, 201 bp, Homo sapiens
gcccgccttccatttcaacatgctgaagccctatatgaagtttttcactgacagtgtgaatatcatgcacgtgaattctttgaacccagagttccagctgmagccttggggtggaggcaccacagacagatctggtctggaattttggctctgctgggtggcattcagcattgcttttcctctctgagctttggtttcctc

SEQ ID NO: 362143 - DNA, 201 bp, Homo sapiens
ttacaggcccctgccttgcttgcaggtccccacatgaaggagggcatgagagttctgactcagctggtggccacttacccccagggctttaagatctggaygaaccccattactcccatcatcaggttgtgccaccccaacatcatctggtctgtcatcaatgcctcaggtaccatctgaaacacctggtggtgaatgccg

SEQ ID NO: 362144 - DNA, 201 bp, Homo sapiens
gggcatgagagttctgactcagctggtggccacttacccccagggctttaagatctggatgaaccccattactcccatcatcaggttgtgccaccccaacrtcatctggtctgtcatcaatgcctcaggtaccatctgaaacacctggtggtgaatgccgtggtgcatctgaggcctgcaagcccctcctcccccaagctt

SEQ ID NO: 362145 - DNA, 201 bp, Homo sapiens
agatacccttgcccatggcccttgactgcctctactaggggatgggctcctggtaaatgccagtgacaagtggagctgccaccgtcagatgctgatgcccrccttccatttcaacatgctgaagccctatatgaagtttttcactgacagtgtgaatatcatgcacgtgaattctttgaacccagagttccagctgaagcc

SEQ ID NO: 362146 - DNA, 201 bp, Homo sapiens
agcgtgatctcggctcactgcaacctccgcctcctgggttcaagagattcttgtgtctcagcatcccgagtagctgggattacaggcccctgccttgcttrcaggtccccacatgaaggagggcatgagagttctgactcagctggtggccacttacccccagggctttaagatctggatgaaccccattactcccatcat

SEQ ID NO: 362147 - DNA, 201 bp, Homo sapiens
tgcatggtgctaggatggcctccttttcttttcttttttttttttttttgagacggagtcttgctgtgttgcccaggctggagtgcagtagcgtgatctcrgctcactgcaacctccgcctcctgggttcaagagattcttgtgtctcagcatcccgagtagctgggattacaggcccctgccttgcttgcaggtccccac

SEQ ID NO: 362148 - DNA, 201 bp, Homo sapiens
tggactccatgcatggtgctaggatggcctccttttcttttcttttttttttttttttgagacggagtcttgctgtgttgcccaggctggagtgcagtagygtgatctcggctcactgcaacctccgcctcctgggttcaagagattcttgtgtctcagcatcccgagtagctgggattacaggcccctgccttgcttgca

SEQ ID NO: 362149 - DNA, 201 bp, Homo sapiens
accatgttggccagactggtgtcaaactcctgacctcaggtgatctatccaccttggcctcccaaagtgttggaattacaggcatgagccaccgtgcctgrcccactgactagatttttacagataaggcccatactgagcagaccccagtgaccaattcctcaccgagcaaaaccccactgacttagatcctgctgaccg

SEQ ID NO: 362150 - DNA, 201 bp, Homo sapiens
taatcttaccaaagattactaaagtcgtgtgaactggaaagcctctgagctagcttttactagtctgataaacatttacttttctatttttttttttttttgagacaaggtctcactctgtcacctaagctggagtgcaatggtgtgatcatggcttactgcagccttgaccatctgagttcaagccatcttcccactttg

SEQ ID NO: 362151 - DNA, 201 bp, Homo sapiens
aagtttcacagatctctagggcagaagcaaagtgctgtcaatctctttgctaaagcatagcaagaatcacctttattccagttctcaacaacttcctcacytccatctgagaccaccttagcctggacttcattgtccatatcactatcagcattttggtcaaagccattcaacaagtctctaggaagttccaaacttttc

SEQ ID NO: 362152 - DNA, 201 bp, Homo sapiens
caccataactggctaatttttgcattcttagtagaggtggggtttcaccatgttggccagactggtgtcaaactcctgacctcaggtgatctatccacctyggcctcccaaagtgttggaattacaggcatgagccaccgtgcctggcccactgactagatttttacagataaggcccatactgagcagaccccagtgacc

SEQ ID NO: 362153 - DNA, 201 bp, Homo sapiens
agagttttcatagttttgggtttttcatttaagtctttaatccattttgagttaacttttgtatgtggtataaggaagggattcagtttcaatcttctgcrtatggctagccagttatcccagcaccatctactgaatagggaatcctttttccattgttagtttttttgtgtgtcagatttgtcaaagatcagatggttg

SEQ ID NO: 362154 - DNA, 201 bp, Homo sapiens
ggcccatggtaacatcaaatgaaagcttcatcagttagaaggttttgcaggcgtgaacgccacccagcttatagaagtagccaccaaagtgtatgttaacyatgaccaggaggaaaacaaggaagcagattgaaggcttaaaaaaaaggcagatctgttggcagcaggccttatagaaaaagagattagcaatgtgagagg

SEQ ID NO: 362155 - DNA, 201 bp, Homo sapiens
aactcccaattcctttgaccaagaggggctcgagcaaggcaattggtaagacagtacacaggaaagggctagcaactggctattaggaaaatagtgcttcyttttttttttttttttttttttttgaggcagagtctcgctctgtcccccaggctggagtgcagtggcacaatcttgactcattgcaacctctgcctcccg

SEQ ID NO: 362156 - DNA, 201 bp, Homo sapiens
cttcatgtcaaatgtcagatcaaagaacttggatgtgatccagagggcactggggagcattggaaattgcttgagcaggggagggacaggtcagagatagkttttagagatgactgagtgagacacaaatagcaggggacctctaggtgtgaaactgacaagtctgatattttactctatttacaaattaataagccagtg

SEQ ID NO: 362157 - DNA, 201 bp, Homo sapiens
ctgaagggacattgttagaagtgacctagaaggcaagaggtgagccctctgtcaacgcgtgcataagggcagcttgagggctccttggtcaagcggtaacrccagtgtctgggaaggcgcccgttacttagcagactgcgaaagggagtctcctttccttggaggagtcagggaacactgctccaccagcttcttgtggaa

SEQ ID NO: 362158 - DNA, 201 bp, Homo sapiens
atcaaatgaaagcttcatcagttagaaggttttgcaggcgtgaacgccacccagcttatagaagtagccaccaaagtgtatgttaactatgaccaggaggmaaacaaggaagcagattgaaggcttaaaaaaaaggcagatctgttggcagcaggccttatagaaaaagagattagcaatgtgagaggacacggacgtgga

SEQ ID NO: 362159 - DNA, 201 bp, Homo sapiens
actggtagacccctgctgaccaggtcccaactgcgagacccatgcagatgaaggcccagcgtccagacctcactgcctagaccgcactgatctgatcctcmctgaccaggccccaaccgccagaccccacctaccaggtcccagctgctgcatccctgccaaataacccccagctgccgtatcccctctgaccaggcccca

SEQ ID NO: 362160 - DNA, 201 bp, Homo sapiens
tatgactttcaatctgactcacccaaaagccatagtgttaacccttaccattccacaggctgaggaatggagacttcatagaaagaaactgcaggcgccartgcagcttcatacacggaaagaagaaaaattattatttggactagttaataaaattcctaaggtataggctgaagataacccacctaggctggctgtaaa

SEQ ID NO: 362161 - DNA, 201 bp, Homo sapiens
ttctgacacacaatccaacctggccagactgtaggcagcttcttctcacgctgtttaacactgaggagcacagaagagtaacacagggagctctccactgrctagaagcccctgcaccagcagatgcagtgaacgctcaggcatatgctcagggccagctcccagaccaagatcccaactgggacccagaggatgcaactc

SEQ ID NO: 362162 - DNA, 201 bp, Homo sapiens
gtcagatttgtcaaagatcagatggttgtaggtgtgcagccttatttctgggctctctattctgttccattggtctatgtgtctgtttttgtaccagtacyatgctgttttggctactgtagccctgtagtacagtttgaagtcaggtaacatgatgtctctagctttaccttttttgcttaggactgccttagctattca

SEQ ID NO: 362163 - DNA, 201 bp, Homo sapiens
ccagggaatggagaccctctgactgaatgagcacaggtgtcctggcctcatgacttgggacatgccatcctcaggccacaggcaccccgggcgttggtggrgtcccaacattcaggtggggtcttggcacaagtgggcagtgactgctgagccacgactgtggttctcggtttaggatttgatcaagccaccatggggaca

SEQ ID NO: 362164 - DNA, 201 bp, Homo sapiens
tcataacattgcccagtggcatacttatccaaagaactggactccatgcatggtgctaggatggcctccttttcttttcttttttttttttttttgagacrgagtcttgctgtgttgcccaggctggagtgcagtagcgtgatctcggctcactgcaacctccgcctcctgggttcaagagattcttgtgtctcagcatcc

SEQ ID NO: 362165 - DNA, 201 bp, Homo sapiens
gagcctcggggggccagggaaggaagtcaagatagtcaagcagaccaactcaaatctggccatgctcgagctatgcaaatgcctctcagggagacgcgagsacccatttattataatgaccaagtccaagtccggcggggggcaatgaacttgcatctaccagcccttttcaaccactgatctcttaaactggaaacacca

SEQ ID NO: 362166 - DNA, 201 bp, Homo sapiens
attgaccaagggcatgcaagggtggaacatgaatccaagttctcctgaacccccgtcttgggtctttgtctcttaatagtaacagttgttgttcccagcamaacctggtcctccttggggaggggttcctggggagaagacaaagaggttggctttggggaagtccatcttgatggttgggcttggggaaggactcaaagg

SEQ ID NO: 362167 - DNA, 201 bp, Homo sapiens
acaaatgtgtattaaaattaatcttgttttctctgttttgttacaaactattgccttttaacttttggaggatacttttgatgaatttctatgaagttaawttcctccactttttttcttctacagccagaaaatccatccatttctccaagagttttaggggactccctttaccagatgtgacattttagcttattcatg

SEQ ID NO: 362168 - DNA, 201 bp, Homo sapiens
ggtttcaaattgacacagatgtcctcagctgggactcctggactttcctccagggattctatccctccagaaggcaccccatggttcacatggcagagagrgttccagggagtgagacgaggcaggttagattcattagttattacctcatcaatttcacattgtgttttgtcagagaaagccaaaagtccaacagagaat

SEQ ID NO: 362169 - DNA, 201 bp, Homo sapiens
ctgctgataaagacatacctgagactgagtactttaaaaaggaaagaggtttaattgactcacagttccacatggatggggaggcctcactatcatggtgraaggtgaatgagaagcaaagtcatgtcttacatggtggcaggcaagagagtgtatgcaggggaactccccctttataaaaccatcagatcttgagaggct

SEQ ID NO: 362170 - DNA, 201 bp, Homo sapiens
taatcccagcgctttgggaggctgaggtgggcagatcattttaggccaggagttcgagaccagcctggccaacacagtgaaaccgtgtctctactaaaaayagaaaaaattagccaggcatgttggcacatgcctgtagtcccagctcttcaggaagttgaggcgtgagaattgcttgaactcgggaggtggagatttcag

SEQ ID NO: 362171 - DNA, 201 bp, Homo sapiens
atccaagttctcctgaacccccgtcttgggtctttgtctcttaatagtaacagttgttgttcccagcacaacctggtcctccttggggaggggttcctggkgagaagacaaagaggttggctttggggaagtccatcttgatggttgggcttggggaaggactcaaaggagctagggaccagccccagctgtgtccccttc

SEQ ID NO: 362172 - DNA, 201 bp, Homo sapiens
cctgacacctgccccctgcatggacccccgggacatacttcccttagccctgctcagcccaagctcggcccgggttgagtgcctctgcctgctccagggcrggaaaaggaaactccagctccgaagccatggagaactccatgtccctggctgggactcagcctcttgccagccccaccaggggctccagccgccccttta

SEQ ID NO: 362173 - DNA, 201 bp, Homo sapiens
ttcttttcttttttttttttttttgagacggagtcttgctgtgttgcccaggctggagtgcagtagcgtgatctcggctcactgcaacctccgcctcctgrgttcaagagattcttgtgtctcagcatcccgagtagctgggattacaggcccctgccttgcttgcaggtccccacatgaaggagggcatgagagttctga

SEQ ID NO: 362174 - DNA, 201 bp, Homo sapiens
gagccagactcaaaagacagcatgccccaagtctcaccctgaagggaaggatcggagcctcggggggccagggaaggaagtcaagatagtcaagcagaccractcaaatctggccatgctcgagctatgcaaatgcctctcagggagacgcgaggacccatttattataatgaccaagtccaagtccggcggggggcaatg

SEQ ID NO: 362175 - DNA, 201 bp, Homo sapiens
acagagttaaagggaaagtcccagagagagcaagagaggccagttttgcaggggccaccagagggaacagagattcttcctccatatgtcccagcctaccycgctttacaggggctgatagctccagctccccaggagccagactcaaaagacagcatgccccaagtctcaccctgaagggaaggatcggagcctcggggg

SEQ ID NO: 362176 - DNA, 201 bp, Homo sapiens
aacatgggaactgggagtggggaagtgtgtgaaagtgtgtgaatggaggggcctaattaggttcatcagttgcaaagtggggagtcacagatctcttagcmtggactgtgtgttctgagcaaagtgtggggccgactaagactagcggtgatctgcatatggctaataggagctgccctacgactgcagcagttgtagcag

SEQ ID NO: 362177 - DNA, 201 bp, Homo sapiens
tggaggtagtgagagtggctcaccaccccaattaagaacatgggaactgggagtggggaagtgtgtgaaagtgtgtgaatggaggggcctaattaggttcmtcagttgcaaagtggggagtcacagatctcttagcctggactgtgtgttctgagcaaagtgtggggccgactaagactagcggtgatctgcatatggcta

SEQ ID NO: 362178 - DNA, 201 bp, Homo sapiens
gaaagctggtgtcccagtgtagtgtccaccctctgagaggctgggggtgccaggacacagccgtgggagcccgtcaccctgactctgtagaaagtggtcayggggcccttccctccccatgtcacctccttgccgctcctatgtcgctggcagtcgagaagcacctggagccatttttctgtgtccctcatctcctgatgt

SEQ ID NO: 362179 - DNA, 201 bp, Homo sapiens
tctagttctgtaaataatctcactggtagtttaataggaatagcattgaatctataaattgctttgggcagtgttaaggcagaaattaaagaaaaataaayactgcatttattcactccagaagaaataagggttatttgaaaaacacaagttttcctctgctgcaggcaaggctatagacaggtcatggcgacctggcct

SEQ ID NO: 362180 - DNA, 201 bp, Homo sapiens
gccctgtagtacagtttgaagtcaggtaacatgatgtctctagctttaccttttttgcttaggactgccttagctattcaagctcacttttggttctatakgaattttaaaactgttttttttctagttctgtaaataatctcactggtagtttaataggaatagcattgaatctataaattgctttgggcagtgttaagg

SEQ ID NO: 362181 - DNA, 201 bp, Homo sapiens
gacctcactgcctagaccgcactgatctgatcctcactgaccaggccccaaccgccagaccccacctaccaggtcccagctgctgcatccctgccaaatarcccccagctgccgtatcccctctgaccaggccccaactgctggaccccctccaaacaggccccaactataagaccccactgaccaggccccaaccgccag

SEQ ID NO: 362182 - DNA, 201 bp, Homo sapiens
attcctcaccgagcaaaaccccactgacttagatcctgctgaccgggcttccccctcactgacaagactctggctgaccaggtcaccacagacaaggcccrcaatgactatgtcccattgactgggcttttgatgaccaggcccccatggaccacaaaagtgaatgaccaaggcaaagtctcaaatcatccaagtttattg

SEQ ID NO: 362183 - DNA, 201 bp, Homo sapiens
cctctccatcccagggatgtgggagatgaaccctgcatcactccattcagcccatcctccccccaaccccaccatcctcctgagaacctagatgcatggaygctgtccaccctctggtactgaagcagcccagagactcaagcctgtcttgctgcccctcaggtcataacaccacggccagtggcctctcctgggtcctat

SEQ ID NO: 362184 - DNA, 201 bp, Homo sapiens
agactggtgtcaaactcctgacctcaggtgatctatccaccttggcctcccaaagtgttggaattacaggcatgagccaccgtgcctggcccactgactakatttttacagataaggcccatactgagcagaccccagtgaccaattcctcaccgagcaaaaccccactgacttagatcctgctgaccgggcttccccctc

SEQ ID NO: 362185 - DNA, 201 bp, Homo sapiens
ttctgcacaaccacttacagcacctctgtgtctccaactgctccatgacacggaggtaggctggcggcacttggcacagtgacagcatgggttcacagccyctgtcatgacggggccctacctggctcagcagggcccagggtcagcgtcctctgcccgcttaatggtcaacatgtatgcgtgcaatttgtctgtgtatgt

SEQ ID NO: 362186 - DNA, 201 bp, Homo sapiens
ccagtgacaagtggagctgccaccgtcagatgctgatgcccgccttccatttcaacatgctgaagccctatatgaagtttttcactgacagtgtgaatatsatgcacgtgaattctttgaacccagagttccagctgaagccttggggtggaggcaccacagacagatctggtctggaattttggctctgctgggtggcat

SEQ ID NO: 362187 - DNA, 201 bp, Homo sapiens
gcgcttccgcagggcctgctgcctggttcatgacttcacagaagctatcatccaggagcagcgccacacccttactagccagggtgttgattatttccacsaagtaaaggccaagtccaagactttggacttcactgatgtactcctgctgagcaaggtggggttctctgggatctgaatgcaaaaagtagaagggagctt

SEQ ID NO: 362188 - DNA, 201 bp, Homo sapiens
cctcactgcctagaccgcactgatctgatcctcactgaccaggccccaaccgccagaccccacctaccaggtcccagctgctgcatccctgccaaataacycccagctgccgtatcccctctgaccaggccccaactgctggaccccctccaaacaggccccaactataagaccccactgaccaggccccaaccgccagac

SEQ ID NO: 362189 - DNA, 201 bp, Homo sapiens
ggcagggcagggcagaagcaaagtgctgtcaatctctttgctaaagcatagcaagaatcacctttattccagttctcaacaacttccttaccttcatctgygcatggactttctgtattatctcatccccagcggatggcgcttccgcagggcctgctgcctggttcatgacttcacagaagctatcatccaggagcagcg

SEQ ID NO: 362190 - DNA, 201 bp, Homo sapiens
tgtcctttgcccactttttaatggagttgtttatttttctgttgtacatttgtttaagtttcttatagattctagatattagacctttgtcagatgcacarttagcaaaattttttcccattctgtaggttgtctgttcactctgttgatagtttcctttgctgtttaaaagctttttagtttaattagatcccatgtgtc

SEQ ID NO: 362191 - DNA, 201 bp, Homo sapiens
gtcataacattgcccagtggcatacttatccaaagaactggactccatgcatggtgctaggatggcctccttttcttttcttttttttttttttttgagayggagtcttgctgtgttgcccaggctggagtgcagtagcgtgatctcggctcactgcaacctccgcctcctgggttcaagagattcttgtgtctcagcatc

SEQ ID NO: 362192 - DNA, 201 bp, Homo sapiens
gatttttttctttttcaacttgcccaataatttgaacttattccaattgcctgaaagacatcctagtggcaagttccttgggatgcttggtgatgtccttrtgtttagtaaagatcactacaaggggtttcagttagcctaagtttagcaaatgccttttcacttttcccttttacttcttttcctttttttttttttttg

SEQ ID NO: 362193 - DNA, 201 bp, Homo sapiens
cacttgaacccgggaggcagaggctgcagtgagctgagatcgcgctcctgcactccagcctgggcgacagagctagactccatctcaaaaacaaaaaagcraaacaacaaatctaattatacaaccattataatgtaaagaaccatgcctaggccaaatctgttggtttgccaacttgaattgaacccaaacatattgcaa

SEQ ID NO: 362194 - DNA, 201 bp, Homo sapiens
ccagaaagaagtcatatatgaaaaagacacatgtacatacatgtttttagcagcgcaatttgtatttgcaaaaatatgaaaccaacctaagtgcccatcarccaatgagtggatatagaaaatgtggtatatgtacaccatggagtaccactcagccatcaaacagaatgaaatacagctttgcagcaacttggctggagc

SEQ ID NO: 362195 - DNA, 201 bp, Homo sapiens
ggccagtaatttaggaatcaagaggatataattcggaagtagactgttgtgtttaggagtttttctttccattgtggaattgagtagcagcggtatatatrctatgtctggtaaaatgggccatacagtagtctaagacatgaggagaccttaaggagcttggacttagttgaggtgaccagactatttaatctgcttagg

SEQ ID NO: 362196 - DNA, 201 bp, Homo sapiens
caatgctgttaactggattgagtccagctcttgggatggtatgttacatgcctattccccgccgtcccccaaaatttttttctaaggttcaatagacccaratgacactttaattaatgcaatacgcaaacttttgtaatttgtccttgtttggatatattaagaaagatattttacctgtctgtcattatccgaattgtg

SEQ ID NO: 362197 - DNA, 201 bp, Homo sapiens; identical to SEQ ID NO: 78256

SEQ ID NO: 362198 - DNA, 201 bp, Homo sapiens
gttacatgcctattccccgccgtcccccaaaatttttttctaaggttcaatagacccagatgacactttaattaatgcaatacgcaaacttttgtaatttrtccttgtttggatatattaagaaagatattttacctgtctgtcattatccgaattgtgaattggttatcttatcttgtaggacaaatggtctattcaaaa

SEQ ID NO: 362199 - DNA, 201 bp, Homo sapiens
tgcccaagctggagtgcaatggcacgatctcggctcactgcaacctctgcccccaggttcaagtgattctcctgcctcagcctcctgagtagctgggattrcaggcacacaccaccatgcctggctaattttttgtatttttagtaacagggtttcaccatgttagccaggctggcatcgaattcctgacctcaggtgatc

SEQ ID NO: 362200 - DNA, 201 bp, Homo sapiens
aaattgattatgtaacctgctaatgtgtatgaatcttaaatttgaaaattagtgacatagtacatattgtttcatctttgagtgtctttttaaatgtataytttaaggtatagagaggtttcattatacagtgtatttgtggttgctgtttaaacatatacaaatatcctagctttattctaaagtcaaactttaaaattt

SEQ ID NO: 362201 - DNA, 201 bp, Homo sapiens
gaggctgaagtaggagaatcacttgaatccaggagagggaggttgtggtgagccaagatcacaccactgtgctccagcctgggtgacagagcgagactctrtcaaaaaaaaaaaaaaaaaatgtattgagaactactctggggaagttgatttagcagtcttctcaagtgagcacctgaatctgtcccacagatcattaca

SEQ ID NO: 362202 - DNA, 201 bp, Homo sapiens
gtaaaaaattaaaaacgtaatttttttaaccatcagatttttaaaattatgttctacttgaaagtttttgtgatttatctctttttttaaattttttaaawtttttttttttttttttgagacggagtctcactctgtgacccaggctggagtgcagtggcacgatcttggctcagatcttggctcactgcaacctccgtc

SEQ ID NO: 362203 - DNA, 201 bp, Homo sapiens
gaatatgttccagtcaccttcgcaaattatttctacttaatttacataataatgtttaatgctcctttgtctaaatgcttaattttttaacataagcagtmagagggaaaatcactttataaaaggttgggagggtgaaggtggcagtgttgaaaatgattaggtcttgctagaaaaaatacctttattttctttgaaaaa

SEQ ID NO: 362204 - DNA, 201 bp, Homo sapiens
acatagaagttgccatctcaagtaacaatcagtctttcaaaacagatggactgaagaatatgttccagtcaccttcgcaaattatttctacttaatttacrtaataatgtttaatgctcctttgtctaaatgcttaattttttaacataagcagtaagagggaaaatcactttataaaaggttgggagggtgaaggtggca

SEQ ID NO: 362205 - DNA, 201 bp, Homo sapiens
gctcttaaattatgtaattatgtaaaaaaagtaaagctttattaaatattaataacatccgaatgtagttaccagtgaatccattaagggcagatgctaartttgccagtaattaaatagagagcagaggaaatggtgtatgctgtgttaaacatagaagttgccatctcaagtaacaatcagtctttcaaaacagatgga

SEQ ID NO: 362206 - DNA, 201 bp, Homo sapiens; identical to SEQ ID NO: 78260

SEQ ID NO: 362207 - DNA, 201 bp, Homo sapiens
ttctgaactattgttacaccctacataggtactcacctcagcaattagcagggaagagaattggagtgttttcttatggttctggtttggctgccactctrtactctcttaaagtcacacaagatgctacaccgggtaagtgctgaatctttcaacaagaatgtattgagaactgagtccaggcacagtggctcacacccg

SEQ ID NO: 362208 - DNA, 201 bp, Homo sapiens
tgtggcaccagatgtcttcgctgaaaacatgaagctcagagaggacacccatcatttgggtaaaaatattaaatgttctttaagttaacccatttggaggkctgatatcattaaggatgctacatatacgataaggatatcaagactttactcagtactaatctgatgtcagtgaaaattattgggatatatgaaacttat

SEQ ID NO: 362209 - DNA, 201 bp, Homo sapiens
attacttacccttgctgcaagttattcagtttgctatttttctactgcattttgttttttaaaatactcttttatttaaaaaaaatactaatcctgacccmctaaattgattatgtaacctgctaatgtgtatgaatcttaaatttgaaaattagtgacatagtacatattgtttcatctttgagtgtctttttaaatgta

SEQ ID NO: 362210 - DNA, 201 bp, Homo sapiens
tgatatttttatgtttttcaagaaggtagtatagatttaaaaggtgggatacatattacctgtcctaatgataggactagattttttttttttttttttttggggagacagaatctcgctctgtcgcccaagctggagtgcagcagcgtgatctcggctcactgcaacttatgcctcccagtgattctcctgcctcagcct

SEQ ID NO: 362211 - DNA, 201 bp, Homo sapiens
cagcaaaataccatagagtaggtggtttaaacagcagacatttatgatctcataggtttgcagtctggaagtcagggtgccagcgtggttggttcccgatsagggctctcctcctggattgcccgtgtcctcacatggcatagagagagtatgacagcatgagcaagctctcgttttatcttcttataagagcactgatcc

SEQ ID NO: 362212 - DNA, 201 bp, Homo sapiens
ataattgctacttcacatgtacacaattgagtgccctaaatactaaacttaaagaaactaatacttcaggtgattgctaaactcttaatatctatttctcratttcaaagttgaaaaccagcaacttataacctaaaacaattttttttctgtttctcctttctaaagctctttcaccatgcctggatcacttcctttgaa

SEQ ID NO: 362213 - DNA, 201 bp, Homo sapiens
ggctgaggtgggaggattgcttgaggccagatgttcaaggccaacctgagcaacatagtgagaccccatctctataaaaaataataaaaataaaataattrtaccatggattaattgtagacaagttatttatagtttcaaattatgcctgtttcctaacttgtctagtggcagatactcaataatagatttctagtctga

SEQ ID NO: 362214 - DNA, 201 bp, Homo sapiens
gaatctgtcccacagatcattacaatattttagtcttcattacttctttcagtaggtttttactctctgccctaaaaatctatccaaaaaaaaaaaaaaaattctaccttatctggataaaggataggactaagttatctaatttttataggcttatggtcttggctatatttaaggtcacttttgtgctttccctgagca

SEQ ID NO: 362215 - DNA, 201 bp, Homo sapiens; identical to SEQ ID NO: 78253

SEQ ID NO: 362216 - DNA, 201 bp, Homo sapiens
tgcaatattaacactttgagttagatccttaaaactttaagttagattctacttttacttatagcctaaatttttattgctacttttatagcttcccacaygctgtagctttggatcagttaaacttctgaactattgttacaccctacataggtactcacctcagcaattagcagggaagagaattggagtgttttctta

SEQ ID NO: 362217 - DNA, 201 bp, Homo sapiens
tgctcactgcaagctcctcctcccgggttcacgccattctcctgcctcagcctcctgagtagctggggctacaggcatctgccaccacgcccggctaattyttttgtatttttagtagagacggggtttcaccatgttagccaggatggtctcgatctcctgaccttgtgatccgcctgcctcagcctcccaaagtgctga

SEQ ID NO: 362218 - DNA, 201 bp, Homo sapiens; identical to SEQ ID NO: 78254

SEQ ID NO: 362219 - DNA, 201 bp, Homo sapiens
gtcacccaggctggagtgcagtaacatgatctctgctcactgcaagctcctcctcccgggttcacgccattctcctgcctcagcctcctgagtagctgggrctacaggcatctgccaccacgcccggctaattcttttgtatttttagtagagacggggtttcaccatgttagccaggatggtctcgatctcctgaccttg

SEQ ID NO: 362220 - DNA, 201 bp, Homo sapiens; identical to SEQ ID NO: 78255

SEQ ID NO: 362221 - DNA, 201 bp, Homo sapiens
tggtaagtaaatctagacactactttttagtcccttttttaaaagaggactggtttatctatgatgaatacatgattgattgattgattgattgattgatttttactttttctttttttttttttgagacggagtcttgctctgtcacccaggctggagtgcagtaacatgatctctgctcactgcaagctcctcctcccg

SEQ ID NO: 362222 - DNA, 201 bp, Homo sapiens; identical to SEQ ID NO: 78257

SEQ ID NO: 362223 - DNA, 201 bp, Homo sapiens
ttggtaagtaaatctagacactactttttagtcccttttttaaaagaggactggtttatctatgatgaatacatgattgattgattgattgattgattgatttttactttttctttttttttttttgagacggagtcttgctctgtcacccaggctggagtgcagtaacatgatctctgctcactgcaagctcctcctccc

SEQ ID NO: 362224 - DNA, 201 bp, Homo sapiens
aaacttttgtaatttgtccttgtttggatatattaagaaagatattttacctgtctgtcattatccgaattgtgaattggttatcttatcttgtaggacaratggtctattcaaaatttagtcagatggatgacagagccttggcagatgaattttaaaaaaaaattagagcattttctttctttatcaaagaagggaaaa

SEQ ID NO: 362225 - DNA, 201 bp, Homo sapiens
atgctgcaatattaaaactaagttatattccctactgcaatattaacactttgagttagatccttaaaactttaagttagattctacttttacttatagcytaaatttttattgctacttttatagcttcccacacgctgtagctttggatcagttaaacttctgaactattgttacaccctacataggtactcacctcag

SEQ ID NO: 362226 - DNA, 201 bp, Homo sapiens
ctactgtaagtggtgagaattgatcagatagttaaggaaggtccttagataatgcagtatacttattaacatacagacatcaagaagcagaaatatatagrcatcttcctttttggttctaatagggcttcgtgggacacatatgcaacatgcctatgatttttacaagcctgatatgctatctgaatatcctatagtaga

SEQ ID NO: 362227 - DNA, 201 bp, Homo sapiens
attataaatacagagtcctcattattctctttagacttattttatggtgaatatagtactctgaaaataataaaatgcattatctgtaaaaaattaaaaamgtaatttttttaaccatcagatttttaaaattatgttctacttgaaagtttttgtgatttatctctttttttaaattttttaaatttttttttttttttt

SEQ ID NO: 362228 - DNA, 201 bp, Homo sapiens
tggtttataccttcaaaaagatatattccctgttcactttatttccaatagtgttaaaaaccactgagccaggcaaggaagaccatactgtcttcagcatrtttaaagcagtttgaagagttgaaaagaatctaaagggtagccttgtgggaaaggctggaaaggtggttactcctactttggtgacttaagagatcatat

SEQ ID NO: 362229 - DNA, 201 bp, Homo sapiens
aatctgggaacaattgaaacctaccatatgccttgaacagtagcagtaaagagccagtttctttaaactagacattatggtgctgcagctcatctcaaaastgatagcaggctactctggacacactacatatagagtagccctgctctgcaaggagcagtaataaattaaaaaaaaaattaaaaagtgatagcagaaagc

SEQ ID NO: 362230 - DNA, 201 bp, Homo sapiens
caatgcttttttgattacttagaattttttaaagagctcttttagagttagacatagatttttgtcatatgtcacttgcacattcaataagatggaaaacmcaagtgaaaaaacacataaggaattgctaaatttcacatatttagagtctgccttctgaattgtttttggagtcagagttgttaatacctgtaattttcc

SEQ ID NO: 362231 - DNA, 201 bp, Homo sapiens
ggtaatttagaaaggtttcatgggtaaaatgtgacctatgtgatctagggctataaaggatttcaataagcagaagcacgaggtgggttgttgaagaaagmactaaatgtttttggataaagaatataataatttgagagtaaagggtagagggagggttatgtaggtaagtagttgtaagatggggaaagattgggtagt

SEQ ID NO: 362232 - DNA, 201 bp, Homo sapiens
atggttcccttgcatctgttctagcacagtaagtataaatttcacctactacttaactccccttatttgggagatgttagatttctaagaccaaatctagygtcaagcatgttggtggtagatcacagaaaattttatcttgaggctctctaatctgctattgtccattgacttgaaagatgtatgggttgaggctacagt

SEQ ID NO: 362233 - DNA, 201 bp, Homo sapiens
caactctaccggccgcgattggctgtgggagccaccgtcccgcctcccagcgactctcggcggtgccggagtcgggtgggttggcggctataaagctggtrgcgaaggggaggcgccgcggactgtcctttcgtggctcactccctttcctctgctgccgctcggtcacgcttggtgagtgtcccgcgctggggagtagaa

SEQ ID NO: 362234 - DNA, 201 bp, Homo sapiens
agtgctcctagagttaacagatttttccttctgagatgtgttttggactttattgcacagatactattagatgagaggcagttgaaagtcgttaacattayccgtgtcagtagttctttgcacttgagacacctaagcagcttgtgttctttaaactttattttaaaattgcagttatttttgtgtgaagaagggggcagg

SEQ ID NO: 362235 - DNA, 201 bp, Homo sapiens
cacttgaggatggaaatctggaagtcattgtatacattttcttctttccctaacatctagtcagttacagtttctgccagttcttttgctttttccatgtktttggaggctgttcctcttcgctccacatgtagtaaatgctctagttcatgacccatgtcttatctggactgccatgtcagcttcctaactcatccattc

SEQ ID NO: 362236 - DNA, 201 bp, Homo sapiens
gctgatatcattaaggatgctacatatacgataaggatatcaagactttactcagtactaatctgatgtcagtgaaaattattgggatatatgaaacttayctttagctttattaccagatgaattgtatatcataactaattgtagatattctctccctttcctttagtcaactatattccccagggttcaatagattca

SEQ ID NO: 362237 - DNA, 201 bp, Homo sapiens
attggtaagtaaatctagacactactttttagtcccttttttaaaagaggactggtttatctatgatgaatacatgattgattgattgattgattgattgatttttactttttctttttttttttttgagacggagtcttgctctgtcacccaggctggagtgcagtaacatgatctctgctcactgcaagctcctcctcc

SEQ ID NO: 362238 - DNA, 201 bp, Homo sapiens
atgcctatgatttttacaagcctgatatgctatctgaatatcctatagtagatggaaaactctccatacagtgctacctcagtgcattagaccgctgctaytctgtctactgcaaaaagatccatgcccagtggcagaaaggtaagttttacccattttccttggttttggtatgagttgagagcagtctaatgtactagg

SEQ ID NO: 362239 - DNA, 201 bp, Homo sapiens
tattggtaagtaaatctagacactactttttagtcccttttttaaaagaggactggtttatctatgatgaatacatgattgattgattgattgattgattgatttttactttttctttttttttttttgagacggagtcttgctctgtcacccaggctggagtgcagtaacatgatctctgctcactgcaagctcctcctc

SEQ ID NO: 362240 - DNA, 201 bp, Homo sapiens
caaaaagatccatgcccagtggcagaaaggtaagttttacccattttccttggttttggtatgagttgagagcagtctaatgtactaggtatctttggtargcaactactttgtgggcattcttcatttaatatccttttaccattaattcctcattcaccaaacaacattttcccatagtttctgggaaagtgtaattta

SEQ ID NO: 362241 - DNA, 201 bp, Homo sapiens
tacactgctacaaaagcagaactatttagaaggagttaaaatgtcttttgtaaagtttcttacacagctttctttttttcccttttttacaggcaacttcrggctcgctggagaacaactaaggggcaccaaaccctctgaggttttactttaaggttcgctgtatgtttgccttggacaaaaaggctacctaccacgtgc

SEQ ID NO: 362242 - DNA, 201 bp, Homo sapiens
ttttttttttctctttcttttctattttctgtctttgtccttttgttctttgagtcttcctcagcatttcctgccaacccttttctggtttctgtttcttyaacctctttttgttttatggtcccttttatggtattttctcttatttctaggaaaacattaatgataggtttttgaacacttcccctgagtagtctctgt

SEQ ID NO: 362243 - DNA, 201 bp, Homo sapiens
ctaaaacgcgccgttaaagtgggggagagattgcgcggagcccacgcgatccctgggacgccggagacaacggggctcttgggaaggcgcggagcccgggraagccggggatgtgcgcgtgagccgtgcccgcagggtctccccgcctccgccacctttcttgggtggctctccgcctcgtcctccctccgagggccgttg

SEQ ID NO: 362244 - DNA, 201 bp, Homo sapiens
tttgggaggctaagatggaagaattgcttgagcccaggagttcaagaacagcctggacaacatgttgaaaccccatctctaccaaaaatacaaaaattagstgggcatggtggcaggtgcctgtagtcccagatacttgggaagctaagtgggaggatcacttgagcccgggaggtggaggctacaatgagccaagatccc

SEQ ID NO: 362245 - DNA, 201 bp, Homo sapiens
aggcaaattcatcagaagtagaacacaggttaccaagggcctggagggagggagaatggggagttattgtttaatggctaaagagtttttggtgggaataytaaaaatttggtgggtatacatagtggcgatgggtacactgcactctgaatctatttaatgccactgaattgcacatttacaaatgattaaaatgaccat

SEQ ID NO: 362246 - DNA, 201 bp, Homo sapiens; identical to SEQ ID NO: 78280

SEQ ID NO: 362247 - DNA, 201 bp, Homo sapiens
ccattcagtatggaagcttttgtttaattcacctgtttttcacctgatttccatcagtcccaagttgatctcttacactctttctagagactagaccttastctgctgctgaaaagaaagaagagagagaattggtaaaagggttttgagactctacttcataaacaagctttaaaccagttcttatatctacagcctatc

SEQ ID NO: 362248 - DNA, 201 bp, Homo sapiens; identical to SEQ ID NO: 78281

SEQ ID NO: 362249 - DNA, 201 bp, Homo sapiens; identical to SEQ ID NO: 78282

SEQ ID NO: 362250 - DNA, 201 bp, Homo sapiens
aggacatggcaggtaaaataactattcattcacagatatttattagagcatgttttctagcatatgaaaaatatagtaccaggctagccacaggtcttacmagtagtaacaaatctcatttttttttttttttttttttttttttgagacagtggttcactcttgttgcccaggctggagtgaaatggcatgatctcagct

SEQ ID NO: 362251 - DNA, 201 bp, Homo sapiens
cggggttagcattgttgttccagagcctacactctaaaccactgttaaaccaggacaggttgtaacagtttttaatctttaatctttagaacaagtgtatyttcaaggaccttgaactagtctcgattgacaaactctaaagcttttgaagtgcaaccagctgggttgatcggtcttttcacagatatctgaggtacagct

SEQ ID NO: 362252 - DNA, 201 bp, Homo sapiens
gtggcaaccagaatttgaacctaagcaatttgattgaaaaacctatgttcttcatcagcatgtaccccacctatataaagtattatagagctttgggggatttttttttggcaaagcaagtttttttctccataaatcttactggcctcgatatttggcctatatacaagtcacttgcaaagatcaaattgtatgggaagt

SEQ ID NO: 362253 - DNA, 201 bp, Homo sapiens
ttaaattttcttgcatttgctccaggtaattgaagacttgttatgggacaggtactcttccagacacttgacacatatgaggaatggcaggcaatgaagamgttgaatgacttgcactaggtcttctatcgatagcggctccaggctcccggggttagcattgttgttccagagcctacactctaaaccactgttaaacca

SEQ ID NO: 362254 - DNA, 201 bp, Homo sapiens
cattaaatgttaagtggatcttctcagtgtggtacaattactatggatgattgtcttaatcctttctaaaatttctctaatgtactttcataatcaaattstagcccagtttaagtgagttatatgtatttgggggaagataaagtgttgctggttttgtgtttctgttatcaaagtagtataacaaagttaaaaaaactg

SEQ ID NO: 362255 - DNA, 201 bp, Homo sapiens
aagtgggaggatcacttgagcccgggaggtggaggctacaatgagccaagatcccactgctatacttcagcatggacagcagaatgagaccctgtttttgttttttttgtttttttttaaaaaaacctggtcccattctgatttttgaatctttctattttctttctagaaacttttgggatcttctcttttggtgccttc

SEQ ID NO: 362256 - DNA, 201 bp, Homo sapiens
ttgagtgaggtgccctggtaagctggcttttttgcagccccggcttggtgattaagtcgaatctctctaccaatcctccggggccagaggtaaaatttaaycaccccgaagtgtgagaggttctactttttctgagcagttagtgcgtcagtctttgtggttttttgggtttagggttaggagaaaggggtaagtgaaaga

SEQ ID NO: 362257 - DNA, 201 bp, Homo sapiens
tataactaaagcaaattgtctgttttgtttgccaatgttgcttattcttagagttgttatgccatttataccacaaataagaatagactatactaacatgwtcctccttgagaaacaagcatttcctactaaaaataaaaaggcaaccaacactaatatagcagggcagtcttctacctctgaaataagtttgtcatttag

SEQ ID NO: 362258 - DNA, 201 bp, Homo sapiens
gatcacttgagcccgggaggtggaggctacaatgagccaagatcccactgctatacttcagcatggacagcagaatgagaccctgtttttgttttttttgtttttttttaaaaaaacctggtcccattctgatttttgaatctttctattttctttctagaaacttttgggatcttctcttttggtgccttctctctatcc

SEQ ID NO: 362259 - DNA, 201 bp, Homo sapiens
atgtaccccacctatataaagtattatagagctttgggggatttttttttggcaaagcaagtttttttctccataaatcttactggcctcgatatttggcytatatacaagtcacttgcaaagatcaaattgtatgggaagttgtcgctcattcacataacacaaggatgttagtttcctatgtggcaggaagctctgatt

SEQ ID NO: 362260 - DNA, 201 bp, Homo sapiens
aggtaaaataactattcattcacagatatttattagagcatgttttctagcatatgaaaaatatagtaccaggctagccacaggtcttacaagtagtaacmaatctcatttttttttttttttttttttttttttgagacagtggttcactcttgttgcccaggctggagtgaaatggcatgatctcagctcactgcaact

SEQ ID NO: 362261 - DNA, 201 bp, Homo sapiens
ttttttttttttttgagacagtggttcactcttgttgcccaggctggagtgaaatggcatgatctcagctcactgcaacttctgcctcctgggttcaagcrattctcctgccttagcctcctgagtagctgggattacaggtatgcaccaccatgcctggctaattttgtatttttagtagagatggggtttcaccatgtt

SEQ ID NO: 362262 - DNA, 201 bp, Homo sapiens
ttctctgactttgggagggccagtgcagaagaatcaagacagaatatgctcccgtgtgggccaggctgtgaattctttgaaagaagctgcagagaagcaasaaagattatcctaagacttctggaggaagaattaggatccttctgcaggaactcagtttactgtgaattgaaggttgtgtacacagcttcttgttaggtc

SEQ ID NO: 362263 - DNA, 201 bp, Homo sapiens
tgttaaaccaggacaggttgtaacagtttttaatctttaatctttagaacaagtgtattttcaaggaccttgaactagtctcgattgacaaactctaaagsttttgaagtgcaaccagctgggttgatcggtcttttcacagatatctgaggtacagctcattaacataatggatgtagtcccgagggggcagttggggga

SEQ ID NO: 362264 - DNA, 201 bp, Homo sapiens
aatgatctgatttatcttatccttgcttctgacgatctgtaatgtaaattaaagacccctacttcccagatgtacttgagtgaggtgccctggtaagctgscttttttgcagccccggcttggtgattaagtcgaatctctctaccaatcctccggggccagaggtaaaatttaatcaccccgaagtgtgagaggttctac

SEQ ID NO: 362265 - DNA, 201 bp, Homo sapiens
tctgatgattctctgttggggtgaaggacatggcaggtaaaataactattcattcacagatatttattagagcatgttttctagcatatgaaaaatatagwaccaggctagccacaggtcttacaagtagtaacaaatctcatttttttttttttttttttttttttttgagacagtggttcactcttgttgcccaggctg

SEQ ID NO: 362266 - DNA, 201 bp, Homo sapiens
ggagaagtgtgtgatgttgaagaagacaagtcacccgcgtcagttctccatcactgcgccttcggtcgcctgcaaccgggcaccttatagcaagcattttyactcatgtaaaatagcgtcttgtggccgtcagctgccactacggaatttctgctgttccctttcccaaaccaatttaactaacttccccgactgtgggtt

SEQ ID NO: 362267 - DNA, 201 bp, Homo sapiens; identical to SEQ ID NO: 78285

SEQ ID NO: 362268 - DNA, 201 bp, Homo sapiens
tcaattttcgcaggctcctcacaattctctatttggaagaagtgtccctctccttcccttttcttttcctcctttactcagcgtcagtccccgcagccatstcctccgaccctttttgtctacgtcccagcgtcgcgaaccacagcggcggaggtggagcggggagaggcgttaggccgggcggctaaaacgcgccgttaa

SEQ ID NO: 362269 - DNA, 201 bp, Homo sapiens
atttagaaaagtacatgatccccagaccacaacaaaccaaaacataaactcatgtctgtgtcccatggtcatagtcaaagattttgtactgctaaaattaycaaataatttaaataaagtggatttgaacacaatttgaaggtgtctttctgattaacatgatagaaacttcacataaatcagtttcttagatctagatat

SEQ ID NO: 362270 - DNA, 201 bp, Homo sapiens
atatctattccatttgcatcacaattgattcatgatctcagatgactcacagagattttacctacagctgttatctaggctcctttatctatttttccttsccggatattgtttagattccattggcttacatcgagtagagaacatcagccatacggaacctgctgtgagccttcacttgtacagtccaccttttgatac

SEQ ID NO: 362271 - DNA, 201 bp, Homo sapiens
cgtgtcacttactatctttaactgcaagttcaattctaattaatatctattccatttgcatcacaattgattcatgatctcagatgactcacagagatttyacctacagctgttatctaggctcctttatctatttttccttcccggatattgtttagattccattggcttacatcgagtagagaacatcagccatacgga

SEQ ID NO: 362272 - DNA, 201 bp, Homo sapiens; identical to SEQ ID NO: 78284

SEQ ID NO: 362273 - DNA, 201 bp, Homo sapiens; identical to SEQ ID NO: 78287

SEQ ID NO: 362274 - DNA, 201 bp, Homo sapiens
tttcttacacagctttctttttttcccttttttacaggcaacttcgggctcgctggagaacaactaaggggcaccaaaccctctgaggttttactttaagkttcgctgtatgtttgccttggacaaaaaggctacctaccacgtgctatccagtaatatacttaaataagccaatacttagatctactgtaaggcagatgc

SEQ ID NO: 362275 - DNA, 201 bp, Homo sapiens
tgagctaaataaaagaaagtaaataatccagggcaaggcccccagtgtgaaaccaagggatgtcagccacctgagaagatggtgttaagaggctgggcagycacattcgacagtggttggcatttgtttctggttaagtcaggcatggtttggctcttggtttgtggtttaccatcttttaaagtctcacgttgagaaatc

SEQ ID NO: 362276 - DNA, 201 bp, Homo sapiens
gcacttctggcctgaagacagctccattgagcccctgcagtacaggcgtagtgccttggaccaagcccacagcctggtaaggggcgcctgccagggccacrgccaggaggcattccccgaagccttgctcccctggtgcagcagggctgtgggaggtggtgacctgtgtggagaaggcaaggtgactgttacacctcctgg

SEQ ID NO: 362277 - DNA, 201 bp, Homo sapiens
ggaatttttaaaaggaaaagcaagtattcagaataggaatcttgtagtttgggaacattaaccaggccagggagggttcacagctttcaaactaatcagargtggggatttgtaccataaagaccaattaaaactcttggggctctttgccttggaaaggcaaaagctgggggagaaacatgttctgaaatcttgaatgtg

SEQ ID NO: 362278 - DNA, 201 bp, Homo sapiens
actcaaattaaaacaccactattgttagacttattaaaatttttttaaaggactaaaatatatataccgatcacaagagatgtatgttaaagataaagackttaagaagttgaaagtaaaaagggacagaaaaagatgtaccatggaaacagtaagcaaaaagctagtgtagctatatcgacgtcaggaaaggaaacttta

SEQ ID NO: 362279 - DNA, 201 bp, Homo sapiens
ggtcagagtgcagtgtaagcagtgtcagaggcccgcgttcagcccaagaatgtggattttctctccctattgatcacagtgggtgggtttcttcagaaaarccccagaggcagggaccagtgagctccaaggttagaagtggaactggaaggcttcagtcacatgctgcttccacgcttccaggctgggcagcaaggagga

SEQ ID NO: 362280 - DNA, 201 bp, Homo sapiens
aaagcacaagatgagaaggatactcttaacttcggtgggctgaagcttctggaagcctctccgtgttaattttcttcaaggctttataatccatttctagwaatagctccccaccaagacagctacaaaagttaccaactgacccattctaagcttcttcttgcaagctttgatttctaactgggaagaaagggagggagc

SEQ ID NO: 362281 - DNA, 201 bp, Homo sapiens
aaagggagggagccagcccagagaagtcagagcgagaatgaggctgagagaaaggcagccaagctggcaggacaagcgctggcttaaccattagctcccgsgtactggggaagctcctccgtaaatatttgagagtacaaactccagttatttggagggagtcaaataaatagggaagataaataaactccaaacctctcc

SEQ ID NO: 362282 - DNA, 201 bp, Homo sapiens
aggtgaaagaggattgcggtgacaggagaaatgggagatattctttatgatcgtttttaaaggaaagcaaacattcaaaaataagaatcttatatgaaccytatatgaaggtagctgccttcagttgaccaaataggtaggataagcagaatgatagagtgagaagagatttattttacaacccataaattttaattagtg

SEQ ID NO: 362283 - DNA, 201 bp, Homo sapiens
atgtaaaatgaataaataaagctcatatgtgtttgcaggaggtgggaagtagttccctgggaggcctggagaaactcggcacagttaaatctcagggaggrtatctaaatggctcgcccctcatgccccatccttgccttcacgcttcctcttccagctggcagcgatcgacccttcacccttgacgatttacagtacatg

SEQ ID NO: 362284 - DNA, 201 bp, Homo sapiens
actcttaacttcggtgggctgaagcttctggaagcctctccgtgttaattttcttcaaggctttataatccatttctagaaatagctccccaccaagacakctacaaaagttaccaactgacccattctaagcttcttcttgcaagctttgatttctaactgggaagaaagggagggagccagcccagagaagtcagagcg

SEQ ID NO: 362285 - DNA, 201 bp, Homo sapiens
taaatatttcttgtttctctttacaggtcgttatgccatggtggtctgtggagacattgccgtctatcccagtggtaatgctcgtcccacaggtggggccrgagctgtggctatgctgattgggcccaaggcccctctggccctggagcgaggtttgtagtaatccattaccaagaggctgtgcatggcatagccaagaac

SEQ ID NO: 362286 - DNA, 201 bp, Homo sapiens
gggagaggctctagaattctaccagaggctcagaatcccaaagatgattgatagacacattcaatctgagttccagctcccgtagaatggagctaaatttrtaagcctggcacccagggcagtgaagggacagagtatttctaacacgtgagaaactatgaagttaccctgagtgcatcactttaccagtgtgtgccttgg

SEQ ID NO: 362287 - DNA, 201 bp, Homo sapiens
ctgtactacagggtcagagtgcagtgtaagcagtgtcagaggcccgcgttcagcccaagaatgtggattttctctccctattgatcacagtgggtgggttkcttcagaaaagccccagaggcagggaccagtgagctccaaggttagaagtggaactggaaggcttcagtcacatgctgcttccacgcttccaggctgggc

SEQ ID NO: 362288 - DNA, 201 bp, Homo sapiens
tgtcaaaacagtgctcatggaactcttccaggattcaggcaatactgatattgagggcatagataccaccaatgcctgctacggtggtactgcctccctcytcaatgctgccaactggatggagtccagttcctgggatggtatgtacggccacgaaccttatgtaagaaaggtgctggaattggaggctgaatattacca

SEQ ID NO: 362289 - DNA, 201 bp, Homo sapiens
gcctcttctcctcattccacagtgaatttctccccacctggtgacacaaacagccttttcccaggtacttggtacctggagcgagtggacgagcagcatcrccgaaagtatgcccggcgtcccgtctaaaggtggtgagtgagagtttgcagagttggtggcataaaaccctaatgtcttcctctgggtaacaacacagag

SEQ ID NO: 362290 - DNA, 201 bp, Homo sapiens
agtgagctccaaggttagaagtggaactggaaggcttcagtcacatgctgcttccacgcttccaggctgggcagcaaggaggagatgcccatgacgtgccwggtctccccatctgacaccagtgaagtctggtaggacagcagccgcacgcctgcctctgccaggaggcctggaaatagaagaaactcctggttggcacag

SEQ ID NO: 362291 - DNA, 201 bp, Homo sapiens
aatagtgataatgacaatgaaaaaggtgtaacaatcttgcttttgcttcccaggctctcccctggacaagttggtgtccagcacatcagacctgccaaaasgcctagcctcccgaaagtgtgtgtctcctgaggagttcacagaaataatgaaccaaagagagcaattctaccataagggtaagaaaaaagtcaggaagag

SEQ ID NO: 362292 - DNA, 201 bp, Homo sapiens
ggaggcaggagtcttggggctttataaagtcctgccgggcaccactgggcatctctttcaaggtttctgctgggtttctgaactgctgggtttctgcttgytcctctggagatgcagcgtctgttgactccagtgaagcgcattctgcaactgacaagagcggtgcaggaaacctccctcacacctgctcgcctgctccca

SEQ ID NO: 362293 - DNA, 201 bp, Homo sapiens
tttgtgagcaatggcaacttttactctgccagctgcatgaagcagtagaaatatcagtaccaggccacagctttcctctctacaccaccattcccaccttyacccctagcctctgcctagaaccacaggaccttgtgccaactgcagtgttagtaaaaccagtgactttatatcactgcagcagaatcagaaatggactga

SEQ ID NO: 362294 - DNA, 201 bp, Homo sapiens
cagtgctgtgggtgaatactgggagcttcctcacaggtcagaatactaaaattactaccatatctcacccacaaacttgagtttttgggacagtacttctkacagatgaaagtggaacacataatagtcaagaccacaattatttattgaatactagtctgattatcataaagttagtgactacggatcatttactcaata

SEQ ID NO: 362295 - DNA, 201 bp, Homo sapiens
ggaaatacggttcttaagggcaggtcagtagcaaagaggggctgttaaatgtgtcaacttagttcattcatcagaagaagagtgggagaaatagggagggrggggggaaagggagagagagaggttggggagagagtcagcgggagggggagagagaaagagaaatttggaatttttaaaggagaatttccacgtcagcct

SEQ ID NO: 362296 - DNA, 201 bp, Homo sapiens
tctgtatcagacagtggtctccaaagtgaagtacatgatgtcaagggatgggcaagatctgtttgggcacatcaagaaaacagtagctttggtatgcatayttttgtctcatttatttaaaatctctatacttagtagagcatggtggttaaatgggtctgactttagagcccacaacctgggttcaaatttttttaacca

SEQ ID NO: 362297 - DNA, 201 bp, Homo sapiens
tttaatccagtaaattctcattgcagttctgtgagaggcaccattagccctcccacagatgaggaaacaaaggtctaggataattaaacactgagttcccrgtcagacagctgtccagagttgaccgtgacattcacaaccaggcccattcccttcaaggtgagctacagcaaggccaacccctctgagttcactgcagac

SEQ ID NO: 362298 - DNA, 201 bp, Homo sapiens
ggtgaaagaggattgcggtgacaggagaaatgggagatattctttatgatcgtttttaaaggaaagcaaacattcaaaaataagaatcttatatgaacctyatatgaaggtagctgccttcagttgaccaaataggtaggataagcagaatgatagagtgagaagagatttattttacaacccataaattttaattagtgc

SEQ ID NO: 362299 - DNA, 201 bp, Homo sapiens
tgcttccacgcttccaggctgggcagcaaggaggagatgcccatgacgtgccaggtctccccatctgacaccagtgaagtctggtaggacagcagccgcaygcctgcctctgccaggaggcctggaaatagaagaaactcctggttggcacaggggataggggaaaaaggagcgagggattgggagcagaatcagaagttc

SEQ ID NO: 362300 - DNA, 201 bp, Homo sapiens
tgcttgaacccgggaggcagaagttgcagtgagctgagatcgagctactgcactatagcttgggtgacagagtgagactctgtctcaaaaaaaaaaaaaaattagctgggtgtggcagcttgcacctgtagtcccagctactcaggatcctgaatcctgaggtgggaggatcacttgagcccaggaggtaaaggctgcagt

SEQ ID NO: 362301 - DNA, 201 bp, Homo sapiens
aattattagggttgactttggataatacttaacctcaatgcacctcaccttccccaactgtagcatgtgtgcaatcacaatacctgtgttctactgtttttatgagcattaagtatctaaaacaattaaaatagcagtgcttagcaggtgctcaaatgttggatgttatttctattcattttctgttttgtgggttttata

SEQ ID NO: 362302 - DNA, 201 bp, Homo sapiens
ctccgtaaatatttgagagtacaaactccagttatttggagggagtcaaataaatagggaagataaataaactccaaacctctcctgtcagatataatgtrtatttatcattctgcctcactatcttgtgatcatatgatccacttttgcctcacagctgtccttagaagtgaccttgctgctgggagaggctctagaatt

SEQ ID NO: 362303 - DNA, 201 bp, Homo sapiens; identical to SEQ ID NO: 78290

SEQ ID NO: 362304 - DNA, 201 bp, Homo sapiens
atttgagagtacaaactccagttatttggagggagtcaaataaatagggaagataaataaactccaaacctctcctgtcagatataatgtgtatttatcaytctgcctcactatcttgtgatcatatgatccacttttgcctcacagctgtccttagaagtgaccttgctgctgggagaggctctagaattctaccagagg

SEQ ID NO: 362305 - DNA, 201 bp, Homo sapiens
tagtccagggtcaagacttttacgagatatggttgggagaagatttgctagaagatctgttgtccaaaggggcaagaagtgggtggggaaacagaagatakagttgggaagagggaggcaggatgcagcttcccagtatagaatatagctaaacacccagaatgtgtagtcccatggaagccagaagtatagtctttgaaa

SEQ ID NO: 362306 - DNA, 201 bp, Homo sapiens
tcaagcctgtgggaaaatgggcagtagtggatgcgtaaatggatcaggtgttttgaggagtaacaggagagcatgaagccaaagccttaaagatgtgcaamctttgggctcagtaatcccatgtgtttaaaagaacacctacctattcgctgtagtgttttaactagtgaggaacaggagcaggaagatgggttaaagtgc

SEQ ID NO: 362307 - DNA, 201 bp, Homo sapiens
gtaggaactattggcaaaaggatgggatgaagatttcaatggaggaaggctatgtttactgtaggaaaatgttgtactcttataataaaagtcttaatagmcttttattaaggccttaagtgctagattcaagatggctgcccctcttgttctgtgggtccagtgttctatttggtggactaagggtgaccttgcagcccc

SEQ ID NO: 362308 - DNA, 201 bp, Homo sapiens
tccatcaaggtttgcctcaaatgcggtctcttccacgaagcttctctgatcctccaacccactgaaatctctgcttcctttgaactcctgtagattttgcycacattcctttttgtgggcctgaccacattctgccttgaagttgggttatatgtgtgcttatcattcctcacactggtcaaggaggtctcaagaacctca

SEQ ID NO: 362309 - DNA, 201 bp, Homo sapiens
cagggtcagaggtctgagtccggaataggagcaggggcaggtccctgcggagaggcacttctggcctgaagacagctccattgagcccctgcagtacaggygtagtgccttggaccaagcccacagcctggtaaggggcgcctgccagggccacggccaggaggcattccccgaagccttgctcccctggtgcagcagggc

SEQ ID NO: 362310 - DNA, 201 bp, Homo sapiens
taagggtgaccttgcagccccttacagcccagccaagagagcttcactgtgaaggggcagacatcttcattactattttctcttccaaaaactcatataaytctttgtgagtactgcctcttctcctcattccacagtgaatttctccccacctggtgacacaaacagccttttcccaggtacttggtacctggagcgagt

SEQ ID NO: 362311 - DNA, 201 bp, Homo sapiens
accattaccaccactgatatgtccaaccaattatttagttgaggagtagaaatgaaaaataaggggcattcaccagcctttaaccaaaaatcaaagagccwattcttgagagcattgtcagccttaagcatgccatttcaaatgcgtagattcttctgaggggctgggtattccacagatggggttgcaaatgcatctttt

SEQ ID NO: 362312 - DNA, 201 bp, Homo sapiens
agcaatagttggccatcagccaaaagacatacatcaatcctccccaacattctgactcccttggttcaaactcttggaatcattcccatttcccttctggyatattcacagttaatcccattatgcatggcttgaactaatattgcttttcatgagtcaccttttctctatatgtctaatcgcctttaatccaacccacat

SEQ ID NO: 362313 - DNA, 201 bp, Homo sapiens
gtagaataaccatcttcttccccaccattactgaggctgccatcttgacagagttacgttattattaatagcaaagtaaatcactgaagggatttaagcawggagtaagtttgtttaatttatgtgtttaaagcacttatttggctactacttagagactagattgaaaaggaacaaagctggatatggggaaaccactta

SEQ ID NO: 362314 - DNA, 201 bp, Homo sapiens
tcagtggcatgactggcatgcaggagtggaggggagcagaggggtgaggacatggcagctctactgcctatcccttctgccagctcccactggctgagcarcaggctttgaaacagactttgatctaaacagggaaccagaggggaaggcgccaacgggaagccgtgcaaggcagcagggctcctagagcttgcaagtgaa

SEQ ID NO: 362315 - DNA, 201 bp, Homo sapiens
ggacgagcagcatcgccgaaagtatgcccggcgtcccgtctaaaggtggtgagtgagagtttgcagagttggtggcataaaaccctaatgtcttcctctgrgtaacaacacagagagagaaggtggggacaggtgcagggagaagaaagtttaatggaagaggattggggtgacaggagaaatgggagaattatctgtgga

SEQ ID NO: 362316 - DNA, 201 bp, Homo sapiens
ccgaaagtatgcccggcgtcccgtctaaaggtggtgagtgagagtttgcagagttggtggcataaaaccctaatgtcttcctctgggtaacaacacagagrgagaaggtggggacaggtgcagggagaagaaagtttaatggaagaggattggggtgacaggagaaatgggagaattatctgtggaatttttaaaaggaaa

SEQ ID NO: 362317 - DNA, 201 bp, Homo sapiens
taaggaatggggcggttgaagattctgttaaagccagatacttctgctggagggagttttaggctaagggtcatgtaacaattcttatatcatgggattcyttctggggagaagcaatgaggttcaggaaattcgtggacacaaggatagggagaagagagcaaggtgaaagaggattgcggtgacaggagaaatgggaga

SEQ ID NO: 362318 - DNA, 201 bp, Homo sapiens
ggagcagaggaagggaaggaagaagtcagtgggtggcagagatgcacagatacagccacctgagaggaagcagaggtgcgggtggaggggccctgggttcmttccttaccgctgggatattggcaggtgctaggctgttgcagcccagatgttgttagggctaggagaggtggacaagtgggctgagggccgcaggatgcc

SEQ ID NO: 362319 - DNA, 201 bp, Homo sapiens
agggaaggaagaagtcagtgggtggcagagatgcacagatacagccacctgagaggaagcagaggtgcgggtggaggggccctgggttcattccttaccgmtgggatattggcaggtgctaggctgttgcagcccagatgttgttagggctaggagaggtggacaagtgggctgagggccgcaggatgcctttgagaggac

SEQ ID NO: 362320 - DNA, 201 bp, Homo sapiens
cctggagaaactcggcacagttaaatctcagggaggatatctaaatggctcgcccctcatgccccatccttgccttcacgcttcctcttccagctggcagygatcgacccttcacccttgacgatttacagtacatgatctttcatacacccttttgcaagatggtccagaagtctctggctcgcctgatgttcaatgact

SEQ ID NO: 362321 - DNA, 201 bp, Homo sapiens
tattaatatgagcagtgaacttccaacaatgagattttagcagaaatgaagggctgctgtcagtgcagtgctcatggtggagctctacaggtctctgcagygccctagcctgcctctcctgctctcctatcacaggcagatgtgcgacggggaccctgcctacccccagccttggctccagtagcattgggcacagatccc

SEQ ID NO: 362322 - DNA, 201 bp, Homo sapiens
gggttaaagtgcggtacatcctgtcatggaccattcttcagcctttacaaataatgttatagaatgtcatggaaaaaatatatatatatatacacacacamtaagttaagaaagtatgctaaccacaacacatagcatgattttctttctaattttctagtaagctctataaaattagggatggattccaccagaaaaata

SEQ ID NO: 362323 - DNA, 201 bp, Homo sapiens
tgatttctttccccacagccactctgcccaagaactggctggctccaggattggtgccttctcttatggctctggtttagcagcaagtttcttttcatttygagtatcccaggatgctgctccaggtgagtgtcatctttctagtaggccttcctgacaagattcatctggtagaataaccatcttcttccccaccattac

SEQ ID NO: 362324 - DNA, 201 bp, Homo sapiens
aggaacaggagcaggaagatgggttaaagtgcggtacatcctgtcatggaccattcttcagcctttacaaataatgttatagaatgtcatggaaaaaatawatatatatatacacacacactaagttaagaaagtatgctaaccacaacacatagcatgattttctttctaattttctagtaagctctataaaattaggga

SEQ ID NO: 362325 - DNA, 201 bp, Homo sapiens
cctggataaagcacttctaaaggcctctcaggacatgttcgacaagaaaaccaaggcttccctttacctctccactcacaatgggaacatgtacacctcawccctgtacgggtgcctggcctcgcttctgtcccagtgagtactgcatctggctccatgtcctccatgcacaccctcagcctccgcccccgtgggctgcag

SEQ ID NO: 362326 - DNA, 201 bp, Homo sapiens
tgaggaacaggagcaggaagatgggttaaagtgcggtacatcctgtcatggaccattcttcagcctttacaaataatgttatagaatgtcatggaaaaaawatatatatatatacacacacactaagttaagaaagtatgctaaccacaacacatagcatgattttctttctaattttctagtaagctctataaaattagg

SEQ ID NO: 362327 - DNA, 201 bp, Homo sapiens
gtgttttatttgatttctttccccacagccactctgcccaagaactggctggctccaggattggtgccttctcttatggctctggtttagcagcaagtttyttttcatttcgagtatcccaggatgctgctccaggtgagtgtcatctttctagtaggccttcctgacaagattcatctggtagaataaccatcttcttcc

SEQ ID NO: 362328 - DNA, 201 bp, Homo sapiens
gtgaggaacaggagcaggaagatgggttaaagtgcggtacatcctgtcatggaccattcttcagcctttacaaataatgttatagaatgtcatggaaaaaatatatatatatatacacacacactaagttaagaaagtatgctaaccacaacacatagcatgattttctttctaattttctagtaagctctataaaattag

SEQ ID NO: 362329 - DNA, 201 bp, Homo sapiens
tgtgttttttttttaaatgaaaataattaaaatttatatttggaaaaaaacatacacatacacaaaagtatataaagcaaagaaagactcctcatttgacctgttaccacttcccaaaatttaacactgatggtttatatgtattcttccaatattttttctaagtacctgcaagtatacacatatctattccattttaaa

SEQ ID NO: 362330 - DNA, 201 bp, Homo sapiens
tctgaatcactccagagaaaagtggaggggatgaggaaagagaagagtatttctggctcagattggctgggagtccccatgttttcttgtgttttttttttaaatgaaaataattaaaatttatatttggaaaaaaacatacacatacacaaaagtatataaagcaaagaaagactcctcatttgacctgttaccacttcc

SEQ ID NO: 362331 - DNA, 201 bp, Homo sapiens
agggtgcctggaacccatttctagttgcatgaggtagacagggagaagatcgggatgataggctgttgttctatttgaagtgcagaatataatatatatayacatatatgtgtgtgtgtgtgtgtgtgtgtgtgtgtgtgtgttttatttgatttctttccccacagccactctgcccaagaactggctggctccaggatt

SEQ ID NO: 362332 - DNA, 201 bp, Homo sapiens
actgggtttgaatatcaaaatccatattaactagctatgtgaccttacactagttactcagtctctcaggaaggcaatgtcttcacttgtgaatgtggatrttacctacctcattggattgtttcaagaattgtttaaggttaactagtgtcctactagtgttttaaatgttagtttccctccctgtcctttaccttctat

SEQ ID NO: 362333 - DNA, 201 bp, Homo sapiens
aatcccagcactttggaagaccgagatcaggagatcgagaccatcctggctaacacggtgaaaccctgtctctactaaaaatacaaaaaattagctgggcrtggtggcaggtgcctgtagtcccagctactcaggaggctgaggcaggagaatggtgtgaacccaggaggcggagcttgcagtgagcagagatcacgccac

SEQ ID NO: 362334 - DNA, 201 bp, Homo sapiens
gctcaataaacattggaaggccctatcagaaaaatcagctagcagaaaacttacttaaaagtaggaaaacagtgggtatgttcttgtgtagaaaaaagaarggagaaagacatgtaattagaggtacacttttaaaatgagtaaagattgtataattatgccctataagggcttataacatgtagaagtaaagtatatgac

SEQ ID NO: 362335 - DNA, 201 bp, Homo sapiens
ggcacttctggcctgaagacagctccattgagcccctgcagtacaggcgtagtgccttggaccaagcccacagcctggtaaggggcgcctgccagggccayggccaggaggcattccccgaagccttgctcccctggtgcagcagggctgtgggaggtggtgacctgtgtggagaaggcaaggtgactgttacacctcctg

SEQ ID NO: 362336 - DNA, 201 bp, Homo sapiens
gttctatttggtggactaagggtgaccttgcagccccttacagcccagccaagagagcttcactgtgaaggggcagacatcttcattactattttctcttycaaaaactcatataactctttgtgagtactgcctcttctcctcattccacagtgaatttctccccacctggtgacacaaacagccttttcccaggtactt

SEQ ID NO: 362337 - DNA, 201 bp, Homo sapiens
gcaggaagatgggttaaagtgcggtacatcctgtcatggaccattcttcagcctttacaaataatgttatagaatgtcatggaaaaaatatatatatatayacacacacactaagttaagaaagtatgctaaccacaacacatagcatgattttctttctaattttctagtaagctctataaaattagggatggattccac

SEQ ID NO: 362338 - DNA, 201 bp, Homo sapiens
actaactagtactcctaaccctgccactaactaaaacatcaaaattagcacaaacactgcttgtaagaccagccctatcgaaacaaaaagtataacatatwccaaagatactagcttaatatctttaatatataaagatattatcaataataaaataaataccctaatagaaaaatgagcaaaggatatgaacagaaaatt

SEQ ID NO: 362339 - DNA, 201 bp, Homo sapiens
aggatatctaaatggctcgcccctcatgccccatccttgccttcacgcttcctcttccagctggcagcgatcgacccttcacccttgacgatttacagtayatgatctttcatacacccttttgcaagatggtccagaagtctctggctcgcctgatgttcaatgacttcctgtcagccagcagtgacacacaaaccagct

SEQ ID NO: 362340 - DNA, 201 bp, Homo sapiens
aaccaattattagggttgactttggataatacttaacctcaatgcacctcaccttccccaactgtagcatgtgtgcaatcacaatacctgtgttctactgkttttatgagcattaagtatctaaaacaattaaaatagcagtgcttagcaggtgctcaaatgttggatgttatttctattcattttctgttttgtgggttt

SEQ ID NO: 362341 - DNA, 201 bp, Homo sapiens
taaaggactaaaatatatataccgatcacaagagatgtatgttaaagataaagactttaagaagttgaaagtaaaaagggacagaaaaagatgtaccatgsaaacagtaagcaaaaagctagtgtagctatatcgacgtcaggaaaggaaactttatgccaagaatatcacaaagatgaaaagggatatttaataagtata

SEQ ID NO: 362342 - DNA, 201 bp, Homo sapiens
gctcccaaagcagtgctgtgggtgaatactgggagcttcctcacaggtcagaatactaaaattactaccatatctcacccacaaacttgagtttttgggayagtacttcttacagatgaaagtggaacacataatagtcaagaccacaattatttattgaatactagtctgattatcataaagttagtgactacggatcat

SEQ ID NO: 362343 - DNA, 201 bp, Homo sapiens
ggggaaattgcttgagaccaggagcccatgcagtaagctatgatcaagcaactgcctccagcctggactacagagtgaaacaaaccctgtctctaaaaacrtataaataaataaaaataaaatacagttaaacctactttaaagacataaatagtattcttgcctgctcaggcatgcccagatgggcatccgcaaaagaca

SEQ ID NO: 362344 - DNA, 201 bp, Homo sapiens
attttagctaacatttctttccttccatcccataggaaggttgcaggcctagtgtcagtgattccagccatgtgttctgagtgcttgagatgttaatgctrtacatttcaagaaccatttttaaacaatgtggtgtgttttttttgtactaacaggtagagtggaacccccagctattagaggtcccaccccaaactcagt

SEQ ID NO: 362345 - DNA, 201 bp, Homo sapiens
ctgccagaatcagtaggtaagaagcatttttttctaaaactacatgtggccctttcaggcacacaacctcccaagctgccccatgctgaagagatttgcamggatgatcgaacagagagctgtggacacatccttgtacatactgcccaaggaagacaggtgaggggctctcactgctggcatgaagtcacgcttggtcag

SEQ ID NO: 362346 - DNA, 201 bp, Homo sapiens
tggccttgtgtccacttttctcagtttgttatgtgataagtcaccatagtggcctataggatcaggcttcaggaagcaacttagttctgataacactattmtttattagaatgcccaaatgctggtagtgctttacagcagggattttttggaaggtgtcagggagttgccagtctgtttcaggtctattacctgctctag

SEQ ID NO: 362347 - DNA, 201 bp, Homo sapiens
gttccttctgattatttttctaagggccttctagaattcctggaaattattaccccttcttcttcccagcttgtcagctttgttctttgattccccaaggsctagttggtcacggcttatccaggttaccactctcctgctccctcagcccctcccatctcagttgtgttcacaacaggtctgtgtgctggtgcctgtgtt

SEQ ID NO: 362348 - DNA, 201 bp, Homo sapiens
tttattaccccttgaagaggggtatacacaaaataagtaaaattatcaagttagtctttgccactaactgggaagcttaagagcaggaatgagaatgagartgtgtatgtggggtggacactattatatgaaactgatgtatcatccattcttgaaaatctgaaaactgtactttagacttgacgtgacctggactccaga

SEQ ID NO: 362349 - DNA, 201 bp, Homo sapiens
taattaaatattccttttatgagtgtcactattttctcatttttttcagtattcgttccactaacatttttcggaatctggagtccacccgttgtttgctrgctgggcttttccagtgtcagaaagaaggttcgtatttggggtcccagtcagtccctgtccctgaggggtcttgcttctcacttccgaagcccctatctc

SEQ ID NO: 362350 - DNA, 201 bp, Homo sapiens
caggaatgagaatgagagtgtgtatgtggggtggacactattatatgaaactgatgtatcatccattcttgaaaatctgaaaactgtactttagacttgaygtgacctggactccagactcctaggagacgccaagggtcctctcttggtgaatgtgcctaacagatttcttagtgaggctgaatggccctgtggagcttt

SEQ ID NO: 362351 - DNA, 201 bp, Homo sapiens; identical to SEQ ID NO: 78313

SEQ ID NO: 362352 - DNA, 201 bp, Homo sapiens
gaaaccatattctccttacgactctcaataccatgagaccaccctgaaggtgagcaatgcttccttgctctggggagccccactgcaaaggttgggttgtkttctctgggctgagttcagcaggctgtcaggtgttttcattcttctttctctttcttccctactttaggggggcatgtttgctgggcagctgaccaaggt

SEQ ID NO: 362353 - DNA, 201 bp, Homo sapiens
actatgtggaagacattccctttctttcaccaaccttcaacccacaggaggtcttgtgagtcacttgaaaggggatgttgcacttaatttaaggtcttgarcatgaggatacctgtcctgactccccaagatggttcccactgtcacccaaggtagtttgggggacaacttgtcatgctgcatacccttatgtcacaggat

SEQ ID NO: 362354 - DNA, 201 bp, Homo sapiens
aaaatggtgcaggtcgtgtttcgacacggggctcggagtcctctcaagccgctcccgctggaggagcaggtgagaggtcggcccgggctggggctggtggrgcgaggaccgtgtgccaggccaggagtctcgccctgacacacatcttcagagctttactcgcgcggagcggggctcgggttgggtccagaagaagggaaa

SEQ ID NO: 362355 - DNA, 201 bp, Homo sapiens
gctttacagcagggattttttggaaggtgtcagggagttgccagtctgtttcaggtctattacctgctctagtctatttgtggcccgataggagggcttgygctagacagaacaaggctgctgccactaacttttttcattgctcagattataggagagcctcctttggcagggccagggcatgttgaaggcattttctgt

SEQ ID NO: 362356 - DNA, 201 bp, Homo sapiens
taccaatcttccctgcttcaccatctatctttacctcctcctcttcattttaatagaagtgacgacccttaatgaaagatgcaacccttctctcctgtccragggtgacccttcctattttcttctttatcacacattctctcaactccttaggaatttttctctaccaattatttctttttgtcttcttgtttcccctcc

SEQ ID NO: 362357 - DNA, 201 bp, Homo sapiens
cgcctgtaatcccagctattcaggaggctgaggcaggagaatcgtttgaactcgggaggcggaggttgcagtgagccgagatcgcaccactgcactccagsctgggtgacagcgagactccatctcaaaaaacaaacaaacaaaaaaagaatcccagaaggtggcactgttgatggaaatggtgcaactttgggatattgc

SEQ ID NO: 362358 - DNA, 201 bp, Homo sapiens
agcattttacccacaatagaacatcttttgaaattggagtcaatcttctcaaactctgccactgctttatcaattaagtttatgtaataaatccattgttrtaatttcaacagtgttcacactatcttcaccaggactagattccctctcaaggaaccacttctttgtagtaacttctcatgcattcaagttttatcatga

SEQ ID NO: 362359 - DNA, 201 bp, Homo sapiens
ccctctaggtgcttaaatgttgttcacttttcacagggaaagtcttcagatggcagtaggcccattcctccacatcctagagagcaacctgctgaaagccrtggactctgccactgcccccgacaagatcaggtacctggcacagcaactctgctttgtgcagctaagggccgtgggaacttctggctgtagggagggaac

SEQ ID NO: 362360 - DNA, 201 bp, Homo sapiens
agttcacgcttgtaatcctagcactttgggaggccgaggcgggtggatcatgagatcaggagttcaagaccagcctggccaagatggtgaaaccccatctstactaaaaatacaaaaattagccaggcgtggtggtgggcgcctgtaatcccagctattcaggaggctgaggcaggagaatcgtttgaactcgggaggcgg

SEQ ID NO: 362361 - DNA, 201 bp, Homo sapiens
ggcatcttatatgggggcggtttgtggcgctcccaaatagttaaaatagtaacatcaaagatcacagagttcaggatcagcctgggaaacatggcaaaacyctgtctctcaaaaaaaaaaaaattagctgggcatgatggtatatgcctgtagtcccagctgctcgggaggctgaggtgagaggatgagccaaggtaatgc

SEQ ID NO: 362362 - DNA, 201 bp, Homo sapiens
ttttattgcttagtacctttccaaaactcagctaaaagaagcggtattcaagaagcattacatgaggtccacccattcttcaggatcgatggttcttaacygtggtgaacattggagtcaactggaaagctttaaaaaatacacatgccagggtctccctccgaaggattctaatttaattggtccagggtatccagataa

SEQ ID NO: 362363 - DNA, 201 bp, Homo sapiens
gcacagtagttcacgcttgtaatcctagcactttgggaggccgaggcgggtggatcatgagatcaggagttcaagaccagcctggccaagatggtgaaacmccatctgtactaaaaatacaaaaattagccaggcgtggtggtgggcgcctgtaatcccagctattcaggaggctgaggcaggagaatcgtttgaactcgg

SEQ ID NO: 362364 - DNA, 201 bp, Homo sapiens
aggatgagtagatgagaaacatttctttcttctatagtaagtggactttgttcactactgtgagtgaacatgctttaagctgcagtagtcacctgtggccrtgatgtgacaggcctgagaatgaaagtggtggagccacacagccaagcctgggagcacgaccactgaacttcttctgtaaaataaataagacataaataa

SEQ ID NO: 362365 - DNA, 201 bp, Homo sapiens
aggtgagaggatgagccaaggtaatgccactgcactccaggaggcagacgtttcagtgagccaagatcatgccactgtactccagcctgggcaacagagcyagaccccatttcaaaaagaaaaacaaatcataaatcatagatcaccttgacagatttaatagtaatgaaaaagtttggaatattatgagaattaccagat

SEQ ID NO: 362366 - DNA, 201 bp, Homo sapiens
cgatggttcttaaccgtggtgaacattggagtcaactggaaagctttaaaaaatacacatgccagggtctccctccgaaggattctaatttaattggtccrgggtatccagataatgtaaaagactctctggtgaagcttgagaattatctggactgaagagcattaaaaaagtggaggccccacttttttgggggataat

SEQ ID NO: 362367 - DNA, 201 bp, Homo sapiens
agcaaatgtttgccttgggagagagactgaggaagaactatgtggaagacattccctttctttcaccaaccttcaacccacaggaggtcttgtgagtcacwtgaaaggggatgttgcacttaatttaaggtcttgagcatgaggatacctgtcctgactccccaagatggttcccactgtcacccaaggtagtttggggga

SEQ ID NO: 362368 - DNA, 201 bp, Homo sapiens
catgaaccctcgaagggttttttttatccagaggggttagagggtcagaaagagggagcagtgattaactgtgaaagaaggaagaaggcctctctgtgaayacctggtcctctgatgtgtcagaaggaggttcaggtgttggagaccaggtgccagtgggactgacacatgcctttgggaagaatggagggctccctagat

SEQ ID NO: 362369 - DNA, 201 bp, Homo sapiens
tttccaaaaagattaattagttggctatggatagatggattgtgcaggtgaaagggaggagtttgtcacaggcactaataaggtttacattctacaataarataatggaaggaccattgggagggacttttcttctaggcagtgatcaacagggcttggtgtggggatagtggatccacagggagccaaaggtttgaggtt

SEQ ID NO: 362370 - DNA, 201 bp, Homo sapiens
cccagcctctgataaccatcactctactctctaattctgtgactttgacttctttagattctacacagacaagcataccttgaagatattgcagattcagrtctagaccaccacaataaagcaaatatcgcaataaagtgagacccacagttgttttttgtttcccagtgcatataaaagttgtgtttacactcttctgta

SEQ ID NO: 362371 - DNA, 201 bp, Homo sapiens
tttacacagagacatgaatgagcacatgctgttggaaaaatggcactgatagacttgctcaatgcagagttctccaaaccttcaatttgtgaaaaatgcartctctgtaaagagcaataaaatgatgtatgcctatgttactaaaaggttaactttacatattttcatcacgtaaaaatgaaagtatgtgagctgatggat

SEQ ID NO: 362372 - DNA, 201 bp, Homo sapiens
ctcccaaagtgctaggattacaggtatgagccactgcactcagccacgatgtagaagttcttgaaggacagatgctttcctctgagacattaggaaaaagytactgatatgatgacactggcttagcaagattaattaggtgattttgaaacatacaatgcattattatttattgtagtcaccatcctgtacaatagatca

SEQ ID NO: 362373 - DNA, 201 bp, Homo sapiens
tatatatatatatatatatcctgaaggcactaggaaaagatttagattcttttagggctttatccctaagggagagtgggtgtgtgatggatatcttctgsctttatggttgaaaggtccgttgtagcttaggataccagcttcattcatcttcaatctgtgtagccacaaaatagcatctgaatccatggcctgactttg

SEQ ID NO: 362374 - DNA, 201 bp, Homo sapiens; identical to SEQ ID NO: 78314

SEQ ID NO: 362375 - DNA, 201 bp, Homo sapiens
tgcaggagcaggtgccgagaggttgccctgatgggctctgcccgctggacatgttcttgaatgccatgtcagtttataccttaagcccagaaaaataccaygcactctgctctcaaactcaggtgatggaagttggaaatgaagagtaactgatttataaaagcaggatgtgttgattttaaaataaagtgcctttataca

SEQ ID NO: 362376 - DNA, 201 bp, Homo sapiens
agatccaatttgatagaggttgttattgggattttttttttttgagacagaatcttgttctgttgcaaggctggagtgcagtgacgcgatctcggctcacygcaacctccgcctctcgggtttaagcaattctcttgcctcagcctcccgagtagctgagactataggtgcacaccaccaggcccgactaatttttgtatt

SEQ ID NO: 362377 - DNA, 201 bp, Homo sapiens
tgtcttacatctacctcctctattgttaactggcttagatgaggccttaggctctcatgtggactattgctaacatctcaaaatgggcttttctgcatctrgtcttcccattccaattgtgatgtatgctgccaggtttcagatttattctgtggagcctgtgggctaagaggatgttgagcggctggggctgtgggattc

SEQ ID NO: 362378 - DNA, 201 bp, Homo sapiens
tcccgagtagctgagactataggtgcacaccaccaggcccgactaatttttgtatttttactagagacgaggtttcatcatgttggccaggatggtctcgmtatcttgatctcatgatccgcctgcttcaagtctcccaaagtgctgggattacaggcgtgagccagcacccggccgttattgggattttttaatcttctt

SEQ ID NO: 362379 - DNA, 201 bp, Homo sapiens
tatgtaaaataatggaaccttcaggaaagaggaatctggtcttgccctcaactgggttggatactgctgctagttctggctgtagttggctgctgcacacraacagtacgtgtctaggtcacataaagcaggatgggctgccccttacttcttgggaagccttgagtttaggagtgatccacagcacctgatcttctgaaa

SEQ ID NO: 362380 - DNA, 201 bp, Homo sapiens
ttaacacttagaggccattgtagggttattaactggactaattttaatattgttgtgtctcaggaaataaggaggctcaaggagagggagagagatggggraaataccagtcagcagagcactcagaaaacacacaacatttattgattaagtttggcatcttatatgggggcggtttgtggcgctcccaaatagttaaaa

SEQ ID NO: 362381 - DNA, 201 bp, Homo sapiens
atgggggcggtttgtggcgctcccaaatagttaaaatagtaacatcaaagatcacagagttcaggatcagcctgggaaacatggcaaaaccctgtctctcaaaaaaaaaaaaattagctgggcatgatggtatatgcctgtagtcccagctgctcgggaggctgaggtgagaggatgagccaaggtaatgccactgcactc

SEQ ID NO: 362382 - DNA, 201 bp, Homo sapiens
tgagacaggaaaatggcgtgaacccgggaggtggagcttgcagtgagccgagatcacgccactgcattccaacctgggtgacagggcaagactccatctcaaaaaaaaaaaaaaccagtaaaacaggccaggcgcggtggctcacacctgtaatcccagcaatttgggaggccgagaagggtggatcacgaggtcaggaga

SEQ ID NO: 362383 - DNA, 201 bp, Homo sapiens
tcaactgaaaatacttatggttatttcttaattatatgccaaacaaggggtggattattcatgaattttctgggaaaggagtgggatttcctggaactgarggttcctccccactttaggccatatagggtaactgctggccccgacattcgtaaattgtcatagtgctgatgggagtgtcttttagcatgctaatgcatt

SEQ ID NO: 362384 - DNA, 201 bp, Homo sapiens
ggttatttcttaattatatgccaaacaaggggtggattattcatgaattttctgggaaaggagtgggatttcctggaactgagggttcctccccactttargccatatagggtaactgctggccccgacattcgtaaattgtcatagtgctgatgggagtgtcttttagcatgctaatgcattataattaacgtaaaatga

SEQ ID NO: 362385 - DNA, 201 bp, Homo sapiens; identical to SEQ ID NO: 78315

SEQ ID NO: 362386 - DNA, 201 bp, Homo sapiens
aacccaagtgtgaagcacactttgtaaactgttaatcactatagaatataaggctttactttttattttttgtcagaggccggaggcagactgcctctttrcagccaggaatctcagaggatttgaaaaaggtgaaggacaggatgggcattgacagtagtgataaagtggacttcttcatcctcctggacaacgtggctg

SEQ ID NO: 362387 - DNA, 201 bp, Homo sapiens
ttatttaggtgagacattgctggaaaggaaggacactgggacccaacactgctgctactgccctaatcttggtgataatccacagcatgaacactgttccrtctagcctttcctagttgagaaagtccatcgagtttgggttttgatacattcagcccctgaatggttgcagtcagtggttcccaaccttttcatccccaa

SEQ ID NO: 362388 - DNA, 201 bp, Homo sapiens
gtgtgccaggccaggagtctcgccctgacacacatcttcagagctttactcgcgcggagcggggctcgggttgggtccagaagaagggaaaacagcagtarccagtgactccccaggctcttgagcaaaggacctgctggggttaggacagccccggaacttccagttttgccctgatggcgcagccatcagtaagcgctg

SEQ ID NO: 362389 - DNA, 201 bp, Homo sapiens
gaggtcggaacaaatttaaaatgggctagtctgtggcagtaatgttttaaaaatctgtctggttttgtcaggataattatgactaaagcacaaatagtttaaaaaaaaaatgattatctttcctggatgtgactttttatagcagaaaggcctagtgaagaggaacaggcaacctgaaatccccaaactcccaggtattac

SEQ ID NO: 362390 - DNA, 201 bp, Homo sapiens
tgatcttgaactcctggcctcaagtgatgctcccacctcagcctcccaaagtgctaggattacaggtatgagccactgcactcagccacgatgtagaagtycttgaaggacagatgctttcctctgagacattaggaaaaagttactgatatgatgacactggcttagcaagattaattaggtgattttgaaacatacaat

SEQ ID NO: 362391 - DNA, 201 bp, Homo sapiens
tatccttgaacattgaagacaaggtgatgggcagataggaacaggagtccctccaagcaagagaagcaagctggaagaagatgcagaaacagtgggcaggktctaggttggaggggaggaaagaggcagtgaagctgagtacaggggctggacaaagggggtagaagtccttttttaaaatttttttaagagatggggtct

SEQ ID NO: 362392 - DNA, 201 bp, Homo sapiens
gtcacccaaggtagtttgggggacaacttgtcatgctgcatacccttatgtcacaggatctggtgaacaggtcgttcctggaggtcgcattcattgcactwcgagtctctcaggggctgacatcccacagaaaagtgaagcattcttcctagttccatagctctccttatgtactcttgaaagacccctggagcgtatgtg

SEQ ID NO: 362393 - DNA, 201 bp, Homo sapiens
agctcgtttaatacactttggtaaaggctactaaagagagccactgaagctactgtgaaagcataaggccatgaccaaggtttctgggaacacttaagctragtcttaaggaatgaacaaaagtctttctaaatgaatgaggagagaaaattccaggcataagaaacatgatactgaaaggccatgaaatatgagaaagga

SEQ ID NO: 362394 - DNA, 201 bp, Homo sapiens
tcacccaaggtagtttgggggacaacttgtcatgctgcatacccttatgtcacaggatctggtgaacaggtcgttcctggaggtcgcattcattgcacttmgagtctctcaggggctgacatcccacagaaaagtgaagcattcttcctagttccatagctctccttatgtactcttgaaagacccctggagcgtatgtgg

SEQ ID NO: 362395 - DNA, 201 bp, Homo sapiens
tgcaacattccttgacttataaagatggtcatttacccaatcaccacaaataaggatttgtctaagccaatcatggcaaccttgttttcatttgtcagtgrctgggttctgggaattctaggaggggtgtttttttctctttgataaaaagtgagaagcacaaaaacaaggagaagaccagtctctgaagtctccatggaa

SEQ ID NO: 362396 - DNA, 201 bp, Homo sapiens
ataaaggataggcttcaaggtcagggaacgttgctgggtggtgagatggaaccctgatgtggaggctcagcaggaagaagcaggaaggacactgggccccyggtggttttagttccagaaacaaatgtgggccccagggctctgcaatggtaaggctggaactactcaacataagagctccacctttaactgtgcccccta

SEQ ID NO: 362397 - DNA, 201 bp, Homo sapiens
gcatattaaaaaaatctgagatgcccttcataaagaaagctggttaatctttaaatctgttttccttaagcttatttagccataggatctttttttctgtrataaatacataaagaagactaacaatgggaaaggtttctctagatttaaaagttggacatccaaagttatataggatcctccccactcttgtgaaaataa

SEQ ID NO: 362398 - DNA, 201 bp, Homo sapiens
attactggtctgagtttcagatcatcatgaccttattaaaaaggtgccaaaaagcaaaggttcttgttactttgtttagctttttggcagtatctcaaatrgaaacaaaatttccatcacattttttaagaaatatgtaaaataatggaaccttcaggaaagaggaatctggtcttgccctcaactgggttggatactgct

SEQ ID NO: 362399 - DNA, 201 bp, Homo sapiens
tttttggcagtatctcaaatagaaacaaaatttccatcacattttttaagaaatatgtaaaataatggaaccttcaggaaagaggaatctggtcttgcccycaactgggttggatactgctgctagttctggctgtagttggctgctgcacacaaacagtacgtgtctaggtcacataaagcaggatgggctgccccttac

SEQ ID NO: 362400 - DNA, 201 bp, Homo sapiens
ctggccttttttctttactaacttgaacacccaggaaaggcagggtcaagttttctcaagatgggtatcttccacaggagctggcaaattgttggagctaytaattgtacctactgtgtgtgaggccctttgctgggaaacagaagtcaatagatgaccgagtctctgttctcaggaagccaggacagaccagtaaaggag

SEQ ID NO: 362401 - DNA, 201 bp, Homo sapiens
gtcttctcttccccaggagaagatgggctcctgcaggttccatggaagctgatcagctgccagaatcagtaggtaagaagcatttttttctaaaactacaygtggccctttcaggcacacaacctcccaagctgccccatgctgaagagatttgcacggatgatcgaacagagagctgtggacacatccttgtacatactg

SEQ ID NO: 362402 - DNA, 201 bp, Homo sapiens
tctcttccccaggagaagatgggctcctgcaggttccatggaagctgatcagctgccagaatcagtaggtaagaagcatttttttctaaaactacatgtgkccctttcaggcacacaacctcccaagctgccccatgctgaagagatttgcacggatgatcgaacagagagctgtggacacatccttgtacatactgccca

SEQ ID NO: 362403 - DNA, 201 bp, Homo sapiens
gatctgtggccttgtgtccacttttctcagtttgttatgtgataagtcaccatagtggcctataggatcaggcttcaggaagcaacttagttctgataacrctattatttattagaatgcccaaatgctggtagtgctttacagcagggattttttggaaggtgtcagggagttgccagtctgtttcaggtctattacctg

SEQ ID NO: 362404 - DNA, 201 bp, Homo sapiens
ttattctgtggagcctgtgggctaagaggatgttgagcggctggggctgtgggattccctcctacttcaactagagaaattcgagtttttgcctttatacrtacaaatctaaagttaaactttatgtggtattttctgatttaaaaattggaaaaccattcccaggttgaggcaaaccaaaccacttctttgccatacaca

SEQ ID NO: 362405 - DNA, 201 bp, Homo sapiens
cacagcacctgatcttctgaaagctctcaactgctcagcttctaaaaggcaaagatcttctcagaaacatcagaagtggtactgagaaggaaagatgtttrttggtggcaacattctctttaggcaggtcccagactgggaatatcccaggtttccatcagggaaggaaatcactagcctcaggtgcaggtgtctgggtag

SEQ ID NO: 362406 - DNA, 201 bp, Homo sapiens
tgaccaaggtttctgggaacacttaagctaagtcttaaggaatgaacaaaagtctttctaaatgaatgaggagagaaaattccaggcataagaaacatgayactgaaaggccatgaaatatgagaaaggaaaggaagttgcgtggctagtgagtaagtatgtagaatagggaagaagtggtaagggggctgctagagagga

SEQ ID NO: 362407 - DNA, 201 bp, Homo sapiens
aagctctaccaggtgcgctgcgccctcgggcacacttggtctcctgggccatgcaagggtattgacccttgacctttaagttaccccccaagaggggcccrtcctggctggagctcagaatggcccaggaagcaccagctggcccaccctctggggagggcacagacagcacatccccacagaccctgcgaaattccacat

SEQ ID NO: 362408 - DNA, 201 bp, Homo sapiens
aaggccgactctcttgacagcaggtcttctctccaaacgtatccacccagccaggtgtctgccatggggctgcttagagtcggccacaaaatcaacccgtstgcagggtcagtggcttggcattgggctttggggcctgtccctgtggctggcagcctgcctgctgcccggtccacgcctctgttgccttggatttgggtt

SEQ ID NO: 362409 - DNA, 201 bp, Homo sapiens
ctgccctccggggtctggtggcgtttacagtgcaggtgccctgatgcctctgcacccttccccagaacgcagatgtcatctgctgcacatgtgtgggcgcyggtgacccgaggctggccaagatgcagttccgctccattttaatcgacgaaagcacccaggccaccgagccggagtgcatggttcccgtggtcctcgggg

SEQ ID NO: 362410 - DNA, 201 bp, Homo sapiens
agctgcagtgttgggccccggcccaggagggagcccagaggcagagccaccggtcaacaggccctcagcaggaatggacaaggctgcagggcagggggacrctgttggctcaacagtgtcacacacaagtcagttgtaggggctgtggcgcctttaaggcaagcttctggaaggaagcaggagaatatcctgtatcctggg

SEQ ID NO: 362411 - DNA, 201 bp, Homo sapiens
cctgtggctggcagcctgcctgctgcccggtccacgcctctgttgccttggatttgggttctgagtgaatgcagccttgcctcttggaccgtcctgtgagrcgggcagctctccacctgcgtcctcagcactgcgcccttgttgcaggtatggcgtcatcattgtgggcaacccgaaggcactatcaaagcagccgctctg

SEQ ID NO: 362412 - DNA, 201 bp, Homo sapiens; identical to SEQ ID NO: 78335

SEQ ID NO: 362413 - DNA, 201 bp, Homo sapiens
ggctcctttcactctgcgtgatgtgtgagaagtagctacaaggtgagcttcgtagctgttccctggccgagcattcaggaaaatgaacctgatcgaggttyatccacgctgtggtatgtgtcatcatttcattccttttttttttttgagacagagtctcgctctgttgcccaggctggggtgcagtggcgtgatcttggc

SEQ ID NO: 362414 - DNA, 201 bp, Homo sapiens
ctgtggtcgcagccatctgggcaccccacctttcacagtcacggagcgtaggttcgactttccccatgcataggggcgctggccagcggaaggttgaggcrgagaagaatttttgcctcccatggaggagcacatattggctggctattaagatcattcaggaagcaggttgtattttgttttttcttgcatcgcctgttg

SEQ ID NO: 362415 - DNA, 201 bp, Homo sapiens
cagctggttgtatggttgcttcccctctgcccgaatggtgatgttggtgatgccacttgtgtggcgcgtccctgggctgactctggaagttaatgtatgcygcttgtgtggcacgtccctggactgactctggaggttaatgtggctgcaggagcgccttacctggacgctgactctgcacacggaggttccagaagccag

SEQ ID NO: 362416 - DNA, 201 bp, Homo sapiens; identical to SEQ ID NO: 78336

SEQ ID NO: 362417 - DNA, 201 bp, Homo sapiens
gaagaatggggctggctgtgggcagacttgtcctgcagagcctgaacctgcccagacaggtgggctgcgagaatgtcctggggaaataggttggtgtcgargtcggcacagtcagctgagacagaggggagaggagagggtgccgggtcaagtagtgggtgcctggccctccttccacagacagccctcacttttccccac

SEQ ID NO: 362418 - DNA, 201 bp, Homo sapiens
gttgttgtttctgtggaactgtgagaagagctgctgtggccaaagctgggttctgcgagctctgcctgcccctgctggccacatgtgcaggagctcccggygaggtcctggggcccaggatgtggctgctccctgctggtgagcgctgctggcttcgctgccgccctctgcgtctctgaaaggggcctagatgggtggctg

SEQ ID NO: 362419 - DNA, 201 bp, Homo sapiens
tgctagcaaggaagtgtggggtctttttctgaggttcacgttctggagaaagaaaatgaccaaagcccggaggcaggcttacttgtgctgacacaagcccytcctgtgcctttgacagctgtgggtctcggagggttacagatggagcagtcagatctcgtggcatctctgagttagtaacttgaaatatggtgttatgag

SEQ ID NO: 362420 - DNA, 201 bp, Homo sapiens
aggccaaggtgggtggatcacctgaggttgggagttcgagaccagccagaccaacatggagaaaccctgtctctactaaaaataggcgtggtggcgcatgyctgtaatcccagctacttgggaggctgaggcaggagaatcgcttgaacccgggaggcagaggttgcggtgagccgagatcgcgccattgcactccagcgt

SEQ ID NO: 362421 - DNA, 201 bp, Homo sapiens
agggtgtcacaccagagtcatcgaggctggttcttctgcactgagtcctggaagctgcagcctcactcaggtgacactgcgttctgctgcaggttgggccygaaggcatcctgcagaacggggctgtggacgacagtgtagccaagaccagccagttgttggctgagttgaacttcgaggaagatgaagaagacacctatt

SEQ ID NO: 362422 - DNA, 201 bp, Homo sapiens
tgtgcctttgacagctgtgggtctcggagggttacagatggagcagtcagatctcgtggcatctctgagttagtaacttgaaatatggtgttatgagcaargccagaaaggggctgctgtttttaaaagattttaaagaagggtatcttctggataaccaaaagacattcttgtcccattttcagaatcttctgggtaatt

SEQ ID NO: 362423 - DNA, 201 bp, Homo sapiens; identical to SEQ ID NO: 78319

SEQ ID NO: 362424 - DNA, 201 bp, Homo sapiens
gtggggagctagtttgggggagggctggcccccagagatgccagatggatgaggtgtgactgcctctgctaatggaccgtgaacggtaccggaacttttamcaggggcccgaaaattggaagtggtgaaaagccaaattttgggtgttaaccgtttatcatttcctggtttcagccacattgtaaatcaccttgtgagggc

SEQ ID NO: 362425 - DNA, 201 bp, Homo sapiens
cgacgtggcgctctcacaggactccacgtaccagggagagcgggcttaccagcatggcggggtgacggggctgtcccagtattaaaaggcaagcccccctrgagcaggcctggccccaccccagcctcaaggagaaggatgggagggggctctccccagggagctgcactggaggggtggtatctggaaatgtgtgctgtg

SEQ ID NO: 362426 - DNA, 201 bp, Homo sapiens
cctgagcttctgcgggtgacatgtacagaactcaggcaccctgctgacctgcatgtgcttccagcatgcctgagctgcagaagctgcagcagctgaaagaygagactggggagctgtcgtctgccgacgagaagcggtaccgggccttgaagcgcaccgcagagagagagctgctgatggtgagtgcccctcctgcctgca

SEQ ID NO: 362427 - DNA, 201 bp, Homo sapiens
ggacatcaactgggacagctcgcagtggcagccgctgatccaggaccgctgcttcctgtcctggctggtcaagatcccctccgagcaggagcagctgcggrcacgccagatcacggcacagcagatcaacaagctggaggagctgtggaaggtggggctgcccagcgggccgacccgtgccttcgtgtggtttctggttgc

SEQ ID NO: 362428 - DNA, 201 bp, Homo sapiens
caagaagtggttctgcaacggacgtggaaatacttctggcaggtagataatcagaccatgcatgtgtgtttaatcagtgctgtgctcagatttgtgtgtakattatggaaatgttgaagcaaagcgtaatataaaatcacgctaacaaacctgggttttttcctcctctgtgactggtttaacttgaaacagatggtggtg

SEQ ID NO: 362429 - DNA, 201 bp, Homo sapiens
ggctcggggtcgagggaagggtgttgcctaccggccacagcctcctggagggcagtttgcttgtgtatgtggagccttttgcttggccgtactgggagggktgttgtttctgtggaactgtgagaagagctgctgtggccaaagctgggttctgcgagctctgcctgcccctgctggccacatgtgcaggagctcccggcg

SEQ ID NO: 362430 - DNA, 201 bp, Homo sapiens
atccctgcaggtggccactgtccaggggtgcgcatccacagcagcccctgggctgagggacttctgagctcatccggcggcccctgtgctcgctgtaacarcagtgatccacttggcctcattttcagctcgacgtgggatcatatgatgtgtcctggcgtgtctggcttcctctgtccatgtcaggctggtgctgtgcaa

SEQ ID NO: 362431 - DNA, 201 bp, Homo sapiens
tccctgggctgactctggaagttaatgtatgccgcttgtgtggcacgtccctggactgactctggaggttaatgtggctgcaggagcgccttacctggacrctgactctgcacacggaggttccagaagccagtggtcacatgcagaccctctgagcacacacttgctcccaggccatgtttgggaatgtgcagtgacctc

SEQ ID NO: 362432 - DNA, 201 bp, Homo sapiens
gttgaagcaaagcgtaatataaaatcacgctaacaaacctgggttttttcctcctctgtgactggtttaacttgaaacagatggtggtgtgtgaatgcctyaatgtatttacccttgatttattctctgtggctctttttattatgcaagtagggttggcttaattctccttcccagtttttatttcgatttttctgcaag

SEQ ID NO: 362433 - DNA, 201 bp, Homo sapiens
gggaggccaaggtgggtggatcacctgaggttgggagttcgagaccagccagaccaacatggagaaaccctgtctctactaaaaataggcgtggtggcgcwtgtctgtaatcccagctacttgggaggctgaggcaggagaatcgcttgaacccgggaggcagaggttgcggtgagccgagatcgcgccattgcactccag

SEQ ID NO: 362434 - DNA, 201 bp, Homo sapiens
ccttcctgatgttgatcagctgcagctggactgtgtcgcttgttctgtgtttgggacaggacagtgttctcccagtgcccaaattccaaggggggagttcratggtcttgcccgagtggtgggactctcgtcctggtgggtcccgtgctagcggctccccttcccctccaggttgctgtgtacaggtcactccactgctgg

SEQ ID NO: 362435 - DNA, 201 bp, Homo sapiens
ctgagcaagcttgctctggcctgagctcatcggagctgtccggaggctaattcaggccagatcctgaatcatcggcttcaattaagttcacttgaccgtcrgcgctgggcttgccttcctgatgttgatcagctgcagctggactgtgtcgcttgttctgtgtttgggacaggacagtgttctcccagtgcccaaattcca

SEQ ID NO: 362436 - DNA, 201 bp, Homo sapiens
ttcctaagcatcctggttgtgggcatggacatggctctgtggctaggcgggggttagaccagctgtgtgggggaccggggggtgtagaaggccaccagtgrcccttttttggccaggtaggtttgctagagaagagtgaaatccagtcagaacaagggaaactgtctcaaagcagagatgaggccagggtgtcacaccaga

SEQ ID NO: 362437 - DNA, 201 bp, Homo sapiens
cttcctggccttgctgtgcttgtgggactgagggcagtgaggccagcagagggagagtgaagcctttgacccccgcggttgcactgttagaagacagcacrtgccgcctggccagggtgctgtgagggccccaggagtaggagtgggctcccctgctaagggaaagcctgtgggaatggcgcctctggagttgttcagaag

SEQ ID NO: 362438 - DNA, 201 bp, Homo sapiens
cctgcgtcctcagcactgcgcccttgttgcaggtatggcgtcatcattgtgggcaacccgaaggcactatcaaagcagccgctctggaaccacctgctgawctactataaggagcagaaggtgctggtggaggggccgctcaacaacctgcgtgagagcctcatgcagttcagcaagccacggaagctggtcaacactatc

SEQ ID NO: 362439 - DNA, 201 bp, Homo sapiens
accagcaagaagtggttctgcaacggacgtggaaatacttctggcaggtagataatcagaccatgcatgtgtgtttaatcagtgctgtgctcagatttgtktgtaaattatggaaatgttgaagcaaagcgtaatataaaatcacgctaacaaacctgggttttttcctcctctgtgactggtttaacttgaaacagatgg

SEQ ID NO: 362440 - DNA, 201 bp, Homo sapiens
agtgtgtgagagcaaggggagtcggagtgcagggggatgtgatggagagtgtccagctggaggggtgtgggggtcggatttctgtagctttggaatttttmaaaataagaggaaatatcagggcagaatccttccagtttgggggccagacctcctggcaaccctctgccttgagagggctcagagaccctgcagcttctt

SEQ ID NO: 362441 - DNA, 201 bp, Homo sapiens
aaggccaccagtggcccttttttggccaggtaggtttgctagagaagagtgaaatccagtcagaacaagggaaactgtctcaaagcagagatgaggccagrgtgtcacaccagagtcatcgaggctggttcttctgcactgagtcctggaagctgcagcctcactcaggtgacactgcgttctgctgcaggttgggcccga

SEQ ID NO: 362442 - DNA, 201 bp, Homo sapiens
agctcgggcacctcctacctgaacaggtgagcagggacaggcccaccggcgtctgcaggtcttggggacagcttgagaggttgttgacccattctacttayttttaacatgggactgaaactttttttgccttcatttcctgtttagcctgtttagactctaaaccgtgttgtttctgcctccttttccattgtacttgtt

SEQ ID NO: 362443 - DNA, 201 bp, Homo sapiens
ggaagcacctcgaggacagaacatgttggatggtggagcacctttctatacgacttacaggacagcagatggggaattcatggctgttggagcaatagaaycccagttctacgagctgctgatcaaaggtaagtgaacttcacgcgtctcccccagttccccttttgctgtggatgttctttggttctattttaaagactt

SEQ ID NO: 362444 - DNA, 201 bp, Homo sapiens; identical to SEQ ID NO: 78347

SEQ ID NO: 362445 - DNA, 201 bp, Homo sapiens
gttggaaggttaatacatgcccactactatcatttatttactacatttgttgagtcaattctcagacaaacccctgctaggaattaagaggcttactgggyactacggatggttgctctgtggtttgaaaatgttgacatagttagattctgacagctacttctcccccggaccccgaaatctccacccaccatattgaga

SEQ ID NO: 362446 - DNA, 201 bp, Homo sapiens
ttggctctagctttacttagtgttatgattctgatcacattctgataaaaagaaactgttttaaaagcatgtgaagatcactactttttgctcaatgctcrttttatgtgcctttcactcacagagttcagggcaatcaagaaagaacatcaagtgaaagacatcctgtagattatagtgataacctgaaactatggcctc

SEQ ID NO: 362447 - DNA, 201 bp, Homo sapiens
tccctagagcaaggcaggagtagggactcgaatggtacagttgggctggggatcgccctggtacaataaaagcgtccagagaggacggtaacaggcaggarctccaaaggtcagtccctgcaatttaagactcaggaatttaggttgcacaaaaaggaaagcaacctactgcatttggcactggcggtcccgggaggccgg

SEQ ID NO: 362448 - DNA, 201 bp, Homo sapiens
atcgctttcagtattcagtttattactgtatttcattttgactggatgttaggaaaatcctgagttacagagataagttaaaaatatccatagtttttacrcaaaaattagctgggtgtggtaggcacctgtaatcccgctactcgggaatctgaggcaggagaatcgcttgaaccttggaggtggaggttacggtgagct

SEQ ID NO: 362449 - DNA, 201 bp, Homo sapiens; identical to SEQ ID NO: 78356

SEQ ID NO: 362450 - DNA, 201 bp, Homo sapiens
tttttcctcaggacttggactaaagtctgatgaacttcccaatcagatgagcatggatgattggccagaaatgaagaagaagtttgcagatgtatttgcaragaagacgaaggcagagtggtgtcaaatctttgacggcacagatgcctgtgtgactccggttctgacttttgaggaggttgttcatcatgatcacaacaa

SEQ ID NO: 362451 - DNA, 201 bp, Homo sapiens; identical to SEQ ID NO: 78348

SEQ ID NO: 362452 - DNA, 201 bp, Homo sapiens
attatcattcgacacttagccatgcacttttaaaagcccgcttatatggggaagaaaaaggacatttacaccaactattgtaaagcagccctgctctttgrgtataatttaatcagaactggagtttgggcatgtctgcaggggtagaaccacatagtcagtaaaggaaacgcagatggggtcaagagctagagaggccac

SEQ ID NO: 362453 - DNA, 201 bp, Homo sapiens
ccgctcttgaggaaatcaaagacaaacacaggatatggaataaacccagaattatctcattgtaaaatgtgttaagtaccacgaggagaaatatcagggcsatctgacacagctaatgatttgaagaagggtgtgacctgccaccattttaaatctagttatttcactcctgagctgtgtgtgtggaaaacttgtagtaaa

SEQ ID NO: 362454 - DNA, 201 bp, Homo sapiens
gatacattttgtggttgttccacagtcagtaactgagaaattgctagcagttggaatgaggcctgctctattggtagcttttgagacgaggatgctttgarggccttcctcctggggtgctggagacattaggctcataaaaggcataaaggtcagaacatcatcttcttcaaatagtccagtgccttcagcctttgagtt

SEQ ID NO: 362455 - DNA, 201 bp, Homo sapiens
caaaggtcatttcttctaagtcttatagtatttttggaactgaatagtgcagccaattgttattttaacacaaactgctctaactcactttctggaaataycagagaagttgtgtaattaggtagaatcttcgtatactctaagataagaatttttacgcaaattttttttaacttgaatgggaggaattattcatgcttt

SEQ ID NO: 362456 - DNA, 201 bp, Homo sapiens
gctttgacacttgagttatctggatttgtcttgtattctgttttctcaaaggtggaaggaacagcatatttaagttcttttctgtggaaaactcagaaatygagtctgtgggaagcacctcgaggacagaacatgttggatggtggagcacctttctatacgacttacaggacagcagatggggaattcatggctgttgga

SEQ ID NO: 362457 - DNA, 201 bp, Homo sapiens
ttgtggttatttttactagaagaaaaggaactcagttttggtcttttcagttttaaagtgcctttcagatatccaggtgggatacttgaggttagggactrgaaacagatttcggagttatttgggagccatatgagactatgtgatccactaggaaaggggatagaacaccggcatttaaggaatgcgtgggcagaaaag

SEQ ID NO: 362458 - DNA, 201 bp, Homo sapiens
taaggaatgcgtgggcagaaaagagaagcaagggctgaggacagctaaggagagaagcagaatggagtgttgtcatggaaaccaaagaaaggagtggtcasagggtcaaatgttggtggatacctcaagagtttagagactgagagtgtcaactggattgggtcctggctgatcttcacaaaatccattttctaccagaaa

SEQ ID NO: 362459 - DNA, 201 bp, Homo sapiens
atggagaaactccagctgggcccagagattctgcagcgggaaaatccaaggcttatttatgccaggctgagtggatttggccagtcaggaagcttctgccrgttagctggccacgatatcaactatttggctttgtcaggtatgttgaaaaaaaatttagtctacacttttaatttattccatcaagatctacaggtatgt

SEQ ID NO: 362460 - DNA, 201 bp, Homo sapiens
cttctgggttcatatttccattaggggctagtaagtgtttgctaattacacaaggctaaaagaatcagtaaatcatagtcattacttcatcactaggaccycttgtgacacaggcaattgcagaagctgattaggggaaggcagataccttctaatgggccgaaagttttcacagtgtttagcagcagaattccagacctg

SEQ ID NO: 362461 - DNA, 201 bp, Homo sapiens
cccttgtgacacaggcaattgcagaagctgattaggggaaggcagataccttctaatgggccgaaagttttcacagtgtttagcagcagaattccagacckgggcctgcctgtgaagagctggaggctgccttattgtagtgctgtttccttggaaactgtagttaagataactctggaatatggagtgcgttttgctgta

SEQ ID NO: 362462 - DNA, 201 bp, Homo sapiens
ttattgtgaactcatgaatgttcatagtatttgatgtgttttaatccaccacagtcattattctagtttaacaggctccatcttaattgtcagtgggaagsccttcaagttagtccctctgcccatttgggtcagatttaggctggtgccaatcctgcacagctggcaggagttcagcagggcaggggtgagtggagtctc

SEQ ID NO: 362463 - DNA, 201 bp, Homo sapiens
tggaaactgtagttaagataactctggaatatggagtgcgttttgctgtatttacactcaatctgagcccacatgatgagcacagcgttgttaaattaackgtagcataaagctgcccccttacgtattttaagttccacctaaaggtttctcttacataatgagctgtgacctaactggatgtgtaaacagactgtaacc

SEQ ID NO: 362464 - DNA, 201 bp, Homo sapiens
tgatgtgttcttatctgatggagtaattgtttttgcaagcatctgagagcattttatgattaaacatattaacttcacctattcaaatatagttggaaaarctatagaagaacacaatggtttatctagatcataaagggtacctctctgtccagaaattaaaaagcttgccttttgtcactgctccaaataaattggaag

SEQ ID NO: 362465 - DNA, 201 bp, Homo sapiens
attttaaaacatatatagtagtcctctcttatctgtgggggatgcattgcaagacccccagtgggtgcctgaaactgcagatagtactgaacctgattgckgtcaattggaagatgtttctgtttatgtcttccacccacaaagttaatgcgttttccatcttaattaagcacttatgcactatggctgtaacttttcagt

SEQ ID NO: 362466 - DNA, 201 bp, Homo sapiens
ttggccccagggctacactagtcgctctgaacctagtctggttccacagactgcccaattcatgagtcattcgttgctcagttaaactcttaaattaattygtctaaagtttttcttttaacagtatcaaaggttggtggcaaattgaggctgcggtttccctgtgtcagggggctcttcactcgcatgcatggtatatga

SEQ ID NO: 362467 - DNA, 201 bp, Homo sapiens
ggtggagctctgtggagccatgaacactgccacctgcagtctgatgaagatagcaaatgatattcattttctgagttctggtccttggccaggtctgggakaactgatcttgctgaaaatacaacaggaagcagtatcgtgccaggcaaggcaaaccctcgtcagtgtgaagcaatggccatcgttgcagcccaagtcatg

SEQ ID NO: 362468 - DNA, 201 bp, Homo sapiens
tgactaagctcagatttggaaaagtgatgtatactagctttcacttagattatctgctggagagattgattattcctctaagatgctcacatatttatttwaagaagagattaaatttaaaagagacattaaatttgtttttaatgatgtaggtgttctctcaaaaattggcagaagtggtgagaatccgtatgccccgct

SEQ ID NO: 362469 - DNA, 201 bp, Homo sapiens
gttctgtgctatggtcctggctgacttcggggcgcgtgtggtacgcgtggaccggcccggctcccgctacgacgtgagccgcttgggccggggcaagcgcycgctagtgctggacctgaagcagccgcggggagccgccgtgctgcggcgtctgtgcaagcggtcggatgtgctgctggagcccttccgccgcggtgagcc

SEQ ID NO: 362470 - DNA, 201 bp, Homo sapiens
ttgggactggattccaagttccatattggagtgtcaggagcacagcaaacagctcaccttaaaccattggtgtttaatcctgtggccttggtcagggtcakgggcaggatgggagattgtgggctgtgaagggatggtagacaatgggagaattggggtgttagagttagggtaggatctgggggcttttgatttctagta

SEQ ID NO: 362471 - DNA, 201 bp, Homo sapiens
ttaagaagatcgttacttttctcttaaggtgtcatggagaaactccagctgggcccagagattctgcagcgggaaaatccaaggcttatttatgccaggcygagtggatttggccagtcaggaagcttctgccggttagctggccacgatatcaactatttggctttgtcaggtatgttgaaaaaaaatttagtctacact

SEQ ID NO: 362472 - DNA, 201 bp, Homo sapiens
ccttaacttcttgcttgtgaagagcctcaaggtcagccagaggtgagagacgagggcctttacagatctctcccaggcattcatactgccctgcgtgtgtrcgtgtgcgttgccttctcaggagttgcaaaaaaaattctcaggaatatgttggagcttttcaaagtcccctatggatatcccattccccagtttattctt

SEQ ID NO: 362473 - DNA, 201 bp, Homo sapiens
ccatttcaaaaaaaaaaaagaccctatatttttaaaaacttgcttaaaatttcagattgcatttcatttatgatgaagcagaacaaaaatactttgtttcwaggtcgactcactacagtgtgtaaaaacttctcacattctttggcctgaacatgaaagccagataaacagtattcagaactctctgctaaaactctctct

SEQ ID NO: 362474 - DNA, 201 bp, Homo sapiens
tgagttgaggctctgatgagtcagaatttggtataggatacatttaaatatgtgcttaaataacataaacataaaatatatttaaaatagtgcgcatatayatgcatatgtgtatatatgtgtgtgtgtgtatgtgtataaatgtggaactctaatatctctgtaatccagcctcaaaaaaaggcactgccgtaggccact

SEQ ID NO: 362475 - DNA, 201 bp, Homo sapiens
ttgattataattgctctgttcaaagcataataatttaggaaattgtatttttcctcaggacttggactaaagtctgatgaacttcccaatcagatgagcayggatgattggccagaaatgaagaagaagtttgcagatgtatttgcaaagaagacgaaggcagagtggtgtcaaatctttgacggcacagatgcctgtgtg

SEQ ID NO: 362476 - DNA, 201 bp, Homo sapiens
gaggatgctttgagggccttcctcctggggtgctggagacattaggctcataaaaggcataaaggtcagaacatcatcttcttcaaatagtccagtgcctycagcctttgagtttgagccttgtgataattgtactttattgtgtaattacttcaggactcagtgggaaggtggcgtgatgagatgactttaggactcagt

SEQ ID NO: 362477 - DNA, 201 bp, Homo sapiens
tccccagtttattcttttgagttttttggtcagcatcttatgagctgcaataaataacaccacctaagacagctgcgataaaatattgcctttttttttttattaaatcaacaatttagggctagagcaaagtgagctctgagtcagaaagacaagccctgagaatggagcctttcagggagctgccagacaggctaaata

SEQ ID NO: 362478 - DNA, 201 bp, Homo sapiens
cacctcgaggacagaacatgttggatggtggagcacctttctatacgacttacaggacagcagatggggaattcatggctgttggagcaatagaaccccakttctacgagctgctgatcaaaggtaagtgaacttcacgcgtctcccccagttccccttttgctgtggatgttctttggttctattttaaagacttttggc

SEQ ID NO: 362479 - DNA, 201 bp, Homo sapiens
tactctgaagtgatgtgaaagctgatcacagtgcatttacctttctactacaagtttagagtttcattgttacgtttggtagcttttcagatgcatatackaaaagttatttgcatatagctggaatgactttttttaaattttccaaatttttgatgtgttcttatctgatggagtaattgtttttgcaagcatctgaga

SEQ ID NO: 362480 - DNA, 201 bp, Homo sapiens
ctaaaatttatataaccaattccctatgcaagttcatttacattttttccaattttgtattataaaaataatttttatggccgggtgtggtggctcacacytgtaatcccagcactttgggaggccgaggcgggcggatcacgagggcaggagttcgagaccagcccggccaacatagtgaaaccccatctctactaaaaa

SEQ ID NO: 362481 - DNA, 201 bp, Homo sapiens
aagcttctgccggttagctggccacgatatcaactatttggctttgtcaggtatgttgaaaaaaaatttagtctacacttttaatttattccatcaagatmtacaggtatgttgattaacaataatttgtaaaggtaaaaatttaaacatttatcagaatcaatcaagagagcatgggtgttcaaaatggatcggtttgag

SEQ ID NO: 362482 - DNA, 201 bp, Homo sapiens
gtggcatgatctcggctcactgtaacctctgcctcttggattcaagtgattctcctgcctcagcctcctgagtagctgggattacaggtgcccaccaccaygcccggctaatttttgtatttttagtagagacggagtttcaccatgttgaccaggctggtctcgaactcctgacctcaagtgatctgcccccacttagcc

SEQ ID NO: 362483 - DNA, 201 bp, Homo sapiens
taattttgattacttttaatcccaggaaatttcaggtgctggttacctggggtttgtgctataaatactatacttgttgatagcttaaaaactctcaggtrctattgtcactaaccactctttctacagatgggtgctaaactttttcgtgaaggtactgatgctaggcactttagcgcctgtggaaacatcaggtgtaaa

SEQ ID NO: 362484 - DNA, 201 bp, Homo sapiens
gccagtcaggaagcttctgccggttagctggccacgatatcaactatttggctttgtcaggtatgttgaaaaaaaatttagtctacacttttaatttattmcatcaagatctacaggtatgttgattaacaataatttgtaaaggtaaaaatttaaacatttatcagaatcaatcaagagagcatgggtgttcaaaatgga

SEQ ID NO: 362485 - DNA, 201 bp, Homo sapiens
gaaatttcaggtgctggttacctggggtttgtgctataaatactatacttgttgatagcttaaaaactctcaggtgctattgtcactaaccactctttctrcagatgggtgctaaactttttcgtgaaggtactgatgctaggcactttagcgcctgtggaaacatcaggtgtaaattctgcaggaggagctcatgagctg

SEQ ID NO: 362486 - DNA, 201 bp, Homo sapiens
caggcggccagctgttcaaaccatgttcaaacaaggcaaaggcccacttgtaaccaatccggctgtttctgtacctcacttctgttttctgtacatcattktccgtccataagtcctctttggccccagggctacactagtcgctctgaacctagtctggttccacagactgcccaattcatgagtcattcgttgctcagt

SEQ ID NO: 362487 - DNA, 201 bp, Homo sapiens
gtgctcatttttcatatccacacttcacctcaatgaatgagccttcctggaaacactgaaaatgaaacaagacaacatttttctagcagggtcattgctcsaaccccttaactcctgatcaccttctcctgggtattcttctgctgagtttaaactttgtaactcccctgatttttttacagccccctctttttgcatcca

SEQ ID NO: 362488 - DNA, 201 bp, Homo sapiens
acctgaagcagccgcggggagccgccgtgctgcggcgtctgtgcaagcggtcggatgtgctgctggagcccttccgccgcggtgagcccgggccccgcggrctgctctcgggaagttcccgcggaggggaggggcctggccgttcgatcgaggctgcacccgccacacctttgccctgttgccgcaagaacccttgtcggc

SEQ ID NO: 362489 - DNA, 201 bp, Homo sapiens
tactacatttgttgagtcaattctcagacaaacccctgctaggaattaagaggcttactgggcactacggatggttgctctgtggtttgaaaatgttgacrtagttagattctgacagctacttctcccccggaccccgaaatctccacccaccatattgagaatcattgcctgagtcattgtttcagacttctatgagca

SEQ ID NO: 362490 - DNA, 201 bp, Homo sapiens
ttgcttgtgaagagcctcaaggtcagccagaggtgagagacgagggcctttacagatctctcccaggcattcatactgccctgcgtgtgtgcgtgtgcgtkgccttctcaggagttgcaaaaaaaattctcaggaatatgttggagcttttcaaagtcccctatggatatcccattccccagtttattcttttgagttttt

SEQ ID NO: 362491 - DNA, 201 bp, Homo sapiens
ttaacacaaactgctctaactcactttctggaaataccagagaagttgtgtaattaggtagaatcttcgtatactctaagataagaatttttacgcaaatwttttttaacttgaatgggaggaattattcatgctttgacacttgagttatctggatttgtcttgtattctgttttctcaaaggtggaaggaacagcatat

SEQ ID NO: 362492 - DNA, 201 bp, Homo sapiens
ttaacttcttgcttgtgaagagcctcaaggtcagccagaggtgagagacgagggcctttacagatctctcccaggcattcatactgccctgcgtgtgtgcrtgtgcgttgccttctcaggagttgcaaaaaaaattctcaggaatatgttggagcttttcaaagtcccctatggatatcccattccccagtttattctttt

SEQ ID NO: 362493 - DNA, 201 bp, Homo sapiens
aggcgtgagccactacacccagcaattattttctgttttacaatttataatttatatatataattatataaatttataatttatagctttttatacaacartatagcaaagacattctttcttgtctgtacaaaagatcttcaccctcacccatttgatatagcagccatatcatatttttgatctgcctgtactaaaatt

SEQ ID NO: 362494 - DNA, 201 bp, Homo sapiens
taagtcagtcaccaaagggctaatactgtatgattctactacatgaaatgtctaaagtggtcaagttcatagagacagaaagtagaatggtgcttgccagrggctgtggggaggtaggagcgggagttagtgtttactgggttcagagtttctgtttgaaaagttgaaaaagttcaggagttgtgtggtacagatggatgg

SEQ ID NO: 362495 - DNA, 201 bp, Homo sapiens
acccgccaaactcaagaccggtaccttccacagggcttctgtgatccacacagttccctgagggagacgtgctactatcattggcattgaagacttgaaggcttggcgaggttaactgccttcctctaaagcagatgacgggaaagggtccgaagcactgccccaggcagttggaccctaaagccactgctttcaacaact

SEQ ID NO: 362496 - DNA, 201 bp, Homo sapiens
gaggctgcacccgccacacctttgccctgttgccgcaagaacccttgtcggccccagccttccagatttttgcctcctagggtattgttagtgatcattcktcccaaactggattgtccaaaacttgggttctgagatactgctgttgcctggtttctccttttgcctctctgactccttcccaaattcctcctttttttt

SEQ ID NO: 362497 - DNA, 201 bp, Homo sapiens
agtgttctcattgctttaatgccggtttttgaaggctgtcattctgccactctggagttaactcccttccttggtgtatcctgttattttaaaacatatayagtagtcctctcttatctgtgggggatgcattgcaagacccccagtgggtgcctgaaactgcagatagtactgaacctgattgctgtcaattggaagatg

SEQ ID NO: 362498 - DNA, 201 bp, Homo sapiens
ttctgacagctacttctcccccggaccccgaaatctccacccaccatattgagaatcattgcctgagtcattgtttcagacttctatgagcactaaaaaaagcccatggttttcaggtcctaatatcactttattagagtttttgcctgtgacgacatgtgagataggcctgattccagaattctaagaaccatgtgttgt

SEQ ID NO: 362499 - DNA, 201 bp, Homo sapiens
gccccagccttccagatttttgcctcctagggtattgttagtgatcattcttcccaaactggattgtccaaaacttgggttctgagatactgctgttgccyggtttctccttttgcctctctgactccttcccaaattcctccttttttttctaagaaacgttccgtatttgcctttcttaattaattgagggtcttgaac

SEQ ID NO: 362500 - DNA, 201 bp, Homo sapiens
tttctagcagggtcattgctccaaccccttaactcctgatcaccttctcctgggtattcttctgctgagtttaaactttgtaactcccctgatttttttayagccccctctttttgcatccatagccttttatgatatccttaaccctcatctcccttcatagtttacctaggatccttagctgacagatgacttgtgcta

SEQ ID NO: 362501 - DNA, 201 bp, Homo sapiens; identical to SEQ ID NO: 78355

SEQ ID NO: 362502 - DNA, 201 bp, Homo sapiens
agaaaagggatttactaaagggatgagaccctgctctggggattgaataaataggcttggataaacctagagggaaacagagatgtactgggagaaattayatcctgggaagaagccacacattccagaaatggtggcttcactctttgagtccttaactgctgtaaacatgccattagcctacagcaaatgttattaata

SEQ ID NO: 362503 - DNA, 201 bp, Homo sapiens; identical to SEQ ID NO: 78409

SEQ ID NO: 362504 - DNA, 201 bp, Homo sapiens
ggagtgaatgtgaaggcaagatacaaaaataagaattttttgtaataagcttttaagaagtggtggggcctcaactaggtctaaggtggtgtgtgtacagyggaggagaagatataagaaatactcagaaggccaaataatcaggatttgggaatgggaatgggaatgggagaatggaagggtggacgattactctctgcc

SEQ ID NO: 362505 - DNA, 201 bp, Homo sapiens
ttcatgaccaaagtgactggccagacagtctagacaggccaggttctaccttactgccttgaaactgaggaatcaatatctctgcacacatagagctcatktgtggagcaccaggatgctatagcacatttgtttgtaatctctgaactaggtgactacaaaggggaccttccccattaaaatcctacaattaaatggcaa

SEQ ID NO: 362506 - DNA, 201 bp, Homo sapiens
tctgaagtgttctcactgggtttggtttggttttgttttctccttggaaggtccagaaatgtccttggtgtgtttgacagactttcaggcccatgcgcgaragcagctgtctaagtcaactcgggattttattgaaggtggagcagatgacagcatcacgcgggatgacaacattgcagcatttaaaaggtgtggtcttct

SEQ ID NO: 362507 - DNA, 201 bp, Homo sapiens
agaggttcaaggagctaaaatgagctaaaatttctagaacaatagctggcaattggtcaatttgctattttattcttttctcctctgtctcttcttcttgrgcagtaggaataaaaaaggaaaaaagaaaaaacattgaaatggagacaaaataaaatgggaatacaagaagacaaaataaagtgggaatacaagaaaacc

SEQ ID NO: 362508 - DNA, 201 bp, Homo sapiens
tacgtttgtgtaacctaagattgagaaaacattcattttccataataaagaatagttagagtgcaagggggtttacagatgaataagaaggtgctaaaatytaaccaagtcatccctcagaacaggggtgctggcccttctggctcacaccatctgtagggaaagggatgcttaacgcagccccaaggctagggccctctt

SEQ ID NO: 362509 - DNA, 201 bp, Homo sapiens
agactcaatgccacacagcaaagaaggggtagaactagcattcttctaatttcatatgctatgctttttccaccatgaagttcaggattctccactggaaytacattccctcatcctctgccctctctaattctcttctgcttcattaaggagttcataagaggcccagttgcctgtctgaaggctataacacaaccaaca

SEQ ID NO: 362510 - DNA, 201 bp, Homo sapiens
agcttccccttcatttccttttctgcatctgaagtgttctcactgggtttggtttggttttgttttctccttggaaggtccagaaatgtccttggtgtgtytgacagactttcaggcccatgcgcgagagcagctgtctaagtcaactcgggattttattgaaggtggagcagatgacagcatcacgcgggatgacaacat

SEQ ID NO: 362511 - DNA, 201 bp, Homo sapiens
tcctcctggatcaacataggttactcagctctcagccaactgaacccaccaaggttccacaggaccctgtctggtttagacttgtatcaggaatcaggggrgtccaccccagacaacgcctccctgctgcagaatcatctcaccaacagaagatctctttgttgtccggcacagaattcgcctccgtccgcggtacctgag

SEQ ID NO: 362512 - DNA, 201 bp, Homo sapiens
agctgtactttggccccttttagccatggctggaacacagggcaaccagtcctgagactgcacaaagcagcaaggccctggtgccctgcatcttaggcctmcagtcctatgatgggagggtctgcagagaagatgtctgatatgccctggaatcattttccccattgtcttggcaattaacatttggctcctcgttacata

SEQ ID NO: 362513 - DNA, 201 bp, Homo sapiens
actgtcctagcagaggttctccattagggctctgcccctttaagcagatttctgcctggacatccaagtgtttctatacatcctctgaaatctaggcagarcttcccaaatctcagttcttatcttctgcacatccacatgcccaacaccatgtggaagctgccaagctttgaggcttgcaccctctgaagctacaatctg

SEQ ID NO: 362514 - DNA, 201 bp, Homo sapiens
tcttctgaagcccattgcaaatgttcaatagctttcatcccctatctttgtctctgtgctttcctttattcccaaggtaattctcacttcacagataatcmccatctttcccattatagctctgactacatctagaatttatactagtggatggtcagaatgttcctttatgtctctttgtgtctctgtctgtctgcctcg

SEQ ID NO: 362515 - DNA, 201 bp, Homo sapiens
gagccaggccactggaatcgtgacacattactagatatgtaatattgaacaaagtattttaacctcttgaacttcaggtttctcacccgtgaaatggggakgataatatttgtgttgaacatttccacaaggattaaaacagtcatgcatgtaaagcaatttacacagtgcatggtacatcatggagtacttgaaaaatgg

SEQ ID NO: 362516 - DNA, 201 bp, Homo sapiens; identical to SEQ ID NO: 78410

SEQ ID NO: 362517 - DNA, 201 bp, Homo sapiens
ggtagctgtccaaaagataggacaggcaggcaactttcaagacaaagattaagcactattctctgcacagtggaaaccagagctgtcctcaagatcattgwcagctctggggagtgtcacctctggctctgaattcttgcttctgttgaattcgttcaatttacggactattgacatatcccatgcctgctgtttctgtcc

SEQ ID NO: 362518 - DNA, 201 bp, Homo sapiens
tagggtttttacatgtttaccctgacattttgacatggccatgttcagagatgacctgggctcaggttcacagaataatacccaatgcaaacagaattacrttattcattctgtatgtaaaccattttataagagtgagcacaaagatcaagtcagacttgctccccttcatcaccccttacccatgatgaggtgagttgc

SEQ ID NO: 362519 - DNA, 201 bp, Homo sapiens
accagatagtagcatcagttcaccaagaaatgaagctggtgaggcagtgaaaatccagggcctagaaagctgggaatgccatgacgtgggcacattgaaaracaagaggcaggcatgatcagccttgaactttaggaagatcccaggaagctgatggaagacaagatgtggagtgaatgtgaaggcaagatacaaaaataa

SEQ ID NO: 362520 - DNA, 201 bp, Homo sapiens
ctggaattgaagaggcaacataagagacaaagttccttaggaaaatcaggccaagatgataagatgtttttattttgtctgtcaaaggctcaaactttagwtttaccgtgttgtactttagtcctatctcattttctcagatacgccatgaggaagtcagggacaagttggtcaagtggtgcatgagaaataatgttcaac

SEQ ID NO: 362521 - DNA, 201 bp, Homo sapiens; identical to SEQ ID NO: 78405

SEQ ID NO: 362522 - DNA, 201 bp, Homo sapiens
ccaaggagtctcaaagataataagagattgagtcaggggagaagagttggtctgaaaaagtaggagatggagcatcggtcaaccaacagcagtccacaggyagaggctgacccgccacttatttttgtatggtccatgagctaacgatggtttttcatttttgaatggctgagggtggggagtcaaaagaagaataatttg

SEQ ID NO: 362523 - DNA, 201 bp, Homo sapiens
tgggacaagggtgattttggtgtaggctaactcctgcactgctgcaatggactttgggaatatctcttactttgagtcacactgccaaggccagagacaakacagaacagaggagcaaaagaaagcctaaaatattcattctcatgacctaggatgttacaggattttatgacccattggctaatgttattctgtgcaatg

SEQ ID NO: 362524 - DNA, 201 bp, Homo sapiens
gacttcttttcccctgggtagatacctggtagtgggattgctggatcaaatggtagttctacttttagttctataaggaatctccacactgttttccatartagttgtactagctcacattcccaccagcagtgtagaagtgttccctgttcactgcatccacatgaacatctattattttttgattatggccattcttgt

SEQ ID NO: 362525 - DNA, 201 bp, Homo sapiens
gtggaggagaagatataagaaatactcagaaggccaaataatcaggatttgggaatgggaatgggaatgggagaatggaagggtggacgattactctctgmcttctggcttagggatcactggctttagcaataactctgttaagataagaatacagggagaccaatgttgaatccaaacaatttcatactgcagcttccc

SEQ ID NO: 362526 - DNA, 201 bp, Homo sapiens
ttaaatggcaagaagtgcctcagagagagacagccatgataaagtgggaatccctggctatagtagagatactaaagccagccttttcaaccagtgggcarctgtgacaccaagccaagtaactcaacagttctcattaatcacagattggccttgaggtgctccaaaatccttattcaaattccagaagcacattgagat

SEQ ID NO: 362527 - DNA, 201 bp, Homo sapiens
aaatgtgtctcatctttggaatgcatcaagtagccttgtgagagctcaggactaagttccctttttatttcctatagggaaatgcaataccttatttccaratgactcctatcagcacttctctctgctggaatgatctctcctggtttcagagcataactcgattgcccatcatcctgaaagggattttgacaaaagagg

SEQ ID NO: 362528 - DNA, 201 bp, Homo sapiens
aacataagaccaaatgttctcacccttggagctgcccaacttgtcaccagaagtgttctggccagagctggatgctgagaaataggaaagccacggaaaakatttttgcacgaactggagagtaaactaaaaaagttcatgtaacattttctactttatgacacactcagaaaatgctaattttggatggcatacatagac

SEQ ID NO: 362529 - DNA, 201 bp, Homo sapiens
ctgggctcaggttcacagaataatacccaatgcaaacagaattacattattcattctgtatgtaaaccattttataagagtgagcacaaagatcaagtcaracttgctccccttcatcaccccttacccatgatgaggtgagttgcttgtgtttgacaaaaatgagcttgtaaccacattgttcttttaggctgccggtcg

SEQ ID NO: 362530 - DNA, 201 bp, Homo sapiens
ttcctaaagaactaggccagaggttctggaaggacaccatcctatagcaccaagcaagtgtaccttaaagtgagtcatcagaggctgacttttctcccccrttgtatctccacagcctaccctgcaattttcacgctgagatttcccacagactgtgtagggggtttccatacaaatataagctgtgataaccctgagttc

SEQ ID NO: 362531 - DNA, 201 bp, Homo sapiens
aactttggatacacctgtatgtggcaacaggcgacatgacattcgaaaccagttgaggaggaacttaacactaacagatcttcaatcacctaaaaaggtargaaagataccaaattcgatggacaggcattacaagaggcaaatttccttccctcttttctcctttcctccattctttctttccacaggcatttatcgaac

SEQ ID NO: 362532 - DNA, 201 bp, Homo sapiens
ggacctcagctcagcttttaatttcaggtggcttcaaatctatcatggattaagctgaaatacacaaaaatgtatattttctcaaatgaggaaactgagamttggagcgaagacatgtagcctgccactgttcaaataagtgttagtagctatctctcttgaagcagcctgcctctcaggctgccacacacaccactccac

SEQ ID NO: 362533 - DNA, 201 bp, Homo sapiens
gaggaggaaacaaagctggagggtcacataccagctcttcaatccttggcctagaattcacacctgctattcccactcccaggccattggccagaagaackagtcacagagccatgcctgtatttaagcaacagcgaaatgttaagcatgtggggagcagtatatgcctccgccaccctggctgagagtgtgtgtcaataa

SEQ ID NO: 362534 - DNA, 201 bp, Homo sapiens
ggatttgggaatgggaatgggaatgggagaatggaagggtggacgattactctctgccttctggcttagggatcactggctttagcaataactctgttaasataagaatacagggagaccaatgttgaatccaaacaatttcatactgcagcttccccttcatttccttttctgcatctgaagtgttctcactgggtttgg

SEQ ID NO: 362535 - DNA, 201 bp, Homo sapiens
attgaaatgaataaagtaggaaatgggaaatctgccagtcagcagcagccatatgaacgtcatcaccatcaacttcattagcactggtatctatgcagtayaccactttgcaatgtaaagaatgctgccatagctagtatcttattcagtctcccaacaatcctaaagacatgtattattattttccctattttacagata

SEQ ID NO: 362536 - DNA, 201 bp, Homo sapiens
caccagcagtgtagaagtgttccctgttcactgcatccacatgaacatctattattttttgattatggccattcttgtagcagtaaggaagtattgcattstaattttgatttgcatttccctaatcattagtgatgttgagcactttttcatatgtttgttggctatttgtatattttattttgagaattatctattcgt

SEQ ID NO: 362537 - DNA, 201 bp, Homo sapiens
gttcagagaaggttgggaaatggggaatgaggtgttggaagcggctttctggagataagtctcctcctggatcaacataggttactcagctctcagccaaytgaacccaccaaggttccacaggaccctgtctggtttagacttgtatcaggaatcaggggggtccaccccagacaacgcctccctgctgcagaatcatct

SEQ ID NO: 362538 - DNA, 201 bp, Homo sapiens
tctgtctgcctcgggagcagggtgaacatggtgttaaggaagttttgaacattttaacaaatgagttccacacttccatggcccttacaggtaagttaacrtgttttccctgatttggaacttaaagcaggatggctaaagaataggagcagcagtccttccctctagcagaccctttcctgatgtggtagctgtccaaaa

SEQ ID NO: 362539 - DNA, 201 bp, Homo sapiens
ctccactgactggatgaagcaaaagtttattccgtattccaacttcaagtggagctccttttactggcatggctaagcagggtcagaaggagtagaggtgraggtggaatgataaaatctagtgtagatgagttgagtctctagaaatcttgggtctgtgctgagaagctaattctcatgtaaggagaagctaattctaag

SEQ ID NO: 362540 - DNA, 201 bp, Homo sapiens
aaataataccatgctgggactataaaaaatgcctcttattagaatgtgaattctctctagttattacatgtaagttcaaaacatattcaattccccgcccycacctataagttaaagtagaaaattatttcctcactattttcttatactgttcagtctcagccaaagtatcccattcaggtagaatgctaatggattcct

SEQ ID NO: 362541 - DNA, 201 bp, Homo sapiens
gccaggccactggaatcgtgacacattactagatatgtaatattgaacaaagtattttaacctcttgaacttcaggtttctcacccgtgaaatggggatgwtaatatttgtgttgaacatttccacaaggattaaaacagtcatgcatgtaaagcaatttacacagtgcatggtacatcatggagtacttgaaaaatggtt

SEQ ID NO: 362542 - DNA, 201 bp, Homo sapiens
aagcctgccagcttctctacttccttcctccttccctcagtcaggagagtttgaacttcagattgttagcaacaggtactcctgaatgtccttgccctcakatttcctcctctttgtcactggtctgctaattttacctcactgttttatcagacaaaaagcctaaagaggttcaaggagctaaaatgagctaaaatttct

SEQ ID NO: 362543 - DNA, 201 bp, Homo sapiens
tcattttccaagcttagacattttcaaaatgattcctaaaggatagttacacctaagctgcatctccatgcttcttctgaagcccattgcaaatgttcaayagctttcatcccctatctttgtctctgtgctttcctttattcccaaggtaattctcacttcacagataatccccatctttcccattatagctctgactac

SEQ ID NO: 362544 - DNA, 201 bp, Homo sapiens
tttctactgccctgtttctactggagagatttattcattacccccaagccctgtcctctttcctctttcagggtgttgtatcaaaagtaccaagctctgcrtttatagggctcaaattgaagatgggaataaatggagccaacatacattgtttctcaggtacccaaattagcaaaaataggaaaaaggtagatggtgacc

SEQ ID NO: 362545 - DNA, 201 bp, Homo sapiens
ctttgttcttcttgacataagggactacatagcacaattatttttggtttgcaaatgaaaaaggaaatgagatgggagagattaggaaaagagaagaaggygtgagaaagatttccctgagaaaggcactcaatagtttggagaaatcgagaaaggaggaagaggcacatctgtgtagtaaaacggatttcaattacctgg

SEQ ID NO: 362546 - DNA, 201 bp, Homo sapiens
atataaacatttggatcaatgtctcccagtatgccctaaactatgttcaacgctctatggacagcacacagtttacaatatggctgggttccaaaactctrcttggagggcatttgtttgaaactcagaacagattttcccacaaaagaatgctattaaaatagcggttggattcccaggtgactgaaaatacccacttga

SEQ ID NO: 362547 - DNA, 201 bp, Homo sapiens
gcctctgtgtcccctttgtccattagaggaactaacccattcctggttgaagccctagttactgcggcctatcttcttcctttagataatgacttaaaagmcattcagtttccacccaaaacctttggttaattttcacatggctgccaactgcctgggagttggctggagcttagaaacttcaggtttctctgtttttcc

SEQ ID NO: 362548 - DNA, 201 bp, Homo sapiens
tctttattggtatctggctaactagtagtttttcaattagttcaccagtagtttttggaattgtttatggctttaactaaaaagatcctctgacattgcaytgggcaaatattttctgaacttcagtgtccttacttggaaaaggagatgattcctaaatggtgacaaaaattgttttggttggggctgagaaaattttta

SEQ ID NO: 362549 - DNA, 201 bp, Homo sapiens
gacaaaaacttataatccaaagataattatcattttggttatcagccacctctcattccccaacatcaaatacaattatctaagagcaccattcatttatraaattacttaataattaaacatgtattgagtgcacactacattatatgccttctggaatacaggtgatgagtaagacatagtcactccagttctgttaaa

SEQ ID NO: 362550 - DNA, 201 bp, Homo sapiens
gttgcttcaggcagaactattccttgggaataataatttttccattttgaggctctcaataaaacatgaattcatcacagatcctagctttatatacaccrtgtctcctttgcaagagtgatccttctccaggattttgccattgcaattaattccatggcccaagtaaagggggaaaataaactaataaggacaaaatta

SEQ ID NO: 362551 - DNA, 201 bp, Homo sapiens
ctgtagaacaagtatataaacagagatacaagagctcagagacaataagatgtgatatcagtaacaaagtataagaaaaaatagttatcaacaaaatgaargccaaaatggaagcaatacaaagaaaaacagtgttcaaaatataaggagcttagaagacaaaattgagaaaagctagtaaatgtgtggaaataaaaggag

SEQ ID NO: 362552 - DNA, 201 bp, Homo sapiens
ggtagtctgtaaccaggcccataatatctctgagatatgcctgtttttaaagaagtaatgtctagaaatttttcagatttgttaaacagctgtaaattcayagattccaacatttgatggaacccagcaggataaatataaagaaacatgacgtctgaaaatctgtgactagaaaaagaaaagttaaacagccagagaaga

SEQ ID NO: 362553 - DNA, 201 bp, Homo sapiens
ttccaacatttgatggaacccagcaggataaatataaagaaacatgacgtctgaaaatctgtgactagaaaaagaaaagttaaacagccagagaagaaagrcatttacattggggaaccaaaatagaaatacttccttcttatcataagcaatacaatccagaaaacaatcgaatccatcttgaaagtgttgaaagaaaaa

SEQ ID NO: 362554 - DNA, 201 bp, Homo sapiens
tgttcttacatctattttaatgttctctaaacacaaataaaatataacatattgaattgacagaatacaagtgaatataagatgagaaatatatatatatmtatatatatatatagatatatatatatttttttttttttttttgagacagagtttcgctcttgttgcccaaactagaatgcaatggcgcaatcttggctc

SEQ ID NO: 362555 - DNA, 201 bp, Homo sapiens
tttcttcctatattttgggggttctgttgtttaatgtatatatttatagtttttatatcttctaaattgacttccataagtattttagaatcaggttatgragataccatccttatgctttcaagttttgctttagtgcttcctgttggtggtacctagtagggaaccagctgacaaaagaaagatgtaatttgcagagtc

SEQ ID NO: 362556 - DNA, 201 bp, Homo sapiens
tctattttaatgttctctaaacacaaataaaatataacatattgaattgacagaatacaagtgaatataagatgagaaatatatatatatctatatatatrtatagatatatatatatttttttttttttttttgagacagagtttcgctcttgttgcccaaactagaatgcaatggcgcaatcttggctcactgccacct

SEQ ID NO: 362557 - DNA, 201 bp, Homo sapiens
gctttatctacagtttgatgtttccattttctttcggttcagggcactttcaaatttcactttttaaaaaacgcctttattgaggtattattcacataccrtaccatccacccatttaaagtatacaattcagtggtttattcagagtttggtatgtttagtatattcacaattatctgcaatgatcaccagtcatctagt

SEQ ID NO: 362558 - DNA, 201 bp, Homo sapiens
ttaatgttctctaaacacaaataaaatataacatattgaattgacagaatacaagtgaatataagatgagaaatatatatatatctatatatatatatagwtatatatatatttttttttttttttttgagacagagtttcgctcttgttgcccaaactagaatgcaatggcgcaatcttggctcactgccacctctgcat

SEQ ID NO: 362559 - DNA, 201 bp, Homo sapiens
gaccaccagtaaagagtgctattctagaatcatgacccagaattctagaaatgaaggctttcatgaggaagggtaatagttaacagtgttaaatatcctgwtaagttcacagtactgtgtaaggtacataaaaaatggcttgttggtttcaggaattagggagctgtggtgacagcagtagagaagtttcagtaacattaa

SEQ ID NO: 362560 - DNA, 201 bp, Homo sapiens
tcagttgctgactatcctatagtcatttcccaaaatcattcttggcctatattgtgcacaagtaactatttatataactgcttcaactatttttttttttktgtgtgtgtgtgttttcctggattctctgaaatttcttttgaatattattaaaatataggatgtttgagaaggctatttaatatctaactttgtcataaa

SEQ ID NO: 362561 - DNA, 201 bp, Homo sapiens
taacaccattttaattaacctcttggttatttccaggtttaaggagatctttttattaccttgaaggtgtggcatttcttttaggaaggtcttaaattccytcaggcacttgccactaaaggagtgtagaatgctgttgtttcattattttctgtatcagttgctgactatcctatagtcatttcccaaaatcattcttgg

SEQ ID NO: 362562 - DNA, 201 bp, Homo sapiens
taaacacaaataaaatataacatattgaattgacagaatacaagtgaatataagatgagaaatatatatatatctatatatatatatagatatatatatatttttttttttttttttgagacagagtttcgctcttgttgcccaaactagaatgcaatggcgcaatcttggctcactgccacctctgcattctgggtttaa

SEQ ID NO: 362563 - DNA, 201 bp, Homo sapiens
caccatgcctggctaatttttttgtattttcagtagagacggggtttcaccgtattagccaggatggtctcaatctcctgacctcgtgatccgcccgcctyggcctcccaaagtgctgggattacaggggtgagccactgcgcctggccttcattttctctttttatgttgctggctaggacttctagtacaatcaaattg

SEQ ID NO: 362564 - DNA, 201 bp, Homo sapiens
ctcaccataacaccttgtcattaattttaatatggattttaatatttaatatgcatttgtattgcctaccctgtagtcagagccgctgtttataacccccyttttttttttttttttttttggagacgtagtttcgcttttgttggcccaggctggagtgcaatgtcacgatctcagcttagtgaaacctccgcctcccag

SEQ ID NO: 362565 - DNA, 201 bp, Homo sapiens
ttactcagtctgtgttcagaagaaatttaacctttttagaagataatgtcattcaaagcctctacaatttttcattttatgtagtttgccttcagataaamaattactagacagattaaaaaaataaaacgcaagagcatattctagagattatatctgcacaaatgaaatgtttatgagattattcactgaaaaatgttc

SEQ ID NO: 362566 - DNA, 201 bp, Homo sapiens
caagattcctttagcttccatgtgctttggtttttattcatgataggacaaacaatgggagcagattatgagacagaggaataagaagttaagcatgtatrgtattaactaattgcagttatcaaagaagtagtgaacttgataaggttatagtagtacttctgcttcatggaagaagattgaactataacgtcaccactg

SEQ ID NO: 362567 - DNA, 201 bp, Homo sapiens
tcaccataacaccttgtcattaattttaatatggattttaatatttaatatgcatttgtattgcctaccctgtagtcagagccgctgtttataaccccctttttttttttttttttttttggagacgtagtttcgcttttgttggcccaggctggagtgcaatgtcacgatctcagcttagtgaaacctccgcctcccagg

SEQ ID NO: 362568 - DNA, 201 bp, Homo sapiens
tttcatgtgcctctagggtggggcattccacttgagaatcattaatattatggaattccgtacaactgtaaaaaaaaaaaaaaaactgagaaagttgtttrtgaactgatatggaaagaccaccaacttgctatgttttgtttaagaaaggaggacaatgagcatatatatttggattgcctacatttgcataaaacattc

SEQ ID NO: 362569 - DNA, 201 bp, Homo sapiens
tgaagcaggagactctgttgaatctgggaggcagaggttgcagtgagccgagatcgtgccactgcactacagcctgggtgacagagggagactctatttcaaaaaaaaaaaaaagaactgaaagaaggtgtgtggctgtagaacagagagctagaggagtatgtatgagatgaagcttgagagatagatagaagctacatt

SEQ ID NO: 362570 - DNA, 201 bp, Homo sapiens
aaataagagtttaatatgtttttttaaatagatgatcaatatggatgttaaaaatcagtagcatttctctacaccagctacaaaaggcaagaaaatgtcattttgcaaaaagatatcttatgtaatagaacaaaagtatatatgtttcctacaaataaatctaacaaaagataaagttcaaatttttactcagccatggaa

SEQ ID NO: 362571 - DNA, 201 bp, Homo sapiens
atagaattccttaggataagggaagccatgaagtgttttaagtgagagtgaggcatagtctgaataatttcagaaagcacattgggtctatagtatggatrgagaatagcttgtgggtgggttggagagtggttggagagtgaatgtgtgaagactattggaagcgtattacagtagtttaggtgaggcatgatggtagcc

SEQ ID NO: 362572 - DNA, 201 bp, Homo sapiens
tgtttaaactttaagggtaactccaaagtaggcgtgcacacacacacacacactctctctctctctctctctctctctcatcaaagtatagtatatataartatatataaactttaaggataaccctaagtaggcagtttgaaattagtcaatttcagacaaggagtcatggctcgtgtctgtaatcccagcactttggga

SEQ ID NO: 362573 - DNA, 201 bp, Homo sapiens
aacatttaattgaactgaaatttaacaattcagctttggctaactgtattataattagagtaatgataatgtctgtgacatgcacatagcaatcacagaaraataattactggtaattaccttcaggaaaagtgcttggcaacagatgtaaaagaatatagcaagaaacctagatttaaaggcaaattactagtttttttt

SEQ ID NO: 362574 - DNA, 201 bp, Homo sapiens
aggaggagacacctagccaagtgcttgatatctgtaaaggaaaccatgaggctgatttggggattgtgtgtctgtatgtgtgataagggaacagtactctrgaagcagttgccactgccagggtgaaccctggctggtgagacactatcagaaactagaagtaagcaggagggaataagactcttcttcctccagtcttgt

SEQ ID NO: 362575 - DNA, 201 bp, Homo sapiens
aaacatttaattgaactgaaatttaacaattcagctttggctaactgtattataattagagtaatgataatgtctgtgacatgcacatagcaatcacagargaataattactggtaattaccttcaggaaaagtgcttggcaacagatgtaaaagaatatagcaagaaacctagatttaaaggcaaattactagttttttt

SEQ ID NO: 362576 - DNA, 201 bp, Homo sapiens
tgtattgggaatgtaaaatggtacactgtggaaagcagtttgttggtttcttataaacttactgtatagcctagcaattccactcctaaatatttccttgktgctcacaaatgagatcaggtgtagttgtatgtttcttagtaaattcgatttttttccgccaatgatataaagaatttacaaattgaattttaagatctt

SEQ ID NO: 362577 - DNA, 201 bp, Homo sapiens
attattattgtgtttgttttgggcagcatgaacagcacccatagaaaatgacaaacttaataaattatgttgtgtgtgttctgactgctctaccaactagmcatttccctgtctctctcctttggtctccctattctttgaaagacaacaatattaatataaggccagttaataaccctataatgtacacctagtatgcat

SEQ ID NO: 362578 - DNA, 201 bp, Homo sapiens
tgacattttcggatgaaagggtttgcatcccacacacttttgtgggaagttatttcagaatgtgattcagtaaaacaggtgtagacaaagacttaggactraagaagcaataggcataactctggaaagcaagaaaagagaagtggcaagatgacagctgtggagtatccctagaaaatgaccagattgggaggaaggtct

SEQ ID NO: 362579 - DNA, 201 bp, Homo sapiens
acaagaaagtcatagttaaaacataaggacaactaaaatgtagcatgattttacgcagttgatgtctaagaaaagactgggcagctgataaaatggtagcrtcactgaatgagtcaagacattttaacataaccgcaaaatagaggttgtaatattgatgggaatattttgtcatagttgttttgatatatacatatttca

SEQ ID NO: 362580 - DNA, 201 bp, Homo sapiens
gactaaggacatcccaaatgaggtcagtagtgctggtaaattgcccagacaggaatgtatgagatatattttaaggcaagatgtataccagtttatgtaamgcgaacgtttcacagtggcaaagtgggagagaagattggagccattatgtagacagccttacacaccaaatcaaaggttcttagttgttcaggaaataag

SEQ ID NO: 362581 - DNA, 201 bp, Homo sapiens
agatgcagcatttattgatgctgcttttccttggccccttggctccagaattgggagcacagctactagtgaaattctctgtgtaggagggtgctgccacrgttgagaagacagccaaactattgccacagtggtttgggaatagaatacacacacacttctattgttagcagtggcttactaatgcttccgtaaattaag

SEQ ID NO: 362582 - DNA, 201 bp, Homo sapiens
atggagaaacctttatgttttatatttaaaggttgacattcttaagtaggctcactgttacgttttatttccttcttttctcacagggaagaggaagaacrtctgagaaataaaattcgagctgatcatgagaaggccttggaagaagcaaaagaaaaattaagaaagtcaagagaggaaattcgagcagaaattcagaca

SEQ ID NO: 362583 - DNA, 201 bp, Homo sapiens
aacacaaacgctttgatttgggtttagaagatgtgttaattccacatgtagatgccggtaaaggggctaaaaaccccggagtcttcctgatccatggaccsgatgaacatagacacaggtttgtttatttcagaagttctggtactaacatttggcagagcaaggtacggtgattggatcgaatctgtcttttttttttct

SEQ ID NO: 362584 - DNA, 201 bp, Homo sapiens
tgattcctcttggaacccagttaataggaggtctgactgaatttcctggaactctggagtttctcttaggaccagtctggttagtcttttcttgccctctrgttgatattggttcttctgaaatagtttactcactaaactcttaagcaaatagtgcttgttgaggaacaaataaaaataaatctatagattatttagatt

SEQ ID NO: 362585 - DNA, 201 bp, Homo sapiens
caatataacaactatttacatagatttaaagtatgtgggagcatatgcattggttatatgaatatactataccattttatatcaaggatttgagcattcarggatttttgtatctgcgagaggtcctggaaccaatcccccatagatactgagggacaactgtattcagtgctaaatagaaaataaatgttttagaaattc

SEQ ID NO: 362586 - DNA, 201 bp, Homo sapiens
tgattttctgctgggccccttgactctgatttagttgggtatgacaagaatgacccaattcgtataatttgctttcacaaagtcaagataatgacaaataygaaactcaagactacagatacatctgggatatggggaatagtatgtgaatgggcagtgaacagaccatcaaaggtgttcgtagtgttgtatttcttaaat

SEQ ID NO: 362587 - DNA, 201 bp, Homo sapiens
gatcttcaaggaatcagcacactgtcttccacaatggttgaaataatttacactcccaccaccagtataaaagcatccctttttctctgtaacctcaccarcattttttattttttgactttttaataatcattctgactggtgtgagatggtttttcatggtggttttgatttgcatttctctaatgatcagtgatgttg

SEQ ID NO: 362588 - DNA, 201 bp, Homo sapiens
aagtcaagataatgacaaatatgaaactcaagactacagatacatctgggatatggggaatagtatgtgaatgggcagtgaacagaccatcaaaggtgttygtagtgttgtatttcttaaattgagatgtgagtagagtcgagatatatatgtatattcctttctgtgtatgaagtacttcatcaacagagaagaattttc

SEQ ID NO: 362589 - DNA, 201 bp, Homo sapiens
ttagttcaagtaatcaaatatctatttggatatattctagtaatggatatggaaggtatagcagatactttaagcttagccttatgaattattataaaacsttgaccttgatggagtagaaatagagctgtgctctgattttacctcacctctagagtctgttttatatgtagactacttaaggcacttccttcggacagt

SEQ ID NO: 362590 - DNA, 201 bp, Homo sapiens
gcaataaataaataagatagatatgtgagagagcatgtatgtatacacatatacagtcatgtaccacataactgtgtttcagtcaacaatggatatgttgrtggttgcatgaaattataatggagctgcaaaattcttatttcctagtgatgttttaatgatcctgaccctgtgtaggcctaggccaatgtttgtgtttgt

SEQ ID NO: 362591 - DNA, 201 bp, Homo sapiens
ttatattaattatgttaaaaattatttttatatcaattatattaataaaaatattaaagacagtacaaattcatcaaaggcaataaaagaaggaaaaaatrtaacttcatgtcatatttgataaccaaaataaacaaaaacgaaaagatttctgatttctggaatgagacataagtctgcttcctaccgtatcctgaaacc

SEQ ID NO: 362592 - DNA, 201 bp, Homo sapiens
cttttgccattaactatgttgtgtcaactgtaggttttttaaagatgctgtttattaggttgaggatgtctccttgtaattgtagtttactgagagttttrtcatgaatgagtgttgaattttgtcagatgcattgtcttcatttttctctagatgactgtatgattttttttcctttattctgttaacatggtaaattac

SEQ ID NO: 362593 - DNA, 201 bp, Homo sapiens
tcaaataacagagctttgaaatgtatgaatcacaaatggaagaattaaaaggagattcctttttaattttttattaaaaaggtaattccacaaagattgtwggatccttcaacattcttctcttcaactgatagaataagcagacagaaaatcaaagatgatgtagaagtcccgaatgacagtatgagctattttaaatga

SEQ ID NO: 362594 - DNA, 201 bp, Homo sapiens
ctctcatccttcctgaacacataggcttcaagtgatcaagtagaagtacactagtactccagatctcaaattgtatccaagaagggagaaacacacacatmcacacacacacacacacacgaggaactcaaggagaaatcaacaaagttcaggtcagaactgaccctggtaaatgtgaacaagataaaacagaaagcatgg

SEQ ID NO: 362595 - DNA, 201 bp, Homo sapiens
ggtgtctgattaatgctggctgcataaagcaagttgggaaatgtttaatgaatagtatgctgttaaatgaatagatttttggtctactattatataattcrtctgatatataattaaatactctgctattgtataactcagaactccttgggttgtaagacactcagctcaaactaagtgatacaaatagtatttattggt

SEQ ID NO: 362596 - DNA, 201 bp, Homo sapiens
atatcacattttgataattgtcacaatattttaaaacttttcattattattacatctgttatagtaatatgtgatcggtgatctttcttattactctaggkcaccatgagcaagcagtcatagatgatggcaaacttaatcactaaatgttgtctctgttctgacggctccacagattggccattctcccttctctctcct

SEQ ID NO: 362597 - DNA, 201 bp, Homo sapiens
aggcttcaagtgatcaagtagaagtacactagtactccagatctcaaattgtatccaagaagggagaaacacacacatacacacacacacacacacacgargaactcaaggagaaatcaacaaagttcaggtcagaactgaccctggtaaatgtgaacaagataaaacagaaagcatggcaattgtgcaaacatactgcta

SEQ ID NO: 362598 - DNA, 201 bp, Homo sapiens
ggctcacacctgtaatcccagcactttgggaggccaaagtgggcggatcatgaggtcaggagatcaagaccattctggctgacacggtgaaaccctgtctstactaaaaataacaaaaaattagccaggtgtggtggtgggcacctctagtcccaggaggctgaggcaggagaatggtgtgaacccgggaggtggagcttg

SEQ ID NO: 362599 - DNA, 201 bp, Homo sapiens
tagtcccaggaggctgaggcaggagaatggtgtgaacccgggaggtggagcttgcagtgagctgagctggtgtcactgcattccagcctgggtgacagagygagactccatctcaaacaaaaaaaataaataaaataaattttaatttgaacacaaccatgtccatttacttagatattatctgggactgcttttatgctg

SEQ ID NO: 362600 - DNA, 201 bp, Homo sapiens
aattgccagccttaaaatgatcaaaagtacaacattgatgacatggaggcaggagagtcacttgaacccaggaggtggaggttgcagtgaaccgagattgygccactgcactccagcctgggtgacagagcgagaccctctctcaaaaaacaaaataaaacaaaaccaaatccaaaaaacagaactctttctcttcaacgt

SEQ ID NO: 362601 - DNA, 201 bp, Homo sapiens
ggattttctagctagggtgagttaattggtggtagaagcagagcctcttgattgacagctctgttatatgtgaggaaaggagagctgtccccaaaaagacttaacatttctcaaaaggaaagaatgccaaacaaatatgtacctcctgaagaaagaagacttttctattatgcccatttttttcctgtcatatagatgaga

SEQ ID NO: 362602 - DNA, 201 bp, Homo sapiens
tacaaaaataaaagataaattggatttgattaaaattgaaaatttttgtgcatcaaagcatactatctatgagaaagaaagacgacccacagaatgagagaaaatatttgcaaatcacatgtcttttaagggtctatacacagaatatataaagaactcctacaactcactaacagaaggcaaactacctacaactcaaca

SEQ ID NO: 362603 - DNA, 201 bp, Homo sapiens
aaggagagctgtccccaaaaagacttaacatttctcaaaaggaaagaatgccaaacaaatatgtacctcctgaagaaagaagacttttctattatgcccatttttttcctgtcatatagatgagattaaacatagttatgtatgttttcatactgatacaaatgctaattgaataatgtactaatatagatctggaagaat

SEQ ID NO: 362604 - DNA, 201 bp, Homo sapiens
acaaaaataaaagataaattggatttgattaaaattgaaaatttttgtgcatcaaagcatactatctatgagaaagaaagacgacccacagaatgagagaaaatatttgcaaatcacatgtcttttaagggtctatacacagaatatataaagaactcctacaactcactaacagaaggcaaactacctacaactcaacaa

SEQ ID NO: 362605 - DNA, 201 bp, Homo sapiens
ttctgcttttcagttttctggatgagattgtttaggattggttttatttttttctttaatgtttggtatatgttgctgaagaaaccacttgcatctggaatttttttttttcttgaaggtttttaaactacaaacttaatttctctaatagtaaggaccattcagtttatctgtttcattttggttgagttttggtaattt

SEQ ID NO: 362606 - DNA, 201 bp, Homo sapiens
agttataaacacagtttaaaaaataaagtcatttgcagtagtatcaaaaaataagaactatatgtgtataaatttgacaaaatatgtacagaacctgcacrtggaaaactttatgttgtttttgagagaaatttaaaaggacttaatggagagaaatgccatgttgatgaatttgaatattcaatattgttgggatgttaa

SEQ ID NO: 362607 - DNA, 201 bp, Homo sapiens
ttgaggatcaacaataccaaatattgacaaggatgctagagcaactctgttatacattgtattgggaatgtaaaatggtacactgtggaaagcagtttgtyggtttcttataaacttactgtatagcctagcaattccactcctaaatatttccttgttgctcacaaatgagatcaggtgtagttgtatgtttcttagtaa

SEQ ID NO: 362608 - DNA, 201 bp, Homo sapiens
agaagatggggactttgggaggtgattaggtcatgagggttgacctctcatgaatggaaaaaatatatatatatattttaaagttgagtaattagcacagmttcgatgaattttcatagttaggcctacactcattcttctggcactttagcatggtcaagtggcactgcttaggtttggcatagttgttaagtcacacgc

SEQ ID NO: 362609 - DNA, 201 bp, Homo sapiens
tcttgagtcagtttttatagtttgttttcaagaatttgtccacttcatgtagattatctaattttttggtgaataattgtttatcatattctttaaaaatwttttttttttttaagcgttgggggtctgtgttgcccaggctggagtgcagtggttattcacaggtgtgatcatggtgcactgcaaccttgtactcctggc

SEQ ID NO: 362610 - DNA, 201 bp, Homo sapiens
tacttcaagactggctgaataaaaccatagactggagggactctacctccagtctatggtagagtccatagactggtaggactggagtcctacctaagtckttcttctcttcggttttatataagaaaaacatttgcgttcagagttgtgtctaatgtggacatctgggaagggaggtatgaaaacttaacctaaagaaat

SEQ ID NO: 362611 - DNA, 201 bp, Homo sapiens
ttatgtttggttttttttacataatattttttaggttaatccatgttgcatttatcaatagttcattcctttctattgatgagtattatgctcttgtttgkatataccacattttatttgtccattcactttttgatggtccgttaatcatgtgtttttgaaaggaatcagaaaaaaagaattgtttaccatttggctaca

SEQ ID NO: 362612 - DNA, 201 bp, Homo sapiens
acttggctatttgcatctttactctgatccctctttagtttttaattatatcattttatcagttgtgtttaaggcattacctgatcatcctgtatacaatktcaaattgttcccttactccctcttacttttccctgctttacttttcttcatagcacctatcttccaacatagcacataattttcttaagcattccccaa

SEQ ID NO: 362613 - DNA, 201 bp, Homo sapiens
gttttatctaagttattgattttatatgcatagaattgtttggagtattgccttgtcatttgaatgtctgtggcagctgtagtaataatcccctttcattyctaatattattgatttatgttttgtctcctctcttgtcctgctagaagtttattaattttattgatcttttcaaagaaacaacttttgggttcattgatc

SEQ ID NO: 362614 - DNA, 201 bp, Homo sapiens
atcttactggatttcttatacactattctgaaacctcttgtctttgtgtttagatcatttgggtgtctgaggtttatttctttgatgtttttcatcaaagytgctcaaaatacgttattggttttctgtgccattaaaagtgagctcacttcatgttcttgttgaattctaactgaagctcatttctcccctttttatttt

SEQ ID NO: 362615 - DNA, 201 bp, Homo sapiens
taatagttagaatggctgggtgcagtggcacatagtcccagctccgcaggaggttgagatgggaggatcgcctggggccaggagtccaaggctatggggcrccatgatcatgatgcctgtgaatagccactgtgccctaacctgggcaacatagcaacatagcaaaaccctttctcttaaaaaaaaaaaaaaaaaaaagca

SEQ ID NO: 362616 - DNA, 201 bp, Homo sapiens
tcaccacacctggccggatttttttttaaactgttttatttcagtaggtctagttgttcatcttactggatttcttatacactattctgaaacctcttgtstttgtgtttagatcatttgggtgtctgaggtttatttctttgatgtttttcatcaaagctgctcaaaatacgttattggttttctgtgccattaaaagtg

SEQ ID NO: 362617 - DNA, 201 bp, Homo sapiens
acacactctctctctctctctctctctctctcatcaaagtatagtatatataagtatatataaactttaaggataaccctaagtaggcagtttgaaattartcaatttcagacaaggagtcatggctcgtgtctgtaatcccagcactttgggaggttgaggcaggaggatcgcttgagcccagcttgggcaacatagtga

SEQ ID NO: 362618 - DNA, 201 bp, Homo sapiens
attttgcactgagtgcaaacagcaacaataaaaataaacaacaaaaattacttcatattctgttctttcagggaagaaagaagtccttgcaaacaaacatraatggtttattttgctcagttatttcttttgtcatgttacagcattaaagctaggtcctgaatcattcaagtttgatggtgcagtggaggctgtggctgt

SEQ ID NO: 362619 - DNA, 201 bp, Homo sapiens
attctgttaacatggtaaattacattgttttttggatgttaaattagtcttatattcctgggttaaactccactttgtcgtggtatggtatctgtcttagrtgttgctaatttttcttaaggaattttgcatctgtgttcttgagatacattggtcttgagttttcttgtaatatctttgcttgattttggtgtctgatta

SEQ ID NO: 362620 - DNA, 201 bp, Homo sapiens
tccttttctttctcattccagatctgaatgtgtctcactgataattctttccttttaatggcaaaagtagaaaacaagttcctgggtttaatggagaaacmtttatgttttatatttaaaggttgacattcttaagtaggctcactgttacgttttatttccttcttttctcacagggaagaggaagaacgtctgagaaat

SEQ ID NO: 362621 - DNA, 201 bp, Homo sapiens
tgattctaataaaagtagcagttggtttgggactgatagtgattgttatgatttcaattgggtggtgctgacagtatgtggttcttggtatctgtgaggayaaaccgcataagctatctcatttctatcttacatgagtggtgtggatcattccgtatcagtaggttcactaatgcaaataaagtacatttaaaacaatgt

SEQ ID NO: 362622 - DNA, 201 bp, Homo sapiens
  misc_feature (1)...(201): n = A,T,C or G
ggttgttagaatgatggggatgagggcactattgcatttaattatatgtgggctgggtatgctaaacatcccatggtgccttggtggttgtgcacaataantaattgaattatcctcctcataatgccagtagtgcatttaagaaaaaccaggttatatggctatcttggtgaaggactaaaagttattactagcttcctt

SEQ ID NO: 362623 - DNA, 201 bp, Homo sapiens
ttgaaatgccatccttcaatatcactggtctcaaattcattgatagaattttttcttaaactaataagtggggtaagtataatctcctaaattggtacccmctggctgctcctaaactggtttccagtcatgtcctccagtatgtgatttttataaattaaaggtaatattgtatattaaagttcaaataaagatgttctt

SEQ ID NO: 362624 - DNA, 201 bp, Homo sapiens
gctcagttcttcattgggaaaaaatatttttaaagaaaatttagaagtttttgctgaattaaagtatcttcaattttaattactggatttggaagttgaartgccatccttcaatatcactggtctcaaattcattgatagaattttttcttaaactaataagtggggtaagtataatctcctaaattggtacccactggc

SEQ ID NO: 362625 - DNA, 201 bp, Homo sapiens
cagtgttatagaaagagctattcactggttattttggcagaagatctttaaaatcctagcgagctgccctgatatccttttagcagctgtagtccttacaraattgtccaatttgttccttttaatgtttttgtatattttatatcagcctctgaaaagtatatcaaattttattattatctttgagctatatgcatctgt

SEQ ID NO: 362626 - DNA, 201 bp, Homo sapiens
gcagctgtagtccttacagaattgtccaatttgttccttttaatgtttttgtatattttatatcagcctctgaaaagtatatcaaattttattattatctytgagctatatgcatctgtcatatttataaatagtctgcaaaacaaacatttaattgaactgaaatttaacaattcagctttggctaactgtattataatt

SEQ ID NO: 362627 - DNA, 201 bp, Homo sapiens
ttttattattatctttgagctatatgcatctgtcatatttataaatagtctgcaaaacaaacatttaattgaactgaaatttaacaattcagctttggctractgtattataattagagtaatgataatgtctgtgacatgcacatagcaatcacagaagaataattactggtaattaccttcaggaaaagtgcttggcaa

SEQ ID NO: 362628 - DNA, 201 bp, Homo sapiens
ataaaagtctgaagaactaggtttagtaaataggcattaagtgaagccagatacacagaaccactgtcagtgctgctgattaatgagcattggttatggcrttgctacctctggatactggatgtgtctgcttccagagtgatttcttaaattgagtccttgtttctttacaggtatatagtaccagccatagcatctcat

SEQ ID NO: 362629 - DNA, 201 bp, Homo sapiens
ggagagatatgaaataaacaaatacatgatgtgatgtaatataatggtaagaatttcttttttcttaaagcacttttagtttctaggacaatacattcttytgcttttctcatagccttacttagcttcatgcttcactcagtctttttattattattattagttttctccttttctcctagcctcttagtgttggaatgc

SEQ ID NO: 362630 - DNA, 201 bp, Homo sapiens
ctttccttattgatctttctagatgttctagccattattgaaaatgggggtattgaagtttctattattgttactttgtctgtttctcccttcatttctgrccatgatttcttcctatattttgggggttctgttgtttaatgtatatatttatagtttttatatcttctaaattgacttccataagtattttagaatcag

SEQ ID NO: 362631 - DNA, 201 bp, Homo sapiens
ataagggacattagtctgtagttttcttggaatgtctttggctagctttggtatcaagataattactggtctcataaaatgaattaggaaatcattcctcytctgttgtttttagaagagcttgagaatgattgctgttaatccttctttaaagatttggcagaattcaccagtaaagctatctggttctgggcttttcta

SEQ ID NO: 362632 - DNA, 201 bp, Homo sapiens
cagagtcaactaagcattgctggtgaaaataacagtacagattaaagttactataaacgtacaatttccagttttatgtggatcaccagtattccatgagttttttttttttactttgatcaatttactttcctattctttactctccttaagttttctatgtaacccctctatccatctccagctcttattttgaccatt

SEQ ID NO: 362633 - DNA, 201 bp, Homo sapiens
ccaatggttgaactaatttacacttccaccaacaatgtaaaagcattcctatttttccacaacctctccagcatctgttgtttcctgactttttaatgatygtctttctaactggtgtgagatggtatgtccttgtggttttgatttgcatttctctaatgaccagtgatgatgagctttttttcatatgttcgttggctg

SEQ ID NO: 362634 - DNA, 201 bp, Homo sapiens
agaagcacttttttaaaaaaaaagtcaattcctattatgttatttttcctcctatttactgggcattcttaaaatatcctaccccatgctgcctcattttkttactcatttgagtatttgcatatatgtatatttccatctttttctaacagttgcccttgaattttaacttacatcttgtttatattttttctaacaaca

SEQ ID NO: 362635 - DNA, 201 bp, Homo sapiens
gcctatgagggacctcttccttgtagaattagaattgaatagccagcagctcacctcagacaaaatggatgcctgttgaaatgggccttttctcagtagakccctgcagaattttatgacttgtgcagtctgaggttttgccccaggtagatgagcaggagggcatctttccagtagtaacagagacaagctctcttcacc

SEQ ID NO: 362636 - DNA, 201 bp, Homo sapiens
atattttctgaacttcagtgtccttacttggaaaaggagatgattcctaaatggtgacaaaaattgttttggttggggctgagaaaatttttactcttttyatgtataaagcacagatatacatatagtcataaatagatacacagtatatatttggtattaaaattttatggagggagaaggcaattaggcttttttaaa

SEQ ID NO: 362637 - DNA, 201 bp, Homo sapiens; identical to SEQ ID NO: 78424

SEQ ID NO: 362638 - DNA, 201 bp, Homo sapiens
ttgccttgcctatcctcttgtgataagaagaataaccaaaagataacaatatttatctttattggtatctggctaactagtagtttttcaattagttcacyagtagtttttggaattgtttatggctttaactaaaaagatcctctgacattgcattgggcaaatattttctgaacttcagtgtccttacttggaaaagga

SEQ ID NO: 362639 - DNA, 201 bp, Homo sapiens
ttcttgagtcagtttttatagtttgttttcaagaatttgtccacttcatgtagattatctaattttttggtgaataattgtttatcatattctttaaaaawtttttttttttttaagcgttgggggtctgtgttgcccaggctggagtgcagtggttattcacaggtgtgatcatggtgcactgcaaccttgtactcctgg

SEQ ID NO: 362640 - DNA, 201 bp, Homo sapiens
gtagattctgagtaagaaaaaacacaaagcctacattaaaaccaagccttgatgacacttatttttattaattgcattcttaattttattttactcaggtkatgcacattcggaaactacttcagaaaatggatcgtccaaatggtctttatccaaattatttgaaccccagaacagggcgctggggtcagtgtaagtatt

SEQ ID NO: 362641 - DNA, 201 bp, Homo sapiens
tgaggatcaacaataccaaatattgacaaggatgctagagcaactctgttatacattgtattgggaatgtaaaatggtacactgtggaaagcagtttgttrgtttcttataaacttactgtatagcctagcaattccactcctaaatatttccttgttgctcacaaatgagatcaggtgtagttgtatgtttcttagtaaa

SEQ ID NO: 362642 - DNA, 201 bp, Homo sapiens
attcctagatgggcaaagatggattgaagacaaccttgatttcagtgtggtgagtgtatgattgataactaatctcttagattaaccatgaaaagacacartgtctaactgctatggtctgaacatttgtgccttcctaaaattcatatgttgaaacctaatcactaatgtgacggtactagaagatggggactttgggag

SEQ ID NO: 362643 - DNA, 201 bp, Homo sapiens
caaatatatataatctatggtatcctgttttgatctgtttattcttgggtcatagttgtagtatagtttccaggttggtaataaggactagaactctttcytgtttttttttttaatgttaattataatgtaattattggacacttaaaatatttttgatacaacttttggatggttagtgccactcattctttgttcaga

SEQ ID NO: 362644 - DNA, 201 bp, Homo sapiens
agacttgaaggcaaggtgggtaaaataggatgaactggtattcagggtaatagctataaagtagaccatgggatattaagaatgagatgagagctctaaargtagaattgacaaacctgaatatctaattagatatgaggagattcagtaagaaggaagaatcagagataatattaaagtttccagtgccaacctgactac

SEQ ID NO: 362645 - DNA, 201 bp, Homo sapiens
atctttgctcttagtctggaaattgtataaagagattataaacagagtttgatcttaggcatccagggttccttttctttctcattccagatctgaatgtrtctcactgataattctttccttttaatggcaaaagtagaaaacaagttcctgggtttaatggagaaacctttatgttttatatttaaaggttgacattct

SEQ ID NO: 362646 - DNA, 201 bp, Homo sapiens
ccttgtatatcattattatcagtcagggttcaatcaggaaccagactatgccatttattttaactagaggatttaatgtttagaattgttatccaactaayggggaaccaaaaaggcaaaaagagagcattgtgatatcaccagaagtattaactctaggaaacaggaaacagctgccacctgtggggactataagaacaa

SEQ ID NO: 362647 - DNA, 201 bp, Homo sapiens
ttttggaatctattcggttcctgagttttggaaaacgagaattcaaatagagttcaggtggcaaaggatccttgtgttatctctttgtatttctgtggttrtatcagttgacatttgctttagcgtattatttgctgttgtttactatatcagaaaagagtctgtagtaataaactttcttttactttgagcaaggaaata

SEQ ID NO: 362648 - DNA, 201 bp, Homo sapiens
tttgctgaattaaagtatcttcaattttaattactggatttggaagttgaaatgccatccttcaatatcactggtctcaaattcattgatagaattttttyttaaactaataagtggggtaagtataatctcctaaattggtacccactggctgctcctaaactggtttccagtcatgtcctccagtatgtgatttttata

SEQ ID NO: 362649 - DNA, 201 bp, Homo sapiens
actgagttttatctcttttttgtgtttgtgctctggtgtcaggagcaaaacaataaacaatgtatgtttaaactttaagggtaactccaaagtaggcgtgmacacacacacacacactctctctctctctctctctctctctcatcaaagtatagtatatataagtatatataaactttaaggataaccctaagtaggcag

SEQ ID NO: 362650 - DNA, 201 bp, Homo sapiens; identical to SEQ ID NO: 78419

SEQ ID NO: 362651 - DNA, 201 bp, Homo sapiens
tttaagaatcttctgagctgcttcatctgctaactgccagttctctaacactgaaatgtggtaggtaactggacatatttgaaggacatctttatgtaagwgatatatggagtcaggagatagccaccttcatatattgctctgtgccaagagaaataaaaccgatttctttttccaaaagaaggagacaaaacaggagag

SEQ ID NO: 362652 - DNA, 201 bp, Homo sapiens
ttgtaaatatgtccacttccctaaagactgaccaaataaatatctcttcatactcgctcttaaatttattatttgtatttcttgcatatctgtacatgaawgccttgtaaacattttattttttcaacaaatgtgtattaccaggcactgttcaagccacttgaggatgtttcagtaggcaagcaggacaaaaattcctgc

SEQ ID NO: 362653 - DNA, 201 bp, Homo sapiens
agctcttttcttctctgtttgcttcattagtagcaaacttcctcacatggtggcaagaaggccactggcagctctaaggttatagcacgctcagggctggraattctaaggtaaagagataccacttttgctgatgacatcaggaaatgacctaaggagggtttggattagcttggtttgtgtcacttgcccttttccaaa

SEQ ID NO: 362654 - DNA, 201 bp, Homo sapiens
cctttaaaattttctgtttatattttgttttgtatgaagagtctgagtggtttttactttgtgtgtgtatgtgttgggctgcaggggtatgagtaggactrtttattttgcctgaggttctttaagctgctggggtctgtgggttgatatctttaattattttctaaaaaattctcagttattgttttttaaaatatagac

SEQ ID NO: 362655 - DNA, 201 bp, Homo sapiens
gatataacagaatcagcttcctgtaaagcctatcaatcacagtgatcaggatacagtttaaaattactcaatgtatgaaaaaaatagggaaaatgatccatttttttttttccaaaagtcaatcaatggtgacctgttctaaggtaacccagatactggcattagttgacaaggatgttaaagcagctgttataactatgc

SEQ ID NO: 362656 - DNA, 201 bp, Homo sapiens
agtctgtgaaaagttaaggacataattaatccctgggacaaacattaaagaaaaatattgcagacacgtatagcttaaccaccaataaataaactgtaaatctctctctctctctctctctattttttttttttgggggggggaccgagtctcactcttgtcacccagactggagtgcagtggtgtgatcacggctcactg

SEQ ID NO: 362657 - DNA, 201 bp, Homo sapiens
gtctgtgaaaagttaaggacataattaatccctgggacaaacattaaagaaaaatattgcagacacgtatagcttaaccaccaataaataaactgtaaatctctctctctctctctctctattttttttttttgggggggggaccgagtctcactcttgtcacccagactggagtgcagtggtgtgatcacggctcactgg

SEQ ID NO: 362658 - DNA, 201 bp, Homo sapiens
attatagtatctatgcacttttgaaaacttaaaggttttagaagcatatgctgtactatataaatgaaaaacttcctgttctcttatcttttcctcttatytttttctttggccttatgtttatatttttgtctcttctctgttacttattctatttttgttttctctcctccatttagttttcactggtgtctgtttttt

SEQ ID NO: 362659 - DNA, 201 bp, Homo sapiens
gggacaaacattaaagaaaaatattgcagacacgtatagcttaaccaccaataaataaactgtaaatctctctctctctctctctctattttttttttttkggggggggaccgagtctcactcttgtcacccagactggagtgcagtggtgtgatcacggctcactggaacctcaacctcctgggcttaagtgatccttgc

SEQ ID NO: 362660 - DNA, 201 bp, Homo sapiens
gtggactctagaaaatggtgtgtaatacctgttcgtggaagctcactggtaggtgaagatgctttctgagtgataacatatgagctattgcaaacatggtyggggattccacatgccatttagcaataacttggggataatgtggtacgtggagatagaaatggaaagcttgttttcctggggcaatctccccatttgtca

SEQ ID NO: 362661 - DNA, 201 bp, Homo sapiens
cagtatgcatgattgccaacctggtaacctcatccaagcttcagtgtatagagttttatggggcttcattatgtaggcatcattgattgattactcaattrcctgtatggttgaactcagtctcccaatggactgatactgtgtaacccagagccttgtcctaagccatattgttggtgtttatgacatggccagcttttg

SEQ ID NO: 362662 - DNA, 201 bp, Homo sapiens
atgtatgagatgaagcttgagagatagatagaagctacattatacagaatttcttaataggccataatataatagaattccttaggataagggaagccatsaagtgttttaagtgagagtgaggcatagtctgaataatttcagaaagcacattgggtctatagtatggatggagaatagcttgtgggtgggttggagagt

SEQ ID NO: 362663 - DNA, 201 bp, Homo sapiens
taataaatgaggattattttctattaatttgtgttgtcattaataaatatgttttcatgacctagatttttttctctctacataaaaagattggtaacacsctgagtaaggtgaacattgagcctctggctcttcttcagtgccgttggtgtaaatgtaaattaatagaattttcataaagagcaatttatttatatcaac

SEQ ID NO: 362664 - DNA, 201 bp, Homo sapiens
acttaagcatttgtggattttggtttccaagggaggtcctggaaccaattcctcatggatatcaaggaacaactgtgtttatatttagccatatatacatraacatatttacatatggctatatatggttatatctgtatgtttataatgttatacatgcatacatgacttttttccaattagttggcagtcaggtggcat

SEQ ID NO: 362665 - DNA, 201 bp, Homo sapiens
gctgggcatggtggttggtgcctgcctgtagtcggaggctgaggtgggaggatcacttgagcccaggagttcgagggtgtagttagctatgattgtgtccstgcattccagcctgagagacagaggctctgcctctttaaaaaaaattaacttctggtttgggctgactccacatatttcttggataggaaaatcatattg

SEQ ID NO: 362666 - DNA, 201 bp, Homo sapiens
ttagtccttatactcttactttagtttacctttatacataaataattaaaatacactgaatgtgaagggaatcttttttttccccccaaagagaacaggarcctaaagggatctttttaatgataatttttttcttcccaaatataggaagttcacaaatgggtgctaccatagtagatgctttggataccctttatatca

SEQ ID NO: 362667 - DNA, 201 bp, Homo sapiens
tttctctggaatcaacaggttgcctgagtgattgtgcttttctggcttgggctttgcttatcttatctgggtttgttcatgtgtctgcaggtagatgacargttggctgaaggctagcttggccccactggggaggactcagctctgcttcatgtggtctcatcatctatcaggagataccatgctttttacatagcagtg

SEQ ID NO: 362668 - DNA, 201 bp, Homo sapiens
tagagatttcaaatctcactattgcaattttaattttcttgtcatctttctttgtctcatccctcttctggaccttttttttctatcctgttttttatttrgggctttctgctcctgtttgggcgacgtcacattgttttatgcactaatattaaagtctgctggatgttccatttcccttataaattgctcatggttatt

SEQ ID NO: 362669 - DNA, 201 bp, Homo sapiens
tttgctgaagttgcttatcagcttaaggagattttgggctgagacgatggggttttctaaacatacaatcatgtcatctgcaaacggacaatttgacttcmtttcctaattgaatcccctttatgtctttctcttgcctgattgccctggccagaacttccaacactatgttgaataggagtggtgagagagggcatcctt

SEQ ID NO: 362670 - DNA, 201 bp, Homo sapiens
ggaggggcagtgggaataaggaagacttcattgagaaagtgtgcctcagaaacgtagaatgagtaggagattgcttaatgaagtggaattggaggttgagrggaggttgagggtcaaagcagaagacacaacatgtgtgagagccctaaggaaaaaaagcttggcatcactaagaatctgagaaatgttaagtatggctgt

SEQ ID NO: 362671 - DNA, 201 bp, Homo sapiens
tttcaaagggaatgcttccagtttttgcccattcagtatgctattggctgtgggtttgtcataaatagctcttattattttgagatgcgttccatcaatamctagtttatcactggtatgtgtttcaggtatggggagggattttgcatcaacttttaagagcatcttgacaaataatcattgtataaccacagttgaccc

SEQ ID NO: 362672 - DNA, 201 bp, Homo sapiens
gtatactaggatcttattgtctaaaggaacattttataaccaaactggttggcaacaaatgtatgcctactgtggcaggccccgctttcatgaaactttcmatctagggagagatgatgggcattaaataaataattttgtttttgaggtgtgatgaatgttacgaagttgtactcagtgctttcagagcaaggaatgtgt

SEQ ID NO: 362673 - DNA, 201 bp, Homo sapiens
gatgctcttaacacttgagttcactgcatagcaaaaagaggtgtctgtgaaattattacagtagtaaagtatgtactgcaataaatcttacacatttatgrtttaatactgcatctttacatttgtttacatttctcttgactatcaatggcaccatgtatgtctgtgtatatgtaagttttaatacattttaacttttta

SEQ ID NO: 362674 - DNA, 201 bp, Homo sapiens
ttaagttggggaaagacttaattaactaatatagtattttctaaggttgatcatcttataccacgaatcgttaattttgacagttctactgatccgtaaawgataaccactgcaaattttttcagtataaaatttttcactgcaaaaaaatttcagtagaaaataaggatgcagggccagttacaatagtccttaagagag

SEQ ID NO: 362675 - DNA, 201 bp, Homo sapiens
gtagtaaagtatgtactgcaataaatcttacacatttatgatttaatactgcatctttacatttgtttacatttctcttgactatcaatggcaccatgtaygtctgtgtatatgtaagttttaatacattttaactttttataatagatttgtatttcatgatactaaatggtaaaatagactagtatctacacatatgtt

SEQ ID NO: 362676 - DNA, 201 bp, Homo sapiens
ttttaaattctgaattctgctgctgtttctgttaaagattttgaagtaattgttttaaagacaagaatcgtggggtatttgggaatatatggaataacttytaatataagaatctatttttgccatttcagcttctataaaaacagttacttaaaagaacataaaattgactgacttcagttatattgccttgcctatcct

SEQ ID NO: 362677 - DNA, 201 bp, Homo sapiens; identical to SEQ ID NO: 78420

SEQ ID NO: 362678 - DNA, 201 bp, Homo sapiens
gctaattatatagtctaaaataatctctaagttaaaaatgtgttcagcaataagaaggagaatatataggcactttttacttccaaatagtttacaccaayaaggcaaatcattttcttaagaacttgaattttaattctggaaatgtgtctctgcattattttttaaattctgaattctgctgctgtttctgttaaagat

SEQ ID NO: 362679 - DNA, 201 bp, Homo sapiens
ttaaatttgatacccgtatgaaataaaattaagtgagagagcatagcaatgacattttcggatgaaagggtttgcatcccacacacttttgtgggaagttrtttcagaatgtgattcagtaaaacaggtgtagacaaagacttaggactgaagaagcaataggcataactctggaaagcaagaaaagagaagtggcaagat

SEQ ID NO: 362680 - DNA, 201 bp, Homo sapiens
aaagtttttttcaaccctagggatgaagatggcatgatacaaaacccaaagatcattgaagaaaagattgagaattcaattacataaaaataaaaaacatstgtacaaaaaaagagcactaagtaaagtaaaagacagatggcacactgggaaaacatttcttaaaattagaaattattaagaaaaaatactaagcctact

SEQ ID NO: 362681 - DNA, 201 bp, Homo sapiens
aaaaacctacagctaacatcatattgaaaaactgaatgtgttgctcttaagattaggaacaagacaaaggtgtctgctctcttcaccacacctggccggawttttttttaaactgttttatttcagtaggtctagttgttcatcttactggatttcttatacactattctgaaacctcttgtctttgtgtttagatcattt

SEQ ID NO: 362682 - DNA, 201 bp, Homo sapiens
tcggatgaaagggtttgcatcccacacacttttgtgggaagttatttcagaatgtgattcagtaaaacaggtgtagacaaagacttaggactgaagaagcrataggcataactctggaaagcaagaaaagagaagtggcaagatgacagctgtggagtatccctagaaaatgaccagattgggaggaaggtctctagcgga

SEQ ID NO: 362683 - DNA, 201 bp, Homo sapiens
actccactgtcagcactagacaggtcaacaagacagaaagtcaacaaagaaacaatggatttaaactataccctggaacaaatggacttaacagatatatrcagaacattccatccaataaccgcagaatacacattctattcaagagtgcatggaactttctccaagatagaccatatgataagccataaaacaagcctt

SEQ ID NO: 362684 - DNA, 201 bp, Homo sapiens
taacactggagctcccaaatttataaaacaattactgatagacctaagaaatcagatagacagcaacacaacaataatggaggacttcagtactccactgwcagcactagacaggtcaacaagacagaaagtcaacaaagaaacaatggatttaaactataccctggaacaaatggacttaacagatatatgcagaacatt

SEQ ID NO: 362685 - DNA, 201 bp, Homo sapiens
aatgactgtaagaacaaacaaataaaaaaaagactatacctaaatttaatcagtgtttaagtgaagattctaaaccttggagaagagagctgagtgtgagkaagtaagattgggaacatattaagcctattaaaaataacatcagatttcttatcaattatactggatgttagaaggtattggaatggtactttcaagaag

SEQ ID NO: 362686 - DNA, 201 bp, Homo sapiens
ttaggtgcattattactaataaatacaagtcagcttgctttttaaataaggggaggagtcatgtaagaaagaaaagccatgaatagcttttagttaacatrtgaacttgtttaaagacacttggttggagtcttgattgttttgtaagaagagctaaatggtactactgtcccctctccagctgcaagaaagagaaatatg

SEQ ID NO: 362687 - DNA, 201 bp, Homo sapiens
gggaaaagtctgaatggtctgggtaccattcagaccaaaccagctacaacattccctgaagccaaagcatcatccagagcaaggctctagctctcttcaattctgtgaatgctaagagaggtgaggaagctgtaggagaagagtttgaggcttacagaggttggtttatgaggtttaaagaaggaagctgcctccaaaaca

SEQ ID NO: 362688 - DNA, 201 bp, Homo sapiens
cttgacgtaagttgaggctcattttaccttttacatgtgtcataggtgctataccatggagtagttattgctataggcatacttttttccccagaagaggmcatgtctcctactttttttgtttccctcaatagaccttacttcatggattaatatttatctagcatatatactgatggcataacaaaaactatgtaatga

SEQ ID NO: 362689 - DNA, 201 bp, Homo sapiens
tccttttgctagtttctccatgctggcagagagccattatcagctccaggattatatattacatagaccatcagattgcagaataaaaaagccctctatcycatggtgtcaataacaatatgtgtaaaaagaacttgattgttcctacctgaatcacatgtatccactcactttgtttagggcaggggttgacagctgcaa

SEQ ID NO: 362690 - DNA, 201 bp, Homo sapiens
aaaaggcaacaatcaatgtgttttagctaccagagatggaaactgattgtcacggcagtggcaaagttaaatgaaaaaacctgtattcttgacgtaagttraggctcattttaccttttacatgtgtcataggtgctataccatggagtagttattgctataggcatacttttttccccagaagaggccatgtctcctact

SEQ ID NO: 362691 - DNA, 201 bp, Homo sapiens
cagtatattaaaaatgttttataagccagattatggcatcatataatgagaatgaccatatagtgtgttgttcataagagtacaatttaagaatgaatggrggagctgaaataattaaaactatttaattttctgagtatttaatcactgacaaattggttttattttattgggtatcctgtaaaataattctgctataaa

SEQ ID NO: 362692 - DNA, 201 bp, Homo sapiens
gtatttgttgatataaattatatacagtttttcatgtttttaaacattatttatcattctgcaagttgttttccccttcatgttatctttacaatttcacktttgggctctggttcaattatataattatattatctgcctattcagtgattaaacctcaagttatttgtgtatttccctgttgatagatttttagttttt

SEQ ID NO: 362693 - DNA, 201 bp, Homo sapiens
aaaacactggactagaccttccaaggttttctctggctttaaaaacatgagtttctatatgaagtaatagataatgagctccctgaaagccaaaaaactakaaatttctatttgatttcggaagttgaattgttgattttattaaataacaatttctgttttagggttaatttatcatcagataccatgaaacaaatatga

SEQ ID NO: 362694 - DNA, 201 bp, Homo sapiens
ttatttggattcttgcagtaatttaaaataacagattatattccaggtaaacaaatatggctaagatgaaactagaaccccaaaggaagaaaagtaactgrttattttaaattgctactacaaatgcagttggattgaagaaaatatagatgtatttaatgtccattttcacaaaattctaggaagtcatggtatgaagac

SEQ ID NO: 362695 - DNA, 201 bp, Homo sapiens
ctggggttagtagtaccgtgtttttctgttggtaaaatgtggggctgggattggaagactcttgggtgtttctgccttggatatcttatataagacttcartcagcacctatgtgctgatgatgcccttgtctgcctgagtcgcctgaacagatcagccctcatgtcagtttctcatggtttcattcagggaccaacctta

SEQ ID NO: 362696 - DNA, 201 bp, Homo sapiens
tagtctttttaaaaaaacttttaaaatcagctttattgaaatatgttaagtgtacagtttattgcattttggcaaatgtttaagcctgggtaaacatcagycttacttgatgcatggaatatttccattctaatttggcagtcagttctacccacccccaaactctaatctgctttctgtcactataggttgctgcttgtg

SEQ ID NO: 362697 - DNA, 201 bp, Homo sapiens
tcatacctgagctccctactgtagctaatgaaatctgttaggaatgatcatgcagttttgatagtactaaatgaccatagccactcatccacccgatgagscttactgtaaagatacacataaaaggaacaatggaaaagagtagacaactttattttcgtcttatactccaaaccccaggtagaggtctctgtaaacaga

SEQ ID NO: 362698 - DNA, 201 bp, Homo sapiens
ctggctttaaaaacatgagtttctatatgaagtaatagataatgagctccctgaaagccaaaaaactagaaatttctatttgatttcggaagttgaattgytgattttattaaataacaatttctgttttagggttaatttatcatcagataccatgaaacaaatatgattgacctaaaatttatgctagttcataaatct

SEQ ID NO: 362699 - DNA, 201 bp, Homo sapiens
acagaaaatcaaagatgatgtagaagtcccgaatgacagtatgagctattttaaatgaattgatatttatttatacagcactttactcaacagctgctgartacactttcttttcaagtgcacatggtatgtttaccaaaaataaattgtatgctggatcataaaacacattcagtcaatttaaaaagttagaaatagtac

SEQ ID NO: 362700 - DNA, 201 bp, Homo sapiens
tggtaataaaaagctatttcacaaaattaactccaagttaaatggctttattggtgaattatatcaaataagaaagaaatatcattcttccccagaggaayagggaacattttgcagctctacttcagaggccagcatagcactaacatcatagcctgaaaggcaatatagcaagagaaaactacagaccagtatactttt

SEQ ID NO: 362701 - DNA, 201 bp, Homo sapiens
atggcaccttggactaagatggtgttgtagagatgagagatataaatgatttcagggtattttggagataaatttaaaaggattgggtgatacgtggaggrgggtataaaacagaaggaattgattttgtctctcaggtttctgtttttggtgctagattgatggtacgatagttattaaatatcaaatgcttaaagaata

SEQ ID NO: 362702 - DNA, 201 bp, Homo sapiens
actcgtgaataataacaaaatgcttttgctcacatgtgtggtcaatccttaataagatctgtttcagtgaaatgatggcagcagaagccatgttggaatargttgaggagtgaatagaaaggagaggatatggatatagtaaattagacaattttgtaaaactggaaaagttacttgtgttattatgtcagtagcagccaa

SEQ ID NO: 362703 - DNA, 201 bp, Homo sapiens
tcagtgcttagccttaaatcttttttagcctctttcatgtggccaaccaattcatattgagaaacagttgggcttcttcattaacgtgttattttaggaawgggattactgttaaggagtggtgatcccaaatgtgatacaatttgtcttgtttggcctttaactacagtcagtacactggaaactatgtgattcttaaga

SEQ ID NO: 362704 - DNA, 201 bp, Homo sapiens
tttatgttacctggtttctactctaatcccattgtagcaaaaaacatactttatatggtctgaatacttttaatttcattgaaacttgttttatgacctaraaaatggtctgtattggtacatgttccgtttgcatttaaacagaatgtatattttgttatagtgttctgtaaatgtcaattaggtcaagttggttgatgg

SEQ ID NO: 362705 - DNA, 201 bp, Homo sapiens
aattttgtctgttttcttgtaattttctttaaaactattttgacttttgcttaattttttccaaaggaaaaaaattgtatttgtcattgttttttttaatyatacatgctttgaaaggcatgataactgctttgaaagttaaccttataaattcacactatttttcatgaatcatctgctatatgttatgtatcttgtaaa

SEQ ID NO: 362706 - DNA, 201 bp, Homo sapiens
ctaagtgtacagtgtttaaatctacagtaatgttcagtaatgtcctaggccttcacattcactcaccactcatcctctgactcgccagagaattttcagtmctgcaggtttcgttcatggtcagtgccctgtacagatataccatttttaatcttgtattctgtatttttactgtactttttctatgtttaggtaaacaaa

SEQ ID NO: 362707 - DNA, 201 bp, Homo sapiens
aaggaaatcttttgcacttaatcacaacatggctctcctcaatactacggagaacagaattgattcagattgtttttaagcctgaacgtaaacaatattgycgcctttttgggtttcagcacctccttattcatccattttctcttttatgggaagggggttgatgaggtgtgtgaagatgatagaacgtgccccagaaac

SEQ ID NO: 362708 - DNA, 201 bp, Homo sapiens
aagtatgaacattaacaggagtttggaagaatttgattccagtcctcatgggtgattttgaggggttcaaactcaagtggaggaagtaactgtagatgtgrtggaaatagcaagagaaccagaattagaagtggggcctgaagataggactgagttactgcagtcttatgataagacttgaatggatgaggagttgcttct

SEQ ID NO: 362709 - DNA, 201 bp, Homo sapiens
ttgaacctggaaggcagaggttgcagtgagctgagatctcatcattgtactccagcctgggtgacagagcgagactccgtgtcaacaataaataaaataarataagaatttattttagtgtattcatgaaaattgattttatttacttttagttaatgtttacagagactggaaaaacttctgactttatatacattttca

SEQ ID NO: 362710 - DNA, 201 bp, Homo sapiens
tttatcattatctcagcacctagcacaatacttgaaacataataagtattccgtagtatttgataaatgcatgaatatatttaatattatatttgagaacatgtgatatatcatataccatgtaataaattaattttgtctgttttcttgtaattttctttaaaactattttgacttttgcttaattttttccaaaggaaa

SEQ ID NO: 362711 - DNA, 201 bp, Homo sapiens
ttttaaatggtgtatgttttcttttatgatgaaatgttatggatggcccacatcttttatgaggtgaaaccattttgtaaaaatattagcgaaagaaagtraaattgatttaaaaaaacagtaaagaagaaaaagtttttaaaaagaatgatagttgctttaaactttaaaacaacagcaattaaaagagacagagggaca

SEQ ID NO: 362712 - DNA, 201 bp, Homo sapiens
ttatcattatctcagcacctagcacaatacttgaaacataataagtattccgtagtatttgataaatgcatgaatatatttaatattatatttgagaacatgtgatatatcatataccatgtaataaattaattttgtctgttttcttgtaattttctttaaaactattttgacttttgcttaattttttccaaaggaaaa

SEQ ID NO: 362713 - DNA, 201 bp, Homo sapiens
agaactgtttttccagctggatgaaaagagtagcatcaagtcccctattctgctgttttctgctcacttactcctggagacaagctaagtcaaatcaataygtacttataagtacctgctttctcagagttgtatttgagaattaaagtatatgaaatgtatactctacccataaatagcttggagtctggtttagaaatc

SEQ ID NO: 362714 - DNA, 201 bp, Homo sapiens
attccgtagtatttgataaatgcatgaatatatttaatattatatttgagaacatgtgatatatcatataccatgtaataaattaattttgtctgttttcttgtaattttctttaaaactattttgacttttgcttaattttttccaaaggaaaaaaattgtatttgtcattgttttttttaatcatacatgctttgaaag

SEQ ID NO: 362715 - DNA, 201 bp, Homo sapiens
acctatttaaatttttaatacaattttagatataaataagctatcgtgtcagatataataatttataagagatctatttaaaatttacatattcattaaaygaatgttttggtcttttcccaatcctgtgtctccttttacttttccttttcattcagtggagtagggcgaaactggggctgggcatctgcaggtagcagc

SEQ ID NO: 362716 - DNA, 201 bp, Homo sapiens
ttagtctttttaaaaaaacttttaaaatcagctttattgaaatatgttaagtgtacagtttattgcattttggcaaatgtttaagcctgggtaaacatcakccttacttgatgcatggaatatttccattctaatttggcagtcagttctacccacccccaaactctaatctgctttctgtcactataggttgctgcttgt

SEQ ID NO: 362717 - DNA, 201 bp, Homo sapiens
taagagtctggatagcaagtgatacatgtgagtctggatagattccaatgcagtttttggaatctattcggttcctgagttttggaaaacgagaattcaartagagttcaggtggcaaaggatccttgtgttatctctttgtatttctgtggttatatcagttgacatttgctttagcgtattatttgctgttgtttacta

SEQ ID NO: 362718 - DNA, 201 bp, Homo sapiens; identical to SEQ ID NO: 78416

SEQ ID NO: 362719 - DNA, 201 bp, Homo sapiens
tcactagatgatgaattacaactatgtgacaggttacactaaattttgttgtaaatatctttttatgtaattgggtgtgtaaatttttagctacatctcaraaagaatgacttagactataaggtaggtattttatcaaaaaagtacttagtacctgttaaaattttttgttctttgctctttaatgtgcattaaaatcac

SEQ ID NO: 362720 - DNA, 201 bp, Homo sapiens
tgagaaatgaagatgcagaaagtagaaaaatattttccacagggtgtttgtgaaaaacaaatgaagtattgataatattttgaaaactataaagcattacrtatttgtgaatgttttcaatatgtttttcacagaattcagaggtgtctgtgtttgaagtcaacattcgatttattggaggcctacttgcagcatattacc

SEQ ID NO: 362721 - DNA, 201 bp, Homo sapiens
aaatacaattgaataaagtcatttctgtgaagatctaaattaatgtagctgtagttttattgtaaaaatagagcttaaaactttatagaggaatgaagatagtatggtctcttaaatatttctcaaatatcagttaatttaaataggctttgtcagaagctgtcagtttaagattatgtattctcccaattggtgggaatt

SEQ ID NO: 362722 - DNA, 201 bp, Homo sapiens
ttcaaccatttttttctgagttcatatatatcaggcattaggcagctcagaaatcacaagttggaaacatagtcttaacaaatttgttattaaaggaaagrgaaatagcataaaattaagatcaaatttatcaccacagtatgtctactttcactggtatcagagtctctggggcagaaattatgtctgtgtctcttgctt

SEQ ID NO: 362723 - DNA, 201 bp, Homo sapiens
tatccaaaaatagaaggatatgtttccagcttgaaagacaccatcaagatcccagcatagaagatgaaaacagacccacaacaaggcacagcaccttggawtttcaaaaccactggggtaaaggaaagatctcagcttccacagggagagagaatagaataaagtctcgtagatctggattcagagtgccttcagacctct

SEQ ID NO: 362724 - DNA, 201 bp, Homo sapiens
agtttgcaaacatgctctctgattgccaaatgctgcctggtaccaatgagatgctttttcctaccctgtgctcccgtgtacccagtaccttgtgctatgtwtactatgagagagagagcaataagtaaatgcttactaatggctataatttatgaatattcatgttttaaatctcagatattcaagattaaagcagtgcaa

SEQ ID NO: 362725 - DNA, 201 bp, Homo sapiens
tcttagcactatctctgtcattatacatgatggaacatacactgttagcagtaagcaccaaggagaaaaataaagtgggatggggcataaaggagtttaartttcaaataggatggttagggagtccatgaaaaggtaacatttgtgtgaagacctgaaggagattagtgggtgaggatattttttgtaagaacatttaat

SEQ ID NO: 362726 - DNA, 201 bp, Homo sapiens
agtggagctaatgtagagtgactgagggacagagtgaatgaaggagagtgcatgaaggagggggtgaagccatagaaggtaatggggatacatctttgatrtaggtatatacccttattaaggactgtggcttttgctctgagatagggagccatttgagggttctaaactgttgacttctatttaacactcccacattga

SEQ ID NO: 362727 - DNA, 201 bp, Homo sapiens
ttttgctctgagatagggagccatttgagggttctaaactgttgacttctatttaacactcccacattgactgctagattgagaataggctgcaaaaataytatcttagtaacttaagtactctaatagagaaaacaggcataagaagcatatatagatcctaatgtcacttccctcctcaagaaactacagtggttctat

SEQ ID NO: 362728 - DNA, 201 bp, Homo sapiens
tgatccacccacctttgcctcccaaagtgctgggatgataggggtgagccaccacgcccagcctaactttcgttacttatactttaaagctctttgtgttwacaagatatcatgaaaaagccactcataaattgctggtagaagtataaattagtaaagcatatatggagggcaaattggtagtaacttaccaaaatttca

SEQ ID NO: 362729 - DNA, 201 bp, Homo sapiens
gagcatgctttctatttagaaaaagttcataggtcattttatcagttttaattttatatgtagaaaagatatgatacaaaatgtgtgattaacaaagatayagtattaatattagtttctagataagaaagttgatttctttgtctttatggtaaacagaagcaatactgtttgctctataaggtaacttgtgtttactaa

SEQ ID NO: 362730 - DNA, 201 bp, Homo sapiens
gggagtgctaaagcacttagtattttgtaggtgccacatgaccaaagtaattggatttggtataaaagcttgaggttctgtggatttctcagtgcttagcsttaaatcttttttagcctctttcatgtggccaaccaattcatattgagaaacagttgggcttcttcattaacgtgttattttaggaaagggattactgtt

SEQ ID NO: 362731 - DNA, 201 bp, Homo sapiens
atggtgaatttgaaaaggtaactctatgtgggtattcttattctggaagaattattttgacctttttagtcttagaaatttctaatgagtcacccccacattttttttaaagacatattgtttttctctctatatataatctttgttttcttttgtgtatatgcataaatgtgtttctttaaaacattttctgatttttaa

SEQ ID NO: 362732 - DNA, 201 bp, Homo sapiens
cttcctattgctgaatgtcatattaaagataaagaaagacgtaatttatgatgttgactgcggggtttttattatagcatctacactagtgaagttcaaartgaactcttaagcatcaatctttataatctgttttctaatcgaaaacattggttttttacttagaaatagatgaaatgttttctttggacaactttataa

SEQ ID NO: 362733 - DNA, 201 bp, Homo sapiens
gcagcatttaatactgaacattaaatctaactttactatctctgatttcatgcactatgtatagtgcagattacctctttggtgaggaaaaagctggctgragttccagagcaagctccatggaaggatatggccaagtgatgttgtgtatacgcttgttctcgttccttagttttgtgacagattttgtgatatttcctt

SEQ ID NO: 362734 - DNA, 201 bp, Homo sapiens
ggagggggaaagagaagagaataatagacctactttatttcctggttggggcttagagcttgatctcagaattcacttagttttaggaggtgtctgataakgagtcaaagaattgataaagcaagaagaagggacccaaggcaaaatgtgaaagctgaggatgtcagggctgcggatttgttttcagtagagagtcaaagg

SEQ ID NO: 362735 - DNA, 201 bp, Homo sapiens
atgctcagcctagatggatttttttttttaatctatcttccagtagaatgtaagcctcatagccgtagggactttttccttttaactactatgatctcccyagcacctagcacatgaggcactcagtaaatatgtattgaatttgttgataaatttttagtctgttaggcaagaaaagaacttggctatttgcatctttac

SEQ ID NO: 362736 - DNA, 201 bp, Homo sapiens
agatcaaatttatcaccacagtatgtctactttcactggtatcagagtctctggggcagaaattatgtctgtgtctcttgcttgtgtgcttttttcctccstatctcttgaaattcaaactttgaatatagtaaaattctggaaagctatataagaatatgtcttatattcttatatatacttatatacttaagaataagt

SEQ ID NO: 362737 - DNA, 201 bp, Homo sapiens
gcacaatacttagcctatgtcatttaatgattaaagtgaagaaaatataggaaatcagtcattactgattcattgttttatattactaaatttataattgkggaaaaaacaagaatggacatgttatgcccctttgagttagaaaatgaattgattgtcttgcttaataatttagataatttatttaacttctctatgcat

SEQ ID NO: 362738 - DNA, 201 bp, Homo sapiens
ttatcctttctatcaattaatgcctctctctcatttctaatttcagttcaaatttcacctctttgcagactggctttcataattaattctcaaatctctcrtcattacaacttggagcactttagtacatgcatggcatagggctggaaatagatggtatgctgcctcatccccttctagtacctatatggaatatcacca

SEQ ID NO: 362739 - DNA, 201 bp, Homo sapiens
ttataaattttgagtgatttgacatcttcacagtattgtttcagtccatgaataatggtatatctctccatttatttatttttttattggtgtttctactytttagcatacagatcttgtatgtattttgataaatttatacatatttcatgtttttggtagttctgtattttaaattttggtttcccattgttcattgtc

SEQ ID NO: 362740 - DNA, 201 bp, Homo sapiens
caatagtatcatgaagccaaaacaattgcatttttatagacttttcacagtataatattaagtgggctattaagtccacatgtgcatacgtaacacatagatgaacatgttaatagtatttcaacaatatcaaaatgtgaactgtagtttagcttaattgaagttattttagtttttaaaaatactttttgtttttgtctc

SEQ ID NO: 362741 - DNA, 201 bp, Homo sapiens
atagtatcatgaagccaaaacaattgcatttttatagacttttcacagtataatattaagtgggctattaagtccacatgtgcatacgtaacacatagatgaacatgttaatagtatttcaacaatatcaaaatgtgaactgtagtttagcttaattgaagttattttagtttttaaaaatactttttgtttttgtctctg

SEQ ID NO: 362742 - DNA, 201 bp, Homo sapiens
ggttctcaagaatacaattgctggattaaaaagcatctgctttttttttttttttaatctgtgggacagatttctagatgtagcgttcctggatcaaaggratatgtatttttaaatttaatagatattgccaaaatgtgttccagaaaggctgtagtacatttccaccaacaatatgtgagagtctctaaatgtctgcag

SEQ ID NO: 362743 - DNA, 201 bp, Homo sapiens
tttttcaaccctagggatgaagatggcatgatacaaaacccaaagatcattgaagaaaagattgagaattcaattacataaaaataaaaaacatgtgtacaaaaaaagagcactaagtaaagtaaaagacagatggcacactgggaaaacatttcttaaaattagaaattattaagaaaaaatactaagcctactaaaaaa

SEQ ID NO: 362744 - DNA, 201 bp, Homo sapiens
tcaagtgatcctccctccttggcctcccaaggtgctaggattacaggtgtgagccactgcaccctgcccaaattttcatatttgtgtgtgtgtgtgtgtgwgtgtgtgtgtgtctgtgtgtgtatatatatatatatatgtatatatgtaaatttatatgtatacatataaaagaaaatttatatataaatttatatatat

SEQ ID NO: 362745 - DNA, 201 bp, Homo sapiens
tccctccttggcctcccaaggtgctaggattacaggtgtgagccactgcaccctgcccaaattttcatatttgtgtgtgtgtgtgtgtgtgtgtgtgtgtstctgtgtgtgtatatatatatatatatgtatatatgtaaatttatatgtatacatataaaagaaaatttatatataaatttatatatatttatatatgat

SEQ ID NO: 362746 - DNA, 201 bp, Homo sapiens
atgattttacgcagttgatgtctaagaaaagactgggcagctgataaaatggtagcgtcactgaatgagtcaagacattttaacataaccgcaaaatagakgttgtaatattgatgggaatattttgtcatagttgttttgatatatacatatttcaaaatagttaaaatgtaaaatcactgctctcttgtttattaccaa

SEQ ID NO: 362747 - DNA, 201 bp, Homo sapiens
cctccttggcctcccaaggtgctaggattacaggtgtgagccactgcaccctgcccaaattttcatatttgtgtgtgtgtgtgtgtgtgtgtgtgtgtgtstgtgtgtgtatatatatatatatatgtatatatgtaaatttatatgtatacatataaaagaaaatttatatataaatttatatatatttatatatgatat

SEQ ID NO: 362748 - DNA, 201 bp, Homo sapiens
tggcctcccaaggtgctaggattacaggtgtgagccactgcaccctgcccaaattttcatatttgtgtgtgtgtgtgtgtgtgtgtgtgtgtgtctgtgtrtgtatatatatatatatatgtatatatgtaaatttatatgtatacatataaaagaaaatttatatataaatttatatatatttatatatgatatataaac

SEQ ID NO: 362749 - DNA, 201 bp, Homo sapiens
gcctcccaaggtgctaggattacaggtgtgagccactgcaccctgcccaaattttcatatttgtgtgtgtgtgtgtgtgtgtgtgtgtgtgtctgtgtgtrtatatatatatatatatgtatatatgtaaatttatatgtatacatataaaagaaaatttatatataaatttatatatatttatatatgatatataaacat

SEQ ID NO: 362750 - DNA, 201 bp, Homo sapiens
ctgagacaggagaatcacttgaacccgggaggcagaggttgcagtgaaccaagatcatgccactgcactccagctgggggacacagcaagactccatctcaaaaaaaaaaaaagaagaaaaagaaagttttataaaatactgggggccaaagggaggggaaaactagtaaattatccagaataggtattggtactgatgtt

SEQ ID NO: 362751 - DNA, 201 bp, Homo sapiens
tttataattgtgtggttcaattgccaaattttaggacgtttcttagatatcttattgttttgatttctaatttaatttcattgtgatcataaaaattacartttgaatcctttcaaatttattacaacttgtttatagctccgcatatggtctttcttggtaaatacacttgataaggaagtgtattctgcagttgttggg

SEQ ID NO: 362752 - DNA, 201 bp, Homo sapiens
tgggtataacattctgtatatatcagttaggttaaggtggttaatggtgtttagatcatgtatatctttccagatttttttttggtataattgttttatgyattcctgaaacgaagtgtcaaaatatcccaagtatgattgtggaattgtctcttctctatttctgtcaattttttgcttcatgcattttgacgaagcttt

SEQ ID NO: 362753 - DNA, 201 bp, Homo sapiens
ttattgcactttgtgaggcttgtagacaagatttatttttgtgaaacttaattttgctctctcttttaatgtaatagatggactgtgtcaagcaactattrgaatttggttgattaaggggttcacattctttcagatcactaaatctaaagtgagctctggggagagcatagccaaactaggataaaatgggagctctag

SEQ ID NO: 362754 - DNA, 201 bp, Homo sapiens
gcactttgtgaggcttgtagacaagatttatttttgtgaaacttaattttgctctctcttttaatgtaatagatggactgtgtcaagcaactattggaatktggttgattaaggggttcacattctttcagatcactaaatctaaagtgagctctggggagagcatagccaaactaggataaaatgggagctctagttaca

SEQ ID NO: 362755 - DNA, 201 bp, Homo sapiens
taagcagtttaaaaaatacattttgaatggtctaaaagtttaaaataatatgaccacattttagtttaaaaacatttacacaaaaattctcagtaaatggrgttaaaatatgaaatttgaatgaaaatacagatatgtgccttttattcacatttttaacagtctgtataaatagtttaaacaagaattcttaaatttatg

SEQ ID NO: 362756 - DNA, 201 bp, Homo sapiens
tgatagttactccatagaatctgaaatctggggacaattgagggccgtggtggtaactcatgatagcaagcactttccctctttctcttctgtcctgaacmatgttggccacttgacctcaggcttatagtctcttgattgcaagatggctctcttagctttaggcttcacaaatacatttgaagacaggaataggtggtt

SEQ ID NO: 362757 - DNA, 201 bp, Homo sapiens
gggctctgttgagtttctgataaataggtctagagtggggcctaagaatttgcgtttttaacaagttcccaggtgatgctgatgctgctggtctgggggamtcacactttgataaccactgacatctgtgacccagtaaaacacttatggagacaattagggattaagaaattaactatactggcagagaacctagcataa

SEQ ID NO: 362758 - DNA, 201 bp, Homo sapiens
atagcacttttacagttggtactaagatcatatgtattttgggtatgggtcagaacttacctaatttagaagaaacaaattgacagtttatcttcatttagtgtgtgtgtgtgtgtgtgtgtgtgtgtgtaagggtacaggatagagggctgaggaatgttactttaactaataagtaatggaaaataagtcatggtcacc

SEQ ID NO: 362759 - DNA, 201 bp, Homo sapiens
tggttgaaatagggttttatggctacccttagctgcaaggacagctgggaaagacttgattaacatagatggattatgatctgttctctggggttagtagyaccgtgtttttctgttggtaaaatgtggggctgggattggaagactcttgggtgtttctgccttggatatcttatataagacttcaatcagcacctatgt

SEQ ID NO: 362760 - DNA, 201 bp, Homo sapiens
ttccgccttctctatgtcctcttatcaataaattcctacctattcaatgaaaacagaaaaggaaaatcctaagttaaataaactatttaaatatagtaatmtctcttgcaaccacctgttagggaaaaggaaaaatattagggtatatatataaatacccattaaaagattaatatcaattttatgtgtgatagtattata

SEQ ID NO: 362761 - DNA, 201 bp, Homo sapiens
cgtttggaataccttccgccttctctatgtcctcttatcaataaattcctacctattcaatgaaaacagaaaaggaaaatcctaagttaaataaactattyaaatatagtaatctctcttgcaaccacctgttagggaaaaggaaaaatattagggtatatatataaatacccattaaaagattaatatcaattttatgtg

SEQ ID NO: 362762 - DNA, 201 bp, Homo sapiens
aacccttactctatattatctacaaaaattaactcaaaacagatcaaagactctaaatttgagaaccaaaactgtaaaactcttagaagaaaacatagggraaaatcttcgtgacctttgatttgacactggattcttcaatatgacaccaaaggcacaggtaacaatacaaaaataaaagataaattggatttgattaaa

SEQ ID NO: 362763 - DNA, 201 bp, Homo sapiens
tggtacttttccttgccaagttcagtcagaactcttctcaacacaacagtatgctaggtaaccagttatttatgtatatctatctatatatatatagatakatatatttgctacaatttttgcttttagaaaaacatatatctggagcaataaaagtgaaaaaggtcaaacaaaaagaaacatacaaataattataacatc

SEQ ID NO: 362764 - DNA, 201 bp, Homo sapiens
tacttagtacctgttaaaattttttgttctttgctctttaatgtgcattaaaatcacctggaaggcttcgtaatacacaggtaactaggtccacactcacraagtttcagtagatctggagtttagcttaaaaatttgcatttctaacaagctcccatgtgttactgataatgctggtcctggactcatacctgagctccc

SEQ ID NO: 362765 - DNA, 201 bp, Homo sapiens
taaaatatccattcatttttccttagtagttattccagctaaatatatactgtaattatctacaactaaatcaattcataatctaagctctaaaatgtttycttatatgtgtgtattatggcaaaatgtctttaaaattaccttgcctttaaaaaaaacatccacacagtgtcattatctatatacttttattttagacca

SEQ ID NO: 362766 - DNA, 201 bp, Homo sapiens
gcttgatagaattcgtcagtgaaataatctgaactggagttttctttgtggagaggttttaactatacattcagtttctttaatagatacaggctgttaargtaatctagttcctgagttcacttgagtagttttttttttttaaacaaggaatgtaaattattgaattgttgacataaagttgctaataatagtttctta

SEQ ID NO: 362767 - DNA, 201 bp, Homo sapiens
atatcaaatgtgtagtttggtgttgattatggttatttatagtatctatgattttgcagtacccaaaaccagaagttgttataatatacatgttgttataygctaatatacataaagtaatatacgtaagtatactttgtgtacataatagatctcaataattaaaaacttttttttttaaaactgacatttgttttatat

SEQ ID NO: 362768 - DNA, 201 bp, Homo sapiens
actctgtcttattatggtagtgattcagatattggttccagattatatgcaatttgatcacccactccgacacttgctgttaattaagtctcagtttgggraagttactactttatagactatcatattacccaggttttataatggccagaaggatatagtaagtttgaacactaatagtttgcatctaaaattttgaat

SEQ ID NO: 362769 - DNA, 201 bp, Homo sapiens
gagggtggcgagggataaaacactacaaatatgaggcagtatgtactgcttaggttatgggtgcaccaaaatctctcaaatcactgctaaagaacttactyatgtaaccaaataccacctgtaccccagtaacttatggaaaaaaatgaatgacagcagagtcctcatcagaaccaatattcctcctgaacatagatagaa

SEQ ID NO: 362770 - DNA, 201 bp, Homo sapiens
gagcgagactccatctcaaacaaaaaaaataaataaaataaattttaatttgaacacaaccatgtccatttacttagatattatctgggactgcttttatrctgtaacagcagagttagtttgttgatctctggtctaaggataggggattttctagctagggtgagttaattggtggtagaagcagagcctcttgattga

SEQ ID NO: 362771 - DNA, 201 bp, Homo sapiens
ttttttgctattagtagtatagtttgaagttgggtaatgtgatgcctccagctttgttctttttgcttaggaatgtcctggctatccgagctcttttttgrttccatatgaattttaaaatagttttttctaattctgtgaagaatgtcagtgatttaatggaaatagcattgaatctataaattgttttgggcagtatgg

SEQ ID NO: 362772 - DNA, 201 bp, Homo sapiens
ccaatatgaatcgtgttacaaaattcttaattttatatttcatataaattaaagaggaaaaagaaaaggtttataatatattttaaaacaatgtgttactrtataatacaactataattgtagttaataactaaaacctcttgaaaatgtcaaagaaatacttgatttctgatgcaactttgactaaaatatttactttag

SEQ ID NO: 362773 - DNA, 201 bp, Homo sapiens
tagcacttttacagttggtactaagatcatatgtattttgggtatgggtcagaacttacctaatttagaagaaacaaattgacagtttatcttcatttagtgtgtgtgtgtgtgtgtgtgtgtgtgtgtaagggtacaggatagagggctgaggaatgttactttaactaataagtaatggaaaataagtcatggtcacca

SEQ ID NO: 362774 - DNA, 201 bp, Homo sapiens
gggtttcatatagacctactaaattggaatctgtttttaacaagagttcaagagagttttaagtagtcatgcccacatctgttgggaatgttacattatartatctatgcacttttgaaaacttaaaggttttagaagcatatgctgtactatataaatgaaaaacttcctgttctcttatcttttcctcttatttttttc

SEQ ID NO: 362775 - DNA, 201 bp, Homo sapiens
aggatttgcactacctgattttataaattacagtaaagctacaattcaggacagtatggttttagcataaggatgggcatagagatctgtggaaaagaatrgaaatagaagtgtacatacatggttaattgattttcaacaaagatgctgaggttcagtgattaaaaggatagcctttccaacaagtggtgctgggtcaac

SEQ ID NO: 362776 - DNA, 201 bp, Homo sapiens
ttttcccacttccctttactcagacatgaattattgtgaggtttgtttgtatttgacgtttgtcaacaacagactggtgtagatgcctttgctgcatttgttttttttttttttttttgggtacattctgtggtccaggctggagtgcagtggcacaattacagttcactatagtctcaaactcctatgctgaagtgatcc

SEQ ID NO: 362777 - DNA, 201 bp, Homo sapiens
aacagttataaacacagtttaaaaaataaagtcatttgcagtagtatcaaaaaataagaactatatgtgtataaatttgacaaaatatgtacagaacctgyacatggaaaactttatgttgtttttgagagaaatttaaaaggacttaatggagagaaatgccatgttgatgaatttgaatattcaatattgttgggatgt

SEQ ID NO: 362778 - DNA, 201 bp, Homo sapiens
gatactttcaaattggagctcatgcctaagattggaaagttggtaatgcagaagctaagtatcttctagaaatcagtagtacatggtaaacattaattgatttttttttttaagtgaaagcaagtttattagaggaggaaagaaacaaaggattataggcagagcagccaatttatttttaactgggcaaatgttttgttt

SEQ ID NO: 362779 - DNA, 201 bp, Homo sapiens
tgcccaagattaatgttgttttcatgcctgccaacatccattctgcagcccatgggtcaaggagtgattaagactctcaagtcttattatttaaagaatgmattttgtaaggctatagctgccatatatagtgattcctctgacagatctcagcaaagtaaatggaaaatcttctggaaaggagtcactattctagatgcc

SEQ ID NO: 362780 - DNA, 201 bp, Homo sapiens
tttattcctgttaaaacatggttgtaatgaagtctgcactggagttttattttcagattgggtattaggatttgtcattaaaaaaaaaatctccttcaaarggcattctttccaatgatctgtttttgaatttaatgtagtccagaaggaaggcatcattatatattagaaagaacattggactcagtgttaagagacagg

SEQ ID NO: 362781 - DNA, 201 bp, Homo sapiens
gagaaagtggtttcttgagatggaatctattcctggtgaagatgctatgaacattgtcaaaatgacaataaggatttagaatactacgtaaacttagttgrtgcagccagtgtcaggatatgagagtggcctccaagttggaaagaatttttactgtggacaaaatgctgtcaaacagcatcacatgctacagagagatct

SEQ ID NO: 362782 - DNA, 201 bp, Homo sapiens
aggctcttactactcctgtggcacaattttctttgatttaaggctataatttccttttttaaaaaaatttattttaattttttaacaaaacacacctctcrtgggaaggactataatttcctaaccttaatattgagagattccactgaaagtgttctctcctgttctccatatcttaagaacaacttttgggacaagtta

SEQ ID NO: 362783 - DNA, 201 bp, Homo sapiens
tttaggtcattggcattttttaagagttcagataagttattctatctctccccatttttgttttctttttctaagatgtatttaagataattaatttatgtttttttttttttttgagacggagtcttgctctgtcgcccaggctggagtgcagtggcgcgatctcggctcactgcaagctccgcctcctgggttcacgcc

SEQ ID NO: 362784 - DNA, 201 bp, Homo sapiens
tctaattaccctgctaacgtggtacaaaaggctcgcgccaaggctcgctcacgcccagagagtaaagccatgttgaaactatgattcctctagtgtttttycaactacctgccactcacccaccaactctcctcagacctcagttacagcctgacatctggaaaaaagagacaaatattttgaagcgttttggtaaggaat

SEQ ID NO: 362785 - DNA, 201 bp, Homo sapiens
gttctgttccattgatctatatctctgttttggtaccagtaccatgctgctttggttactgtagccttgtagtatagtttgaagtcaggtagcatgatgcygccagctttgttcttttggcttaggattgacttggcgatgcgggctcttttttggttccatatgaactttaaagtagttttttccaattctgtgaagaaa

SEQ ID NO: 362786 - DNA, 201 bp, Homo sapiens
ggcgatgcgggctcttttttggttccatatgaactttaaagtagttttttccaattctgtgaagaaagtcattggtagcttgatggggatggcattgaatstataaattaccttgggcagtatggccattttcacaatattgattcttcctacccatgagcatggaatgttcttccatttgtttgtatcctcttttattag

SEQ ID NO: 362787 - DNA, 201 bp, Homo sapiens
cagaagacacaacatgtgtgagagccctaaggaaaaaaagcttggcatcactaagaatctgagaaatgttaagtatggctgttgcagagggtgtgggtctrggtgatgagactagatgagaggtcaggtttggcctgcttacaagttttttggcctccttattgttgttacaaaagtttgaattagttgtcagcattcaca

SEQ ID NO: 362788 - DNA, 201 bp, Homo sapiens
caggaattagggagctgtggtgacagcagtagagaagtttcagtaacattaacaaacgagaggagagattgcagttgcatgagaaatgaagatgcagaaartagaaaaatattttccacagggtgtttgtgaaaaacaaatgaagtattgataatattttgaaaactataaagcattacgtatttgtgaatgttttcaata

SEQ ID NO: 362789 - DNA, 201 bp, Homo sapiens
gttaggcaaggtggtggtatataagatcaatatataaaaatgaattgcatttctgtaaaccagcagcaaacagaaacctatccaaaaaaaagttgccatayataatagcataactaattaactaaattatcccacagttattctaaacaaattatgtattaggtcttatgagtccataagtgctcattttattatatttca

SEQ ID NO: 362790 - DNA, 201 bp, Homo sapiens
attgtctctgttttccatacagagtcctgaggaaagagcctgtatttaacgatgagctcccagcaagcattctgtgtggcattgtgtccgtaaagcctaaygtgaaggaattcacagagacctcggccatttttgaggatgggaccatatttgagggcattgactgtgtaatctttgcaacagggtatagttttgcctacc

SEQ ID NO: 362791 - DNA, 201 bp, Homo sapiens
cttgggtcattttttccttccttatcaatttatatatggaccaataaaacaagagggaaatattacacttccaataattgtctctgttttccatacagagycctgaggaaagagcctgtatttaacgatgagctcccagcaagcattctgtgtggcattgtgtccgtaaagcctaacgtgaaggaattcacagagacctcg

SEQ ID NO: 362792 - DNA, 201 bp, Homo sapiens
ttgggattacaggtgtgtgccatcacgccccgctaatttttgtatttttagtagagatggggtttcgccatgttggccaggctggtctcgaactcctgacmtcaggtgatacacccgcctcggcctcccaaagtgctggaattataggcatgagccaccactcctggccagccatatcttatacacagtgatcttaaccaa

SEQ ID NO: 362793 - DNA, 201 bp, Homo sapiens
tttttgtatatggtgagagataggggtccactttcattctgcgtatggctatctaattttccaagcacaatgtactgaatagggtgtcctttccccagcayatgctattgtcaactttgctgaagatcagttggctatagggatgaggctttatttctgacttctctattctgttccactgatctatgtgtctatgtttat

SEQ ID NO: 362794 - DNA, 201 bp, Homo sapiens
aggtgtattcaatggaaagcgtgtcctggtggttggcctggggaattcgggctgtgatattgccacagaactcagccgcacagcagaacaggtactactcsccgggtactcgggtgactctcgttactgacagaagagttattatcgtttgaaaggtgtgatatgaaatgtgggggaggagggaagggtatctgatgtaaa

SEQ ID NO: 362795 - DNA, 201 bp, Homo sapiens
gaagactttaaaatttgaacctggcagcataggttgataaaactgaactgcaacatgtgctacccttcaagaaaaagaaaggatagcccagagggtagagmctcaggccctgagggcagaggcctgagccaaagccttcaagcctgaaggaatttgtcctactggatttcaaaattgcttgggattagtgattcttttctt

SEQ ID NO: 362796 - DNA, 201 bp, Homo sapiens
ctactgatagtgattcccgactgctgacttctagaactgtgaatcaattgctattattttaagccattaactttgtggtaatttattacagcagccacaakaaactaatacctttggtttttcagcgtttcctattttactactgtgagggggcttatagattgcaaatgatggagcaaacagcagtgtttctcagatcac

SEQ ID NO: 362797 - DNA, 201 bp, Homo sapiens
tacagagtcctgaggaaagagcctgtatttaacgatgagctcccagcaagcattctgtgtggcattgtgtccgtaaagcctaacgtgaaggaattcacagrgacctcggccatttttgaggatgggaccatatttgagggcattgactgtgtaatctttgcaacagggtatagttttgcctaccccttccttgatgagtct

SEQ ID NO: 362798 - DNA, 201 bp, Homo sapiens
aattttttaaaaattaggtcttaaaatgcttacatttacaaatctgatcaatagttgcaacctcttgttactgtttgcttttataaattgaccattagatrcttgtgctcatgagttgacacattgaaattatgcaaggttgaattttgaaaaatctctgtcaccatatttaatggttcaagggaatgaaaggattctagt

SEQ ID NO: 362799 - DNA, 201 bp, Homo sapiens
taccgaatttactgtggataaaggatgactcaaataagtatacacttggccatctgtttttgcaagttctgcatccacagattcaacccaccattgatttwaaaaatccaaaaataaaaataaaaaatcaaaatcaaaatcaaaaaacaatacactacaactattcattaagcatttacattgcattaggtattataagta

SEQ ID NO: 362800 - DNA, 201 bp, Homo sapiens
ggttaaattaaaatatacttctgttatatctaatatgcttggtgtgttaaaatagcacattattgtgactgcatctattcacaaggtcgcttctgttaaartctttgtttaaatatatgactcaaactgccatatatttctcacttttcactcaggactaaaccactttaaaggcaaatgcttccacagcagggactataa

SEQ ID NO: 362801 - DNA, 201 bp, Homo sapiens
cagcaagatccaggaatatatcattgcatttgccaaagaaaagaacctcctgaagtacatacaatttaaggtaagatgttatcaacaatttagctcttgtmataatgctgaagaagtctatgtctactactggattctcatttgttcctttcagtttccctttctaatttgtcaacatttttaacagtgtggcctctctaa

SEQ ID NO: 362802 - DNA, 201 bp, Homo sapiens
tttggtaaccacggaggtcctggaaccttccatagataccaagggatgactgtaattacttggaaccagccctgaccatgatcagtatactcatttaccamttcgcttccatttgatactatacattcacaggaccatgcagaggagggcagggctagcatttacaaatcagtcttttccaactcttccaaagagatgatg

SEQ ID NO: 362803 - DNA, 201 bp, Homo sapiens
ataaattgaccattagatgcttgtgctcatgagttgacacattgaaattatgcaaggttgaattttgaaaaatctctgtcaccatatttaatggttcaagrgaatgaaaggattctagttacataggcctaaaggacataatgaaatttaaaatttgtttcccttagaaaagattaagatatattttcttaaaagatatta

SEQ ID NO: 362804 - DNA, 201 bp, Homo sapiens
tttttagtagagatggggtttctccatgttggtcaggctggtctcaaactcccaacgtcaggtgatctacctgcctcaccctcccaaagcactgggattayaggcgtaagccaccatgcctggtcttagaaattttgtaattgcatatgttgctcatactatattggtactggtcagtgctgtgctaaatgatgaaaagtt

SEQ ID NO: 362805 - DNA, 201 bp, Homo sapiens
tctccatgttggtcaggctggtctcaaactcccaacgtcaggtgatctacctgcctcaccctcccaaagcactgggattacaggcgtaagccaccatgccyggtcttagaaattttgtaattgcatatgttgctcatactatattggtactggtcagtgctgtgctaaatgatgaaaagttagaagcattcactttaaagt

SEQ ID NO: 362806 - DNA, 201 bp, Homo sapiens
tccttgcaagtcagaagtaaattagacaatgggctttgaaattctccattacagttctcccttgatagatcattaataagagccacttggacataaaattrgtggtaaatattagttaggtttatgtagttataattatttactcatttaaaacacaataacttttcacatctttttttttttttacagatttagggggta

SEQ ID NO: 362807 - DNA, 201 bp, Homo sapiens
gtgggatgttaccactgaaagggatggtaaaaaagaatcggctgtctttgatgctgtaatggtttgttccggacatcatgtgtatcccaacctaccaaaaragtcctttccaggtaaggccaaaatttaagctgctagccacataactgacaaaaatgaatatcttgataatgtcttcttttttctaaaagtataagcagg

SEQ ID NO: 362808 - DNA, 201 bp, Homo sapiens
ataaacatcctgattttgcaactactggccagtgggatgttaccactgaaagggatggtaaaaaagaatcggctgtctttgatgctgtaatggtttgttcyggacatcatgtgtatcccaacctaccaaaagagtcctttccaggtaaggccaaaatttaagctgctagccacataactgacaaaaatgaatatcttgata

SEQ ID NO: 362809 - DNA, 201 bp, Homo sapiens
tgttttttaaggtcatgatcagttccagaagtggctcctgggtgatgagccgggtctgggacaatggttatccttgggacatgctgctcgtcactcgattyggaaccttcctcaagaacaatttaccgacagccatctctgactggttgtacgtgaagcagatgaatgcaagattcaagcatgaaaactatggcttgatgc

SEQ ID NO: 362810 - DNA, 201 bp, Homo sapiens
ggtctgggacaatggttatccttgggacatgctgctcgtcactcgatttggaaccttcctcaagaacaatttaccgacagccatctctgactggttgtacrtgaagcagatgaatgcaagattcaagcatgaaaactatggcttgatgcctttaaatgggtaatgcagagctaaacgtgatatgcctgctggcttttagtt

SEQ ID NO: 362811 - DNA, 201 bp, Homo sapiens
gtgcttatttttttttcagaagaaaactttctctttagaaattagagagaaatgaaaatgtagttagatcactaaaaggaatttgttttctagagacaagrtcttactctgtcacccaggctggagtgcagtggtacaatcacggctcactgcagcctggaactcctgaactcaagtgatcctaccgcctcagcctcctga

SEQ ID NO: 362812 - DNA, 201 bp, Homo sapiens
aataagtagcaactttaaaaatgtaaacaccgaggtaccctcacttcagagtttttcctgaaacaggctttaacagggaactgggcataagcctttattcygggatttggaaagagctccatggaagagaaggatcacagaaaatagagatggggccagcaaataacaacttctcttacttcccaatgttgcctcccatca

SEQ ID NO: 362813 - DNA, 201 bp, Homo sapiens
agtcccttggggctgccattcccacagttgacctccagtcccgctgggcagcacaagtaataaagggtaagtcaataaagaggctcatggattgcgaagaygaatgccagtgacaataactttggatctttgtgaaaacaataatcctagttacaaggtccccttcagttttgaaaatttataattctatattctttagtg

SEQ ID NO: 362814 - DNA, 201 bp, Homo sapiens
tttataattctatattctttagtgctatattttgttagcaatttaaagtataccagtttggattattgtatgaaatactacaagatattattagaggaggyattttgtgactacaacttcttacagctgataattacccaagatcatttattagacttgagaccaccaaagctcacatccacttaagactaagtgaatgac

SEQ ID NO: 362815 - DNA, 201 bp, Homo sapiens
ttcctcctcctatttggtcttctccacagtatgatgaccatcttggagtatactgaattaagaataacagttaacattttcgagctccatgcatatgctaragactgtgcaaaactctttatatcatttagggaacttctgaggtagtacaaacattactgacattccagatgagaaatatgagacaccaagaatttaaaa

SEQ ID NO: 362816 - DNA, 201 bp, Homo sapiens
aaaggttaagtgatttgcccaaggccacagagctatagaagtgatttggaatctctcatactcacacttcagagatgaagattactgtcttcaaaaggcawgaagggtaattcctcaaaattagacatataccagtttacactaagtatcacttgcttaatgaaggagttaactagacaaaatgagtgagatgttataatt

SEQ ID NO: 362817 - DNA, 201 bp, Homo sapiens
catacctcaaccgcctcccactctcctacccttccaagtctccaatgtctattattcccacattctatgtcaatgtgtatacattatgtagctcccaatcrtaagtgagagaatatgtggtatttcactttctgtttctgagttatttcacttaagataatggcctccagtcccatccatgttgctgcagaagacataatt

SEQ ID NO: 362818 - DNA, 201 bp, Homo sapiens
aatcttcctaatatgtaggctcactagaacattttctctttcaaactgcccagacggttggacaggacgtagacacacagaagaaaagaagacaaagaacrggtaggaaaattaaaaaggtaggaggctgaggcgggtggatcacctgaggtcaggagcttgagaccagcctgaccaacatggtgaaaccaaatctctacc

SEQ ID NO: 362819 - DNA, 201 bp, Homo sapiens
ttctcccttgatagatcattaataagagccacttggacataaaattagtggtaaatattagttaggtttatgtagttataattatttactcatttaaaacmcaataacttttcacatctttttttttttttacagatttagggggtacaagtgcagttttattacatggatataatgtatagcagttaagtctgggctttt

SEQ ID NO: 362820 - DNA, 201 bp, Homo sapiens
acttgaatgacaggataaaatagatttctgtgtaaataaaggtaaatcattatttcagcttcttgggtttaggaaatttatgatgaactcatagttttcasagatttctatttgtatatgtgattatttgcatatgtgataaattaaagggaagatcaatttcagaggctatttaattaattgatcctttagtctcttctt

SEQ ID NO: 362821 - DNA, 201 bp, Homo sapiens
ctagggaaaacgtgactagaattcagttattagtcacctgtagcagagattgattaaaatatgaaaatttgcctgcagcactgtgacagggtggctgaccmtaagatgtagatgtaaagttcagacgtttatttgggaacactctcaggatcaatacttccacaggaagggaaggaagcttccatttactttgaagctggg

SEQ ID NO: 362822 - DNA, 201 bp, Homo sapiens
ccctccctataagaagtgtagaaatgggaaattaagcaagccattgtaggtcttgagtaatcatatctgggctaagagttttattctctttcaagttgatwccaagattaccaaagaaatcatcctaaatttgaagtatttctggacacaaaaggctgttttggtctgggttttagagaactctgcaaacttatgtaaacc

SEQ ID NO: 362823 - DNA, 201 bp, Homo sapiens
cttttaagcattttatacatgtcagagatttagcaagactctgctaaggctctggcatatattatttcattttatccttacaattatgaagagagctctaytagtatctccattttagagatgagataactgcgtttcagtgtagttaataactttactaaggtcccacagccaggaagtagaagcagcgttcaaaacaaa

SEQ ID NO: 362824 - DNA, 201 bp, Homo sapiens
caatttatatatggaccaataaaacaagagggaaatattacacttccaataattgtctctgttttccatacagagtcctgaggaaagagcctgtatttaaygatgagctcccagcaagcattctgtgtggcattgtgtccgtaaagcctaacgtgaaggaattcacagagacctcggccatttttgaggatgggaccatat

SEQ ID NO: 362825 - DNA, 201 bp, Homo sapiens
tcagtgtagtagatgatcagtctgtaatacataagaatactgagttcttatattttacaaaggaaacaacaaacttgattggggtcaggcaagaaaggcargcagcatcccccagcagcaggctggaatacagttgtggggagatgcagatcacacgaccaggtagccaggaaggtaatggcatgaaatttcactcaggat

SEQ ID NO: 362826 - DNA, 201 bp, Homo sapiens
gggtcaggcaagaaaggcaggcagcatcccccagcagcaggctggaatacagttgtggggagatgcagatcacacgaccaggtagccaggaaggtaatggmatgaaatttcactcaggattccacttagggttcagacccagagaggctggcattaaaggaagggtgctacccttactctctatgaggacaagagttgtaa

SEQ ID NO: 362827 - DNA, 201 bp, Homo sapiens
cctccctataagaagtgtagaaatgggaaattaagcaagccattgtaggtcttgagtaatcatatctgggctaagagttttattctctttcaagttgatamcaagattaccaaagaaatcatcctaaatttgaagtatttctggacacaaaaggctgttttggtctgggttttagagaactctgcaaacttatgtaaacct

SEQ ID NO: 362828 - DNA, 201 bp, Homo sapiens
tatgcttggtgtgttaaaatagcacattattgtgactgcatctattcacaaggtcgcttctgttaaagtctttgtttaaatatatgactcaaactgccatrtatttctcacttttcactcaggactaaaccactttaaaggcaaatgcttccacagcagggactataaagaaccaggtgtattcaatggaaagcgtgtcct

SEQ ID NO: 362829 - DNA, 201 bp, Homo sapiens
tattcatccattcaacaaatattaattgaagacctacgttgcttctgacattgtattaagttctttttagtacaaggcacagagtaaataataggattgakaatctacattacatagacagttttagccctccatgcctcctgtaatatatatcatagaaaggagacccagaaaggatttgaaatcagaggagtttgggaa

SEQ ID NO: 362830 - DNA, 201 bp, Homo sapiens; identical to SEQ ID NO: 78450

SEQ ID NO: 362831 - DNA, 201 bp, Homo sapiens
aggaaaattaaaaaggtaggaggctgaggcgggtggatcacctgaggtcaggagcttgagaccagcctgaccaacatggtgaaaccaaatctctaccaaaratacaaaaattagccaggcgtagtggtgcatgcctgtaatcccagctacttgggaggctgaggcaggagaatcacttgaatctgggaggcagaggttgca

SEQ ID NO: 362832 - DNA, 201 bp, Homo sapiens
ggtgcaggaattttttttatataatgacttcttttcctttggatagatatctactaggggcattgttgggtcaaatggtagttctatttttaattctttgygaaatctccatactgttttctatagtttatattccaaccaacagtgtttccttttctccacatactcactaatatctttttttttttttttttttttttt

SEQ ID NO: 362833 - DNA, 201 bp, Homo sapiens
tagacaaaatggatacagatgaattaaaaaatataacaagaatactataaaagtgtttgccaagtaatattttaagttggttaaattttctcaattttttaaaaaaatcttatcaaaactcactcaataataagtagaaagcctgaattgtcatttgatgatttatagttcttttgacctagaaattaaaaatcttcccat

SEQ ID NO: 362834 - DNA, 201 bp, Homo sapiens
ctttgagaagagcaatgacattgggggcctgtggaaattttcagtgagtagcatgttgttgtaatagacaggaaaataggttgggaagtgtataagagcaygctgtgtgcacacaggtttccaaacctgctaccatggcagttatcatatctgttagaattggaatccactaagtacagtgtcaagagcaggttggaaagt

SEQ ID NO: 362835 - DNA, 201 bp, Homo sapiens
tttgagaagagcaatgacattgggggcctgtggaaattttcagtgagtagcatgttgttgtaatagacaggaaaataggttgggaagtgtataagagcacrctgtgtgcacacaggtttccaaacctgctaccatggcagttatcatatctgttagaattggaatccactaagtacagtgtcaagagcaggttggaaagta

SEQ ID NO: 362836 - DNA, 201 bp, Homo sapiens
aaccaacagtgtttccttttctccacatactcactaatatctttttttttttttttttttttttttgagtgggagtctcactctgtctcccaggctggagkgcagtggcgccatctcagttcactgcagcctccacctcctgggttcaaacgattctcctacctcagcctcccgagtagctggggttacaggtgcccacac

SEQ ID NO: 362837 - DNA, 201 bp, Homo sapiens
gatgttaagcattttcccatatgtttattggccattggtatgtctttttttgaaaaatgcttatttatctcctttttcccctttgtaatggtgttatctgkgcttctttaaaattgagttgcttgagttccttataaattctgatatttgtcttttgttgaatgcatagcttgcaaatattgtctcccattctgaaggtag

SEQ ID NO: 362838 - DNA, 201 bp, Homo sapiens
cgcctcagcctcctgagtagctgggagtacaggcatgtgccaccacacccagctgattttgtttgttttttgttttgttttgtggagacagggtctcactytgttgtccaggctgctttcaaactcctgggctcaagtgatcctcccacctcagcctcccaaagtgctgggattacaggcgtgagctaccatactcagcca

SEQ ID NO: 362839 - DNA, 201 bp, Homo sapiens
gtgtaaaagtgttcctatttctccacatcctctccagcacctgttgtttcctgactttttaatgactgccattctaactggtgtgagatgatatctcattktggttttgatttgcatttctctgatggccagtgatggtgagcattttttcatgtgttttttggctgcataaatgtcttcttttgagaactgtctgctcat

SEQ ID NO: 362840 - DNA, 201 bp, Homo sapiens
ttttgctgtgcagaagctctttagtttaattagatcccatttgtcaattttggcttttgttgccattgcttttggtattttagacatgaagtccttgcccrtgcctatgtcctgaatggtaatgcctaggttttcttctaggttttttatggttttaggtctaacatttaagtctttaatccatttgaattaatttttgta

SEQ ID NO: 362841 - DNA, 201 bp, Homo sapiens
attattttgagatatatcttctctagttcttttaattgtgatgttagggtgtcaattttagatctttcctgctttctcttgtgggcatttagtgctatcartttccctctacacactgctttaaatgtgtcccagagattctggtatgctgtgtctttgttctcgttggtttcaaagaacatctttatttccgccttcatt

SEQ ID NO: 362842 - DNA, 201 bp, Homo sapiens; identical to SEQ ID NO: 78449

SEQ ID NO: 362843 - DNA, 201 bp, Homo sapiens
attttggagagctgatgactaaaaacaaagtgcttatttttttttcagaagaaaactttctctttagaaattagagagaaatgaaaatgtagttagatcaytaaaaggaatttgttttctagagacaaggtcttactctgtcacccaggctggagtgcagtggtacaatcacggctcactgcagcctggaactcctgaact

SEQ ID NO: 362844 - DNA, 201 bp, Homo sapiens
tttgagatatatcttctctagttcttttaattgtgatgttagggtgtcaattttagatctttcctgctttctcttgtgggcatttagtgctatcaatttcyctctacacactgctttaaatgtgtcccagagattctggtatgctgtgtctttgttctcgttggtttcaaagaacatctttatttccgccttcatttcatt

SEQ ID NO: 362845 - DNA, 201 bp, Homo sapiens
cattatcttaatctttatcttaatttatcttaaatctgcactgttcaatatagtagccactagtcacaaaactgagatgtgctataagtataaaatatacaaaaactttccaactcttattataaaaaaggaaagtaaaataccttattaataaattttaattacattttgaaatgttaacatatcagacagattgagtta

SEQ ID NO: 362846 - DNA, 201 bp, Homo sapiens
attatcttaatctttatcttaatttatcttaaatctgcactgttcaatatagtagccactagtcacaaaactgagatgtgctataagtataaaatatacaaaaactttccaactcttattataaaaaaggaaagtaaaataccttattaataaattttaattacattttgaaatgttaacatatcagacagattgagttaa

SEQ ID NO: 362847 - DNA, 201 bp, Homo sapiens
tttttttcagtttttaatgtgactattagaattttttttttttgttttgacacggagtttccctcttgctgcccaggctggagtgcaatggtgtgatctcrgctcaccataacctccacctcctaggttcaagtgattctcctgcctcagcctcccaagtagctaggattacaggcatgcaccaccatgcccaactaattt

SEQ ID NO: 362848 - DNA, 201 bp, Homo sapiens; identical to SEQ ID NO: 78434

SEQ ID NO: 362849 - DNA, 201 bp, Homo sapiens
ttggtgagggaacaggtgcagagtttataccagataccaatattaccaaaggaaaactaattccaggccctgcagctgacaattgttcacctttcgccttrgtttggattggcttagtgatcaggaacagcaaactcagcagactgaaatttctctgtgtttaggtgaaaatgtgcttctgtgtgaaggcacaactggcaa

SEQ ID NO: 362850 - DNA, 201 bp, Homo sapiens
ctgttttccatacagagtcctgaggaaagagcctgtatttaacgatgagctcccagcaagcattctgtgtggcattgtgtccgtaaagcctaacgtgaagkaattcacagagacctcggccatttttgaggatgggaccatatttgagggcattgactgtgtaatctttgcaacagggtatagttttgcctaccccttcct

SEQ ID NO: 362851 - DNA, 201 bp, Homo sapiens
tcagtatactcatttaccaattcgcttccatttgatactatacattcacaggaccatgcagaggagggcagggctagcatttacaaatcagtcttttccarctcttccaaagagatgatgtgtttcccagacttcccatttcccgatgacttccccaactttatgcacaacagcaagatccaggaatatatcattgcattt

SEQ ID NO: 362852 - DNA, 201 bp, Homo sapiens; identical to SEQ ID NO: 78439

SEQ ID NO: 362853 - DNA, 201 bp, Homo sapiens
gagggcagggctagcatttacaaatcagtcttttccaactcttccaaagagatgatgtgtttcccagacttcccatttcccgatgacttccccaactttaygcacaacagcaagatccaggaatatatcattgcatttgccaaagaaaagaacctcctgaagtacatacaatttaaggtaagatgttatcaacaatttagc

SEQ ID NO: 362854 - DNA, 201 bp, Homo sapiens; identical to SEQ ID NO: 78441

SEQ ID NO: 362855 - DNA, 201 bp, Homo sapiens
ctgtttctacacagagtttgggtatccacagtggtgttttctctcccatctccaggtttggcaaaagcgagaccatacagacagattacattgtttatatrgatgaactctcctccttcattggggcaaagcccaacatcccatggctgtttctcacagatcccaaattggccatggaagtttattttggcccttgtagtc

SEQ ID NO: 362856 - DNA, 201 bp, Homo sapiens
ctttcctgctttctcttgtgggcatttagtgctatcaatttccctctacacactgctttaaatgtgtcccagagattctggtatgctgtgtctttgttctsgttggtttcaaagaacatctttatttccgccttcatttcattatgtacccagtagtcattcaggagaaggttgttcagtttccacgtagttgagcggttt

SEQ ID NO: 362857 - DNA, 201 bp, Homo sapiens
tttcctgctttctcttgtgggcatttagtgctatcaatttccctctacacactgctttaaatgtgtcccagagattctggtatgctgtgtctttgttctcrttggtttcaaagaacatctttatttccgccttcatttcattatgtacccagtagtcattcaggagaaggttgttcagtttccacgtagttgagcggtttt

SEQ ID NO: 362858 - DNA, 201 bp, Homo sapiens
ccaattcgcttccatttgatactatacattcacaggaccatgcagaggagggcagggctagcatttacaaatcagtcttttccaactcttccaaagagatbatgtgtttcccagacttcccatttcccgatgacttccccaactttatgcacaacagcaagatccaggaatatatcattgcatttgccaaagaaaagaacc

SEQ ID NO: 362859 - DNA, 201 bp, Homo sapiens
gttaataactttactaaggtcccacagccaggaagtagaagcagcgttcaaaacaaacccagatctgctgattctagagcctctcagtcttggccacttgmtctactacctgtcacttaatggcaaagttaagcacatcaggagaacgtttcatgtcctacctttccctcttcgtttcatcacccaccccttaatggaccc

SEQ ID NO: 362860 - DNA, 201 bp, Homo sapiens; identical to SEQ ID NO: 78452

SEQ ID NO: 362861 - DNA, 201 bp, Homo sapiens
agccatggtgctttctagaggaaatcagggaatcacatggtgcttcatggttctatatttctatcagtcgtgcatcattaattagttagccagcctggggyttctctttttactttttcaatgatttctctgtccggatgggttcatcatttctgcatactctgtagtgtcttctaaatgtcagtcatttgcacatgccat

SEQ ID NO: 362862 - DNA, 201 bp, Homo sapiens
acatggtgcttcatggttctatatttctatcagtcgtgcatcattaattagttagccagcctggggtttctctttttactttttcaatgatttctctgtcyggatgggttcatcatttctgcatactctgtagtgtcttctaaatgtcagtcatttgcacatgccatgtagcaaattcttactcttttacagtctcatgat

SEQ ID NO: 362863 - DNA, 201 bp, Homo sapiens
taggtcactggaactgcccaaaatacattaaaccataggcttctatacagggaacatttttttaaactttttattgacatagtacacatttagattaagtstacaaatcctaaatgtataccttgattaatttttaataaagtgaaccaacatcacatagggaatcttaaaatataaatttattgatattttcttttttca

SEQ ID NO: 362864 - DNA, 201 bp, Homo sapiens
cctggtggcaaaaggatataaggtcagctttggctttaacttgtggggaaaggaaattgggattctcctccagagagtgcaaacgtgttttgtaaggtggwaggtaggcttcaattggtttagaattttgcattttacagaactgaaagtgtttcataattattagtattatgtatttatgagtttttaacatattgttag

SEQ ID NO: 362865 - DNA, 201 bp, Homo sapiens
ggatataaggtcagctttggctttaacttgtggggaaaggaaattgggattctcctccagagagtgcaaacgtgttttgtaaggtggtaggtaggcttcarttggtttagaattttgcattttacagaactgaaagtgtttcataattattagtattatgtatttatgagtttttaacatattgttagatatttagggtaa

SEQ ID NO: 362866 - DNA, 201 bp, Homo sapiens
gagagtgcaaacgtgttttgtaaggtggtaggtaggcttcaattggtttagaattttgcattttacagaactgaaagtgtttcataattattagtattatrtatttatgagtttttaacatattgttagatatttagggtaaatttttaaactctatgatagtgtttcttagcaaattatccacccttgtcaactccttta

SEQ ID NO: 362867 - DNA, 201 bp, Homo sapiens
tcttagcaaattatccacccttgtcaactcctttaaaccctacatctgaacgttgtggactgattattttaaccatttcagaattgacgtttaaacatttygaaatgagtttttacaagtcattttttatcctttgatagcaatatttcttatttttgttgaaggtgggagttgtgaagcaaactgaaactgcagcattaa

SEQ ID NO: 362868 - DNA, 201 bp, Homo sapiens
tggttcgcttggcatacctgggtttcctcttcttcagtaaagtcatttttgatattggaagtcttgcgaatcttctcaggacttttctccttgattgtatkggcaacagtcttgtgtgtaacatcaagcaaacctttgatgtctaagtagtttgcaggcagaagtagtacaaaaagtattccttgatcgactttcaggaat

SEQ ID NO: 362869 - DNA, 201 bp, Homo sapiens
tcatccaagtgatgaagtgggttgatatttgggcctccatggggtctggtgtactccactaagccctttggaagtaagatactggttatctgtctttatgmtctttatatcttaggaaagataaggcatgcaactatgatccaaataaatcagaagaatgaatactgggcagaagatttttgcaaagggcagaagtactgt

SEQ ID NO: 362870 - DNA, 201 bp, Homo sapiens
tctggcctcacaatctaatcacctcccaccaggtctccccctcagcattggggattacaattcaacatgaggtttgggtggggacacagccaaaccatatyaatactctatgctatggagagatccagatggtcttggtccatgtgccctgagattttaaggttgaagatagacacaatggcagacatatgtgtggacaat

SEQ ID NO: 362871 - DNA, 201 bp, Homo sapiens
cgtccctatttgtgcaggcgaggccccgcccccccgccccggcgcacgcagggtcgcggcgtgctcgcgcccgcagacgcctgggaactgcggccgcgggytcgcgctcctcgccgggccctgccgccgggctgccatccttgccctgccatgtctcgccggaagcctgcgtcgggcggcctcgctgcctccagctcagcc

SEQ ID NO: 362872 - DNA, 201 bp, Homo sapiens
aaggtaaaaggaattctttttggggtgtttaatctgaaattataaaattttgaaattaaaggcattttaaaaccaaggttaccattgtttttaagaacacrgttttaaattggagaacattttattttagaactgagcaatagactggctctctagtattacaaggatttttttcctcattctcgtgaatgagcctgcctg

SEQ ID NO: 362873 - DNA, 201 bp, Homo sapiens
attttgacataatgtgtgaatgattgttactttattacatatataatatatataatacatatatacaaaaaatataatacaaatatatatatatatatatatattttttttttcttttttttaagacagagtctcttttcgtcagccaggctggagtgtagtggcgcaatcccggtctactgcaacctccgcctcccgggt

SEQ ID NO: 362874 - DNA, 201 bp, Homo sapiens
ttttgacataatgtgtgaatgattgttactttattacatatataatatatataatacatatatacaaaaaatataatacaaatatatatatatatatatatattttttttttcttttttttaagacagagtctcttttcgtcagccaggctggagtgtagtggcgcaatcccggtctactgcaacctccgcctcccgggtt

SEQ ID NO: 362875 - DNA, 201 bp, Homo sapiens
tctaggttggagaggtttgttgtttttttttttttttcctctcaaaactttagatattttactccactcttttcttgcttttgtggtttctgagaagtcaratgtaatttttatctttgagcttgtgtggataaggtgtttcttccctctggcttacttcagtattttttttttctttatctttggttttctgtagtttga

SEQ ID NO: 362876 - DNA, 201 bp, Homo sapiens
gtaaaagcttttattcttcaaagaacaccatcaagaaagtgaaaagacaatccactgaatagaagaatttttgtaaatcatatatccagtaagggacttgyatctagaatatatatatatatataaactcttacaagtcaatggtaaaaagataactcagaaaatggacaaatgatccatacaggtttttctccaaaggat

SEQ ID NO: 362877 - DNA, 201 bp, Homo sapiens
aaacttcttatgataacagaatgataacatgtggtgattacctttacttactagtgaaagaaatagcttaatatataagctactctcatgacatctaatgkctagcagccagggatgctgctaaacatcctaaaatgcacaggatatttccctaaaaaacacattatttggctccaaatttcaacactccaaaaccaaaca

SEQ ID NO: 362878 - DNA, 201 bp, Homo sapiens
ttttaggagatattgtccaaattattattttggtaaccattaagttttacttaaaatttgtgtttaataatgctaacaagttaatggttctgtttattacrttttttaatttgattaatttaaaagaatttttataacaagttaatatattctgttttctaggttctcaaattatttctggcattgttaacttagagaagc

SEQ ID NO: 362879 - DNA, 201 bp, Homo sapiens
ttgatagcatatagggtttaatcatgattgttacctatgtttatttaatatgcatggggctcttacattatctgtacaaggggtcttcagaaagttcatgkaaaatgcatattatgaaaaaactttgcatagatttcaaaaaattttggcaccaaaataaactcatactaacttgttagagcatgtctcaataggatgtag

SEQ ID NO: 362880 - DNA, 201 bp, Homo sapiens
tgggagagaatacaagattcatgtatttaattttcataataaaaacactgctcatatggcactcttaatcttcagtgcacattaaattttttttttccatggagctttaaaaaaaatactgatgcctgaaccctacctccagaaatctttttttgttttgttttgttttgttttgtttttattgatcattcttgggtgttt

SEQ ID NO: 362881 - DNA, 201 bp, Homo sapiens
ggtacacacatccttgacatgcagtttggagtatttctagacaaaggggatgggcattttacattttgaaaaaacaacctgttcttcaaaaaaggttcatyccaccatcagaaaaatgccctttttttccatgccctgggtattagtaatgatttacatttttccaaaggtcaattttaggagatattgtccaaattatta

SEQ ID NO: 362882 - DNA, 201 bp, Homo sapiens
gctttaaaaaaaatactgatgcctgaaccctacctccagaaatctttttttgttttgttttgttttgttttgtttttattgatcattcttgggtgtttctygcagagggggatttggcagggtcataggacaatagtggagggaaggtcagcagataaacaagtgaacaaaggtctctggttttcctaggcagaggaccct

SEQ ID NO: 362883 - DNA, 201 bp, Homo sapiens
tttagttttagaaagcctcaaatagctttatcttcatatttgctttgaaagtttagatgaatataaatatccagattttaaatttaaagaaattgctcccrttatcttccagtattacattcaatgtagataaagtcagtaagagtctgattctcatcccttgcttaatgatgaattttttctttctctgaggcatttaga

SEQ ID NO: 362884 - DNA, 201 bp, Homo sapiens
tctaggcatcagtgtcttgttagcatgtctctttaatttcatgatgccttggtcaaataaagtgtctgagcgtgtatcccacttctttttatttttttctrtaaggtctcactctgtcacccaggccggagtacagtggtgcaatcttagcccactgcaacctctgtctcttggactcaagcagtcctcccacgtcagcct

SEQ ID NO: 362885 - DNA, 201 bp, Homo sapiens
agctgttagtaaaagtgaaggtggagaggaaaaactaggctattggaacagcttcgaccaaagagtgtaaattagtgaaactagtttgcaagaatactagrgacaggggtcaggcacggtggctcacgcctattatctcagcactttgggaggctgaggcaggaggatcacttgagctcacaagttcgagaccagcctagg

SEQ ID NO: 362886 - DNA, 201 bp, Homo sapiens
gatttggcagggtcataggacaatagtggagggaaggtcagcagataaacaagtgaacaaaggtctctggttttcctaggcagaggaccctgcggccttcsgcagtgtttgtgtccctgggtacttgagattagggagtggtaatgactcttaatgagcatgctgccttcaagcatctgtttaacaaagcacatcttgcac

SEQ ID NO: 362887 - DNA, 201 bp, Homo sapiens
aagagctcactgttgttgtgctcatcagaaacactattgtactgcagtcccagctactggttagactgaggtaggggaggatcgcctgagcccaggagttmgaggcagcaatgagctattatcatgccattgcagtccagccggggcaacaaagcgagatcctgtctgttaaaaaacaaaaagaaccattgcagcctcttt

SEQ ID NO: 362888 - DNA, 201 bp, Homo sapiens
ggatgataaggcttccagtccacagaaagagaggggtgaagatgattccagtataatggaaccatgagaacacacagaggaataaaggtgtgtcacatcasctctttgaatatgccacaaaaaaaaaaaaaaaaaaaaggctctgaattagttttccctcagtatctgctggggactggtttcaggaccccccagtatgaa

SEQ ID NO: 362889 - DNA, 201 bp, Homo sapiens
gaacaaaggtctctggttttcctaggcagaggaccctgcggccttccgcagtgtttgtgtccctgggtacttgagattagggagtggtaatgactcttaaygagcatgctgccttcaagcatctgtttaacaaagcacatcttgcaccgcccttaatccatttaaccctgagtggacacagcacatgtttcagagagcaca

SEQ ID NO: 362890 - DNA, 201 bp, Homo sapiens
ttgatcttatagttcaaatttaacttttatactcaaggttttattctggacatatgttcttaaaatctatgtttaaagttttgttttctgtcgtacaaacagagtactgaaatttttcatgctatcttagagttttttttttaaggctatttccatgcctagtaaattgaaacatatttcttttttgcagaccaactgtac

SEQ ID NO: 362891 - DNA, 201 bp, Homo sapiens
attactattccctcatttttcttgatatgatgccaattttttgcaaatataaacagtcatatttgtgacttgtctcatactcaactcctagtgcacacaagggagtttttctcaatctaggagtggagttgttggattgtaaggaacatgtgtctttcatgatctccaaggaggctgtaccagcttagaatcccaccacca

SEQ ID NO: 362892 - DNA, 201 bp, Homo sapiens
tgatcttatagttcaaatttaacttttatactcaaggttttattctggacatatgttcttaaaatctatgtttaaagttttgttttctgtcgtacaaacagagtactgaaatttttcatgctatcttagagttttttttttaaggctatttccatgcctagtaaattgaaacatatttcttttttgcagaccaactgtaca

SEQ ID NO: 362893 - DNA, 201 bp, Homo sapiens
gttttactcttgttgcccaggctggagtgcagtggcataatcttggctcactgcaacctctacctcctgggttcaagcgattctcctgcctcagcctcccragtagttgggattacaggcatgtgccaccacgcccagctaatttttgtatttttagtagagacggagtttcaccacgttggtcaagctggtctcgaactc

SEQ ID NO: 362894 - DNA, 201 bp, Homo sapiens
tccattgccacatcatcagatgttgaaggcacaggcatggatttctttcattctaataccatctttttttttttaatgctaccagaagctgtactttagatttgagtattgttgattctaggggatgttttctctttttgcaggcattctttcctttatctgtttttgtcctgtaccacagctaatgaatgaaatatgcat

SEQ ID NO: 362895 - DNA, 201 bp, Homo sapiens
agtttcaccacgttggtcaagctggtctcgaactcctaacctcaggtaatccacctgcctcggcctccagaagtgctaggattacaggtgtgagccaccgsgcccgcctccagaatcttttatctgaatactataacctcacacgaatcttttcctgaataagaagcagatttttttaaaaagtagagttttggcaaacac

SEQ ID NO: 362896 - DNA, 201 bp, Homo sapiens
cactgactgtggagtatttgtactctatacaaaatatattctttatggacagaaagaaaacatcttgaatcagtccacaccttctaattagttgtaaataccagtactaaaatccacatgataagtgagcactaaatgagtaagttgttatgattttattggcattaaaaatgtcatcttatcaatatctctgtgctttct

SEQ ID NO: 362897 - DNA, 201 bp, Homo sapiens
tattctttatggacagaaagaaaacatcttgaatcagtccacaccttctaattagttgtaaataccagtactaaaatccacatgataagtgagcactaaatgagtaagttgttatgattttattggcattaaaaatgtcatcttatcaatatctctgtgctttctttaactgtgtctagcaaacactagttatcttatttc

SEQ ID NO: 362898 - DNA, 201 bp, Homo sapiens
gttacagagttttatgcaaaagatacagttgacatcaaaggtaaatattttccctgtatgtcctcaagttgaactgatttgaaatttggataaaggtattmgtatgattctcaatttaatgatgactaggtagttattataaatatgtgggagaagaagagctcactgttgttgtgctcatcagaaacactattgtactgc

SEQ ID NO: 362899 - DNA, 201 bp, Homo sapiens
aattatgatataaagccaggtataagatgttattcagttgttttctagtaatcaagctagaataaataaactatacatttcttaaaggaaattaacaggaratacgtttatcaataaacagttcccacaattataaatgcatacttccccagtagccttgatgactggttcatgagccagtatttcttcagtgtgtattca

SEQ ID NO: 362900 - DNA, 201 bp, Homo sapiens
aaaaagtactcattttaatattttatgaaatagagcattttggcagagaaactttagctctttctttctctctctttcttcaacttgggaaagaataaggmataaatctttatcttttttttttcttcttctggccaagacctaaataccagcatttcatgataatggataagttatctttgaaattttccttttttcttt

SEQ ID NO: 362901 - DNA, 201 bp, Homo sapiens
attcttccagtctacgggaagcctgaaatccacctcctcctccacaggtgcagccgaccaggtggaccctggcgctgcagcggccgcagcgcccccagcgsccgccttcccgccccagctgccgccgcacgtagtaggttctgtctgggactgggcagggccatcggggctgggggggcggggcttgtgggtaaggcgggc

SEQ ID NO: 362902 - DNA, 201 bp, Homo sapiens
agatcatcagaggcatctacaaatgagtagtcaccagtgacaaaatctcaaagcgaggcaggctggagaatgggcgatctgttagtcttgccagagaggarggtattagcaaaggcagattgaataagcggaaggtaaaaaaataaaaagcagcaatagcattttttttttacatatacttcattagcacaggtttggctt

SEQ ID NO: 362903 - DNA, 201 bp, Homo sapiens
ttctttcaatctttcaaatctcctctttcatttctttttgactttgaaaaaaatttccccctttcatttcctgcttcttatctttattatctgtagtattkattcagttgtgtgccttctagactatcgttcattctgagaagttttccttttgtctctaattcctgagttctgcccgttgatttctgagtttttctaaat

SEQ ID NO: 362904 - DNA, 201 bp, Homo sapiens
tttgagccgattcttccagtctacgggaagcctgaaatccacctcctcctccacaggtgcagccgaccaggtggaccctggcgctgcagcggccgcagcgsccccagcgcccgccttcccgccccagctgccgccgcacgtagtaggttctgtctgggactgggcagggccatcggggctgggggggcggggcttgtgggt

SEQ ID NO: 362905 - DNA, 201 bp, Homo sapiens
ttataaatgcatacttccccagtagccttgatgactggttcatgagccagtatttcttcagtgtgtattcagcattgctacttccattggtactgcatccrtaccatcaggtgctatggaaaaatagaattgtaatagaaaatgtgttggctcctaatgcagtggccttcaaactaccctccagggtgtgagtcccacaga

SEQ ID NO: 362906 - DNA, 201 bp, Homo sapiens
aagcggttttgagccgattcttccagtctacgggaagcctgaaatccacctcctcctccacaggtgcagccgaccaggtggaccctggcgctgcagcggcygcagcgcccccagcgcccgccttcccgccccagctgccgccgcacgtagtaggttctgtctgggactgggcagggccatcggggctgggggggcggggct

SEQ ID NO: 362907 - DNA, 201 bp, Homo sapiens
aaaataatgttcggcttcctaataagaaagtgaagaggaaaatcaaggtgttttcatcttgcttgtaggatgggtgctgcagacaatatatataaaggacrgagtacatttatggaagaactgactgacacagcagaaataatcagaaaagcaacatcacagtccttggttatcttggatgaactaggaagagggacgagc

SEQ ID NO: 362908 - DNA, 201 bp, Homo sapiens
aatttgtctcatttacatttttctaaattaagtctaataagcgaggaattttccctaagctgtgaattggaattaattatggttcctcacagaaaggtaasaatagtaggagtactaatgttgaaaatgtggccttgtgctgtaaattttttaacagctctttctcatgtttctttaccaagagaatcatggttctttctt

SEQ ID NO: 362909 - DNA, 201 bp, Homo sapiens
ccacaattataaatgcatacttccccagtagccttgatgactggttcatgagccagtatttcttcagtgtgtattcagcattgctacttccattggtactrcatccataccatcaggtgctatggaaaaatagaattgtaatagaaaatgtgttggctcctaatgcagtggccttcaaactaccctccagggtgtgagtcc

SEQ ID NO: 362910 - DNA, 201 bp, Homo sapiens
attctttatggacagaaagaaaacatcttgaatcagtccacaccttctaattagttgtaaataccagtactaaaatccacatgataagtgagcactaaatgagtaagttgttatgattttattggcattaaaaatgtcatcttatcaatatctctgtgctttctttaactgtgtctagcaaacactagttatcttatttca

SEQ ID NO: 362911 - DNA, 201 bp, Homo sapiens
atagacctattcagaatttctgttttttttcttgtgtgagttttggctcattgtgtcttttaaggaattgtttttcaagaaattttcaccaaggttaccaratttgtggacatagagttggtcatagtattcctttattatccttttatttgtccacagcatccgtagtgttgtccttttcatttctgatattagccattt

SEQ ID NO: 362912 - DNA, 201 bp, Homo sapiens
ttttaaggaattgtttttcaagaaattttcaccaaggttaccaaatttgtggacatagagttggtcatagtattcctttattatccttttatttgtccacrgcatccgtagtgttgtccttttcatttctgatattagccatttgtgtcttttctcttttgttcttagttagcttgactagaagcttatcagttttctttt

SEQ ID NO: 362913 - DNA, 201 bp, Homo sapiens
ttctttatggacagaaagaaaacatcttgaatcagtccacaccttctaattagttgtaaataccagtactaaaatccacatgataagtgagcactaaatgagtaagttgttatgattttattggcattaaaaatgtcatcttatcaatatctctgtgctttctttaactgtgtctagcaaacactagttatcttatttcat

SEQ ID NO: 362914 - DNA, 201 bp, Homo sapiens
tctttatggacagaaagaaaacatcttgaatcagtccacaccttctaattagttgtaaataccagtactaaaatccacatgataagtgagcactaaatgagtaagttgttatgattttattggcattaaaaatgtcatcttatcaatatctctgtgctttctttaactgtgtctagcaaacactagttatcttatttcatc

SEQ ID NO: 362915 - DNA, 201 bp, Homo sapiens
ttcctacatgtgtcttccactgtttttctgtcttatgtggttttaactgagtattttatattatttcattttctctctttttttttttttttgttttttgktttttggtttcttggggtgttttttgaggtgggatcttactgtgttgcctaggctggcctcaaactcccgggctgaagtgaccttcccacctcagcctcc

SEQ ID NO: 362916 - DNA, 201 bp, Homo sapiens
aaatgactgttaaacattttggcacattatttccatgtgtgtatatcacttttttccatttgtgaacttgcattcctgctgcaaaatcacttttgtattcygtggtttttttttttttaactttacaattccccatttttaaaaactttattgcagaaaatttcaaacatacacaaaattatacagaatagtgtcatgaac

SEQ ID NO: 362917 - DNA, 201 bp, Homo sapiens
gtttttagcaacctgaagtgaatgggaacatcttcagtttcagaaagcacacaaaataaactaactcttaaaacctctccaggttgggcgtggtggctgamtcctgtaatcccagcactttgggaggccgaggcgggtggatcacgaggtcaggagatcgagaccatcctggctaacacggtgaaaccctgtctctactaa

SEQ ID NO: 362918 - DNA, 201 bp, Homo sapiens
aatgtttttcatattgctagaagaaggctagttatttctgccttgtcttaacagaatgatacgatataattcttaaatgtatcatttgtgatttttaaaamtaacatttgtttttctaattacacaagtaatgcatgttcattatgcaaaattttaaactcaaaattttttaatcacttgtaattccaccacctggagatc

SEQ ID NO: 362919 - DNA, 201 bp, Homo sapiens
ttttaactgagtattttatattatttcattttctctctttttttttttttttgttttttgttttttggtttcttggggtgttttttgaggtgggatcttaytgtgttgcctaggctggcctcaaactcccgggctgaagtgaccttcccacctcagcctcccaggtagctgggagtacaggtgcatggcactgtgcccagc

SEQ ID NO: 362920 - DNA, 201 bp, Homo sapiens
gcgggtggatcacgaggtcaggagatcgagaccatcctggctaacacggtgaaaccctgtctctactaaaaatacaaaaaaattagccgggtgtggtggcggggcgcctatagtcccagctactcgggaggctgaggcaggagaatggcgtgaacccgggaggcggagcttgcagtgagctgagatcgcgccactgcactc

SEQ ID NO: 362921 - DNA, 201 bp, Homo sapiens
gctgtaatctcatcatttattgtcttctgcctacttcagatttaatttactttcctgtttctggtttgcccttgaactcttatttttaagaatctctacargtgactctgatgcacaaatttaggagccattgtttgcattttaatttctaacattttataggaagaaaaacaggatcagagagagattttgttttgcatg

SEQ ID NO: 362922 - DNA, 201 bp, Homo sapiens
gatcgagaccatcctggctaacacggtgaaaccctgtctctactaaaaatacaaaaaaattagccgggtgtggtggcggggcgcctatagtcccagctacycgggaggctgaggcaggagaatggcgtgaacccgggaggcggagcttgcagtgagctgagatcgcgccactgcactccagcctgggcgacaaggcgagac

SEQ ID NO: 362923 - DNA, 201 bp, Homo sapiens
agcattttaaaagctcatgctaagcttaaatgtaagaatctactgtatggcttgtaatcttagtttcatgtaattgtttcattagaatatgttattgtaartcacttcaaatgctttttgtactcaatggaaaaaatattaaaatctagcagaatgagatatttgcataagatttagctccaagctgtatctgtaaataga

SEQ ID NO: 362924 - DNA, 201 bp, Homo sapiens
attttatccctaggatataattatatcccattaaattatatccctaggatatagtttaatattacgcccttgtagctttcattgattttttatgaaataawtcagacgtataataatcctccatgcaccttctaccctactaaagaaataaaacactacaatacaatcgaacctctaatcctccctaatcccattgccctc

SEQ ID NO: 362925 - DNA, 201 bp, Homo sapiens
tgagctgtgtacctaagaaatgctaaaatggtaaattttattatttttatatatatatatcataatttttaaaagcacttgaagtatgtccaataatactrttgtaataggaataatcattgcctctacttaacaattttaatatttaagctctagttatcattcaatatgaaaagtcctcttttcctaattgcagtattt

SEQ ID NO: 362926 - DNA, 201 bp, Homo sapiens
ggactacaggagcgtgccaccacacccagctaatttttgtatttttagtagagatggggtttcaccatgttggccaggatggtctcgatcacttgacctcrtgatccgcccacgtcagcctcccaaagtgctgggattacaggcgtgagccacctcgcacagccaaactttcttgttaatgtatatcttgtcttgcttcta

SEQ ID NO: 362927 - DNA, 201 bp, Homo sapiens
ggggtttcaccgtgttagccaagattatctcaatctcctgaccttgtgatgcgccctcctcggcctcccaaagtgctgggattacaggcatgagccactgygccggccaaaaaattaacattaatttatgaatatatttgaatttcttgaattttcccaatgtccccccgccaccggctttagattttaaaatgaaagacc

SEQ ID NO: 362928 - DNA, 201 bp, Homo sapiens
taactaagaagaaaatatgagaccgggtatggtggctcatgcctgtaatcctagcactttgggagcctgaggtgggtggatgacttgaggtcaggagttcragaccagcctagccaacagggtgaaaccctgtctctactaaaaatacaaaaactagctgggcatggtggcacattcctatagtcccagctactcgggagg

SEQ ID NO: 362929 - DNA, 201 bp, Homo sapiens
gttcgagaccagcctagccaacagggtgaaaccctgtctctactaaaaatacaaaaactagctgggcatggtggcacattcctatagtcccagctactcgkgaggctgaggcacgagaattacttgaaccctggaggtagaggttacagtgagctgagattgcaccaccgtactccagcctgggcaacagagagactgtct

SEQ ID NO: 362930 - DNA, 201 bp, Homo sapiens
tgtgatattcgtcttttggtacctggcttattttacctaacataatgacctcagttccatccatgttactgcaaaggacagggtttcattttttggggggsgctgaatagtattccattgtgtgtatattccacattttcattatctgttcatccattgatggacacttaggctgagtccataacttggctgttgagaata

SEQ ID NO: 362931 - DNA, 201 bp, Homo sapiens
taaagaaagttgaggtctcccaggctaatcatcctggtgttattcttgattctttcttccttttggtccctttatctgttaccaagttctttttttttttyttttcctcgctctgccacccaggctggagtgcagtgatacaatcatgactcattgcaatctctacctccccagctcaagcaatccttccacctcagcccc

SEQ ID NO: 362932 - DNA, 201 bp, Homo sapiens
tatgagatcaacttttttagctcccacatttgagtgagaacatgtgatattcgtcttttggtacctggcttattttacctaacataatgacctcagttccrtccatgttactgcaaaggacagggtttcattttttggggggggctgaatagtattccattgtgtgtatattccacattttcattatctgttcatccattg

SEQ ID NO: 362933 - DNA, 201 bp, Homo sapiens
cgtttgcaactaatccaagtctactttcaaataacactatattgctttatgagtaatgcacgtattttttaataacaaaataatcctgattactttcttcyatcctttgcaccatcactgtcatttatttcacttatacttaagtgtacataagcatatatatatataaacatacataatcgcatacactgttgctattat

SEQ ID NO: 362934 - DNA, 201 bp, Homo sapiens
cttcagttttgaaggattattttgcaaggtacagaattctaggttggagaggtttgttgtttttttttttttttcctctcaaaactttagatattttactmcactcttttcttgcttttgtggtttctgagaagtcagatgtaatttttatctttgagcttgtgtggataaggtgtttcttccctctggcttacttcagta

SEQ ID NO: 362935 - DNA, 201 bp, Homo sapiens
ctaacttgggggacagtggtttgcctgtgacttcatttttcttacagatctaaagagttgatttttcagttggttctactttttccttgtgatggagaggyaacctccaaccttcttatatgctaaactggaaaccagaaacttccctgacctttttatggatgaaaatctttattttcatggttccttctgatctctgga

SEQ ID NO: 362936 - DNA, 201 bp, Homo sapiens
aacagccttaaggaactggcccaattgccaatcactgtgtgaaagaacaaccaccaaatttgttgtttcagcatagtaggattcattctcaatttattccrtcaaacatactagttttttagctacttcgggatatattttgcagtgacttggtcctggtgggtagtgttatgtggaaagatacgcttgttacaatatgtg

SEQ ID NO: 362937 - DNA, 201 bp, Homo sapiens
gtccacagaaagagaggggtgaagatgattccagtataatggaaccatgagaacacacagaggaataaaggtgtgtcacatcagctctttgaatatgccamaaaaaaaaaaaaaaaaaaaaggctctgaattagttttccctcagtatctgctggggactggtttcaggaccccccagtatgaaaatctgcagatgatcac

SEQ ID NO: 362938 - DNA, 201 bp, Homo sapiens
agagtaaaatcctagacttcacacagtttttgataggtcaataggattctcagatctcttgctaatattaattacctgcaaaatgtgagtaaaccggctgygtatgggaaagaataggggctttagatctagaaaactcaagattctgtacaagttctccagcatcctggccatgtgcaagttacttcatccttctagaac

SEQ ID NO: 362939 - DNA, 201 bp, Homo sapiens
tattgagtgtaataattgtattctagttatataggaggatgttttgttcttagaagatagaatcttaaatctttagtgatgaagtgtcatgatgtctgcarctaattctcagatggttcaggaaaaaatgtctgtgtctgtggaggaggaagaagaagggaaatatggtaaaatattaacaattgattatctaggtaaaca

SEQ ID NO: 362940 - DNA, 201 bp, Homo sapiens
cagcgtaggggcattttcttaagttattttatgtcattacctttgttgtttgtatcttttgcacttcctatttgagcagctttcaactgttaggacatggyctccgtgttttaaatctatttgtttgtactttacatttcttggtctttctcattgctgttctcagagatttctttgaatttatcttccaggtttaaaaac

SEQ ID NO: 362941 - DNA, 201 bp, Homo sapiens
cagaaagagaggggtgaagatgattccagtataatggaaccatgagaacacacagaggaataaaggtgtgtcacatcagctctttgaatatgccacaaaaaaaaaaaaaaaaaaaaggctctgaattagttttccctcagtatctgctggggactggtttcaggaccccccagtatgaaaatctgcagatgatcacatccc

SEQ ID NO: 362942 - DNA, 201 bp, Homo sapiens
agtatctatcttagttcataactggttatcctatgccatcatgctatttgttcactatttgagggaaagaactctactccattgtgtattccctgccccaytcaggatggcagtaagtacagctactaatataaattaaagtcattcagaaatgaaattattttcacatttatattacattgttttcacttcatcctggaa

SEQ ID NO: 362943 - DNA, 201 bp, Homo sapiens
ggtgaagatgattccagtataatggaaccatgagaacacacagaggaataaaggtgtgtcacatcagctctttgaatatgccacaaaaaaaaaaaaaaaaraaaggctctgaattagttttccctcagtatctgctggggactggtttcaggaccccccagtatgaaaatctgcagatgatcacatccctgatataaagtg

SEQ ID NO: 362944 - DNA, 201 bp, Homo sapiens
gttcaccaacagggaagaagaggagtcagtgccgctaatacgcatttgatgtgaactgaaaactaacccagagcattgtacctttcccttaaatgttctgkgcattttattttattgattttaatttttgtgttttgttgagatggggtgtcactgtcatccaggctggagtgcagtggcacgatcatagctcactgcaga

SEQ ID NO: 362945 - DNA, 201 bp, Homo sapiens
gctgaggtgggagttcgcttgaacctgggaggttgaggctgcagtgagccaagatcgtaccattgtactccagcctgcgtaacagagccagaccttgtctaaaaaaataaaataaaaatgctggggactggatattgcatcttaaaggggcaaggaaaatgaaagaaaatgctgaattctcattttcatatttatagaaca

SEQ ID NO: 362946 - DNA, 201 bp, Homo sapiens
gactacaggtgcacaccaccatgcctggctgatttttgtatgttctgtagagacaggctctcactatgttgcccaggctggtctcaaactgttgaattcargtgatcctcctgccttggcctcccaaagtgctgggattacagggatgagctaccttgcctggctgattttaatttttatcaatgaacataatttttaaaa

SEQ ID NO: 362947 - DNA, 201 bp, Homo sapiens
ctcattgttcagttcccacctatgagtgagaacatgcagtgtttgattttctgtccttgcaatagtttgtgagaatgatggtttccagcttcatccatgtycctacaaagtacatgaactcatccttttttatggctgcatagtattccatggtgtatatgtgccatattttcttaatccagtctatcattgatggacatt

SEQ ID NO: 362948 - DNA, 201 bp, Homo sapiens
tggtttccagcttcatccatgttcctacaaagtacatgaactcatccttttttatggctgcatagtattccatggtgtatatgtgccatattttcttaatscagtctatcattgatggacatttgggttggttccaagcctttgctattgtgaatagtgccacaatgaacgtacgtgtgcatgtgtctttatagcagcatg

SEQ ID NO: 362949 - DNA, 201 bp, Homo sapiens
ccatttgagaaagagataagatccctcgtgtaggataggcattgtttcaaactgtgcgtatgaaatcagtgcattgaattgcaattagcattttggggtartacttcctagatagtgctttgtgttccacatcatggcatatcagggtgcaaccaatgtccagttgacccaaataagctttttttttttaatgcagtagaa

SEQ ID NO: 362950 - DNA, 201 bp, Homo sapiens
aacgtacgtgtgcatgtgtctttatagcagcatgatttataatcctttgggtatatacccagtaatgggatggctgggtcaaatggtatctctagttctaratccttgaggaatcgccacactgtcttccacaatggttgaactagtttacactcccaccaacagtgtaaaagcgtttctgtttcttcacatcctctccag

SEQ ID NO: 362951 - DNA, 201 bp, Homo sapiens
gttccaacatacagatcttaattcaatcctgactcaaacacataaacctttttttttaaagcactagtgaaacatttaaaaatttttgagcactgacaggktatctaatgatactgaagaattacttaaaaaaatgtttaagtgagataaacagtgcaatgcaatggttatgatttaatagaaaaatccttactttagtga

SEQ ID NO: 362952 - DNA, 201 bp, Homo sapiens
atatacccagtaatgggatggctgggtcaaatggtatctctagttctagatccttgaggaatcgccacactgtcttccacaatggttgaactagtttacastcccaccaacagtgtaaaagcgtttctgtttcttcacatcctctccagcatctgttgtttcctgtctttttaatgatcattgttctaactggaatgagat

SEQ ID NO: 362953 - DNA, 201 bp, Homo sapiens
gcacctgcaggacagctctgagctgccctcagccctctccttggcctccttcccatgttcatcagtgtccaaagtccagagggggccgaggcagcaggggkctggcatgttagcactgccctgagcatgtgcacacccagccaggttgcaacagttcctaggcttggccttaactttgagatcagagtgggtgctgggagc

SEQ ID NO: 362954 - DNA, 201 bp, Homo sapiens
ctgtcttccacaatggttgaactagtttacactcccaccaacagtgtaaaagcgtttctgtttcttcacatcctctccagcatctgttgtttcctgtcttyttaatgatcattgttctaactggaatgagatggtatgtcattgtggttttgatttgcatttctctggtgaccagtgatgatgagcattttttcatatgtc

SEQ ID NO: 362955 - DNA, 201 bp, Homo sapiens
ccactttttgatggggttgtttgtttttttcttgtaaatttgtttaagttctttgtagattctggatattagccctttgtcagatgggtagattgcaaaawttttctcccattctgtaggttgcctgttcactctgatgacagtttcttttgctatgcagaaactttttagtttaattagatcccatttgtcaattttggc

SEQ ID NO: 362956 - DNA, 201 bp, Homo sapiens
tcttaaggccttttaaaattagattatatcgaattaattttttttgaggttctgtctttggacttctttcagttgatatagtcttgtcaattttttatttacacacacacacacacacacacacacacacacccatatgtatgtcattggttttgtcaaaaagcctgaaaatgcaaattctgcttgtaaatattggtagag

SEQ ID NO: 362957 - DNA, 201 bp, Homo sapiens
cttaaggccttttaaaattagattatatcgaattaattttttttgaggttctgtctttggacttctttcagttgatatagtcttgtcaattttttatttacacacacacacacacacacacacacacacacccatatgtatgtcattggttttgtcaaaaagcctgaaaatgcaaattctgcttgtaaatattggtagagg

SEQ ID NO: 362958 - DNA, 201 bp, Homo sapiens
aatgagagcttctttgtgcattttcatcaagtgcattctcctcaggaatatatctccttgaaaagaaaaaatggggtgtatttgcagtaggtttattgatrgtcgaataggaagaaacagcatttgagaagtgtggagaaaagatcttcctgattactacagagacctcctaaagtggggccagactgcttgaacagaaag

SEQ ID NO: 362959 - DNA, 201 bp, Homo sapiens
gaacatcacactctggggactgttgtggggtggggggaaggggggagggataacattgggagatatacctaacgctagatgacgagttagtgggtgcagcrcaccagcatggcacatgtatacatatgtaactaacctgcacattgtgcacatgtaccctaaaacttaaagtataataataattaattaattaattaaaaa

SEQ ID NO: 362960 - DNA, 201 bp, Homo sapiens
cttagccccctgagtggctgggactacaggcctgcaccaccatacccagctatttttgtatttttagtagagacagggtttcaccatgtgggccaggctcrtgttgaactcctgacctcaagtgatccacctgtctcggcctcccacagtgctgggattacaggtgtgagccaccacgcccggccagcactacactttcta

SEQ ID NO: 362961 - DNA, 201 bp, Homo sapiens
caatcctgttactgggtatatacccagagaaatataaattgttgtgtcataaagacgcatgcacacgtatgttcattgcagcactattcacagtagcaagrcatggaatctacctaaatgcttatcaacggtagactggttaaagaaaatgtggtacaaatacactgtggaatactatccagccataaaaaacaataagat

SEQ ID NO: 362962 - DNA, 201 bp, Homo sapiens
tctataatactctatttcctatgatgtgataggtaaaacaatggacaaacagttaagaaacctgtgttttagtctattccaatctgtatgatcttgaacargtcacctaacttcactcacccctaaatttttatgaatctgttctaaaagcaacttcagaaattatttgtcagtacacatctctttaataactgcttagag

SEQ ID NO: 362963 - DNA, 201 bp, Homo sapiens
actaggctattggaacagcttcgaccaaagagtgtaaattagtgaaactagtttgcaagaatactagggacaggggtcaggcacggtggctcacgcctatyatctcagcactttgggaggctgaggcaggaggatcacttgagctcacaagttcgagaccagcctaggcaatgtggcaaaaccccatctctaccaaaaata

SEQ ID NO: 362964 - DNA, 201 bp, Homo sapiens
tgccaggtaaacattttaataatgtccatttaagaaatggccatagcttgtaagtagttacatcctcatcaagaacttttgctgtgagcctgtaaagaaayagagtttttctcataaaacaagttttattctctcccatgtggctttttctgactccatatttccatcctaccagcacccccaacccctctcgcacacaga

SEQ ID NO: 362965 - DNA, 201 bp, Homo sapiens
aagagaatagaggaacatgttaaacaccaccataggggtactgtcagcaaaatctagactgtgggaaactataggacaaatgactggtgtttttttttttytaacaaataaatagcaatgacaaaaaaaaaaaaaaaaaaaaaggtgggggagagagggaagagaacctgcatattaaaagagagttaaagaccagtcacc

SEQ ID NO: 362966 - DNA, 201 bp, Homo sapiens
gactccatatttccatcctaccagcacccccaacccctctcgcacacagaggttaaaggagtacataattacagaaagagatcccccaggcgattatagawgagtggttgcgttctttaccttgaagatatgagaactaccataatttaaagtggagaccagcatataatgatacactcagcaactgtttgtatgttaaca

SEQ ID NO: 362967 - DNA, 201 bp, Homo sapiens
gtccaagatctcctgaacactggcctgccctccttaagaaagaaaccctataataccatgaggcatgtaggggtgactcaaaaaactccaggccagaaacyagaacacctaataagtatttgtctcttgtctgccacagattagccctgtcaccttgaggaagtggcttgacctctgaaatgtcttatctcatctataaaa

SEQ ID NO: 362968 - DNA, 201 bp, Homo sapiens
ccatctaaaaagaaaatcaaactgaaactgttcagacctctagatctagataccaatttacaagagaaaaagagaatagaggaacatgttaaacaccaccrtaggggtactgtcagcaaaatctagactgtgggaaactataggacaaatgactggtgtttttttttttttaacaaataaatagcaatgacaaaaaaaaaa

SEQ ID NO: 362969 - DNA, 201 bp, Homo sapiens
ctttttccttagtattaccactgagaatgtgaaaactgaactaaaattacacctttcagtcttcaaggactcacattctagaagggtcctgggatttggtkaggtaatttcatgttcattctattcagaccttacataatttcatagatctggcttctattctcttgtcattattccagactaaagaaagttgaggtctcc

SEQ ID NO: 362970 - DNA, 201 bp, Homo sapiens
acaaaggatttaacagctaaaaagatattttgaaacctctgacctagtactagagtcaagaccattgcctaataaaagtatgtccaagatctcctgaacaytggcctgccctccttaagaaagaaaccctataataccatgaggcatgtaggggtgactcaaaaaactccaggccagaaaccagaacacctaataagtatt

SEQ ID NO: 362971 - DNA, 201 bp, Homo sapiens
gtgacaaatttttcattctaaacaggctgctgtcactttaaatgcttatgggaatactttccacctttacgcttgctatccagctagtatgtagtcagtayataaattaatcttaatgtaaacctgagatacactttgaaagaaagatattcctagaaaaatatcatattagtaaattatacccttttgtttcccaaatat

SEQ ID NO: 362972 - DNA, 201 bp, Homo sapiens
ccttgggcagtatggccattttcacaatattgattcttcctatccatgagcatggaatgttcttccatttgtttgtgtcctcttttatttcgttgagcagyggtttgtagttctccttgaagaggtctttcacatcccttgtaagttgtattcctaggtattttattctctttgtagtaattgtgaatgggagtacactca

SEQ ID NO: 362973 - DNA, 201 bp, Homo sapiens
ttatgttatatatatttatcataatttttaaaagcacttgaagtaagtcaaagaatcctactgtaatagaaataatcattgcctctacttaacaattttartatttaaactctagttattacattttaaatataattaaaatatatttttagtttaaatacttaataaaaatacttaaaatatatataaatataaaataat

SEQ ID NO: 362974 - DNA, 201 bp, Homo sapiens
aggtaatccacctgcctcggcctccagaagtgctaggattacaggtgtgagccaccgggcccgcctccagaatcttttatctgaatactataacctcacaygaatcttttcctgaataagaagcagatttttttaaaaagtagagttttggcaaacacatacatttgtttctaatggatatatctgtgcattatgatatgt

SEQ ID NO: 362975 - DNA, 201 bp, Homo sapiens
ttgttttttgtttttaaatggtagacttgaacgtacttcaatgggatatccagtgggatatgttatttccaagaatttattattctaaaaataaataaatwaattaattaatcacctttggaggatcctagaatgaatcctaatgatacttaaaatcaaaatatcattagtcacttggaggttgaaaactgaaaaataaag

SEQ ID NO: 362976 - DNA, 201 bp, Homo sapiens
tgtcgtcatcatggtgatggtgttggggctggtgaaacactgcccactgcatcaattccagagtaaaaactagattgaatccaaaattttctataaattartgttgacctttactgagttctgagatcaatattaattactgctgtgctttgtaattataaaagggctatttgatgtttcacaccaaggatatgggtggag

SEQ ID NO: 362977 - DNA, 201 bp, Homo sapiens
ttgagcagcggtttgtagttctccttgaagaggtctttcacatcccttgtaagttgtattcctaggtattttattctctttgtagtaattgtgaatgggartacactcatgatttggctatttgtctattattggtgtataggaatgcttgtgatttttgcacattgattttgtatcctgagactttgctgaagttgctta

SEQ ID NO: 362978 - DNA, 201 bp, Homo sapiens
caccacgttggtcaagctggtctcgaactcctaacctcaggtaatccacctgcctcggcctccagaagtgctaggattacaggtgtgagccaccgggcccgcctccagaatcttttatctgaatactataacctcacacgaatcttttcctgaataagaagcagatttttttaaaaagtagagttttggcaaacacataca

SEQ ID NO: 362979 - DNA, 201 bp, Homo sapiens
gactgaaccttaaaactgccaagatttcatagttgagtaagaagttaaggttgaaaaccaacaaaggaggtgtagccagagaggcaggagagaaaaacagkacattacagtgtcatgggagcgaggggaaagagtgcttcaagaagaaaagtagtggtcaacagtgctgaaaggtcaggtgagttgaagcctgaaaagtca

SEQ ID NO: 362980 - DNA, 201 bp, Homo sapiens
tttgtatcctctctctttttttcttagccaagctagaaattattaattttcttgatcttttcaaagaattagcttttggtgttgttgatttttctctattrattttctatttccaatttcactgatttctgctgtaatctcatcatttattgtcttctgcctacttcagatttaatttactttcctgtttctggtttgccc

SEQ ID NO: 362981 - DNA, 201 bp, Homo sapiens
ataataattggtcgttgtacttttcttgtgacttttaggaagatttaaaatttttcaaaagaaagtggaagacagattttaattacaataaaatttaaaaatgaaataacatttattctgtcttattgctttaggtgaaatccttaaccctgtttgtcacccattatccgccagtttgtgaactagaaaaaaattactcac

SEQ ID NO: 362982 - DNA, 201 bp, Homo sapiens
tgatactatggtaaattgtatcattaacaatgttttattttgaattacaggttgggcattcctaatctgaaaatctaaaatctgaaatgctccaatgagcrtttcttttgagcatcatattgttgctcaaaaagctttggatttcagagcattttagattttatttgtaatgcaaatatttcaagattaaaaaaaaattga

SEQ ID NO: 362983 - DNA, 201 bp, Homo sapiens
aaagtgtcagacttacttactttgggtaatatatcttcttcatatatatatatatatatatatatatatatatatatatacaatctaaattcgaagagagyaatatttctattcatgtaaatgccatacacattttactcatcaaggccttcaaataagtttcacatctgacttttacattaggcctaagccaaatgtatt

SEQ ID NO: 362984 - DNA, 201 bp, Homo sapiens
aaactttttcagcagtctgcagctgttataaaaatagttctcccataattcttctttaaagacagttgtcaatatttatacctgtcaaggaagatagcacttttttttttttttttttttttttttttacagaaaattagcttttcaggtcttagaaattaacatgtgacagttttattttattttttttctgctgtacat

SEQ ID NO: 362985 - DNA, 201 bp, Homo sapiens
aactttttcagcagtctgcagctgttataaaaatagttctcccataattcttctttaaagacagttgtcaatatttatacctgtcaaggaagatagcacttttttttttttttttttttttttttttacagaaaattagcttttcaggtcttagaaattaacatgtgacagttttattttattttttttctgctgtacatc

SEQ ID NO: 362986 - DNA, 201 bp, Homo sapiens
ttagtagagacagggtttcaccatgtgggccaggctcgtgttgaactcctgacctcaagtgatccacctgtctcggcctcccacagtgctgggattacagktgtgagccaccacgcccggccagcactacactttctaatgagtttttattgaaaaaaattttagttgaaaatgaagctgttggctcgtaagtgaaaagct

SEQ ID NO: 362987 - DNA, 201 bp, Homo sapiens
tatgtgcagtttagtattataacttttataaataaactttaaatactgtagtgtgatcttattgcaatcattagaaggaaggattatatgagagaaacttwtttttctattataatacacatgcttctcaagttaaaatgggactatgccctgataaacccatcataagtcagaaacatcataaatcaaaaatgcacttaa

SEQ ID NO: 362988 - DNA, 201 bp, Homo sapiens
tcccccgtccccttgcacttcccaggtgaggcaacgccctgccctgtttcagctcaccgtccataggctgcacccactgtccaaccagtcccaatgagatraagcaggtacctcagttggaaatgcagaaatcacatatcttctgcatccatctcggtgggagctacagactggagctgttcctatttagccatcttggaa

SEQ ID NO: 362989 - DNA, 201 bp, Homo sapiens
tgaaaaaagtaccttttccccttgtcttcaataaatatttattacagtgtttattttatgccaacattataaactagatgttaggtctacaatggggttaatgagatgagatagacaacctgctttcaagaagcttccagtttagtgtgagagaaaggtgttgaaactgttattccggatttggaggatgctgtgaaggag

SEQ ID NO: 362990 - DNA, 201 bp, Homo sapiens
gaaaaaagtaccttttccccttgtcttcaataaatatttattacagtgtttattttatgccaacattataaactagatgttaggtctacaatggggttaatgagatgagatagacaacctgctttcaagaagcttccagtttagtgtgagagaaaggtgttgaaactgttattccggatttggaggatgctgtgaaggaga

SEQ ID NO: 362991 - DNA, 201 bp, Homo sapiens
aaaaaagtaccttttccccttgtcttcaataaatatttattacagtgtttattttatgccaacattataaactagatgttaggtctacaatggggttaatgagatgagatagacaacctgctttcaagaagcttccagtttagtgtgagagaaaggtgttgaaactgttattccggatttggaggatgctgtgaaggagaa

SEQ ID NO: 362992 - DNA, 201 bp, Homo sapiens
cgattctcctgcctcagcctcccgagtagttgggattacaggcatgtgccaccacgcccagctaatttttgtatttttagtagagacggagtttcaccacrttggtcaagctggtctcgaactcctaacctcaggtaatccacctgcctcggcctccagaagtgctaggattacaggtgtgagccaccgggcccgcctcca

SEQ ID NO: 362993 - DNA, 201 bp, Homo sapiens
taactgttttacatgcctcagctaaatttgaaaacaatgcacaagccagaactggaaatactgatcctggggagaaagatatatgagttggttatggggcyggggagcctattgcatcattattgggtacaccatgttattgttttgctggcaatagcagaagctgtgctgatagtcgcaagttttatggtagaccttttt

SEQ ID NO: 362994 - DNA, 201 bp, Homo sapiens
caatagtcttctaattatttgttgctcttacagaaaaatgcaactgagtttgcatcttgatcttaaatctagccattttgctagagatcctctcattaatkataatactttgtatagagattccttttggttttccttgtggacagctatgtgatctgccaatgacagttttgttttgtcctttctcatcctaatgccttt

SEQ ID NO: 362995 - DNA, 201 bp, Homo sapiens
attttgtaatgaaatgacattatttgaggacctgctgtatttttattttggttttaagtcctttcaataaattttaaaagtgttctctataaagggttttyacatcttttattagattaattactaagtactttttgttagtatataggtcatatcttttttacaatagtcttctaattatttgttgctcttacagaaaaa

SEQ ID NO: 362996 - DNA, 201 bp, Homo sapiens
aaatacccaatatgcaaatagagttggaattataccatagttttgcaaattcatgttagcatgtagtgttccatcctttgtactgtgactattttcagatrttctatgcaagaatcagagatgcctttgcagattccagtgatgagaattttcattataggggctggatttctcttacataacacaaatgatcctgaatac

SEQ ID NO: 362997 - DNA, 201 bp, Homo sapiens
ttgttgatacaaatgtgaaaagaatcagaaataatcagctctagaacctattagaaatgtattgaaatttggaatttagtatttatgaatgaatatgttcyagatgcatgcttgacggctgatgagcaatgacattcagaatgtcttacccatttcagatatatatgccttgaaaaccaggagaatatggaataaaacttt

SEQ ID NO: 362998 - DNA, 201 bp, Homo sapiens
atggtgggttaaatcaaggaataaatgtttccatagtgaaaattgtgagaagtacctcctactaccatgcagctcaaaaacgagtaatacgtgcggcagayttgtttatcacttttgtgttacatcagtttattgtcatgcatttgtatgattatcacctgccttatgaatttttacttgacaatcatttgtattcactca

SEQ ID NO: 362999 - DNA, 201 bp, Homo sapiens
tatccagaaaaagaatattggctgaaatttagctagagcattttgcaactagagcccccacttgagagcagcattgattgttatgtacactatttattgasgtaccagatggtgtgactatgatatcattaaaaaaatgattaacctcaatgaacctgacatcagaggattgaataccagcattacaaatgtatttgtcac

SEQ ID NO: 363000 - DNA, 201 bp, Homo sapiens
gtttccatagtgaaaattgtgagaagtacctcctactaccatgcagctcaaaaacgagtaatacgtgcggcagatttgtttatcacttttgtgttacatcmgtttattgtcatgcatttgtatgattatcacctgccttatgaatttttacttgacaatcatttgtattcactcattttccaacccacttattccattttg

SEQ ID NO: 363001 - DNA, 201 bp, Homo sapiens
ggctgcagtgagctgttatcactgccactgcactccagcctgggtgacagatcaagagcctgtctcaaaaacaaaaaacaaaacaaaaaactgtatccagkgcttgtgtattatcctaatttctaaaaatcaatgaccccccaaaatatttccctcatcagaatgttctgttatcagccaaagatttctttctgtcagctc

SEQ ID NO: 363002 - DNA, 201 bp, Homo sapiens
aacccagatcatgaattgatgaaaataaattaatcaaaaacaaatttagagaaccacattgggactctgccttttctccttggttagatactaatctccargagaggactcatttaaagacaaggtattagggaagtatatacagctgtgaatagtatcttttgtggaatatttattagtactgttatcaataagttgcac

SEQ ID NO: 363003 - DNA, 201 bp, Homo sapiens
catatgggaagaaacactttcttctctttatagttagggaagtcagtgctttcctgtgaagagacttttacaggatttcagttccttggataaaaactatstaaaaatcctctctgttcagaataggggaggatcatatctcagactggtgtaacatctagtaattgaatattttaaaattttatatacttagaaattcaa

SEQ ID NO: 363004 - DNA, 201 bp, Homo sapiens
gaggtctttaaaaagcataaagaacatcaaggtcaaaaaatgattcttgtatcaaagtaaaagatacaaaagaccgtagaaagatgttttaattgaacagygtatgaaaattttaggtcatttcatttccaagtccaacacatagtttatattaataattacatctagaaataattttatgtgatttactttattgtattc

SEQ ID NO: 363005 - DNA, 201 bp, Homo sapiens
aaaaaatttgtaaagttttatctttaattgacaaataattgtatatatttgtattagggttctgtagagggagagaactaataggatagatgtatataagragtattgacttacatgatcacaaggtgaagtcccactgtaggctgtctgcacgctgaggggcaaggaagccagtctgaatcccaaaacctcaaaagtagg

SEQ ID NO: 363006 - DNA, 201 bp, Homo sapiens
cacttagtttgcttccagatcttggctattgtgaatagtgctgcaataaacatgggagtgcagctgtctcttcaatatactgatttcctttcttttgggcwtatatatatacctagcagtgggattgctagatcatgtgttagttctatttttagttttctgaggacctttaactcttatccataacagttgtactaactt

SEQ ID NO: 363007 - DNA, 201 bp, Homo sapiens
caaaatgagatgttttataggaatctggtgaaatgcttacatggtcactgtctgacaactctttttttctggggcaaatatctctttcctactcagggacrtggaatttggggttttaagctttagaccatcctgggcacttcaatatatcagaccttacttgtccacaaagtttttcccagactataagtaaccctagtt

SEQ ID NO: 363008 - DNA, 201 bp, Homo sapiens
tcagtgtcttatttcagtatctatcttagttcataactggttatcctatgccatcatgctatttgttcactatttgagggaaagaactctactccattgtrtattccctgccccactcaggatggcagtaagtacagctactaatataaattaaagtcattcagaaatgaaattattttcacatttatattacattgtttt

SEQ ID NO: 363009 - DNA, 201 bp, Homo sapiens
attggcttagaagaaattaatgaaagcagaaactttatatttttatgtaataatgtacatacattattatgtattatgtaatgaacgtatgtatgaatgtwtgtgtgtatgtatgaaagtatgtatgtatgtaatgaaagcagaagtttacatagtttactgcttctgttgcagtctctatcatattttatgaatatatac

SEQ ID NO: 363010 - DNA, 201 bp, Homo sapiens
cttttagtaataaaatcagctagaagaatatattgggtagtatcacacagactaggttttattgggtcccattggttacagtttaggaaacaaatgtttgmttatattattcttggatcacaggctccactgagacagaaattgtgcttgttctgcacaccttttatcccctattcctagtactaagtagatgtgcagtaa

SEQ ID NO: 363011 - DNA, 201 bp, Homo sapiens
ttagttactttaataaaagatatgtagtagaaaagtggctgccttttctactacatttttttttttttttttacagtggagaaagtaagtgtaagtgccarttctaccatttacatgctatacgaccatggaagagttacctctgttgtaagactattatggagaccaattaagttaaaatacatgaaagtgctttttaat

SEQ ID NO: 363012 - DNA, 201 bp, Homo sapiens
ccttcacattttttaacttgtttaacctatttttgctatatggtttatgttattttaaaaatgaaaaaatactaaacaagtattggctttgttttccttgsctaaaattatttcctttatacctttaaaatattacatagtatttaacctcatttagaaaatatcagtgatattttatttcaactaactagttaatagaaa

SEQ ID NO: 363013 - DNA, 201 bp, Homo sapiens
atttattattctaaaaataaataaattaattaattaatcacctttggaggatcctagaatgaatcctaatgatacttaaaatcaaaatatcattagtcacwtggaggttgaaaactgaaaaataaagatccaagcaggtatcctatcttttcaaataggtaacggggaagtttctctttatagaaatgttccagccaataa

SEQ ID NO: 363014 - DNA, 201 bp, Homo sapiens
tacacaccatcaaacatatgtctgttctttattattagattactctaaataagcttctactgtgtacaccacatagtgggtgatgtcctgggtacagattrtgccaattatgtgaaattcataaaatgagaaggaacactggatgttgtgggaagtggttagcataggctgtatggttttgtggaacgtgccctggaatat

SEQ ID NO: 363015 - DNA, 201 bp, Homo sapiens
tcagacagagagatcaaaggtaaagatgtaaatttgttgtgagacatttttgtgtacgtgattgggtgtggatgagatcatcttgacagacagtatggtgragaagattaatgttctgagactgaaccttaaaactgccaagatttcatagttgagtaagaagttaaggttgaaaaccaacaaaggaggtgtagccagaga

SEQ ID NO: 363016 - DNA, 201 bp, Homo sapiens
aatcagcattaaccaaataatcacatacagaaatgtgaaactgcagctatgacaagtcaatgaaggctatatgcaagatgttaggacaggctgtgatcctgatatgatctggtcaggaaggtcaggggaaggcttcccttagcaagtaacttttgagtgcctatctgaaggatgagtgtaagaaggaaggaagtatatttc

SEQ ID NO: 363017 - DNA, 201 bp, Homo sapiens
taaatatccagattttaaatttaaagaaattgctcccattatcttccagtattacattcaatgtagataaagtcagtaagagtctgattctcatcccttgyttaatgatgaattttttctttctctgaggcatttagaattttttaatccttattataaaattttcagcagaatgtttagatgtaaatcttttcttactaa

SEQ ID NO: 363018 - DNA, 201 bp, Homo sapiens
actatacaaaattatcttaagtttgaattatagaggcattttcacagtagcaaccagtaggtactgactccatcactgacaatagctataggtcacactcygtgtttctgagtgacagccacacatggtagatactcatgtcaccacctagtttatcttcaaatgtgaaggactccagtgacactcacatttagtcctttc

SEQ ID NO: 363019 - DNA, 201 bp, Homo sapiens
tcatttattcattcatccaacatgtactaagtgaatacctaacatatggcaggcactgagaatacaaaggaaccacagtttttgatttcatgaaagctatrtagtggagaaaatcagcattaaccaaataatcacatacagaaatgtgaaactgcagctatgacaagtcaatgaaggctatatgcaagatgttaggacagg

SEQ ID NO: 363020 - DNA, 201 bp, Homo sapiens
atataggtctaatgatgcttagatcctaggaaagggcctatggttcatgtttctgacaggagattatttaggtagttcatttagccatttcacatgaccartgtgttaatgtctgaatttaatctactcgttctgtgttgtcttaaaagtcaaacttttcagtaaaacgaaaccaaacaaaaaatacacccctagcagttt

SEQ ID NO: 363021 - DNA, 201 bp, Homo sapiens
ttttggtagagacggggtttctccatgttgataggctgctctcgaactcctgacctcagatgatctgcccgcctcggcctcccaaagtgctgggattacakgcgtgagccactgtgcctggcccagaatttatttttatacatgatatgagttaggaatctaatttcatatctttctatatggataatcaattgttttgta

SEQ ID NO: 363022 - DNA, 201 bp, Homo sapiens
cattttccactaatcttttatagacaatagctaatcttttactcaatagctacccccaggaaatcctccctgatcctaaaactgcatttgttcgttaggtrctcctggcctgtgttcccattgtacctagatcataacccagttataatcttattacattgttatcattaatgctttttaaaaagttttactattcatcac

SEQ ID NO: 363023 - DNA, 201 bp, Homo sapiens
gtagttcaatataaaaaatgttattccttttgaaaatattggaaagggaaagtgtcagacttacttactttgggtaatatatcttcttcatatatatatatatatatatatatatatatatatatatacaatctaaattcgaagagagtaatatttctattcatgtaaatgccatacacattttactcatcaaggccttca

SEQ ID NO: 363024 - DNA, 201 bp, Homo sapiens
ataaaatatctccttatgtgaaataactagatatgctggatcaagcataacaaacatccctttaggacattgctgaatctgtatttaaaacataagggaaraactgagggaacagatggaaaaaggaactggaaatggaagtgaattgactgctgcagctgccctctgggctcctgcagatcttggtaatcaaaaggattg

SEQ ID NO: 363025 - DNA, 201 bp, Homo sapiens
tagttcaatataaaaaatgttattccttttgaaaatattggaaagggaaagtgtcagacttacttactttgggtaatatatcttcttcatatatatatatatatatatatatatatatatatatatacaatctaaattcgaagagagtaatatttctattcatgtaaatgccatacacattttactcatcaaggccttcaa

SEQ ID NO: 363026 - DNA, 201 bp, Homo sapiens
agttcaatataaaaaatgttattccttttgaaaatattggaaagggaaagtgtcagacttacttactttgggtaatatatcttcttcatatatatatatatatatatatatatatatatatatatacaatctaaattcgaagagagtaatatttctattcatgtaaatgccatacacattttactcatcaaggccttcaaa

SEQ ID NO: 363027 - DNA, 201 bp, Homo sapiens
ttgttagagcatgtctcaataggatgtagtttgaggcattaacagggataagatatcagtttgaaaagagcttctatcagaacaacatgaattctgctaamaattaaagcgagaacaaacaccatatttatggtgaagcttgggtggaagagtggtgacatcattaatgctttatgaaaagtttcatgagacctcggaata

SEQ ID NO: 363028 - DNA, 201 bp, Homo sapiens
gttcaatataaaaaatgttattccttttgaaaatattggaaagggaaagtgtcagacttacttactttgggtaatatatcttcttcatatatatatatatatatatatatatatatatatatatacaatctaaattcgaagagagtaatatttctattcatgtaaatgccatacacattttactcatcaaggccttcaaat

SEQ ID NO: 363029 - DNA, 201 bp, Homo sapiens
aaatgttattccttttgaaaatattggaaagggaaagtgtcagacttacttactttgggtaatatatcttcttcatatatatatatatatatatatatatrtatatatatatacaatctaaattcgaagagagtaatatttctattcatgtaaatgccatacacattttactcatcaaggccttcaaataagtttcacatc

SEQ ID NO: 363030 - DNA, 201 bp, Homo sapiens
cttctaactctaaatggtattataatatgctttaccactacaaatcttattaaattattttagtttaccaagttaatacttttaaagaatacactgtcaaattattgattcttattgtgtgaaaaagccaaattgaacaataagtataaatactcttatctttcaaggtattggaaggcataggtttctacaaaataaaaa

SEQ ID NO: 363031 - DNA, 201 bp, Homo sapiens
ttctaactctaaatggtattataatatgctttaccactacaaatcttattaaattattttagtttaccaagttaatacttttaaagaatacactgtcaaattattgattcttattgtgtgaaaaagccaaattgaacaataagtataaatactcttatctttcaaggtattggaaggcataggtttctacaaaataaaaag

SEQ ID NO: 363032 - DNA, 201 bp, Homo sapiens
tctaactctaaatggtattataatatgctttaccactacaaatcttattaaattattttagtttaccaagttaatacttttaaagaatacactgtcaaattattgattcttattgtgtgaaaaagccaaattgaacaataagtataaatactcttatctttcaaggtattggaaggcataggtttctacaaaataaaaagt

SEQ ID NO: 363033 - DNA, 201 bp, Homo sapiens
aattgttttaacaattgtacaagtagatctatttattttcctcacattagacaattagattatctctatttttgtcagttatgaatacatacaaacaatawtacagtgaacagttttatacatgcctttttgagcacttgtatgtttcttgggtagatgcttaaaagaggaattgctgggtcatctagaccaatatacaca

SEQ ID NO: 363034 - DNA, 201 bp, Homo sapiens
gagctactcaagcctcagcaatggcagatgcccctccccctgtcaagccacaacgtcgcaggttgatctcagactgctgcgctagcagtgagcaaggctcygtgggcgtgagacctggtgagccaggcatgggagggtatctcctggtctgccggttgcaaagaccatgggaaaagtgcagtatttggtcaggagtgtact

SEQ ID NO: 363035 - DNA, 201 bp, Homo sapiens
ttcatttattcattcatccaacatgtactaagtgaatacctaacatatggcaggcactgagaatacaaaggaaccacagtttttgatttcatgaaagctaygtagtggagaaaatcagcattaaccaaataatcacatacagaaatgtgaaactgcagctatgacaagtcaatgaaggctatatgcaagatgttaggacag

SEQ ID NO: 363036 - DNA, 201 bp, Homo sapiens
gagacaagatcacgccactgcactccagcctgggcaacagaggaagactccatctaaaaagaaaatcaaactgaaactgttcagacctctagatctagatrccaatttacaagagaaaaagagaatagaggaacatgttaaacaccaccataggggtactgtcagcaaaatctagactgtgggaaactataggacaaatga

SEQ ID NO: 363037 - DNA, 201 bp, Homo sapiens
taattgtatggtttctttattctgttaatgtggtgaattacattgattggcttttgattattaaaccaactttgtattcctcaaaagctctaaatggtttrtataaccttggattgacttattaatagtttattaagaagttttgcatgtatatttatgggtgaaattggtctgtaatttttcttgtaatgttcttttcag

SEQ ID NO: 363038 - DNA, 201 bp, Homo sapiens
gtaatcccatttgagacagctcctttaacaatgctgtcacagttcagggagccttggcatgacacacgtaacccttctgtgcggtattctctctggcattrcattcttacattacattctctctggcattacattctttcactttccattttgtacttttctctattgctttatttgtatgtaatgttctgaagtccaaat

SEQ ID NO: 363039 - DNA, 201 bp, Homo sapiens
tgggattacaggcgtgggacaccgcacccggccccaatatgatgccttttgatgacaaaaaaagccttaactttaatgaagttgaaggtatcagtccttcyttttatgggtgaatgcttttgtgccttaaataggaaattatttcaatccctgaggtcttaaacatattctcctataattttttataaacattttaaagtt

SEQ ID NO: 363040 - DNA, 201 bp, Homo sapiens
ggacctttaactcttatccataacagttgtactaacttacgttcctaccagtagtgtacaagagttaccttttctccacatcctcaccagcatttgttatygcatgtcttttgaatatgtcattttgactggggtgagatgatatctcattgtaatttcgatttgcatttctctgatgatcaatcatgttgcacctgttca

SEQ ID NO: 363041 - DNA, 201 bp, Homo sapiens
aaggctgcctaaacatctactacaattcttactgtgtttttgcttacatgttacagcagaaacagactcactagcagacttttccatgtaaattaaaattyttcatttccaatgttaaatttcctttttttttgtgtacccaggattaatttgagataaatctagtagaccatgttgtctgttgttaggcgccgaatcatg

SEQ ID NO: 363042 - DNA, 201 bp, Homo sapiens
tgttagtatgaaataactacaggaatggagatgtgtggctaaggagaaaagtaaatctaaaacttcacctttctggaggggtcatgcaaggaggcgtgacttgagagaatttgccacggttaatgttacaattctggggcagcctacctttcattgcttgattattctgcatagacccattttttaggtctacaaacactg

SEQ ID NO: 363043 - DNA, 201 bp, Homo sapiens
acttcacccccaccgccccccgcccacctttccaaggagcaatggaaagaggtgcagggtaggagttgggtgtcagcaagaacaaggatataataggacaygtatctgtccctcctctcttgtctgagcctgcttctccaggggtgtcagggaattggcctcctcacgggaccctttaccccagtcaggccagtcaagctg

SEQ ID NO: 363044 - DNA, 201 bp, Homo sapiens
aaattccttcctttattggaccttgcaccattttagaagccgaagctgagattaacatcttctgcttgtctttgtacttcaacttcacccccaccgccccycgcccacctttccaaggagcaatggaaagaggtgcagggtaggagttgggtgtcagcaagaacaaggatataataggacacgtatctgtccctcctctct

SEQ ID NO: 363045 - DNA, 201 bp, Homo sapiens
attgttttaacaattgtacaagtagatctatttattttcctcacattagacaattagattatctctatttttgtcagttatgaatacatacaaacaatatwacagtgaacagttttatacatgcctttttgagcacttgtatgtttcttgggtagatgcttaaaagaggaattgctgggtcatctagaccaatatacacaa

SEQ ID NO: 363046 - DNA, 201 bp, Homo sapiens
aagtgaaggaatctctttttgggtactggtttttcgggctctgatattaggttctctaaagttctgggtgagggcttgttttcttaactcgggaaactggwtgttacctaaatttcattatagctatgagaagggtggttaggtttatagcacaaacacttatgcctttcttttgttaaataatttagtgacctgctgtta

SEQ ID NO: 363047 - DNA, 201 bp, Homo sapiens
ttgttttaacaattgtacaagtagatctatttattttcctcacattagacaattagattatctctatttttgtcagttatgaatacatacaaacaatattwcagtgaacagttttatacatgcctttttgagcacttgtatgtttcttgggtagatgcttaaaagaggaattgctgggtcatctagaccaatatacacaat

SEQ ID NO: 363048 - DNA, 201 bp, Homo sapiens
ttaaaaaaactcttagtgcatctgatttgaactttagattacttgtttagtaaggacaaaaagaaaaaacaaaaacacacacagcaaaaagaaaagacaaraacacccataaccaaccaaataaaaaaccacacacacaacacattaatacttacgttaataccattgattaaaataacctatacctttgctctctaaagg

SEQ ID NO: 363049 - DNA, 201 bp, Homo sapiens
attgtggagtgtctatcttaaaatattagggtttttggtattcttaactttaaccacaagaggtctccaaaggatttgatattttgtgaattactgtttartggttactaaaatcttcacatttctttttatatctgaaagtacaggtttatttactttgtatcatattgtgacttagaacaaatattagagatgatagta

SEQ ID NO: 363050 - DNA, 201 bp, Homo sapiens
tttacaaatgtaataaatataggattgttagattttctatttcttgtgtcgttttgtgatttttaaaaaaggagatagacatattaaaaaagagattaaaaagagattaaagagattaaaaagagatataaaatatttgatcatgccaatatttgattgttttatgacaggcttattttttaatctctgtagaattcattt

SEQ ID NO: 363051 - DNA, 201 bp, Homo sapiens
cctccataccaagtggattcagagagcccagaggtcagaaatcgtgcagagtcttatgttgacagaggaatggccctgccataagaaaggtgcctgagttrtacaaggtgttggcagctggagccaagttacacctggtttacttacctgatataattttaagtgcttcacaaataacgttttttaccttcatagttaaat

SEQ ID NO: 363052 - DNA, 201 bp, Homo sapiens
ttacaaatgtaataaatataggattgttagattttctatttcttgtgtcgttttgtgatttttaaaaaaggagatagacatattaaaaaagagattaaaaagagattaaagagattaaaaagagatataaaatatttgatcatgccaatatttgattgttttatgacaggcttattttttaatctctgtagaattcatttt

SEQ ID NO: 363053 - DNA, 201 bp, Homo sapiens
acagagaaaagaatcagatcaaggagcttagagaatgccaatagttgggaataggagcaagaatacaaacagaaggggaggaattaaagagctaggtggasaaccaggacaaggtagggatgtgtagttataatttgtcacacgtggtataaccaatgatgtgagctaattttttacattattgactctgttatagtttac

SEQ ID NO: 363054 - DNA, 201 bp, Homo sapiens
ttcagagagcccagaggtcagaaatcgtgcagagtcttatgttgacagaggaatggccctgccataagaaaggtgcctgagttatacaaggtgttggcagytggagccaagttacacctggtttacttacctgatataattttaagtgcttcacaaataacgttttttaccttcatagttaaatatttacttaaggtatat

SEQ ID NO: 363055 - DNA, 201 bp, Homo sapiens
tacaaatgtaataaatataggattgttagattttctatttcttgtgtcgttttgtgatttttaaaaaaggagatagacatattaaaaaagagattaaaaagagattaaagagattaaaaagagatataaaatatttgatcatgccaatatttgattgttttatgacaggcttattttttaatctctgtagaattcatttta

SEQ ID NO: 363056 - DNA, 201 bp, Homo sapiens
aattgaacctcactggttctcagttaactcccaaaagattatttgattggcctagtttgagaagcttttatgctagctaggcccattggctggttctggctttttttttttttttttgagatggagtctcactctcacccatgctggaatgcagtggtgctgtcttggctcactgcaacctccacctgctggattcaagtg

SEQ ID NO: 363057 - DNA, 201 bp, Homo sapiens
gatcacctgagcctggggaggttaaggcaacagtgagccgaggtcacaccattgcactccagcctgggcaacaaagtgagaccctgtctcaaagaaaaaamaaaaacaaaaacaaaaacagaaaaaaaacccacgttatttttattatgactgttaatactagaaaagacttaagagttaattttgtccaatagcttccaa

SEQ ID NO: 363058 - DNA, 201 bp, Homo sapiens
ttttaatttgcgtttctctgattagagatgttgagcattgtttcatttatctattggccatttgtatatcttttgggaatcgtctattcagaccttttgcmcatttttaaatagggttatttgttttcttgttattgagtagtttgagttccctgtatatttggtatattagccccttatccagtgtttgatttgcagata

SEQ ID NO: 363059 - DNA, 201 bp, Homo sapiens
tagtcgggcatggtggctcatgcttgtaatcccagcactttgggaggccaaggtgggtggatcacctgaggtcaggagttcaagaccagcctggccaacartggccaacgtggtgaaacccgtctctactaaaaatataaaaaatagccaggtgtggtggcaagcacctgtaatcccagctacttcagaggctgaggcagg

SEQ ID NO: 363060 - DNA, 201 bp, Homo sapiens
atatatatgtgtatatatgtatatatgtgtatatatgtgtgtatatatgtatatatgtgtgtgtatatatatgtatatgtgtgtgtgtgtgtgtgtgtgtrtatatatatatataattttttttttttttgagacggagtttcgctcctgtcgcccaagctggagtgcaatgacacgatcccaggatcccagctcactgca

SEQ ID NO: 363061 - DNA, 201 bp, Homo sapiens
atataccataattgccttaatattttctctgttgtatctactctttgctgtcatgaataatcctgccatggtacctcacagaattgattctttaaaaaaamaaaacaaaaattgggggcacatagtaggtgtgtatatttatggattacatgagatattttgatacagacaccgaatgtgtaataatgttaccctcacatg

SEQ ID NO: 363062 - DNA, 201 bp, Homo sapiens
tttaaagacagttgtcaatatttatacctgtcaaggaagatagcacttttttttttttttttttttttttttttacagaaaattagcttttcaggtcttaraaattaacatgtgacagttttattttattttttttctgctgtacatctgctgacttcagggatattatgactgtccattattctagtgtactcaatgatg

SEQ ID NO: 363063 - DNA, 201 bp, Homo sapiens
ctgctgcttagggaaaccccagcgaacccactgcaatctcaactctcccaggattgtttgttaaaccaaatgactcttttttttttagtggatggattttsaacagcagttaaagtcggggttttcagttcatttgtagggtttttgtttttagtataaaaaatataaatttcaactaatggaggggaggggaaagagtgg

SEQ ID NO: 363064 - DNA, 201 bp, Homo sapiens
gagaaaaaacctgatgagaatttggtcaaggacatggggtaaaacggtatggtgatgggtcaaaaaatgaatatgtagggagtagttatgtgagagagaasgtatcagagaataaaatgcctgactttcagatatcaaatgtgctgtttttctggttgatggcaagatcttatgtatggctatggaaggtgggtagcagaa

SEQ ID NO: 363065 - DNA, 201 bp, Homo sapiens
agtctgttctagtatgctgaattcagatgtatttttgttcagtaacatttttatcttgtcatcatccaaaagctgagaatctgtcctgccggtctgtctcrtcaactctgtagccatctccatgataggaaataagtagtaggaataaagagacatttctcggctgaaggagtgctgatagcctgcagccagccctggcat

SEQ ID NO: 363066 - DNA, 201 bp, Homo sapiens
ctttcctctgccgggttgaatgagagtttaaaggaggaactgctgctgctaagaacaaaatgaacccgagtgcctcttactgtttgtcccgactgtcagtkcatagggattaactaacatccaggaacttttagctggcctctgctttgttcttcaacattcggaccttcagtgagctctagacctgcacaaacgacctgc

SEQ ID NO: 363067 - DNA, 201 bp, Homo sapiens
ataagatgacattattcaattaattatagtgtctttattataaaatattacagttactcaaatgtgttagactcttgggaaagctgaatgtcatacatatrtagcttgatttgaaaattaaattcatttcttgcttcctctgtcactgagtacaatgaaagcagatgttaaagtttatgtgggtgacatttttataaagtt

SEQ ID NO: 363068 - DNA, 201 bp, Homo sapiens
gaaagggttttattaattgacagcatgcagcatatccaaatacctgtttactggtttaaaatgtggaaaataatctgttacatctgagtactttttacttrgatttaaaatatagtaaaacatccttaaattattaagagaatgaaattgggggattggaggaatgggttaagtgtggtgctggagaaaacagcagtttct

SEQ ID NO: 363069 - DNA, 201 bp, Homo sapiens
ttgagttgacttgtttagtaaatgctttcacaaacgttgctgcatatttcataaaaatcatgatatacgtttatttaaaggtccttgtgccattagaatakaattttagatagtttgagaaaatataccatttcagaaattattcttaaggatgatttaagtgaagttttgttaagacacacttgaggttctaaagttatt

SEQ ID NO: 363070 - DNA, 201 bp, Homo sapiens
ccactgaactgtgtacctaagaaatgctaaaatggtaaattttatgttatatatatttatcataatttttaaaagcacttgaagtaagtcaaagaatcctmctgtaatagaaataatcattgcctctacttaacaattttagtatttaaactctagttattacattttaaatataattaaaatatatttttagtttaaata

SEQ ID NO: 363071 - DNA, 201 bp, Homo sapiens
tctctcccttgattattggctttgaagcaaatcctagggagcatcagtttatcctctaatatttcagtaggtacccttaaaaacaaaataagtacatgacrttgtcatataagtgtatcataatttatccattccatttttattatattcatttttccagtattataaatactgttatgatgaatatccatatacagaaat

SEQ ID NO: 363072 - DNA, 201 bp, Homo sapiens
aatatgatgccccccccccctacctttttttttttttttttttgagatggagtcttactctattgcccaggctggagtacagtgtctcaatcttggctcartgcaacctctgcctccagggttcaggcgattctcctgcctcagcctcctgagtagctggaactacaggcatgcgccaccacgagctcattattgtatttt

SEQ ID NO: 363073 - DNA, 201 bp, Homo sapiens
tagttttctgaggacctttaactcttatccataacagttgtactaacttacgttcctaccagtagtgtacaagagttaccttttctccacatcctcaccarcatttgttatcgcatgtcttttgaatatgtcattttgactggggtgagatgatatctcattgtaatttcgatttgcatttctctgatgatcaatcatgtt

SEQ ID NO: 363074 - DNA, 201 bp, Homo sapiens
tcaatctcgttacttgttattggtctgttcaggttttggatttcttcgtggttcaatcttggtggattgtgtgtgtttaggaatttatccatttcttctarattttcggatttattggcatatggttgctcatagtaaccactaatgatcctttgaattcctgtagtatcagtagtaatgtcttctttctcatctctaatt

SEQ ID NO: 363075 - DNA, 201 bp, Homo sapiens
actcaggtctcctgactcccattctgatgagggggcttgtgggcaaggggtgcgtcttttaacctccatcctttttttttttccttggtggtcgaagagtyttactgattttttaaaaaagtgctggattgggtgactagaagaaagctgcccttaggtctccagtttttaagactgcaacagcatggctcaatatttgaa

SEQ ID NO: 363076 - DNA, 201 bp, Homo sapiens
actatgttgcccaggctggtctcgtattcttggactccagtgatcctcttgccttggcctcccaaagtgctgggattacaggtgtgagccaccgctcctgrcctataaattttcttctatgcactgcttttggtgcggttccacaaattttgataaggtgtgcttcctgtttttacttagttccaaatattttaaatttct

SEQ ID NO: 363077 - DNA, 201 bp, Homo sapiens
taagtacgtttgtttgtttttaaaccagagatactgccacaggaaaagcccaagggtgacccctcacttgggtcacctgcacagtatttttcagattgagkctgtggaagggcattgaagactggtgtttagccacctaccgtgttttaatgtaggtggcagcttgggtgcttcaaaatcttgttcctttcgtatatattt

SEQ ID NO: 363078 - DNA, 201 bp, Homo sapiens
ggagtgcagctgtctcttcaatatactgatttcctttcttttgggcatatatatatacctagcagtgggattgctagatcatgtgttagttctatttttasttttctgaggacctttaactcttatccataacagttgtactaacttacgttcctaccagtagtgtacaagagttaccttttctccacatcctcaccagca

SEQ ID NO: 363079 - DNA, 201 bp, Homo sapiens
cgcctggctaatttttgtattctttttaaattaaagatggggtttcaccatgttggccaggctggtcttgaactcctggcctcaagtgatccatctgcctyggcctcccaaagcgctgggattgcaagtgtgagccacctcacctagcccctccatatatttttaatatgtagttatttttatatttaaggtgagtttctt

SEQ ID NO: 363080 - DNA, 201 bp, Homo sapiens
gtatgcttttggcaagttttctgccaagaaaaaattcataatcttgtcacatctttagtgatgaacataaaccttttaaacaggaaacacttaaattgcartgaacatgtcaaaaatgatactgttcttttattacctatcttttcccctctgtgcctttgctacataactgtttatttcttagaggtattttatttagca

SEQ ID NO: 363081 - DNA, 201 bp, Homo sapiens
ttgatttttcagttggttctactttttccttgtgatggagaggcaacctccaaccttcttatatgctaaactggaaaccagaaacttccctgacctttttrtggatgaaaatctttattttcatggttccttctgatctctggatagggaagagagatcagaaaggagcaataagggaggtcatgtgttgctgctgcaggc

SEQ ID NO: 363082 - DNA, 201 bp, Homo sapiens
taagtttccacatttttatggggctgttctgaactcttatttttcactggtcagtgtttgtgtgcaagccagaatcacacaagcttatttgctatagcatyataataactttttacatctgtagggaaagttctcccctcctattctcctaatagaattcctaatttctatttagcttttgctcctctctctattttagag

SEQ ID NO: 363083 - DNA, 201 bp, Homo sapiens
cagaaaggagcaataagggaggtcatgtgttgctgctgcaggccgagaacagccttgaggagcacagtgtcggatcccagacccttaggtcttccggctamaagtgcctatcagcttggagaaggagcaccatggagataggtggtcctaagatccctcggggcagattttaagcacagctttttaaagaaatcctgcctt

SEQ ID NO: 363084 - DNA, 201 bp, Homo sapiens
gagcacagtgtcggatcccagacccttaggtcttccggctaaaagtgcctatcagcttggagaaggagcaccatggagataggtggtcctaagatccctcrgggcagattttaagcacagctttttaaagaaatcctgccttaatacgtttatttgttattgttatcagaaagaaggcacacattcagacttttaataagg

SEQ ID NO: 363085 - DNA, 201 bp, Homo sapiens
gggcttccttgagtgacagaacattgaggggagacccgcagtgggtgcttctttctgcaggcagggcatcccatcaagtgagaagtgatgagccttcagcmgagaggggaccctggagtgggtagctcctctccgcaggcaggttgtctgcttgtctcttcaagtttggccgagtctggggatttgtatgggcttgagagg

SEQ ID NO: 363086 - DNA, 201 bp, Homo sapiens
cgcagtgggtgcttctttctgcaggcagggcatcccatcaagtgagaagtgatgagccttcagccgagaggggaccctggagtgggtagctcctctccgcmggcaggttgtctgcttgtctcttcaagtttggccgagtctggggatttgtatgggcttgagaggaggaagtgtgtgctgattggttcatgggctgccatg

SEQ ID NO: 363087 - DNA, 201 bp, Homo sapiens
ggcttgaaggtggggcttcacccggacctgaccctttctgctcaggagcctgtctgcctcctgccgtcatccatggcacccaggctgtttgtgccatgggrcacctgcaggacagctctgagctgccctcagccctctccttggcctccttcccatgttcatcagtgtccaaagtccagagggggccgaggcagcaggggg

SEQ ID NO: 363088 - DNA, 201 bp, Homo sapiens
aaagtccagagggggccgaggcagcagggggctggcatgttagcactgccctgagcatgtgcacacccagccaggttgcaacagttcctaggcttggcctyaactttgagatcagagtgggtgctgggagctgggagaggccaggcagtcggagcaggtacttctgagcctgcagagggagggggaattccctttctgggc

SEQ ID NO: 363089 - DNA, 201 bp, Homo sapiens
agggagggggaattccctttctgggcccttgagattgcagagatgcccgggtccacagccacagcttgggtggctgtggctgcagctgcacccaggagggyggggctcctgcctgctcccagcccccaagagcacagggatgcccaggtttgcagccacaactgggcagccacagctgtgcccagggagcgtgaggctctc

SEQ ID NO: 363090 - DNA, 201 bp, Homo sapiens
gccaactcagaagggggcgaggcttcttccacccatttctggctcctgtcggttctgtggagcatgcagccctggctgcgcctctcctactgcagctggcrttacggctgtggctgttccagatgggctgccattgccatcataatgacctggatttctcttgccaacctctccatgcctcaccgtcttcttattgctgat

SEQ ID NO: 363091 - DNA, 201 bp, Homo sapiens
agaagggggcgaggcttcttccacccatttctggctcctgtcggttctgtggagcatgcagccctggctgcgcctctcctactgcagctggcattacggcwgtggctgttccagatgggctgccattgccatcataatgacctggatttctcttgccaacctctccatgcctcaccgtcttcttattgctgatctttggag

SEQ ID NO: 363092 - DNA, 201 bp, Homo sapiens
gcgaggcttcttccacccatttctggctcctgtcggttctgtggagcatgcagccctggctgcgcctctcctactgcagctggcattacggctgtggctgytccagatgggctgccattgccatcataatgacctggatttctcttgccaacctctccatgcctcaccgtcttcttattgctgatctttggaggtttgctg

SEQ ID NO: 363093 - DNA, 201 bp, Homo sapiens
acttttaaacacagaaacacagagaagtattgttttgtcctgtgaataccaaaactttgatttggatttattagtgagaaaaaagcaggatcaaacgtttycctactttttaggagttctgtgcaatacctcaaattctatccagaatgttcctacaaagtacagtatgatgttagacactctttacatccaacatgtttt

SEQ ID NO: 363094 - DNA, 201 bp, Homo sapiens
ctgaatttaggatgagagatcttatttaattcaactccctgattttagaggggaggaaactgaagcctagagaggtgtattggcttgtccagagtccacastagaaaccacctttcttttgtgggccaattctttattcatgtttatacttttattttcacactctgttattttcttgcttatcaaggctctcatagaaat

SEQ ID NO: 363095 - DNA, 201 bp, Homo sapiens
ataaataacatttgtcaggattcatttttgctaagctttaggtcaagtagaatttagatttatccttgctatctctgagtccttctctggtcttccttgtstcatttgtcgtggcaacccttttctctttttttacaggaatagggtgtgggtggagggggcacttaggttttcctcttagtgccttgtactcttacatga

SEQ ID NO: 363096 - DNA, 201 bp, Homo sapiens
ctggtgaggttgtggagaaaaaggaatgcttatatgctgggtgagagtgtaaattagttcaactgttgtgtaaggcagtgtggtgattcctcaaagacctraagacagaattaccattcaacccagcaatcctgttactgggtatatacccagagaaatataaattgttgtgtcataaagacgcatgcacacgtatgttca

SEQ ID NO: 363097 - DNA, 201 bp, Homo sapiens
taacaaaatatcatagactgagtagctcataaacaacagaaatttattcctcagagttctagaggctggaaagtccaagatcaaggtaccagcagattcartttctggtgagggcctgtttcctggttcctagatgacacctcacatggtggaatgggtaaagggtctcttactcatgtattcacacagtggaagggataa

SEQ ID NO: 363098 - DNA, 201 bp, Homo sapiens
gtttgcaggcactggcttctagctgcatcttccctaatctgttcccacctacttccgcacctgtgtttctcaactttcatttgggggcaaaaggtactgtsagtgccttgcaacggaagtttaggtctgtgtttctgagtgagttggcattctttccacctcccacttcagcacccacccttggaaagctcttatctgtct

SEQ ID NO: 363099 - DNA, 201 bp, Homo sapiens
cccagttcttttaaagttttaagttcatgtgtatgtatatatatgacaggctgggtcctctaggaggcagattctgagatttgcattcaggaggttcattsggagtgctgggctgtgttatggtcaaaaggcttcagccagccctgcagagaactctgaggctagagtggtccttcagagttacctcaacttggggtgagg

SEQ ID NO: 363100 - DNA, 201 bp, Homo sapiens
tgggaggccaaggtgggtggaccacttgtgcccagaagttcgagagcagcctgggcaacatggccaaaaccccatctctacaaaaaaaaaattagctaggygtggtagtatgcacctgtagtttcagctactcgggaggctgagatgggataatcaccttgaacctggaagattgagactgccagtgagctgagattgcgc

SEQ ID NO: 363101 - DNA, 201 bp, Homo sapiens
cattactttaaagattcagtatgccaaaggttactgaagatattgagaacctacagaagatttcttttattcatagattttattcagatatgcaacgattrcatccagaaattctatcagagcattaatgaaaataatagtattacataacaggcaatcacagtcagtatccacatgtcacttattttgtagattgtgaca

SEQ ID NO: 363102 - DNA, 201 bp, Homo sapiens
ttattcatagattttattcagatatgcaacgattgcatccagaaattctatcagagcattaatgaaaataatagtattacataacaggcaatcacagtcartatccacatgtcacttattttgtagattgtgacaaatttttcattctaaacaggctgctgtcactttaaatgcttatgggaatactttccacctttacgc

SEQ ID NO: 363103 - DNA, 201 bp, Homo sapiens
tgagggaaaagtatctatgagaatttaaaaataaacttagccctcttcctctgcaaagtccagagacaaattaaactctttagttgccatattattattgktctttttctctgaaaaaaacctagaataaaactttactacaaaggatatatatacaagatagtaataaaatatgtcaatttctaaatttgctgtagaaat

SEQ ID NO: 363104 - DNA, 201 bp, Homo sapiens
cgatttaataaagttatgagaacttacatgtcctttttaatcctctaatttatttcagctttcaggcacagttttgatctcctttctttatttcacaggcrcagcagaacaagtccctgattttgtcaccttcctttaccaaataactagaggaattgcagcaaggagttatggattaaatgtggctaaactagcagatgt

SEQ ID NO: 363105 - DNA, 201 bp, Homo sapiens
ttaagcctgtgtttgctgcaggattttggtagctagccttgacctggttgaagaagttgtctaagggtcattttgttctctcactcactcaccacttagtrgtggatggtgtcgggaagaaacctgtttcccagctaaataaacatggtttaaatattagagctgtgaagtctaaatttttatatgatattttttctatat

SEQ ID NO: 363106 - DNA, 201 bp, Homo sapiens
agccttgacctggttgaagaagttgtctaagggtcattttgttctctcactcactcaccacttagtggtggatggtgtcgggaagaaacctgtttcccagytaaataaacatggtttaaatattagagctgtgaagtctaaatttttatatgatattttttctatatatacaaagaattgatttttgtatatcaattacct

SEQ ID NO: 363107 - DNA, 201 bp, Homo sapiens
cttttgaaaatattggaaagggaaagtgtcagacttacttactttgggtaatatatcttcttcatatatatatatatatatatatatatatatatatatayacaatctaaattcgaagagagtaatatttctattcatgtaaatgccatacacattttactcatcaaggccttcaaataagtttcacatctgacttttaca

SEQ ID NO: 363108 - DNA, 201 bp, Homo sapiens
tgacccagagtcacacagctacttgatggtggagcagtaattggaactcaggtactctagctccataccctaaatagtcaattgggttgctattctgcagraaaaaaaaaaaagtaagtctgtgttatgctggcgttttactctttaattagcttcattgttttcggttggtgttacttttcatcctgggaacacttcata

SEQ ID NO: 363109 - DNA, 201 bp, Homo sapiens
acttcttcaagtatttgcatttttgttgatacaaatgtgaaaagaatcagaaataatcagctctagaacctattagaaatgtattgaaatttggaatttartatttatgaatgaatatgttccagatgcatgcttgacggctgatgagcaatgacattcagaatgtcttacccatttcagatatatatgccttgaaaacca

SEQ ID NO: 363110 - DNA, 201 bp, Homo sapiens
ttataattagagaaagctgaaggctcattgaatcaagaccggtagcagccttggtttcaattaattctaaacacggcttgagttgctgaggctcctgactrtcagactctaccttgtcttttatggtgttaaaaacagttcacccatagggttttccagagctaaaagtagaggattctttgaagagtggatggcaaggaa

SEQ ID NO: 363111 - DNA, 201 bp, Homo sapiens
gataagccataaatctggttcaaaggtttccacaaagctaaatttgttcagttaaatagttcacagtgcccagaaagccaaatgaattaattagttaagarggcaacttaaaacaaatttttattgtgtttgacagcaatcttttagtaataaaatcagctagaagaatatattgggtagtatcacacagactaggtttta

SEQ ID NO: 363112 - DNA, 201 bp, Homo sapiens
taaaacatcaatgcccaatactgctgtggataagccataaatctggttcaaaggtttccacaaagctaaatttgttcagttaaatagttcacagtgcccaraaagccaaatgaattaattagttaagaaggcaacttaaaacaaatttttattgtgtttgacagcaatcttttagtaataaaatcagctagaagaatatat

SEQ ID NO: 363113 - DNA, 201 bp, Homo sapiens
atgagacattttatgaaaaagaacaccgttagccaatagcaatacatttaagtgccataagtaatacagtagactttagcatttttttttctgttcagtaktaattgttttaagccaccagcctgtagtcctgtggtggtttgcgcaattggtatgctgcaatggaaaatccatcatgcaagataccccagagtccagatt

SEQ ID NO: 363114 - DNA, 201 bp, Homo sapiens
ataggaaaattgttatgcaatccttggggtgttgcttcgccagctgtaaacctctgtggctggtggtgcctttgcccgagtttttacttgggcctgctggrctcattcctcccactcggcctggcaggctgtgcttggcttttgcttttggcctgaatctcgcagctgccaagggtgagccaggagtggagtggtgagggt

SEQ ID NO: 363115 - DNA, 201 bp, Homo sapiens
atcatactagctaaagaaacagttgctaacttgtttaccaaagtacagtagtgcagttaacttctctttctctacctccttctcctgtgcttccgccttgyactcctccacttcggtatactgtagttcaccaagtccagagtgctggactctacaaatggcacacagcctcctctagtgacactcttttctggctcattt

SEQ ID NO: 363116 - DNA, 201 bp, Homo sapiens
gaaaaaacaaaaacacacacagcaaaaagaaaagacaaaaacacccataaccaaccaaataaaaaaccacacacacaacacattaatacttacgttaataycattgattaaaataacctatacctttgctctctaaaggtctggggttgtgagctaacttaaaaaccagcttggttgttcacagttactggtttccttttg

SEQ ID NO: 363117 - DNA, 201 bp, Homo sapiens
aatcctgaagtttatagatagcttagattgaggacagacagtggtaaagccctaaagaagagcttctgaaccctgaaccctgaggtacatggtccatggtyggatgtggcagaaaggtcagcgcccaaatgagagagctgcaggggaataacaaacagccagccagttttcattttagtgtatgaaggaaatgttaagcaa

SEQ ID NO: 363118 - DNA, 201 bp, Homo sapiens
agcgataactgctgtaattaataaacttcgaatatgtatttgcatgttttgattttttagagttggggataaaactgaattatttaaagacctttctgacytccctttaataaaaaagaggaaggatgaaattcaaggtgttattgacgagatccgaatgcatttgcaagaaatacgaaaaatactaaaaaatccttctgc

SEQ ID NO: 363119 - DNA, 201 bp, Homo sapiens
caaacacataaacctttttttttaaagcactagtgaaacatttaaaaatttttgagcactgacagggtatctaatgatactgaagaattacttaaaaaaaygtttaagtgagataaacagtgcaatgcaatggttatgatttaatagaaaaatccttactttagtgatacatgctaaaatgtttacatattaaatgatttg

SEQ ID NO: 363120 - DNA, 201 bp, Homo sapiens
taaatgtgggaaacttttttggttgttattgtttcacattttttctgtcttcctgtctcttgtgtctccttctgagagtttattacagggatgttaactayttgatgttatctgttaagtcattgaggctcttttcatttgttttccaggcttatttctctttgtacttcattgtggatagattctactgctctgttttca

SEQ ID NO: 363121 - DNA, 201 bp, Homo sapiens
gcatacactgttgctattattattgtgaacaaaatgttatgctagatccactaaaaataagaaaaataaaagtttttcgccttcactggttccttcttcartgctgcacttttctttatgtagatacaagtttctgacccctgtcattttccttccttctaaagaactttccttaaacatttcaggatagatctgctggct

SEQ ID NO: 363122 - DNA, 201 bp, Homo sapiens
acttttttggttgttattgtttcacattttttctgtcttcctgtctcttgtgtctccttctgagagtttattacagggatgttaactacttgatgttatckgttaagtcattgaggctcttttcatttgttttccaggcttatttctctttgtacttcattgtggatagattctactgctctgttttcaagttcagtggtc

SEQ ID NO: 363123 - DNA, 201 bp, Homo sapiens
taataccgattctgaaacttaggtttagttccaaaactgatacttattaaagttgctaaaaatagtttttacttacaaaaattatatttccactgtagtastggaaatttaaaaaaaaaagtaaaacaacaaagctgggcatggtggcacatgcatgtaatctcagccacttgggaggctgaggaggaaggattgcttgag

SEQ ID NO: 363124 - DNA, 201 bp, Homo sapiens
ttgatctcagtcagtttggatcatcaaatacaagtcatgaaaatttacagaaaactgcttccaaatcagctaacaaacggtccaaaagcatctatacgccrctagaattacaatacatagaaatgaagcagcagcacaaagatgcagttttgtgtgtggaatgtggatataagtatagattctttggggaagatgcagagg

SEQ ID NO: 363125 - DNA, 201 bp, Homo sapiens
ggaggcttgttagactcttcactcttaactatttaagtgggtgtggcagatttgaaactgtagtaattctctataaatgagggcatcactagttcaaaacwgttttctaatgatgaaattttttagattagccactaattcttaatataattaatgtaaaagctacagtgtttctattaatgggaaaaataaactcaagaa

SEQ ID NO: 363126 - DNA, 201 bp, Homo sapiens
ccgcctgcctcagcctcccaaagtgctgggattacaggcttgaaccactgcacccagcccgaaagaaattcttaaaatctactgaaagttaagatgaccckctatacacccttcacctaggttcatcacatgttagcatttgccacatttgctttttatctctcatgtattttttttcctgaaacatttggaagtaagttt

SEQ ID NO: 363127 - DNA, 201 bp, Homo sapiens
catggcaatggttcctaaacttggatggtcttctgaatcatctgagggagcttttgtgttttagtttagttttcttacatccctggagattcgatttactrtgttttgggagggattaattggtttgtatgggaacaaaacaaaagccttccaggtaattctgaggtatttcctggatcaggagcccttgacttggaggga

SEQ ID NO: 363128 - DNA, 201 bp, Homo sapiens
ccagatcccaccactgcactccagcctgggcgacagcgagactccgtcccaaaaaaaaaaaaaaaaatgtgtgtgtgtgtgtgtgtgtgtgtgtgtgtatrtatatatatatatataaagaattctgtcaaataaattgtattcatgatagctatttgatatattatagttttgactacaaaactgtgctttatactaact

SEQ ID NO: 363129 - DNA, 201 bp, Homo sapiens
ttacctagaatagtgggttctgaagtactgtcaggttctctgaggtcattcatggcaatggttcctaaacttggatggtcttctgaatcatctgagggagmttttgtgttttagtttagttttcttacatccctggagattcgatttactgtgttttgggagggattaattggtttgtatgggaacaaaacaaaagccttc

SEQ ID NO: 363130 - DNA, 201 bp, Homo sapiens
tagcagttatccacttctggtcttatttcctttttaatacccaggaatagctgtgtgtactgctaagaattcacttttctgcagtatcacacagttcaggytgaagacagaggaccgctttccttttgtgatatttatgctacaaagtaatgttttgcctaatgcatttccacttatgagataaattgtggatattatcaa

SEQ ID NO: 363131 - DNA, 201 bp, Homo sapiens
gcagtttcttctgaagattcgaaacgtcaaattaatcaaaaggtatgtaactgctatagatgagtatccagttacctagaatagtgggttctgaagtactrtcaggttctctgaggtcattcatggcaatggttcctaaacttggatggtcttctgaatcatctgagggagcttttgtgttttagtttagttttcttacat

SEQ ID NO: 363132 - DNA, 201 bp, Homo sapiens
ggctgatgttatttgtatatacttttttattcattgagctatgaactccagagttagtatggtttaaaaaaactttttttgttgttttgttttggaaacakctccttcttgggaaaataagagttagtatttctagagaaaaatgttagtttagaaagagtagttattttaggctaaggcagacctgagcttgttaatgaa

SEQ ID NO: 363133 - DNA, 201 bp, Homo sapiens
ctttaactctctgcaaagaccctatcttcaaataaagtcacattatatactgagggtgtggacttccacatttgaatgttatagggacataattcaactcrtaacatagggcgaggacattcttttccacctccctcctcagtccgtttgtgcctgtggtagttgcacagtaaagatttgtagatttgaaaaggaaatacc

SEQ ID NO: 363134 - DNA, 201 bp, Homo sapiens
tatcctttttggggttcactcagcttcttgaatctgaaagttgatgtctcttgccaaatttgtgaatatttcatctattatttcttcaaggtttttgttgktggtggtggtgttttttttgttgtttttttttttttttgcctttcttttctcctcttgggactttgatcacaagaatgttagatcttttgttatagtccc

SEQ ID NO: 363135 - DNA, 201 bp, Homo sapiens
tgtaaaagtgaaaaaagtctattttaaaggaaaaaataattcttgctaacctcctcacccatttcacttaaattagttttattataatgtgacttaaatayttataaactgaaaacttagtgctctaggttttatacctattttaacaggaataaagtccaagcaaaatttgagattaaagtaaatgtatgaaacaaataa

SEQ ID NO: 363136 - DNA, 201 bp, Homo sapiens
tgggaaggtgggactgggtagaaagagggcattccaggaagtgtggtcacaggatgagaaaagggaattgggaacatcgagttgactggagtgttaggaawatatgggtcaagagtagcctgcaacagaatgtagtgcagaagagctgttcagtgagtatttgctgaatgattatgtttaaggccagagaggaagactgga

SEQ ID NO: 363137 - DNA, 201 bp, Homo sapiens
tttgtgaacttgcattcctgctgcaaaatcacttttgtattctgtggtttttttttttttaactttacaattccccatttttaaaaactttattgcagaamatttcaaacatacacaaaattatacagaatagtgtcatgaactcctgtcactctattagccagcttcagcatttctcaggaccattctcatttttctaca

SEQ ID NO: 363138 - DNA, 201 bp, Homo sapiens
cagagaaaatgactgttaaacattttggcacattatttccatgtgtgtatatcacttttttccatttgtgaacttgcattcctgctgcaaaatcacttttstattctgtggtttttttttttttaactttacaattccccatttttaaaaactttattgcagaaaatttcaaacatacacaaaattatacagaatagtgtc

SEQ ID NO: 363139 - DNA, 201 bp, Homo sapiens
tatatgttcattcagaagacaaaaaaaaaaggataaattcataagttgaattctgtaacccagagaaaatgactgttaaacattttggcacattatttccrtgtgtgtatatcacttttttccatttgtgaacttgcattcctgctgcaaaatcacttttgtattctgtggtttttttttttttaactttacaattcccca

SEQ ID NO: 363140 - DNA, 201 bp, Homo sapiens
atagtatcatttagatatctgtgagtctgactcttcgtgtaagagtcctgaaaagcagacaggtttctaacactttagaaatagagtacatacatactccygagtgtatcatctttactttttccatgtttatgctgtgttatagccataactggggaaatacattttttctgtaacattatatttgtatttgtttttagg

SEQ ID NO: 363141 - DNA, 201 bp, Homo sapiens
cactatgttgcccaggctggtctcaaactgttgaattcaagtgatcctcctgccttggcctcccaaagtgctgggattacagggatgagctaccttgcctrgctgattttaatttttatcaatgaacataatttttaaaattcaatggtgctaaaaggctcctgctgacaagcttccatcccttcagttcacgtccttccc

SEQ ID NO: 363142 - DNA, 201 bp, Homo sapiens
ccactgcccttgttcaggccttatctcttccagcagctgttccaaaggcctactctgttttcctttcggagtgctcacctccaccgaagcctccacccagytgccaattctgccccatgcctgataatttgctcgtgcgttgacatacataaaatttctaagacaaaaattttttaataatggtaaatgaaccttgggaac

SEQ ID NO: 363143 - DNA, 201 bp, Homo sapiens
taaataaaaacccagcctgcctgagtgcctgagttcctggatttctagaggtggtgttgcatatagacagttgagcagatttttctctagttttatggtaycagagaatttgtgataagggaagacaggaaatccatctttattcattatcctcaggaaattaggtaaagagaatgagaaaaaaaaaaagttccaattcag

SEQ ID NO: 363144 - DNA, 201 bp, Homo sapiens
ttatttttttctttatttttatttttttattttgtagagacagcatcttgctttgttgcccagggtggtctctcaaactcctagccttaagtaatcctacyaccttggcctcctaaagtgctgggattacaggtgtgagccactgcgcctggctgtgaaccattattttaaaggagaaaatagttaatattattggaaatt

SEQ ID NO: 363145 - DNA, 201 bp, Homo sapiens
ataagtatagattctttggggaagatgcagaggtaagtcgtcttttcaggcactattttatatttttcttgtctagccttagatatttttcagtatttttrtttcattttctgaccttatataaaagctgatttgatcaatcaccttttaaaaaatactgttatgtaaagtaaaaactaaaaatgaacacaagaaacttgg

SEQ ID NO: 363146 - DNA, 201 bp, Homo sapiens
atacaagtcatgaaaatttacagaaaactgcttccaaatcagctaacaaacggtccaaaagcatctatacgccgctagaattacaatacatagaaatgaarcagcagcacaaagatgcagttttgtgtgtggaatgtggatataagtatagattctttggggaagatgcagaggtaagtcgtcttttcaggcactatttta

SEQ ID NO: 363147 - DNA, 201 bp, Homo sapiens
ggtggtgcctttgcccgagtttttacttgggcctgctgggctcattcctcccactcggcctggcaggctgtgcttggcttttgcttttggcctgaatctcrcagctgccaagggtgagccaggagtggagtggtgagggtgaggggtgtgtgagcaggtgaccatggggtctggcccctgtgcactgccaggcatgctggc

SEQ ID NO: 363148 - DNA, 201 bp, Homo sapiens
atatacctgcatttaatatagaatacatactatattccatgacataaaagtcatggaaacaaaataggaaactcatcaaaattaaaagcaaaggcattctyaggtataggaaaattgttatgcaatccttggggtgttgcttcgccagctgtaaacctctgtggctggtggtgcctttgcccgagtttttacttgggcctg

SEQ ID NO: 363149 - DNA, 201 bp, Homo sapiens
tgcttaatattcaagtatttagattgatttaattgttagcatcccataaggataaaacttttttttcctggaagcttatctcatttcctaaaagaataaartataaagtaagaataagtttttacaatgtaagaaatatattttctgtgttgattaacttttatactacatagtatatacctgcatttaatatagaataca

SEQ ID NO: 363150 - DNA, 201 bp, Homo sapiens
catgtccacatcacaggaaattagaagtaagtagacagagggggcacgtagaagcagtgccattattacaagtgataagctgtttgatggcatggatagaygtggatgaatggcaaaaagctactgagtgaacataaatgccccatggtccaggaccattagggtggggtcagcaatgccataactctcaataggttttga

SEQ ID NO: 363151 - DNA, 201 bp, Homo sapiens
attgctttatacatagaatgaccaacttggcatgtccacatcacaggaaattagaagtaagtagacagagggggcacgtagaagcagtgccattattacargtgataagctgtttgatggcatggatagacgtggatgaatggcaaaaagctactgagtgaacataaatgccccatggtccaggaccattagggtggggtc

SEQ ID NO: 363152 - DNA, 201 bp, Homo sapiens
cactgcactccagcctgggcgacagagcaagactccctcttaaaaaaaaaaaaaaaaaaagattctgagtcaaagtgctcaagttgaatgcattttgtcayccacaagacaaaacgtgttaaccccttgtggtttactttatctataaaatagagataacaatagttcctgcttctagggttgttgtgggaattaaagact

SEQ ID NO: 363153 - DNA, 201 bp, Homo sapiens
attattgctttatacatagaatgaccaacttggcatgtccacatcacaggaaattagaagtaagtagacagagggggcacgtagaagcagtgccattattrcaagtgataagctgtttgatggcatggatagacgtggatgaatggcaaaaagctactgagtgaacataaatgccccatggtccaggaccattagggtggg

SEQ ID NO: 363154 - DNA, 201 bp, Homo sapiens
tcacctaagtatagtggttattaagcatagaagtcataaagtttatccattaaagctcactttattgataggagcatttactccaaggtctcagaagagcrtatacattattgctttatacatagaatgaccaacttggcatgtccacatcacaggaaattagaagtaagtagacagagggggcacgtagaagcagtgcca

SEQ ID NO: 363155 - DNA, 201 bp, Homo sapiens
gaaattctaatgaaagctgttggcctttttcttcagaaaaattctcaagccaacaaaattttgcctataattttcaagatttcacacctttcccacaaagyccagatccatgaactcctccctcagccaggctaatattgattgacttatcttagatcatcaagaaaaaaaaggtgtttttgtttttagtctcttttaata

SEQ ID NO: 363156 - DNA, 201 bp, Homo sapiens
ttagagaaatggttctatatatgtatatgtatgtgtgtatgtatatatatgagtcattgaaattctaatgaaagctgttggcctttttcttcagaaaaatkctcaagccaacaaaattttgcctataattttcaagatttcacacctttcccacaaagcccagatccatgaactcctccctcagccaggctaatattgatt

SEQ ID NO: 363157 - DNA, 201 bp, Homo sapiens
tattttttaaaagtttacattttattttgtattttatttttattgatggagtcttgctctgttgtccaggctagagtacagttgtgcgattatagttcacwgtagtctcaaacttctggtctcaagcaatcctcccaccttagcctgcagatgaggtgagactaaaggaaaagcagtcattttaatctgtagctgtgattg

SEQ ID NO: 363158 - DNA, 201 bp, Homo sapiens
tcgcaaccttagctttacattggaatcacctggagaacttcaaacaaaaattgccattaagaaccttccctcagaatcttatctaattggttttcactgasaaatgggcatggatattttttaaaagtttacattttattttgtattttatttttattgatggagtcttgctctgttgtccaggctagagtacagttgtgc

SEQ ID NO: 363159 - DNA, 201 bp, Homo sapiens
aatcagggaatttaactcatgctccatcattgaaatctgtaattcagaatagtgattggttcgcaaccttagctttacattggaatcacctggagaacttmaaacaaaaattgccattaagaaccttccctcagaatcttatctaattggttttcactgacaaatgggcatggatattttttaaaagtttacattttattt

SEQ ID NO: 363160 - DNA, 201 bp, Homo sapiens
tgctttattgggaatctacctctttaaaaaattctatgctggttatgaattgacataatgagaccaaaattactattgttctgttttcttcttatttgctrcctaagagccaaagaaatgtctgaggaccaggaatgtttcaaagtctctggaaaaattgaaagaattctgctgcgattctgcccttcctcaaagtagagt

SEQ ID NO: 363161 - DNA, 201 bp, Homo sapiens
tgtatatacttccagattttaaaaatttgtacatgtgtatatgtgcatagtcataagctcaaaaattagtttaaatatattttacagattatattatattytatactaatttgctactatctttttctactattaatagaatttagaaaattttgaacaattttcagtatcaggacctgcagatctactctccccgctttt

SEQ ID NO: 363162 - DNA, 201 bp, Homo sapiens
ggtttcaggaatgagtgaaattgcatctgtgtttaatatgccatctttaccctgaacccagtgtttctttctttttttaaaaaaatcacattatagttagrttcattgctttattgggaatctacctctttaaaaaattctatgctggttatgaattgacataatgagaccaaaattactattgttctgttttcttcttat

SEQ ID NO: 363163 - DNA, 201 bp, Homo sapiens
tttgcctttccagggaagaaatctccagttggctgctgatgtggaggaaggacagttgtctttgagcttggagtatggtaggggtttagggaacaaattgytttgaaccaatcctctttattttagaacctccctttattcctttccagagctactggtactctaattcctgagtcttttgagcattttgtgttgtaatta

SEQ ID NO: 363164 - DNA, 201 bp, Homo sapiens
tctttccgcttgagctagtaagatttcccagtcaagagtcctcccagcttctgcctggaggggagtaggagtgctctggcttcctgggttctggagaggcygtggatctcagcatacattgtgtctgtgttcctaatcgtccttctgggttaggtacagtactccatcaactgtgcttgttttgcctttccagggaagaaa

SEQ ID NO: 363165 - DNA, 201 bp, Homo sapiens
ggaaacaaaaagtacactccacagggtgggagtgggccctagcaagcagcttgggagcaattttaaacttttagaaatgaacaaaacacaactcttgccckcagagtgtttttgctttaatagggaaggtaagaggtgataaatgtgtgcagtcccagttcctttacatttaatagcaccaacctaatagtagtgctctaa

SEQ ID NO: 363166 - DNA, 201 bp, Homo sapiens
tggaaacaaaaagtacactccacagggtgggagtgggccctagcaagcagcttgggagcaattttaaacttttagaaatgaacaaaacacaactcttgccytcagagtgtttttgctttaatagggaaggtaagaggtgataaatgtgtgcagtcccagttcctttacatttaatagcaccaacctaatagtagtgctcta

SEQ ID NO: 363167 - DNA, 201 bp, Homo sapiens
agggaaaattttaaactattttttttgaagcaacaaaagcagagatttattggaaacaaaaagtacactccacagggtgggagtgggccctagcaagcagyttgggagcaattttaaacttttagaaatgaacaaaacacaactcttgccctcagagtgtttttgctttaatagggaaggtaagaggtgataaatgtgtgc

SEQ ID NO: 363168 - DNA, 201 bp, Homo sapiens
gtatatttttgaagagcgatacaaatatacatttcaaaaaagagagtaatagtaaacaaggtgaatatacatttgagaaaagagtcaaatttaaatttttrtggctagaaaattcacaggagatctaatgaaagcctgtgaagaggtttaaatataaatagggaaaattttaaactattttttttgaagcaacaaaagcag

SEQ ID NO: 363169 - DNA, 201 bp, Homo sapiens
atgtcctttttaatcctctaatttatttcagctttcaggcacagttttgatctcctttctttatttcacaggcgcagcagaacaagtccctgattttgtcrccttcctttaccaaataactagaggaattgcagcaaggagttatggattaaatgtggctaaactagcagatgttcctggagaaattttgaagaaagcagc

SEQ ID NO: 363170 - DNA, 201 bp, Homo sapiens
tttcacaatactttttttttttttcccagcaaatacaactccaagatcttcatcccactttcattccaggcagtttttttttatgtctataggagggaaamtctttgtataacatacacacttatagtatatttttgaagagcgatacaaatatacatttcaaaaaagagagtaatagtaaacaaggtgaatatacatttg

SEQ ID NO: 363171 - DNA, 201 bp, Homo sapiens
tgccctagcagaggttctccatgagagctctgccctgtagcaaatttctgcctggacatccagttatttccatacatctctgcaatctaagcggaggttcscaaacctcagttcttgacttttgtgtacctgcaggctcaataccacatggaagctgccaaggcttggggcttgcatcctctgaagccacaacctgagctg

SEQ ID NO: 363172 - DNA, 201 bp, Homo sapiens
taacatatccccatcattaaatgatgcaagactgtcaacacctgtagtaagttttaggcagtgagtaagtatttattattcatctagtagcatctgccagmcataagagtccctgattatttcatctctgtttttaacactttggttttaaatactgtcaaagtcaaataaaatatagagacaaatctctaaaacatttta

SEQ ID NO: 363173 - DNA, 201 bp, Homo sapiens
tattgtgtgggagtcttagtctctttgtaggtgtctaaggacttgctttatgaatctggatgctcctgtattgggtgcatatatatttaggatagttaagycttcctgttgaattgatccctttaccactgtgtaatgcccttctttgtctcttttgatctttgttgctgtaaagtctgttttatcagagactaggattgc

SEQ ID NO: 363174 - DNA, 201 bp, Homo sapiens
atatttgggtcggggcacagtcaaactatatcacattggaaaagattcaaaaatatatttttagcataaaggaagtcatggtaaacaaggtaactgtataytggaaaagtcatatttagaagaaaagagtcactgtatttcttcggagattcttagcctttagcatataagacatcaaaggttttttatttttaattatag

SEQ ID NO: 363175 - DNA, 201 bp, Homo sapiens
atttcgactgctactcttccttgtatctcatgttattatcttccttgaatattcttttttttttctttgctctgttgcccaggctggagggcagtggcatmatctcagctcactgcaaactccgcctcccaggttcaagcaattctcgtgcctcaacctcccgagtagctgggattataggcacttgccaccacacccggc

SEQ ID NO: 363176 - DNA, 201 bp, Homo sapiens
ggagagctgattgtataccctctaaaaggatgaattttatgctatgtcacttatatcttaataaagctattatttttcaaaagtacatgccgtgtgttagrgatggcaaggataaattgttgtcatggtgacatgggatcctgtgttgtgcagaaggagaggagactggagagaggtgtaggatcagaccacacagagggt

SEQ ID NO: 363177 - DNA, 201 bp, Homo sapiens
aagatgattccagtataatggaaccatgagaacacacagaggaataaaggtgtgtcacatcagctctttgaatatgccacaaaaaaaaaaaaaaaaaaaargctctgaattagttttccctcagtatctgctggggactggtttcaggaccccccagtatgaaaatctgcagatgatcacatccctgatataaagtgggat

SEQ ID NO: 363178 - DNA, 201 bp, Homo sapiens
gttagtatgaaataactacaggaatggagatgtgtggctaaggagaaaagtaaatctaaaacttcacctttctggaggggtcatgcaaggaggcgtgacttgagagaatttgccacggttaatgttacaattctggggcagcctacctttcattgcttgattattctgcatagacccattttttaggtctacaaacactga

SEQ ID NO: 363179 - DNA, 201 bp, Homo sapiens
actgtacaaggatatcgtaatctatatggaagcacaaaggaacatataaatttaaatccttttgctccatgatcagtcacttcttttcattttaaactttrattttggacattcacaaaattgttaactcttgagtgatgtggattgagtaagttgtattacaattgtaaaaacaaatgattcatttcaacttgtattgaa

SEQ ID NO: 363180 - DNA, 201 bp, Homo sapiens
cgcaataagtacgtttgtttgtttttaaaccagagatactgccacaggaaaagcccaagggtgacccctcacttgggtcacctgcacagtatttttcagaytgaggctgtggaagggcattgaagactggtgtttagccacctaccgtgttttaatgtaggtggcagcttgggtgcttcaaaatcttgttcctttcgtata

SEQ ID NO: 363181 - DNA, 201 bp, Homo sapiens
tttttgtagtttagattataaagtctgaaatacagtttgggtggataaagtttcttaggatggtatagatgtgactaatcatggagtccttcctgttgccrtccttcaacgcaataagtacgtttgtttgtttttaaaccagagatactgccacaggaaaagcccaagggtgacccctcacttgggtcacctgcacagtat

SEQ ID NO: 363182 - DNA, 201 bp, Homo sapiens
tgccccccacctccctcccagaaatcttaagttggactggggcatggtctggaagtcacattttaaaagtgtcccagatgatttcaaagtgaagccaagaygtggaagcacttcctcaagccctcgctggagaaatcatgtgttgaattataaaaataataggtgcttattatgaaatgtaacaggtgtactagggtatga

SEQ ID NO: 363183 - DNA, 201 bp, Homo sapiens
gggaatgactgaagttaaggaaacatgttggagcaattgtaaaggcaatgtgtgtcacattttctgccacttgtcatttagattgtgtaagctaaatctartataagtgggaccattgtttgaatgaaaaaaaatccaaacttgagatgtagagaaatatagatgaatttgaagcccagaaaggacatttaagctctctta

SEQ ID NO: 363184 - DNA, 201 bp, Homo sapiens
ctgcccttaggtctccagtttttaagactgcaacagcatggctcaatatttgaaatcactacggttaaaagcagtcatattgtgcagttccccagtgaacwctttttgtagtttagattataaagtctgaaatacagtttgggtggataaagtttcttaggatggtatagatgtgactaatcatggagtccttcctgttgc

SEQ ID NO: 363185 - DNA, 201 bp, Homo sapiens
cttagttgctcagtctggactctggtccctaaagtgggaagtctcaggcaaatctgagtatcagaccatgccggcaattcagctctcttcacctgcttctytctctgcaagatgggataatcatgatacttatatttcagggtgttgtcatgtagtttaaataatgcatataaaacaatctagtacctgacatatagtagt

SEQ ID NO: 363186 - DNA, 201 bp, Homo sapiens
agggacttgagtgttctgatctaaatctgtggtcactgcagctatgtctgcattagggggcaccccaagtccagtaatactgtagctcttgtagactcttwgagttaccaccttggtggtcttgcataatattctggaaaattccctggatttctaggcagagactcttgttgtcctcctttactttcccccaaacaaacg

SEQ ID NO: 363187 - DNA, 201 bp, Homo sapiens
tgttagttctatttttagttttctgaggacctttaactcttatccataacagttgtactaacttacgttcctaccagtagtgtacaagagttaccttttckccacatcctcaccagcatttgttatcgcatgtcttttgaatatgtcattttgactggggtgagatgatatctcattgtaatttcgatttgcatttctctg

SEQ ID NO: 363188 - DNA, 201 bp, Homo sapiens
ggttgcagtgagctgagatcatgccactacactccagcctcggcgaaagagcgagactactacgtcgcaaaaaaaaaaaaaaaaaaaaaaaaaaaggaaawaaataaataaataaataaagtcgaagccagagcaggaataacaaggcaaagtcagtgggcacccactcgggtttagggtgactcttaactctaaacaccc

SEQ ID NO: 363189 - DNA, 201 bp, Homo sapiens
ggcggaggttgcagtgagctgagatcatgccactacactccagcctcggcgaaagagcgagactactacgtcgcaaaaaaaaaaaaaaaaaaaaaaaaaarggaaaaaaataaataaataaataaagtcgaagccagagcaggaataacaaggcaaagtcagtgggcacccactcgggtttagggtgactcttaactctaa

SEQ ID NO: 363190 - DNA, 201 bp, Homo sapiens
tgacataatgtgtgaatgattgttactttattacatatataatatatataatacatatatacaaaaaatataatacaaatatatatatatatatatatatwttttttttcttttttttaagacagagtctcttttcgtcagccaggctggagtgtagtggcgcaatcccggtctactgcaacctccgcctcccgggttcaa

SEQ ID NO: 363191 - DNA, 201 bp, Homo sapiens
tttgacataatgtgtgaatgattgttactttattacatatataatatatataatacatatatacaaaaaatataatacaaatatatatatatatatatatwttttttttttcttttttttaagacagagtctcttttcgtcagccaggctggagtgtagtggcgcaatcccggtctactgcaacctccgcctcccgggttc

SEQ ID NO: 363192 - DNA, 201 bp, Homo sapiens
cctttcttacccaattacatctattctaaagctgtcccacttcttttcctttgagcacatgactactgctatctatctcctattcttaaccagcattaatwacactgtgtattagatactgttttaaaggctttatgtttgttgaccgacttaatcctcataaacacccttgtgaggttgctgctgttattttattacggg

SEQ ID NO: 363193 - DNA, 201 bp, Homo sapiens
aacaagaccactctgttactttactgttttagaaagcacttaagtataatgcttaatctactgtattaaaactgtatacaacagccaggcatggtggctcwtgcctgtaatctcagcattttgggaggctaaggcaggaggatcatttgaacccaggagttcaacaacagcccaggcaacatagtgagaccttgactctac

SEQ ID NO: 363194 - DNA, 201 bp, Homo sapiens
tgcccttgcagcttatatgtcggaggggttatcattaacaatttggcatatatccttgtgtaaaactccacacatacacacataaacatacacatatagtwctctgtatttgtttaacataactgggatttattcgttcagctaattttttgaatgcctattatatgccaggcattgggcatacaataaggaataaaacag

SEQ ID NO: 363195 - DNA, 201 bp, Homo sapiens
cggtggctcaaacttgtaatcccaacactttgagaggctgaggcaggcggatcacttgaggcgaggagtttgagaccagcatggccaacataccgaaaccmcatctctactaaaaatacaaaatattagccaggtgtggtggcgtgcacctatagtcccagctgcttgggaggctgaggcgtgagaatcacttgaaccctg

SEQ ID NO: 363196 - DNA, 201 bp, Homo sapiens
gatgttttaactttaaattaaactaaattggctgggtgcggtggctcaaacttgtaatcccaacactttgagaggctgaggcaggcggatcacttgaggcraggagtttgagaccagcatggccaacataccgaaaccccatctctactaaaaatacaaaatattagccaggtgtggtggcgtgcacctatagtcccagct

SEQ ID NO: 363197 - DNA, 201 bp, Homo sapiens
cccactccatttgcctgagagacatctagaatattatctcaaaatagtaagatctcataaaaacaaactgtttttcaaatttccatgaaagtgttttttaytttagaaactgacccaaaaaagtactaatttcttttttccacaatgctttattaagctttgttgacctatataagggttataggcgaggaggggagtagg

SEQ ID NO: 363198 - DNA, 201 bp, Homo sapiens
aataggaataatcattgcctctacttaacaattttaatatttaagctctagttatcattcaatatgaaaagtcctcttttcctaattgcagtatttctccsttatactagcattttccttgcaaaaggcccagagattgtgatttgaagggacagaagcccactccatttgcctgagagacatctagaatattatctcaaa

SEQ ID NO: 363199 - DNA, 201 bp, Homo sapiens
caaggtcctccttactgtccgtccctgctcagtcaccaaagaatgacttttttgaaagtacaattccagagttaaatactggctaagtgtagaaaacaatrctggaattcagtcttcacctccaccagtcctcatggtgagatgaagtgtttatgggtttctttgttgtaacctcaaaagtggaatgcatttcctggttgg

SEQ ID NO: 363200 - DNA, 201 bp, Homo sapiens
atttacaaagttaatacatgtttgttgtaaaagtgaaaaaagtctattttaaaggaaaaaataattcttgctaacctcctcacccatttcacttaaattarttttattataatgtgacttaaatatttataaactgaaaacttagtgctctaggttttatacctattttaacaggaataaagtccaagcaaaatttgagat

SEQ ID NO: 363201 - DNA, 201 bp, Homo sapiens
ctctgagcaataaacttctgtttacaaactgcccattctgaggtattctgttataacccaaataaacaaagatgccagctaagcaccgttctagagtcgaygtctgattagggcactaacatgttaactagtcacccctaggatggacttagttaaacctaattgtcagaacagcggaagtaaggactcatatctaaacac

SEQ ID NO: 363202 - DNA, 201 bp, Homo sapiens
ttacagtttaagaatgttagtatatttttaaaagcacaaccagtggggaaaattctatcccttttcttggcaaattaacaatctaagcatacaaaaatttrtaggaaaattttgccagctctccatcagagtgctgtcatgatgattagttcatatttccttcttacgaagcttgccctttcttgtttatcacccacagaa

SEQ ID NO: 363203 - DNA, 201 bp, Homo sapiens
gaggaggacggccatttttgtggtgggtacaccaccaaatgaccttttaaaaatattgctgcattaactttggtagaggagctgggtcgttatctccatcrtccattctcatatcttccaacatggtcttgatagtcacagattgtttggcaatttccacatcaaatatctccgcatcaaaactcagcatcttaattgacg

SEQ ID NO: 363204 - DNA, 201 bp, Homo sapiens
ggaggtggagcctgcagtcagcccagatcccaccactgcactccagcctgggcgacagcgagactccgtcccaaaaaaaaaaaaaaaaatgtgtgtgtgtktgtgtgtgtgtgtgtgtgtatatatatatatatatataaagaattctgtcaaataaattgtattcatgatagctatttgatatattatagttttgactac

SEQ ID NO: 363205 - DNA, 201 bp, Homo sapiens
agttggttatggggccggggagcctattgcatcattattgggtacaccatgttattgttttgctggcaatagcagaagctgtgctgatagtcgcaagtttyatggtagacctttttgaagttgcaatgtgggtgccaaaccatttgttgtttttatccttggctcagagcctgaaaattgatgcatattaaccttctttaa

SEQ ID NO: 363206 - DNA, 201 bp, Homo sapiens
gaggacttttgagcaaaatagtctaatgatctgatatacattttaaaaagaattcctctggctgctctgttaagaataccctgtagggtgcaaggatgaarcagtgagaccagatggaaagctgttgcagtgtttgtggtgagacatgaaattgatcagacaacttttttccctcacttagcaacatgttatagatggcct

SEQ ID NO: 363207 - DNA, 201 bp, Homo sapiens
gactgtagagttcttagaagagtatggcctttcttgctttttctcaaaggcaaatataatgtcaggtaattttgctgttatgctattgaaaaaatacctcytgagtcacaggaagcataaattattttttaaagatttaccatgtgttaggatgattgtgtcatatattaaatatataatggatgacatttagactattat

SEQ ID NO: 363208 - DNA, 201 bp, Homo sapiens
tttcttgggggtgtgtacttctgtttaaagtttgatagtaatgtctgaatgagaaccagaaaaggaagaagtatgccttttaaatatggttgtgcttttcwgtcctattctgggtcttgaggcatgctactcctatatcttatgtttaataaaatatgaagattcaaactgagggagtttgagaaattctgttttattaaa

SEQ ID NO: 363209 - DNA, 201 bp, Homo sapiens
tttagatatagatgccaagccctagaaattaagagactgtggtcgtgatacagagatagacaaaaagaccagtggaacagcatggagaatccaaaaacatrtatagaaatgcaatatgcagtgaaagtaacattataaatcatcagggacgtatggaatgctaattgctgctttgatcattaattatatggaaaatgaaat

SEQ ID NO: 363210 - DNA, 201 bp, Homo sapiens
tgttatgctattgaaaaaatacctcctgagtcacaggaagcataaattattttttaaagatttaccatgtgttaggatgattgtgtcatatattaaatatrtaatggatgacatttagactattatcatctcgaagcatgtaaatatagaatatactttttgaagttagttttcttcaaaacgagagatatttctcaccat

SEQ ID NO: 363211 - DNA, 201 bp, Homo sapiens
cttggattaaagtaaaaagtaaaagtttcagaagtaatttaattttcggagaagccagtaaaattggaatcatttgtgttttatttgaaaaaattaaaatrtggtacaaatataagaatataatacagatatagaagaaggctgctgaaaccaccatctagtccaggatatagagttttggcagtcactctagaagctctc

SEQ ID NO: 363212 - DNA, 201 bp, Homo sapiens
gtataaattacatacggcaaatataaaaagttttatttttaatcaattttaatcaggtgtaatttatatgcaataaaatttatacattttaagtgtatgartcaatcaattttgacagatacacacatcaatataactaccacccaaattaagatctagaacatttcatcttcccaaaacgttctctttgcctttttgcag

SEQ ID NO: 363213 - DNA, 201 bp, Homo sapiens
aaaggtcgattcttaaaagaaaacttgttgaagtgctctaaatggaagtctttttttttatttctctcctgtgtcttttatgatagtatctgacaactatmttttttttgtttttgcagagattgggttttgctctgttgccaggcttgtctcaaactcctggcctcaagcgatcctcctgccacagcctcctgagtagct

SEQ ID NO: 363214 - DNA, 201 bp, Homo sapiens
taacattaagaatgtaaacacagccatatgctacctaatgacagtcagtgagggaccacctatacaacattaatctcataagattataataggtatttttrctgtaccatttctatgtttaaatatgtttagatacacagatacttaccattgtgttacagttgtctctagtattcagtacagtaacatgctatacaggtt

SEQ ID NO: 363215 - DNA, 201 bp, Homo sapiens
atttctatgtttaaatatgtttagatacacagatacttaccattgtgttacagttgtctctagtattcagtacagtaacatgctatacaggtttataaccygggagcaataaactataccatatagcctaggtgtgtaggaggctataccatcatctaggtttgtgtaagtacactctctgatgtgcacacaatgatgaaa

SEQ ID NO: 363216 - DNA, 201 bp, Homo sapiens
gtccctgattatttcatctctgtttttaacactttggttttaaatactgtcaaagtcaaataaaatatagagacaaatctctaaaacattttatttggggyggggcacggtggctcacgcctttaatcacagcactttgggaggcggaggcaggcggatcacctgagtgcaggagttcgagaccagcctggccaacatgat

SEQ ID NO: 363217 - DNA, 201 bp, Homo sapiens
tgaagtaggagaattacttgaatccaggaggcagaggttgcagtgagccaagatcgcgccattgcactccagcctgggtgacagagtgagactctgtctcaaaaaaaaaaaaaaaattttttatttgggaagcaagaattgcaatttgggacatacacacagaccaggtcgtctttggtatgtttgaagcacaaagagaaa

SEQ ID NO: 363218 - DNA, 201 bp, Homo sapiens
gaagtaggagaattacttgaatccaggaggcagaggttgcagtgagccaagatcgcgccattgcactccagcctgggtgacagagtgagactctgtctcaaaaaaaaaaaaaaaattttttatttgggaagcaagaattgcaatttgggacatacacacagaccaggtcgtctttggtatgtttgaagcacaaagagaaaa

SEQ ID NO: 363219 - DNA, 201 bp, Homo sapiens
cttgaatccaggaggcagaggttgcagtgagccaagatcgcgccattgcactccagcctgggtgacagagtgagactctgtctcaaaaaaaaaaaaaaaattttttatttgggaagcaagaattgcaatttgggacatacacacagaccaggtcgtctttggtatgtttgaagcacaaagagaaaattggaggttttatta

SEQ ID NO: 363220 - DNA, 201 bp, Homo sapiens
ttgaatccaggaggcagaggttgcagtgagccaagatcgcgccattgcactccagcctgggtgacagagtgagactctgtctcaaaaaaaaaaaaaaaattttttatttgggaagcaagaattgcaatttgggacatacacacagaccaggtcgtctttggtatgtttgaagcacaaagagaaaattggaggttttattaa

SEQ ID NO: 363221 - DNA, 201 bp, Homo sapiens
aattctatgctggttatgaattgacataatgagaccaaaattactattgttctgttttcttcttatttgctgcctaagagccaaagaaatgtctgaggacyaggaatgtttcaaagtctctggaaaaattgaaagaattctgctgcgattctgcccttcctcaaagtagagtccagacagaatctctgcaggagagatttg

SEQ ID NO: 363222 - DNA, 201 bp, Homo sapiens
tatttgttttgagacttttaatggttttcataactgcagaatcagggaatttaactcatgctccatcattgaaatctgtaattcagaatagtgattggttygcaaccttagctttacattggaatcacctggagaacttcaaacaaaaattgccattaagaaccttccctcagaatcttatctaattggttttcactgaca

SEQ ID NO: 363223 - DNA, 201 bp, Homo sapiens
acattggaatcacctggagaacttcaaacaaaaattgccattaagaaccttccctcagaatcttatctaattggttttcactgacaaatgggcatggatattttttaaaagtttacattttattttgtattttatttttattgatggagtcttgctctgttgtccaggctagagtacagttgtgcgattatagttcactgt

SEQ ID NO: 363224 - DNA, 201 bp, Homo sapiens
gctctcccaggcttcagttctcacaagtaacagtcaagtgcctgcagctttcccaggctggagctgaatgctggcagttctacagttctgagatctcagcraggttctgttctctctgctccactagacattaccccacttggggttgtctgtcctggctctggctctgaccccacatttttgcttggcattaatccacga

SEQ ID NO: 363225 - DNA, 201 bp, Homo sapiens
agataatagacattcaagtacttagtaacttatttgtttgcccaacttagtgtaattcagaaaatattgagcactgactgtggagtatttgtactctatayaaaatatattctttatggacagaaagaaaacatcttgaatcagtccacaccttctaattagttgtaaataccagtactaaaatccacatgataagtgagc

SEQ ID NO: 363226 - DNA, 201 bp, Homo sapiens
acgcttgttacaatatgtgaaaaagagccagttacaaagcctggcattcatttcacttttgtatgagtaattgtatgtataaatatatgcggagaaaaccrtctagatagaaggcttattccaaaataccatgggggatatggctttatggtcatttttcttttacttatgtaaatttttaaatttctaaaataaatgtgt

SEQ ID NO: 363227 - DNA, 201 bp, Homo sapiens
tgtggaaagatacgcttgttacaatatgtgaaaaagagccagttacaaagcctggcattcatttcacttttgtatgagtaattgtatgtataaatatatgyggagaaaaccatctagatagaaggcttattccaaaataccatgggggatatggctttatggtcatttttcttttacttatgtaaatttttaaatttctaa

SEQ ID NO: 363228 - DNA, 201 bp, Homo sapiens
gtgtatgggaaagaataggggctttagatctagaaaactcaagattctgtacaagttctccagcatcctggccatgtgcaagttacttcatccttctagarccctgagagaagtactgtgccatagtcaagagaatcagacatgttatacttgagcacaaatcttgcttttcccttttaacaactatgtgacctttttcaa

SEQ ID NO: 363229 - DNA, 201 bp, Homo sapiens
tgaagttgaaggtatcagtccttccttttatgggtgaatgcttttgtgccttaaataggaaattatttcaatccctgaggtcttaaacatattctcctatrattttttataaacattttaaagtttaattttcaaatttcagtcattaatcaatctactcagaatttatttatttacttatcttttgagacggagtttcac

SEQ ID NO: 363230 - DNA, 201 bp, Homo sapiens
ggttttgcacagattctaacactgttggtgggaatcgtattatttgttttgatgaactttaattcagtgagaaatagataagttatattcattatgttctrtctactcagtaaataagtatacagtatactgtgaatatatttttcggttcacaaaaaacagaaataaagctggatagttaaaatgttgtttctagtatct

SEQ ID NO: 363231 - DNA, 201 bp, Homo sapiens
ctaggggcctgtccgttttgtgtttgtggttttgcacagattctaacactgttggtgggaatcgtattatttgttttgatgaactttaattcagtgagaartagataagttatattcattatgttctatctactcagtaaataagtatacagtatactgtgaatatatttttcggttcacaaaaaacagaaataaagctgg

SEQ ID NO: 363232 - DNA, 201 bp, Homo sapiens
ttgcccaagctggtctcaaactcctggacttgatcaaaggttttgttttgaatttgactttgaaaaatgacctagatttttatgttcttatattagatatkttagactttgactttctaggatgtcatttaaaaatgtttttaggtctccctttttcttttttcgagacacagtctctgtcacccaggctggagtgtggtg

SEQ ID NO: 363233 - DNA, 201 bp, Homo sapiens
ttgacctgcttgttaactgagaatatgtgcacaggtctggggtatagtatgtgtagattcgtggtaaaaagacttgggattgtgaggggctgaaagattaygaaaggataggggttttaaaatattattactaaggagttctgtccttagaaaagatttctaggatcaagaaccaagagctggacgatgatgacaacaggc

SEQ ID NO: 363234 - DNA, 201 bp, Homo sapiens
gcaaaggtataatcaaaagtgtagaaaaaactagaaaaaaagttttagaacaacacgagtttacctagtatagactttctgccttatggtaatacctcctrtctctcttagccttttgaacagcccagctctcattgtgctagccttgagtctgaggccccatggagttcccatagtggggaaattctcaatcctcccttg

SEQ ID NO: 363235 - DNA, 201 bp, Homo sapiens
agcaggctgaggtgggaggatcatctgagcacaggaaggttgaggctgcagtgagctgtgttcatgccactgtactgcagcctgggcgacagagttagaayctttctcaaataaacaataataaaataaaagcttggtcctatacagcatcgaattttaatttcacccatacagtaaatttttcagtgatcatatttttaa

SEQ ID NO: 363236 - DNA, 201 bp, Homo sapiens
ttgtcctggtggttggttttagaattataatttcaaataatgcccttagtcttctaagaaagtggtggttgttccctactgtgagcactgataaaattaaygagtttcatagtaattctaatatggagatattaaagccaggttaccttgtctgtcctactcagtcaagaaccctgtttcattctgtcttcagaggagaga

SEQ ID NO: 363237 - DNA, 201 bp, Homo sapiens
cagctccacatggctggggaggcctcacaatcatggcagaaggcaaggaggagcaagtcacatcttatggggatggcagcaggcaaagacagagattgtgstgggaaactcccgtttttaaaaccatcagatttcatgagactcattcactatcatgagaacagcacaggaaagacctgcccccataattcagtcatctcc

SEQ ID NO: 363238 - DNA, 201 bp, Homo sapiens
ctgggaaactcccgtttttaaaaccatcagatttcatgagactcattcactatcatgagaacagcacaggaaagacctgcccccataattcagtcatctcycaccaggtccctcccacaacatgtgggaattacgggagctacaagaaaagatgtggctggggacacagagccaaatcatatcaccagtgaattgtatttt

SEQ ID NO: 363239 - DNA, 201 bp, Homo sapiens
ctccctcagccaggctaatattgattgacttatcttagatcatcaagaaaaaaaaggtgtttttgtttttagtctcttttaatacttagaagcagttcacstaagtatagtggttattaagcatagaagtcataaagtttatccattaaagctcactttattgataggagcatttactccaaggtctcagaagagcgtata

SEQ ID NO: 363240 - DNA, 201 bp, Homo sapiens
gtttgtgcagcaaataggttgtacctagctatggccctttttggcacaaccgttgttgttgttcctcctcctcctcttctttctcttcctcctcctcctcttttttttttttttttttttcttttttgaaatgggttcactctgtcactcaggctgcagtgcagtggcatgatcatggctcactgcagcctcgacctacct

SEQ ID NO: 363241 - DNA, 201 bp, Homo sapiens
gacgtggatgaatggcaaaaagctactgagtgaacataaatgccccatggtccaggaccattagggtggggtcagcaatgccataactctcaataggtttygaaatatattctgatcactctgaattgtccagacaaggttaaattgagttcagcatactgtctctgggaatatgaaatagaatgtaatgtatctgatgag

SEQ ID NO: 363242 - DNA, 201 bp, Homo sapiens
cttccacttcggcctcccgagtagctgggactacaggcacacaccaaccatacccagctaatttttgtattcttttaggaatggagtttcaccgtgttgcycaggctagtcttgaactttcaggctccagtgatccacctgccttggcttcccaaagttctgggattataggcatgagttaccatgcccagcctcccttct

SEQ ID NO: 363243 - DNA, 201 bp, Homo sapiens
tgtatctgatgagtatttctatccaaatcattttttttaaagttgcttattttgttacccaggtattaatatgtacaacaaaccctcatgacacaagtttwcctatataacaaacctgcacatgtacccctgaacttaaaatgaaagttaaaaaatagttgcttaatattcaagtatttagattgatttaattgttagcat

SEQ ID NO: 363244 - DNA, 201 bp, Homo sapiens
attccagtctgtgtgtatgtttgccaattcttttgaatttcctacataggcagtcatgtcagatacaaacagacagtttcacttctttcttccccatctatttttttttcttgtcttattgcagtaactaggactttcagtacagtgttgaaaaagcagtaagaaaggatatcgttgccttgtttctgatcttagtgggaa

SEQ ID NO: 363245 - DNA, 201 bp, Homo sapiens
ttgtgtgtggaatgtggatataagtatagattctttggggaagatgcagaggtaagtcgtcttttcaggcactattttatatttttcttgtctagccttaratatttttcagtatttttgtttcattttctgaccttatataaaagctgatttgatcaatcaccttttaaaaaatactgttatgtaaagtaaaaactaaaa

SEQ ID NO: 363246 - DNA, 201 bp, Homo sapiens
tacccaggtattaatatgtacaacaaaccctcatgacacaagtttacctatataacaaacctgcacatgtacccctgaacttaaaatgaaagttaaaaaawagttgcttaatattcaagtatttagattgatttaattgttagcatcccataaggataaaacttttttttcctggaagcttatctcatttcctaaaagaat

SEQ ID NO: 363247 - DNA, 201 bp, Homo sapiens
caatagatatagacctattcagaatttctgttttttttcttgtgtgagttttggctcattgtgtcttttaaggaattgtttttcaagaaattttcaccaargttaccaaatttgtggacatagagttggtcatagtattcctttattatccttttatttgtccacagcatccgtagtgttgtccttttcatttctgatatt

SEQ ID NO: 363248 - DNA, 201 bp, Homo sapiens
aaatttaaaaacaagtatgtaaaacattaagatatttagactttcaaaatttgcataaaaattctatgatagcttacttggttcataattttttttaaccytctactttgaaaatatttgtaacctatggatagtttgccggaatgctacaatgtgcttctataaacttttcatctagattcactaagtgttagctttttg

SEQ ID NO: 363249 - DNA, 201 bp, Homo sapiens
gaccagaactgtgtctcatggccatagttgcaaggaaaacagaaaataagaaggtagtttttgtccagcttttaaatagagttaagcacagtaattgggartacaatcagtggtaatcagaaaatagtttctgtcacagggtgtggaatcagtaataatagtaacagccaacctttatgatatatttacaatattagtgta

SEQ ID NO: 363250 - DNA, 201 bp, Homo sapiens
acggtcatttataaatgcagtgtgttatttgatgccaaataatttcaaaagcaaaattgtcagtttcaaaagccaaataattatatgtaaaattagaccagggtgcatttaaaaaaaattactatgggggtggaatcagttctctgataatggaagaatggagagataagaaggccttaaatgatactgtgtgaaagtatt

SEQ ID NO: 363251 - DNA, 201 bp, Homo sapiens
atagctactctaacttcctttagaaattaatatagctgcttcagctttctttaatgttaacatgatgtatcttcctccatatatatatatatattttagayagagtctcactctgtcacccaggctggagtgcagtggtacaatctcagctcactgcaacctctgcctcccagattcaagtgattcttgtgcctcagcctc

SEQ ID NO: 363252 - DNA, 201 bp, Homo sapiens
tgttaataataatagatttaatgaaatcaaatttaaaaacaagtatgtaaaacattaagatatttagactttcaaaatttgcataaaaattctatgatagyttacttggttcataattttttttaaccttctactttgaaaatatttgtaacctatggatagtttgccggaatgctacaatgtgcttctataaacttttca

SEQ ID NO: 363253 - DNA, 201 bp, Homo sapiens
aatagagttaagcacagtaattgggaatacaatcagtggtaatcagaaaatagtttctgtcacagggtgtggaatcagtaataatagtaacagccaacctytatgatatatttacaatattagtgtaatattcttatcaaggtacaggcactgttatgtgcaccttatatagagtactttatgtaagtacattcaatgagt

SEQ ID NO: 363254 - DNA, 201 bp, Homo sapiens
tactaaattaatattaggattatttacaatcagttttctagataaatgtaatttgtgaattatagttttatttatttatttctttgagacggagtttcacycttgtcacccaggctggagtgcaatggcgtgatcttggctcactgcaacctctgcctcctaggttcaagcaattctcctgcctcagcctcccgagtagct

SEQ ID NO: 363255 - DNA, 201 bp, Homo sapiens
ggaagttgaggtgggaggatcccttgagcccaggagtttgaggttatagtaaactatgattgtgccattgcaatctagcctggatgatagattgagacccygtctctaaaaaaaaaaaatttgttaattcatactgacactaacaaaaataaactttaaaatggtggaggtgagtggggaaaagtgaaacctctgctttac

SEQ ID NO: 363256 - DNA, 201 bp, Homo sapiens
gcactattataataataaatgttttcccaattttgatcttatagttcaaatttaacttttatactcaaggttttattctggacatatgttcttaaaatctrtgtttaaagttttgttttctgtcgtacaaacagagtactgaaatttttcatgctatcttagagttttttttttaaggctatttccatgcctagtaaattg

SEQ ID NO: 363257 - DNA, 201 bp, Homo sapiens
cccgtctctactaaaaaatagaaaaaattagccaggcgtggtggcgggcacctgtagtcccagctactcaggaggctaaggtaggagaatggcgtaaaccygggaggcggagcttgcagtgagccaagatcgtgccactgggcaacagagtgacactccgtctcaaaaaaaaaaaaaagaaaagaaatacattggtttggt

SEQ ID NO: 363258 - DNA, 201 bp, Homo sapiens
gagccgattcttccagtctacgggaagcctgaaatccacctcctcctccacaggtgcagccgaccaggtggaccctggcgctgcagcggccgcagcgcccscagcgcccgccttcccgccccagctgccgccgcacgtagtaggttctgtctgggactgggcagggccatcggggctgggggggcggggcttgtgggtaag

SEQ ID NO: 363259 - DNA, 201 bp, Homo sapiens
aatatttctatatatggatattcatcataacagtatttgtaatactgaaaaaatgaatatagaaatggaatggataaattatgataaattatgataaatgrataaattatgatttcctgtctttgatttagttcatttttctttatattttattaacttagtatatattttattaacttagtatatattttattaatttag

SEQ ID NO: 363260 - DNA, 201 bp, Homo sapiens
gaaaccccatctctactaaaaatacaaaaattagccaggcatggctaaagttttttgtaggtacataatagatgtatatatttatgggttacatgagataytttcatacaggcatacaatgcataataattacatcagggtaaatggggtatccatctcctcaagcatttatcctttgtgttacaaacaacccaattatac

SEQ ID NO: 363261 - DNA, 201 bp, Homo sapiens
gccataaaaaagaatgagatcctgtaatttgcaacaacatggatggattatggaggtcattatgttaagggaaataagccaggtgcagaaagacaaacttkgcgtgttgtcacttacttgtgggagctaaaaattaaaacagttgaactcacggagatacagaatagaatgatggttaccagaaactggtagtggtagtgg

SEQ ID NO: 363262 - DNA, 201 bp, Homo sapiens
gtccgcctcagcctcccaaagtgctgggattacaggtgtgagccatcgcgcccggcctgaatttggttgcaataatacagaaatgcaagcacactgagaaragataatacataactaaggctaaaaatgaatggtgtgatagaacttcacttgcttcctggctgatttcagagaaccttatttgcagagcacagttggatc

SEQ ID NO: 363263 - DNA, 201 bp, Homo sapiens
tccatgtcttcctcttcgtttatttcttcattttggtggagtatatatcctctagaaccttcctgagaaagcacgttggaagtaaatcttttgaaacattsatgtctgaaagtggtttttttgttgttgttattattgttactaccttcacatttgattggtagtttggattggtataaaattctaggttttagatgactt

SEQ ID NO: 363264 - DNA, 201 bp, Homo sapiens
aacctaagattaatagcaagtcacagatgagtttaaagcagaggtgtgacatgaacagatttgggctttaggaaaaccactcaggctgcagtgtggagaaygagttggaaaaaggaatggaagtggggaggaaagttaggaggctgtttcaatataatttggacttagactatagtagtggctgtagaggtggagagtggt

SEQ ID NO: 363265 - DNA, 201 bp, Homo sapiens
gtaaattcccattgaagaagaaatacaattatgattaccattatgagaagggaaaagacggtagtatgggaaatgatagtaaagggattaagtctggtctrgtgaatctagaaaggcctttcagaggaagagagggtaggagttcgccagacgaagtgtagctgatgggtggtagggaagaggaaaataaccttctaggca

SEQ ID NO: 363266 - DNA, 201 bp, Homo sapiens
ctatggttcatgtttctgacaggagattatttaggtagttcatttagccatttcacatgaccaatgtgttaatgtctgaatttaatctactcgttctgtgytgtcttaaaagtcaaacttttcagtaaaacgaaaccaaacaaaaaatacacccctagcagtttgtatttcagctccccacccccaccagacaactttttt

SEQ ID NO: 363267 - DNA, 201 bp, Homo sapiens
tatggtattatatctagatttggaggaggggatagttaaagagaaatgataattggctgatataaaataccatactaaattaatattaggattatttacartcagttttctagataaatgtaatttgtgaattatagttttatttatttatttctttgagacggagtttcactcttgtcacccaggctggagtgcaatggc

SEQ ID NO: 363268 - DNA, 201 bp, Homo sapiens
agaaattacctagaatgcagcacagggtggcaatgtcaggccttcagtgtttcttctctggatttttgaaacagctttctaactggtattcctgacactgytcttatgtgcatccagactattagccttggatcccagctcctgtgatcacattttcaaaccttcaccctccattttccactaatcttttatagacaatag

SEQ ID NO: 363269 - DNA, 201 bp, Homo sapiens
atgcattactgctcggaaatgggaagggagagtagcaggtggtgcgtaattgagagctgtgtttgattgggactgacctggtgcccctttcctctgccggkttgaatgagagtttaaaggaggaactgctgctgctaagaacaaaatgaacccgagtgcctcttactgtttgtcccgactgtcagtgcatagggattaact

SEQ ID NO: 363270 - DNA, 201 bp, Homo sapiens
ggcctcccaaaatgttaggattacaggcgtgagccaccacgcctggccaactcatagttttattgattttctggcagtttatgaataaatttgctcatttrcagacttacgtggactctgctaaaggtcttagactttttaaggcccttcagaacaatcagacaccccttttctgttgtaagttaagcacaaatggaactc

SEQ ID NO: 363271 - DNA, 201 bp, Homo sapiens
aatgttaggattacaggcgtgagccaccacgcctggccaactcatagttttattgattttctggcagtttatgaataaatttgctcatttacagacttacstggactctgctaaaggtcttagactttttaaggcccttcagaacaatcagacaccccttttctgttgtaagttaagcacaaatggaactctgtccaagtg

SEQ ID NO: 363272 - DNA, 201 bp, Homo sapiens
atagtatataattcctacttagtgcatttagaaataccatctggcttaccgccagagttaaccatgtgtgcgaactgggactcggaaaaatgaaaacagcygtttgcccttcaagcattttctttggggctgtcctttacttcagcaaccacttttgggctgatgacatcctgagctctgggtccaggctgcacctctctc

SEQ ID NO: 363273 - DNA, 201 bp, Homo sapiens
taacttgccatagtcactccgttaggtatattaactccaggccttgtattcagggcggctctcggaaatctgatttatagtatcatttagatatctgtgartctgactcttcgtgtaagagtcctgaaaagcagacaggtttctaacactttagaaatagagtacatacatactcccgagtgtatcatctttactttttcc

SEQ ID NO: 363274 - DNA, 201 bp, Homo sapiens
ggcgctcatccacagagccacatctgttaggtaagttggcacatcactggaatataataccgattctgaaacttaggtttagttccaaaactgatacttaytaaagttgctaaaaatagtttttacttacaaaaattatatttccactgtagtagtggaaatttaaaaaaaaaagtaaaacaacaaagctgggcatggtgg

SEQ ID NO: 363275 - DNA, 201 bp, Homo sapiens
ttggagatgctttgtctgtgctgcaagtttcaattcatggctgtgtccagtggttttgtttactggatctaagatcagaccacttacgtatgaagcagtgkgctaggcactgtgcgtacagaggaagaagatgtggttatgatatatgtctggcagagtttacaacctcacatgagagtcagatgtgtgcatacctaactg

SEQ ID NO: 363276 - DNA, 201 bp, Homo sapiens
gctttgtctgtgctgcaagtttcaattcatggctgtgtccagtggttttgtttactggatctaagatcagaccacttacgtatgaagcagtgtgctaggcrctgtgcgtacagaggaagaagatgtggttatgatatatgtctggcagagtttacaacctcacatgagagtcagatgtgtgcatacctaactggacttaaa

SEQ ID NO: 363277 - DNA, 201 bp, Homo sapiens
gacagcttggccaaaaccccgtttctactaaaaaaaaaaaatacaaaaattagctgggtgtggtggcagacacctgtattcccagctaccccggaggctgrggcaggataatcgcttgaacttgggaagcagaggttgcaatgagccaagatcacaccacttcactccagcctgggcgaaagagcaagactcttatctcaa

SEQ ID NO: 363278 - DNA, 201 bp, Homo sapiens
tataataattggtcgttgtacttttcttgtgacttttaggaagatttaaaatttttcaaaagaaagtggaagacagattttaattacaataaaatttaaaaatgaaataacatttattctgtcttattgctttaggtgaaatccttaaccctgtttgtcacccattatccgccagtttgtgaactagaaaaaaattactca

SEQ ID NO: 363279 - DNA, 201 bp, Homo sapiens
taataattggtcgttgtacttttcttgtgacttttaggaagatttaaaatttttcaaaagaaagtggaagacagattttaattacaataaaatttaaaaatgaaataacatttattctgtcttattgctttaggtgaaatccttaaccctgtttgtcacccattatccgccagtttgtgaactagaaaaaaattactcaca

SEQ ID NO: 363280 - DNA, 201 bp, Homo sapiens
aataattggtcgttgtacttttcttgtgacttttaggaagatttaaaatttttcaaaagaaagtggaagacagattttaattacaataaaatttaaaaatraaataacatttattctgtcttattgctttaggtgaaatccttaaccctgtttgtcacccattatccgccagtttgtgaactagaaaaaaattactcacac

SEQ ID NO: 363281 - DNA, 201 bp, Homo sapiens
gcttttgttatgttgaggtatgttccttctatacccagttgtttgagagtttttattatgaagcgttgttgaattttatcaaatcctttttcagcatcaawtgaaatgattatgtgtttttttttcttcattctgttaatatgatgtatcatagtgactgatttgcatatgttgaaccgtctttgcatctctgtgataaat

SEQ ID NO: 363282 - DNA, 201 bp, Homo sapiens
cgttgtacttttcttgtgacttttaggaagatttaaaatttttcaaaagaaagtggaagacagattttaattacaataaaatttaaaaatgaaataacatwtattctgtcttattgctttaggtgaaatccttaaccctgtttgtcacccattatccgccagtttgtgaactagaaaaaaattactcacaccaggtgggga

SEQ ID NO: 363283 - DNA, 201 bp, Homo sapiens
tatttgatatgaatttgtctcattctggtatcagggtaatactggcctcgtagaatgagtttggaagtattctcctttttttttttttttttttttcccaraatagtttgaggaaaatgggtctagttctttaaatgtttggtaggattcagcagtgaagctattgggtcctgggcttttctttgctgggagactttatta

SEQ ID NO: 363284 - DNA, 201 bp, Homo sapiens
aataaatgttgaattaggctactactaatatcaactaaaggaggtaaaagttttgagatttttcatgaatgaaaatgtttcacatgcttgttggccatgtrtatgttgtcttttgaaaagtatctgttcatgtcctttgcctattttttaatgggtttggttttttcttataaatgtaagttccttatagatggtggatat

SEQ ID NO: 363285 - DNA, 201 bp, Homo sapiens
cttttctttgctgggagactttattatggcttcaatctcgttacttgttattggtctgttcaggttttggatttcttcgtggttcaatcttggtggattgygtgtgtttaggaatttatccatttcttctagattttcggatttattggcatatggttgctcatagtaaccactaatgatcctttgaattcctgtagtatc

SEQ ID NO: 363286 - DNA, 201 bp, Homo sapiens
tgttggcatgccttaggctctcaccaactgttggtgggagacatcagtttctttccatgtgagcatctccacagacagcccacaacatggcggctggcttccctcagagcaggcaggcaacaaaatgagagtacccaagtcagaagccacaacctttctgtaacctaatctctgaagtgacatctcatcacttttgccgta

SEQ ID NO: 363287 - DNA, 201 bp, Homo sapiens
cttttgtattttctttgtttcagtttcatttatttctgctctgatttttatttttattttatattaattttgggtttggtttgctcttgcttttctagttyttcaaggtttatcatttggttatttatttgaaatgtttcctcttttttcatgtaggtgcttttagctataaacttccctcttagtacagccgtcactgta

SEQ ID NO: 363288 - DNA, 201 bp, Homo sapiens
tttttaaggctatttccatgcctagtaaattgaaacatatttcttttttgcagaccaactgtacaagaagaaagaaaaattgtaataaaaaatggaaggcwccctgtgattgatgtgttgctgggagaacaggatcaatatgtcccaaataatacagatttatcagtaagtaccttatgccaaaaaataagtcgatgataa

SEQ ID NO: 363289 - DNA, 201 bp, Homo sapiens; identical to SEQ ID NO: 78489

SEQ ID NO: 363290 - DNA, 201 bp, Homo sapiens
ctgctctgatttttatttttattttatattaattttgggtttggtttgctcttgcttttctagttcttcaaggtttatcatttggttatttatttgaaatktttcctcttttttcatgtaggtgcttttagctataaacttccctcttagtacagccgtcactgtatcacataggttttggtatgtgttttcattatcatt

SEQ ID NO: 363291 - DNA, 201 bp, Homo sapiens
atttttattttatattaattttgggtttggtttgctcttgcttttctagttcttcaaggtttatcatttggttatttatttgaaatgtttcctcttttttsatgtaggtgcttttagctataaacttccctcttagtacagccgtcactgtatcacataggttttggtatgtgttttcattatcatttgtttcaagaaatt

SEQ ID NO: 363292 - DNA, 201 bp, Homo sapiens
gagaaagaaagggtgaaggcctatgaaatccagcaaactggtatggattcctgtagaaggcagtaaggtttctgggaaaaggaatggcatgatagaagggaagagatgagtgtactgcctagatgggacagttgaattttaaaaataaatatttccctaaaggaaaaagcggatacagagaaaagaatcagatcaaggagc

SEQ ID NO: 363293 - DNA, 201 bp, Homo sapiens
gaaagaaagggtgaaggcctatgaaatccagcaaactggtatggattcctgtagaaggcagtaaggtttctgggaaaaggaatggcatgatagaagggaagagatgagtgtactgcctagatgggacagttgaattttaaaaataaatatttccctaaaggaaaaagcggatacagagaaaagaatcagatcaaggagctt

SEQ ID NO: 363294 - DNA, 201 bp, Homo sapiens
tatcagaggaattgttatgcaaattaggtatctgtgttatgactgaagtccaacttctttctaatgtcatttgaattaaacattagtataaaggtttcaattttttttttttttaaagaatgagagtaaaagaaacaacaggtcttactcattaatttggttaagaggaagtgcttcacacatacgaaatgttattaagtg

SEQ ID NO: 363295 - DNA, 201 bp, Homo sapiens
caaaaaaccaaacaccgcatgttctcactcataggtgggaattgaacaatgagaacacttggacacaggaaggggaacctcacacaccggggggcctgttrtggggtggtgggggggacggatagcattaggagatatacctaatgtaaatgacaagttaatgggtgcagcataccaacatggcacatgtatacatatgta

SEQ ID NO: 363296 - DNA, 201 bp, Homo sapiens
tcctgccccacatctactcagatcccactaggtaatcatggttattactttatcatgtatacttccagaaaccttttgtttaaaaaagcaaatatgaattwtatatatatatatatgaaatctcttcctcccttattacatagatggagccataatatacccagtactttgtacttggctgttttcccttagtagtataag

SEQ ID NO: 363297 - DNA, 201 bp, Homo sapiens
caaatgtctgcttgtttttcaaggaataggaagaaatgtttagtgaatacctagcagtctgttgccagagatggtttttgttgtttcaattccattgtacrttcttcttagcatttaaaaaattatttgaacttttgaacaggcaatatcttcacatactttaaaagtttgaaaatctgaaaagttacacagtaaaatgtt

SEQ ID NO: 363298 - DNA, 201 bp, Homo sapiens
aatccatggcctttccacattggggggtggggtgagactctcatcacataggcagttaggaaccccagaggctcttcagttttaaacgtgtagcttccaaygtcatcttgagaactgatattcagcagtggaaggagaaagaacagggaggatatacatttatggcttttatgtgaggcaggccttgcattggcacatacc

SEQ ID NO: 363299 - DNA, 201 bp, Homo sapiens
caatgcattggttagggaagctagctgttaacacaaagaccccaaaaagtctaatggctctaatgttgtgaaagttaatttcttctttttttttctttgcrtaaacaatccatggcctttccacattggggggtggggtgagactctcatcacataggcagttaggaaccccagaggctcttcagttttaaacgtgtagct

SEQ ID NO: 363300 - DNA, 201 bp, Homo sapiens
ggttagagatacaggtaggctggtgttttacatgtatttgcaatatttaatttttaaaaaattatacagaaaatacacacacatgaattttttataatgtrctgctatttgaccttcactaccatcataatcaggtgaaaatgagacccatgcacatctgtctagaaagcccatgttgaacttgagagcatctgttttcca

SEQ ID NO: 363301 - DNA, 201 bp, Homo sapiens
aggacaagcagaggacttaaagctctgagggatcaagggagtagaaagaaaatgtcagtctagtgaactaatctctaactgtgctttattttttatctgtrtttttttcagctatctttagagatagttattctgttttagagataagaataactaagtctcagtttttccaaggtcatccagccaagcacataggggacc

SEQ ID NO: 363302 - DNA, 201 bp, Homo sapiens
ttatttccagattttcttccttttggcacacatagactgattatacccatctctttactagaaacaagtgttttgattattatttaaatgttttgctcatytattcaacgtctgatgtgaggttgtaaataaccattgaattttgtaaaattgccaatcttgtgcaattttgtgtttgtagtacagttctctgaaaagtta

SEQ ID NO: 363303 - DNA, 201 bp, Homo sapiens
cttagtatatattttattaatttagattgagtaaagtcaatcaattttatcaacacattcatttttttgttttctgcttaattttataaaataacaatggygaaattcaataaaatatcaaaatatttcataatgacattgtcaaaagtgaatttttgtttgtcaagcagcattcattgactggtgatattcctaaatgtt

SEQ ID NO: 363304 - DNA, 201 bp, Homo sapiens
aacttgatcatactatgagaaactcagccataggtttggaatccgtattcacaccacacattcactgaggacaatattctgctcatacgattgatttgctrctgcatttcactgctgtttgtctgatattaacaattttaaacagagcagggcagctagtatttggaacaatccttacagtgtgacggcgtcaaggacgtt

SEQ ID NO: 363305 - DNA, 201 bp, Homo sapiens
aaattcaataaaatatcaaaatatttcataatgacattgtcaaaagtgaatttttgtttgtcaagcagcattcattgactggtgatattcctaaatgtttsttcatcacatgagatttaaaagcttgaatttggcatatcaaagataatttaggtgtcttatgtgggttttaccaaatttaatgcctgcttttgtcttatt

SEQ ID NO: 363306 - DNA, 201 bp, Homo sapiens
ttgtttgtcaagcagcattcattgactggtgatattcctaaatgtttgttcatcacatgagatttaaaagcttgaatttggcatatcaaagataatttagstgtcttatgtgggttttaccaaatttaatgcctgcttttgtcttattttaatttgaatttctctagttagcattgtaaataattttctctatgtttactg

SEQ ID NO: 363307 - DNA, 201 bp, Homo sapiens
aagagaataatgggtatctcctatttgtttttcttaacaaaactgatttgggttttttaaacatagaagggttgttgtaaggctgggcgtggtggctcatrcctgtaatcccagcactatgggaggacgagatgggtggatcacctgaggtcaggagttccagaccagcctggccaacatggtgaaaccccacctctacta

SEQ ID NO: 363308 - DNA, 201 bp, Homo sapiens
atttacattatacagatgtagccaattcatttactcttttggaaagatcatattgatttcttatcgttttttccccattatgtttatttctttaaaaaatkttttaatatcactgtaaattgattgaagcatcctgacatttccatagatattcctttacagcaaatattaatgggatctacatggctaagttactgttta

SEQ ID NO: 363309 - DNA, 201 bp, Homo sapiens
tcattatgtttattagacggtagtttcacttaactatttagataatctagaattagaaaataaattgtgggcctggcagggtggctcatgcctaaaatccsagcactttgggaggctgaggcgggtggatcacttgaggtccggagttcaaggtcagcctggccaacatggtgaaacctcatctctactaaaaatacaaaa

SEQ ID NO: 363310 - DNA, 201 bp, Homo sapiens
atgggcctagaaagacaggtaacacttaactagacagatttgggggaaaatacattcctcaatgaaagcaaagtttaaacaaggttgaaataatttatttaaaaaaaaaaatagctggctgggtgcagtggctcacgcctgtaatcccagtactttgggaggctgaggaaggtggatcgcttgagctcaggagtttgagac

SEQ ID NO: 363311 - DNA, 201 bp, Homo sapiens
tttccacactgtttatagaaaagacttttatatgcattgaattatgttgatgccaaaggcttcattttgtctttgtttttaattaatatttatttatttattttttttagagacagggtctcgctttttcgcccaggctggagtgcattggcacgatcatagctctctgcatccttgaactcctgggcccaagtgatcctc

SEQ ID NO: 363312 - DNA, 201 bp, Homo sapiens
aaaatgacctagatttttatgttcttatattagatattttagactttgactttctaggatgtcatttaaaaatgtttttaggtctccctttttcttttttygagacacagtctctgtcacccaggctggagtgtggtggcaggatcttgattcacttcaacctccgcctcctgggttctagcgattttcctgcctcaccgt

SEQ ID NO: 363313 - DNA, 201 bp, Homo sapiens
ttctcctgccttagccccctgagtggctgggactacaggcctgcaccaccatacccagctatttttgtatttttagtagagacagggtttcaccatgtggsccaggctcgtgttgaactcctgacctcaagtgatccacctgtctcggcctcccacagtgctgggattacaggtgtgagccaccacgcccggccagcacta

SEQ ID NO: 363314 - DNA, 201 bp, Homo sapiens
aaaaaaccagaaagaatgaataaaacctagtattgataacatggtaattataatcaataataatttaattgtacatttttaaataaaagagtataactggattatttgtagcacaaaagataaatgcttgaggagatggataccccatttaccctgatgtgattattacgcattgtatgtctgtatcaaactatctcatgt

SEQ ID NO: 363315 - DNA, 201 bp, Homo sapiens
gcaccaccatacccagctatttttgtatttttagtagagacagggtttcaccatgtgggccaggctcgtgttgaactcctgacctcaagtgatccacctgyctcggcctcccacagtgctgggattacaggtgtgagccaccacgcccggccagcactacactttctaatgagtttttattgaaaaaaattttagttgaaa

SEQ ID NO: 363316 - DNA, 201 bp, Homo sapiens
ccatacccagctatttttgtatttttagtagagacagggtttcaccatgtgggccaggctcgtgttgaactcctgacctcaagtgatccacctgtctcggsctcccacagtgctgggattacaggtgtgagccaccacgcccggccagcactacactttctaatgagtttttattgaaaaaaattttagttgaaaatgaag

SEQ ID NO: 363317 - DNA, 201 bp, Homo sapiens
tagtagagacagggtttcaccatgtgggccaggctcgtgttgaactcctgacctcaagtgatccacctgtctcggcctcccacagtgctgggattacaggwgtgagccaccacgcccggccagcactacactttctaatgagtttttattgaaaaaaattttagttgaaaatgaagctgttggctcgtaagtgaaaagctt

SEQ ID NO: 363318 - DNA, 201 bp, Homo sapiens
aaggatttttttcctcattctcgtgaatgagcctgcctgcagattggcagacatagggcgttgtcccaggaaagtgaggatagatgccttttgtggagggytttgaaggctagactgaggagttgatagccagagggagttcattcagtgattctgagcatggggctgatatcatcagagctgggcttgtgtgtaggaggg

SEQ ID NO: 363319 - DNA, 201 bp, Homo sapiens
gactggctctctagtattacaaggatttttttcctcattctcgtgaatgagcctgcctgcagattggcagacatagggcgttgtcccaggaaagtgaggakagatgccttttgtggagggttttgaaggctagactgaggagttgatagccagagggagttcattcagtgattctgagcatggggctgatatcatcagagc

SEQ ID NO: 363320 - DNA, 201 bp, Homo sapiens
agtcaaaggagttaaaactcttcagaaatatttattactattgcaaattaaagtaaacactgaatttattctcctgactcctgaatctgcatattattaastagtttctctcagtttcttcctgttccagtctgttctagtatgctgaattcagatgtatttttgttcagtaacatttttatcttgtcatcatccaaaagc

SEQ ID NO: 363321 - DNA, 201 bp, Homo sapiens
atctgagtcaaaggagttaaaactcttcagaaatatttattactattgcaaattaaagtaaacactgaatttattctcctgactcctgaatctgcatattrttaactagtttctctcagtttcttcctgttccagtctgttctagtatgctgaattcagatgtatttttgttcagtaacatttttatcttgtcatcatcca

SEQ ID NO: 363322 - DNA, 201 bp, Homo sapiens
cctgatatgagttaacactgttatactcttagaagaaaacataggtgtaaatctttgtaaccttgaatgaggcaatgatttcttaactatgacatcaaaarcacaagtgagaaaagcaaaaatagatacattggacttcatcaaagtaaaagcttttattcttcaaagaacaccatcaagaaagtgaaaagacaatccact

SEQ ID NO: 363323 - DNA, 201 bp, Homo sapiens
gtggagttctaactgatgtttcatttctgaatgtgggtattgtattaatctatacattttttagtgtggccaaaatgttttattttaaaaagtgtcagccyggcattataccctcattggattctactttaagctccaaaaataaacttattaaagagatcaatctgtatggttggttgtgttggggctttgtaaaaaaag

SEQ ID NO: 363324 - DNA, 201 bp, Homo sapiens
gttagagaataagtgaagacatgcaggggagtgatagaaaattcagaagcagggtttcttccagggggaagaagggaaagtagtaaaggttggggatggaygtggcatagtggagttctaactgatgtttcatttctgaatgtgggtattgtattaatctatacattttttagtgtggccaaaatgttttattttaaaaag

SEQ ID NO: 363325 - DNA, 201 bp, Homo sapiens
cccgccccagctgccgccgcacgtagtaggttctgtctgggactgggcagggccatcggggctgggggggcggggcttgtgggtaaggcgggcggaggcgkggaccctccgcccgatgatagggctggaggaggaaggggcgggctgaagaaggggaaggtgggaagagcccagccggggctacaaattgggtgaagcgct

SEQ ID NO: 363326 - DNA, 201 bp, Homo sapiens
tttatggtaccagagaatttgtgataagggaagacaggaaatccatctttattcattatcctcaggaaattaggtaaagagaatgagaaaaaaaaaaagtyccaattcagatagaggtatctgtccaatggagatatatgtaaaatattaatccttccataaaaggtaaaatttgaattttagggtcaacatgaaagtgtt

SEQ ID NO: 363327 - DNA, 201 bp, Homo sapiens
agttccaattcagatagaggtatctgtccaatggagatatatgtaaaatattaatccttccataaaaggtaaaatttgaattttagggtcaacatgaaagygttagtatgaaataactacaggaatggagatgtgtggctaaggagaaaagtaaatctaaaacttcacctttctggaggggtcatgcaaggaggcgtgact

SEQ ID NO: 363328 - DNA, 201 bp, Homo sapiens
gtgacttgagagaatttgccacggttaatgttacaattctggggcagcctacctttcattgcttgattattctgcatagacccattttttaggtctacaarcactgaatgagcacctatgatttttattctagaggctttttgtagctcatttatttttcctaagaatgctttttgccccttttttttttttttttttgag

SEQ ID NO: 363329 - DNA, 201 bp, Homo sapiens
attacagggatgagctaccttgcctggctgattttaatttttatcaatgaacataatttttaaaattcaatggtgctaaaaggctcctgctgacaagcttscatcccttcagttcacgtccttccccatcctagtcccaaggcaactactttcaacacttcccctttctgttgtatttctaagtaatatccgtattttcat

SEQ ID NO: 363330 - DNA, 201 bp, Homo sapiens
gccacggttaatgttacaattctggggcagcctacctttcattgcttgattattctgcatagacccattttttaggtctacaaacactgaatgagcacctmtgatttttattctagaggctttttgtagctcatttatttttcctaagaatgctttttgccccttttttttttttttttttgagatagggtctctcgctct

SEQ ID NO: 363331 - DNA, 201 bp, Homo sapiens
tcctggctactcaggcatgcaccaccccttacagctaattttttaaaaaaaattttgtagagatgggttctggctattttgcccaggctggtctcgaactyctggcctgaagtgatgctctcacctcagccttgcgagttcttggaattataggcatgagcgactgcatttagcatcttccagtctttttctttcttcaaa

SEQ ID NO: 363332 - DNA, 201 bp, Homo sapiens
taatttttggatttttttctgagacagattctcgctctcttgcccagtctggagtgcagtggtgcaacctcagctcactgtaacctctgcctcccgggctmaagcgattttcctgccttagcctcctgagtagctgggattacaggcatgcaccactacccttgcataatttctgtatttttagtagatatgtggttttgc

SEQ ID NO: 363333 - DNA, 201 bp, Homo sapiens
aggcacatacctgtagtcctggctactcaggcatgcaccaccccttacagctaattttttaaaaaaaattttgtagagatgggttctggctattttgcccmggctggtctcgaacttctggcctgaagtgatgctctcacctcagccttgcgagttcttggaattataggcatgagcgactgcatttagcatcttccagtc

SEQ ID NO: 363334 - DNA, 201 bp, Homo sapiens
ggacattttcctgtgctctgccatttgagtagctgttagtttatcaaccttcaggtcatgtttatagaagcactctgccacagggcctgtgtccctgcatrttcttactgagtatgccaagaaagcccctgattgctttttacatgggccacttatttgtcaaagttgtgcttgcagcaaacaacctggagggataagtta

SEQ ID NO: 363335 - DNA, 201 bp, Homo sapiens
tactgaaaatattccttaatgctggtagcttcttgacttcgtgcctttcttacccaattacatctattctaaagctgtcccacttcttttcctttgagcayatgactactgctatctatctcctattcttaaccagcattaattacactgtgtattagatactgttttaaaggctttatgtttgttgaccgacttaatcct

SEQ ID NO: 363336 - DNA, 201 bp, Homo sapiens
gagatcctctcacttcagcctcctgagcagcatactaatcaggcacatacctgtagtcctggctactcaggcatgcaccaccccttacagctaattttttwaaaaaaattttgtagagatgggttctggctattttgcccaggctggtctcgaacttctggcctgaagtgatgctctcacctcagccttgcgagttcttgg

SEQ ID NO: 363337 - DNA, 201 bp, Homo sapiens
tactttctagaagtgagattggtaataaataagcaagaaaattcaggtaatttcagagaaggttgaaaacaaaataaaatgggctgatgtgatagagaatsacagagcagaggggcttctgtagattgggtggtcaaggaaggtgtgtcctgggagttgatgtttgagtgtagacctgtagaaaggccttaaggcaggaat

SEQ ID NO: 363338 - DNA, 201 bp, Homo sapiens
tttataggtcttattaaatgtgggaaacttttttggttgttattgtttcacattttttctgtcttcctgtctcttgtgtctccttctgagagtttattacrgggatgttaactacttgatgttatctgttaagtcattgaggctcttttcatttgttttccaggcttatttctctttgtacttcattgtggatagattcta

SEQ ID NO: 363339 - DNA, 201 bp, Homo sapiens
tattgctgtaatatgctgtgtaaaggctcaaacctttcctgcatgatttttttaaagagtaggggtctcgctctgctgtccaagctggattgcagtggtgyggtcatagctcattgcagccttgaactcctgggctcaagagatcctctcacttcagcctcctgagcagcatactaatcaggcacatacctgtagtcctgg

SEQ ID NO: 363340 - DNA, 201 bp, Homo sapiens
agtagagacagggtttcaccatgtgggccaggctcgtgttgaactcctgacctcaagtgatccacctgtctcggcctcccacagtgctgggattacaggtrtgagccaccacgcccggccagcactacactttctaatgagtttttattgaaaaaaattttagttgaaaatgaagctgttggctcgtaagtgaaaagcttg

SEQ ID NO: 363341 - DNA, 201 bp, Homo sapiens
ttgagagtaaggtacagaataaaagtgtcatatcatcagtattctccaccagatcctgtgctatgatattgctgtaatatgctgtgtaaaggctcaaaccyttcctgcatgatttttttaaagagtaggggtctcgctctgctgtccaagctggattgcagtggtgcggtcatagctcattgcagccttgaactcctgggc

SEQ ID NO: 363342 - DNA, 201 bp, Homo sapiens
ttttttaggtctacaaacactgaatgagcacctatgatttttattctagaggctttttgtagctcatttatttttcctaagaatgctttttgccccttttytttttttttttttgagatagggtctctcgctctgtcacccaggctggagtgcacttgtgcaatctcagctcactgtaacctcctgggttcaatctctgct

SEQ ID NO: 363343 - DNA, 201 bp, Homo sapiens
ttaatttggttaagaggaagtgcttcacacatacgaaatgttattaagtggtcggtacttgatggtaccaatttcgtgattgcagtgttacagttctatcraagtttaataagctcaattctgtgggttcatatgaagtcatttcaatataattcttagatatttagagccaagtaaatgtggaatggcataccaaacagt

SEQ ID NO: 363344 - DNA, 201 bp, Homo sapiens
acctgagactgggtaatttataaagaaaagaggtttaattggttcagggttccataggctgcacaggaagcatggctggggaggcctcaggaaacttacartcgtggcagaaggtgaaggggaagcaggcaagtcctacatggctggagcaggaggaagagagagggggaggtgccatacactttcaaacaaccagatctc

SEQ ID NO: 363345 - DNA, 201 bp, Homo sapiens
gtgcataccactgtgtctgactttttataaaaatacgttttaaacctctttatctacaggttccctctccatctctttttattcctatcctcacctttggttttttttttttttttttgaagaaactcagttgtttttcttgtggagttttccaaagtctggattttgctgattacatatccatagagtttaagatattcc

SEQ ID NO: 363346 - DNA, 201 bp, Homo sapiens
acaaaatgaaaagcatgaaatgatacagttttttataaaacatgaaaacatgcatggtaatatacatcacattcaagataatgtttgcttcttttattaattttttttttaatttgagacgatgtttcactcttgctcaggctggagtgcagtggtgtgatcacagctcattgcagccttgactccctgggctcaagtgat

SEQ ID NO: 363347 - DNA, 201 bp, Homo sapiens
tgaggcgggagaatcccttgagtctggaaggtggaggttgtagtgagccgagatcgtgccactgcactccaagctgggtgacagagtgagattctgtctcaaaaaaaaaaaaaaagatacagttatgcaatatgattcacccatttagcatgcacaattcggtggcttttaggatattcccagagttgtgcaaccatcatc

SEQ ID NO: 363348 - DNA, 201 bp, Homo sapiens
tagctaggtcatttttatggagggactttcaagaattattaagtgaagagaacaagacacagaaatatgtttataaaatcatctcagttttataatgtagtaatataatatataatgagcatatattatatatgcttgtgtatgaccaaaatatgaacatgaaaaaatatggaaagattcattctaggctgttaacatgag

SEQ ID NO: 363349 - DNA, 201 bp, Homo sapiens
agctaggtcatttttatggagggactttcaagaattattaagtgaagagaacaagacacagaaatatgtttataaaatcatctcagttttataatgtagtaatataatatataatgagcatatattatatatgcttgtgtatgaccaaaatatgaacatgaaaaaatatggaaagattcattctaggctgttaacatgaga

SEQ ID NO: 363350 - DNA, 201 bp, Homo sapiens
gctaggtcatttttatggagggactttcaagaattattaagtgaagagaacaagacacagaaatatgtttataaaatcatctcagttttataatgtagtaatataatatataatgagcatatattatatatgcttgtgtatgaccaaaatatgaacatgaaaaaatatggaaagattcattctaggctgttaacatgagag

SEQ ID NO: 363351 - DNA, 201 bp, Homo sapiens
ctaggtcatttttatggagggactttcaagaattattaagtgaagagaacaagacacagaaatatgtttataaaatcatctcagttttataatgtagtaatataatatataatgagcatatattatatatgcttgtgtatgaccaaaatatgaacatgaaaaaatatggaaagattcattctaggctgttaacatgagaga

SEQ ID NO: 363352 - DNA, 201 bp, Homo sapiens
gctatttttgtatttttagtagagacagggtttcaccatgtgggccaggctcgtgttgaactcctgacctcaagtgatccacctgtctcggcctcccacaktgctgggattacaggtgtgagccaccacgcccggccagcactacactttctaatgagtttttattgaaaaaaattttagttgaaaatgaagctgttggct

SEQ ID NO: 363353 - DNA, 201 bp, Homo sapiens
tgaaatagagcattttggcagagaaactttagctctttctttctctctctttcttcaacttgggaaagaataaggaataaatctttatcttttttttttcytcttctggccaagacctaaataccagcatttcatgataatggataagttatctttgaaattttccttttttctttcagtgtgcaggatgacagaattcga

SEQ ID NO: 363354 - DNA, 201 bp, Homo sapiens
tgagaaactttctaaagtatcttaactcagttgtttatagtatagctttactttacagataacttttgatgttcttagatcattagatatacctacatcartatacataagataagcttccaaaggaaatactctttgctttgggaatactctttcctatcatctactaattttcattatagcagcagtcttttatttgta

SEQ ID NO: 363355 - DNA, 201 bp, Homo sapiens
cactatcacagtcgagatgtggaagaatacttttaccctaaaactttccatgtgcttttgcagttggtcccctcccttcacatctggccctaggcaattaytaattttccaccagtatattttaccttttacagaatttcaaatacaggatatcttacaatatatattaaaattttttggcttgatttctttcacaaaata

SEQ ID NO: 363356 - DNA, 201 bp, Homo sapiens
ctgcctcagcctctggagtagctgggattacaggcactcgccaccacgcctggttaatttttgtatttttagtagagatggggtttcaccatgttggccakgttggtcttgaactcctgacctcgtgatctacccgcctcggcctcccaaagtgctaggattacaggcatgagccaccgtgcccagctgcctttgtctggt

SEQ ID NO: 363357 - DNA, 201 bp, Homo sapiens
gtgaatgtttaaaagcattatatagactctatttcagaattgtgttgactaataaaaaatgctagttttccctaccccacacctatctttcaactgctttrtatttatttctttattagatagaaaattcctcagtaaacttttatttagagtaattcctctttatgatttttttgttctaaaggtcgattcttaaaagaa

SEQ ID NO: 363358 - DNA, 201 bp, Homo sapiens
atctgggtcaattatataatcatagataacttaatttttttgatgcagtggtatttactgtccacctctaataaagcaggtgaatcatagactaccattgkatacatgtctttggagcagatttccatccatttttactccagtcctatggtggctaccggtattgttcttgtcgcctgctattcttagtctgcagtttgc

SEQ ID NO: 363359 - DNA, 201 bp, Homo sapiens
gaaaatgtattgttttgaacgaaggttcattggtacttggaaaatttggagtaactggcaagctctgattagtgaatgactgcaatgggtaaaactagccwtagagtcacagcaggttgttttagcagctatcaggtaaaattggtttcaggttacagtaggcagtttcagcagctaggcttgcagagaattacatttttg

SEQ ID NO: 363360 - DNA, 201 bp, Homo sapiens
cttttttgaaatgggttcactctgtcactcaggctgcagtgcagtggcatgatcatggctcactgcagcctcgacctacctgggcccaggtgatccttccwcttcggcctcccgagtagctgggactacaggcacacaccaaccatacccagctaatttttgtattcttttaggaatggagtttcaccgtgttgcccaggc

SEQ ID NO: 363361 - DNA, 201 bp, Homo sapiens
cacctcctcctccacaggtgcagccgaccaggtggaccctggcgctgcagcggccgcagcgcccccagcgcccgccttcccgccccagctgccgccgcacrtagtaggttctgtctgggactgggcagggccatcggggctgggggggcggggcttgtgggtaaggcgggcggaggcgtggaccctccgcccgatgatagg

SEQ ID NO: 363362 - DNA, 201 bp, Homo sapiens
tgtgggaaacttttttggttgttattgtttcacattttttctgtcttcctgtctcttgtgtctccttctgagagtttattacagggatgttaactacttgrtgttatctgttaagtcattgaggctcttttcatttgttttccaggcttatttctctttgtacttcattgtggatagattctactgctctgttttcaagtt

SEQ ID NO: 363363 - DNA, 201 bp, Homo sapiens
cacattttttctgtcttcctgtctcttgtgtctccttctgagagtttattacagggatgttaactacttgatgttatctgttaagtcattgaggctctttycatttgttttccaggcttatttctctttgtacttcattgtggatagattctactgctctgttttcaagttcagtggtctttttttctgctatgtctaatc

SEQ ID NO: 363364 - DNA, 201 bp, Homo sapiens
ccttttgctcctttttgctcatgttttcctttacattcttaattatatggagcatatttataaattgtattttcttgttcttatatgctaattgcatcatmtctgtcatttctggggctgcatcccttgacagatttttcctattttttgcatgtctagtaactaattatttggatcatggatatgttgaatctgtgttgt

SEQ ID NO: 363365 - DNA, 201 bp, Homo sapiens
attaaattcctttggatcactttggtctttttaaggattgtttttaaacttcggtagagaataatagcccttactctagagcaactttagtcacattctayggcttgacctttttagagttagaaaggggtgcatagtagcagtagcacaccattatatcgtatttccacaatacagagacagtagacattagtaacatta

SEQ ID NO: 363366 - DNA, 201 bp, Homo sapiens
ccaactttaaaaggtcactaaagttaactggacaataatctaggcagacatcactttacaaaaaagagggaaagcccaaaatgccaccttctatagaaaaygcacagtacagttttattcagagcaaagaaaaaagaaacttgatcatactatgagaaactcagccataggtttggaatccgtattcacaccacacattca

SEQ ID NO: 363367 - DNA, 201 bp, Homo sapiens
gatttcagcctgtgtcttagggaatcagtcttactatcttgttacactttcttttgttgtaaaaatgtagagaaagaaacaaatggaaagcaatagtctcragccctttatcaattgcagttaaggttgctttagcttagaaatgttgtatgtttatagaaatggttgagaggaaagctttagaaagcgataaacaaataa

SEQ ID NO: 363368 - DNA, 201 bp, Homo sapiens
ccattgcactccagcctgggtgacagagtgagactctgtctcaaaaaaaaaaaaaaaattttttatttgggaagcaagaattgcaatttgggacatacacrcagaccaggtcgtctttggtatgtttgaagcacaaagagaaaattggaggttttattaaaaaggagaaataagccaggagcagtggctcacatctgtatt

SEQ ID NO: 363369 - DNA, 201 bp, Homo sapiens
taggtcatttttatggagggactttcaagaattattaagtgaagagaacaagacacagaaatatgtttataaaatcatctcagttttataatgtagtaatataatatataatgagcatatattatatatgcttgtgtatgaccaaaatatgaacatgaaaaaatatggaaagattcattctaggctgttaacatgagagat

SEQ ID NO: 363370 - DNA, 201 bp, Homo sapiens
gtagagttgtttgagctccttatatattgtggttattaatcccttgtcacatgggtggtctacatacattttcttccattccatgggttgtctcttcactktgttgattgtttctgttgctgtgcagaagctttttaacttcatgtgatcccatttgtccatctttgctttggttgccctattaagaaatctttgcccagt

SEQ ID NO: 363371 - DNA, 201 bp, Homo sapiens
gaggcaggagaatgatgtgaacccaggaggtggagcttgcagtgagctgagattgctgccactgcactccagcctgggcaacagagcgagactccatctcaaaaaaaaaaaaaaaaaagataataaaaaaattaaaaagtactcattttaatattttatgaaatagagcattttggcagagaaactttagctctttctttc

SEQ ID NO: 363372 - DNA, 201 bp, Homo sapiens
tggagtgcagtggcatgatctcagctcactgcaacctccgccccccgggttcaagcagttttcctgccttagcctccctagtagctggtattataggcgcmtgccaccacgcccagctaatttttgtattttagtagagatggggtttcgccatgttggccacgctggtctcaagctcctgacctcaggagatccacccat

SEQ ID NO: 363373 - DNA, 201 bp, Homo sapiens
aaagaagtattaatgttgggataaggaaactaacttagaaatcaggccctgatgtgtttagaagcaaatgaatttggacctggaaagatgtgtcctcctcatatatatatatatatatatattttttttttttctttttttttttttagatggagtcttgttctgttgcccaggctggagtatagtggtgcgatctcagct

SEQ ID NO: 363374 - DNA, 201 bp, Homo sapiens
ttccgggttgtcagctttttcagctccaagtctgggttttatgctacaaaaagtaaacctggggaactcaccgtcatactgttcctcacatcccaagttcmctagctggtctgctttctgctcacctttcagagtcgtcttatgtttgtttgacatgtaatatgcagggagtggtacttagagtaggagtggggaaacata

SEQ ID NO: 363375 - DNA, 201 bp, Homo sapiens
ttatggtgttaaaaacagttcacccatagggttttccagagctaaaagtagaggattctttgaagagtggatggcaaggaaccttgtcattcagttgtaargtttaaattgcttcacatacgtcaggccttctcagagtagagataacacatcattttctaaccttcccgatataggctacagaaattgacagaagaaaga

SEQ ID NO: 363376 - DNA, 201 bp, Homo sapiens
aagaagtattaatgttgggataaggaaactaacttagaaatcaggccctgatgtgtttagaagcaaatgaatttggacctggaaagatgtgtcctcctcatatatatatatatatatatattttttttttttctttttttttttttagatggagtcttgttctgttgcccaggctggagtatagtggtgcgatctcagctc

SEQ ID NO: 363377 - DNA, 201 bp, Homo sapiens
ataaggaaactaacttagaaatcaggccctgatgtgtttagaagcaaatgaatttggacctggaaagatgtgtcctcctcatatatatatatatatatatattttttttttttctttttttttttttagatggagtcttgttctgttgcccaggctggagtatagtggtgcgatctcagctcactgcaacttccgcctcct

SEQ ID NO: 363378 - DNA, 201 bp, Homo sapiens
cgccaccgcgcccagctaattttttgtatttttagtagagacagggtttcaccatgttggccaggctggtcttaaactcctggcctcaagtgatctgcccrcttggcctcccaaagtgctgggattacaggtgtgagccaccgtgtccggcctgtcttcctcatatttaattcgaaataagaataataccaaacaataaaa

SEQ ID NO: 363379 - DNA, 201 bp, Homo sapiens
tgaaaagccagttaagtacgtatttttgaaaaccaagggaataataataaagtaagagatgcatagtccattttcacactgctgataaagacataccagakactgggaagaaaaagaggtttaattggacttacagttccacatggctggggaggcctcagaaacattgtgggagttgaaaggcacttctttttttttttt

SEQ ID NO: 363380 - DNA, 201 bp, Homo sapiens
ccattttcacactgctgataaagacataccagagactgggaagaaaaagaggtttaattggacttacagttccacatggctggggaggcctcagaaacatkgtgggagttgaaaggcacttcttttttttttttttcttaatttaagttctgggatacatgtgtagaacatgcaggtttgttgaaaggcacttcttacatg

SEQ ID NO: 363381 - DNA, 201 bp, Homo sapiens
acactgctgataaagacataccagagactgggaagaaaaagaggtttaattggacttacagttccacatggctggggaggcctcagaaacattgtgggagktgaaaggcacttcttttttttttttttcttaatttaagttctgggatacatgtgtagaacatgcaggtttgttgaaaggcacttcttacatggcggtggc

SEQ ID NO: 363382 - DNA, 201 bp, Homo sapiens
taatttaagttctgggatacatgtgtagaacatgcaggtttgttgaaaggcacttcttacatggcggtggcaagagaaaatgaggaagaaggaaaggtggraacccctgataaacccatcagatttcatgagacttattcactatcatgggaatagcatgggaaagactggctcccatgattcctcccactgggtcctccc

SEQ ID NO: 363383 - DNA, 201 bp, Homo sapiens
ggttacagtaggcagtttcagcagctaggcttgcagagaattacatttttggagcaatgatatgtgctctcagtgctttttcccctggcctctctactccrtttcaattgagtatgacaagaatgacccaatttatatgatcaactttcacaatactttttttttttttcccagcaaatacaactccaagatcttcatccc

SEQ ID NO: 363384 - DNA, 201 bp, Homo sapiens
aacacagtggcgcccagaagcttggagattccaggaactgcagagccccagagagggtgtcatagacctggcttaggagcccctaggtctgagctccccaraggtccacagctcttctctcctgtcttctctccttcttgttgctgcaatgtggcaagcaagagatgggtttcaggcctgtttgtgttacagctcttttag

SEQ ID NO: 363385 - DNA, 201 bp, Homo sapiens
aaagatgtaactcagaaactttaatcattatagaaactacgtaggaaatgatgagttcatgtcctttatagggacatggatgaagctggaaacgatcattytcagcaaactatcgcaaggacaaaaaaccaaacaccgcatgttctcactcataggtgggagttgaacaatgagaacacatgggcacaggaaggggaacat

SEQ ID NO: 363386 - DNA, 201 bp, Homo sapiens
aggggaatttactccagtgtttattgtgagaaccaagtggaactcctgggagtaaaactcacaaaagtgtgcccccttcccccatgactcggttcccctgyactttttgactctcagacttgttgacactgagcctccagcaattgatcagttccagttccagttttcctaccctgatactggttccttcagaggtttctg

SEQ ID NO: 363387 - DNA, 201 bp, Homo sapiens
tgctggatcatgtggtagttctatttttagttttttggtagttttttttcaaactactctccatagtggttgtactaatttacattcccaccaacagtctrtgagggttcccttttctccacatcctcaccagcatttattattgcatgtctttggataaaagccattttaactgaggtgagatggtatctcattgtagtt

SEQ ID NO: 363388 - DNA, 201 bp, Homo sapiens
ttacatgtatttgcaatatttaatttttaaaaaattatacagaaaatacacacacatgaattttttataatgtactgctatttgaccttcactaccatcayaatcaggtgaaaatgagacccatgcacatctgtctagaaagcccatgttgaacttgagagcatctgttttccagcacatcttgcattagaaagacagaag

SEQ ID NO: 363389 - DNA, 201 bp, Homo sapiens
tgattcatctcagtacagatgacagtcacctgcagagtataattagtcatcttttaaaaacgcccaatattttccccaaaatatcatttaacttactaagrgccatatactgtactggacataggtttttattttaatattataaggaaactgaatctcagacaggtaaagtggtttgaccatgtcaaccacttagatggg

SEQ ID NO: 363390 - DNA, 201 bp, Homo sapiens
tgcttataatgaatcaaggcagactactcacatcaacacctaataaacaaagtcaggaactgtagaccaggaaaagttgctatgagagctttctaagattrctggaatgtatgctatttttctatgttagttttcttttctttagtaataaaattcttaaaccaaaggcctacctgttcattcttagaatgtttgaaaaaa

SEQ ID NO: 363391 - DNA, 201 bp, Homo sapiens
cttttcaccaccatgcaatcttgaaaaacacatcataaattctcttatggaagtagttttgtatctattaatctgcatccaggttgacaagaggagacttwagctaaaacccttgggacaaagagaatagagttcaccaacagggaagaagaggagtcagtgccgctaatacgcatttgatgtgaactgaaaactaaccca

SEQ ID NO: 363392 - DNA, 201 bp, Homo sapiens
ttatgaaatgtaacaggtgtactagggtatgaagtgaaacaaaaacaccccattctccccaggtctaccatgtttctttaggtaacatttcacaagtctasaagtatacatcttttcttttctaaaatggtatcatactaagcattactattgtataacttgcttttgtttcctaatatgtgggagacatatttctctatc

SEQ ID NO: 363393 - DNA, 201 bp, Homo sapiens
tcttcctgcctggccagctttattatcaggctagtgacaatgactgcagctcttcctggcatcatgtccagaatgtccaaaggaagaagagacaagcattkcctgttcactctttcttagaacaagggaactttttctcagatgccttccagtatctcatgattgcctcattgcattttcagaattgagtaacaggctcct

SEQ ID NO: 363394 - DNA, 201 bp, Homo sapiens
acattacttttgatcaaaatgttgtcagaaattaaggctgtagacactgctgtggattaaatcctcccttgaaacatgtctctcttttttttgttctagargatggactgtgtatattcagtaatcttctcaattgcaaattatttaaaaattgaattatatcataaaaaattatagaaattcatttgcaaatattttcaa

SEQ ID NO: 363395 - DNA, 201 bp, Homo sapiens
aggagggaggattgtttaaagccaggagttcgagaccagcctgagcaacatagcaagacctgatctctacaaaaaatattaaaaaattagctgagtgtggwggcatgaacctgtagtcctagctacttaggaggctaggcaggaggattgcttgagcccaggagtttgatgttacagtaaggtatgattgtgccactgcac

SEQ ID NO: 363396 - DNA, 201 bp, Homo sapiens
cagcctgggtgacagagtgagactctgtctcaaaaaaaaaaaaaaaattttttatttgggaagcaagaattgcaatttgggacatacacacagaccaggtsgtctttggtatgtttgaagcacaaagagaaaattggaggttttattaaaaaggagaaataagccaggagcagtggctcacatctgtattcctaacgcttt

SEQ ID NO: 363397 - DNA, 201 bp, Homo sapiens
tggccatggtggcacttgcctgtagttccagctactcaggaggctgaggtgggaggatctcttgagcctgggaggtcaaggttggaaaaagaaaatgtatygttttgaacgaaggttcattggtacttggaaaatttggagtaactggcaagctctgattagtgaatgactgcaatgggtaaaactagccatagagtcaca

SEQ ID NO: 363398 - DNA, 201 bp, Homo sapiens
aaaacagttcacccatagggttttccagagctaaaagtagaggattctttgaagagtggatggcaaggaaccttgtcattcagttgtaaggtttaaattgsttcacatacgtcaggccttctcagagtagagataacacatcattttctaaccttcccgatataggctacagaaattgacagaagaaagaagagaccattg

SEQ ID NO: 363399 - DNA, 201 bp, Homo sapiens
aaagtaaagaaagtccaacaaaaggaaggaggaagtgatctgggaatgtctggcaactctggtgagttgtgggggattcttttttctcctcagtcatggcyctggtattctggaattctccagagggcagaagagcgtattagaattgtgtcttttttctttgtggagaaaggtcccttttgttcctgagcagagtggccc

SEQ ID NO: 363400 - DNA, 201 bp, Homo sapiens
gatctgggaatgtctggcaactctggtgagttgtgggggattcttttttctcctcagtcatggctctggtattctggaattctccagagggcagaagagcstattagaattgtgtcttttttctttgtggagaaaggtcccttttgttcctgagcagagtggccccctataggtgatggtgatgtgtataggaggttaagg

SEQ ID NO: 363401 - DNA, 201 bp, Homo sapiens
cttttttctttgtggagaaaggtcccttttgttcctgagcagagtggccccctataggtgatggtgatgtgtataggaggttaaggggatggtagagctasaattctgcaatttagctgtagttctcccaactttctcctttattccttctagctatttttgtcctggttataaaattaaaacattcttgctacagaaatt

SEQ ID NO: 363402 - DNA, 201 bp, Homo sapiens
gcagctgccaagggtgagccaggagtggagtggtgagggtgaggggtgtgtgagcaggtgaccatggggtctggcccctgtgcactgccaggcatgctggyttcggcagggtgggcagctccaggtgccagcgtgagtgagggctggaccaggcgtaccacaaacagcttccacagctggcaccagggaacacagtggcgc

SEQ ID NO: 363403 - DNA, 201 bp, Homo sapiens
cccagctactcaggaggctgaggcgggagaatcccttgagtctggaaggtggaggttgtagtgagccgagatcgtgccactgcactccaagctgggtgacrgagtgagattctgtctcaaaaaaaaaaaaaaagatacagttatgcaatatgattcacccatttagcatgcacaattcggtggcttttaggatattcccag

SEQ ID NO: 363404 - DNA, 201 bp, Homo sapiens
cccctgtgcactgccaggcatgctggcttcggcagggtgggcagctccaggtgccagcgtgagtgagggctggaccaggcgtaccacaaacagcttccacrgctggcaccagggaacacagtggcgcccagaagcttggagattccaggaactgcagagccccagagagggtgtcatagacctggcttaggagcccctagg

SEQ ID NO: 363405 - DNA, 201 bp, Homo sapiens
gaaggtggaggttgtagtgagccgagatcgtgccactgcactccaagctgggtgacagagtgagattctgtctcaaaaaaaaaaaaaaagatacagttatrcaatatgattcacccatttagcatgcacaattcggtggcttttaggatattcccagagttgtgcaaccatcatcaaagtcaattttagaacattttcatc

SEQ ID NO: 363406 - DNA, 201 bp, Homo sapiens
cttcttacatggcggtggcaagagaaaatgaggaagaaggaaaggtgggaacccctgataaacccatcagatttcatgagacttattcactatcatgggamtagcatgggaaagactggctcccatgattcctcccactgggtcctcccactgggttacctctcactgggtccctaccacaacacgtgggaattctgggag

SEQ ID NO: 363407 - DNA, 201 bp, Homo sapiens
attcgagaccagccttgccaacatggcgaaaccccgtctctactgaaaatacaaaaattagccgggcatggtggcaggtgcctgtaatcctagctacttgrgaggctgaggcaggagaatggcatgaacctaggaggcggaggttccagtgagccaagatcatgccactgcactccagcctcggtgacagtgagacttcat

SEQ ID NO: 363408 - DNA, 201 bp, Homo sapiens
acatggcggtggcaagagaaaatgaggaagaaggaaaggtgggaacccctgataaacccatcagatttcatgagacttattcactatcatgggaatagcaygggaaagactggctcccatgattcctcccactgggtcctcccactgggttacctctcactgggtccctaccacaacacgtgggaattctgggagataaaa

SEQ ID NO: 363409 - DNA, 201 bp, Homo sapiens
ccagccactcactctggaggctgaggcaggagaattgcttgaacccaggaggtggaggttgcagtgagccgacatcgtaccactgcactcaagcctgggcracagagcgagactccatctccaaaaaacaaaaccaaaaaagaacagaagagcgagatgtatgaagttagaaaaactgtcctaaaaattgcccgtgttcta

SEQ ID NO: 363410 - DNA, 201 bp, Homo sapiens
tatagagggttgtctttttctctggttgcttttaagattttctcttaatcactgattttcatgtttgattttctttctgccccatataatctgcaggaacmcatatttgattttggtggaccttgtctctttcccccacacccgagacagcctgtgctgtctagcacaggctggagtgcagtggcacaatctcagctgact

SEQ ID NO: 363411 - DNA, 201 bp, Homo sapiens
gggcatgatggcgggtgcctgtaatcccagctactcaggaggctgaggcgggagaattgcttgaaactgggaggcggaggttgcagtgagccgagatcgcrccattgcactccagcctgggtgactgagcgagactccgtccctcacccacccacccccctaaaaaagaaaaactactgttttaaaatgagctaaaagaca

SEQ ID NO: 363412 - DNA, 201 bp, Homo sapiens
gtgcctgtaatcccagctactcaggaggctgaggcgggagaattgcttgaaactgggaggcggaggttgcagtgagccgagatcgcgccattgcactccarcctgggtgactgagcgagactccgtccctcacccacccacccccctaaaaaagaaaaactactgttttaaaatgagctaaaagacactaagaaaatgata

SEQ ID NO: 363413 - DNA, 201 bp, Homo sapiens
gtttcatcatgttggttggccaggatggtctccatctcttgacctcgtgatccacccaccttggcctcccaaagtggtgggattacaggcgtgagccactrtgcctggccgcatgtgtgttgttaattacagagtaaataacacttgttgcatatgttagaatcttttttttttttttttgccgaggcgtagtctcactct

SEQ ID NO: 363414 - DNA, 201 bp, Homo sapiens
cctcccaaagtggtgggattacaggcgtgagccactgtgcctggccgcatgtgtgttgttaattacagagtaaataacacttgttgcatatgttagaatcttttttttttttttttgccgaggcgtagtctcactctgttgcccaggttggagtgcagtggcgtgatctcagctcactgcaatctccgcctccctggttca

SEQ ID NO: 363415 - DNA, 201 bp, Homo sapiens
ctgttgcccaggttggagtgcagtggcgtgatctcagctcactgcaatctccgcctccctggttcaagtgattcttgtgcttcagcctcccgagtacctgrgactacaggttcgtgccaccatgcctggctaatttttatgttttttagtagagacgaggttttgccgtgttggccaggctggtttcgaactcctcacctc

SEQ ID NO: 363416 - DNA, 201 bp, Homo sapiens
ccaagagttcttcttgattgtcaaaactttatatcacctaaagtcagaatttcaagcaataatacctgctgttaattcccacattcagtcagacttgctcyggaccgttattttagaaattcctgaactcctcagtccagtggagcattacttaaagatactcaatgaacaagctgccaagtaagtaccagaccctgaatt

SEQ ID NO: 363417 - DNA, 201 bp, Homo sapiens
ctctgccccgccaagtttaagcaattctcctgcctcagcctctggagtagctgggattacaggcactcgccaccacgcctggttaatttttgtatttttartagagatggggtttcaccatgttggccatgttggtcttgaactcctgacctcgtgatctacccgcctcggcctcccaaagtgctaggattacaggcatga

SEQ ID NO: 363418 - DNA, 201 bp, Homo sapiens
tgtttcatctccagaagttccattttgttcttttaaaatattttccagttctctatatgaattatatctcagtaaagctaaaaaaaattccttttgctccyttttgctcatgttttcctttacattcttaattatatggagcatatttataaattgtattttcttgttcttatatgctaattgcatcatctctgtcatttc

SEQ ID NO: 363419 - DNA, 201 bp, Homo sapiens
agaaaatttaaactttcctcaattctgattctaacttttaaaagtcactaattaaacttcattttcatgtatcttatgctatttcataaaaaatatttctrttttcagtgttctacccaagagttcttcttgattgtcaaaactttatatcacctaaagtcagaatttcaagcaataatacctgctgttaattcccacatt

SEQ ID NO: 363420 - DNA, 201 bp, Homo sapiens
gcaatccttggggtgttgcttcgccagctgtaaacctctgtggctggtggtgcctttgcccgagtttttacttgggcctgctgggctcattcctcccactyggcctggcaggctgtgcttggcttttgcttttggcctgaatctcgcagctgccaagggtgagccaggagtggagtggtgagggtgaggggtgtgtgagca

SEQ ID NO: 363421 - DNA, 201 bp, Homo sapiens
aaggcattctcaggtataggaaaattgttatgcaatccttggggtgttgcttcgccagctgtaaacctctgtggctggtggtgcctttgcccgagtttttmcttgggcctgctgggctcattcctcccactcggcctggcaggctgtgcttggcttttgcttttggcctgaatctcgcagctgccaagggtgagccaggag

SEQ ID NO: 363422 - DNA, 201 bp, Homo sapiens
aaaaagtaccttttccccttgtcttcaataaatatttattacagtgtttattttatgccaacattataaactagatgttaggtctacaatggggttaatgagatgagatagacaacctgctttcaagaagcttccagtttagtgtgagagaaaggtgttgaaactgttattccggatttggaggatgctgtgaaggagaag

SEQ ID NO: 363423 - DNA, 201 bp, Homo sapiens
tgcactgttcaaataaattgagttttttttgaaaagttagtatctttacctgatgtcccggtgaagctgaattgttttaaacatttgggaactacaaagtrtacatgtttctgggttttcttttggattggggttcccatttctgggccattttgcttctctctcactctcccctcttctttttggtcactagatttttag

SEQ ID NO: 363424 - DNA, 201 bp, Homo sapiens
aaaagtaccttttccccttgtcttcaataaatatttattacagtgtttattttatgccaacattataaactagatgttaggtctacaatggggttaatgagatgagatagacaacctgctttcaagaagcttccagtttagtgtgagagaaaggtgttgaaactgttattccggatttggaggatgctgtgaaggagaagc

SEQ ID NO: 363425 - DNA, 201 bp, Homo sapiens
ttgttttaaacatttgggaactacaaagtatacatgtttctgggttttcttttggattggggttcccatttctgggccattttgcttctctctcactctcscctcttctttttggtcactagatttttaggccatatttttcattgtagggggagctgggtaaatttttagaagttggcagtgacagagtggcaattaatt

SEQ ID NO: 363426 - DNA, 201 bp, Homo sapiens
tttagaagttggcagtgacagagtggcaattaattagaagttggatttagccaactataaatttgtctcatttacatttttctaaattaagtctaataagygaggaattttccctaagctgtgaattggaattaattatggttcctcacagaaaggtaagaatagtaggagtactaatgttgaaaatgtggccttgtgctg

SEQ ID NO: 363427 - DNA, 201 bp, Homo sapiens
tttccctaagctgtgaattggaattaattatggttcctcacagaaaggtaagaatagtaggagtactaatgttgaaaatgtggccttgtgctgtaaatttyttaacagctctttctcatgtttctttaccaagagaatcatggttctttctttctataagaatttatagaatgtgctgtcttttacagtgtgcttggaagt

SEQ ID NO: 363428 - DNA, 201 bp, Homo sapiens
gcagctttatctgttggcatgctttgctcaaagtggttttgccctactcctgagagagagccagatttgtccccattggccttttgtgcattacacacctkagaataaataataaaaagaaaataagtgttaataataatagatttaatgaaatcaaatttaaaaacaagtatgtaaaacattaagatatttagactttca

SEQ ID NO: 363429 - DNA, 201 bp, Homo sapiens
ctttcaaaatttgcataaaaattctatgatagcttacttggttcataattttttttaaccttctactttgaaaatatttgtaacctatggatagtttgcckgaatgctacaatgtgcttctataaacttttcatctagattcactaagtgttagctttttgccagatttgcattttccgtctctgggaacttattattgtg

SEQ ID NO: 363430 - DNA, 201 bp, Homo sapiens
tgggaaccagacttggtgggaaaaagtgaggggtctctattggaatgttagcgcttattctccgtggtactaggccagtactttttatccatccaaagttwattggatgagtcaattagtgaataaaccgtaatcatgtaaatatgttttctaatgaagactcaagcaagaaaacatttttgagatgtatagaagttcctc

SEQ ID NO: 363431 - DNA, 201 bp, Homo sapiens
ccgggtgtggtatcacgtgcctgtaatcccagctactcagaaagctgaggtgggagaattgcttgaacccaggaggtggaggttgcagtgagccaagatcrtgccactgcactccatccagcctgggcaagagagtgagactctgtctcaaaaaaaaaaattttttttcagacaaaactttcatacaagttgtatgtcttc

SEQ ID NO: 363432 - DNA, 201 bp, Homo sapiens
acacctttgttggaagtcatgaatgcttgtgatgattctatagtttgggacctggttggattgtacactagagagtgatgaggtagcatgtctgtgcttcytggatgggaagtaaagacttggccaactttttttcttcaagtttcctaaatcctctgtggcaggcaagcagcgttctcaaagtcagatgcattatgctat

SEQ ID NO: 363433 - DNA, 201 bp, Homo sapiens
tcctggatgggaagtaaagacttggccaactttttttcttcaagtttcctaaatcctctgtggcaggcaagcagcgttctcaaagtcagatgcattatgcwatgttctgtgatattaaattaggctctgagataatgtcaccatgttttctgagggcaggaacaaatatgtagttgtcatcccctaggcgaaggagagaaa

SEQ ID NO: 363434 - DNA, 201 bp, Homo sapiens
ctacatctattgagataatcatgtggtttttgtcattggttctgtttatgtttcggattacacttactgatttgtgtatgttgaagcagccttgcatcccrtagatgaagctgacttgatcgtggtggataagctttttgatgtgctgctggatttggtttgccagtattttattgaggattttcgcattgatgttcatca

SEQ ID NO: 363435 - DNA, 201 bp, Homo sapiens
ccctctttctctgttgattggaatagtttcagaaggaatggtaccagctcctctttgtacctctggtagaattcggctgtgaatccgtctgttcctggacwttttttggttggtaggccattaagtattgcctcaatttcagaacctgttactggtttattcagagtttcaacttcttcctggtttagtcttggcatggag

SEQ ID NO: 363436 - DNA, 201 bp, Homo sapiens
tgattggaatagtttcagaaggaatggtaccagctcctctttgtacctctggtagaattcggctgtgaatccgtctgttcctggacattttttggttggtrggccattaagtattgcctcaatttcagaacctgttactggtttattcagagtttcaacttcttcctggtttagtcttggcatggagtatatgtcctggaa

SEQ ID NO: 363437 - DNA, 201 bp, Homo sapiens
tggaatagtttcagaaggaatggtaccagctcctctttgtacctctggtagaattcggctgtgaatccgtctgttcctggacattttttggttggtaggcyattaagtattgcctcaatttcagaacctgttactggtttattcagagtttcaacttcttcctggtttagtcttggcatggagtatatgtcctggaattta

SEQ ID NO: 363438 - DNA, 201 bp, Homo sapiens
agtttcagaaggaatggtaccagctcctctttgtacctctggtagaattcggctgtgaatccgtctgttcctggacattttttggttggtaggccattaaktattgcctcaatttcagaacctgttactggtttattcagagtttcaacttcttcctggtttagtcttggcatggagtatatgtcctggaatttatccatt

SEQ ID NO: 363439 - DNA, 201 bp, Homo sapiens
tctctgatggtagtttgtatttctgtgggatcggtggtaatgtcccctttatcattttttattgcgtctatctgattcttctctcttttgttcgttattartcttgctagcagtctatcaattttgttgatcttttcaaaaaactagctcctggattcattgactttttgaaggattttttctatctccttcagttctgct

SEQ ID NO: 363440 - DNA, 201 bp, Homo sapiens
ccttcagttctgctctgatcttagttatttcttgccttctgcttgcttttgaatttgtttgctcttgcttctctagttcttttaattgtgatgttaaggtrtcgattttagatctttcctgctttctcttgtgggcatttagtgctataaatttccctctacacactgctttaaatgtgtcccagagattctggtatgttg

SEQ ID NO: 363441 - DNA, 201 bp, Homo sapiens
ttctggcattgttaacttagagaagcctgtgatttgctctttggctgccatcataaaatacctcaaagaattcaacttggaaaagatgctctccaaacctragtaagtgattcctccaaaattaaaaaaagggggagcttatattatgaacatttcttaaattgaatttggtagtactatacttagagaagcttgcctgct

SEQ ID NO: 363442 - DNA, 201 bp, Homo sapiens
tgtgggtaaccggacctttctctctgactgcccttaacattttttctttcatttcaaccttggtgaatctgacaattatgtgtcttggagttgctcttctygaggagtatctttgtggtgttctctgtatttcctgaatttgaatgttggcctgccttgctaggttagggaacttctcctagataatatcctgaagagtgt

SEQ ID NO: 363443 - DNA, 201 bp, Homo sapiens
catgataatggataagttatctttgaaattttccttttttctttcagtgtgcaggatgacagaattcgagtcgaaaggatggataacatttattttgaatrcagccatgctttccaggcagttacagagttttatgcaaaagatacagttgacatcaaaggtaaatattttccctgtatgtcctcaagttgaactgatttg

SEQ ID NO: 363444 - DNA, 201 bp, Homo sapiens
tttggatttttttctgagacagattctcgctctcttgcccagtctggagtgcagtggtgcaacctcagctcactgtaacctctgcctcccgggctcaagcrattttcctgccttagcctcctgagtagctgggattacaggcatgcaccactacccttgcataatttctgtatttttagtagatatgtggttttgccatgt

SEQ ID NO: 363445 - DNA, 201 bp, Homo sapiens
aaggatggataacatttattttgaatacagccatgctttccaggcagttacagagttttatgcaaaagatacagttgacatcaaaggtaaatattttcccygtatgtcctcaagttgaactgatttgaaatttggataaaggtattagtatgattctcaatttaatgatgactaggtagttattataaatatgtgggagaa

SEQ ID NO: 363446 - DNA, 201 bp, Homo sapiens
tacatttcttggtctttctcattgctgttctcagagatttctttgaatttatcttccaggtttaaaaacttggtctagggcagggcacagtggctcacgcytgtaatccaagtgctttgggaggctgaggctggtggatcacttgagcccaggtgttgtgaccagcctgggcaacatggtggaaccccatctctactaaag

SEQ ID NO: 363447 - DNA, 201 bp, Homo sapiens
agttagaaagtgggtttgagggtgtgatggcaaataagatggcccaaaggatgtatgctagcgttgcctgctgcaagcaaggaccaggaagcactggtgcrgctcactgaagagccgttatctattcttggagggatactgacatgatgacctgaaatctagcaggggagcaaagaagtttccatgatgagaatgaatgtt

SEQ ID NO: 363448 - DNA, 201 bp, Homo sapiens
caaaaaggcacagagcacaagggcagatgaatgagcagcccatgagtacactgcgaactgagagagaatgcagtcatcttgagctagaagggaacagattytgtggggattgaggcaccaggctgtggtccaattaggcagagaaagatggacaacagagtccaaacggtagggggtgataagaagcaagaaacagtaata

SEQ ID NO: 363449 - DNA, 201 bp, Homo sapiens
aatgcagtcatcttgagctagaagggaacagattttgtggggattgaggcaccaggctgtggtccaattaggcagagaaagatggacaacagagtccaaayggtagggggtgataagaagcaagaaacagtaataactgtttctaaaacaaattagatttgttgcattagcacaaaatagaaacagcaaaccaatatttta

SEQ ID NO: 363450 - DNA, 201 bp, Homo sapiens
tggctcatagaaatcgcaagatataattgcctgcctcatcattaacatcacctgccccttcctggtgtgggcctctgtgttcttgggatgagtaaccactrtctatgtgggcctttctacctgtctgccttgacctgagcagttcgacagtctgatgatgctggaggtcttagcctggttgtaagacaaagtaaaatcaga

SEQ ID NO: 363451 - DNA, 201 bp, Homo sapiens
tatctatgtgggcctttctacctgtctgccttgacctgagcagttcgacagtctgatgatgctggaggtcttagcctggttgtaagacaaagtaaaatcaracgcagatgtcatctgccagggatttccagaaagagctctcagattgcctcaaaaacacattggagcctctacactacatatgctacagttacacgaaat

SEQ ID NO: 363452 - DNA, 201 bp, Homo sapiens
gctcccaaagggcaccactgtgatgacacatgagggtatcagcagcttgtcctcaaacctctcattgcccttcctcttccacccactggctccatcgaggsacatacctgaaaggctttcctttatcacagtgctacacaggaggggaaacggaccaagccattgttcctctatcaggattcctttgtgtgggcatgcatc

SEQ ID NO: 363453 - DNA, 201 bp, Homo sapiens
tgtgctgggcagaaatggggcctgatggccaggccttcactataggtcttatgaagcctttgaaagagtcccaggagccagcgggatgggaaagctgagayggggcagcaggtgatcaggcagagggcacagcagggccagagctgtgaagagtcccagcagctgtggtgcgaggggcccggggccaccacacagatcatc

SEQ ID NO: 363454 - DNA, 201 bp, Homo sapiens
tcgctaaagccagcagagctcccgcccttggccgaagcgacccctcctccctgcacacaggtgggggcagctcagcaccaggagcagaacaaatcagcacsctgcctgcagggcctctttttggtagtgaatcaggaatttttctcgatggaaaaaaaaatctaaaggctgtattttgacgctaagtttgggacaacttta

SEQ ID NO: 363455 - DNA, 201 bp, Homo sapiens
ccagtcatttaacttcatagaggagtatctggcttcatctggaaaacagggacaatagcatataatgtgcctggtacagcaggtacccgatggttccctcyctcctttcctccttgtaatgcaaatattactcatttgggtggagacgtacattgaaggcctgagagagcagctacatctgaggtcgtctgtgagttgaag

SEQ ID NO: 363456 - DNA, 201 bp, Homo sapiens
atttgggtcatccctggtcaatcccagaaaggaacatacttcctgttagcttaggaagaccatgtctggcttatgtttaggcccatactgcctggaaagartctgggcaaagcttctttcactttagtgagttctacagtaaacctctagagtgacagcattgcctctctctagttagaaagtgggtttgagggtgtgatg

SEQ ID NO: 363457 - DNA, 201 bp, Homo sapiens
tgggacaactttaaacttaaagtgtctttcccttgtaattcacagagtctaatccactcatttctgggaatgtttttccccagcagtctcagtctcaaaakacatgtaaatcagtgacttgggatgaactaactagaaaattaaaattttgagaagctatttgctcataagcccaatagccaggcccagtttaaacgggca

SEQ ID NO: 363458 - DNA, 201 bp, Homo sapiens
ggaatttttctcgatggaaaaaaaaatctaaaggctgtattttgacgctaagtttgggacaactttaaacttaaagtgtctttcccttgtaattcacagaktctaatccactcatttctgggaatgtttttccccagcagtctcagtctcaaaagacatgtaaatcagtgacttgggatgaactaactagaaaattaaaat

SEQ ID NO: 363459 - DNA, 201 bp, Homo sapiens
taactagaaaattaaaattttgagaagctatttgctcataagcccaatagccaggcccagtttaaacgggcaaatagtattgctagagattcagttttgcygtcactaatactaacacattgataatgagacaagtaaccgtctcccctccccaccatccttacctttcccaccggaggttaattaaaaaaaaaaaaaaaa

SEQ ID NO: 363460 - DNA, 201 bp, Homo sapiens
gcttcctgttttcttgaaaacaatttacccttgagggacaaagtctggtaacggtcccatgccttcatcacaggaggcctaggaaaggcctctgttttacrgagtaggattctaaatatctccttcctgcctaggactgtctatttgctgagtagaacagtaatgccaagagtgcccattaaggttggctgcgtactaagt

SEQ ID NO: 363461 - DNA, 201 bp, Homo sapiens
ctcaaactatctgtggcaaaatctcttattaatttctaatccatagcagactcacacatttgtaaaatatgataaagtgcaactattagaaaaagagaatwaggctgggcgtggtggctcacacctgtaatcccagcattttgggaggccaaggcgggcagatcacgagatcaggagattgagaccatcctggctaacatg

SEQ ID NO: 363462 - DNA, 201 bp, Homo sapiens
accagaaataaatctgagtcagcagaaaggcagacatggtccatccgggatgcccaggaagagcagggggctcgggctggaggcagtgacagaacccaagrcctcctcttcacattctaggatgtcacagaaccagagaagagcattaagaccaggatctgaactcccagtatacctgcctgggaccaagaaatgtacagc

SEQ ID NO: 363463 - DNA, 201 bp, Homo sapiens
aagagcattaagaccaggatctgaactcccagtatacctgcctgggaccaagaaatgtacagcttgtggccacttaacaaaagggcttgatgtagctgtcsttgtttttttaatgcggagggcagtgtaggaacaaacaggatattattgcttttggctctgtctggctgtgctcttgcacctccccatcgctccaaatct

SEQ ID NO: 363464 - DNA, 201 bp, Homo sapiens
tgatcccatagccttagggtcatcaggggaagggactcatttattcagtgcctactgcagcctgtcccgtcgtcttcacaacacctcacagggagacctcmtcatgcccatgatggggaggagctgctgaggctcgggtgggtaccaagcagggttcctacacctagcggggcttggtaacatcctgtaatcggggagctt

SEQ ID NO: 363465 - DNA, 201 bp, Homo sapiens
aaatagaaaacacacacacacacacacacacacacacacacacacacagaaagagagagagagagacagagacaccggaaagagaggctatggctcctgcrgttctcttgcccattgacccctatgttgtggctcagggtcatcctatgaagctatctaatccagcttctttgctttccagacactcatccaagaggaagg

SEQ ID NO: 363466 - DNA, 201 bp, Homo sapiens
gctggctgacagcctgccctcctccccacacagcgcagactacccagacctgcgcaagcacaacaactgcatggccgagtgcctcacccccgccatttatkccaagcttcgcaacaaggtgacacccaacggctacacgctggaccagtgcatccagactggagtggacaaccctggccaccccttcataaagactgtggg

SEQ ID NO: 363467 - DNA, 201 bp, Homo sapiens
ggggctaattggcccttctaaatctctaggcagtagcagacccaacagggtttctgtctgtgcatgtttatcctctttttcatcgtttgttggtagttcartacttgtattacaaataaatatataaatacttatttagatttatacatgttttctccatttcaggctctctccttatgctgtcatttcctttctttctga

SEQ ID NO: 363468 - DNA, 201 bp, Homo sapiens
taacatgtgctgggatggcccgtgactggccagatgccaggggaatctggtatggatgcagcattttcacatttgcaatatctgtagaggatgtttttgaratcacctgcttatcctaacctggagttgctgtgtactgcagttgacagcatgcccagactgagctaaatggaaaaagactacttggaaagtgtgtgtgtg

SEQ ID NO: 363469 - DNA, 201 bp, Homo sapiens
tgcagatattagcacggaagaagaactaataatctgatttcctgggctatcctgtaacctatatcctgtaacccctactcagaagaggcttgatttgttayttgcacacataaacattctcaaatgttttcaaggtctttgatgcttttagttgggacattcaggtttagtagagacttcgaaatgacggttctattagga

SEQ ID NO: 363470 - DNA, 201 bp, Homo sapiens
cgaaatgcaaatccaggccccctgattccagacccatgcctctctcactgctctaccaccttctggaaaaagggatatcatagtactgactttaagtatcrgctctaaaggacactgcagatggaaagtggaggagtggcacgagagggatgaaaatagatgtgttttctcagcccttggaaccctgccatggatgagata

SEQ ID NO: 363471 - DNA, 201 bp, Homo sapiens
ctgtaaaccggccagaaccggctgtggtctgtggtcagttatgaggatggagtgctttgtaaggctgaacacttgtcagggggaaactgcgttgagggaagggggggttcgccacgtcaggttgtctgttgaagttgaggaagaaatcttccagacatagtttttcagtaactggttttagtttaattttaggaaagaaag

SEQ ID NO: 363472 - DNA, 201 bp, Homo sapiens
ttccacataggcaggtatggatgagagagacaaggaaaaccactgaggtgtctctgagacatttagtgtctcttatgaaaatcaggatctctgagggaatygccagcaacccccatgtaccttgggaattcctgaggtgacatgacttgtgtttgaggctgtggtggtcctaaatctcctattcctcaatcagtacacact

SEQ ID NO: 363473 - DNA, 201 bp, Homo sapiens
ccatgtaccttgggaattcctgaggtgacatgacttgtgtttgaggctgtggtggtcctaaatctcctattcctcaatcagtacacactccagggtaagayagcacccaatttgatttctattattccaacagatatttactgaacactggtttcaacagccagggactgttttcaaaaaggcaaagtccccgctctcgtg

SEQ ID NO: 363474 - DNA, 201 bp, Homo sapiens
gagattcagttttgccgtcactaatactaacacattgataatgagacaagtaaccgtctcccctccccaccatccttacctttcccaccggaggttaattaaaaaaaaaaaaaaaaaaaaaaaaacctatggaattggccccacgtgtttcacctgggcagaggcctgttcttcactagcttgcttgcttggttggttgtc

SEQ ID NO: 363475 - DNA, 201 bp, Homo sapiens
agcttgtcaagtggatgagttggtacagaaacaataaaattgaatggtgtgtattcaccagtaagacattaggagctgatgtgtttgtggctgagctttaytgggtgggggtcgggaggagggttcagtgtatctttgggaatatgaggaattctcctcttattctattattattactgatttctctcctattactgatta

SEQ ID NO: 363476 - DNA, 201 bp, Homo sapiens
agattcagttttgccgtcactaatactaacacattgataatgagacaagtaaccgtctcccctccccaccatccttacctttcccaccggaggttaattaaaaaaaaaaaaaaaaaaaaaaaaacctatggaattggccccacgtgtttcacctgggcagaggcctgttcttcactagcttgcttgcttggttggttgtcc

SEQ ID NO: 363477 - DNA, 201 bp, Homo sapiens
caagaaatagaaaacacacacacacacacacacacacacacacacacacacagaaagagagagagagagacagagacaccggaaagagaggctatggctcytgcagttctcttgcccattgacccctatgttgtggctcagggtcatcctatgaagctatctaatccagcttctttgctttccagacactcatccaagagg

SEQ ID NO: 363478 - DNA, 201 bp, Homo sapiens
tgggcagtggcaggtcacaatcctctcctggctgaagtctctgatctctcccacttagagactgcaggactcctctccccacatccacttggtctcttacstgtgtaatcatatttgaatatatctctctgtagagtatgtgtgtaactatgcaagaaagagtagtatacacattgcaaaaaaaaaagtcttgactttaat

SEQ ID NO: 363479 - DNA, 201 bp, Homo sapiens
gattcagttttgccgtcactaatactaacacattgataatgagacaagtaaccgtctcccctccccaccatccttacctttcccaccggaggttaattaaaaaaaaaaaaaaaaaaaaaaaaacctatggaattggccccacgtgtttcacctgggcagaggcctgttcttcactagcttgcttgcttggttggttgtccc

SEQ ID NO: 363480 - DNA, 201 bp, Homo sapiens
cggaggttaattaaaaaaaaaaaaaaaaaaaaaaaaacctatggaattggccccacgtgtttcacctgggcagaggcctgttcttcactagcttgcttgcttggttggttgtcccggggttaaaatcagtcctgttcttgcccctagagtggtctgccttcaaatgctctcctccgaatgtgaggaagagtgacatttgac

SEQ ID NO: 363481 - DNA, 201 bp, Homo sapiens
cacagaaagagagagagagagacagagacaccggaaagagaggctatggctcctgcagttctcttgcccattgacccctatgttgtggctcagggtcatcytatgaagctatctaatccagcttctttgctttccagacactcatccaagaggaaggatggccagtatcttttctaagttgctaactggccgcaatgcttc

SEQ ID NO: 363482 - DNA, 201 bp, Homo sapiens
ggaggttaattaaaaaaaaaaaaaaaaaaaaaaaaacctatggaattggccccacgtgtttcacctgggcagaggcctgttcttcactagcttgcttgcttggttggttgtcccggggttaaaatcagtcctgttcttgcccctagagtggtctgccttcaaatgctctcctccgaatgtgaggaagagtgacatttgaca

SEQ ID NO: 363483 - DNA, 201 bp, Homo sapiens
gaggttaattaaaaaaaaaaaaaaaaaaaaaaaaacctatggaattggccccacgtgtttcacctgggcagaggcctgttcttcactagcttgcttgcttggttggttgtcccggggttaaaatcagtcctgttcttgcccctagagtggtctgccttcaaatgctctcctccgaatgtgaggaagagtgacatttgacaa

SEQ ID NO: 363484 - DNA, 201 bp, Homo sapiens
tcctaggcagttctagccaagtatccctgtgcccactggctgaagggagcctagtggaaggatgggcaaacaacaagtccttccattggcccctttcctckggggctgctggctgacagcctgccctcctccccacacagcgcagactacccagacctgcgcaagcacaacaactgcatggccgagtgcctcacccccgcc

SEQ ID NO: 363485 - DNA, 201 bp, Homo sapiens
tgagctaaatggaaaaagactacttggaaagtgtgtgtgtgtgtgtgtgtgtgtgtgtgtgtgtgtgtgtgtctaagcattgtggtgtttctaagatgtgyagaaatatgacctggtttgcatgaattatgtgcctgaaggagcagaaataaaaaatgttcatgtgcagctgctctgtagggatggacaggcaggatccat

SEQ ID NO: 363486 - DNA, 201 bp, Homo sapiens
taatcaatgccctgcagatgcttctattcaaattaatcattcatcttcttcactgtcaaaggttgagcttgttcagatagtcatcgatggagtcaattacmtggtggattgtgaaaagaagttggagagaggccaagatattaaggtgccaccccctctgcctcagtttggcaaaaagtaaactttccctttcccaattta

SEQ ID NO: 363487 - DNA, 201 bp, Homo sapiens
agagtctgtgtcaagcattctgggagctcctgcccacagagccaggaatccagcagcaacccatgctgaaggtgactgctggaggtcacactaacccttgycaggaagcctcagagactccctcccttgggcggggaagaaggcagcccacttcacagcacttcaaaggactagatggctcctagcttcctgttttcttga

SEQ ID NO: 363488 - DNA, 201 bp, Homo sapiens
ctgatgatctgaggtggaacaacagtttcatcccaaaatattccctccctacgatctgtggaagaattgtcttaaaacattcattatctttcaagacaccrgtccctgatgcaaaaatggttggggaccactgctttacatggttcatttaacttaattgggccattttaatagtctggtaggagaggtattattttctct

SEQ ID NO: 363489 - DNA, 201 bp, Homo sapiens
agaaataaataagttctttgaaaccaatgagaacaaagacacaatgtaccagaatctctgggacacagctaaagcagtgtttagagggaaatttatagcascaaatgcccacaggagaaagcaggaaagatctaaaatcgacaccctaacatcacaattaaaagagctagagaagtgaaagcaaacaaattcaaaagctag

SEQ ID NO: 363490 - DNA, 201 bp, Homo sapiens
aggttaattaaaaaaaaaaaaaaaaaaaaaaaaacctatggaattggccccacgtgtttcacctgggcagaggcctgttcttcactagcttgcttgcttggttggttgtcccggggttaaaatcagtcctgttcttgcccctagagtggtctgccttcaaatgctctcctccgaatgtgaggaagagtgacatttgacaaa

SEQ ID NO: 363491 - DNA, 201 bp, Homo sapiens
agcagggttcctacacctagcggggcttggtaacatcctgtaatcggggagctttttctcattatacatgtgagggccccactcttggagagactcattcaaaaaaggtggagcctagaaatccaaaattttaacacacatcaaaattttcttttttaggtttttacttttttatcataaagataacacatgcttattttt

SEQ ID NO: 363492 - DNA, 201 bp, Homo sapiens
aagtacttgagggacatgtaactataataccacaacttctgaaatttactgaataatgtgtggtgtagtgaataaagaaaatctgggagtctatccctgtwgattctaatattaactagatatttattactggaaaacaatgtagttaatgctttaaaaatgttaagtctaactatactaggcagtcactataaaagtgag

SEQ ID NO: 363493 - DNA, 201 bp, Homo sapiens
gttgtgaagtccatctaagtggcaagttctcatttatcacagtgctgttcctgttaatcaatgccctgcagatgcttctattcaaattaatcattcatctycttcactgtcaaaggttgagcttgttcagatagtcatcgatggagtcaattacctggtggattgtgaaaagaagttggagagaggccaagatattaaggt

SEQ ID NO: 363494 - DNA, 201 bp, Homo sapiens
ttgataggatttcaaaatccatgtctgaaagaaatgtgtgtcacatcatataagtagatttcattcaaaagtttgtgggctttttttttgtgagacaaagrtttgttcatttcttgcatttgaagtactctttgatgacatccttgggctgagactccttgccatagtccttaactactacacaactgcaaccaaccactt

SEQ ID NO: 363495 - DNA, 201 bp, Homo sapiens
ggagagaggccaagatattaaggtgccaccccctctgcctcagtttggcaaaaagtaaactttccctttcccaatttataaataatctgtctgctggtacracagacataaatctctactctgagagtttttatacacttggaaaaatataaaattgtagatcctgcctatctttacaataaaactctccttaatatatct

SEQ ID NO: 363496 - DNA, 201 bp, Homo sapiens
gccttcgcttcctgggttcaagtaattctcctgcctcagcctcccaagtagctgggattacaggtgcctatcaccatgcccagctaatttttgttattttyagtagagacagggtttcgccatgttggctaggaatcctggctttagatcaaggagtcaaatgcctggtacagcatctgtgacatcaacacatgatgtagg

SEQ ID NO: 363497 - DNA, 201 bp, Homo sapiens
acagcctgtcatggtcaaacggtcaggagcctgcactgggccaccctaatttgcagataccaggaaacggagcaggtacatgctcaaaaccagaactgagwgtctcacttggtggcttttattgataggatttcaaaatccatgtctgaaagaaatgtgtgtcacatcatataagtagatttcattcaaaagtttgtgggc

SEQ ID NO: 363498 - DNA, 201 bp, Homo sapiens
aggatactgaggaatttcagttccaagattgctttgctagccacaatcaaagcttccccaggattatctgcatgagtcatcctttgttgctcagacacaagggcagtattggaacttggaataaaataataattataaattaattaaattagttccttccaggaactaaaatatggatatgacacttcaaacattaatatt

SEQ ID NO: 363499 - DNA, 201 bp, Homo sapiens
agacagcctgtcatggtcaaacggtcaggagcctgcactgggccaccctaatttgcagataccaggaaacggagcaggtacatgctcaaaaccagaactgwgtgtctcacttggtggcttttattgataggatttcaaaatccatgtctgaaagaaatgtgtgtcacatcatataagtagatttcattcaaaagtttgtgg

SEQ ID NO: 363500 - DNA, 201 bp, Homo sapiens
ccctaacatcacaattaaaagagctagagaagtgaaagcaaacaaattcaaaagctagcagaagacaagaaataactaagatcagagcagaactgaaggaratagagacacaaagacacaaaaaaaccttcaaaaaatcagtgaatccaggagcgggttttttgaaaagattaacaaaatagaccactagtcaggctaaaa

SEQ ID NO: 363501 - DNA, 201 bp, Homo sapiens
caatagaaaaagagggactcctccctaactcattgtatgaggccagcatcatcctgataccaaaacctggcagagacacaataaaaaaagaaaaatttcasggcaatatctctgatgaacactgatgtgaaaatcctcaataaaatactggcaaaccgaatccagcagcacatcaaaaagcttatccaccaaaatcaactc

SEQ ID NO: 363502 - DNA, 201 bp, Homo sapiens
gacagcacccaatttgatttctattattccaacagatatttactgaacactggtttcaacagccagggactgttttcaaaaaggcaaagtccccgctctcrtggagcttgcttattttttgaaacctggtgtattcatttatgactcctaggcagttctagccaagtatccctgtgcccactggctgaagggagcctagtg

SEQ ID NO: 363503 - DNA, 201 bp, Homo sapiens
tctgttatctgtggggtagtctctgctgtgtcacatacggacatctctgacgatgggcacgatgagctcccagggttcagacagcctgtcatggtcaaacrgtcaggagcctgcactgggccaccctaatttgcagataccaggaaacggagcaggtacatgctcaaaaccagaactgagtgtctcacttggtggctttta

SEQ ID NO: 363504 - DNA, 201 bp, Homo sapiens
agcattcctatacaccaatagacaaacagagccaaatcatgaatgaactcccattcacaattgcttcaaagagaatacaatacctaggaatacaacttacragggatgtgaaggacctcttcaaggagaactacaaaccactactcagaaataaaagaggagacaaacaaatggaaaaacgttccatgctcatggatagga

SEQ ID NO: 363505 - DNA, 201 bp, Homo sapiens
tgctgggctccacccctgagctcagcccaagagcatctacttattcagtgtaaggaagaaagacgaggccacacattgtacttgtcaagccactgaaacaktctatgcataaaatctgcataggaaactccaatatggagatggtgcctgcggttaggagggtggagatgaatggaggatctcctagcttgttgataaatg

SEQ ID NO: 363506 - DNA, 201 bp, Homo sapiens
cctagcttgttgataaatgggaacagttaggtgtggaaatcctgtctgtgtccagaagatggtttccattatcacagccaaagaaaatcctggaagctacraaaatctagaaaggaaattccaggtgggaggcctgccctgactcttgtggagcaagcctctgcatttcctggtggggttgattcctgctgcttccaccat

SEQ ID NO: 363507 - DNA, 201 bp, Homo sapiens
ccctttgaaaactgcacaagacagggatgccctctcccaccactcctattcaacatagtgttggaagttctggccagggcaatcaggcaagagaaagaaakaaagggtattcacgcaggaagagaggaagttaagttgtctgtgtttgcagatgacatgattgtatatttagaaaaccccatcatctcagcccaaaatctt

SEQ ID NO: 363508 - DNA, 201 bp, Homo sapiens
gaaggaaatagagacacaaagacacaaaaaaaccttcaaaaaatcagtgaatccaggagcgggttttttgaaaagattaacaaaatagaccactagtcagrctaaaaagagagaagaatcaaacagacacaataaaaagtgataaaggggctatcaccactgatcgtacagaaatacaaactaccatcagagaatactata

SEQ ID NO: 363509 - DNA, 201 bp, Homo sapiens
cccttcctcttggctctgcttcctaagatttatcatctcagacactgacttgggcacatatcagtgcataggcaatttaaggaatgaaaaatagggaccargacatttgggtcatccctggtcaatcccagaaaggaacatacttcctgttagcttaggaagaccatgtctggcttatgtttaggcccatactgcctggaa

SEQ ID NO: 363510 - DNA, 201 bp, Homo sapiens
cgagtatttgagcgattctgtcgtggactaaaagaagtaagatgttatctgagatttctggatatttattaaaataaaattaccgtattgtttgttcttgraagaagacactatggtaacttccaagatggagctaatttttttctagaaatcaaagcaactgccgcctcccaggttcaagtgattatcccgcctcagcct

SEQ ID NO: 363511 - DNA, 201 bp, Homo sapiens
agatagatagggaggcagctggagtatgtgatgcctgagagctaacattcaatggtcccttccatccttgctgctcattctttagttgtataatgtatgtytggaattaactaatttctctcttaatttgggtttccttgggggcagtacaagtcatttgcttaggaggtgatcccaggggaaaaaaaaattaagtagatg

SEQ ID NO: 363512 - DNA, 201 bp, Homo sapiens
gcatgagctgggctctgagaaggaagagacaggaaccaattggtcatgtccacgtggcctcagaagctgagtacgtgacggtcaccagatgcctaggcagkctcccttgaaatggcagggctgctgtccaaaatcctgctgggtcattgctatttacaggcagccttcccggcgtgcggtggatatcccaagcggggctat

SEQ ID NO: 363513 - DNA, 201 bp, Homo sapiens
gccacttcagcctctttcaaaggtcctacttcaatgggggaatcccagtctcagcccctattcccaatgctggcatcccaacttcagtagagtgggagggyggtcctcagaaatttctcctacctttcagaagtccagaaatccatcctgttcagggtctagttgtgatgcagtggcaaagttcaatagagcatatggtct

SEQ ID NO: 363514 - DNA, 201 bp, Homo sapiens
tctagttagaaagtgggtttgagggtgtgatggcaaataagatggcccaaaggatgtatgctagcgttgcctgctgcaagcaaggaccaggaagcactggygcagctcactgaagagccgttatctattcttggagggatactgacatgatgacctgaaatctagcaggggagcaaagaagtttccatgatgagaatgaat

SEQ ID NO: 363515 - DNA, 201 bp, Homo sapiens
ctttagtgtatgcatttgtattccctcctgctatattgaaaaaaagtataagaagattacaattgtgctggtgctaatatgcactactctaactggtatayggtagaaattcagaaagaggaaaccataccaatataatttggaacatcatgctcagtaccccaaatggtagagggtgaagggctgttcctccaacaaacg

SEQ ID NO: 363516 - DNA, 201 bp, Homo sapiens
tatgaacagacacttctcaaaagaagacatttatgtggccaaaaaacatgaaataaaagctcatcatcactggtcattagataaatgcaaattaaaaccayaccgagataccatctcacggccagttagaatggtgatcattaaaaagtcaggaaacagttgctggagaagatgtggagaaataggaatgctttcacactg

SEQ ID NO: 363517 - DNA, 201 bp, Homo sapiens
agcatatggtctgtcaaatagctggaagaagacatccctgctgctgtttattttttatcatagcatattaacagagaaaaggcatggaattcagaaagttyagacattatgtctaaaactacccagattttcccaagcaatatgaagaaaaaagcaaagcaagaaatagaaaacacacacacacacacacacacacacaca

SEQ ID NO: 363518 - DNA, 201 bp, Homo sapiens
gcatatagcttagtaattcctttgttattgatctgttttttatcaatgtttttcactctcatttttgaaaaaatggttagactagttccccagttctaggktgacagttattgcttctaaaaatattatctacctgggctcattatcaaaaaatcagctcgtttgtcatttctttgtaggtaaactgtcttttctttctga

SEQ ID NO: 363519 - DNA, 201 bp, Homo sapiens
ataatgagacaagtaaccgtctcccctccccaccatccttacctttcccaccggaggttaattaaaaaaaaaaaaaaaaaaaaaaaaacctatggaattgkccccacgtgtttcacctgggcagaggcctgttcttcactagcttgcttgcttggttggttgtcccggggttaaaatcagtcctgttcttgcccctagagt

SEQ ID NO: 363520 - DNA, 201 bp, Homo sapiens
taatttcctgtattaacatgctaaaaggcactcccaccagcgccaggacagtttacaaatgccatggcaacatcaggaagttcccctatatggtctaaaasggggaggaaccctcagttccgggaattgcccacctgtttcctggaaaactcatgaatagcccaccccttgtttagcatatcatcaagaaataactacaag

SEQ ID NO: 363521 - DNA, 201 bp, Homo sapiens
tacactttgcaaatattcaccagatctccctagactttgtactggaaaatattcattttgggaatgcagagatggtagagaatagttgacatgttgcatartatagaattagaattcacggctatggagacagagacctgcattcagtttcatcttttatctgtgttgtcttgagtgagttacataatctctgtgagcctc

SEQ ID NO: 363522 - DNA, 201 bp, Homo sapiens
ctccaagttcataaatttaatttcatctggaaagccctttttttcatataaggtagtatattcacgtgttccagggattagggcattcacattttaggagrtctgttattctgcctacaaaggctgtgttctgataaattttataaaaaacaagcggtggactgtatttagccctagggtctaggtttgtgttatgcaacc

SEQ ID NO: 363523 - DNA, 201 bp, Homo sapiens; identical to SEQ ID NO: 78503

SEQ ID NO: 363524 - DNA, 201 bp, Homo sapiens
ctttgagagatttcccatattccttggctcatgaaaccttccccaactgaaagccagtaacaatggttggttgagtccctctcacactttgaatctctctytcttcttacattgcttctgtctgacaagatattatccaggatcatgtctcccatctccaagttcataaatttaatttcatctggaaagccctttttttca

SEQ ID NO: 363525 - DNA, 201 bp, Homo sapiens
cctgacggcgcctggaaattgtgaagaggcggagttagagttccctggggttggaagcttcttacgtagggcggataccaaagcccctctcccgtgccatygcaaccctgagctcttgtacagattagagtcggtccacggaaaagccgtgctgtgcacccagcacctgcgttctctctggcaacagggcagggccacacc

SEQ ID NO: 363526 - DNA, 201 bp, Homo sapiens
ctgaagttgcagctggagtatttctgcatctccttcttttcttttcagtgtgctctaaatgtattcctgcttctctcacagggaaggggaagactggcagmgggtccggagtgcctttcaaaagaaactaatgaaaccaggggaagtgatgaagctggacaacaaaatcaatgaggtctgcaggctggggccagctttcct

SEQ ID NO: 363527 - DNA, 201 bp, Homo sapiens
gaaggcgatcctcaactttgagagatttcccatattccttggctcatgaaaccttccccaactgaaagccagtaacaatggttggttgagtccctctcacrctttgaatctctctttcttcttacattgcttctgtctgacaagatattatccaggatcatgtctcccatctccaagttcataaatttaatttcatctgga

SEQ ID NO: 363528 - DNA, 201 bp, Homo sapiens
tttttcatcctattgtcaaactattgtcaaaagatgatcactattttatcccaaatattctgatgctaatattctctggctatttcttggcatgattctcrgtgtttgtttgattttatggttcctgaagttgcagctggagtatttctgcatctccttcttttcttttcagtgtgctctaaatgtattcctgcttctctc

SEQ ID NO: 363529 - DNA, 201 bp, Homo sapiens
tggacaacaaaatcaatgaggtctgcaggctggggccagctttcctggggctcgtggggacatagggatattggtggagcttcaagtcacagctacaaagwacaaaggaaaaaagaatgcaattcgggtgattcaaagtgggggtcttctctttctctccattccttcctacagcctcctccccaccaaacccttatttct

SEQ ID NO: 363530 - DNA, 201 bp, Homo sapiens
aattcatctcattcatttcactgggattcactagcatcaactccacaaaaatgaaaagtctcatactagatgccacggtgcctccgcgcacagcatctatrccacggtgcctcagcgcacggcctcataccagacgccacggtgcctccatgcacgggcttctgtgcttaaactctgggtaggaggagacttcatgtgccc

SEQ ID NO: 363531 - DNA, 201 bp, Homo sapiens
ttacgccgagtgtaccatttacaactcggactcttgacaaggcaacagttctgggtgaatatgctttacccaaaggagtaagtagaatttgtatattctayaccttacaaaaccttggaagatacactttgcaaatattcaccagatctccctagactttgtactggaaaatattcattttgggaatgcagagatggtaga

SEQ ID NO: 363532 - DNA, 201 bp, Homo sapiens
gaaacaattatcacactgcaaaaaaatctttggagccatatttcttttctggcactcatttcctaaatcatttgggcaaattctattaaatcttggaaagycagtgccctcccctttaattcaataatcttgctactctaatgaacgctgtaagcactaattaagataggggcatgattgaaggttatgagatggaggctc

SEQ ID NO: 363533 - DNA, 201 bp, Homo sapiens
aatttatcccgtaatccccaagtgcaacaaaagcttcttaaggaaattcaaagtgtattacctgagaatcaggtgccacgggcagaagatttgaggaataygccgtatttaaaagcctgtctgaaagaatctatgaggtaagagcctatctctgagccaatataaatgtgttagaacactgttctcgtaaacacaaaacaa

SEQ ID NO: 363534 - DNA, 201 bp, Homo sapiens
tatcccgtaatccccaagtgcaacaaaagcttcttaaggaaattcaaagtgtattacctgagaatcaggtgccacgggcagaagatttgaggaatatgccrtatttaaaagcctgtctgaaagaatctatgaggtaagagcctatctctgagccaatataaatgtgttagaacactgttctcgtaaacacaaaacaagtgg

SEQ ID NO: 363535 - DNA, 201 bp, Homo sapiens
ttttttatatattggatttgtctaaaggcgtagctataaggacgcgtgaaagagcttcactgatacatttgcagaataaggtggtgggcatcacctttttytcagctaatagtggtttaatgcagttatttacaaaaactcaagtttatgtccatttggcttgcagacagcaaacagtctaatgtggattctctacaattt

SEQ ID NO: 363536 - DNA, 201 bp, Homo sapiens
gtccaggatggcaacttatcagctctgtgtgcataagtgagtgacttggcctctttaagcctcagctttctcatctactacatgggaaatgagtagagacrgtacctactactacttggttgtcagaggatcaaccaatacacttcgtacagtgtttggtaccatatggacctcattaaatgtgaggcattagttattgaa

SEQ ID NO: 363537 - DNA, 201 bp, Homo sapiens
cctaagccggacatggccaggggtcgcttcacagagatggtgcccctcagctaagtcctgatggttgagtaggagttcaccaggtgaaaagggaggaaggrgagtgtccctgcagaagaagtgcggaatgacaagcatatcctgtaacagaggctggcagagggccagcagccagctcatggagggctgtatgagcgggag

SEQ ID NO: 363538 - DNA, 201 bp, Homo sapiens
aagggaggaaggagagtgtccctgcagaagaagtgcggaatgacaagcatatcctgtaacagaggctggcagagggccagcagccagctcatggagggctstatgagcgggagtttgaattttagcctgtaagtaaccgggagctgtgggaatgtattcagcagcagtgtgatatatgggcagatttactgggaggatcac

SEQ ID NO: 363539 - DNA, 201 bp, Homo sapiens
gaagagccagccacagaaagacctcgtggaagagcgctgcaggtagaggaaacggcccatgcaaaggccctggggcagaaagagggatggagctacagaaytagtaaatgtggtcagagctgagactggagaattggatgggccatgttagccagagccttgtgagcccagcctgggtaaggcattagatttgattgcacc

SEQ ID NO: 363540 - DNA, 201 bp, Homo sapiens
ttggatgtttattttgaactggatgcgtccccagatgggatcatataggtgaaggattgcaaactcagaagcttccagggctcacatgactaatataaaayaataaggcagacccagtaaaaatttcaggaaacgtgatagtgcatgcccctcccaggagggacagcagccccagttccagcaaacgaatgccatgtcaga

SEQ ID NO: 363541 - DNA, 201 bp, Homo sapiens
tctgttattctgcctacaaaggctgtgttctgataaattttataaaaaacaagcggtggactgtatttagccctagggtctaggtttgtgttatgcaaccrcatgtaatataaatgtatatatttatcagcctgtattgaacacaatagaatattttttctgcagtatgccattcaatactttttctgacaatagaggagt

SEQ ID NO: 363542 - DNA, 201 bp, Homo sapiens
gtgattgtaccactgcattgcagtctgggtgacagtgtgagaccccgtctcaagaaagagagagagacagagaaaggaaggaaggaaggaaggaaggaagwaaggaaggaaggaaggaagaagggagggagggagggaaggaaggaaggagggagggagggagggagggaaggcagaagggagggagggaaggaaggaagg

SEQ ID NO: 363543 - DNA, 201 bp, Homo sapiens
gccgggcggcaaccacggccgccgctgccggctcctgcccgccgggggagggcggggaggcgcgttcgaagcacacccggtgaactccgggcttcgcatgmcttcctgggggttatctccggggtggagtctgccgcccccaccccacctcccgcgcccagcgaacatagccccggtcaccccaggcccggacgccctcgc

SEQ ID NO: 363544 - DNA, 201 bp, Homo sapiens
aacatacacattttagtctggaatgaagggggaaaaccaacgttaacagtttactaaacagccttgcactggggttttaactaactcaagaagatgagagraacaagagatacaattattgagaagaaaaaaacaacttctttaggaagatctgtgatcatgctgcctctttgagtatgcacttgggcagcatttatttaa

SEQ ID NO: 363545 - DNA, 201 bp, Homo sapiens
tactctaatgaacgctgtaagcactaattaagataggggcatgattgaaggttatgagatggaggctcacaaaagagctatattattatataataggacayagagaaagctttgcttttgagcctctggtataaaacattttttggaaattctttttacatccttttgggaaaacaaaactcacaacattttaggattaga

SEQ ID NO: 363546 - DNA, 201 bp, Homo sapiens
tatgtagcttaaagctacattggctgtttccaccaatattttttctctagtcattgcctgtgcagaggaaataaaagatgccacttaaaagggtgtgggcmtttgtcagaaactgtagctggagtactcagctcaatgtttgaatttcttatttttggtgttggcaccctcgtatgagggctgtttacatgtggttgtaac

SEQ ID NO: 363547 - DNA, 201 bp, Homo sapiens
aggaaatatttggcttaaattagcaaagtacggcctaaaaaataaatacatatgactactagtggtgaatattatgtagcttaaagctacattggctgttyccaccaatattttttctctagtcattgcctgtgcagaggaaataaaagatgccacttaaaagggtgtgggcctttgtcagaaactgtagctggagtactc

SEQ ID NO: 363548 - DNA, 201 bp, Homo sapiens
tcatttgtgtgagtggcacatggcacttagcaacagcgtcttcatgtctgcggaggtggacacaatgatcattttcaggaaatatttggcttaaattagcraagtacggcctaaaaaataaatacatatgactactagtggtgaatattatgtagcttaaagctacattggctgtttccaccaatattttttctctagtca

SEQ ID NO: 363549 - DNA, 201 bp, Homo sapiens
tttttacagtgacattttctgcagaggattgggggacatgccttatttctacttgtaaaggtggaataaggagggatatcaaagttgtgttttaggtcgayaaatgctactatgggatgtgattcttctgctttttagttgttagcatttaacaagttagcacctttatttacccccaaactgtaatgcctaatcgttata

SEQ ID NO: 363550 - DNA, 201 bp, Homo sapiens
gttgaagacttgtacagcgaactgaacaaatggtcgtttgaaagtaagttgtcgtcacagacttgctcactgattttgcaggtgattttgcggataaaacrtggctcttttgacaactcttttgtaaacaggcattattgctgcctagggaaaggccagagcagcccttttaatgcttcttttaggtgcttaagttatgcc

SEQ ID NO: 363551 - DNA, 201 bp, Homo sapiens
cacacctcaggatagctgctgcaacacaatccttgagatgctgggccaacagggacagttagctgattcctttgtggttttattcccccattctgattagaaaaaaaaaatgttttccttttcttaaattgccagaattatttttagatcaaaagctgaaacttaagcttcagggtggcttcaggaaaagctcaggaaata

SEQ ID NO: 363552 - DNA, 201 bp, Homo sapiens
catgggcggcttcccctagctaattagaaacaattatcacactgcaaaaaaatctttggagccatatttcttttctggcactcatttcctaaatcatttgrgcaaattctattaaatcttggaaagccagtgccctcccctttaattcaataatcttgctactctaatgaacgctgtaagcactaattaagataggggcat

SEQ ID NO: 363553 - DNA, 201 bp, Homo sapiens
tcattttgggaatgcagagatggtagagaatagttgacatgttgcatagtatagaattagaattcacggctatggagacagagacctgcattcagtttcaycttttatctgtgttgtcttgagtgagttacataatctctgtgagcctcaacttcgtctgtaaaaggggtttaataacagaatctgctgcgcagggtggtt

SEQ ID NO: 363554 - DNA, 201 bp, Homo sapiens
tggctgctgatgggagggatagaaggaaaacctataacacttccataaattcaaggtcagaaatattgccataaatagataaatataagtaactttttttwattacttatttgagacagactctcactctgccccaggctggagtgcagcggcgtgatctcggctcactgcaacctccacctcctgggttcaagcgattct

SEQ ID NO: 363555 - DNA, 201 bp, Homo sapiens
agcggctggagatcaaaccgtggaaggcctatcgcgactaccgcaaagaaggctacgggctgctgatcctgtgagtccaatccgagggacctgggcatgcrgccagacctgatgagcctgacggcgcctggaaattgtgaagaggcggagttagagttccctggggttggaagcttcttacgtagggcggataccaaagcc

SEQ ID NO: 363556 - DNA, 201 bp, Homo sapiens
gctgatgggagggatagaaggaaaacctataacacttccataaattcaaggtcagaaatattgccataaatagataaatataagtaactttttttaattamttatttgagacagactctcactctgccccaggctggagtgcagcggcgtgatctcggctcactgcaacctccacctcctgggttcaagcgattctcctgc

SEQ ID NO: 363557 - DNA, 201 bp, Homo sapiens
ctgatgggagggatagaaggaaaacctataacacttccataaattcaaggtcagaaatattgccataaatagataaatataagtaactttttttaattacttatttgagacagactctcactctgccccaggctggagtgcagcggcgtgatctcggctcactgcaacctccacctcctgggttcaagcgattctcctgcc

SEQ ID NO: 363558 - DNA, 201 bp, Homo sapiens
tgatgggagggatagaaggaaaacctataacacttccataaattcaaggtcagaaatattgccataaatagataaatataagtaactttttttaattacttatttgagacagactctcactctgccccaggctggagtgcagcggcgtgatctcggctcactgcaacctccacctcctgggttcaagcgattctcctgcct

SEQ ID NO: 363559 - DNA, 201 bp, Homo sapiens
gatgggagggatagaaggaaaacctataacacttccataaattcaaggtcagaaatattgccataaatagataaatataagtaactttttttaattacttatttgagacagactctcactctgccccaggctggagtgcagcggcgtgatctcggctcactgcaacctccacctcctgggttcaagcgattctcctgcctc

SEQ ID NO: 363560 - DNA, 201 bp, Homo sapiens
atgggagggatagaaggaaaacctataacacttccataaattcaaggtcagaaatattgccataaatagataaatataagtaactttttttaattacttayttgagacagactctcactctgccccaggctggagtgcagcggcgtgatctcggctcactgcaacctccacctcctgggttcaagcgattctcctgcctca

SEQ ID NO: 363561 - DNA, 201 bp, Homo sapiens
ccttttcttaaattgccagaattatttttagatcaaaagctgaaacttaagcttcagggtggcttcaggaaaagctcaggaaataacccaggacgaggtcrttaggggataaggtgggttcccagggagaatatataattagtgtgacttcaggatgaataacattatggccagtgaatatgcgatgtagcaagacctgaa

SEQ ID NO: 363562 - DNA, 201 bp, Homo sapiens
ggacagggcagggtggtggggcaggggagggaggatcatttaagtgcattacgtttactgtgcactttatttctgttattattatatactcaccataatgkagaatcagtgggagccctgagcttgttttcgtgcaacacgaaagtcccatctgggggtgatgggagacagtgacagatcatcaggcattagattctcata

SEQ ID NO: 363563 - DNA, 201 bp, Homo sapiens
tcagaaccatttgaaagtgtatctaatttgatggctacaccctcttcctgttttgtaaattagactcttataataatggcatctacagtttatttgcagcygaggctgccagtcctctgacatgaagaagactgccttggaggcatcttcttccaaaaataataaaataaccatcatctctgaatggtcttgcacttggtg

SEQ ID NO: 363564 - DNA, 201 bp, Homo sapiens
tcaaagaaagaattgtatgctgctgtcacagagctccagctggctgcggtggaaacggtaagggtgggctggatttgagtttgctaaatgaacggtctgtrccatttttagatgacagattttaaatagtaattcatctcattcatttcactgggattcactagcatcaactccacaaaaatgaaaagtctcatactagat

SEQ ID NO: 363565 - DNA, 201 bp, Homo sapiens
taatgtgcattatatattttagtatatttatgtgcatatatgcggctgtctccaacctttttggcaccagggaccagtttcgtggaagacaatttttccayggacagggcagggtggtggggcaggggagggaggatcatttaagtgcattacgtttactgtgcactttatttctgttattattatatactcaccataatg

SEQ ID NO: 363566 - DNA, 201 bp, Homo sapiens
ggactcctgagttcaagttcagctctgtcactggttgtggtggcttggccaaatgtgcaatcaccttttcatcctcagttgccttgtctctaaaatggactaataattaataataataataagagaacctacctcaatgtaactgtttctgggtctactacagattacagttaacataaaaacctggcatatcacagtatc

SEQ ID NO: 363567 - DNA, 201 bp, Homo sapiens
aaagaaagaattgtatgctgctgtcacagagctccagctggctgcggtggaaacggtaagggtgggctggatttgagtttgctaaatgaacggtctgtacmatttttagatgacagattttaaatagtaattcatctcattcatttcactgggattcactagcatcaactccacaaaaatgaaaagtctcatactagatgc

SEQ ID NO: 363568 - DNA, 201 bp, Homo sapiens
gtactgtctttctagatggtggtatttgctaacatcatatccaactcagggaagcggactgagtgctgggatccaaggcattctacagggttcactgctgrtttacacttcacctgtgtcagcaccatcttcaggtgcttagaatggcctgggagcctgttctgtcttgcatcttccatgacatgaaagggaggctggcac

SEQ ID NO: 363569 - DNA, 201 bp, Homo sapiens
gactcctgagttcaagttcagctctgtcactggttgtggtggcttggccaaatgtgcaatcaccttttcatcctcagttgccttgtctctaaaatggactaataattaataataataataagagaacctacctcaatgtaactgtttctgggtctactacagattacagttaacataaaaacctggcatatcacagtatct

SEQ ID NO: 363570 - DNA, 201 bp, Homo sapiens
aactgctgtgccatatgtgatcagcatgattattaccatataatgagcctggtggttgtttgcttaatagtgagggaggtacacgcctagattttatgttmtaaatattagaaatttttaccattattgtcaacatggatggacactctacttgtgcgtatgtatgtggggtatgtgtgcttagtaatatctgggtccaag

SEQ ID NO: 363571 - DNA, 201 bp, Homo sapiens
tttctctcagactctgcttttcctcaatattcttggactgttgccttttctcagaaaatcccacacttttaagaggcatagaattgagtctttaataaccmgctaaacatagactccaactccagcattgctgtttgtgtaaagtgatgattattttaaatgacaggtatctgcctcgtgttgtatgagaagagatttggg

SEQ ID NO: 363572 - DNA, 201 bp, Homo sapiens
attacaatttttatcaaacacatccagtggaaaatcatcccccacattaccttcaatattgaaaggaggtggaggtggggtacgggcattgctcccaggascggtgcagagagagccgggggtgtccttgtaattccagccttttaaaaagtgcagggtgctgcggtttagaatgttcctcttccagaacgaacattgtct

SEQ ID NO: 363573 - DNA, 201 bp, Homo sapiens
actcctgagttcaagttcagctctgtcactggttgtggtggcttggccaaatgtgcaatcaccttttcatcctcagttgccttgtctctaaaatggactaataattaataataataataagagaacctacctcaatgtaactgtttctgggtctactacagattacagttaacataaaaacctggcatatcacagtatctc

SEQ ID NO: 363574 - DNA, 201 bp, Homo sapiens
gcctcataccagacgccacggtgcctccatgcacgggcttctgtgcttaaactctgggtaggaggagacttcatgtgccccagtgacaaaaagccagagtrggatgtgatgagtgccatgatgtccatgcaaactgctacgggagttcaggagcagtaaagttctctgccctggcaagatacagaatccagatttttcaaa

SEQ ID NO: 363575 - DNA, 201 bp, Homo sapiens
ctgcggtttagaatgttcctcttccagaacgaacattgtctttgagagaaggagaattcagaataaaaaggcatttgcatttctctcagatgatgagcacrtttgggaggatgatggtcactccagtcgagctgcacaagagcctcaacaccaaggtctggcaggaccacactctggcctgggacaccattttcaaatcag

SEQ ID NO: 363576 - DNA, 201 bp, Homo sapiens
gcatatcctgtaacagaggctggcagagggccagcagccagctcatggagggctgtatgagcgggagtttgaattttagcctgtaagtaaccgggagctgygggaatgtattcagcagcagtgtgatatatgggcagatttactgggaggatcactgtggctgctgatgggagggatagaaggaaaacctataacacttcc

SEQ ID NO: 363577 - DNA, 201 bp, Homo sapiens
ggtagttggaaaagctgtgggtgggtgctgactaagctaattgactctcactcctcaggtttatgattttaggccatttgtttacctttttaatgctagtytcctactttataagtcaagagccaattatccaccactaaaaagttggttgcagtaatcctgtataattttttttttccagactgtgtcactcaggctagg

SEQ ID NO: 363578 - DNA, 201 bp, Homo sapiens
tagcaagacctgaagttagctcagtgagctttaaagttttgttttccttcaacggctttaaaatgtgtcttttgcggttgttttctttgaaggtcttggcygattttatgggcagaatagatgagctctgtgatgaaagaggccacgttgaagacttgtacagcgaactgaacaaatggtcgtttgaaagtaagttgtcgt

SEQ ID NO: 363579 - DNA, 201 bp, Homo sapiens
atgttgcccaggctggtctcgaactgctgacctcaggtgatccacttacctcagcctcccaaagtgctggtattgcaggcgtgcgataccacgcctgactracttttgtgttttttaagtagagatggggttttgccaccggttggtctcaaactcctgacctcagatgatgctcccacctccacctctgagagtgctggg

SEQ ID NO: 363580 - DNA, 201 bp, Homo sapiens
gttaacataaaaacctggcatatcacagtatctccgtggactagatctatttctgccacatgacgaaggggaatatttgatgctaggcattgttcacttayacatttagttaatcctcacaacacacctataaggtaggtccttttattagccctgagaggggtacctgagacacatagaagttagccaacgttcccaaga

SEQ ID NO: 363581 - DNA, 201 bp, Homo sapiens
ccattccttcaacttttctctaggtaaaaagttttgaaatgaagagttgagaattttatttgtaaaaaggttccttctaaataaaatgatgaaatggaagraaaaaaaaccctatatgaagtgctagcccagtacctggcgtgtaatgggtgtttagaacataattattcccttcccttctcttcctctggtgaatggctt

SEQ ID NO: 363582 - DNA, 201 bp, Homo sapiens
aatcaaggatagtttgtgcccctgaggttttccaggccacttcccctcaaatcagctgctgcagcttagcccctgcagttttccctacaggctcagactgycttacgtggctttggtaaaagctacagtcatctgccctttggaaactctatttggtacttgcggtgagggactcactgatatggttaaatctgtttcttt

SEQ ID NO: 363583 - DNA, 201 bp, Homo sapiens
ttcccttcccttctcttcctctggtgaatggcttccaattcattatgtcaggagatagaatccaataagtgactctaaaaacacagctgggttagaggcakagtgcagacccgaccctgcagcacctttgctagggcccctggatctcctgtgtgacttgatcaggacagtggatctctgatcatgacactctgaggtgat

SEQ ID NO: 363584 - DNA, 201 bp, Homo sapiens
cccctgactctctcctccctcttccgccctcccagtggcgctccaaaccctccccgacatgcgcgcctcgggcgcatggtgcgcttcggcgtctgggcagsgagggtccccggtcccctaggaggaaggaggcgggaggagggaaagcgcttcgggcacggcggaggatgcgcgctgacaccgcgctgtgcccggccggct

SEQ ID NO: 363585 - DNA, 201 bp, Homo sapiens
tctcttcctctggtgaatggcttccaattcattatgtcaggagatagaatccaataagtgactctaaaaacacagctgggttagaggcagagtgcagaccygaccctgcagcacctttgctagggcccctggatctcctgtgtgacttgatcaggacagtggatctctgatcatgacactctgaggtgatgagtcattgga

SEQ ID NO: 363586 - DNA, 201 bp, Homo sapiens
aactcggactcttgacaaggcaacagttctgggtgaatatgctttacccaaaggagtaagtagaatttgtatattctataccttacaaaaccttggaagayacactttgcaaatattcaccagatctccctagactttgtactggaaaatattcattttgggaatgcagagatggtagagaatagttgacatgttgcatag

SEQ ID NO: 363587 - DNA, 201 bp, Homo sapiens
caccaatattttttctctagtcattgcctgtgcagaggaaataaaagatgccacttaaaagggtgtgggcctttgtcagaaactgtagctggagtactcarctcaatgtttgaatttcttatttttggtgttggcaccctcgtatgagggctgtttacatgtggttgtaaccctcagtgtaggtagtgcctgtttattttt

SEQ ID NO: 363588 - DNA, 201 bp, Homo sapiens
cttagcaacagcgtcttcatgtctgcggaggtggacacaatgatcattttcaggaaatatttggcttaaattagcaaagtacggcctaaaaaataaatacwtatgactactagtggtgaatattatgtagcttaaagctacattggctgtttccaccaatattttttctctagtcattgcctgtgcagaggaaataaaaga

SEQ ID NO: 363589 - DNA, 201 bp, Homo sapiens
ttccaggttcttgagagaccaccatgaaccagagacaagggttcccactctcatggaacttgtatgcaagtggggaagacagacagtagccatgtaaacawacaaatgtggtcactttagatagtggtgtggattgtggaggacgccatcaggatggtgtaatatagagagatggagatgattaaagggaagccctctctg

SEQ ID NO: 363590 - DNA, 201 bp, Homo sapiens
cccccttttaccgctaggaattgtccccaggcctcccagccccactccctgcaaggacacctcaaaatccctgaacccaaattatctggacttcaactttytggtgcaatctttgactaggaggaaaggtgctttttcatcctattgtcaaactattgtcaaaagatgatcactattttatcccaaatattctgatgctaa

SEQ ID NO: 363591 - DNA, 201 bp, Homo sapiens
ctgagttcaagttcagctctgtcactggttgtggtggcttggccaaatgtgcaatcaccttttcatcctcagttgccttgtctctaaaatggactaataattaataataataataagagaacctacctcaatgtaactgtttctgggtctactacagattacagttaacataaaaacctggcatatcacagtatctccgtg

SEQ ID NO: 363592 - DNA, 201 bp, Homo sapiens
ttcaagttcagctctgtcactggttgtggtggcttggccaaatgtgcaatcaccttttcatcctcagttgccttgtctctaaaatggactaataattaataataataataagagaacctacctcaatgtaactgtttctgggtctactacagattacagttaacataaaaacctggcatatcacagtatctccgtggacta

SEQ ID NO: 363593 - DNA, 201 bp, Homo sapiens
tcaagttcagctctgtcactggttgtggtggcttggccaaatgtgcaatcaccttttcatcctcagttgccttgtctctaaaatggactaataattaataataataataagagaacctacctcaatgtaactgtttctgggtctactacagattacagttaacataaaaacctggcatatcacagtatctccgtggactag

SEQ ID NO: 363594 - DNA, 201 bp, Homo sapiens
atttcctttgtgacatttatcaccagaatcggctttcaaagaaagaattgtatgctgctgtcacagagctccagctggctgcggtggaaacggtaagggtrggctggatttgagtttgctaaatgaacggtctgtaccatttttagatgacagattttaaatagtaattcatctcattcatttcactgggattcactagca

SEQ ID NO: 363595 - DNA, 201 bp, Homo sapiens
tagtaagtctagttatgttctcctaatagacattacaatgaattcaaaactattgaagtgatcaaaagttagcctaagaaggccctaattttttttttttytttttttttgagacagtgtctcacactgtcacctgggctggagtgcaatggtgcaatctcagctcactgcaacctccgcctcctgggttcatgcgattct

SEQ ID NO: 363596 - DNA, 201 bp, Homo sapiens; identical to SEQ ID NO: 78509

SEQ ID NO: 363597 - DNA, 201 bp, Homo sapiens
gcccaggtgttgatactttttcttctgcaaaattgttccagaagctgtactgtctttctagatggtggtatttgctaacatcatatccaactcagggaagyggactgagtgctgggatccaaggcattctacagggttcactgctggtttacacttcacctgtgtcagcaccatcttcaggtgcttagaatggcctgggag

SEQ ID NO: 363598 - DNA, 201 bp, Homo sapiens
tttggctctttgttgggtaaaacctttaccggtttctgcaattatgttctgtgctgtttcacaaggcagaagaagagaggggtaattctgtttttgtgtgygtgtgcattacagattgtccgcaaatacgacatccaggccacagacaatgagcctgttgagatgctacactcaggcaccctggtgcccagccgggaactc

SEQ ID NO: 363599 - DNA, 201 bp, Homo sapiens
ttgtttattttccatgtgcttccccttctgtgctgtttcttgcctgaagtaaaggtagggttttctctatcaggagatagcgaggttctcatttctcctcytgctccacaaggcggttgaaagtgggaatccatcctcgctcactttcctgttgaactgcttaccctgggtggctccttccagtgatcaaagtacagtgtc

SEQ ID NO: 363600 - DNA, 201 bp, Homo sapiens
cattacagattgtccgcaaatacgacatccaggccacagacaatgagcctgttgagatgctacactcaggcaccctggtgcccagccgggaactccccatygcgttttgccagcgataatacgcctcaggtgagcatctaggcggttcattatcctctgcaaggtagtgagaatgacgagggatgagctatgctgggaagt

SEQ ID NO: 363601 - DNA, 201 bp, Homo sapiens
ctgcaggctggggccagctttcctggggctcgtggggacatagggatattggtggagcttcaagtcacagctacaaagaacaaaggaaaaaagaatgcaaytcgggtgattcaaagtgggggtcttctctttctctccattccttcctacagcctcctccccaccaaacccttatttctccctcctccaccctcttttaaa

SEQ ID NO: 363602 - DNA, 201 bp, Homo sapiens
tgttaatgagtcatacaacaaacatttgttgaatacttgctgtgtgtctggcactgtgctaggtactagggatatgacaatgaatgaaacgcataaccccygtacccttggggagcttatatgctagacaaggtgacagtcaacaagtaaacacattttaaaatatactcttccaaggagtaaaggaaaagagaaagggag

SEQ ID NO: 363603 - DNA, 201 bp, Homo sapiens
atttttacagaacttcacagtgattcccaaaaaatggcatacacacatattttatttcaatagttaagtgttcattttaatgtgcattatatattttagtrtatttatgtgcatatatgcggctgtctccaacctttttggcaccagggaccagtttcgtggaagacaatttttccatggacagggcagggtggtggggca

SEQ ID NO: 363604 - DNA, 201 bp, Homo sapiens
ggggaacattttaaaatgggacacagtagattttttatggaatggtcgctaaggttcttagggatgttaatgacattgtggttatgttggagaatgctttrttcttaggacattactgctaaagtatttaacggtgaagtgacctgagagctcaaaattattttcagatgcttcagcacacacaaccacgtatacacttgt

SEQ ID NO: 363605 - DNA, 201 bp, Homo sapiens
gcttcaagggctagcacggaaacatacacattttagtctggaatgaagggggaaaaccaacgttaacagtttactaaacagccttgcactggggttttaaytaactcaagaagatgagaggaacaagagatacaattattgagaagaaaaaaacaacttctttaggaagatctgtgatcatgctgcctctttgagtatgca

SEQ ID NO: 363606 - DNA, 201 bp, Homo sapiens
gacaatagaggagttctcatgttccctccacaacttttgccatgtccatataccaaccaggtgctatttatttcaatactactgagttatttcctttaaataacataagccaaatagcatatgttggcctcgtcctgagtaataatttccttaatgaaattaagagttagtaagtctagttatgttctcctaatagacatt

SEQ ID NO: 363607 - DNA, 201 bp, Homo sapiens
ccaaggtctggcaggaccacactctggcctgggacaccattttcaaatcaggtaaagggccgcccttcacaaccagccagaaccagcccagcacccccgtrtctggagcttcagagaggaggtctggagtgatctcctgagcctcatcaccacatttaggttttgcaaacacaggtgttttggggattgccccagcataca

SEQ ID NO: 363608 - DNA, 201 bp, Homo sapiens
tgggacaccattttcaaatcaggtaaagggccgcccttcacaaccagccagaaccagcccagcacccccgtgtctggagcttcagagaggaggtctggagygatctcctgagcctcatcaccacatttaggttttgcaaacacaggtgttttggggattgccccagcatacacaaattctaagtaacaagctttctgtagt

SEQ ID NO: 363609 - DNA, 201 bp, Homo sapiens
ttatgtcaggagatagaatccaataagtgactctaaaaacacagctgggttagaggcagagtgcagacccgaccctgcagcacctttgctagggcccctgsatctcctgtgtgacttgatcaggacagtggatctctgatcatgacactctgaggtgatgagtcattggacctggagataatttctagaaaaagaaagtga

SEQ ID NO: 363610 - DNA, 201 bp, Homo sapiens
gtaattccagccttttaaaaagtgcagggtgctgcggtttagaatgttcctcttccagaacgaacattgtctttgagagaaggagaattcagaataaaaakgcatttgcatttctctcagatgatgagcacgtttgggaggatgatggtcactccagtcgagctgcacaagagcctcaacaccaaggtctggcaggaccac

SEQ ID NO: 363611 - DNA, 201 bp, Homo sapiens
tagcggctgatagatacttgttgaataaatgaaggaattcaggaactattgagtgcctactgtatgcctgggactgttccaggttcttgagagaccaccaygaaccagagacaagggttcccactctcatggaacttgtatgcaagtggggaagacagacagtagccatgtaaacatacaaatgtggtcactttagatagt

SEQ ID NO: 363612 - DNA, 201 bp, Homo sapiens
caaactgtattttaggtcaggcacagttggctcatgcctgtaatcccagcacttttggaggcaggcagatcacctgaggtcaagagtctaagaccagcctrgccaacatggtgaaaccccatctctactaaaaatacaaaaattagccaggcatggtggtggatgcctgtagtcccagctactcaggaggctgaggcagga

SEQ ID NO: 363613 - DNA, 201 bp, Homo sapiens
catttatgtctttatattgtaataaatatgtacatatctaggtatatgctttctctctgctgtgaaattatttttagaattataaattcacgtcttgtcakatttcatctgtataccttcaaattctctgaaagtaaaaataaaagtttttaaatatttgagagacttcccctctttattgcctttgttacaacaaaataa

SEQ ID NO: 363614 - DNA, 201 bp, Homo sapiens
caccaattttacatgtactcatttgtgttcgaacaattattgcgtcaaactgtattttaggtcaggcacagttggctcatgcctgtaatcccagcactttkggaggcaggcagatcacctgaggtcaagagtctaagaccagcctagccaacatggtgaaaccccatctctactaaaaatacaaaaattagccaggcatgg

SEQ ID NO: 363615 - DNA, 201 bp, Homo sapiens; identical to SEQ ID NO: 78510

SEQ ID NO: 363616 - DNA, 201 bp, Homo sapiens; identical to SEQ ID NO: 78511

SEQ ID NO: 363617 - DNA, 201 bp, Homo sapiens; identical to SEQ ID NO: 78512

SEQ ID NO: 363618 - DNA, 201 bp, Homo sapiens; identical to SEQ ID NO: 78513

SEQ ID NO: 363619 - DNA, 201 bp, Homo sapiens
gtagcaatggggtctgaatatgtggcctaggctgatctcaaactcctgggctcaagcatccctcctgcctcagcctcccaaagtgcttgggattacgggtrtgaggcaccatgcccagcctgaacttgatttttttgttgtttccttttcataacaaacatcaaatgccttcagtgtactagttcttctaggttctggaat

SEQ ID NO: 363620 - DNA, 201 bp, Homo sapiens; identical to SEQ ID NO: 78514

SEQ ID NO: 363621 - DNA, 201 bp, Homo sapiens
cactttgttcctgaaattgtggtggtctttgcctctcatggagccttgcatatgctgtttcctctgcctggaatatcctaccttttacttaactgattctygttcttctttccagtcacattttgtacatttcttctgggaagctttctctgatttcccctttccacaggtccaagttaactgccttgtctaggtcctccc

SEQ ID NO: 363622 - DNA, 201 bp, Homo sapiens
tgatacctgcctcttgctggtaaggaggccctcgcgggtgccctggggagctcctctacctgctctgctgtgatgttttttcctaagtagaaactgaagcrctcctcttccaaaatacagagactcactgtgttagtctgtttttgcgttactaataaaggcgtacctgagactcggtaatttgtaaagaaaagaggttta

SEQ ID NO: 363623 - DNA, 201 bp, Homo sapiens
agctgaaccaagaggagcagaaagccgtgagaatatggggctaaagaaccttctagccaggaggcctgcggtacccactccattggggccatgatattatyctttcaggcagggactcaggaaggttaacgttttaaccctctctaaaatagcatctttcctcaatgagcagcttagtctttggtcgtggcagagatgacc

SEQ ID NO: 363624 - DNA, 201 bp, Homo sapiens
cttgttttctcgtctgtaaattctttgattctctgacaccactcactatatttcattgtgaatgatttgattgtttcagataaaggggactgcaataatascttgtgacatgaaggcaagatttattcatgttagaggcaggctttgtaaaatgggccactcttccaattgacatttgtttttatagctgttttcattatg

SEQ ID NO: 363625 - DNA, 201 bp, Homo sapiens
ctcacatggcctgggggccttgtctttacctctaggatgttccgctgaatgggaaccctgccttgcctctggcttctatcccaaaggtctaagaagacagsgaacactccctgccaccccagccatggaggaggcctgccttggcaggatgctacaaagggtggaggtcggctctgtgccagggctgctaacggtgcccat

SEQ ID NO: 363626 - DNA, 201 bp, Homo sapiens
agtctcgctctgtcacccaggctagagtgcaatggtatgatctcggctcactgcaacctctgcctcccgggttcaagcgattctcctgcctcagcctcccragtagctgggattataggtgtgcgccaccacgcccggctaatttttgtatttttagtagagacggggtttcactatgctggtcaggctggtctcaaactc

SEQ ID NO: 363627 - DNA, 201 bp, Homo sapiens
  misc_feature (1)...(201): n = A,T,C or G
attgatctctgaagatatcaagtcatattatacagtgcgacagctagaattggaaaaccttacagtgagtatagcacacacttcagcacttcaggcggctnctggttcacatgcctcttcctttatcccttgggtgatattacctaatgtcagtgttcctggcttttgtataccccgagcaagatgtggtttgggcactgt

SEQ ID NO: 363628 - DNA, 201 bp, Homo sapiens; identical to SEQ ID NO: 78526

SEQ ID NO: 363629 - DNA, 201 bp, Homo sapiens
ggtggtgccaggcttttttaaacaaccagctcttacatgaactcatagagtgataactcattaccatgaggacggcatcaagccgttcatgaaggatctgsccccgtgacccagacacctcctactaggtccatttttaacattggggatcacatttcaacgtgagatttggagggggcaaaactacaaaccatgtcactc

SEQ ID NO: 363630 - DNA, 201 bp, Homo sapiens
tttcaaacacccctcgggctagcgtgtggctgcacggtgtccatttgtgcaggccaccactcctcttgcatctgggtctagccacctctccttcttgactyaccatagttcattttgtaccatgctttcagaatgagctttctcaaatccaagtctcaccacggttcttcccagctgaaaacccttgtgcggttccctttg

SEQ ID NO: 363631 - DNA, 201 bp, Homo sapiens; identical to SEQ ID NO: 78527

SEQ ID NO: 363632 - DNA, 201 bp, Homo sapiens
tttcttctctattggatattcagtttcctggatttcaggtcttctcattttcctctagtagttttgttaggtcatggttggtatggcatggttgggatagygtgttcacacagctatctcgtgagtcatactcctccaatccagcctgctcgcttcccgtgtctgtcatgtagttgtcaccctgctatctctccctccagt

SEQ ID NO: 363633 - DNA, 201 bp, Homo sapiens; identical to SEQ ID NO: 78515

SEQ ID NO: 363634 - DNA, 201 bp, Homo sapiens
gaagtgggagcgtggtatgtccttagctgtctgtgaaatgcagctgaagatgggtgtgggccttcatctgcatttcccatcttcagtttgaggaggtagtwacccttctaaccacttaagaactgcatggtacatgctgttttatttacagggcaaaactgtgctcccgtagtttccctggtgcttgccttcacgttaaca

SEQ ID NO: 363635 - DNA, 201 bp, Homo sapiens
gaactgcgccatctcctctaggccacagaggcctttttgacccccttccaggtctttagacattgtcaggcagtgaggggtcgtagctgccagtgtctccrtggtagcgtgctctgccagggatgcagaagattctccagtcattcctccagtgggcacttcctgcaggtcctgtgcccatggctgggagtggtggctgtc

SEQ ID NO: 363636 - DNA, 201 bp, Homo sapiens
gaattatttgagcccaggagtttgagaccagcctcaaactgggtaatataatgagacctcatctctacaaacaggaaaaaaaaaattttttttttttttttaactagccaggtatagtgctaatatacctgttctgggatccagcatgctctccctgacctgcagcttcatctccaccactttgcccctcactcccaccac

SEQ ID NO: 363637 - DNA, 201 bp, Homo sapiens
tagtaagttcaagatgagctcaggaaagaaagtgagaggacactgagggctagtggttgagccaagtgtgatgggacttaaagggagaagatttaaagaayaaggagcttatgggccggggacggtggcttacgcctgtaatcccagcactttgggaggctgaagcaggtggatcacttgggtcaggagttcgaggccagc

SEQ ID NO: 363638 - DNA, 201 bp, Homo sapiens
accgcttaggcattggaggtggtgtttgctaatcaggacaggcaagatcctagccttagtggggcctagagtcgaatagggcaatcaaacacaaaagcaartaatttcagatagtgacaggtgctgtgaagagaacgacttcctaacggggtacagggtgactgcatagaaggccggctgtcttagagaaggggatcaggg

SEQ ID NO: 363639 - DNA, 201 bp, Homo sapiens
gtgtggagttatggagacctgcttttatcttgaaaagcaagttcttagtgcatcttcatggtgtctgattttttggctggtgagagtgtggctacctctgyggagctgtgggagcggctgactagatgagatttgcctccattcagtacctagactcttgccctgccacacctcttcggagtgagcattgacttcaggatg

SEQ ID NO: 363640 - DNA, 201 bp, Homo sapiens
tatttgtaaaatatacctcaaaagcagttttaaaaatgtattcaagtacatacttaagatctttgcattttactctgagtataccttaattttaaaatctrttttttaaaaagtattatgtagataccttttattttcccaatgtctttattaaatgacatctccacgttttgcttcttacctctatttttttttttttat

SEQ ID NO: 363641 - DNA, 201 bp, Homo sapiens
gcccaggctttagtgcagtgaggcagtcagagcttactgaagttttgaactcctgggcttgaggaacaaaggatttttttaaccttttaattcaaagtctmatcatttatgcaaccatgtcttggtgttggctgttttgggttgttctccctcaaaaatccatgtgctctttcaatatgtagttttaaatctttttttttt

SEQ ID NO: 363642 - DNA, 201 bp, Homo sapiens
ttgatcatatgttattagcaaaggtttactgcctgcttccattgtatagacaatttattttttatgtattccgttctaagaaggcagatgaccaaaagatyttgcatctgttgcccaaggcttgtgactagagaggaaagagataagaatacttttttaaaatcccattttactaaatatgttgaggaagtggtaagatat

SEQ ID NO: 363643 - DNA, 201 bp, Homo sapiens
tgaaaataaagagatatggctaatgtgccaatggtggagataagatagatgcaaaaaaagaaaaacattcaaaagaaggcagagacagaggaaaaaaggamcaaagatcaaatgagtcaaatagaaagcagctaaactagcaatatggcagatttaaatctagccatgtcaatagttatattaaatgtaaatgttctaaat

SEQ ID NO: 363644 - DNA, 201 bp, Homo sapiens
cttctatatatatctccctattcagcgactactgcaagagttccaggaaatgtacactgtgtgttcacttactgcattttaaatcattgcctttactatayttctgcatttcccttcaatctagctctgtctgtacatttctgaaagccagtagcttccctgaagaaccaggtaacaacccgaacaatcaaattagataac

SEQ ID NO: 363645 - DNA, 201 bp, Homo sapiens
ctgctcggctcctggggaggcctcagggagcttccagtcatggtggaaggtgaaggggagcaggagcaagagatgggggaggtcccagactcttaaccagmtctcttgtgaatgcattgcctcagggagggcaccaagcctttcatgagggacctgtccccctgacccagacacctcccacccagccccacctccaacact

SEQ ID NO: 363646 - DNA, 201 bp, Homo sapiens
aaaatacaaaattagctgggcatggtggtgcatgcctgtaatcccagctacttgggaggctgaggcaggagaattgcttcaacccgggaggcagaggttgyggtgagccgatatcgcattatttcagaacaattttccacaagatcagtgagtgctgtccaatagacatataatacaacccacatacatgactttacattt

SEQ ID NO: 363647 - DNA, 201 bp, Homo sapiens
agtctgacctacatggtgaaactactaaaatacaaaattagctgggcatggtggtgcatgcctgtaatcccagctacttgggaggctgaggcaggagaatygcttcaacccgggaggcagaggttgtggtgagccgatatcgcattatttcagaacaattttccacaagatcagtgagtgctgtccaatagacatataata

SEQ ID NO: 363648 - DNA, 201 bp, Homo sapiens
cgtgcacggaaagtttgcagaatgagcaggtgttagttccagctggagatgactgccggctgtgcccttggtacctgctttctggagggaagttttaagaygtgtgcatacttgacccagcagttgtatacatggagaaatttactttgcagcaactctcaaaacaagcgtgtaaagatgtgtataggtagttgtgtttgt

SEQ ID NO: 363649 - DNA, 201 bp, Homo sapiens
ccttgcaggttaacaaccattattgagtacctattgatatgtgtggtgtactgagttaactagaacatgtcccctggtctgtgttctagaccatcttgctkggaaaaaggcagacccaaagcatattttggtgggggcccatggacagtgatgtgatagaggtgtccgctgaggtggtcagggaaggctgcttgcagtagg

SEQ ID NO: 363650 - DNA, 201 bp, Homo sapiens
ccttttacagttttataaataagtaagcagaatagcagaatgtggacattttttaaatccaaattgaatatgcacatgactcaaggagtcaaatagtaccrtaatcggtttatgataaaatccagtggtttggctgggtgtcgtggctcacacttgtaatcccagcaccttgggaggctgaggcaggtggatcacctgaag

SEQ ID NO: 363651 - DNA, 201 bp, Homo sapiens
aacatgcttttcctttttaatgcttagacattttatatgaattaatatttttatttggttgcttatacattactttctttttagctagaatgtgaaccctrtaggaacatggggattgcctttcacatctttgtatcctcagtacctaatgttcagtcaccctgtggtcttgtgtcgtatatacatttagccttccttaat

SEQ ID NO: 363652 - DNA, 201 bp, Homo sapiens
actggggaggtggaggttgcagtgagctgagatcactccactgcactccagcctgggtgacagagtgagactccatcttaaaaaaaaaaaagactccatcytaaaaaaaaaaaaaaagaaaaaagaaagaaaatacccaataagtagttcctgaatgaatagatgagaatgctgtttagaaggttcatgaattggaaaccg

SEQ ID NO: 363653 - DNA, 201 bp, Homo sapiens
gcatataaatgcatgttggttgtcaaccagttaatgaagtgaataaaagggaggaggcggaagaactgcacggacctcttcgcccccgccttctcctgtgyggtgcgtgtggcgctccgcccacctgtgctgcctgtgcggctctcatcacagtgtggagttgtgtgtggagttatggagacctgcttttatcttgaaaag

SEQ ID NO: 363654 - DNA, 201 bp, Homo sapiens
tgatcctcccacctcaggctcccaagtagctgagactacaggcatgtgccatcacgcccagctaatttttgtatttttttggagtagagatgggattttgytgtgttgcccaggctggtcttgaactcctgggcttaagccatctgtctgcctcaggctcccaaagtgttgggattacaggtgtgagccactgtgcccggc

SEQ ID NO: 363655 - DNA, 201 bp, Homo sapiens
tgaagttacaaatgtgaagcaaacccccacccttcaccactagtcagcaattttgagtaaagaaacaaagcatcaggtgctcacagcacacactgtcttakagggaaggggaagcctggtggcctgtggaagccttcagcatagctccatctgcaggcttctgaccctcagcactactgacacttgggctggatcattgtc

SEQ ID NO: 363656 - DNA, 201 bp, Homo sapiens
acacacttcagcacttcaggcggctactggttcacatgcctcttcctttatcccttgggtgatattacctaatgtcagtgttcctggcttttgtatacccygagcaagatgtggtttgggcactgtggtgagcggagcttacttgtgtacctaccaagtgcccagggagggtggaggccacagtgctctctctgaccttta

SEQ ID NO: 363657 - DNA, 201 bp, Homo sapiens
gtaccattgttcttaggcacatttcagtgccagaactcttaatactcaggaagaagcaaaaagaaagatggaggtgcagctagaggttgtggcctttgaasgattcattctgccttaataagagtggtctggctgagctcggtggctcacacctgtaatcccagcactttgggaggccaaggcaggcagatcgcttgagcc

SEQ ID NO: 363658 - DNA, 201 bp, Homo sapiens
tgtgccactcttggaatacaaacgaaattcttaaccaaagccagtttcattttgatgttctattttcctcccattcacactccaaattgtgcaccaaagtrtcatcctagttttgtgaggatggttctccatacttcagggtaggagtatcatgtggattcctatgatacctttctccctgggaccatggagggcagcagc

SEQ ID NO: 363659 - DNA, 201 bp, Homo sapiens
ttgcgttcttcagtgaactctttctttaggccagttgatggcttcttagcagtttattgacgagatcctagggtagcttccgaagctgggttgattgattgcatttgggtgcggatggccaaagtgagtggccctactgcctgtgctgctcagggctcctgggctgatgtggtggcttcttccctttgtgctgctgaacat

SEQ ID NO: 363660 - DNA, 201 bp, Homo sapiens
tatttttatttaaaaaaattaaaacagcagcatataaatgcatgttggttgtcaaccagttaatgaagtgaataaaagggaggaggcggaagaactgcacrgacctcttcgcccccgccttctcctgtgtggtgcgtgtggcgctccgcccacctgtgctgcctgtgcggctctcatcacagtgtggagttgtgtgtggag

SEQ ID NO: 363661 - DNA, 201 bp, Homo sapiens
aagatctggtttctaaaattttatgctagttaccccacccccccttctatatatatctccctattcagcgactactgcaagagttccaggaaatgtacacygtgtgttcacttactgcattttaaatcattgcctttactatatttctgcatttcccttcaatctagctctgtctgtacatttctgaaagccagtagcttc

SEQ ID NO: 363662 - DNA, 201 bp, Homo sapiens
attgcgttcttcagtgaactctttctttaggccagttgatggcttcttagcagtttattgacgagatcctagggtagcttccgaagctgggttgattgattgcatttgggtgcggatggccaaagtgagtggccctactgcctgtgctgctcagggctcctgggctgatgtggtggcttcttccctttgtgctgctgaaca

SEQ ID NO: 363663 - DNA, 201 bp, Homo sapiens
tgaagcccccgtctgaaagttgcccagagccagtgcctcacctgctgttccttgttcactttttcacgggaggccttgcagggctttatgacaagattttrtgggtggctgcccagcatcattgtgactcgtgagacagagagaaaccagttgtaaccatgtagacagtggaagtgatagggagaaaagaggtgaggggac

SEQ ID NO: 363664 - DNA, 201 bp, Homo sapiens
cactctgggagagccgtacacatttgacatctatgatgtgtggcgttttattctatcacatttctgaaatctacactaagagaaaggaggctcttaaaaamccactgaggtgtggactgggggaaggagagatccgtaaagaacctgtttgttacctgttgatactatttcccattggtaaaatttctaatttagtgtgat

SEQ ID NO: 363665 - DNA, 201 bp, Homo sapiens
aattgcgttcttcagtgaactctttctttaggccagttgatggcttcttagcagtttattgacgagatcctagggtagcttccgaagctgggttgattgattgcatttgggtgcggatggccaaagtgagtggccctactgcctgtgctgctcagggctcctgggctgatgtggtggcttcttccctttgtgctgctgaac

SEQ ID NO: 363666 - DNA, 201 bp, Homo sapiens
caattgcgttcttcagtgaactctttctttaggccagttgatggcttcttagcagtttattgacgagatcctagggtagcttccgaagctgggttgattgattgcatttgggtgcggatggccaaagtgagtggccctactgcctgtgctgctcagggctcctgggctgatgtggtggcttcttccctttgtgctgctgaa

SEQ ID NO: 363667 - DNA, 201 bp, Homo sapiens
tgcccttcatcttctcagtgtttggctgttgttgtgattcccttttgtgagcagtgttgaagttagctaatattcatttcttctcccttctttcaccctcytccagagtctgatttgaagtattcctagctgctacctataaaagcaataagcaagattgttttacttttcacaaactcgtcctgttctgtgcctctgcct

SEQ ID NO: 363668 - DNA, 201 bp, Homo sapiens
gttgcttgaattttctaaatggaaacacagtacctttataatcagaaaacaatcccgagttttgatttgagggtgttgtaaaaagttaaaaaaaaaaaaaacagaaatgtgaaaaggaagttgtgttagagtatttggagttgagaaagcatgaaaaggacagaagagaagctggttgtcaggttgcatggggtagctaca

SEQ ID NO: 363669 - DNA, 201 bp, Homo sapiens
ctgacaaaccagccgaagtgaacactaataggacttcctcttgctgctctttcaaggatcagtggaaggagctttcccacgaggacctggagcccccaccygagcatatccccccacctccccggccacccaaacgaatcctggagccacacaatgggaaatgcagggagttcttcccaaatcaccagtgggtgaaggaag

SEQ ID NO: 363670 - DNA, 201 bp, Homo sapiens
ggactaactgatcattaagttcaggtcaagtaataaaaatccttaatgtactcacaaatacaatttaatgttcctgaataatccttgtaaaaactgcagcrgttactcagttttgtaaggtgtggttgggtactattaggctcaaaagtttataggagctttgtgagtatagttaacaactcaaaagaatggggtgttttt

SEQ ID NO: 363671 - DNA, 201 bp, Homo sapiens
gataggaagacgagactttattttcaaaagatttcatcttccaagtacatggctgcagccctgagaggccgagagcccctcgccaagccgtcacctctgcycatgcaaagggatttcctgacaaaccagccgaagtgaacactaataggacttcctcttgctgctctttcaaggatcagtggaaggagctttcccacgagg

SEQ ID NO: 363672 - DNA, 201 bp, Homo sapiens
tgttggttgtcaaccagttaatgaagtgaataaaagggaggaggcggaagaactgcacggacctcttcgcccccgccttctcctgtgtggtgcgtgtggcrctccgcccacctgtgctgcctgtgcggctctcatcacagtgtggagttgtgtgtggagttatggagacctgcttttatcttgaaaagcaagttcttagtg

SEQ ID NO: 363673 - DNA, 201 bp, Homo sapiens
ttttagcaacaaaagtacatattatgttgtagaacatgctttttctttgatccttcttgaacacctattactctatagaggtatgttgtgtatggcaaatyagaacaagcaatagataaggatgattctttaccattataacccagtcaaggtctttgtcctaagttttgtacctttctccagagggaaaggtatttgtat

SEQ ID NO: 363674 - DNA, 201 bp, Homo sapiens
ggcctgtttgcagcattccctactccccttagtttacctggctcacaacctgtctttccatatcaaggcttctgtcacccctggcccatgtcagtgcattkgggcagcccacccagcatcatcacctcatgtcccagggaacttcctgttcctctcttccagctatttccttccctggcagttgagatagtctctaccttt

SEQ ID NO: 363675 - DNA, 201 bp, Homo sapiens
accgcacctggcctgaaataattcttgacaagatctgcttccttgttactaatacagtggatattttgcatcctaattttaatgcagttcagtgtggtagmcctgtatttgcatattgaatattcccttccctgttttaataactctattttttccttttcttttatatctcctgcttctctagctagtcctagaccttac

SEQ ID NO: 363676 - DNA, 201 bp, Homo sapiens
cttacctaccacctctagccctggagcaggctcttcccctgtctttgtcttcctgggcccaggctcctaagcgctgctggaaaaaaaatcccccagtattgagcccctagaaatccagtctttaatcccaaatctgtctcccccagcatctggccatcagatctaaagcttacctgccatcctttccacctcatttctctc

SEQ ID NO: 363677 - DNA, 201 bp, Homo sapiens
ttggtctataacagcaggaaatgtttcaggaggacaatgaggtcccagaccctcagtcttctcctgtgtcctggattcagcttcacaatagcactatggcrgtgtggccactgcttcagcttccacatacatggctgtgaagagagacaggggattgtgctaagcctccccgatttattaggacataggaggagagagttt

SEQ ID NO: 363678 - DNA, 201 bp, Homo sapiens
aactcaggttttgcgagggttctgggaggtcctatacgggaagggttagcagttaccatgggtgtgtagcacgggctttatctgaagggaaggtggagccrtagggagaccatgtggagtggggctccagggctgtgtgggtggggagggatctgcttctgggttaccccatgcctccccttctcaagtactactttttaa

SEQ ID NO: 363679 - DNA, 201 bp, Homo sapiens
ttactctgaactgaactgtatcttgacagcacttttgaattaagagcattactcttattgttctctactacctggacgccacctccctgttgccatagtgktaaggatcatgctccgaggtggggtgaggcagaatggggccaagatcagaaagttacattaagctacatcaggtttatacaagcataaaaccaaattttt

SEQ ID NO: 363680 - DNA, 201 bp, Homo sapiens
tcctgtgcccatggctgggagtggtggctgtcattgttctctgccagaagggttagcagtgcatcctgacctgacttatgtggcgcccagattcctggaargggtctaaaaatggacctagacttggtgtagaacgtgtgcctcttggcctgccaccatggttccctgcctggttttgtgtgtcagctctgccgcttaaga

SEQ ID NO: 363681 - DNA, 201 bp, Homo sapiens; identical to SEQ ID NO: 78520

SEQ ID NO: 363682 - DNA, 201 bp, Homo sapiens
tttttgttgtgggaagagtttataacaccagctacttgcttggtaaaagttggtcttggaacatggcaaggcattgtggcaagcagcactgccgctgaacrcgctgctcctggggctttggaataattcccctggatccgtaacttgggggtgttcatgtcattctggggaacagtggagggagtgcgcggcagcacctgg

SEQ ID NO: 363683 - DNA, 201 bp, Homo sapiens
gtgccttttttttacccatgaatacatatttgtcaactaaacctcattttgcaacttgttccactactcgaatggtaacaaacttttggtttcccaatagrtttggaagatgttgcttttgaaagtaggaaatagatggctttagaagatggaagaatattttgtttgaagtgggagcgtggtatgtccttagctgtctgt

SEQ ID NO: 363684 - DNA, 201 bp, Homo sapiens
agtggagggagtgcgcggcagcacctgggggcaccagtgaagagtggccagccaccaacctctagaacctaactggggtcgaatcctggccccaccttacyagctcatcacagtgtctccgtttcctcttctgtcaaactcaggttttgcgagggttctgggaggtcctatacgggaagggttagcagttaccatgggtgt

SEQ ID NO: 363685 - DNA, 201 bp, Homo sapiens
atctctgaagatatcaagtcatattatacagtgcgacagctagaattggaaaaccttacagtgagtatagcacacacttcagcacttcaggcggctactgrttcacatgcctcttcctttatcccttgggtgatattacctaatgtcagtgttcctggcttttgtataccccgagcaagatgtggtttgggcactgtggtg

SEQ ID NO: 363686 - DNA, 201 bp, Homo sapiens
ggaaatgactttctgttctagaaacacacgctggtactgaaaccctgtggatgcagcctcctgttggcaagcagcgcttccgcatccttggggaacagggygcgtggaccacagccactccactcctggctgctggaggtccggtattgggcacagggtggccgcaggacatgagccacttctgtgggcttctagtgccac

SEQ ID NO: 363687 - DNA, 201 bp, Homo sapiens
taacattgatctctgaagatatcaagtcatattatacagtgcgacagctagaattggaaaaccttacagtgagtatagcacacacttcagcacttcaggcrgctactggttcacatgcctcttcctttatcccttgggtgatattacctaatgtcagtgttcctggcttttgtataccccgagcaagatgtggtttgggca

SEQ ID NO: 363688 - DNA, 201 bp, Homo sapiens
aagagatgatctttgaagacacaaatttgaaattaacattgatctctgaagatatcaagtcatattatacagtgcgacagctagaattggaaaaccttacrgtgagtatagcacacacttcagcacttcaggcggctactggttcacatgcctcttcctttatcccttgggtgatattacctaatgtcagtgttcctggct

SEQ ID NO: 363689 - DNA, 201 bp, Homo sapiens
aatgactttctgttctagaaacacacgctggtactgaaaccctgtggatgcagcctcctgttggcaagcagcgcttccgcatccttggggaacagggcgcrtggaccacagccactccactcctggctgctggaggtccggtattgggcacagggtggccgcaggacatgagccacttctgtgggcttctagtgccacctt

SEQ ID NO: 363690 - DNA, 201 bp, Homo sapiens
tggccgcaggacatgagccacttctgtgggcttctagtgccaccttgtggtgcttgttggaatgaggggctcggagccaccgagtagggtttttctgcccyccctgacgacagcgccctcccccaggtttccggacagtcctgaaatgtgatgtccaggcttgagtgccctcagtccccacagtggtcctttggggaatgt

SEQ ID NO: 363691 - DNA, 201 bp, Homo sapiens
ttcctttacgtagtatttttatttaaaaaaattaaaacagcagcatataaatgcatgttggttgtcaaccagttaatgaagtgaataaaagggaggaggcrgaagaactgcacggacctcttcgcccccgccttctcctgtgtggtgcgtgtggcgctccgcccacctgtgctgcctgtgcggctctcatcacagtgtgga

SEQ ID NO: 363692 - DNA, 201 bp, Homo sapiens
gccgcaggacatgagccacttctgtgggcttctagtgccaccttgtggtgcttgttggaatgaggggctcggagccaccgagtagggtttttctgcccccsctgacgacagcgccctcccccaggtttccggacagtcctgaaatgtgatgtccaggcttgagtgccctcagtccccacagtggtcctttggggaatgtaa

SEQ ID NO: 363693 - DNA, 201 bp, Homo sapiens
gtccccacagtggtcctttggggaatgtaaccttttttatgtggtcttgattaaatcccattttacttccttgcaggttaacaaccattattgagtacctrttgatatgtgtggtgtactgagttaactagaacatgtcccctggtctgtgttctagaccatcttgctgggaaaaaggcagacccaaagcatattttggtg

SEQ ID NO: 363694 - DNA, 201 bp, Homo sapiens
ggagcacgggcccgttgtggtgcactgcagtgcaggcatcggcaggtctggaaccttctgtctggctgatacctgcctcttgctggtaaggaggccctcgygggtgccctggggagctcctctacctgctctgctgtgatgttttttcctaagtagaaactgaagcgctcctcttccaaaatacagagactcactgtgtta

SEQ ID NO: 363695 - DNA, 201 bp, Homo sapiens
ggtacagagacgtcagtccctgtaagtatccacgtggccggtaccagtcttgctcttcctttgctgcaggcctttttagtcaagactcctttcgcctcagrgtttagtataataataaatcaatgtagcagaggtttatgacgcgattgtttcctatagtaaaggcattagagacttatagtaatagctcatttttccacc

SEQ ID NO: 363696 - DNA, 201 bp, Homo sapiens
ccgaaataggtacagagacgtcagtccctgtaagtatccacgtggccggtaccagtcttgctcttcctttgctgcaggcctttttagtcaagactcctttygcctcagggtttagtataataataaatcaatgtagcagaggtttatgacgcgattgtttcctatagtaaaggcattagagacttatagtaatagctcatt

SEQ ID NO: 363697 - DNA, 201 bp, Homo sapiens
taagtaatttgtctttaaacttttactggtttggaatttcctgagattttgatcttgccagaaagtttatagcaaaagttctgagcagatgacacttttgygtctgaaaccaaatcattgtttttgtttttaacttttttcttaatatattatccttagttcagccctgaagtttattctgttatttgtggatctcaactt

SEQ ID NO: 363698 - DNA, 201 bp, Homo sapiens
tttgtgaaattaaataaagccttattgaagactcagctcttgagagtcatctacctacctaacagttattcttgaacagaagagtcttacttttccctatraggcagtgtgatagccatctgtatattcatataatttatgttggcgcttacttcatttaaaaatgtattccgtgaatgcagttgccaggcggtgtgctga

SEQ ID NO: 363699 - DNA, 201 bp, Homo sapiens
tacaggcacttgctgaacgaggggctctgtatacacctcagctcattgactcttcccacaaccctcttgtcacctaccatttagcaaatgaaaaaaccaargctctgaggtgagttgtttgcccagagtcacccagtgctgtttgaacccactcacataaccaaccaataccattacgtaatttttgaggtcttttatctc

SEQ ID NO: 363700 - DNA, 201 bp, Homo sapiens
cttgctgaacgaggggctctgtatacacctcagctcattgactcttcccacaaccctcttgtcacctaccatttagcaaatgaaaaaaccaaggctctgargtgagttgtttgcccagagtcacccagtgctgtttgaacccactcacataaccaaccaataccattacgtaatttttgaggtcttttatctctgtgatcc

SEQ ID NO: 363701 - DNA, 201 bp, Homo sapiens
caagtaagcgatggggaaactggggcagggagcgatgaagtgacttgcgcaaggtcacaagatgatgtgattggaaccaagagaagtgttgtggttggccrcgcccccacactgcctctcatctgcaccaaggagttttgtcccatagcccaagggccttggggacgaatctcagtggaggcccttagcgggcctgcctga

SEQ ID NO: 363702 - DNA, 201 bp, Homo sapiens
aacatcagatagtgtctgagattatcaaaatagaacatcaaaagtatttttctgaatgaactgaaccaaaccagaatgaaagggcaagccctggggagccygtctccaagccttctctgaaagggagtctgtatttggtgataactgctcagcctctccaaagggcctcacctgctgtctctcccagttttatttttaatt

SEQ ID NO: 363703 - DNA, 201 bp, Homo sapiens
ccatttagcaaatgaaaaaaccaaggctctgaggtgagttgtttgcccagagtcacccagtgctgtttgaacccactcacataaccaaccaataccattaygtaatttttgaggtcttttatctctgtgatccacttaaaaattatccaagtatctttatttgtactaagcctccataatgagaaacagtgttccagatgg

SEQ ID NO: 363704 - DNA, 201 bp, Homo sapiens
ttccagagccctttccctctcagggccttgcttaccaagtgactggttcccatttactaggagctcttaggtcattgaagatgttgcgtactccccccagygagggctgccttttgatcacagccgccagaagcctcaaggaaggagcagagctggaaacagacgccaggccattgcttctgttcctctggggcagaccca

SEQ ID NO: 363705 - DNA, 201 bp, Homo sapiens
tataaagtcaaggtctcactatattgcccaggctggtctcaaactcctgggctcaagtgatcctcctgccttggcctcccagagtgctgggattataggtrtgagacactgtgcccagctgtagctgctactttatatcccaggtctatctccaatggagcccaagcttcctgaggccacctgttgtatctttctcattca

SEQ ID NO: 363706 - DNA, 201 bp, Homo sapiens; identical to SEQ ID NO: 78519

SEQ ID NO: 363707 - DNA, 201 bp, Homo sapiens
cctcccgggttcaagcgattctcctgcctcagcctcccgagtagctgggattataggtgtgcgccaccacgcccggctaatttttgtatttttagtagagacggggtttcactatgctggtcaggctggtctcaaactcctgaccttgtgatccgcctgcctcggcctcccaaagtgctgggattacaggcgtgagccact

SEQ ID NO: 363708 - DNA, 201 bp, Homo sapiens
attgtaggttttaaaaattccgtatattttgatatcttgtgttcctcttgacctttaatttgctaaatagttgcaaagaatgaaggtaacctgcatcatcwtcttaaaaaccaactctatctaattataatagtttgtctatctctgaaaaatagtgatgtgttcattctgaaatcagaactaccggatgcagctgcattt

SEQ ID NO: 363709 - DNA, 201 bp, Homo sapiens
cactgaaattgtgaaaacatctccccttttttcctgtttctaattctagctatgaggattatatacagaagtagtcctggatttgatttttttttttttttgatgattgttttttgatagttgttgactacaaatcatttaaacgtctgaaaggggaaaggttttccttaaaaatggatgacaaaggagaataaaaaggta

SEQ ID NO: 363710 - DNA, 201 bp, Homo sapiens
ccactgaaattgtgaaaacatctccccttttttcctgtttctaattctagctatgaggattatatacagaagtagtcctggatttgatttttttttttttttgatgattgttttttgatagttgttgactacaaatcatttaaacgtctgaaaggggaaaggttttccttaaaaatggatgacaaaggagaataaaaaggt

SEQ ID NO: 363711 - DNA, 201 bp, Homo sapiens
ttatccttaaactgctcataatgtatgatgcacgtggttttacgtgtacagcctggtaccattgttcttaggcacatttcagtgccagaactcttaatacycaggaagaagcaaaaagaaagatggaggtgcagctagaggttgtggcctttgaacgattcattctgccttaataagagtggtctggctgagctcggtggc

SEQ ID NO: 363712 - DNA, 201 bp, Homo sapiens; identical to SEQ ID NO: 78523

SEQ ID NO: 363713 - DNA, 201 bp, Homo sapiens
gactatatcaacgctagtttgataaaaatggaagaagcccaaaggagttacattcttacccaggtaagcagattgtctgaattttctatttaatgtcaatktaagagtttgagagtgctgttatccacacctcaaataaaatctgccacatcctttagaaggtcaggatttcagcataccaaaaagcagcaaggaaggggg

SEQ ID NO: 363714 - DNA, 201 bp, Homo sapiens
  misc_feature (1)...(201): n = A,T,C or G
cgcaggtggaggcagacagtggagatggagacagttcagagtatcaggtatggccgagaggggctcctgcccagggtgactgaggaccctgaacacggggnaaaaccagttacctgctactgttggtaacagagcgacaacagttgttagaagtttcgtaattgtaataattgacatgtttgaattctaagtatcttccat

SEQ ID NO: 363715 - DNA, 201 bp, Homo sapiens
cattacctcctggatgctgggctgtcccctctagcccatccttggctttggcacacaggcttgtgctcatgccaggatcattttcatcatttatttgtagycaagttcactgccagggcacatctctgcaacatagaccctcactcccaccttgtgcctagcagaggaccctctatagctagtaagaagtaatgggttttg

SEQ ID NO: 363716 - DNA, 201 bp, Homo sapiens; identical to SEQ ID NO: 78538

SEQ ID NO: 363717 - DNA, 201 bp, Homo sapiens
aagtggagttggtgaccaagcaagattctatttttttctggagacagtctccctctggagtgcagtggcatgatctcagctcactgtaacctctgcctccygggtttaagcgattctcttgcctcagcctcccaaagtgctgggattacaggcacctgccaccatgctgggctaatttttatatttctagtagagttgggg

SEQ ID NO: 363718 - DNA, 201 bp, Homo sapiens
tttgggactctcatctcagctgggactctgagcgtgacacaagggtgatggttccctgtcctctgccagtcatgacaggggtggtctcagcatgggccctyggagagcccttctgcagtgggaccctctccccactcagagctgggctggggttgggagggggaggtctggagtgtgcttcctttccaccctgccctgagc

SEQ ID NO: 363719 - DNA, 201 bp, Homo sapiens
cctttgggactctcatctcagctgggactctgagcgtgacacaagggtgatggttccctgtcctctgccagtcatgacaggggtggtctcagcatgggccyttggagagcccttctgcagtgggaccctctccccactcagagctgggctggggttgggagggggaggtctggagtgtgcttcctttccaccctgccctga

SEQ ID NO: 363720 - DNA, 201 bp, Homo sapiens
aatttagggtaagttccttatcagacagagcaaaagcacagtactgggaccttgtgttctgtcatgtgttctgctgccgccgccagtgtggacagcctgaktctggccccctttcctttggatgtgctgtccctgctgcctggatccttcccgctctctacttcacctaggtgtggtgtccctccctgggcttacttactg

SEQ ID NO: 363721 - DNA, 201 bp, Homo sapiens
atctgagacatgaggtcattaggccacaccatctgtctgttggctgcactgccgtgacatctgcctgtcccaacatgctgggacactacgatgtgtgagargccagtgaaagaaaaccccacagacatgccattcttgaagacttcagtttgctcattctataaatgattccttcttagccacagtttatcctctccttcc

SEQ ID NO: 363722 - DNA, 201 bp, Homo sapiens
cagtcctccgactcgcccccaatcctggaggctatccgcaccccggagatcagaggtggctgggcagtggggactggggtggtgtcaggcgctgacatagkgagcggtcactgcagacaactggaggctttggggagagtctctgacaacctccaccacaattccccgggagggaagagagctctagcaaggagggatgca

SEQ ID NO: 363723 - DNA, 201 bp, Homo sapiens
gtaaatagtgccctgctgctgcctgtgtccctgctgtcattcaggtggacatagactggtaggcatcaccctgaactgtcaggaggccattgggaacctgytggtctcagggaataaggtgggttgggctggaggtttcaaatgaaccctgcgctgtcatcttttctgagcacagagggtacaggccggctcttcttcgaa

SEQ ID NO: 363724 - DNA, 201 bp, Homo sapiens
tcagattgaagaatggggcccatttgacttggtgattggcggaagcccatgcaacgatctctcaaatgtgaatccagccaggaaaggcctgtatggtgagyatccttctctctggcagtccctggagagcctatgtcacctgaccactggcccaggtgcagcagcctgagaaggagccacttgcttctggccaagttactg

SEQ ID NO: 363725 - DNA, 201 bp, Homo sapiens
ggaatcttaagcattaggttagggtcagaagtggagttggtgaccaagcaagattctatttttttctggagacagtctccctctggagtgcagtggcatgmtctcagctcactgtaacctctgcctcccgggtttaagcgattctcttgcctcagcctcccaaagtgctgggattacaggcacctgccaccatgctgggct

SEQ ID NO: 363726 - DNA, 201 bp, Homo sapiens
acatgtgtctcccgcagcgctgtcatggcgtcctgcggcgccggaaggactggaacgtgcgcctgcaggccttcttcaccagtgacacggggcttgaataygtaagccacaggctcccgcctctaccaccacagatcccaggggcacagggtgttggaaagctctggaattctcagaaagagtaatagaagtaaagacacg

SEQ ID NO: 363727 - DNA, 201 bp, Homo sapiens
ccacagagaatattaggactgagcctcaggggtccacaccagggacacctgcttggaaaatgtatacaaacacagggttcgcctaattgccttcattcagrgtatcctccttttccacagtggaagtgtcgtacctaacaaggttctggatatctgtgtgttgagactctgccatttctatttttctgcttttttctttcc

SEQ ID NO: 363728 - DNA, 201 bp, Homo sapiens
gcagatcccttgtggtcgggagttcaccagcctggccagcatgatgaaaccccgtctctactaaaatacaaaaattagccaggtgtggtgctgcatgcctstaacaggctgaggcaggagaatttcttgaatccaggaggcggaggttgcagtgagccaagatccacgtcattgccctccagcctgggcaacaagaaagga

SEQ ID NO: 363729 - DNA, 201 bp, Homo sapiens
tccctgccactgggtccaggtgtttctgtgtggagtgcctggaggtgctggtgggcacaggcacagcggccgaggccaagcttcaggagccctggagctgytacatgtgtctcccgcagcgctgtcatggcgtcctgcggcgccggaaggactggaacgtgcgcctgcaggccttcttcaccagtgacacggggcttgaat

SEQ ID NO: 363730 - DNA, 201 bp, Homo sapiens
gcccaggaagtcaggctgcagtttgctaagatcatgccactgcactccagcctgggtgacacactgagaacctgtctcaaaaaaaaaaaaaaaaaaaaaaaccaaaacagaaacaaaaaagaaagaaaaaaacgaggccaggtgcagtggctcatgcctgtaatcccagcactttgggaggctgaggcaggcagatccctt

SEQ ID NO: 363731 - DNA, 201 bp, Homo sapiens
gcaagccggcagggcctgcccttctctggtctccgatttcactggtgtttctctctggctgccaggatcgcttccttgagctgttttacatgtatgatgaygatggctatcagtcttactgcactgtgtgctgcgagggccgagagctgctgctttgcagcaacacgagctgctgccggtgagcactgggccctgtggggt

SEQ ID NO: 363732 - DNA, 201 bp, Homo sapiens
agcccaggaagtcaggctgcagtttgctaagatcatgccactgcactccagcctgggtgacacactgagaacctgtctcaaaaaaaaaaaaaaaaaaaaaaaccaaaacagaaacaaaaaagaaagaaaaaaacgaggccaggtgcagtggctcatgcctgtaatcccagcactttgggaggctgaggcaggcagatccct

SEQ ID NO: 363733 - DNA, 201 bp, Homo sapiens
gagcccaggaagtcaggctgcagtttgctaagatcatgccactgcactccagcctgggtgacacactgagaacctgtctcaaaaaaaaaaaaaaaaaaaaaaaccaaaacagaaacaaaaaagaaagaaaaaaacgaggccaggtgcagtggctcatgcctgtaatcccagcactttgggaggctgaggcaggcagatccc

SEQ ID NO: 363734 - DNA, 201 bp, Homo sapiens
ttgactagcaccttttttattaaaggaaaaaatagttaagctatgctcatttgagaaaattggaaagtgttaaagaagaatatgccacctgctaacattttgaccagtaccatatttctcccattataagataactctggtttctagaaatccaggacttgtcttacaatccatagatttaaaggccaggcctagtggctc

SEQ ID NO: 363735 - DNA, 201 bp, Homo sapiens
tgagactgcaggtgcacaccactgtgtttggctcttaaaagtttttgtagagatggggtcttgctgtgttgtccaggctagtcgaactcctgggctcaagygatcctctcaactcccactcccaaagtgctgggaatataggcctgagccactacgtctggcctttcagttctgattagcatccctgaatggccattttct

SEQ ID NO: 363736 - DNA, 201 bp, Homo sapiens
ttctttctttttttttctttttttttgagatgcagtctcactgtgttgcccaggctggagtgcagtgacgtgatctcagcacactgcaacctctgcctccstggtccaagtgattctcctgcctcagcctcctgagtagctgtgactacaggcacccaccaccatgcctggctaatttttgcatttttagtagagatgggg

SEQ ID NO: 363737 - DNA, 201 bp, Homo sapiens
ggcctggaggtctcattatgcctaggcttttataatatttttgccaaccaaaggtggaacaaaaagcaaaggcaagtgacttggaaaactcggtttcagckgggatttatgccctgaagttttttactcgttctctatctaatcctggccctacctcttagatgggctatatgaccttggagaataacctagtctggatgt

SEQ ID NO: 363738 - DNA, 201 bp, Homo sapiens
gtaattttcctgcctcagcctcccaagtagctgggcttacaggcgtgcaccaccatgcccagctaacttttgtatttgtatttgtatttttttttttttttgagatggagtcttactcttgttccccaagctagagtgcggtggcgcgatctcggctcgctgtaacctccacctcccaggtttaagcggtactcctgcctc

SEQ ID NO: 363739 - DNA, 201 bp, Homo sapiens
ctacagggagccgtgatcacgccactgcactccagcctgggtgaccaagtgagaccctgtctctaagatagatggatggatggatggatggatggatggatggacagatagaagataaactgcgaggctagcacgggttgtctggcaggggctggtatgtctccacgatggagcccgaggcagggaggcccggtgcatatg

SEQ ID NO: 363740 - DNA, 201 bp, Homo sapiens
tctgttttccttctcgagatttgttttctgtccctgcagtactgctttttccagaatgtcatataaatggaatcatacattattattatttttgagacagmatctcactctgttgcccaggctggagtgcagtggcacgatttggcacattgcaacttccgcctcctgaattcaagcaggaaccatacattatatagccct

SEQ ID NO: 363741 - DNA, 201 bp, Homo sapiens
attatgatgttatgccccaggaggtgccatccatagagaacacagtgtgagtggtggcccctggggtttgcagcacagcaatcctgtgacttagcaaggayggatcagattcaacatatgtggagggtaggacatttgctgatgcattggatgtgtaggctatgaggtggaaagagcagtgagacctgatgcagatctgat

SEQ ID NO: 363742 - DNA, 201 bp, Homo sapiens
tatggtggcacgcccctgtagtccagctactcgggaggctgaagtgagaggaccacttgacctcaggaggtggaggttgcagtgagccgagattgcgccaytgcattccagcctgggcaacagtgagaccctgcctcatacaataatagtaatactttttaaaaggcagggtaatatttccccagatgttgtcagcagcta

SEQ ID NO: 363743 - DNA, 201 bp, Homo sapiens
atggagttccgagcccaggtcttgcccgcgcctccagctttccctgctcccttttcctcccctggtctaggagagaggctcgctgggcctccgtgtttccwccctcccccgaagctgggaagtgtttgaattaaagggaattaagggcagagtatgaactttgagttgcctcctgagttctggatgcggtgggttgtggca

SEQ ID NO: 363744 - DNA, 201 bp, Homo sapiens
tttcctagaccagctcttatgccggctgcctcacctccaggctcagacgccttttccagtttcagctaaatgtgaaacttttcagaggtatgaggttgtgygctcttcctcacacaccagtccttagcccaggcacatactactaattgagtggagttttttcttttaaatcatgaattttcaggatgatttccagtttca

SEQ ID NO: 363745 - DNA, 201 bp, Homo sapiens
ttaatttttttttttttttttttggagatggagtttcactcttgtcgcccaggctggagtgcaatggcgggatctcggctcaccacaacccccgcttcccrggttcaagcaattctgactcagcctcccgagtagctgggattacaggcatgcaccaccattcccgactaattttgtatttttagtagagatggtgtttct

SEQ ID NO: 363746 - DNA, 201 bp, Homo sapiens
ggctgacaatagtgtaggggagatcccaggccacgccacggagaaaagcccctattagcaaggccgttccccagactggtgcctgcccccacaaaacagactcctggctgtttcctctacaggccgaagatcaagctcgcgactctccaagagggaggtgtccagtctgctaagctacacacaggtatggtctctgctctc

SEQ ID NO: 363747 - DNA, 201 bp, Homo sapiens
cagggagccgtgatcacgccactgcactccagcctgggtgaccaagtgagaccctgtctctaagatagatggatggatggatggatggatggatggatggacagatagaagataaactgcgaggctagcacgggttgtctggcaggggctggtatgtctccacgatggagcccgaggcagggaggcccggtgcatatggca

SEQ ID NO: 363748 - DNA, 201 bp, Homo sapiens
tagagatggtgtttctccatgttggtcaggctggtctcgaattccccacctcaggtgatccacccgcctcggcctaccaaagtgctaggattacaggcatragcctctgtgcctggctaattttaaaattttttatagagataggctctcggtatgttgcccaggctggtctcaaattcctaggctcaagtgtaatcccaa

SEQ ID NO: 363749 - DNA, 201 bp, Homo sapiens
tctcctgcctcagcctccctagtagtagctgggactacaggcgcccgccaccttgcccggctaattttttgtatttttagtagagacggggtttcaccatkttcgccaggatggtcttgatctcctgacctcgtgatctgcccgcctcggcctcccaaagtactgggattacaggcgtgagccaccatgccgggcccactg

SEQ ID NO: 363750 - DNA, 201 bp, Homo sapiens
ggtgtgatctcagctcaccgcaacctctgcctcccaggttcaagcgattctcctgcctcagcctcccaagtagctgggattacaggcatgtgccaccaccmccagctaatttttgttggtttgtttgttgttgttgttttagtagagatggggtttctccatgttgatcaggctggtctcgaactcccgacctcaggtgag

SEQ ID NO: 363751 - DNA, 201 bp, Homo sapiens
acgatctcggctcactgcaacctccgcctcccaggttcaagtaattttcctgcctcagcctcccaagtagctgggcttacaggcgtgcaccaccatgcccrgctaacttttgtatttgtatttgtatttttttttttttttgagatggagtcttactcttgttccccaagctagagtgcggtggcgcgatctcggctcgct

SEQ ID NO: 363752 - DNA, 201 bp, Homo sapiens
tctggtttctagaaatccaggacttgtcttacaatccatagatttaaaggccaggcctagtggctcatgcctgtaatcgcagcactctgggaggctgaggygagtggatcacttgaggcgatcacctggacaacatggtgaaaaatagaaaaattagcctggtgtgcttggcatgtgcctgtggtcccagctacccgggag

SEQ ID NO: 363753 - DNA, 201 bp, Homo sapiens
cagtatattgtaattgctctattttattattagttgttaatctgtgcctaatttataaattaaactttatcataggtatgtagatatagacaaaaacagagcacatatagggttccatcttccaaggtgtcaggcagccatggggggtcttgcatgtatcccccctggataaggggagactactgtatagcaaactgtctt

SEQ ID NO: 363754 - DNA, 201 bp, Homo sapiens
cctcaactgccaaaagccacaaccctgtttttcttacagatggctgtttgtcttgtggcaggaaaaaccccgtgtccttccaccctctctttgaggggggrctctgtcagacatgccgggtaagtcctcctactactgccctggaccttcctccccttgcctcctctaactcccctctccttcccaacagcacctgtgtgg

SEQ ID NO: 363755 - DNA, 201 bp, Homo sapiens
  misc_feature (1)...(201): n = A,T,C or G
ctcatgccttcttcttttctcaatagaacaaatggcttcagatgttgccaacaacaagagcagcctggaaggtaacgttctctccctcccagtcatccccntcacaccctggctagggctctaggcctgccttgtcctggctcatccaccctgtcagggtttaacccagagctctgttccttaacctcaggccaaggccta

SEQ ID NO: 363756 - DNA, 201 bp, Homo sapiens
tacccggctccctgacctcatctcatgccttcttcttttctcaatagaacaaatggcttcagatgttgccaacaacaagagcagcctggaaggtaacgttytctccctcccagtcatccccctcacaccctggctagggctctaggcctgccttgtcctggctcatccaccctgtcagggtttaacccagagctctgttcc

SEQ ID NO: 363757 - DNA, 201 bp, Homo sapiens
acagtatattgtaattgctctattttattattagttgttaatctgtgcctaatttataaattaaactttatcataggtatgtagatatagacaaaaacagagcacatatagggttccatcttccaaggtgtcaggcagccatggggggtcttgcatgtatcccccctggataaggggagactactgtatagcaaactgtct

SEQ ID NO: 363758 - DNA, 201 bp, Homo sapiens
acagggagccgtgatcacgccactgcactccagcctgggtgaccaagtgagaccctgtctctaagatagatggatggatggatggatggatggatggatggacagatagaagataaactgcgaggctagcacgggttgtctggcaggggctggtatgtctccacgatggagcccgaggcagggaggcccggtgcatatggc

SEQ ID NO: 363759 - DNA, 201 bp, Homo sapiens
ttttttttggagatggagtttcactcttgtcgcccaggctggagtgcaatggcgggatctcggctcaccacaacccccgcttcccgggttcaagcaattcygactcagcctcccgagtagctgggattacaggcatgcaccaccattcccgactaattttgtatttttagtagagatggtgtttctccatgttggtcaggc

SEQ ID NO: 363760 - DNA, 201 bp, Homo sapiens
tacagggagccgtgatcacgccactgcactccagcctgggtgaccaagtgagaccctgtctctaagatagatggatggatggatggatggatggatggatggacagatagaagataaactgcgaggctagcacgggttgtctggcaggggctggtatgtctccacgatggagcccgaggcagggaggcccggtgcatatgg

SEQ ID NO: 363761 - DNA, 201 bp, Homo sapiens
atggtctcgagctcctgacctcgtgatctgcccacgtcggcctcccaaagtgctgggattacagacctgagccaccgcgcctggccttttttttttttttytttttttagattcaagaagtacatgtgcttgtttgttgcatgggtttattacttactggtggggattgggcttctggtgtatccattaccgaaagagtga

SEQ ID NO: 363762 - DNA, 201 bp, Homo sapiens
caccaccatgcccggctaattttttgtgtttttagtagagacggggtttcatcatgttagccaggatggtctcgagctcctgacctcgtgatctgcccacrtcggcctcccaaagtgctgggattacagacctgagccaccgcgcctggccttttttttttttttttttttttagattcaagaagtacatgtgcttgtttg

SEQ ID NO: 363763 - DNA, 201 bp, Homo sapiens
ttcagggatgggggcctggaggtctcattatgcctaggcttttataatatttttgccaaccaaaggtggaacaaaaagcaaaggcaagtgacttggaaaastcggtttcagcggggatttatgccctgaagttttttactcgttctctatctaatcctggccctacctcttagatgggctatatgaccttggagaataacc

SEQ ID NO: 363764 - DNA, 201 bp, Homo sapiens
agtggaaacggggtttctccgtgttggtcaggctggtcttgaacccctgacctcgggtgatctgcctgcctcagcctcccaaagtgctgggattacaggcrtgagccaccatgcccggcctaaattttttttttgtaatgttggggtctcactttgttgcccaggctgatcttgaactcctgggctcaagcaatcctcctg

SEQ ID NO: 363765 - DNA, 201 bp, Homo sapiens
tgtatttttagtggaaacggggtttctccgtgttggtcaggctggtcttgaacccctgacctcgggtgatctgcctgcctcagcctcccaaagtgctgggrttacaggcatgagccaccatgcccggcctaaattttttttttgtaatgttggggtctcactttgttgcccaggctgatcttgaactcctgggctcaagca

SEQ ID NO: 363766 - DNA, 201 bp, Homo sapiens
caattaagccatcttgtgtacaatgctgcaccaaataccaggacaggatgaagccagctaaacagccctggcctcgaaaccctaagacagacgggcaagcyctccagatgaggggtccttggcgtcctggcctgcttgttggagttgggggactcagagggagtatgggggtaattcttgtgttttctcaagatgaggtta

SEQ ID NO: 363767 - DNA, 201 bp, Homo sapiens
cgagctcctgacctcgtgatctgcccacgtcggcctcccaaagtgctgggattacagacctgagccaccgcgcctggccttttttttttttttttttttttagattcaagaagtacatgtgcttgtttgttgcatgggtttattacttactggtggggattgggcttctggtgtatccattaccgaaagagtgaacgttgt

SEQ ID NO: 363768 - DNA, 201 bp, Homo sapiens
ttaccacgtgaatactgtggtttttcccaacatgacatttatgtaaggactgcaactgcgtacgttatacatttcatgtacgcccgtgtgaagagaccacmaaacaggctttgtgtgagcaataaagctgtttatttcacctgagtgcaggtgggctgagtccaaaagagagtcagcgaagggagataggggtggggccat

SEQ ID NO: 363769 - DNA, 201 bp, Homo sapiens
ttatctgttggtagaagaactaagctcccttaaagaaatctagagagcagaagagaacaggaaatgagagaccacaaactaaagggagaaaatgaactttycaataaggcttgcaggcttgctctagcagttgtagtgattaaaagtagtggcaatggctgggtgcagtggctcacacctgtaatcccagcactttgggag

SEQ ID NO: 363770 - DNA, 201 bp, Homo sapiens
caaagtgaccccccttcctgcattgtgaggtttaattaatgcaattaacatttacgaagtgctctgaaacagctctgctgctggtatcagcctggaggaartgagtgacatcagttctcagcattactgctgggttggggcgagtccctgagcctcctctgagtctaattgggggttgccacctacccctctgtctgccac

SEQ ID NO: 363771 - DNA, 201 bp, Homo sapiens
ggcttgctctagcagttgtagtgattaaaagtagtggcaatggctgggtgcagtggctcacacctgtaatcccagcactttgggaggctgaggtgggcggmtcgcctgaggtcaggagttcgagaccagcctggccagcatactgaaaccctatctctactaaaaatacaaaaattagccgggcgtggtggcatgtgcctg

SEQ ID NO: 363772 - DNA, 201 bp, Homo sapiens
tgatacagtcatgaggaactgttcattttaccatagcagggagtggaggaaatgagctgctgtgtgctcagcatcatttatgcttctgtgtctctctggcscccacaggctacctagtcctcaaagagttgggcataaaggtaggaaagtacgtcgcttctgaagtgtgtgaggagtccattgctgttggaaccgtgaagc

SEQ ID NO: 363773 - DNA, 201 bp, Homo sapiens
acaaaaattagccgggcgtggtggcatgtgcctgtaatcccaaggaagctgaggcaggagaatcacttgaacccaggaggtggaggggttacagtgacccragatcatgccattgcactccagcctgggcaacagagcaagaccgcatctcaaaaaaaaaaaaaaaaaaggagtggtaaaggataaataccaaacaaaagt

SEQ ID NO: 363774 - DNA, 201 bp, Homo sapiens
taaataccaaacaaaagtgagcctcaaaacatattacatatatatgggaagttcaaataagagatagagttgggatgtattcataggtgtctggctttacytacggggaaaaatattaggtccctatctcataccatatacaaataatcaaataattatgttgattaaacctgagtggcctaattcaaataaatgtttctc

SEQ ID NO: 363775 - DNA, 201 bp, Homo sapiens
taaggtagttaccccccaaaccttccttctgagtatgaatttttatagttagagaagaaatgctgcagagaaatggcttaaacatcaataattgatgttgyattatgcaggtttcttgttttcactttacataactttgtctaacaataagtactgcactctttgccccctattgtggaagcaggtaatttagtcaaccag

SEQ ID NO: 363776 - DNA, 201 bp, Homo sapiens
gggtgacttaactcatctgagtctgttgaaggcagggggataataagacctgccccaggatggggtgggggttaaaggaggtggcagacaggctgggtgcrgtggctcacgcctgtaatcccaggccaaggcgagtagatcacctgaggtcaggagtttgagaccagcctggccaacatggtgaaaccacgtctcttctaa

SEQ ID NO: 363777 - DNA, 201 bp, Homo sapiens
gctggtcttgaactcccgacctcatgtaatccgccctcctcggcctcccaaagtgctgggatcacagacgtgagccactgtgcctggctttttttttttttgagagggagcctgagcctgtactgttgcccaggctggagtgcagtggctcactgcgacgtccacctcccgggttcaagcgattctcctgcctcagcctcc

SEQ ID NO: 363778 - DNA, 201 bp, Homo sapiens
gacagtgttcagcctacagtaagtagggccctgggaactgttagctacttaatgttacagtggcagtgtgggatgatgcagttctaaatccagcatgtctrccactctggataggtcatattagataaagcagttggcttgtgatgggggccatgttatctggaaatgccagccttgaatcatgaagtcagtgagatacat

SEQ ID NO: 363779 - DNA, 201 bp, Homo sapiens
cgttgacaaacatctgagtatattttggtgtcatgcacagtctgcagatagccacttgtctggtttttccctgtttggacacattttttttttttttttttgagatggagtttcgctcttgttgcccaggctagagtgcaatggcacgatcccgagtagctgggattacaggcatgtgccaccaccccggctaattttgta

SEQ ID NO: 363780 - DNA, 201 bp, Homo sapiens
tgacctccaagtggggacttgggagatgaccttggtgtttgattggttcctactcctccccccacgtgacttcctggtgttgggcttccctctcccacatrattgttctgtcccatcctcaaatacagagactaggagacattcgtgataagtaatcacgacgagaaaaggcaactagtctttttaattttagtactggat

SEQ ID NO: 363781 - DNA, 201 bp, Homo sapiens
acctctgactactgccccgcacccaagcgcctcaagacaaattgctataacaacggcaaagaccgaggggatgaagatcagagccgaggtgattgttgggkacctgggatcatgggacagatgggaggaggacgctgcagatcaggaattgatctgtacccggctccctgacctcatctcatgccttcttcttttctcaat

SEQ ID NO: 363782 - DNA, 201 bp, Homo sapiens
gggattacaggcatgtgccaccatgcccggctaattttgtatttttagtggaaacggggtttctccgtgttggtcaggctggtcttgaacccctgacctcrggtgatctgcctgcctcagcctcccaaagtgctgggattacaggcatgagccaccatgcccggcctaaattttttttttgtaatgttggggtctcacttt

SEQ ID NO: 363783 - DNA, 201 bp, Homo sapiens
ttgtttatgcttattcaagcattgctgcacgaagactccttacacatgtatgtatttatgtgttgttaggatcccttttttctatgtccattattacattktactttgtatagaagggatctcactatggtgcccaggctagtctcaaactcctggcctcaagcgatcctcctatctcagcctcctgagtagctaggacta

SEQ ID NO: 363784 - DNA, 201 bp, Homo sapiens
gcatagcatggtcttgtcctgggcccgcattctctctggaccctcctaccaagccacggctgcagtctaattacctttcacagagaacaagactcgaagaygcacagctgacgactcagccacctctgactactgccccgcacccaagcgcctcaagacaaattgctataacaacggcaaagaccgaggggatgaagatca

SEQ ID NO: 363785 - DNA, 201 bp, Homo sapiens
tttatccaggatgatcctgaatttctgattgcaagtgatctgcccgccttggcctcccaaagtgctgggatcacaggcatgagcgagccactgcgcttggycagatttttatttttcaatcccaattggcaggtgccatttcagctggccatgtctgtctgctgtgacaggcagagcaggacctgctgggaattgtcgggc

SEQ ID NO: 363786 - DNA, 201 bp, Homo sapiens
gcctcctgagtagctgggattacaggcatgtgccaccatgcccggctaattttgtatttttagtggaaacggggtttctccgtgttggtcaggctggtctygaacccctgacctcgggtgatctgcctgcctcagcctcccaaagtgctgggattacaggcatgagccaccatgcccggcctaaattttttttttgtaatg

SEQ ID NO: 363787 - DNA, 201 bp, Homo sapiens
tgcctctgctggtgggaccacttcttgggagagtcagccacccctgctgccccacaccccacccagctttctagcagctggtctcaactctgaatgttggraaaataggagcaggcatacgaaggctgtgccagctctatctggcttccccggccactttcttgctgatggtcacgtgcatataatttgtattgaatctga

SEQ ID NO: 363788 - DNA, 201 bp, Homo sapiens
aagtgattctcttgcctcagcctcctgagtagctgggattacaggcatgtgccaccatgcccggctaattttgtatttttagtggaaacggggtttctccrtgttggtcaggctggtcttgaacccctgacctcgggtgatctgcctgcctcagcctcccaaagtgctgggattacaggcatgagccaccatgcccggcct

SEQ ID NO: 363789 - DNA, 201 bp, Homo sapiens
tttccttttgagacagagtttcgctctttgcccaggctggagtgcaatggcatgatcttggttcaccacaacctccgcctcccgggttcaagtgattctcytgcctcagcctcctgagtagctgggattacaggcatgtgccaccatgcccggctaattttgtatttttagtggaaacggggtttctccgtgttggtcagg

SEQ ID NO: 363790 - DNA, 201 bp, Homo sapiens
gggtcaagtgatcctctcacctcagtcacctcctgagtagctaggactacaggtgagagccaccaggcttggctaattttaatttttttttttttttttttggagatggagtttcactcttgtcgcccaggctggagtgcaatggcgggatctcggctcaccacaacccccgcttcccgggttcaagcaattctgactcag

SEQ ID NO: 363791 - DNA, 201 bp, Homo sapiens
atcctcccacttcagtctccaaagtagctgggaccttagtcacgtgccaccacgcccatctaatttttaaaattgtttgtagaaacattaaagtctcactrtgttgccccagctggtctcaaactcctcggctcaagcaatcctgcctcagtctccgaaagtgctgggactacaggtgtgagcctgtgcgcccagctgtct

SEQ ID NO: 363792 - DNA, 201 bp, Homo sapiens
tcccgggttcaagcaattctcctgcctcaaccttccgagtagctgggattacatgcgcacaccaccacgcctggctaatttttgtatttttaattgagacrgggtttcatcatgttggcaaggccggtctcaaactcctgacctcaagtgattcacccgcctcggcttcccaaagtgttgggattgtaggcgtggctgtta

SEQ ID NO: 363793 - DNA, 201 bp, Homo sapiens
ggtgactgaggaccctgaacacggggaaaaaccagttacctgctactgttggtaacagagcgacaacagttgttagaagtttcgtaattgtaataattgayatgtttgaattctaagtatcttccatatgcaccacggacctttctttaccttaatcctctcccagacataagtcaaatgccagtatttaccacgtgaata

SEQ ID NO: 363794 - DNA, 201 bp, Homo sapiens
tctcactgggacccttttacaggtgatagaactgaggctctggaagatacaggtactattacgtcttggtggtgagcattttctttctctttttttctttyttttttttttttttgagacagttttgctttgtcacccaggctggagtgcagtggtgtgatctcagctcactgcaacctctgcctcccgggttcaagcaat

SEQ ID NO: 363795 - DNA, 201 bp, Homo sapiens
ctcctgtagaaggaggcatggaaacataataaccttctgccacttagtgaagtgtggacagaggtgagggtcctggggtagcttggaggatttttgttggycaccttgcccgtgtacttggctaagcagccagtcttagggtgccatgtctgtgtctggaattaaatgggttaatgctttcaacatttgaactcccagtag

SEQ ID NO: 363796 - DNA, 201 bp, Homo sapiens
aatcctattccccaagactcactcccccatctggctaggtagggatgcttgtttgtgggttttataaaggtcctatctacccagccagggatgcaactccrtgctgacctggtgatatgaagggaaggcagggttgcctactggttaaaggacctggattctgaaattacagccatttgctgtttacagggtgtgggcatg

SEQ ID NO: 363797 - DNA, 201 bp, Homo sapiens
tggacgatcagttacattgctaaatctctaatatggtagtcccctcttatctgtcattttgctttccacgatttcagttgcttgcagtcaactgccgtctraaagtattaaatggaaaatattaaatggtaaatcccagaaataaacaatttatacattttaaattgagtgccattctggtagcatgatggaatcttgcac

SEQ ID NO: 363798 - DNA, 201 bp, Homo sapiens
ctgttttccttctcgagatttgttttctgtccctgcagtactgctttttccagaatgtcatataaatggaatcatacattattattatttttgagacagcwtctcactctgttgcccaggctggagtgcagtggcacgatttggcacattgcaacttccgcctcctgaattcaagcaggaaccatacattatatagccctt

SEQ ID NO: 363799 - DNA, 201 bp, Homo sapiens
tgtggcttctagaaggtaccctggtttgagatgctgaggtgggaggatcccttgaggccaggagtttgaggccagcctgggcaacatagccagactctgtytctacaaaaaattagccacacctggtggcacacacctgtgggcccagctggaggatcactgaagccctgggagttgaagcctacagggagccgtgatcac

SEQ ID NO: 363800 - DNA, 201 bp, Homo sapiens
tgtagttagtggtccctggatgggcagcaccctgctggaaggaatcggagggctccccttggtaacttcagtgttggtttgggtcctgtcacgtgcctggmccagggctctgttgtcttaggaataaaatcagtggagaagatgaacgatactgacggactgagagcaaatccctgtggctgacaatagtgtaggggagat

SEQ ID NO: 363801 - DNA, 201 bp, Homo sapiens
tgcagaactaagtgagatcctttaccttttcccattggggtggagagtgctgagacaaagggacaaggactggggccagtggcatcctgctcttaaagtcrtagacataacccccaccccttgcaaaggatggggggaggggaagacggtagctgggagctgcaggggtctaagggaggagcaagggaggtggggttgaga

SEQ ID NO: 363802 - DNA, 201 bp, Homo sapiens
tgacctcaagtgatctgcccaccttggcatcccaaaccgctgggattagagacatgaaccaccgtgcctgggcagtcttggtcattttaaaaggacatacrtcttagctgttacactttattttttatgtgcagttatcttgaacttgattttcattccacatgcataagtataattggagataaactagttaacaactac

SEQ ID NO: 363803 - DNA, 201 bp, Homo sapiens
tgtacctcttggagcctcaatggctgagagacctggcgaattgccagctcctctgcacggttttcagccgtgccagggttcattcactccctccttgccgrcttctcagcgtatggattttcaggggcctgatgaagaaatggttgtatgtagccttctgagttagcagagctgagagggaaggaaacagtagaaatgaat

SEQ ID NO: 363804 - DNA, 201 bp, Homo sapiens
gctggagtgcaatggcacgatctcggctcactgcaacctccgcctcccaggttcaagtaattttcctgcctcagcctcccaagtagctgggcttacaggcrtgcaccaccatgcccagctaacttttgtatttgtatttgtatttttttttttttttgagatggagtcttactcttgttccccaagctagagtgcggtggc

SEQ ID NO: 363805 - DNA, 201 bp, Homo sapiens
ctcagaaagagtaatagaagtaaagacacgttgtacctcttggagcctcaatggctgagagacctggcgaattgccagctcctctgcacggttttcagccstgccagggttcattcactccctccttgccggcttctcagcgtatggattttcaggggcctgatgaagaaatggttgtatgtagccttctgagttagcaga

SEQ ID NO: 363806 - DNA, 201 bp, Homo sapiens
  misc_feature (1)...(201): n = A,T,C or G
ggaaaagtttcttcagcggtctctgttctctttaacttcagtctttcctctttctttttgcctaggagccatatgggggtgccgttggtctctggtcaccnacatcctttgctctggcccaaactatgtgtccttctgtccacagtccctgagacggcgggcaacagcatcggcaggaacgccatggccgtcccctcccag

SEQ ID NO: 363807 - DNA, 201 bp, Homo sapiens
gggacagggctgttggctctgattttgccaaggggtaggtggccacaggaattgggcatagcagtgcctaggattctgctccaatgctgcccctcattctytgagttaccattgaccactccttggggctgccacacccttcaaggggttctcaaagtggatataggggaaggggctgggtgtttgtgatttctgtataaa

SEQ ID NO: 363808 - DNA, 201 bp, Homo sapiens
gcaccaccaagcccagctactttataaattcttttgtggaaatggagtcttgctgtgttgcccgggctggtatccaactcctggcctcaagcgatcccccygcctcggtctcccaaagtactgagaattacaggcatgaaccacggtgtctggctacatcttgcattttatggcaagctttttgttgccctcagggacagt

SEQ ID NO: 363809 - DNA, 201 bp, Homo sapiens
tgtacttaataacgaatagcccctcattttagggtggccattcctgagatttggggatggagggaggcacccctgccagcctctccttttcctgccttcaygaaggcagctctgaaagcttttctcaatcattgtccacgattagggagttggcaggaagaaccgcctttgttccctttcgaacggagtcttggttttgtt

SEQ ID NO: 363810 - DNA, 201 bp, Homo sapiens
caagagacccacagaaacctagctcagtgttgccaagggtggtttggaggggacagggtggccagggaggaggtaaatgacaacataacatgatggccacyggattgggcctcccaacaaagggatttgagacatcccagctgccacttattgggaccactaactgaatcagaaggaaagagcacgggcagttaggggtgc

SEQ ID NO: 363811 - DNA, 201 bp, Homo sapiens
ccacaccagggacacctgcttggaaaatgtatacaaacacagggttcgcctaattgccttcattcagagtatcctccttttccacagtggaagtgtcgtamctaacaaggttctggatatctgtgtgttgagactctgccatttctatttttctgcttttttctttccttcctttcaaatagatgtctgtggactttatcc

SEQ ID NO: 363812 - DNA, 201 bp, Homo sapiens
gggattgtattctgcagatgtgtgagcctatgccttcacactgtctgggaggaaggacaaaacttcctgtgttaaccagctacagcagattccactcacaygggggacaaaagtgctagaaagttctggatccatgggcagttggattttatgttatttcttagatttatcttttgggggcagaatcatcagtgtggactc

SEQ ID NO: 363813 - DNA, 201 bp, Homo sapiens
tccggggaagggcaaggggttctgcaggcctgaggctgtgcctgcctgcctccctttgaagacaaaggcctgggattgtattctgcagatgtgtgagcctrtgccttcacactgtctgggaggaaggacaaaacttcctgtgttaaccagctacagcagattccactcacacgggggacaaaagtgctagaaagttctgga

SEQ ID NO: 363814 - DNA, 201 bp, Homo sapiens
cccacaggaaagcatgaagggagacaccaggcatctcaatggagaggaggacgccggcgggagggaagactcgatcctcgtcaacggggcctgcagcgacyagtcctccgactcgcccccaatcctggaggctatccgcaccccggagatcagaggtggctgggcagtggggactggggtggtgtcaggcgctgacatagt

SEQ ID NO: 363815 - DNA, 201 bp, Homo sapiens
ctcctggtggcccgccatggtggtgtcttggaaggccacctccaagcgacaggctatgtctggcatgcggtgggtccagtggtttggcgatggcaagttcyccgaggtgagtccggggaagggcaaggggttctgcaggcctgaggctgtgcctgcctgcctccctttgaagacaaaggcctgggattgtattctgcagat

SEQ ID NO: 363816 - DNA, 201 bp, Homo sapiens
gctgctgtgtgctcagcatcatttatgcttctgtgtctctctggcccccacaggctacctagtcctcaaagagttgggcataaaggtaggaaagtacgtcrcttctgaagtgtgtgaggagtccattgctgttggaaccgtgaagcacgaggggaatatcaaatacgtgaacgacgtgaggaacatcacaaagaaaaatgt

SEQ ID NO: 363817 - DNA, 201 bp, Homo sapiens
ctttcacagagaacaagactcgaagacgcacagctgacgactcagccacctctgactactgccccgcacccaagcgcctcaagacaaattgctataacaayggcaaagaccgaggggatgaagatcagagccgaggtgattgttgggtacctgggatcatgggacagatgggaggaggacgctgcagatcaggaattgatc

SEQ ID NO: 363818 - DNA, 201 bp, Homo sapiens
tggtgtgcttggcatgtgcctgtggtcccagctacccgggaggctgaggtgggagaattggcttgagcccaggaggcagaggttgcagtgcgccgagatcrcaccactgcattcaagcctgggtgacagagcaagaccttgtctcaaaaaagaaaacagtccatacatttaatgtaatgttttttctgttttgttttgttt

SEQ ID NO: 363819 - DNA, 201 bp, Homo sapiens
tggtgcctgcatgaaaagatttaaccacaaccccccttccgaggcctctccctgcacaggcccctccttcctctgtcacataccacagcccaggacagctrtctggctatgaaagggcccagtgtgaaggggaatgtaggccctggctgggggaatccctgggtgtggcctggcgagcacctcctccccacccccccattc

SEQ ID NO: 363820 - DNA, 201 bp, Homo sapiens
tagtgctggctggggcttctatatcttggtggtagagttaattctgatatgtctgccttttgagtgggaggtgaccactgacattccctagggggaagagwtcctatttggtgcctgcatgaaaagatttaaccacaaccccccttccgaggcctctccctgcacaggcccctccttcctctgtcacataccacagcccag

SEQ ID NO: 363821 - DNA, 201 bp, Homo sapiens
ttgctaaaggcttcattagacactgaaatccttggtccttcatgtaggacacaagttaatgtccccatctttagggagataaaacaagaaatctagtgccktcttatataagatacagaggagatgagatagtgctggctggggcttctatatcttggtggtagagttaattctgatatgtctgccttttgagtgggaggt

SEQ ID NO: 363822 - DNA, 201 bp, Homo sapiens
tgctaaaggcttcattagacactgaaatccttggtccttcatgtaggacacaagttaatgtccccatctttagggagataaaacaagaaatctagtgcctycttatataagatacagaggagatgagatagtgctggctggggcttctatatcttggtggtagagttaattctgatatgtctgccttttgagtgggaggtg

SEQ ID NO: 363823 - DNA, 201 bp, Homo sapiens
ttaactatatacagattcttgactaaatacagatgtagatggttaaacacaaattaactaaattcataaaacgtgcatttgagaaagcagactcatatgtytaggctagtcttaatgagccagttagttgacttacttgtcagtgttttaattaaccttaaatgcagaattcatttcctcaacagtttcaagttctcagta

SEQ ID NO: 363824 - DNA, 201 bp, Homo sapiens
cacagacgacacagaggacacacatgggacgccccagagcagcagtaccccctacgcccgcctagcccaggacagccagcaggggggcatggagtccccgyaggtggaggcagacagtggagatggagacagttcagagtatcaggtatggccgagaggggctcctgcccagggtgactgaggaccctgaacacggggaaa

SEQ ID NO: 363825 - DNA, 201 bp, Homo sapiens; identical to SEQ ID NO: 78532

SEQ ID NO: 363826 - DNA, 201 bp, Homo sapiens
actcatatgtctaggctagtcttaatgagccagttagttgacttacttgtcagtgttttaattaaccttaaatgcagaattcatttcctcaacagtttcargttctcagtagccaccccctatgcctactgcccagcatgtcagatatcacagacatgggtatgccaggcttttagctttgaatcgagctttgctctctga

SEQ ID NO: 363827 - DNA, 201 bp, Homo sapiens
gagggtacaggccggctcttcttcgaattttaccacctgctgaattactcacgccccaaggagggtgatgaccggccgttcttctggatgtttgagaatgktgtagccatgaaggttggcgacaagagggacatctcacggttcctggaggtgagggaatctggggacctgattgtcacagacagccagggcagggaaagc

SEQ ID NO: 363828 - DNA, 201 bp, Homo sapiens
ctgcagacagctgtctgttgaatggaatcctaggcatgggaatagggagctaatttgccctggaagcagcacacagggtttatattttgtggtggctgtgkttgtagcataattggagtagaactcatgtatagggaacggctcttttttttgagacagggtctccctgtgttgcccagggtgtacagtgacatgatcata

SEQ ID NO: 363829 - DNA, 201 bp, Homo sapiens
ccccagcctctcaaatcccagcactcccaaagttctgggattacagtcatgatccaccgtgcctggcctattttttgtaataaataaaaagtgtaataaaygctgcctcggctggtctcaaatccctggggtcaagccattctcctacctcagcctcccaaagccccagagttgtaggtgtgagccaccacacccagctag

SEQ ID NO: 363830 - DNA, 201 bp, Homo sapiens
aagtgattctctcctcagcctcccaagtagctgggattacaggtgctcaccaccacgcccagctaatttttatatttttcgtagagacggggtttctccaygttggtcaggttggtctcgaattcctgacctcaagtgatctgcccaccttggcatcccaaaccgctgggattagagacatgaaccaccgtgcctgggcag

SEQ ID NO: 363831 - DNA, 201 bp, Homo sapiens
tacagtgacatgatcataggtcactgcagcctccaattcctgtgctcaagcaatcctcccacctcagcctcctgaacagcttgattataggcacatgccaycacacccagctagttattcttttttttttttgaggtggagtcttgctctgtcacccaggctggaatgcagtggcacaatcttggctcactgcaacctctg

SEQ ID NO: 363832 - DNA, 201 bp, Homo sapiens
tcttgctctgtcacccaggctgaagtacagtggcattattacagctcactggagcctcaaacagctgggctcaggcaatcctcctacctcagcctcccaartggctgggactacaggggcacaccaccgtgcccagccaatttttgtatttttggtagagacagggtcttggtatgttgcacaccctagtcttgaactcct

SEQ ID NO: 363833 - DNA, 201 bp, Homo sapiens
ttaacccagagctctgttccttaacctcaggccaaggcctatttctggaccctgcatcttagttgctagtttatggaatgagttgccaattgtgccccttmagagaaaggtacaggaagggtatggtgaggaacaagggaagctgggccattttggccgggagagccataacctaaaaccaagattactggtatcatgaac

SEQ ID NO: 363834 - DNA, 201 bp, Homo sapiens
gaggggctcctgcccagggtgactgaggaccctgaacacggggaaaaaccagttacctgctactgttggtaacagagcgacaacagttgttagaagtttcrtaattgtaataattgacatgtttgaattctaagtatcttccatatgcaccacggacctttctttaccttaatcctctcccagacataagtcaaatgccag

SEQ ID NO: 363835 - DNA, 201 bp, Homo sapiens
atctcgttcatggtcacttttttgtttatctcattttctctgaggctggtccttcctgttaacgtcttggcatttgtgggaagcacaaaatgttcttgtcyctccaactctgcttttcgctccctgccctgccattcctctcccgcgcctgccctctcccttccatctttcccaggtacttttctctcccagccctgccac

SEQ ID NO: 363836 - DNA, 201 bp, Homo sapiens
gccagcaggggggcatggagtccccgcaggtggaggcagacagtggagatggagacagttcagagtatcaggtatggccgagaggggctcctgcccagggygactgaggaccctgaacacggggaaaaaccagttacctgctactgttggtaacagagcgacaacagttgttagaagtttcgtaattgtaataattgacat

SEQ ID NO: 363837 - DNA, 201 bp, Homo sapiens
  misc_feature (1)...(201): n = A,T,C or G
agtcccacctcatcacctgttcacttccagttgtcctgaagctggctaccaggtctccttggccacctgaaggcctaatccttctggccccgccagacccnaggcctccagtcacctaaggcccagtgagtgtcctctcttgcttctaggtccgaactcgaaataacaacagtgtctccagccgggagaggcacaggcctt

SEQ ID NO: 363838 - DNA, 201 bp, Homo sapiens
  misc_feature (1)...(201): n = A,T,C or G
tcccggctaccagggttggttccccagatgcccagacccctgcccgcagtctctaactgggagatatgcctcactcactgcactactggttgtggctggtngataatctgtgtccttttttcacactgcttttcaggttcttgctttttcttttctctcctgggtaagcttcccgtaagcctgttggcttctctcctggtc

SEQ ID NO: 363839 - DNA, 201 bp, Homo sapiens
agctctggaattctcagaaagagtaatagaagtaaagacacgttgtacctcttggagcctcaatggctgagagacctggcgaattgccagctcctctgcayggttttcagccgtgccagggttcattcactccctccttgccggcttctcagcgtatggattttcaggggcctgatgaagaaatggttgtatgtagccttc

SEQ ID NO: 363840 - DNA, 201 bp, Homo sapiens; identical to SEQ ID NO: 78551

SEQ ID NO: 363841 - DNA, 201 bp, Homo sapiens
aactggcaattagcaagctagccccacacaacctcccctgcctccccgggtattgagaccccagggacctgggccacccaattaagccatcttgtgtacartgctgcaccaaataccaggacaggatgaagccagctaaacagccctggcctcgaaaccctaagacagacgggcaagccctccagatgaggggtccttggc

SEQ ID NO: 363842 - DNA, 201 bp, Homo sapiens
aaatgtagttagtggtccctggatgggcagcaccctgctggaaggaatcggagggctccccttggtaacttcagtgttggtttgggtcctgtcacgtgccyggaccagggctctgttgtcttaggaataaaatcagtggagaagatgaacgatactgacggactgagagcaaatccctgtggctgacaatagtgtagggga

SEQ ID NO: 363843 - DNA, 201 bp, Homo sapiens
tcacaagaactaaagttaaataatcacaacaagtgaaaggtgctgtgtcgagcactgttttctaaacacattcattaggtgaactcattttaataaaaggrtaaagagtaaacaattatcatgcttaggaaagaaggaatatgtgcaaaccctcaatgctggagcagccacagagaatattaggactgagcctcaggggtc

SEQ ID NO: 363844 - DNA, 201 bp, Homo sapiens
caggtgtgagccacctcgtccagccccacgcaagattctagaagtgggtccagctctctttccctctgtccacaccctcatcctgactctgtctctctctytcagattgaagaatggggcccatttgacttggtgattggcggaagcccatgcaacgatctctcaaatgtgaatccagccaggaaaggcctgtatggtgag

SEQ ID NO: 363845 - DNA, 201 bp, Homo sapiens
gagccacagtgttttctccccagtggtggtcacacccccatataggaaatcaggcattccgtgataaaatggaggtttgcatgagtgtgagcactctttayggagactagaacattccctgtgtctttcagttcctttttttttttaagagatgaggtcctcactgtcacccaggctggagtgcagtggcactgtcttggc

SEQ ID NO: 363846 - DNA, 201 bp, Homo sapiens
gatactagaggtggactgggcttgcctgagaggctgggagaccaagggacagacaggactatttggcagacactgaggatggaaggagaacatttatcccrcacctgccaagagctgaggcagccaggaaagcagtgcagcatatactcattaataataatatataggccaggcgcagtggctcacacctgtaatcccagc

SEQ ID NO: 363847 - DNA, 201 bp, Homo sapiens
ccttaacagagcagctgagactgcaggtgcacaccactgtgtttggctcttaaaagtttttgtagagatggggtcttgctgtgttgtccaggctagtcgamctcctgggctcaagcgatcctctcaactcccactcccaaagtgctgggaatataggcctgagccactacgtctggcctttcagttctgattagcatccct

SEQ ID NO: 363848 - DNA, 201 bp, Homo sapiens
gagtgggacctggctggttgaggctgtcaacatcctggaggcacttctgacttgctgtcttttcactccggtacccccaggatctttggctttcctgtgcrctacacagacgtgtccaacatgggccgtggtgcccgccagaagctgctgggaaggtcctggagcgtgcctgtcatccgacacctcttcgcccctctgaag

SEQ ID NO: 363849 - DNA, 201 bp, Homo sapiens
ggagaaaagcccctattagcaaggccgttccccagactggtgcctgcccccacaaaacagactcctggctgtttcctctacaggccgaagatcaagctcgygactctccaagagggaggtgtccagtctgctaagctacacacaggtatggtctctgctctccctttttcagggctcagggactttgtctttggctttcat

SEQ ID NO: 363850 - DNA, 201 bp, Homo sapiens
acctccttccttacctggcaggaagcccccaagctgtaccctgccattcccgcagcccgaaggcggcccattcgagtcctgtcattgtttgatggcatcgygacaggtgagttcggggaacacctggagacactgctatcgtgtcacaacagggtagccagggagtcagaaggcatggttaaggtgtctgacatcagtggc

SEQ ID NO: 363851 - DNA, 201 bp, Homo sapiens
ctctgtctctctctttcagattgaagaatggggcccatttgacttggtgattggcggaagcccatgcaacgatctctcaaatgtgaatccagccaggaaargcctgtatggtgagcatccttctctctggcagtccctggagagcctatgtcacctgaccactggcccaggtgcagcagcctgagaaggagccacttgctt

SEQ ID NO: 363852 - DNA, 201 bp, Homo sapiens
gtctctctctttcagattgaagaatggggcccatttgacttggtgattggcggaagcccatgcaacgatctctcaaatgtgaatccagccaggaaaggccygtatggtgagcatccttctctctggcagtccctggagagcctatgtcacctgaccactggcccaggtgcagcagcctgagaaggagccacttgcttctgg

SEQ ID NO: 363853 - DNA, 201 bp, Homo sapiens
agtcttagggtgccatgtctgtgtctggaattaaatgggttaatgctttcaacatttgaactcccagtaggccaggcactgttacgctgttgccattttcrtggttaaacacatcatgtcgatagtgacatgccgaagggggagggagagaagacaatgatttggggtttattgctggcggatggacattggaagggttga

SEQ ID NO: 363854 - DNA, 201 bp, Homo sapiens
agatgttcagcaagtacctgggaatctctgtaggagtcccactcttacctgttgtaagctgctgatggacctgatcctaaaagtcccacgtggctgggtgyggtggctcacgcctgtaatcccagcactttgggaggccgaggctggaggatcgcttgagcccaggagttctagactagcctgggcaacaaagtgagaccc

SEQ ID NO: 363855 - DNA, 201 bp, Homo sapiens; identical to SEQ ID NO: 78549

SEQ ID NO: 363856 - DNA, 201 bp, Homo sapiens
tcctggaaatgtagttagtggtccctggatgggcagcaccctgctggaaggaatcggagggctccccttggtaacttcagtgttggtttgggtcctgtcaygtgcctggaccagggctctgttgtcttaggaataaaatcagtggagaagatgaacgatactgacggactgagagcaaatccctgtggctgacaatagtgt

SEQ ID NO: 363857 - DNA, 201 bp, Homo sapiens
gactggggtggtgtcaggcgctgacatagtgagcggtcactgcagacaactggaggctttggggagagtctctgacaacctccaccacaattccccgggarggaagagagctctagcaaggagggatgcagggtcgagcccttcacacctgcccgcagcccttggcctcccctttgggactctcatctcagctgggactct

SEQ ID NO: 363858 - DNA, 201 bp, Homo sapiens
ggaggggacggcgggggctcccgaagctgccggggagagaccctctccagggacctcccgaggaggggctctcgccgggttggagacccggctgggtttgsggggtgaggaaacgtccacggaccctgcttggggtggaacggggacagcgggtgggacgcgggggacatacgtctgacggggaccggagatactagagga

SEQ ID NO: 363859 - DNA, 201 bp, Homo sapiens
cctctcatgtccctgcttccctttcaccccacccattctggcttctcccacaggaaagcatgaagggagacaccaggcatctcaatggagaggaggacgcyggcgggagggaagactcgatcctcgtcaacggggcctgcagcgaccagtcctccgactcgcccccaatcctggaggctatccgcaccccggagatcagag

SEQ ID NO: 363860 - DNA, 201 bp, Homo sapiens
gctcagcatcatttatgcttctgtgtctctctggcccccacaggctacctagtcctcaaagagttgggcataaaggtaggaaagtacgtcgcttctgaagygtgtgaggagtccattgctgttggaaccgtgaagcacgaggggaatatcaaatacgtgaacgacgtgaggaacatcacaaagaaaaatgtgagggcagtc

SEQ ID NO: 363861 - DNA, 201 bp, Homo sapiens
agctagtaagaagtaatgggttttggctgttcccaggcccgtgatagcatcaaagaatgataaactcgagctgcaggactgcttggaatacaataggatasccaaggtaagacgagctgtggccctctggaaaaatgcacttggtgacctccaagtggggacttgggagatgaccttggtgtttgattggttcctactcct

SEQ ID NO: 363862 - DNA, 201 bp, Homo sapiens
ggctggaaggttttctctatgtgccatttctttcaggtggtttttaagttctttcttgtaacactcttggaggtgcctaggggtgatagagtttgcagggyggatggctcagctgctaatgacctagggagtccaccatttctgtgggtggattttgtgcctcagagttttgaggtatggcaatgggaaggcagttattgc

SEQ ID NO: 363863 - DNA, 201 bp, Homo sapiens
gaacccaggaggtggaggggttacagtgacccgagatcatgccattgcactccagcctgggcaacagagcaagaccgcatctcaaaaaaaaaaaaaaaaaaggagtggtaaaggataaataccaaacaaaagtgagcctcaaaacatattacatatatatgggaagttcaaataagagatagagttgggatgtattcatag

SEQ ID NO: 363864 - DNA, 201 bp, Homo sapiens
catagtgagcggtcactgcagacaactggaggctttggggagagtctctgacaacctccaccacaattccccgggagggaagagagctctagcaaggaggratgcagggtcgagcccttcacacctgcccgcagcccttggcctcccctttgggactctcatctcagctgggactctgagcgtgacacaagggtgatggtt

SEQ ID NO: 363865 - DNA, 201 bp, Homo sapiens
ccgtgatagcatcaaagaatgataaactcgagctgcaggactgcttggaatacaataggatagccaaggtaagacgagctgtggccctctggaaaaatgcmcttggtgacctccaagtggggacttgggagatgaccttggtgtttgattggttcctactcctccccccacgtgacttcctggtgttgggcttccctctcc

SEQ ID NO: 363866 - DNA, 201 bp, Homo sapiens
tacagtcatgaggaactgttcattttaccatagcagggagtggaggaaatgagctgctgtgtgctcagcatcatttatgcttctgtgtctctctggccccsacaggctacctagtcctcaaagagttgggcataaaggtaggaaagtacgtcgcttctgaagtgtgtgaggagtccattgctgttggaaccgtgaagcacg

SEQ ID NO: 363867 - DNA, 201 bp, Homo sapiens
tactgctacctctggttttggttcccttcttttcctcctatatggagtttacacagccaatatgtgtggtgcgtgtacagcctttgctggattgaacgcaygtgatacagtcatgaggaactgttcattttaccatagcagggagtggaggaaatgagctgctgtgtgctcagcatcatttatgcttctgtgtctctctgg

SEQ ID NO: 363868 - DNA, 201 bp, Homo sapiens
gcccatccttggctttggcacacaggcttgtgctcatgccaggatcattttcatcatttatttgtagccaagttcactgccagggcacatctctgcaacakagaccctcactcccaccttgtgcctagcagaggaccctctatagctagtaagaagtaatgggttttggctgttcccaggcccgtgatagcatcaaagaat

SEQ ID NO: 363869 - DNA, 201 bp, Homo sapiens
ttttttacgctttcctgtaaatctgatgttttctggaatttagggtaagttccttatcagacagagcaaaagcacagtactgggaccttgtgttctgtcaygtgttctgctgccgccgccagtgtggacagcctgagtctggccccctttcctttggatgtgctgtccctgctgcctggatccttcccgctctctacttca

SEQ ID NO: 363870 - DNA, 201 bp, Homo sapiens
ctgaagttcaaaggccagatctaggtaaagtgctttgcctgacacctggcaggcaataaacttcacatatatgagatggcattattgtaaaaatgagaccyattaatcaatgcagtgctaatgacaatgaagactggatgcacgtagtgatagtaacacacaatgtttatcaataataatagccataggccaggcacgctg

SEQ ID NO: 363871 - DNA, 201 bp, Homo sapiens
tgacagtggtacatgtactcatgacctagaggcactgagcaattccccaaacgcattctgaattgtggagggtgatggggtggatacttcttgattggccytgtggtgtggtgctgtggtgggtagccagatggcacatgagaataagtgacttcaggtatcatgactgtgtcatctatgtaggggtccttggtaccaact

SEQ ID NO: 363872 - DNA, 201 bp, Homo sapiens
cctgctggaaggaatcggagggctccccttggtaacttcagtgttggtttgggtcctgtcacgtgcctggaccagggctctgttgtcttaggaataaaatmagtggagaagatgaacgatactgacggactgagagcaaatccctgtggctgacaatagtgtaggggagatcccaggccacgccacggagaaaagccccta

SEQ ID NO: 363873 - DNA, 201 bp, Homo sapiens
gtgactgaggaccctgaacacggggaaaaaccagttacctgctactgttggtaacagagcgacaacagttgttagaagtttcgtaattgtaataattgacrtgtttgaattctaagtatcttccatatgcaccacggacctttctttaccttaatcctctcccagacataagtcaaatgccagtatttaccacgtgaatac

SEQ ID NO: 363874 - DNA, 201 bp, Homo sapiens
tgtttccccccaaggttcaagcactgtcttcctgttggccctgacaatcatagccagcacctgggctctgacgcccactcactacctcaccaagcatgacrtggagagactaaaagcctcgctggatcgccctttcacaaatttggaatctgccttctactccatcgtgggactcagcagccttggtgctcaggtgccaga

SEQ ID NO: 363875 - DNA, 201 bp, Homo sapiens
cctgccttcccaaggcttctcctcaggttaaacccctggattccctcgcccttccccatgtgatttggttcccagatcttggtgtgcatcatcattgggamtgtgtatagcaccttggaagagtgtagagtgtactgaatggttgtttccccccaaggttcaagcactgtcttcctgttggccctgacaatcatagccagc

SEQ ID NO: 363876 - DNA, 201 bp, Homo sapiens
ctgtgacctgaattgatgctcaagacattttagaatgaccaaaagttcccactgtggaggagtggccaaataaactgccgcattaacaagtgggcatgagraagtacctaacagccactaagaatgacaaaagtggatggactgtgatgccgtaggagggttcagatgagatctagtgtgaacagagcgagatccaatgct

SEQ ID NO: 363877 - DNA, 201 bp, Homo sapiens
ttccttccaaaggaggctgtgttgtctggcctcagtaaagctccagaggggtccagcagctgtgacctgaattgatgctcaagacattttagaatgaccaraagttcccactgtggaggagtggccaaataaactgccgcattaacaagtgggcatgagaaagtacctaacagccactaagaatgacaaaagtggatggac

SEQ ID NO: 363878 - DNA, 201 bp, Homo sapiens
cagcactttgggaggccgaggtaggtggatcgcctgagatcaggagttcgagaccagcctggtcagcatggggaaaccccgtctctgctaaaaaaaaaaaacaaaaaaaacaaaactgtgcaatccagtgtttttagtattttcacagacttgtgcaacccttgccacaatgccattccagaatatatttatcaccctgga

SEQ ID NO: 363879 - DNA, 201 bp, Homo sapiens
aactaaatttcatgaacgtcaaattttccagtggttattatgacttccttgtcgaagttgaaggtgacaaccggtatattgcaaataccgtagaggtaggwgtttttctttccttcccattgccatgttagtatatccaaggatatggccaaattgacacagtattaattgtctggtgcattgacttttctctacaaccaa

SEQ ID NO: 363880 - DNA, 201 bp, Homo sapiens
ttcttttttttttgaaacagagtctcgctctgtcaccaggctggaatgcagtggcgcaatcccggctcactggaacctccgcctcctgggttcaagcgatyttcctgcctcagcctcccgagtagctggggctacaggcacgcgccaccatgcccagctaatttttgtatatttagtagagacggggtttcactatgttgg

SEQ ID NO: 363881 - DNA, 201 bp, Homo sapiens
attattcttttttttttgaaacagagtctcgctctgtcaccaggctggaatgcagtggcgcaatcccggctcactggaacctccgcctcctgggttcaagygatcttcctgcctcagcctcccgagtagctggggctacaggcacgcgccaccatgcccagctaatttttgtatatttagtagagacggggtttcactatg

SEQ ID NO: 363882 - DNA, 201 bp, Homo sapiens
tttttttttgagacagggtctcactgtgtcatctaggctgcagtgcaatgcgatcatatttaaagctcactacaacctcaaactcctgggcgtgagcgatyctcccaccttagccttctgagtagctgggactataatcacatgccaccacacccagccataagctttacttgcagtgcttagagagcctggcacatggtc

SEQ ID NO: 363883 - DNA, 201 bp, Homo sapiens
gttcacctgtttgggtcagcccacctggataatctctgaattgtaaggtcagctgacttggggctttaattatacctgcaaaatcactttataacagttcytaaatttgtgtttaaatgaataatcagtggatggaaatccagggggaggagtatgaatgtctttagaattctgcctaccatttcttgtattagcatggaa

SEQ ID NO: 363884 - DNA, 201 bp, Homo sapiens
gtacatttttaaaggggaggagtcatgtcaaacatcctttttttaattatgagagtccattattgtgagtgggaattccattcctgtgattttttttttttccttaagaaagtatagtttatgtttctcctaagtttttacttttcaagggttttaaataacctttttgtacagtttttgcttttcttctggtaggtcttg

SEQ ID NO: 363885 - DNA, 201 bp, Homo sapiens
ctcctgcttcagcctcctgggtagctggaactacaggtgagcgccaccgtgcctagtctcccccccacctttttttttttgagacggagtctcgctctgtygcccaggctggagtgcagtggcacgatcttggctcactgcaagctccgcctcccgggttcacatcagtctcccgcctcaagcctcccgagtagctgggac

SEQ ID NO: 363886 - DNA, 201 bp, Homo sapiens
ctgcaacctctgcctcccgggttcaagggattctcctgcttcagcctcctgggtagctggaactacaggtgagcgccaccgtgcctagtctcccccccacytttttttttttgagacggagtctcgctctgttgcccaggctggagtgcagtggcacgatcttggctcactgcaagctccgcctcccgggttcacatcagt

SEQ ID NO: 363887 - DNA, 201 bp, Homo sapiens
gtctcactctgtcgtccaggctggagtgcagtggcacgatctcggctcactgcaacctctgcctcccgggttcaagggattctcctgcttcagcctcctgrgtagctggaactacaggtgagcgccaccgtgcctagtctcccccccacctttttttttttgagacggagtctcgctctgttgcccaggctggagtgcagt

SEQ ID NO: 363888 - DNA, 201 bp, Homo sapiens
cctttgagtacttcagcctcttagcatttcccagcttcttcccagaatgacatttgccaaccaaatagcacaagggaaggaagagtacaaagagaagaaaktaaaagactaaactagtaggattaggattagagcaaggagagttagtgaggaagtgtaactttcactgaatacttgtctcatccagaattctgctgtaga

SEQ ID NO: 363889 - DNA, 201 bp, Homo sapiens
tcccaggttcaagcgattctcctgcctcagcctcccaagtagctgggattacaggcacctgccaccacacccagctaatttttttgtatttttagtagagrcggggtttcaccatgttggccaggctggcctcaaattcctgacctcaggtgatccacctgcctcggcctcccaaagtgctggcctggccagatctttctg

SEQ ID NO: 363890 - DNA, 201 bp, Homo sapiens
tttctaacttctctgagccttgcctttaaaatgaaacccataattcttacatcaaagcaactgacaggattaaatgagataataggtgtgaagaccctagygcagtgcctggttcttggtgggcgtgtaggaaacggagttccttttctggaccatttgtttgttaggtccctaacaaacaggtcccccttcttagagagt

SEQ ID NO: 363891 - DNA, 201 bp, Homo sapiens
attccctctctgtccctcctcacaccctccctatattcacatggtcaatcatcagtgactctagggctgacattttgtacacactttgtccagtgcttggmccttttgggcctttgatttcaggtgacatattttgatatctgcttttaatccctcatggggaatgcttctccagtcaccatcatctcatgccatgatgcc

SEQ ID NO: 363892 - DNA, 201 bp, Homo sapiens
taaatatagttctgctatgaattcataggtggctgtgaattcaaaagtagatggtaatatccttacagcttctggtaataaacctttacagttttttttttaaagcaaaacaacacccctattcaacatgataattgaggctgttgtcataaaatagttattacagaggcaggaaagaaggccgttagaaggaattacttg

SEQ ID NO: 363893 - DNA, 201 bp, Homo sapiens
ctcagtagttatctggaagtaccctgcatttgtgtagtaagcattattatgatttttttttcagacagagtctttctctgtcgcccaggttggagtgcagyggcgcgatcttggctcactgcaacctccacctcctgggttcaagcaattctcgtgcctcagcctcttgagtagatgggattacaggcgcatgccaccatg

SEQ ID NO: 363894 - DNA, 201 bp, Homo sapiens
  misc_feature (1)...(201): n = A,T,C or G
cactgttaaactagaacatgctaaatctgttgcttccagagccactgtcctccagaagacatccttcacccctgtagggtaagtcctgatcatattttggnggggcgctgacctctttgttttggaaagttagcctgcagccagtgtaacagattaatacattccagttaggtaaatttgatctactggtatcgaaagcct

SEQ ID NO: 363895 - DNA, 201 bp, Homo sapiens
acactgacctgtgcttagaactcatcctggcccgcagagcctgccgcgagtccctggcgtcccctgtggcgggctcttggagccactttcccgagcggaastcagcccgcggctcggactccggcgggacctgctcggaggaatggcgccgccgggtgaggagttgcgcgtggctttggggagagggctgtcgcccgcggg

SEQ ID NO: 363896 - DNA, 201 bp, Homo sapiens
tacttaaaatacaagctgcttttatttaaattttaggaggagagatttgggttttaagtgagaattttcatttctttatgcattatgagttttgtgccaastttctttaagtaaatagttatctgtcttggataattggaattaatttcatattttctccatgtggtcaaataagttattcatgtgtttgcattctttttg

SEQ ID NO: 363897 - DNA, 201 bp, Homo sapiens
tgtatgtatgtatgtataaataaataagggaatatactgaaataatttcaaaagaagacccaaagcatttttttattctagccaaagcagattttgtattygtgggactctgaagaatagcccttttaacttgtgcttactttgtattatgaaagcaataggctttatttttttcatagagtaatgaaaattattatttaa

SEQ ID NO: 363898 - DNA, 201 bp, Homo sapiens
ctgcttctgctaggtcacactatctaggtgagcttcgtaaagagaattcatgtagaattgctcaggaaaaaacaaaaaacaaaaaaaaaaccaagaaataycatcagaatgcttgtcgagccttctggtttaactctggaaatcaaagttgggccaggcatggtggctcacgcgaatcttgctttgcagggccaaggaggg

SEQ ID NO: 363899 - DNA, 201 bp, Homo sapiens
gtctctttaaaaaaaaaaaaaaagaaaaagaaatgagagcgggaagttcgtttagggcttccttagagccatggctcagggagagagggatgaattatggktggaaagatctgtagtgaggctctgttaccttttaaaaaggtatagtgttaccaccattagccaattaagtggggcagcagcatatgccagggccaccct

SEQ ID NO: 363900 - DNA, 201 bp, Homo sapiens
gcgtcctgcctcagtcctgtcactcaagccatccatatacctgggcaccctctttggcactagccaaatgccacttgatggattgcattctctggcctctraatggcagtgagtctttgaagggaataaagggttggccaagcagtgagctggggttaatgtagtctctgtggaagggagacctctgggatcaaaagccag

SEQ ID NO: 363901 - DNA, 201 bp, Homo sapiens
acccagcctatttatatcctgtgtatttttgttaagaatttgaaaaatgaatgccaagtataacatgacagaggagttttaaacaaaagcagagaaatagktgtaagcaggaacatggcacaggtcgctgaagtccaattgttacccctgtttgtgggtgtgtgtgtgggtgtgtgtgtgttttgagacgaggtatcactg

SEQ ID NO: 363902 - DNA, 201 bp, Homo sapiens
ccaggctttatcagtccaatttgcccccaggttgcagacagttctccacatctgtctgtccacaacagaagtgttactatgggagagggtggttgaggcartgaagtgaagtatatattttctgcctgttctcagagatatactgatcctctctgaagactaactctatatgcctctttcagggtgacatacccagccaaa

SEQ ID NO: 363903 - DNA, 201 bp, Homo sapiens
attggatgtcatgacacctcttcttgcagctatgctgggactcatgtatgtctactggactcagctcaacatgttccagaccttgaagtacctggccatcytgggcagtgtgacgtttctggctggcaatcggatgctggcccagcaggcagtcaagaggtaaggccagacatgagccagggatctagagtagggttagaa

SEQ ID NO: 363904 - DNA, 201 bp, Homo sapiens
tttcctcaaccgcagggcatcattatgtttcatttaattggatgtcatgacacctcttcttgcagctatgctgggactcatgtatgtctactggactcagytcaacatgttccagaccttgaagtacctggccatcttgggcagtgtgacgtttctggctggcaatcggatgctggcccagcaggcagtcaagaggtaagg

SEQ ID NO: 363905 - DNA, 201 bp, Homo sapiens
tggatataagcacaacaataataatagtagtagaagtagtagctaacattgatatagcatttgttatgtgccagtcattattctaagatttttttttttttgagacggagttttgctcttgtcactcaggttggcaacaatggcgcattctcagctctctgcaacctcttgtctcccaggttcaagcgattctcctgcctc

SEQ ID NO: 363906 - DNA, 201 bp, Homo sapiens
actatgatcacactactgcactctagcctgggcaacagagtgagaccttgtctcaaaaaaacaaaaagcctgggcgcagtggctcacacctataatcccarcactttgggaggccgaggtaggtggatcgcctgagatcaggagttcgagaccagcctggtcagcatggggaaaccccgtctctgctaaaaaaaaaaaaca

SEQ ID NO: 363907 - DNA, 201 bp, Homo sapiens
aattttgtatttttagtagagacggggtttcaccgtgttgcccaggctgatctcgaactcctcacctcaggtaatccgcccgcctcggcctcccaaagttytgggattacaggcgtgagccactgcgcccggccagaaactgccacaattttctaaagaggaaaaaaaaatcccttctaagctatcccctcccgacgagac

SEQ ID NO: 363908 - DNA, 201 bp, Homo sapiens
agtactaagaagtcatagaacatttgctcccactgaactcagacacagcctcagaatctttttttgaaacataatcttctaagtagacactaacaattgawcagagttgggccagaatgctgtaagaagcctgctcatcagccctcccccagatccttattggctcagcggggatctagatttctggggtatagtccagac

SEQ ID NO: 363909 - DNA, 201 bp, Homo sapiens
ctccgcctcccaggtccaagcgattctcctgcctcaggctcccgagtagctgggattacaggcatgtgtgaccacgcccggctaattttgtatttttagtwgagacggggtttcaccgtgttgcccaggctgatctcgaactcctcacctcaggtaatccgcccgcctcggcctcccaaagttctgggattacaggcgtga

SEQ ID NO: 363910 - DNA, 201 bp, Homo sapiens
gcaatggcgcgatcttggctcaccgcatcctccgcctcccaggtccaagcgattctcctgcctcaggctcccgagtagctgggattacaggcatgtgtgamcacgcccggctaattttgtatttttagtagagacggggtttcaccgtgttgcccaggctgatctcgaactcctcacctcaggtaatccgcccgcctcggc

SEQ ID NO: 363911 - DNA, 201 bp, Homo sapiens
agcttgaaatacctttgagtcatgtaagtggctgttgagagaagtctgggctggaggtacgggtctgagaattatctgcatagaattttgggatgaagccmtgggcatggatgggatggcctagggaggcagggggtggtgggatgagagccaggcctaggagctgagaaacagcaggagagctcaaaactgagggaggag

SEQ ID NO: 363912 - DNA, 201 bp, Homo sapiens
aaaaaaagaaaaagaaatgagagcgggaagttcgtttagggcttccttagagccatggctcagggagagagggatgaattatggttggaaagatctgtagkgaggctctgttaccttttaaaaaggtatagtgttaccaccattagccaattaagtggggcagcagcatatgccagggccaccctaggaacccagaaacat

SEQ ID NO: 363913 - DNA, 201 bp, Homo sapiens
ctcttatgagtaatgctgctgtgaacatttgtatataactttttgtttgaacacttgtttttggttctttcaggtatatgcttaggaatagaattcctgcrtcatatggtaactcggtgtttcacttttcaagaaactaacaagttttcaaagcagctgcaccattttacatttctaccagcaatgtgtgagggttccaat

SEQ ID NO: 363914 - DNA, 201 bp, Homo sapiens
ggggaactagtaagtgcagtgtggtacgtgctttgggggagcacttgagagggtggatacctggcctctcctgggaggactgtcaggaagaggtgaacatstgagcagagttgaagataggacctggtttggcaggcaggaaggacaaggaaaaggtgctcccggcagggtgggtagcagggtcaaacacgtcaaatggcg

SEQ ID NO: 363915 - DNA, 201 bp, Homo sapiens
gcctctcctgggaggactgtcaggaagaggtgaacatgtgagcagagttgaagataggacctggtttggcaggcaggaaggacaaggaaaaggtgctcccrgcagggtgggtagcagggtcaaacacgtcaaatggcgagagcgtggtatagctgcaggaggctagagggtaagattttggagttggagttagggctatgg

SEQ ID NO: 363916 - DNA, 201 bp, Homo sapiens
tgccttttgtagtgatgcttcgtacttctgctctggtttttggtgatgtctttagaggccctggggagagagaaagagcaaattgactagaggttttgtaytgtgaggtataggagataacattgaaatagtaatgttaacctctggcaggatttgaatgcaggatgaaaagtttctcctgaaggttttcaaacttttgtg

SEQ ID NO: 363917 - DNA, 201 bp, Homo sapiens
  misc_feature (1)...(201): n = A,T,C or G
agttaggtaaatttgatctactggtatcgaaagcctacagtcgaatgtaagaaaatgatttttaaaatgaagattatttggttttactgtttcattctctntttctagttggctctgtcttgtcattgtgacataagtagctattttgaaatttaatatttattgatttttttctgataaataataatgtttattatagga

SEQ ID NO: 363918 - DNA, 201 bp, Homo sapiens
gatcgagggtccgaaggagggctgcgagctggtgggagtgcccgcgacctggcggggttggtgcctgggggaggggtgcagcgcggagctacgggtcgccycgaggctcagccgtggggaccgcggacgcgcttagcctaggtctggcctcattcatttcactcgcgcgggcttctgggccaggcggcctaaggttctggt

SEQ ID NO: 363919 - DNA, 201 bp, Homo sapiens
gtccctctccgaagccttcagcgtggcctctgcagctgctgtgctctcgcataatcgctaccacgtgccagttgtggttgtgcctgagggctctgcttccracactcatgaacaggctatcttgcgggtaagacatccatgcccaaagtgtgcccctctgattgtcattcctagtggaaggctttcagaaatctggactat

SEQ ID NO: 363920 - DNA, 201 bp, Homo sapiens
cgtgccagttgtggttgtgcctgagggctctgcttccgacactcatgaacaggctatcttgcgggtaagacatccatgcccaaagtgtgcccctctgattrtcattcctagtggaaggctttcagaaatctggactatggtcacagccaattacagcccctacaaggacatacccattaaatggagggcaaggctcatttc

SEQ ID NO: 363921 - DNA, 201 bp, Homo sapiens
ggcagcttgactttctaaacagaattggaggcaaatttaaatgtcacaaaggtgtttctcattgatttgactttattagaacctgagtgatttcagacacrcaaaggccagtaagaacagaattgctttcacctctggaaatcgttttcagatgtgccgctttcttctatccaggacgtttgctggaagaatgtaactcaa

SEQ ID NO: 363922 - DNA, 201 bp, Homo sapiens
aatagtgtaccctcaacgtggctgccagttagggtgctgggatcagagagaggctttttcagggagaccatcagtgggtgggagaagatgtctcatctccrcccgagtctccattgtgagctttctgagcatttcaccatggagactcggcacagacgtgttccttggctttcctgtaggaatccagggcccaccagagct

SEQ ID NO: 363923 - DNA, 201 bp, Homo sapiens
aattgttgcttttaacaaaagaattactgtttaaatctagataaatctagaagccttgctacaggttttcagaaaccagacctagggtatgggcacctgtycttacatttcagtgatgagaatttcaaatgacatggaacccacggcaagagcgtgaatgccaccagctgccggtgggtttatcttaccaattcttagaga

SEQ ID NO: 363924 - DNA, 201 bp, Homo sapiens
tttaaatctagataaatctagaagccttgctacaggttttcagaaaccagacctagggtatgggcacctgtccttacatttcagtgatgagaatttcaaawgacatggaacccacggcaagagcgtgaatgccaccagctgccggtgggtttatcttaccaattcttagagaacttagtgggggtgtcagttaccttataa

SEQ ID NO: 363925 - DNA, 201 bp, Homo sapiens
accaaaagacctcccatgtgaacacccgaaacagataagggtgactttcctctacagcagtggccctcccaccttcccagcagaggaagagaaacagctgyatttcgcatttctttcaggatcaggtcatccagctgatgaacgcgatcttcagcaagaagaactttgagtccctctccgaagccttcagcgtggcctctg

SEQ ID NO: 363926 - DNA, 201 bp, Homo sapiens
ttccgtgtgccaggtgctctgcaaggcaccgcagacatgattgcatgaaggcaagtaaggtccgtgtcctcgtggagctcacatggacacagtcttctgcragcctcgcagacagaaggcaagcgctgagccagagcatgagcacaccaccacctagagatccagttgccttgtgcggttggagggctagagcaagggcag

SEQ ID NO: 363927 - DNA, 201 bp, Homo sapiens
ctccctagaggattttaaatagtacaggcttggctgggtactgtggctcacgcctgtaatcccagcactttgggagactgaagcaggcggatcatgaggtsaagagattgagaccatcctggccaacatggtgaaaccccatctctactaagaatacaaaaattagcagggcctggtggtgcgcacctgtagtcccagcta

SEQ ID NO: 363928 - DNA, 201 bp, Homo sapiens
cttagtgtctcctgaggtcaaagtgaaggcattggccaaactgggctcctcccggaagcactggagaagaatctgcctccaggcccattcatgttgtcgtrttgtcagcaaaatccagttcctgtggttgtgggcctgaggtctccatttccttgctagctgtctgctaggagttgctctctgttcctcaaggccattggt

SEQ ID NO: 363929 - DNA, 201 bp, Homo sapiens
agggatgaattatggttggaaagatctgtagtgaggctctgttaccttttaaaaaggtatagtgttaccaccattagccaattaagtggggcagcagcatwtgccagggccaccctaggaacccagaaacattgcgagtccagcgtcctgcctcagtcctgtcactcaagccatccatatacctgggcaccctctttggca

SEQ ID NO: 363930 - DNA, 201 bp, Homo sapiens
agctgcttcgagttcccccattagctgtgtgtccttttgtacctttacctctctgggccttggtttcccatcagtaaaaatggggatcatacctctgaggrttttatagggattagaggaggccacagccacaacacataccacagtgcctgacacttagcattgagtcagtgtttgctcccaatagcgcagatattgtca

SEQ ID NO: 363931 - DNA, 201 bp, Homo sapiens
  misc_feature (1)...(201): n = A,T,C or G
gcattacatttccctcttcctcctggccttttaggacagttaatacgaagataaacctgtttggtccatcacttagaacagctgtcattatattgggcttngttgtactgtgccactgttggcagaccatttaccctcagttaataaccctgtttatttccagagattactcacttatcgtatctttacattgagcaatct

SEQ ID NO: 363932 - DNA, 201 bp, Homo sapiens
tagtccagaccccaactttactcaactagggtagctatagaggccagaagacagtagggtgaaccatcaaggctctttgaagatgggatgttagccagagkctggaagccaagcagctactccttttaaatcacatagagttggcctttgtgtctctgggttggctatttttgtagtgatattggagataagagcactgtt

SEQ ID NO: 363933 - DNA, 201 bp, Homo sapiens
tagctggtattgaggagaggtacttaaggcagatttgcacttaattaaggtcattccttcctccctccctccctcagatggactcttgctctgtcacccargatggagtgcagtggtgtgatctcagctcactgcaacctctgcctcctaggttcaagcgattctcctacctcagcctcccaagtagctgggatacaggcg

SEQ ID NO: 363934 - DNA, 201 bp, Homo sapiens
caattgatgtctttttttgttgtttgtttgacatggagtcttactgtcatccgggctggagtgcagttttgtagtcttagctcactgcaacctccgcctcstaggttcaagtgatcctccagcctcagcctcccaagtagctgggactacaggcattctccaccacgcctggctaatttttgtgttttttggtagtgacag

SEQ ID NO: 363935 - DNA, 201 bp, Homo sapiens
gagtgaaggaagtataaacttacctttgtgagtgctagtatctgtgaatttctataaacattatacaggaaggccgttttcatattatagcaggcactatbggggttacatagatgtgaaagttaaggccctggcctttgagatatggcatagctcatgggagggatgagatctgaattctgataacaattcaggatgatg

SEQ ID NO: 363936 - DNA, 201 bp, Homo sapiens
taagctttttttttttttttttttgagacagggtctcactgtgtcatctaggctgcagtgcaatgcgatcatatttaaagctcactacaacctcaaactcytgggcgtgagcgatcctcccaccttagccttctgagtagctgggactataatcacatgccaccacacccagccataagctttacttgcagtgcttagaga

SEQ ID NO: 363937 - DNA, 201 bp, Homo sapiens
aagtataaacttacctttgtgagtgctagtatctgtgaatttctataaacattatacaggaaggccgttttcatattatagcaggcactatcggggttacrtagatgtgaaagttaaggccctggcctttgagatatggcatagctcatgggagggatgagatctgaattctgataacaattcaggatgatgtagaaaagt

SEQ ID NO: 363938 - DNA, 201 bp, Homo sapiens
ttccctgaggaagaagctccctcgactgtcttgtcccagaaccttttcactccaaaacaggaaattcaggtatatcccaaagggcctatccactaaacgtrggagaagagagggcaacaaagccctggacagtggctctgctccctttaacttgttttgtgatgttttatagtttgatcctcacaccctgtggattaggca

SEQ ID NO: 363939 - DNA, 201 bp, Homo sapiens
tggtcacacagccatacgtttcagtttgggcctaaacggaggtctccagaatcccacaccattgctgcttctgctaggtcacactatctaggtgagcttcrtaaagagaattcatgtagaattgctcaggaaaaaacaaaaaacaaaaaaaaaaccaagaaatatcatcagaatgcttgtcgagccttctggtttaactct

SEQ ID NO: 363940 - DNA, 201 bp, Homo sapiens; identical to SEQ ID NO: 78651

SEQ ID NO: 363941 - DNA, 201 bp, Homo sapiens
gacagtagctggctgaagcctcagcactgggtgggctcactgagcaggctgagcatgttctgggaggtgtccctgcttctgctgctgtgtaaactccgccrtcaacatcttgggctttgaagccactgaacgccggactggtttaccttgatttgtctttgcaaagtgtaggaatgatgcttgtcttactccagaatagat

SEQ ID NO: 363942 - DNA, 201 bp, Homo sapiens
tcgaactcctgagcagtcctcctgcctcagcctcccaaaatgttgggattacaggtgtgagccactgtgcctggccacacacttggccacagctgagaggygaatatattgagttagctactttttggcatcagagcaaaggaataaaacaagctggtataggagtacagaccttttcatgatccaacagttgctatgtct

SEQ ID NO: 363943 - DNA, 201 bp, Homo sapiens
ctgtaatgaatggtcaggatgtcatgttctaagctacagaagggccaagtgttggttggcagagctggagtctgggagattgatgatgagcattatttaarctttgctctttgttcatctaattgaaatttacactgtgtttttggccttgcactgtgagaggtgtgcctggaattacctcatctccttatgttgtcacat

SEQ ID NO: 363944 - DNA, 201 bp, Homo sapiens
gtctcacattcttttgtaaaatgagatggggcatacataaatagacttgggagataaatgattattcccttataaatgggatcttagagcgggagagtacyttagtctctctgttgtcaccagttaggaactgtaactgtgaactgaaaccttcagtaattctgtgtttgtctccattttctttcagaacagcacattagt

SEQ ID NO: 363945 - DNA, 201 bp, Homo sapiens
ggatggagtgcagtggtgtgatctcagctcactgcaacctctgcctcctaggttcaagcgattctcctacctcagcctcccaagtagctgggatacaggcrtgcattaccatgcccagctaatttttgtatttttagcagagacagggtttcaccatgttggccaggctgttctcatctcctgacctcaggtgatccgcct

SEQ ID NO: 363946 - DNA, 201 bp, Homo sapiens
agaagttttcctcatcaagtctgccttttgggaaaatgactttttaaaacccagtttcagggcagaaaactaaattgaaacagtgtccaggaaaaaaatayagcattaaaaaaagacaaagctgaaagtacccttctttcttttgtgtctcctacctgccttgtctcgattttgctcacgtgtgctgctggcatcaatcct

SEQ ID NO: 363947 - DNA, 201 bp, Homo sapiens
catgcctgtaataattcactttaggattaggcagcaggcccaaggtcagccaagatttcccgaagcaggggatttgctctcctgcagagcttgcaacctawagataaagcaccccagaaacaaaattctctgctcctgtagcctttgttgtaacaaataattttttatttatttccagttgcaagtcaccaatgttctgtc

SEQ ID NO: 363948 - DNA, 201 bp, Homo sapiens
aattttaataatgccttttaggttccacttttttaaaaaattgcttttagttttctcctctaagcagcccattagttcttaatggagagttattttagttsctttttaatgtacattttagctataaagtttggtcttataaataaaaactttgcctcaatgtactacttacaagtaggttgggaggaaaggtagcttagc

SEQ ID NO: 363949 - DNA, 201 bp, Homo sapiens
gaattcaaggtggaaggcactcacatgtattaaataatggtagtcactacatcaggcaattttgatacatgtttttggacttctggtgaggaaaatgcatyatgattaaaacctttcctggattcgggacagtctttttttttttttttttgagacagagtctggctcacccaggctagagtgcagtggcatgatcatggc

SEQ ID NO: 363950 - DNA, 201 bp, Homo sapiens
aatgcatctcccagctcctgtctttgacactctgcagaagaatcttgcagatagccatgcatgatctgttactacaggttacattgcttcttatatccatrgcacacttgtgttctttgtattaaggtattgtgtcctgaggaatatttgtgcctattacataataggtcctcaggacgtggtgactgtggtttttattat

SEQ ID NO: 363951 - DNA, 201 bp, Homo sapiens
aggagactgtgctggcgtgagttgtcatctcgagcatttctcaggcttcatttgtctcgggtcctatcctaagagggctcattcattggttcagcaaatastttctgggcaagtacttgcagtaaatacttccgtgtgccaggtgctctgcaaggcaccgcagacatgattgcatgaaggcaagtaaggtccgtgtcctcg

SEQ ID NO: 363952 - DNA, 201 bp, Homo sapiens
agaagtcttgcatctaaaatgcacttcccaataccaaactttctttttcatatttttttggttttgttttggttttttttgagacgcggtctcgctatgtygcgcaggctggagtgccgtggtgcgatcatggcccactgcagcgtaggcttcctccagtacccaaattttctaaatatgttattttacgacagctgtttt

SEQ ID NO: 363953 - DNA, 201 bp, Homo sapiens
acgccaccatgcctggctaatttttgtattttcttttttgtagagaaagggtttcgccatgtcgcctggtctagtcttgaactcctgggctcaagcatccrcctgcctcagcctccccaagtgttgggattacagaagtgagccagtgccgctggccaatagtgccttttttcaaggattctagttcaagcttaatttaac

SEQ ID NO: 363954 - DNA, 201 bp, Homo sapiens
tattttcttttttgtagagaaagggtttcgccatgtcgcctggtctagtcttgaactcctgggctcaagcatccgcctgcctcagcctccccaagtgttgrgattacagaagtgagccagtgccgctggccaatagtgccttttttcaaggattctagttcaagcttaatttaacactaaaggcaaaggatttagggccac

SEQ ID NO: 363955 - DNA, 201 bp, Homo sapiens
gtgccaggcagtgtgcaagacttggaaatactgggatgaacaaaagaagcagtctttatcctcatggaacttacagtttagcagagaaatcagacattacrctgttaaagttgtagaaaatcccacagagaagtacagattgctatgagtggatataagcacaacaataataatagtagtagaagtagtagctaacattga

SEQ ID NO: 363956 - DNA, 201 bp, Homo sapiens
tccacctgcctcggcctcccaaagtgctggcctggccagatctttctgtattaactcgtgtaattgtacctgaggtagatactattatcactttacacttkaggaaactgaggcaccagctggttgaataactgccaagggcacattgctaataaatggcagaggtgtgatttaagcctggccccagagtctgggttcttc

SEQ ID NO: 363957 - DNA, 201 bp, Homo sapiens
gtatttttagtagaggcggggtttcaccatgttggccaggctggcctcaaattcctgacctcaggtgatccacctgcctcggcctcccaaagtgctggccyggccagatctttctgtattaactcgtgtaattgtacctgaggtagatactattatcactttacacttgaggaaactgaggcaccagctggttgaataact

SEQ ID NO: 363958 - DNA, 201 bp, Homo sapiens
  misc_feature (1)...(201): n = A,T,C or G
ctcagtgcccttactgctcgtctcagcaaggaggagactgtgctggcgtgagttgtcatctcgagcatttctcaggcttcatttgtctcgggtcctatccnaagagggctcattcattggttcagcaaatactttctgggcaagtacttgcagtaaatacttccgtgtgccaggtgctctgcaaggcaccgcagacatgat

SEQ ID NO: 363959 - DNA, 201 bp, Homo sapiens
  misc_feature (1)...(201): n = A,T,C or G
ggaaggactcaagcgccttcaggcttattgctctttgtacgaagtgagcaattttgggtaataccgtgtcctatggaaagtaactacttaactaaattcangtagctcattccttaagccatctataatggctgagaatgttatctaaaaacgcctttgcttttcctggttcactacatgtgtcaccacttaacattgact

SEQ ID NO: 363960 - DNA, 201 bp, Homo sapiens
ttcatttggtctttagagtatctttacaagcctagcagggtggtcatggccctccccacccccaattttccagctggaaagtgaggtgaagagtgggaaastgacttcccttctggtcacacagccatacgtttcagtttgggcctaaacggaggtctccagaatcccacaccattgctgcttctgctaggtcacactatc

SEQ ID NO: 363961 - DNA, 201 bp, Homo sapiens
ttatggtcttagatgtgagtcagagaatattatctattgagtttcacccacttctctgcccctgtgcttttacagactgtccttatttttctaggctgatktggtcatcaagttccctgaggaagaagctccctcgactgtcttgtcccagaaccttttcactccaaaacaggaaattcaggtatatcccaaagggcctat

SEQ ID NO: 363962 - DNA, 201 bp, Homo sapiens
  misc_feature (1)...(201): n = A,T,C or G
ctccactgaagttggcatcacaaatgttgatctttccaccgtggataaggatcagagcattgcacccaaaactacccggtaggtgagatgccacctgatcnctcagggagctgaggctcaagagctgagaggagtatgcctaggcactgagccctccaggcatcagttctgtgtcagcagccatccagcttacatcctaaa

SEQ ID NO: 363963 - DNA, 201 bp, Homo sapiens
cacctgatccctcagggagctgaggctcaagagctgagaggagtatgcctaggcactgagccctccaggcatcagttctgtgtcagcagccatccagcttrcatcctaaattaaagagtctgtagttccactggtcctgcaccggggattctgcgaattatctaagtggatttggagattgtatataccagtgtttagtcc

SEQ ID NO: 363964 - DNA, 201 bp, Homo sapiens
agcattgcacccaaaactacccggtaggtgagatgccacctgatccctcagggagctgaggctcaagagctgagaggagtatgcctaggcactgagccctscaggcatcagttctgtgtcagcagccatccagcttacatcctaaattaaagagtctgtagttccactggtcctgcaccggggattctgcgaattatctaa

SEQ ID NO: 363965 - DNA, 201 bp, Homo sapiens
ctgaatactggcaaggaattaggggtgcacaccccagccctcaagattaattccatgcctgtgcatgtcttttggaactgctttattaatgggtttggagyctgccattctgcaagactggatcattatcaccttagtcctcacccctgggaagagctgccactgaaggatggtgtgtgtgtgtcagcaaccctgcctctg

SEQ ID NO: 363966 - DNA, 201 bp, Homo sapiens
acctgagaaagagccaggactcagttgcttttgcaaagcagaaccctgttcccttgcagcacctgcctgggcccccagggagccaaaagactgctctgctragttctctcttttctggaagttgctcactcgagaagaatgaaatctgcccgccatggtggcttatgcctataatcccagcactttgggaggctaaggcgg

SEQ ID NO: 363967 - DNA, 201 bp, Homo sapiens
aggactacagacatggaccattacgcctgactaattttttgaattttaatagacacgaggtctcactgtgttgcccagggtggtctcgaactcctgagcartcctcctgcctcagcctcccaaaatgttgggattacaggtgtgagccactgtgcctggccacacacttggccacagctgagaggcgaatatattgagtta

SEQ ID NO: 363968 - DNA, 201 bp, Homo sapiens
caagatataggtattgccactctccagagagctccccggtgccccttttagagtccgacccttctcccacccccactccctggctatgcccgtttggtttyatcctacattatagtcactctgtctgagatttgctttcagcaactgtccttgctgctacatgttgagttctttaattctttaaataagtcgatttctttt

SEQ ID NO: 363969 - DNA, 201 bp, Homo sapiens
tttgggaggccgaggtgggaggattgcttgaagctcaggtgtttgagatcagcctgggcaacatagcaagaccccatctctactaaaatcagaaaattagraaaaaaaaaattaatggtgacgtatgcctgtagtcccggctacttgaggagctgaggtgggaagatcacatgagcccaggaagtcaagtctgcagtgagc

SEQ ID NO: 363970 - DNA, 201 bp, Homo sapiens
gaggtaggtggatcgcctgagatcaggagttcgagaccagcctggtcagcatggggaaaccccgtctctgctaaaaaaaaaaaacaaaaaaaacaaaactrtgcaatccagtgtttttagtattttcacagacttgtgcaacccttgccacaatgccattccagaatatatttatcaccctggagagcaatgctatatctt

SEQ ID NO: 363971 - DNA, 201 bp, Homo sapiens
agtacatttttaaaggggaggagtcatgtcaaacatcctttttttaattatgagagtccattattgtgagtgggaattccattcctgtgattttttttttttccttaagaaagtatagtttatgtttctcctaagtttttacttttcaagggttttaaataacctttttgtacagtttttgcttttcttctggtaggtctt

SEQ ID NO: 363972 - DNA, 201 bp, Homo sapiens; identical to SEQ ID NO: 78646

SEQ ID NO: 363973 - DNA, 201 bp, Homo sapiens
tagaaggaattacttgataggtatctttatttttaatttttcttctttgcccttgatttgaggttgtcacacctcgatatggtatttcagaaaactgccaragctatccttcaattatttgcccagcccgttatctctattccttgatcctgacttagactataaaccagtggatttggcaaggatttccttaagtgttac

SEQ ID NO: 363974 - DNA, 201 bp, Homo sapiens
tctggcgtggggccccagccagtgtgtgcctgggcagcacatcacagtaacaaagtctgaagagatgacaaagcacagtctgagaggcagccagagtagcrgggagctgtttatggaggaaataggggaggggagggcagatgagagagatttgcggtcttttctataggcctccgtatttgattaggttcagggagttgt

SEQ ID NO: 363975 - DNA, 201 bp, Homo sapiens
atgagaaagtacctaacagccactaagaatgacaaaagtggatggactgtgatgccgtaggagggttcagatgagatctagtgtgaacagagcgagatccratgctggtagctataaaaaacagcacaaaggctgtggatttcagcactgcttggggcagaaaaccagaaacaacctaaagttcataagatggaataatat

SEQ ID NO: 363976 - DNA, 201 bp, Homo sapiens
ggagatctagtgagactctgtctctacaaagaatttaaaaattaagctgggtgtggtggcgcgtacctgtagtcccaactactcaggaggctaaggcaggaggatcttttgagcccaggtgtatgaggttacagcaagctatgatggtgctactgcacttcaacctgggtgacacagtgaggtcctgtctctttaaaaaaa

SEQ ID NO: 363977 - DNA, 201 bp, Homo sapiens
ttcaattgttatcctttttggtgctcaaaatgttccatttttgccaatgggccaaactgtgtgtgtgtgtgtgtgtgtgtgtgtgtgtgtgtgtgtgtgtkaacatccattcatttacacattgggtacaactggttttcagtttaactgtagagttaaatagttactagactggccagaaagcctaaagtatttaccaac

SEQ ID NO: 363978 - DNA, 201 bp, Homo sapiens
tggatacctctgaaagaaagattgaatttgactctgcctctggcacctacactctctacttaatcattggagatgccactttgaagaacccaatcctctggaatgtggtatgtgcctgaatgtaccccgacccaggtgagagtggctgtgccccaggcactggtggctctttttcaggggcatggggctcttcaccttcgc

SEQ ID NO: 363979 - DNA, 201 bp, Homo sapiens
aacttgctcagctaataagtagtggaagcaaatctgtcttccaagccgaggctctctccatgacactgggctgctctgcttgattagaactctgccttacyatcaatacccaagcctcctctactaaatctttagctggaggcacaaggaaattgaaaatgggcctcttacagttccacctcatttcctttcttttcaccc

SEQ ID NO: 363980 - DNA, 201 bp, Homo sapiens
taaactagtaggattaggattagagcaaggagagttagtgaggaagtgtaactttcactgaatacttgtctcatccagaattctgctgtagaatcatggcytagagaccttccaggtggaggtggcattttggtgatgaacttggcagctgcctgcacttgattgtgataggaaggagatctggcatccggtctccccatt

SEQ ID NO: 363981 - DNA, 201 bp, Homo sapiens
gcctccactggctaccagggatccagctttgtgctgggccacttcattttgctcttcaacgcctggtgcccaggtgagccacacgccatccactcacagcrttggggtgggcagggctggatccgcccatggaggaggctactggaggtgagaagaacaggggataagagacacacatcaaagtggactgagtgaggccca

SEQ ID NO: 363982 - DNA, 201 bp, Homo sapiens
ggcaagggtgcctggtcactgggactggaatccaggtctctgggccaagcctgggttctggcctctgtctgccaacttcctagaagccagtcctgaccccrgctggccacatcctggggttgctcaacgccatgcgtcactcaggtggccatagttctgtggaatgtgggagaggaagtgggggcagctggctgggtgcgg

SEQ ID NO: 363983 - DNA, 201 bp, Homo sapiens
ggggaggtgttcttgatcccagatctgacctaagagtccacatctgtgtgtccaggtgcaccccggttccgttgtgtgtttctgtgagggtgctgcgtgtrtctgtatctgagtgtgtgtgtccaggtgtctgttctccaaggtctgagtctgtgggtccaggtgtgtctgtttcctgggctagttgtgtgtccctgtccg

SEQ ID NO: 363984 - DNA, 201 bp, Homo sapiens
tggggggaagaacaaggcagtggggagacaccctgggctcagtttgggacgaggcgagcttgcatctggggacatgaatgcatggtctgcccgtgggaggkggcgatgaatgttgctcatgttctgcttcattcccgcccccctatccccctcaggaacttccactgctgggtggagtcgtggatgaccaggccggacctg

SEQ ID NO: 363985 - DNA, 201 bp, Homo sapiens
tgtgtgtttctgtgagggtgctgcgtgtatctgtatctgagtgtgtgtgtccaggtgtctgttctccaaggtctgagtctgtgggtccaggtgtgtctgtwtcctgggctagttgtgtgtccctgtccgctcccccagggggcgccctcgtccggccgccgtccctccctcgggctccggtcccctgggtgagccccagcg

SEQ ID NO: 363986 - DNA, 201 bp, Homo sapiens
gctgtgagaacaagatttatttgtgagacagagagtctttctgagcaacacccaccaaataaatatgctacattgactgcaacctgcttcacccacacacrgggactctcccttttctggagagggtcctgactcttgatgacatcatcataaagcttaggtgacatttactgagtacttactatgtgacctgtaagcact

SEQ ID NO: 363987 - DNA, 201 bp, Homo sapiens
gcgctggggagagggcagatccctacccccaccccacacacctgcatccctgcaagctccagacctttggtgccttagcgatcctcaaatcctagcctcaycgaagaaaagcatcatgaagcctagagaattggggactcgtagcctctaggaatgaatctgaaaatcccagagtgttagggtcatggaatttggggatct

SEQ ID NO: 363988 - DNA, 201 bp, Homo sapiens
ttggccaggctggtctcggactcctggcctcaagtgatctacctgcctcggcctcccaaagtgctgggattataggtgtgagccaccgcacctggccaaarctaaagttttaattgtgttgaaagttagacagccacatgtggccagaagctgctatgttgggcagagcagatcggcgagccaaaggtgggagcgtccagg

SEQ ID NO: 363989 - DNA, 201 bp, Homo sapiens
accccacacacctgcatccctgcaagctccagacctttggtgccttagcgatcctcaaatcctagcctcatcgaagaaaagcatcatgaagcctagagaaytggggactcgtagcctctaggaatgaatctgaaaatcccagagtgttagggtcatggaatttggggatcttagagtcatgaatccttcaaatgctatact

SEQ ID NO: 363990 - DNA, 201 bp, Homo sapiens; identical to SEQ ID NO: 78677

SEQ ID NO: 363991 - DNA, 201 bp, Homo sapiens
tccctacccgcgtcgtgaccaactacaactcggcccatgaccagaacagcaaccttctcatcgagtacttccgcaatgagtttggggagatccagggtgayaagagcgagatgatctggtgaggtgggggccagggtgggatcggagcccagtagggagggccccatggagaggaaaccttggagggcttcttggaggagg

SEQ ID NO: 363992 - DNA, 201 bp, Homo sapiens
gctcagtgtccactctccagctcctcgctgggaaccctggagccacagtggggagttcagggatccgcccagccattcccccgctgtgtgaccccaagcayattccttcccctctctgtgcctcttggagttgcaagagagttgggaggggtgattctgcatcatgagcaccctcctttctccccttctgcagagaagagc

SEQ ID NO: 363993 - DNA, 201 bp, Homo sapiens
tcacagtcttggcatcctgagctggggtggggacaattcaacaagtgctgacactcattctaatgttgaaacactgtgggttcttctttctctttcattcytatcccacaccccccggctgctgcagagccattatagttcattgacttcaaggttaatttttatagaagtttccagagccaaagatcagaatacacaaga

SEQ ID NO: 363994 - DNA, 201 bp, Homo sapiens
cattcatggacacgctgtgctgatcctcggaggtcacgtgacttcctggctggaccccagcatgcgggagccaggccttgggcccctttcctcaccacccsctctctccctgcagcccagaccccgtggaggcaggggaggaagttaaggtgagaatggacctgctgccgctccacatgggcctccacaagctggtggtga

SEQ ID NO: 363995 - DNA, 201 bp, Homo sapiens
ccccccggctgctgcagagccattatagttcattgacttcaaggttaatttttatagaagtttccagagccaaagatcagaatacacaagagacttggccwctttcccatttttcctcactacgatgaaagtcagggctgctggttgctgcagacgggcatgacaaagcccaggggtctgaggggccggcagctgcttcct

SEQ ID NO: 363996 - DNA, 201 bp, Homo sapiens
tcggaggcctcacttgctaaaagctgtagaactggacatggcccaggcccctgaggactgccctgcagggcacggggagacaggactgacctctgaacctyggcggagccagcacaggccctgctttcccacttcctgactgtgtggccttgggtgaggcacttcccctctctgaacccagggttcctcatttaacaaatg

SEQ ID NO: 363997 - DNA, 201 bp, Homo sapiens
gacacgctgtgctgatcctcggaggtcacgtgacttcctggctggaccccagcatgcgggagccaggccttgggcccctttcctcaccaccccctctctcsctgcagcccagaccccgtggaggcaggggaggaagttaaggtgagaatggacctgctgccgctccacatgggcctccacaagctggtggtgaacttcgag

SEQ ID NO: 363998 - DNA, 201 bp, Homo sapiens
aaagtcataatggggctccagattgccccttcttggcctcagtttcttcaccggttaagtggagtcagtaaagccagcctgacctttgggctcctaccatyttgccccaacttcctcagctccttcttctcccctcactggccacagacaactaaatgccctgcattttccagcagccaaagctttgtgctttctggtcct

SEQ ID NO: 363999 - DNA, 201 bp, Homo sapiens
gatgggcccccgtggggggaagaacaaggcagtggggagacaccctgggctcagtttgggacgaggcgagcttgcatctggggacatgaatgcatggtctkcccgtgggaggtggcgatgaatgttgctcatgttctgcttcattcccgcccccctatccccctcaggaacttccactgctgggtggagtcgtggatgacc

SEQ ID NO: 364000 - DNA, 201 bp, Homo sapiens
cacacaattaatcaacatgtatattttctctatacatagagctctatttctctacggttttataaaagccttgggttccaaccaggcagtagatgtgcttytgaaccgcaaggagcaaacactgaaataaaatagtttatttttcacactcaaactaggtctggtctgttcctttatgagtttggagggagatgggtaggt

SEQ ID NO: 364001 - DNA, 201 bp, Homo sapiens; identical to SEQ ID NO: 78676

SEQ ID NO: 364002 - DNA, 201 bp, Homo sapiens
atgataattgcaaaactaactgctcagcaaccccgtagcctgctgtgggatataaatgaaatggtggtatgaccgtgatgcataaaatacatcagaaaatkaattggctctgatttttcatggctttttattctctcctgagaaggagaacaaagtcaagttcttcctttatttcccagggtcctgttttttttttttttt

SEQ ID NO: 364003 - DNA, 201 bp, Homo sapiens
tttctggtcctctgcttagaatgctaccctccaggttccaactctctaaaacttaatcattttttaagacaacattcagatgccacctcctccagggagcyctctgtaactctctcaagctggacaggaccccacctctcctgagctgcaggaaccctttcttggccttcccctctgctactgagttctctctgccttgaa

SEQ ID NO: 364004 - DNA, 201 bp, Homo sapiens; identical to SEQ ID NO: 78695

SEQ ID NO: 364005 - DNA, 201 bp, Homo sapiens
gcatcctgagctggggtggggacaattcaacaagtgctgacactcattctaatgttgaaacactgtgggttcttctttctctttcattcttatcccacacmccccggctgctgcagagccattatagttcattgacttcaaggttaatttttatagaagtttccagagccaaagatcagaatacacaagagacttggcctc

SEQ ID NO: 364006 - DNA, 201 bp, Homo sapiens
  misc_feature (1)...(201): n = A,T,C or G
gatgatctggtgaggtgggggccagggtgggatcggagcccagtagggagggccccatggagaggaaaccttggagggcttcttggaggaggtcacatttnaattgggccttaaaagttcagcagtatttgagcaggcttggggaaggcctagagggaaagtcaaccacatacatgatggggcctcaggaagaatcatgct

SEQ ID NO: 364007 - DNA, 201 bp, Homo sapiens
tcaaggggctgggaccccgtgccggctgcagggacggtggaagggggatgcactacacctggagggtggtacattgtggagtcagagctgaggacaagacraccaggtcagtttctccatctgcaaagtggacacgctggaagaatcctccctccctccacagatgccctgttctctgtcctccacagcctgggagaccca

SEQ ID NO: 364008 - DNA, 201 bp, Homo sapiens
ctgggggaggggggtgagtaggagcagttagaccgtccagctgcctccttatacactatctcagtcgggcctctcaacaatcccaagggggagatgacacktccccacttcacacacaggaaactgaggctcagagtggtgaagtggcctttggaatctctttgaataaataagtggacaaccttggacaaaactagaaag

SEQ ID NO: 364009 - DNA, 201 bp, Homo sapiens; identical to SEQ ID NO: 78678

SEQ ID NO: 364010 - DNA, 201 bp, Homo sapiens
acctgcatccctgcaagctccagacctttggtgccttagcgatcctcaaatcctagcctcatcgaagaaaagcatcatgaagcctagagaattggggactygtagcctctaggaatgaatctgaaaatcccagagtgttagggtcatggaatttggggatcttagagtcatgaatccttcaaatgctatactactaaggct

SEQ ID NO: 364011 - DNA, 201 bp, Homo sapiens
attcatggacacgctgtgctgatcctcggaggtcacgtgacttcctggctggaccccagcatgcgggagccaggccttgggcccctttcctcaccaccccytctctccctgcagcccagaccccgtggaggcaggggaggaagttaaggtgagaatggacctgctgccgctccacatgggcctccacaagctggtggtgaa

SEQ ID NO: 364012 - DNA, 201 bp, Homo sapiens
aagtgcctgccagggctcagtgtgttcctctgtgaaatggaatggtagatgagctgctggcttgggcagcctgtgatttctactttcttttttatttatttttctttctttctttctttcttttttaaaacttttattttaggttcatgggtacacgtgcaggtttgttatataggtaaactcgtgtcacgggggtttgtg

SEQ ID NO: 364013 - DNA, 201 bp, Homo sapiens
gcgtggtcttgaggtttttggctacatgtgattgaattgtggagcgttttagaggacaccacccaaccttcacccaggcccatcccttcccctttctaccyctgccagggacgtactgctgtggcccagttccagttcgtgccatcaaggagggcgacctgagcaccaagtacgatgcgccctttgtctttgcggaggtca

SEQ ID NO: 364014 - DNA, 201 bp, Homo sapiens
tatgctacacaaatggggccaggtgatcccagagagagggatgggcttgtcccgagtcacatcattgcagagcagtggaactgagccttggctctgggccrcatggcccctctctcaggaggactctttagttgaggacatgctgtatgcctgtggctttttatgcattcccacaaaaccaccctaaaaggctggggttct

SEQ ID NO: 364015 - DNA, 201 bp, Homo sapiens
cctcggaggtcacgtgacttcctggctggaccccagcatgcgggagccaggccttgggcccctttcctcaccaccccctctctccctgcagcccagacccygtggaggcaggggaggaagttaaggtgagaatggacctgctgccgctccacatgggcctccacaagctggtggtgaacttcgagagcgacaagctgaagg

SEQ ID NO: 364016 - DNA, 201 bp, Homo sapiens; identical to SEQ ID NO: 78673

SEQ ID NO: 364017 - DNA, 201 bp, Homo sapiens
gaccgctttgctctgagcctcagttttctcacctgggcaaggggtctcaaaggaagcaggtgcttcatgaagtgtaaaaggctgtaggaaggtgaggggtygttatgaccagcatctcggaactgcctatggagatgtgggggacagcagatggggggcctggggagacagacaccttgaggctgtgtgggccagccagca

SEQ ID NO: 364018 - DNA, 201 bp, Homo sapiens
cctggatccccaggctcaccggcagaaaccctggtcatcctggtcaccctgggctgtggccgcctgaagattgagcagcagatcctgcccctcagctgccyactgcagggctgtgttctggtccccgcagcctcttcccaggctgtgtaggatggagccagggaaaacttggccaagaaaagggctgtctgaccactgtgg

SEQ ID NO: 364019 - DNA, 201 bp, Homo sapiens; identical to SEQ ID NO: 78675

SEQ ID NO: 364020 - DNA, 201 bp, Homo sapiens
tattgtttcctgagcacttactatacaccaggtgccttgtgggatgctttgtatgcctgtcctctttaagcttcacaacaaccttatagggaggtactgcyactggcctcattttacagatgagaaaactgtggcatagagaagctaagtaacttgtcgaagttcagagagccagtttcgaacctgagattggactctccc

SEQ ID NO: 364021 - DNA, 201 bp, Homo sapiens
  misc_feature (1)...(201): n = A,T,C or G
atgcgtgcacaggcactgttcactctaggagggcagattgtccaggccccgcagagggccgagaatgaggcccattcatggacacgctgtgctgatcctcngaggtcacgtgacttcctggctggaccccagcatgcgggagccaggccttgggcccctttcctcaccaccccctctctccctgcagcccagaccccgtgg

SEQ ID NO: 364022 - DNA, 201 bp, Homo sapiens
ggggttgggtgaagggctgctgctgaccttcccacctcagcaagctaatctctgtcctccagtctccaccaacttatctcaaaccataaccaacctgcccyggtcacttccgcagcccctgtaggcagccacggaagagcccagatctctgagtacagagtgcacacagcttccctgtccaagcaaccaagaaattcccgg

SEQ ID NO: 364023 - DNA, 201 bp, Homo sapiens
gtggaaggagccaccgcccccgcccgaccatggccgagggtgagtatcagagtcaccgcagccgccactcaggggccccggggcattgggggtcaggaccyggtgggagctgaatccctaagtcctgacttggagagcaacaggcagaccgggctgggtgaggaggcgtctcaatgctgcttggagcctcagtttccccat

SEQ ID NO: 364024 - DNA, 201 bp, Homo sapiens
gtgcaggtttgttatataggtaaactcgtgtcacgggggtttgtggtaccgattattttgtcacccaggtgctaagtctagtacccaagcgttattttttytgctcctctccctcctctcaccctccaccctcaaggaggccccagtgtgtgttgtttccctctatgcgtccatatgttctcgtcatttctctcccactta

SEQ ID NO: 364025 - DNA, 201 bp, Homo sapiens
cagtttgagacccgacagactccgttatggggtccaggccacactagacaaatgccatccttgtcagagggataaagttccctccaaggtggggtcggggyttgagggggtgtggcagtcacaatgggagtgaagtcagcctggaggagtgaagggaacccttatgaggctgatagaaggctttactctggaaggtcctgc

SEQ ID NO: 364026 - DNA, 201 bp, Homo sapiens
aagaggcaaaggcaggattagaaccaaggcccgtgggagtccaagtgcgtcctctacccgctgctcagtgtccactctccagctcctcgctgggaaccctrgagccacagtggggagttcagggatccgcccagccattcccccgctgtgtgaccccaagcacattccttcccctctctgtgcctcttggagttgcaagag

SEQ ID NO: 364027 - DNA, 201 bp, Homo sapiens
gtgagctggtcactgttcaaaatgctttctatgaactctctcacggaaccctctaaacagagccaggaggcgttcatgaaaactgaacaagactaactatkgtttcctgagcacttactatacaccaggtgccttgtgggatgctttgtatgcctgtcctctttaagcttcacaacaaccttatagggaggtactgctact

SEQ ID NO: 364028 - DNA, 201 bp, Homo sapiens
ctatgatcacaccactgcactccagcctgggcaacaaagcaagaccttttctcaattaaattaaaaagaaaaaaaagagttagggagattgggccccaccyagcccccgtgtgaccagggctggggagacaggtcagtcgaaacaatggctgtgctttgtggggagtaagagggcacaaggcccccatgtctagggagggc

SEQ ID NO: 364029 - DNA, 201 bp, Homo sapiens
actgctactggcctcattttacagatgagaaaactgtggcatagagaagctaagtaacttgtcgaagttcagagagccagtttcgaacctgagattggacyctcccaggcatgtggcctaagcctgttttcttcttggataagaaagcagatcagagaggcctggtgatgtggcccaggtcacacagtgctcaggggcaga

SEQ ID NO: 364030 - DNA, 201 bp, Homo sapiens
cagtggttgtcctgggattgtagaagatatgattggagggtaagtcagacccagatctttcatctctggtgcagacagcaaaggctgcgagaggccctagygcctcaccccgattcctggtcctaccaggggcaactggcaccacaagtcctatcagagctcccgggccaaccccaagaacctggcttgggcttgaacaag

SEQ ID NO: 364031 - DNA, 201 bp, Homo sapiens
atgttttgttttggagaatattgaacatacacaaaaatagacagaattgtttaataaattcctatgtcctcatcacccagcactgaccaccgtggtgtctmctgcccctgcgcaccttcatctcagacatcacatcatgtcatctgtcaatgtttcagtatatgcctttaaaggataaggactctcttttttttaacacaa

SEQ ID NO: 364032 - DNA, 201 bp, Homo sapiens
ccagtggttgtcctgggattgtagaagatatgattggagggtaagtcagacccagatctttcatctctggtgcagacagcaaaggctgcgagaggccctakcgcctcaccccgattcctggtcctaccaggggcaactggcaccacaagtcctatcagagctcccgggccaaccccaagaacctggcttgggcttgaacaa

SEQ ID NO: 364033 - DNA, 201 bp, Homo sapiens
tcagaggaggagtcacagagagggagagacacttatccaggctcacacagcaacacagcagaactaaaacctacctctggaagtctccaaagcacctattrtgttaaaaatgttttgttttggagaatattgaacatacacaaaaatagacagaattgtttaataaattcctatgtcctcatcacccagcactgaccaccg

SEQ ID NO: 364034 - DNA, 201 bp, Homo sapiens
  misc_feature (1)...(201): n = A,T,C or G
gaggcgagcttgcatctggggacatgaatgcatggtctgcccgtgggaggtggcgatgaatgttgctcatgttctgcttcattcccgcccccctatccccntcaggaacttccactgctgggtggagtcgtggatgaccaggccggacctgcagccggggtacgagggctggcaggccctggacccaacgccccaggagaa

SEQ ID NO: 364035 - DNA, 201 bp, Homo sapiens
acacaccctgagtcccgagcgcaccaggctcttccgggacactcgctcagctcatcctcccacagccttaggagtgcctgtgccacgcagatccaaacatygaggacctgggaggtggagtggctcacgcggggtcacccattagaagaggcaaaggcaggattagaaccaaggcccgtgggagtccaagtgcgtcctcta

SEQ ID NO: 364036 - DNA, 201 bp, Homo sapiens
acctgagcaccaagtacgatgcgccctttgtctttgcggaggtcaatgccgacgtggtagactggatccagcaggacgatgggtctgtgcacaaatccatmaaccgttccctgatcgttgggctgaagatcagcactaagagcgtgggccgagacgagcgggaggatatcacccacacctacaaatacccagagggtatgt

SEQ ID NO: 364037 - DNA, 201 bp, Homo sapiens
agcccaagcagaaacgcaagctggtggctgaggtgtccctgcagaacccgctccctgtggccctggaaggctgcaccttcactgtggagggggccggcctractgaggagcagaagacggtggagatgtaagtgctggctgctctagctttggggcctgggggaagcgggcagatgccggtgggggtagagactgtcctta

SEQ ID NO: 364038 - DNA, 201 bp, Homo sapiens
ccttgctactgctagaagaacccagaagggagtgaaaagtgtcttgtgggcttaatgtgcaagtcacaaagtctctctactcataggatggctctgggtcrccacggcaatcattgacaattgccctgctctatctgcacagaatgagcaggactgtttatcccaacaccaaatgacgccatctgttgtcaatgtcagagc

SEQ ID NO: 364039 - DNA, 201 bp, Homo sapiens
agtgcctgccagggctcagtgtgttcctctgtgaaatggaatggtagatgagctgctggcttgggcagcctgtgatttctactttcttttttatttatttttctttctttctttctttcttttttaaaacttttattttaggttcatgggtacacgtgcaggtttgttatataggtaaactcgtgtcacgggggtttgtgg

SEQ ID NO: 364040 - DNA, 201 bp, Homo sapiens
gtgcctgccagggctcagtgtgttcctctgtgaaatggaatggtagatgagctgctggcttgggcagcctgtgatttctactttcttttttatttatttttctttctttctttctttcttttttaaaacttttattttaggttcatgggtacacgtgcaggtttgttatataggtaaactcgtgtcacgggggtttgtggt

SEQ ID NO: 364041 - DNA, 201 bp, Homo sapiens
tgcctgccagggctcagtgtgttcctctgtgaaatggaatggtagatgagctgctggcttgggcagcctgtgatttctactttcttttttatttatttttctttctttctttctttcttttttaaaacttttattttaggttcatgggtacacgtgcaggtttgttatataggtaaactcgtgtcacgggggtttgtggta

SEQ ID NO: 364042 - DNA, 201 bp, Homo sapiens
cccaccactcccggcttgaatttttgtattttttatagagacggggtctcactatgttgctcaggctggtctcaaactcctgggctcaagcaatcctcctrcctcagcctcccaaagtgctgggattacaggcgcgagccactacacccaactacttgtatttatttactgctcctccctgcctcctacaaacagacccca

SEQ ID NO: 364043 - DNA, 201 bp, Homo sapiens
gccctgccctgccagccctgctacccctagctcacggctactgcttctccctccacaggcccagcccctagccaggaggccgggaccaaggcccgttttcyactaagagatgctgtggaggagggtgactggacagccaccgtggtggaccagcaagactgcaccctctcgctgcagctcaccaccccggccaacgccccc

SEQ ID NO: 364044 - DNA, 201 bp, Homo sapiens
tgtctgcgtggccagccgtgtttggtgtatctgtgggagtgtatctgtgtttgtgtgtgtatctccacagccctgtcttggtgtgtctgcgtctgctctcygtgtatgtatatctgagtatgtgtgtgagtgtgtgcgtgtgtgtgtgtgtgtgtgtgtgtgtgtgtgtgtgttgggggtggggaggtgttcttgatccca

SEQ ID NO: 364045 - DNA, 201 bp, Homo sapiens
tccactctccagctcctcgctgggaaccctggagccacagtggggagttcagggatccgcccagccattcccccgctgtgtgaccccaagcacattccttsccctctctgtgcctcttggagttgcaagagagttgggaggggtgattctgcatcatgagcaccctcctttctccccttctgcagagaagagcgttcctct

SEQ ID NO: 364046 - DNA, 201 bp, Homo sapiens
ggcccgtgggagtccaagtgcgtcctctacccgctgctcagtgtccactctccagctcctcgctgggaaccctggagccacagtggggagttcagggatcygcccagccattcccccgctgtgtgaccccaagcacattccttcccctctctgtgcctcttggagttgcaagagagttgggaggggtgattctgcatcatg

SEQ ID NO: 364047 - DNA, 201 bp, Homo sapiens
ttcagaggaggagtcacagagagggagagacacttatccaggctcacacagcaacacagcagaactaaaacctacctctggaagtctccaaagcacctatygtgttaaaaatgttttgttttggagaatattgaacatacacaaaaatagacagaattgtttaataaattcctatgtcctcatcacccagcactgaccacc

SEQ ID NO: 364048 - DNA, 201 bp, Homo sapiens
ggtttatgagatttgttttcccccaagacccccacccatctgtcaccctgaccatgccctggtcctctgctccatctgaaactgtaaatggaactttcacrtatcaagcttctgtcctgggctgggccgtggggaagggggttcccaacacatcttctagactcacagcagccccttgagacttcagaggaggagtcacag

SEQ ID NO: 364049 - DNA, 201 bp, Homo sapiens
tgtgatagtgaaaatcacaacatctgtggggcacccactgaacgcatgcttgtcttgaatcctcgcagcttagaagttataaaggactccattttgcagaygggaaagctgaggctcagaaaggtcaagtcactggctcaggaaggtcagtcacacagtgagtcagggacacagaaggcttcaaaccccgactgcagagtg

SEQ ID NO: 364050 - DNA, 201 bp, Homo sapiens
ctcctcccaccttaagggcttcccaatcctgaccttgagcttgccaaggtttatgagatttgttttcccccaagacccccacccatctgtcaccctgaccrtgccctggtcctctgctccatctgaaactgtaaatggaactttcacatatcaagcttctgtcctgggctgggccgtggggaagggggttcccaacacatc

SEQ ID NO: 364051 - DNA, 201 bp, Homo sapiens
acaaattcctgcccctgggcctcacttggaccacatgctgtccagtggctccacactcagaagtctgtcttgcccactcctcccaccttaagggcttcccmatcctgaccttgagcttgccaaggtttatgagatttgttttcccccaagacccccacccatctgtcaccctgaccatgccctggtcctctgctccatctg

SEQ ID NO: 364052 - DNA, 201 bp, Homo sapiens
cagccacttgctctgggacctggagccacctggtgtctttgtctacaaaatgggaatcatgatagcatctatgtaagcggagttgttttgggatttaagtygagataattcacatacaaggcactttgcatctcatttttggaatagtcgatggtgagcaggagacctgggctctcccactgcaaggaccaacttgcggcg

SEQ ID NO: 364053 - DNA, 201 bp, Homo sapiens
tctgcagtgttgacagttgctgcctcctggtttttctatcttgggcccaccgtgggcactcctggagctgcacgccctgggcacacccactgtccggccckgggcagactcctcagcaggggccaggccctcagagggcagatcctcttggtaccaggacagggcccaacactgaagctgttgaaagacatttcccgaggc

SEQ ID NO: 364054 - DNA, 201 bp, Homo sapiens
ccgtgccctggtcctctgctccagcctttggtgcatctgtgaggaacgagaggagtggaacagaggcttaactaatttcatactggtgcccctgactcccwccccacacacaagcagcactctcgtaggtcccagctggagggatttctacaatggaggatgtcactgctggacccagaatcccagctggctcttgggtca

SEQ ID NO: 364055 - DNA, 201 bp, Homo sapiens
gaagaggagcggcaggagtatgtcctcacccagcagggctttatctaccagggctcggccaagttcatcaagaacataccttggaattttgggcaggtaarggccacaccctgtctctcccaaccatctcaggcccttctgtgtgcccggccctgtgtctgggggcagccaaagctgcacaggtgggagtgagtcacagag

SEQ ID NO: 364056 - DNA, 201 bp, Homo sapiens
cggaccactggcacgtgtcctcagtcagtcagtgggggctggctctctgatgtgtgcctggagctgtgcagggggtgctggcctggcctcagaacacttargtttgggtggttcttgccagccaggaccaggtggtgtgcatgccacgccggtggtgtgcaagccaagcctggctgagtccttggctccagcggccagaga

SEQ ID NO: 364057 - DNA, 201 bp, Homo sapiens
caaccaggccctggatgaaaattgttaccctcttcgtcacacactcatggctcacccagtcattgtcccactccattccctcctgtgccaagagaagctgscaccagagagatttggtagactcggccggagtgtcccagtctgctgtgtgggacagagtgggaaacagctgctggaggcttcaacgcaggcttcctggag

SEQ ID NO: 364058 - DNA, 201 bp, Homo sapiens
ctgtcctggcggaccactggcacgtgtcctcagtcagtcagtgggggctggctctctgatgtgtgcctggagctgtgcagggggtgctggcctggcctcaraacacttaggtttgggtggttcttgccagccaggaccaggtggtgtgcatgccacgccggtggtgtgcaagccaagcctggctgagtccttggctccagc

SEQ ID NO: 364059 - DNA, 201 bp, Homo sapiens
acttgcatagcatttagtataggctatgagctttacatctataattcaggaatgctcattaggtggtccagatcttatctccacatgaaactgccgcttcragaagttagtgactggcccaaagtcaccagctaataacaggctgagctgggatttgaaccttaaaagttgtgctccagagcccctattctgaacccttgc

SEQ ID NO: 364060 - DNA, 201 bp, Homo sapiens; identical to SEQ ID NO: 78696

SEQ ID NO: 364061 - DNA, 201 bp, Homo sapiens
catggccgagggtgagtatcagagtcaccgcagccgccactcaggggccccggggcattgggggtcaggacccggtgggagctgaatccctaagtcctgayttggagagcaacaggcagaccgggctgggtgaggaggcgtctcaatgctgcttggagcctcagtttccccatccacactgcataaccattaacccttgcc

SEQ ID NO: 364062 - DNA, 201 bp, Homo sapiens
attttaggtagaagtaatccctgtgtaattgcttgaaggtaagaaagattgcactgtattcgtgcctagtatgcaccaagcactgttgtaggcactggatragtaaaacacagccttagccctcgagcagctcaagaaggtaagtttgaaacagaaaacaacacaggggaaggagtggtcagagagggcttcctggaggag

SEQ ID NO: 364063 - DNA, 201 bp, Homo sapiens
tccctggaatgcagatgggcaggtggaggcccagagcagggcggatgtctccaggacctcaccccgctttccactcctctccaacagtgctgaggtgcctrggcatccctacccgcgtcgtgaccaactacaactcggcccatgaccagaacagcaaccttctcatcgagtacttccgcaatgagtttggggagatccagg

SEQ ID NO: 364064 - DNA, 201 bp, Homo sapiens
ggacacctgctcatctgtgtccacagctgtgtgtggctcgcggtcaaggctacctggctgtgtcaggctgtatctatgtcctggtgtgtgtctgccattcraatctgaatttgtatccatgtcactgtgtctgcgtggccagccgtgtttggtgtatctgtgggagtgtatctgtgtttgtgtgtgtatctccacagccct

SEQ ID NO: 364065 - DNA, 201 bp, Homo sapiens
tcctggagcatttgttgaccgccaactgacaacatgctaggtagtgacctaaccacttagcatgtgtgatttcaccccacagacacttacatggcgctgaytctggggcaggccctgtcctaagcactttataaatatcaacccacttaattcttattgcaagagtgagggggtggattctaacatggctccgttttccag

SEQ ID NO: 364066 - DNA, 201 bp, Homo sapiens
agaacagcaaccttctcatcgagtacttccgcaatgagtttggggagatccagggtgacaagagcgagatgatctggtgaggtgggggccagggtgggatyggagcccagtagggagggccccatggagaggaaaccttggagggcttcttggaggaggtcacatttgaattgggccttaaaagttcagcagtatttgagc

SEQ ID NO: 364067 - DNA, 201 bp, Homo sapiens
accacagaagtggggggaaaagagcagacagaagggcccctggaggtgggtggtccagtggaaggtggcaagaaggggtcctgcttttgagaaagatgacrtttgaatggcaaggatgaggaggtgtgagccctgcagagagcagcgggaagagcattctgagcagagaaatagcacatgcaagggccctggggcagtgag

SEQ ID NO: 364068 - DNA, 201 bp, Homo sapiens
tcccccactcccaaactcaacttcaatcaaaactaaaagtaaaacaaaagtcccacagattaccttattacgcctaatcttgtttctcttcattttttagrtatttttttctgggaatctgttacttttacaatacacataaaaagcacatttttaaaatgagagagtaaaagcacccataattccgtctgccaggagcac

SEQ ID NO: 364069 - DNA, 201 bp, Homo sapiens
ggggaagaacaaggcagtggggagacaccctgggctcagtttgggacgaggcgagcttgcatctggggacatgaatgcatggtctgcccgtgggaggtggygatgaatgttgctcatgttctgcttcattcccgcccccctatccccctcaggaacttccactgctgggtggagtcgtggatgaccaggccggacctgcag

SEQ ID NO: 364070 - DNA, 201 bp, Homo sapiens
aggctcatggcacgcagggaccatgcgtcaacgagcacccttgcttcataccctgtggccaatggaatgatttctcgggacagaagtggccttactggatccccccccccgccccataggtttgttttgaattttagtcaatctgcagagggtagcaactagttggcagctctgccaacaggacaggaacacgccggtgtc

SEQ ID NO: 364071 - DNA, 201 bp, Homo sapiens
tcaccatgttggccaggctggtctcaaactcctgatctcaggtgatccgcccacctcggcctcccaaagtgctaggattacaggcgtgagccaccacgccsggccacatctgctcattctttctaagggcgttgagtgtcctgtttcttgcccatgtggatggtccagcccccactgatggacatgaggttgtgcctggag

SEQ ID NO: 364072 - DNA, 201 bp, Homo sapiens
  misc_feature (1)...(201): n = A,T,C or G
agtgcgtcctctacccgctgctcagtgtccactctccagctcctcgctgggaaccctggagccacagtggggagttcagggatccgcccagccattccccngctgtgtgaccccaagcacattccttcccctctctgtgcctcttggagttgcaagagagttgggaggggtgattctgcatcatgagcaccctcctttctc

SEQ ID NO: 364073 - DNA, 201 bp, Homo sapiens
gtcttactgaggaggaaatggaggctcagagaggggagtggcttgcccaaggtcatacagctggtgagcagcagggtcagtctctgatccaggtgtgcacrgtgctggggcagcctcctgttagactgatgaggaggcctcccgggacaccacccctggggcaagagtggcacttggctccctggaaagcagagacagacc

SEQ ID NO: 364074 - DNA, 201 bp, Homo sapiens
tatgaattcctaaataacattattaatttttactatatttggaagataatttgctgagctagagtaaatttagctccatccacctctatccaaaacttaaacattaaaatagtaaaatctgagtttagtttattgaactattagaagggtcataaatcactgttagtattattgtccatacccttccagatatgagaactg

SEQ ID NO: 364075 - DNA, 201 bp, Homo sapiens
taaaattggccttttgtaaccagaaatcttgatacaccagtcttttactgtttgctgctttcttataagcttggttttactttattttttaaattgatttwaaaaaatttttttgttgtgtttaaaactaccactaggtgtcagtaatatcctgtgactttcagttacagtgcaacctaattaggcagagagcaatgtgaa

SEQ ID NO: 364076 - DNA, 201 bp, Homo sapiens
cgttagcatttgcttttagaacttaatcagatttgaaatgtttataaataatctttgtatatttcctaaaatatttagttttcctccttaagattttttttggcattatttgaaattaaatcaagtagttgcttgcttattttgaggaaaaattattttagctagaattaaatagaaaagaaattcattttcattatcctt

SEQ ID NO: 364077 - DNA, 201 bp, Homo sapiens
gggagtttctgggggcagaaggaaggtccctgaaagggaacagtgatgaggatggaagatctctgagggtgatggggagacatgaaaggagatgctgaggstggaaaaaccccaatagggaaaaggagggaccaggaaataggacattcaccaaggctgtcttaagagggccatagggtcagaaagggattggagcttgac

SEQ ID NO: 364078 - DNA, 201 bp, Homo sapiens; identical to SEQ ID NO: 78731

SEQ ID NO: 364079 - DNA, 201 bp, Homo sapiens; identical to SEQ ID NO: 78733

SEQ ID NO: 364080 - DNA, 201 bp, Homo sapiens
cttgtggaatattgatagctggtctaatatctaaatagagtatctctggctcttcctacaccagcaggtgtttctcactcctggcgcctgaaatgtgtgtgccttctaagactgtaaaaataggcacctctcatatttctatataggaacacttagaaacaaacagcatttggaaagctgcatacatcttatatgaagtca

SEQ ID NO: 364081 - DNA, 201 bp, Homo sapiens
tcttgtggaatattgatagctggtctaatatctaaatagagtatctctggctcttcctacaccagcaggtgtttctcactcctggcgcctgaaatgtgtgtgccttctaagactgtaaaaataggcacctctcatatttctatataggaacacttagaaacaaacagcatttggaaagctgcatacatcttatatgaagtc

SEQ ID NO: 364082 - DNA, 201 bp, Homo sapiens
ctcttgtggaatattgatagctggtctaatatctaaatagagtatctctggctcttcctacaccagcaggtgtttctcactcctggcgcctgaaatgtgtgtgccttctaagactgtaaaaataggcacctctcatatttctatataggaacacttagaaacaaacagcatttggaaagctgcatacatcttatatgaagt

SEQ ID NO: 364083 - DNA, 201 bp, Homo sapiens
gctcttgtggaatattgatagctggtctaatatctaaatagagtatctctggctcttcctacaccagcaggtgtttctcactcctggcgcctgaaatgtgtgtgccttctaagactgtaaaaataggcacctctcatatttctatataggaacacttagaaacaaacagcatttggaaagctgcatacatcttatatgaag

SEQ ID NO: 364084 - DNA, 201 bp, Homo sapiens
aaaagcctttggaagactttatgggtaaatattatcacatagaatgagatatttttatttctctacagaaacaaaaaaggaactggtcctagaaagcaacycaaagtgggaggcactgactgaagtattaaaagaaattgaggcagaaaataaggagagtgaagctcttggtggtccaggtaggaaaaaaggagatgaaaa

SEQ ID NO: 364085 - DNA, 201 bp, Homo sapiens
gctttcggaatcctgaaagaacccctcactatcatccatccgcttctgggttgcagcgacccctatgctctgacaagggtactacatgaagtggagccaasatacgtggttctttatgacgcagagctaacctttgttcggcagcttgaaatttacagggcgagtaggcctgggaaacctctgaggcaagttataaagaat

SEQ ID NO: 364086 - DNA, 201 bp, Homo sapiens
tattgtccatacccttccagatatgagaactggatcaaaagcatgcaagtaccattatgccaaatatatataaggtaaccagcttgatttaggtctaaaasacagactcgtcttggagtaattgtggttttgatctagaaagcatgtctgtatgcctttatgtcatctcatgtttctccctaacttagcactaatcacact

SEQ ID NO: 364087 - DNA, 201 bp, Homo sapiens
aaagattctagcagtaagacattcttctatatttgaaaatttaaacattattattagaattttattaactgaaatgttctagccacttccttgaataatgyttgcagtttttttattgtagtaaaatatatatgacataaaatttaccattttaaccatttttagatacacaggaaataatccttttgaaagtatgatttg

SEQ ID NO: 364088 - DNA, 201 bp, Homo sapiens
aatggagccagcagctcgggggcttctgatggaagtggtttttggaccatactttgggaaacattgcctcagagcctctgtgtcttgttcaaagaagattytttgaaatatcaaccaggttgttgacatttcatgaagaacgacagaatgtaaggcagtatgggtaccacacagagagctgttcgtagaagtctttcctta

SEQ ID NO: 364089 - DNA, 201 bp, Homo sapiens
ctgagatcacactactgcactccagcctgggcaacagagtgagactcggtctcaaaaaaaaaaaaaaaaaaaaacacaaaaacttttaaagtagcctggckaggtgatgtgcacttatcgtctcagctacttgagaggctaaggtgagcccaggagttgaaggtgacaccaagatatgatcacaccactatactccagcct

SEQ ID NO: 364090 - DNA, 201 bp, Homo sapiens; identical to SEQ ID NO: 78740

SEQ ID NO: 364091 - DNA, 201 bp, Homo sapiens
atgaacatcacagaacgtgcttacacaaagctagacggtctagcctgctgcacagctaggctatgtggtatggcctatggctcctgggccacaaacctgcrcagcatgttactgtactgaatactctaggcaactgtaacacaatggtaagtatttgtgtatgtaaacacatctaaacatagaaaggtacaaaaatacagt

SEQ ID NO: 364092 - DNA, 201 bp, Homo sapiens
  misc_feature (1)...(201): n = A,T,C or G
ataagggggcacagggaaactaggaggacaagtgaggtaatagtaacataatgttgttttctattttcaggtcaagtactgatttgtgcaagtgatgaccnaacatgttcccagctgagagactatatcactcttggagcggaggccttcttattgaggctctacaggaaaacctttgagaaggatagcaaagctgaagaa

SEQ ID NO: 364093 - DNA, 201 bp, Homo sapiens
caggtggctcatgtgcatgttataatgtgagaagctgtggtctaagatgttcatgtttttcccagctccttccctttccccatctctggactcactgatayaaatacaatagtccctaaatcactagatttgctcagtgagcatttttaacatctactggggccgctattttaagcctctaccctcaggctttgtcctagg

SEQ ID NO: 364094 - DNA, 201 bp, Homo sapiens
tattttgcttcctgatgaatctgggaagttggataggaaggatgtcaagtatcacagcagaacaacaaaccaaggggactgctcttgttctcgttacgtgytgctgtgcgttctctcctttattctttgggtattggtttgcatcgtatggggtactgtatctgaaaaagtctgggaaatgcataatattctaatttctaa

SEQ ID NO: 364095 - DNA, 201 bp, Homo sapiens
ccttccctttccccatctctggactcactgatataaatacaatagtccctaaatcactagatttgctcagtgagcatttttaacatctactggggccgctrttttaagcctctaccctcaggctttgtcctaggaattgggaatacattgaccaacaaaatgtggtcagtgaggaaactacagaggggagaccttagcagg

SEQ ID NO: 364096 - DNA, 201 bp, Homo sapiens
tcaaaaacctagttcagaaatcgtgttataacagaccaggcattataccagccgcctcttgttccaggctctttgctcctctctgtcttactctttgtctkctagaccttcacgccacaaggctcaaagagtaaacaggtatttattaagcatctggtatgtgccaggccctgtgctaatattaaagtgctgaggttacaa

SEQ ID NO: 364097 - DNA, 201 bp, Homo sapiens
ggaacttaccctttagtggaaaagacagacattaaattattataaatattgtaataagtagaggtatacagagcaccgctggctgcaaaggtaaaagaagwgggtgtaataggagagtacatcaaagacctcacccagaccacaagctgatcgggagccgcttccctgaggaaatgatattcaagctgatactaggcagat

SEQ ID NO: 364098 - DNA, 201 bp, Homo sapiens
tgcaaagtgttgtcaacagggaaactcacctgagccttgagtccccacatttttactgagctgagtcacatagacacagagtacctccatggctggctacrgctcctcagactccagcccccaaagcagcaacagacatttacgataaatcacatcgtcagcataaactatctgatccagctggcacattgtgacccaagg

SEQ ID NO: 364099 - DNA, 201 bp, Homo sapiens; identical to SEQ ID NO: 78744

SEQ ID NO: 364100 - DNA, 201 bp, Homo sapiens; identical to SEQ ID NO: 78746

SEQ ID NO: 364101 - DNA, 201 bp, Homo sapiens; identical to SEQ ID NO: 78745

SEQ ID NO: 364102 - DNA, 201 bp, Homo sapiens
agaggcgctcttgtggaatattgatagctggtctaatatctaaatagagtatctctggctcttcctacaccagcaggtgtttctcactcctggcgcctgaratgtgtgtgccttctaagactgtaaaaataggcacctctcatatttctatataggaacacttagaaacaaacagcatttggaaagctgcatacatcttat

SEQ ID NO: 364103 - DNA, 201 bp, Homo sapiens; identical to SEQ ID NO: 78747

SEQ ID NO: 364104 - DNA, 201 bp, Homo sapiens
tggcatgagaaaagcaatacgattgagttggtttaaccttcggtgaggccaagtacagttgaagcagtgggtgtcagaatttagtagactttagaataacstcagatgctcattaaaactgtagattcataaccctcaattcatagaaattccaactcagtggatgtgaaatggagccagcagctcgggggcttctgatgg

SEQ ID NO: 364105 - DNA, 201 bp, Homo sapiens; identical to SEQ ID NO: 78748

SEQ ID NO: 364106 - DNA, 201 bp, Homo sapiens
tttggaccatactttgggaaacattgcctcagagcctctgtgtcttgttcaaagaagattctttgaaatatcaaccaggttgttgacatttcatgaagaasgacagaatgtaaggcagtatgggtaccacacagagagctgttcgtagaagtctttccttagagatcagttctccacgccttcatattagttgcctatggc

SEQ ID NO: 364107 - DNA, 201 bp, Homo sapiens; identical to SEQ ID NO: 78750

SEQ ID NO: 364108 - DNA, 201 bp, Homo sapiens; identical to SEQ ID NO: 78792

SEQ ID NO: 364109 - DNA, 201 bp, Homo sapiens
gtactgaatactctaggcaactgtaacacaatggtaagtatttgtgtatgtaaacacatctaaacatagaaaggtacaaaaatacagtattgtgatcttaygggatcactgtcttatatgcactttgtcattgaccaaaacgttgttgtacagcacatgaccgtattaataggttgcagggatttggatgtggacatcttt

SEQ ID NO: 364110 - DNA, 201 bp, Homo sapiens
attttaagcctctaccctcaggctttgtcctaggaattgggaatacattgaccaacaaaatgtggtcagtgaggaaactacagaggggagaccttagcagrtatgtgtggatttatgaatcatcgcaagtaaggaactactgacagtctaactttcctattagctcggtttccttcaagggaaattgcctctactttataa

SEQ ID NO: 364111 - DNA, 201 bp, Homo sapiens; identical to SEQ ID NO: 78758

SEQ ID NO: 364112 - DNA, 201 bp, Homo sapiens
  misc_feature (1)...(201): n = A,T,C or G
ggcgcggaccggctcctctaccactttctccagctgcactgccacccagcctgcctggtgctggtgctcaacacgcagccggccgaggaggtgcggccgcnctggcgcgggagtgaggggactccgagagtgttgagggcctcctgagcggatgcgaggcctctgacagggatggaggggctctgagggggattcaggccc

SEQ ID NO: 364113 - DNA, 201 bp, Homo sapiens
ctctgagggtgatggggagacatgaaaggagatgctgaggctggaaaaaccccaatagggaaaaggagggaccaggaaataggacattcaccaaggctgtsttaagagggccatagggtcagaaagggattggagcttgacgctgaggatgttggcaaaggttaactacagttaaggacaatggagaacactgagaaagat

SEQ ID NO: 364114 - DNA, 201 bp, Homo sapiens
  misc_feature (1)...(201): n = A,T,C or G
gaagacaggatgacagccagttacgtatgtaggtcatgtgaccatcagagactgttttaaattaaccataaattgatggcactttttcttttaacttttcntattaggttggctgtttcttgactccagcacctcgatgtttataaatgctcgagcaagggtttatcatcttccagatgccaaaatgagtaaaaaagaaaa

SEQ ID NO: 364115 - DNA, 201 bp, Homo sapiens
tgccctgtgtggtaacgagacctttaacaggtggggtttaggcagcttaatttgagctagtgtgtgataaatgaaacctttgattcttagtcaaatatttrttatttgagcgctctaggttgctgatttcacatgttctgctgttcctttcagggattaaaaatgctgtttttccaacctaaaagttctgtcttaacatgc

SEQ ID NO: 364116 - DNA, 201 bp, Homo sapiens
cagttgtgaacccaagcagggaagagactcagcttatatatcttttctgtcatacctggcagaattaattataacatactttatcaattttgaaaaataargctaccgcaaacctggcttactctttctgtgattattgaggatcttgtcatgatgtagttccaaattgcgaatcttagttatgattgtactgtcctctag

SEQ ID NO: 364117 - DNA, 201 bp, Homo sapiens; identical to SEQ ID NO: 78759

SEQ ID NO: 364118 - DNA, 201 bp, Homo sapiens
ctcaggcatataaaaaccttatcagggagaatactccaggggctcagagctcatctcccaggagctgaccaagagccagtgttgaggagagaagcctttcytggaaacatgcagagtttgagcagcccaggcctgctgagttaatcctttcctgcacagcgttagagccagaggagcctgatagaatgggaggaagacagc

SEQ ID NO: 364119 - DNA, 201 bp, Homo sapiens; identical to SEQ ID NO: 78760

SEQ ID NO: 364120 - DNA, 201 bp, Homo sapiens
ttagtctgttttatcgcagttcctcagttccagttgtttttttttttcttctcatgtttgctttgttccctcgacatcagttgtgaacccaagcagggaagagactcagcttatatatcttttctgtcatacctggcagaattaattataacatactttatcaattttgaaaaataaggctaccgcaaacctggcttactc

SEQ ID NO: 364121 - DNA, 201 bp, Homo sapiens; identical to SEQ ID NO: 78761

SEQ ID NO: 364122 - DNA, 201 bp, Homo sapiens
attccttgtttttgtttttgtttttctcttactgctatcatcatgtagatcattttcaatactacaatttacacacaataaaatctagaattttgaaattygtttcagaagtgttgacaatgttttctcccacagggaaaaagcaagcatggttgtccctgaagaaagagaaggcagagatgaaacaaacttagacctagt

SEQ ID NO: 364123 - DNA, 201 bp, Homo sapiens
agataagccagataatctcccaatctcaaaatgcttaacggagatacattctgagaaatgtgtcattaggcgatttcatcattacatgaacatcacagaaygtgcttacacaaagctagacggtctagcctgctgcacagctaggctatgtggtatggcctatggctcctgggccacaaacctgcacagcatgttactgta

SEQ ID NO: 364124 - DNA, 201 bp, Homo sapiens
ctttggccatgtgaaaagtgtgttccttgaagataaatgtatgtatgtttgttatatgtaacatgtaatgtatgttgaaagtatatatgtaaagtatatgygtaatgtatgtcgaagtatacagcatggcaagtcttgcagtctattgcccagggcttccaaataacagatgtcaaatattgatcaaaagtatgctacatg

SEQ ID NO: 364125 - DNA, 201 bp, Homo sapiens; identical to SEQ ID NO: 78762

SEQ ID NO: 364126 - DNA, 201 bp, Homo sapiens
gtttttgtttttgtttttctcttactgctatcatcatgtagatcattttcaatactacaatttacacacaataaaatctagaattttgaaatttgtttcaraagtgttgacaatgttttctcccacagggaaaaagcaagcatggttgtccctgaagaaagagaaggcagagatgaaacaaacttagacctagtaagaggc

SEQ ID NO: 364127 - DNA, 201 bp, Homo sapiens
ggcagagagcaatgtgaatttatgcaacgttgaagtctggcttatctgtagctcctaatgaaaaatgccaaattccctcctcctttctgatcaaagcccascgaataatgaagctggagctgttactgatgcttggctgagtggaatgtaaatgaatgccaaaaatgaattcttttgaattctttcatcccctgggatcat

SEQ ID NO: 364128 - DNA, 201 bp, Homo sapiens
cagcatgctcagccggcaatgccagcaaccagagggagttaccactgctgagaatcatgcagcagggagtctgagggcagaaactcaccaattctcagcasaggcgctcttgtggaatattgatagctggtctaatatctaaatagagtatctctggctcttcctacaccagcaggtgtttctcactcctggcgcctgaaa

SEQ ID NO: 364129 - DNA, 201 bp, Homo sapiens
aggttgttgacatttcatgaagaacgacagaatgtaaggcagtatgggtaccacacagagagctgttcgtagaagtctttccttagagatcagttctccaygccttcatattagttgcctatggctgctataacgaattaccccagacttagtggctcaaaacagcacacattttattatgttacagttctgcaggttcaa

SEQ ID NO: 364130 - DNA, 201 bp, Homo sapiens
agagcccacagaataatcgagtcttgtcaagaagcattcatcttgcgcctctttcgccagaaaaacaaacgtggttttattaaagctttcacagacaatgytgttgcctttgatactggtttttgtcatgtggaaagagtgatgagaaatctttttgtgaggaaactgtatctgtggccaaggtaaagaacattatgtgac

SEQ ID NO: 364131 - DNA, 201 bp, Homo sapiens
ctgctgcacagctaggctatgtggtatggcctatggctcctgggccacaaacctgcacagcatgttactgtactgaatactctaggcaactgtaacacaayggtaagtatttgtgtatgtaaacacatctaaacatagaaaggtacaaaaatacagtattgtgatcttacgggatcactgtcttatatgcactttgtcatt

SEQ ID NO: 364132 - DNA, 201 bp, Homo sapiens; identical to SEQ ID NO: 78767

SEQ ID NO: 364133 - DNA, 201 bp, Homo sapiens; identical to SEQ ID NO: 78768

SEQ ID NO: 364134 - DNA, 201 bp, Homo sapiens; identical to SEQ ID NO: 78730

SEQ ID NO: 364135 - DNA, 201 bp, Homo sapiens; identical to SEQ ID NO: 78732

SEQ ID NO: 364136 - DNA, 201 bp, Homo sapiens
ctaggttgctgatttcacatgttctgctgttcctttcagggattaaaaatgctgtttttccaacctaaaagttctgtcttaacatgcagggtttactttcytatatacggaggttcaactgaggaacaacgctatctcactgctttgcggaaagaaaaggaagcttttgaaaaactcataaggtaatacatagaaaatcag

SEQ ID NO: 364137 - DNA, 201 bp, Homo sapiens
taaaatttgtactaataatatatttgcatttataggttgtttcaaatagtataaaattttaaattacaatttctgttctttagtagtatcttctagtgatrccctgctctaaaatatttatccagagtggttgaagaattgaaccctctgatttcatttcctctaatgggtgtattagtccattttcatattgctatgaag

SEQ ID NO: 364138 - DNA, 201 bp, Homo sapiens; identical to SEQ ID NO: 78776

SEQ ID NO: 364139 - DNA, 201 bp, Homo sapiens; identical to SEQ ID NO: 78736

SEQ ID NO: 364140 - DNA, 201 bp, Homo sapiens
ctattaaaaactgccctgtattaaatagcctactaatcaagtttgatttgatttaggagtattttatcaatcagctgaagatagaaggagttgaacacctycctcgccgtgtaacaaatgaaatcacaagcaacagtcgctatgaagtttacacacaaggtggtgttatatttgcgacaagtaggatacttgtggttgact

SEQ ID NO: 364141 - DNA, 201 bp, Homo sapiens; identical to SEQ ID NO: 78738

SEQ ID NO: 364142 - DNA, 201 bp, Homo sapiens
aaccctcaattcatagaaattccaactcagtggatgtgaaatggagccagcagctcgggggcttctgatggaagtggtttttggaccatactttgggaaayattgcctcagagcctctgtgtcttgttcaaagaagattctttgaaatatcaaccaggttgttgacatttcatgaagaacgacagaatgtaaggcagtatg

SEQ ID NO: 364143 - DNA, 201 bp, Homo sapiens; identical to SEQ ID NO: 78742

SEQ ID NO: 364144 - DNA, 201 bp, Homo sapiens
aatggtaagtatttgtgtatgtaaacacatctaaacatagaaaggtacaaaaatacagtattgtgatcttacgggatcactgtcttatatgcactttgtcrttgaccaaaacgttgttgtacagcacatgaccgtattaataggttgcagggatttggatgtggacatctttgcggggtaccattattctgcctacagcag

SEQ ID NO: 364145 - DNA, 201 bp, Homo sapiens
tctttttgaaaatatagaaattatatggaatattaccatatagaattatgtaaccatccatcagagttaacaacagaaacatcgatttttagattttgttrtattccttctttgagagttcttccccagtgacattacttactttttctctgtaggtggccaggaacagaatggtacacagcaaagcatagttgtggatat

SEQ ID NO: 364146 - DNA, 201 bp, Homo sapiens
aacctaaaagttctgtcttaacatgcagggtttactttcttatatacggaggttcaactgaggaacaacgctatctcactgctttgcggaaagaaaaggargcttttgaaaaactcataaggtaatacatagaaaatcagtatgaaagccccaactacattggaaacctctggatgggggaatatcagatagtcctgctca

SEQ ID NO: 364147 - DNA, 201 bp, Homo sapiens
tcctggaacttaccctttagtggaaaagacagacattaaattattataaatattgtaataagtagaggtatacagagcaccgctggctgcaaaggtaaaaraagtgggtgtaataggagagtacatcaaagacctcacccagaccacaagctgatcgggagccgcttccctgaggaaatgatattcaagctgatactaggc

SEQ ID NO: 364148 - DNA, 201 bp, Homo sapiens
  misc_feature (1)...(201): n = A,T,C or G
ctgccacccagcctgcctggtgctggtgctcaacacgcagccggccgaggaggtgcggccgcactggcgcgggagtgaggggactccgagagtgttgaggncctcctgagcggatgcgaggcctctgacagggatggaggggctctgagggggattcaggcccctgacactacgcgatgacacagagaaggatggcagggg

SEQ ID NO: 364149 - DNA, 201 bp, Homo sapiens
gtggttttgatctagaaagcatgtctgtatgcctttatgtcatctcatgtttctccctaacttagcactaatcacactgcatcagatgacacaatatatakgaaagatctgggtcagtagtctcatttcataaataacaaagcatgtataattgttcttatttttgagatgctgaggtgttataatcatgtacacccccaa

SEQ ID NO: 364150 - DNA, 201 bp, Homo sapiens
tgtgatccttaaacaagcagcattagcatcacctggcattttgttatgaatgcagattcttagaccccttagatctcagacctactaaatacaacatctgkttttttgtttgtttgtttgtttgtttgtttgtttttgagacggagtttcacccttgttgtccaggctggagtgcactggtgcagtctcggctaactgcaa

SEQ ID NO: 364151 - DNA, 201 bp, Homo sapiens
aggctaaggtgggagaatcactcaaaccccaggaggtggaggttgcagtgagcttagatcgtgccactgcactccagcctgggcaaccgagtgacccccgyctcaaaaaaaaaaaagaaaaaaaagattaaaatcagcaaagggaaaaggcacatggggcaaagtccaggtaaaaccaggcctaagcttccaggtgtcctc

SEQ ID NO: 364152 - DNA, 201 bp, Homo sapiens
tgacaatgttttctcccacagggaaaaagcaagcatggttgtccctgaagaaagagaaggcagagatgaaacaaacttagacctagtaagaggcacagcayctgcagatgtttccactgacactcggaaagccggtgagtcctgcactttgtcaggcacctccattgcctgcaaagggggctgtgaagttccagagttact

SEQ ID NO: 364153 - DNA, 201 bp, Homo sapiens
gtctctttaggttccatgtagcagtaaactcatttttagaacagcacaaacctgaagttgtagaaatccatgtttctatgacacctaccatgcttgctatrcagactgctatactggacattttaaatgcatgtctaaaggaactaaaatgccataacccatcgcttgaagtggaagatttatctttagaaaatgctattg

SEQ ID NO: 364154 - DNA, 201 bp, Homo sapiens
gtgttgagaggggacacagcttggtcggacaagtctgatgatcccctagatatatcaggtggccgggagaaaaatgtcagctgagaagagtgaccacagtstctttgagggcagggatcctgtttgattcatctaggtatccccagtgcttggcatagggcctaaggcaacacacagggcctagtaaagatggttttaaac

SEQ ID NO: 364155 - DNA, 201 bp, Homo sapiens
ttattatttgagcgctctaggttgctgatttcacatgttctgctgttcctttcagggattaaaaatgctgtttttccaacctaaaagttctgtcttaacaygcagggtttactttcttatatacggaggttcaactgaggaacaacgctatctcactgctttgcggaaagaaaaggaagcttttgaaaaactcataaggta

SEQ ID NO: 364156 - DNA, 201 bp, Homo sapiens; identical to SEQ ID NO: 78754

SEQ ID NO: 364157 - DNA, 201 bp, Homo sapiens; identical to SEQ ID NO: 78755

SEQ ID NO: 364158 - DNA, 201 bp, Homo sapiens
tttattatttgagcgctctaggttgctgatttcacatgttctgctgttcctttcagggattaaaaatgctgtttttccaacctaaaagttctgtcttaacytgcagggtttactttcttatatacggaggttcaactgaggaacaacgctatctcactgctttgcggaaagaaaaggaagcttttgaaaaactcataaggt

SEQ ID NO: 364159 - DNA, 201 bp, Homo sapiens; identical to SEQ ID NO: 78795

SEQ ID NO: 364160 - DNA, 201 bp, Homo sapiens
taacaccctgcttacaaagcaaactccttaattttcattaaccccagttttctcattaagaaaacagtgcttcctgaagttattataaggattaagttaayaaaataatttcttagtatagtgcctggtacacaacaaactcttagtaattcataccaaataaaattggccttttgtaaccagaaatcttgatacaccagt

SEQ ID NO: 364161 - DNA, 201 bp, Homo sapiens
ccccctttccctgactcacgtgattctcccacatcagccccaagtggctgggactacaggcatgtgccaccatgctcaactaatttttttttttttttttktagagatggggtctcagtatattacccaggctgatcttctgagctcaaatgatcctcccacctcagccccccaaagtgctgggattacaggtgtgagcca

SEQ ID NO: 364162 - DNA, 201 bp, Homo sapiens
tttctttggaagttcatttttattattcttgactctacgtaatatttcaatccaggctaacaaaatgtggcctcttagagtccttgggaaaacccaccaaktaggtacagaatattttctgagtagtaaattagttatgtacgtgtattgggggggttattgaaaatcctttgtctatgaattcctaaataacattattaa

SEQ ID NO: 364163 - DNA, 201 bp, Homo sapiens
aaaatagctttgactgaaggtgaagcaaagggacagaggaggtgcttaattcagctctcttagcaacaaacaagatggaaaagcaggccttttttttttttcctttttttttttttctttgaggcagtgtcttgcccagatgcccagactggagtgcagtgttgcaatcatggctcactgcagcctcaacacctccccctt

SEQ ID NO: 364164 - DNA, 201 bp, Homo sapiens
cagagtagagatgaatggaggagctggatcagaaataatgcaggatgaagagattagatgaggctggtaaaataattataggctggtaaattttttgtacygtgctgttgatcaactttgtagatagcttatgtacaccaagcttctttcttgcctgagaacagaatagtgtggtatttgggagcaaaatgttagaatcag

SEQ ID NO: 364165 - DNA, 201 bp, Homo sapiens; identical to SEQ ID NO: 78763

SEQ ID NO: 364166 - DNA, 201 bp, Homo sapiens; identical to SEQ ID NO: 78764

SEQ ID NO: 364167 - DNA, 201 bp, Homo sapiens; identical to SEQ ID NO: 78765

SEQ ID NO: 364168 - DNA, 201 bp, Homo sapiens
atattcattaagaaaaacccataagagaggtaacaggaagataagaattggagatttggagatggtgagtgtggacaactctttggaggagttttggcacragggaaataaacagaaatatagctggcaggtactgtgccagcatcaacatatgaggagggtgactttcaggatgacacccaccgtgaaagactgcagaat

SEQ ID NO: 364169 - DNA, 201 bp, Homo sapiens
tcctttcacattttacatggtaatatagatttttaaaaagtatttttatttgaaaacaactcaaaatttatttaaaaagttgtaaaaattaaaatattacraagaacatattcatttactgttacctagagtcacttatggttaacattttacttcacttcctttgttatttgtgccttctttctctccatacacacacag

SEQ ID NO: 364170 - DNA, 201 bp, Homo sapiens
cctggacacttgatctggcccaggcagggtgggcatagtaaatggctaattgtgccatgacagagtccagaataaaatcataccgagtggtcttgtggggsatggtttacaacctgctgtgtgagtacaacatggagctcatgtggaatcattgccttcccacagtttagcccaacttaatttctttattatttagtgacc

SEQ ID NO: 364171 - DNA, 201 bp, Homo sapiens
aaattttaatttgatcttggaaatgttcaagcagacagtaattttaagaagacatatagtcatcttgaatcaccatggcctgcttaatgactgtactttcyttttttttcttttttgagttaggatcttgctctgtcaccaggctggattgcagtggcatgattatagctcactgctgccttgacctcctgggcccaagtg

SEQ ID NO: 364172 - DNA, 201 bp, Homo sapiens
gttctcaaaaggagatgtacaaatggccaacaaacatgtgaaaacatgctcaacatcactaatgatcagggaattgcaaatcaaaaccacaatgagatacygctttactcctgcaagaatgaccataattaaaaaataaaaaaaataatagatgttggtgtggatatggtgaaaagtaacacttttacactgctggttgga

SEQ ID NO: 364173 - DNA, 201 bp, Homo sapiens
tcaagcatctgtttaacaaagcacatcttgcaccgcccttaatccatttaacccttagtggacacagcacatgtttcagagagcacggggttgggggaaakgtcatagattaacagcatcccaaggcagaagaatttttcttagtacagaacaaaatggagtctcctatgtctacttctttccacacagacacagtaacaa

SEQ ID NO: 364174 - DNA, 201 bp, Homo sapiens
ttccccacacttcccccctttctatttgacaaaaccgccatcgtcatcatggcccgttctcaatgagctgttgggtacacctctcagacagggcggctgcygggcggaggggctcctcacttctcagacggggcggccggtcagagacgctcctcacctcccagacggagtggcggcggggcagagacactcctcatttcc

SEQ ID NO: 364175 - DNA, 201 bp, Homo sapiens
gaggggctcctcacttctcagacggggcggccggtcagagacgctcctcacctcccagacggagtggcggcggggcagagacactcctcatttcccagacwgggtcgaggcagggcagaggcgctcctcacatcccagacggagtggcggggcagaggcgctccccacatcccagaagatgggcggccgggcagagacgct

SEQ ID NO: 364176 - DNA, 201 bp, Homo sapiens
ctcagacggggcggccggtcagagacgctcctcacctcccagacggagtggcggcggggcagagacactcctcatttcccagactgggtcgaggcagggcrgaggcgctcctcacatcccagacggagtggcggggcagaggcgctccccacatcccagaagatgggcggccgggcagagacgctcttcacttcctagacg

SEQ ID NO: 364177 - DNA, 201 bp, Homo sapiens
tcacctcccagacggagtggcggcggggcagagacactcctcatttcccagactgggtcgaggcagggcagaggcgctcctcacatcccagacggagtggyggggcagaggcgctccccacatcccagaagatgggcggccgggcagagacgctcttcacttcctagacgggatgactaccgggaagaggcgctcctcact

SEQ ID NO: 364178 - DNA, 201 bp, Homo sapiens
ctcctcatttcccagactgggtcgaggcagggcagaggcgctcctcacatcccagacggagtggcggggcagaggcgctccccacatcccagaagatgggyggccgggcagagacgctcttcacttcctagacgggatgactaccgggaagaggcgctcctcacttcccagactgggcagccgggcagagatgctcctcac

SEQ ID NO: 364179 - DNA, 201 bp, Homo sapiens
gcgagactccgtctgcaatcccggcacctcgggaggccgaggctggcagatcactcgcggtcaggagctggagaccagcccggccaacatggcgaaacccygtctccaccaaaaaatacaaaaaccagtcaggcgtggcggcgcgcacctgcaatcccaggcactgggcaggctgaggcaggagaatcaggcagggaggtt

SEQ ID NO: 364180 - DNA, 201 bp, Homo sapiens
cagaggcgctcctcacatcccagacggagtggcggggcagaggcgctccccacatcccagaagatgggcggccgggcagagacgctcttcacttcctagaygggatgactaccgggaagaggcgctcctcacttcccagactgggcagccgggcagagatgctcctcacttcttagacggggtggcagccgggcagaggct

SEQ ID NO: 364181 - DNA, 201 bp, Homo sapiens
ctccaccaaaaaatacaaaaaccagtcaggcgtggcggcgcgcacctgcaatcccaggcactgggcaggctgaggcaggagaatcaggcagggaggttgcrgtgagccgagatggcggcagtacagtccagcctgggctcagcatcagagggagaccgtgcaaaggggagaggggagagggtcgagggtcagtttattatt

SEQ ID NO: 364182 - DNA, 201 bp, Homo sapiens
ccctagagaggaacttttggggtttggtgccttaaaatttctgtcagtcctcctacagtgatagaaaattgagatactttacttcctttttcttttattgktattaaaaacttggtgggtaacttttacatttctttttaagtgaggaagatagaaagtgtatgttatgacttctgcataaatgtaaggcttttttctctt

SEQ ID NO: 364183 - DNA, 201 bp, Homo sapiens
tcctcacatcccagacggagtggcggggcagaggcgctccccacatcccagaagatgggcggccgggcagagacgctcttcacttcctagacgggatgackaccgggaagaggcgctcctcacttcccagactgggcagccgggcagagatgctcctcacttcttagacggggtggcagccgggcagaggctgcattctcg

SEQ ID NO: 364184 - DNA, 201 bp, Homo sapiens
gttgagatggaaagtgaaaatgctgtatcataattattcagaataaagtaatagataacttacctttaaaataaactcatcaagacttttggctgggcacrgtggctcacgcctgtaatcccagcactttgggaggccgaggcgggtggatcacgaggtcaggagatggagaccatcctggctaacacggtgaaaccccgt

SEQ ID NO: 364185 - DNA, 201 bp, Homo sapiens
cagaataaagtaatagataacttacctttaaaataaactcatcaagacttttggctgggcacggtggctcacgcctgtaatcccagcactttgggaggccraggcgggtggatcacgaggtcaggagatggagaccatcctggctaacacggtgaaaccccgtctctactaaaaatacaaaaaattagctgggcgtggtgg

SEQ ID NO: 364186 - DNA, 201 bp, Homo sapiens
gtgggctgaataagacagttagatggatttatatctggttaaacaaccactgtaaaactctaaaaacaaagttgatgtgtctgatggatcagggtcagccygttgttcgtcgtgttgtggttttcagtgtcatttgatcatggatcctttagaaaagccagttgtatctactgactctcatcccataaaaatgcatgtaag

SEQ ID NO: 364187 - DNA, 201 bp, Homo sapiens
catctctgtgtactacttgtgtaactttaatactgctaaacttctaagcctcaatttttatacagtgtagataacctacctcctagggttattgtgatgawtaataagcagttatctttcggtgtttttttttttttttttgtcttaaattttagttggtttcaatacaagtagtaatttttatttccactcaggaattaa

SEQ ID NO: 364188 - DNA, 201 bp, Homo sapiens
attccactgaaacaagagcactgccttctctcccttttatttattgtcagtatttattaacttctattttttcaatggtttaaaatacattacatacctatttttttttttaatactttcaacttttattatagattaaagggtacatgtgcaggtttgttacatgggtatattgtgtgacggtgaggcttggggtcctaa

SEQ ID NO: 364189 - DNA, 201 bp, Homo sapiens
aattagaaaagattaattatagcaagttaaggtggaagaaatatgagagaatcttggtaaacattttttctgtgtatcattttgaaaaacattctttggayttatttaagcaccaaattacaaatagaaaagttagttttgaagtgatttttcttcaacttagataaagtttttcatcgatgttagaaaaaaaattaatgt

SEQ ID NO: 364190 - DNA, 201 bp, Homo sapiens
tcaggtgcatgttgtatcaaccctgtccctaccctgagtgttagccattcttccgaggagctctggttcctttgactaggaaatgatctagatctgggtgstaggtgtggtcattgctactagggcgactttgattcttggccttttcagttgacagagctagggaataatgctttcatatatacacacatagaccctaat

SEQ ID NO: 364191 - DNA, 201 bp, Homo sapiens
aagtttatatgtgaatactcatatcttttggtatcagctacttaaggtacagagtcaggaaccatataaacgtaggtagaagcaagtaatcacacacaaasgtaagattcactgtggtcttgattgggtattaaattagatgtgactgggctagaaagtgtctctcctgcataactacatccagttttctaaaattcaaaa

SEQ ID NO: 364192 - DNA, 201 bp, Homo sapiens
tttgtattgggccacttagagctattgcagtcttgcacaggaaaggaccatggaatcaccttgttcttggctgctgaatagcttgtgttatggcaggaagrgaagcccaggttttcaggcccatggcttttcctttgcttcacttactggtgtgttttgttgattttgtccataattgaaacacatgggccacttattcag

SEQ ID NO: 364193 - DNA, 201 bp, Homo sapiens
ctgtaaacttcctggagcagcgacactgtatattttgctcactgttaaatcttcaagaacctaaaagaatgccaggcacgtggtggtgctcagtaaatatwtgtcaaaagactgattgaaggattgttttagtcctgctgctgctaatgcttttgtaacttaaaactgtgcttgaatatttagacttccaaaacttttctc

SEQ ID NO: 364194 - DNA, 201 bp, Homo sapiens
agagcatgaaaaaatatgaggaaagccattaaaacagatattgtgcccaggatatcatgtgtactaacatagtttaatttttaaaactatagtcagtttcrccatttagaaagataaaatttttcaaaagacttacaattttgtaagctttctttggtatctatttccagttggagaataaagatttcagtttgactactt

SEQ ID NO: 364195 - DNA, 201 bp, Homo sapiens
atatgcgtttgtgtctggggtgactgtacctgtaaagataaagctatcagtttgcattgccatggtaaagttttaacagctcactaggaatttccttatgrgaaaaatatgggggaggcatgtagcttttcatcttgtagcaatcttatttaggaaccaaaaaggagaggcaggtttgcgtgacccagttcccagcttgaa

SEQ ID NO: 364196 - DNA, 201 bp, Homo sapiens
aatactgcaggcaattggaacactatggtaagtatttatgtatccaaacacatctaaacacagaaaaggcacagttaaaatacgttttataatcttaaggraccgctgttgtatatgcgatccatcattgaccaagacatccttatacaacgcatgactggatatttaaaaaaagaaaactaaaagaaaaaaaaatttctc

SEQ ID NO: 364197 - DNA, 201 bp, Homo sapiens
ctcctgggcccaagtgatgttctgacctcaggtagctgagactataggcacatactaccatgcctggttattttatttttattttattttattttatttatattttattttattttattttattttaattttatttattttatattattttattttattgagatagggtctcactatgttgcccaggctggtctcaaactc

SEQ ID NO: 364198 - DNA, 201 bp, Homo sapiens
catgggacctcaaaatcagaatatttcaacctgaacttattgtctattcccttgtcatccaaatgcccattttttccacttgctatattttagtagcaccygagccagaaacctgaaaatgttcctttctttttttaccagacaaggttttggaattacagatagccttgctgtaatgtgtgcatgttggctttgtttcca

SEQ ID NO: 364199 - DNA, 201 bp, Homo sapiens
tcctgggcccaagtgatgttctgacctcaggtagctgagactataggcacatactaccatgcctggttattttatttttattttattttattttatttatattttattttattttattttattttaattttatttattttatattattttattttattgagatagggtctcactatgttgcccaggctggtctcaaactct

SEQ ID NO: 364200 - DNA, 201 bp, Homo sapiens
cctgggcccaagtgatgttctgacctcaggtagctgagactataggcacatactaccatgcctggttattttatttttattttattttattttatttatattttattttattttattttattttaattttatttattttatattattttattttattgagatagggtctcactatgttgcccaggctggtctcaaactctt

SEQ ID NO: 364201 - DNA, 201 bp, Homo sapiens
gcttatgtctttttctgataccagcattaaaaatgagagtgggttctatattttgaaaaagaatttgtcttgtttcaattcattctgttcaatggagagarcctgtgatgtgcaaggcatagtattaggtacctagagatacaaagaatcagatctacccacttctgccttcaaagagctatagtattattcaaacagtga

SEQ ID NO: 364202 - DNA, 201 bp, Homo sapiens
ctgggcccaagtgatgttctgacctcaggtagctgagactataggcacatactaccatgcctggttattttatttttattttattttattttatttatattttattttattttattttattttaattttatttattttatattattttattttattgagatagggtctcactatgttgcccaggctggtctcaaactcttg

SEQ ID NO: 364203 - DNA, 201 bp, Homo sapiens
tgagccttgatgtgaggtatgagcttaagcagtccagcctttcctggtcagggaaatatgagcaaccagcaacagattttgaagacgtggccagtgagacrggaggagaagcaagattgaggagtgtcctagaagcgtgtgacgtatttcaagaacatggatgatggaacaacgtggaggtaattgcagtaaatactaaaa

SEQ ID NO: 364204 - DNA, 201 bp, Homo sapiens
tgggcccaagtgatgttctgacctcaggtagctgagactataggcacatactaccatgcctggttattttatttttattttattttattttatttatattttattttattttattttattttaattttatttattttatattattttattttattgagatagggtctcactatgttgcccaggctggtctcaaactcttgg

SEQ ID NO: 364205 - DNA, 201 bp, Homo sapiens
ctttttgaaggggttttattttacataaaatcttggctgggcacaatggctcatacctgtaatgtcagtgctttgggaggctgaagcaggaggatggctgragcccaggaattcagggttacagtgagctatgatcatgccactacactccagcctgggtgatagactgagaccctgtttcttaaaacaaacaacaaaaac

SEQ ID NO: 364206 - DNA, 201 bp, Homo sapiens
caatttattcattctactgttgatggatatttgggttattcagatttttttttaatgaagacactgtgtctttaataaaaccacctaatcaagcagctttratccatgttcagtgctcattgctcacagaattttactgtgaagtaatattgctgacgttagtttgtggcttgcttatagatcacccttgtctaacactct

SEQ ID NO: 364207 - DNA, 201 bp, Homo sapiens
atgtctaggatttgttgtaagctggtccccctaatgcacagcccagcctttttggaggacagcctcccagcatcaggtggatctctctctctctctctctctcttttttttttttttttgagacaaggtttcaccttgtcacccagtctggaatgcagtgttgtggccatagctcacagtagctttgaacttatggctcaa

SEQ ID NO: 364208 - DNA, 201 bp, Homo sapiens
tgtctaggatttgttgtaagctggtccccctaatgcacagcccagcctttttggaggacagcctcccagcatcaggtggatctctctctctctctctctctcttttttttttttttttgagacaaggtttcaccttgtcacccagtctggaatgcagtgttgtggccatagctcacagtagctttgaacttatggctcaag

SEQ ID NO: 364209 - DNA, 201 bp, Homo sapiens
gtctaggatttgttgtaagctggtccccctaatgcacagcccagcctttttggaggacagcctcccagcatcaggtggatctctctctctctctctctctyttttttttttttttttgagacaaggtttcaccttgtcacccagtctggaatgcagtgttgtggccatagctcacagtagctttgaacttatggctcaagc

SEQ ID NO: 364210 - DNA, 201 bp, Homo sapiens
tgcagtgttgtggccatagctcacagtagctttgaacttatggctcaagcaatcctcccacctcagccttctgtgtagctgggattacaggcatacgccaycacgcccggctaatgtttttttaatcttttattttttgtagagatggggtcttgctgtgtttaggctggtctcagactcccagcctcaagcaatccttac

SEQ ID NO: 364211 - DNA, 201 bp, Homo sapiens
taggctggtctcagactcccagcctcaagcaatccttacatcttgacctccagaagtgttaggattacaggtgtgagccactgtgcctggcaggtggatcyttttttttttttttttttttttttgagacggagtctcgctctgtcgcccaggccggactgcggactgcagtggcgcaatctcggctcactgcaagctccg

SEQ ID NO: 364212 - DNA, 201 bp, Homo sapiens
aactcttcttatccatgagattttgcaaaaaaaagaaattgaatttatttggaattcaagttttgttcagtgttccttcggaacaggtaaaagtggagccwagtacaaatcccttatggtaggtcgtatggaggtttagtcactggaatagcattgattcttgattaagtggagggtctaacaatctgttctatctacatc

SEQ ID NO: 364213 - DNA, 201 bp, Homo sapiens
ataattattttttataatccagtggtgcttatcttgttttacaaatgggctgaaaattggtgagtgattcaaaggcaacagcaactatgtaatactgttaytttggatatgggccatataactaaacaataatttaagcaggctgttgttggaaataatcatttaacaacaggcttggcctctgtccttgtcacaaaagca

SEQ ID NO: 364214 - DNA, 201 bp, Homo sapiens
attattttgatggccatgtgtgtaacacagatgttgtctgctaaagctaatcacattatcttctatgctaccttaaaagtgtatgtgttaaacacctaccyacccttggcgtgtactaaattaaatatatttgcatatttataaatggtgtgtataaaaaaacttgcatgtagaggtattcaaacattggatgaacatgtt

SEQ ID NO: 364215 - DNA, 201 bp, Homo sapiens
aagagatacaaaatgaagtataatattcatgaaagctaggtgtgcctggagactcagctactcaagaggctgaggtgggaggattacagtctaggagtttraggctgtagtatgctatgatcatgcctgtgaatagccactgcactccagcctgggccatgtagcgagaccctctctgtaaaatgaaacacttaaaataat

SEQ ID NO: 364216 - DNA, 201 bp, Homo sapiens
cctggctaaaagtttcagcgttaatgttgccattcttagtgtacagaattccagtttcataggtgtaattcttttgcgggagaaaggagcaaaaataatcrgttaaagctacaagattgttaaccctttcctttaggaggttgttttgaatattgtttccccagtaattatactgagcaaaattcagttcgattctcattc

SEQ ID NO: 364217 - DNA, 201 bp, Homo sapiens
agtttacataagctgagagctattggttgtgtgttgagccctacaatagcttttagctgtttgtcttttgctgctatctgttgtttattcaagtaaggatwtttggtatggttggtctcagttgtttgagtaatgttctgggaaacttttgttgtatcctttctagttctctgtgctgagggaggtagataactttctttt

SEQ ID NO: 364218 - DNA, 201 bp, Homo sapiens
attagagtgtatggggaaatctctctgtcgctgtatgtactgggtatggagcagtatataaaggagccagtattcaccagtctttttccactggatacttscctgattttctgaaaggttaatacttaaaaacagcagcaacaccatctgctttgttttttaggcctcggattacaaaggttcacttcaaggagactcaat

SEQ ID NO: 364219 - DNA, 201 bp, Homo sapiens
aatctttctacatttttcaaatatattttattttagagaagaaatgggtctaaagatagcctgatggaagaaaaacctcagacatctacaaacaacctggytggaaaacacacagcaaaaacaataaaaactatacaagcttcccgcctcaagacagagacttgatcctgatgaagggtcaagggtaggggtgggaaggtt

SEQ ID NO: 364220 - DNA, 201 bp, Homo sapiens
tgttttgaaatgcttcccatctggtgtcatagaaaagttgaaaaggaggcaaggattttttttctccccaggggaggggtggtgattttatgtgataaatrtctgtagtgccgagtcttccacgtacttttccccacgctttttcttttttttgttttaaggtccatgctaatctctgtatattccaattttagtatatgt

SEQ ID NO: 364221 - DNA, 201 bp, Homo sapiens
cattacttgttattagtctgttcaagttcttatttcttcgtacgtcagtcttggggggttgtacgtgtccaggaatttatccagttcctctaggttttccrgtttgttagcttattattgttcataatagtctctgatgatctttgtatttctgtgctatcagttgtaatgtctccttttctgtttctgattttatttgca

SEQ ID NO: 364222 - DNA, 201 bp, Homo sapiens
gggtgagagtcaataaagatacaattacttggaaatagctataattttttataatacttaccagtagattttatacttcttcttaaattaagacatttggrtggagaataaagcatatgcaatccatatacatatttacatatttgctgtcacatgattctggtatttttggtgtatcagttcacatgggtaacattttta

SEQ ID NO: 364223 - DNA, 201 bp, Homo sapiens
taaaggtctcaattagctttatttgcaattctggaattgggcaacccttccataagtagagtaagtgttccaatgagtggggcagaggaagttgcctttayagacgggaaaaaaagctaaagaaggcagaaacaacaaaaatgttgatcatttcaaagttactttccttgtaaagtgggacagagagatagtataatagaa

SEQ ID NO: 364224 - DNA, 201 bp, Homo sapiens
aagtctgtggtccctccctctctcctttgtaagaacctctgctctgagggatgtttaaattacctcttgactgattatttaagccatttaattgagaagcracttagtggggtggtaggggagcttaaaaaaaagagtgtgaaagttgtacctgatttgagtagccctgaattcctggtctgccttggttgtgacctgtaa

SEQ ID NO: 364225 - DNA, 201 bp, Homo sapiens
aatggatggggctgctcagctctctttgcattatctttcccagcagatattgaggcctaggaaaaaaattatgtctctaaaacagaggcaaaattccattrtgattccattatttcttttcttttcttttaacttccttcctttttttcttctccttccttccttccttccgtttctctttccttgtttctctttctcttt

SEQ ID NO: 364226 - DNA, 201 bp, Homo sapiens
gtactttttggaagacagaaaagttgccagttgtgtatagaaacaagtggataaaatcgggagcagaggatttccataaaggtggaaacagttcttcagayctacacctcagaggtgggaagcaccagaagcaggttggtgccttggagtgctcatctgagtgaatgcagagtgtggaggccagtgagccttctccatatg

SEQ ID NO: 364227 - DNA, 201 bp, Homo sapiens
cagttcttcagacctacacctcagaggtgggaagcaccagaagcaggttggtgccttggagtgctcatctgagtgaatgcagagtgtggaggccagtgagscttctccatatgtcagtggcttttgttccagtctgaagtagtgccaaggggactgtgttcagctgtcatcttgtatcacccaggaaggtaggggctccca

SEQ ID NO: 364228 - DNA, 201 bp, Homo sapiens
tattaggaagttattggattttgcatattaagtatcatttcttccaaggaagtgattaaaagtaacctttgcaaaattggaggccatgctaaatctgttcyaattttgtggctgatgttaactgcctagtaagtcttaatgaatcttaaatctacatgtctatatgtaggagacactaacattacaccatccttggaagaa

SEQ ID NO: 364229 - DNA, 201 bp, Homo sapiens
tctgcactgtgtttgggaaggcagcactgccacaatctagggattctaaggtcattgtgcatttagtggagaagcataggacaatgagaatggagttttcwttagagtgtatggggaaatctctctgtcgctgtatgtactgggtatggagcagtatataaaggagccagtattcaccagtctttttccactggatacttc

SEQ ID NO: 364230 - DNA, 201 bp, Homo sapiens
gaccaaggtggcaataggggagaggggacaacagatggggtaggtatcagaagaggtgggagggagtggcgtcacacatacggtggaaagaatggcctcaracaagataattcgtgctctcaagtgcaaggggatgagggaatattttacaagtaaggggcaaagagatgaggtaaatatgaagactttgcattagaaggc

SEQ ID NO: 364231 - DNA, 201 bp, Homo sapiens
ctcctagttttgattaatgagttgtgtagaatttacacttgagaattgagaaagaaggcttagaaactcccctgggaacccagatcctcactgtaggactyaactcacaggagctgtcatgagatttcacattctatgaagcatggaagagagaccaagttctcctaagaacctcctttgtgtcagttgctttcacatgtg

SEQ ID NO: 364232 - DNA, 201 bp, Homo sapiens
ttcgtggagcaggcaattcagtttgttcagccgggtactgagttcagtttgttcagccaggtactgaggactttattgacagcacaatcataatgaaatgyaaatgtcattcctgtgattcttcaacctttcatattttcattgtctttctgagaagaggaaggaatggatgtttttattaaatgcagaggcgtttgcgca

SEQ ID NO: 364233 - DNA, 201 bp, Homo sapiens
tcgtaacagagagccaccaaacatgtgcagggactttcatcaccttacactgtaaatctccatacttgtcaattactttctgctacaaggaaataggatgytatataagaatacttctgccaggaaattgtaagaacaagtagaaatataaatgaggaaaatgaggctgcaaggatttttacaaataactttctgaagacc

SEQ ID NO: 364234 - DNA, 201 bp, Homo sapiens
tgaaacacttaaaataataaaaattgatgctataatctttataattcaggcctattaagatccccagtttttgtctggaatattcataattcaacaagcaytgatttagtatctgctttatgccagaagctgaactaagctttggaaacacagcggtcaaacaagacaggcaaggttcttggcaactgagaaataggtatc

SEQ ID NO: 364235 - DNA, 201 bp, Homo sapiens
cgccctggcatctttattcccctggtagctgataccacacgtcccaacttagcctgatgcagagtcatttttataagttttgtaggcatcttcatttttartaaaggtagaggaagtagtaaggaggagaaacttccacagaagcatgtgaaagatgaattttaagtctgttaaatctgttttttggggaaacactcacct

SEQ ID NO: 364236 - DNA, 201 bp, Homo sapiens
ctcagctgggagcgtatgccatccagtgtaggtgccacttaagcatatttgcctcagaaatgtctggagaaagtatttgcatttttaaaagggagtttacrtactaaaactcttcttatccatgagattttgcaaaaaaaagaaattgaatttatttggaattcaagttttgttcagtgttccttcggaacaggtaaaagt

SEQ ID NO: 364237 - DNA, 201 bp, Homo sapiens
ttcttggcaactgagaaataggtatcttttattaattttccaggatatttatcttaatcttagatttattttaccccatcaaataatactgtatactcacrtatggttctatgaatataagggtatatgtaataaattacatttagacctaatatttatgctgcatatttattttgcagtatttgttcaatttaagaaatg

SEQ ID NO: 364238 - DNA, 201 bp, Homo sapiens
gtttttcctgtacctaaatgatatttacctgcatgaaagccagggtcattcagttgctcaaattcagcagttgtggaataaattgttagtaaggtgaatgytcactgaaatccagcaaactaaatcacatgattccttgggaaaattacttgagaagtttggcccagccccagggaaacctgccctggaatctgcatggaa

SEQ ID NO: 364239 - DNA, 201 bp, Homo sapiens
tcagtcttcctggacacttgatctggcccaggcagggtgggcatagtaaatggctaattgtgccatgacagagtccagaataaaatcataccgagtggtcytgtgggggatggtttacaacctgctgtgtgagtacaacatggagctcatgtggaatcattgccttcccacagtttagcccaacttaatttctttattatt

SEQ ID NO: 364240 - DNA, 201 bp, Homo sapiens
tgaaagattttccttctatctaatgtaaatctcctcctagaatttaataaccactcccttgatcaatattgcaatgagaatcaattaaaaaccagggagtctgtgtgttttttcttctctccatatttggcagatgttctgaatgacctgttgtttaattttgtggctgtgtggttttacctttgctaatcaaaatgttgc

SEQ ID NO: 364241 - DNA, 201 bp, Homo sapiens
cattatatacaaagacaaattgggtgggaaagtatgcatgcagataatacttgcaggcaggatacattagaaactagtaacagtagtggcctttgggaagsgtttctgagagaatggggattggcagtgggagagagatttattttcatttgaatttttaccaagcacttttcaaaagccctacagattactgtcatgaat

SEQ ID NO: 364242 - DNA, 201 bp, Homo sapiens
agagttgaggaacatgttgagtatcagcatgcatgttattgaaatgatggattaggaaatctaagctgagtacagaagacagtgaagagaagtgaagagcyggtggagagtagccaggtcaatagatagtcttattggggtcaaagaaaaggaagaatggaaatagttgaataagcaataacagcttatcttggttgagtg

SEQ ID NO: 364243 - DNA, 201 bp, Homo sapiens
caggagggtgacaagaggacagctgtgagtgccacatcaggttaaaagagattaggaaagaactctggagtgtaccggggggttcacaccaggactctttktactgtgggacactaagggacacttctcagtcttagatgtttacctttcaattagaaattaaccccgtgtatatgtgtgtattttatcagtaatgcatca

SEQ ID NO: 364244 - DNA, 201 bp, Homo sapiens
aaaatacaaaaattagccggacgcagtggcaggcgcctgtaatcccagctactcaggaggctgaggcagaagaatcgcttgaacctgcggggcggaggctkcaatgagccgagatcgcgccactgcactccagtatgggtgacagagtaagactccgtctcaaaagaaaaaagcctaaagttcaaatgaaactcttattga

SEQ ID NO: 364245 - DNA, 201 bp, Homo sapiens
tcaagatttagacgcctcactcccactccacttgccaaaccatggctcacctttttaaagtgagccaagactaagtacagatccttttgtgatcgtgggtrgttagatgtctgatgttgattactcacaggaggagggattaagtccagtcgtgtatgataaggaaatgaaaggatgttgggtagtggaggtagagactgg

SEQ ID NO: 364246 - DNA, 201 bp, Homo sapiens
gaaggatgtgagtgatcactcaactctcttccctcaaactcgtatcacaggaagaaaaacttgatatccaagtgactcgtgacacctcttgattccagctsaccattcatagataggtgttatctttgggtccaagagggcttgaaggaacaatgtgcaccctctcctgttaccacatctggcagtctttccacgctggtg

SEQ ID NO: 364247 - DNA, 201 bp, Homo sapiens
caggccatgagctagatttggctcattaataaatgatagcactccccgactgacatactcttcaaaatacgagcagccttttggaattaagctttgtctgttttttttttgttttttttgttttttttttttttttgagatggagtctcactctgtcgcccaggctggaatgcagtggcgcgatctctgctcactgcaagc

SEQ ID NO: 364248 - DNA, 201 bp, Homo sapiens
ctcattaataaatgatagcactccccgactgacatactcttcaaaatacgagcagccttttggaattaagctttgtctgttttttttttgttttttttgttttttttttttttttgagatggagtctcactctgtcgcccaggctggaatgcagtggcgcgatctctgctcactgcaagctccaccttccgggatcacgcc

SEQ ID NO: 364249 - DNA, 201 bp, Homo sapiens
taaatgatagcactccccgactgacatactcttcaaaatacgagcagccttttggaattaagctttgtctgttttttttttgttttttttgtttttttttkttttttgagatggagtctcactctgtcgcccaggctggaatgcagtggcgcgatctctgctcactgcaagctccaccttccgggatcacgccattctcct

SEQ ID NO: 364250 - DNA, 201 bp, Homo sapiens
acataagctgagagctattggttgtgtgttgagccctacaatagcttttagctgtttgtcttttgctgctatctgttgtttattcaagtaaggatatttgstatggttggtctcagttgtttgagtaatgttctgggaaacttttgttgtatcctttctagttctctgtgctgagggaggtagataactttctttttgttc

SEQ ID NO: 364251 - DNA, 201 bp, Homo sapiens
gggaaaaaatgcttaactatagcatgattttcttttgagtgaaacactcatgaaataagaaagcccccttgccccactgagtttctccattagaatacaastatttatcttacttccagtgaaaatgtgctcatgtcatggtgtctatcatgtaggaatttggcagtaataccagtgttactggcgagaaattaatactca

SEQ ID NO: 364252 - DNA, 201 bp, Homo sapiens
ccaggtaatccagctaggaagcggggaagtgggatccatcccctggcgctctagctgcagagctcatgtttataaccattaggcaaactgttagcctgttrtggaaaaagcctgattgtcatgcagctaggcaggcgcttatgtctttttctgataccagcattaaaaatgagagtgggttctatattttgaaaaagaatt

SEQ ID NO: 364253 - DNA, 201 bp, Homo sapiens
agggaatcacttgaacccaggaggcagaggttgcagtgagctgagatcgtgccactgcactccagcctgggtgacagagcaagagtctatcttaaaaaaamaaaacaaaaaaaaaaactgtacatgttaacagtgaacagtagtttaccattttgaatataaaggaaccatgaattaagtcatattactgattatacctta

SEQ ID NO: 364254 - DNA, 201 bp, Homo sapiens
tcattgacactagttgggtcaattcagctgcatttcttgggttacattgtgttcgatttctgttgtaggaggaaaaagggtgagagtcaataaagatacarttacttggaaatagctataattttttataatacttaccagtagattttatacttcttcttaaattaagacatttgggtggagaataaagcatatgcaatc

SEQ ID NO: 364255 - DNA, 201 bp, Homo sapiens
aaacttctggaaaatattcaccattctggatgcccctaagataatttatgatttatggcaggaggtcaaattattctgattagcaggagtttgaaagaagwtgatttctacccccacgatgactttgaggggtccaagacttcagtgaaggaagtaactgcagatgcggtagaaatagcaagaaaactagaattagaagtg

SEQ ID NO: 364256 - DNA, 201 bp, Homo sapiens
gatatatgctatttaaggaagagcatacttctgccagcattttcaagttgagtgtttatcttaatttagttctttggaaaattgtaccagcctactctgcrttggctgttaggttgtctgtaattttttggtatgaatgatcatgctatcataaacgtgcttatacataatcttttatgtattttttttgacatgttacta

SEQ ID NO: 364257 - DNA, 201 bp, Homo sapiens
ctgagtttctccattagaatacaagtatttatcttacttccagtgaaaatgtgctcatgtcatggtgtctatcatgtaggaatttggcagtaataccagtrttactggcgagaaattaatactcacagcaattccagatcaaggcaataaaactgaaatttaaatattgtaactctaatgtgaatatcaataaatgtttta

SEQ ID NO: 364258 - DNA, 201 bp, Homo sapiens
gagttcgagaccagcctggccaacatggtgaaatcccatctctaccaaaatacaaaaaattgcctggcatgatggcgggtgcctgtaatcccagctactcrggaggctgaggctgaagaattgcttaacccaggaggcagagtttgcagtgagctgaggttgcgccactgcactccagcctgggcaacagagcgagactcc

SEQ ID NO: 364259 - DNA, 201 bp, Homo sapiens
tctctaccaaaatacaaaaaattgcctggcatgatggcgggtgcctgtaatcccagctactcgggaggctgaggctgaagaattgcttaacccaggaggcrgagtttgcagtgagctgaggttgcgccactgcactccagcctgggcaacagagcgagactccgtctaaaaataaatgaatgaatgaatgaataaatgaat

SEQ ID NO: 364260 - DNA, 201 bp, Homo sapiens
aggaggcagagtttgcagtgagctgaggttgcgccactgcactccagcctgggcaacagagcgagactccgtctaaaaataaatgaatgaatgaatgaatraatgaatgaaagcaaatattggcacaggatcattattaccttttctagagttgatactgaatttactgctttttggaaagtaaacttcattattgactat

SEQ ID NO: 364261 - DNA, 201 bp, Homo sapiens
aaataaatgaatgaatgaatgaataaatgaatgaaagcaaatattggcacaggatcattattaccttttctagagttgatactgaatttactgctttttgraaagtaaacttcattattgactattttttgaatgctacactctataaacttacatgaaaatatggcatgaatggtttcagtgtttaagtgagtatttgaa

SEQ ID NO: 364262 - DNA, 201 bp, Homo sapiens
tggtgggtaacttttacatttctttttaagtgaggaagatagaaagtgtatgttatgacttctgcataaatgtaaggcttttttctctttaatatgattgyatactagtgccttagcattttaataaaatggacaattaacaaacctgttttatatacaatctcttttacagataatgtatatttgaaaatgtagaaactt

SEQ ID NO: 364263 - DNA, 201 bp, Homo sapiens
ctgatttttttttttttttttttgtagagtcaagggtctcactatttgcctcaggctggtcttagtgatccttctacctcagcctctcaaagtgttgggcrtgatttttttgtttcttacatcaccagtcaggattgtttgaattgaaaatatataatatgaaataacttgtcttttataagttatatggggaacataaag

SEQ ID NO: 364264 - DNA, 201 bp, Homo sapiens
ttgtgaacagtagtcagtgagtgattcattacacctcagtgttggaatttgcgtgctcctcctgttgctaggcaacgccatgtgtgagcacaattacaccrtaatggtgtgattgccagtcccccaaattaattgtctttgagctggtaaagtttctgtgcgtgtgtgttttaaatctgtgcattatcaagatttagacgc

SEQ ID NO: 364265 - DNA, 201 bp, Homo sapiens
tcttcactaataacagcctaagccactgaggaatcagacattactgctgctgattactgctgaagtaaacatatgggcactacactgctgtatgtatccaraatcaaagccaaagtataataccttacctaaccaacactatagatacatctgtaggaaaaaagccttccctatgaaagccaatccaaagaattggaagaa

SEQ ID NO: 364266 - DNA, 201 bp, Homo sapiens
gggatcctttgtctaatggtagactagccctttggttggtattgccaacaagaccaagaatttaaaatagcttatatcaatggcttggtttatcaagaagraaggaaaaaggctaacataagactttttagaattagattctcttattttctctgataattacttttaatttttatttatttgagacagggtcttgctctg

SEQ ID NO: 364267 - DNA, 201 bp, Homo sapiens
tgagagttatagcactgtcacattagtaaattagtcctgacagtagaacaatttattttgaaaaagtttggctatgctggttgtgagtgtttgtgacaaaragcactcacatgatttttttttcctgaaattcttttggaaaaccatccaaataatgcttcatcttaaaaattatgattcagacattgtgaaaaaccaaat

SEQ ID NO: 364268 - DNA, 201 bp, Homo sapiens
ggttgttttgaatattgtttccccagtaattatactgagcaaaattcagttcgattctcattcggtatttcctttcaagaccaataaaatagactcttttsggggagggtgtacattttgtatttttaacttttctttatgttccaaaatatttctcctctcacccgcccaatgaaatcaggaaaatattgtaacttacaa

SEQ ID NO: 364269 - DNA, 201 bp, Homo sapiens
ttcacctgaataaataggaatagtcttctttgttgtagagccaggctgttggtgaaatacctgctgcttctcagtttgagtctgcacaattctctgaagtyttgttccagactgaaccagatgtgaatatcttcccatcaaaatacaatttgtgaacagtagtcagtgagtgattcattacacctcagtgttggaatttgc

SEQ ID NO: 364270 - DNA, 201 bp, Homo sapiens
tttggttcagctttatctctgacaattttaatcacatctgaagctcctgcatattgctcctggtcatcctgctttgggttgtgatgactaaccaccgtttrtttctgcaccataagttttgtttccacgtttcatatgttaagattaaacaggcacctgttatcacatgtcctgggcatagactcagtgtgctaaattcag

SEQ ID NO: 364271 - DNA, 201 bp, Homo sapiens
tgtttgaagccatagaagttgaagcacagtcaaaacaaaatgtcatgaaaacaaggccctcaaagccatatttttgttttgtgttgtttttaaccaaagtwtacattcacctgaataaataggaatagtcttctttgttgtagagccaggctgttggtgaaatacctgctgcttctcagtttgagtctgcacaattctctg

SEQ ID NO: 364272 - DNA, 201 bp, Homo sapiens
ccccagctttctgaaaccaagttcaacttcactgaaatcctttgatggttaagaagagaagggtctatattaccttcatgtagtaggactgacatgagggygctagatcaggtccaacaatgattagacagaataatagggtaatagtaggcatttgtttggtattgccatattccaagtactgagcaaagtgcttgctct

SEQ ID NO: 364273 - DNA, 201 bp, Homo sapiens
agaaaggcagagactaaaacaaacaaatggggtgtagggtggggttgggggcattctcacaggaaacagacaatataagaaataaaaatttctaaaaaacwatttagaaagatgaaaaaatataaccatgaatttctatcaatacaaaggtaagaactaataaataagagttattaggcttaaaattagtgtggcagaatt

SEQ ID NO: 364274 - DNA, 201 bp, Homo sapiens
ggggatggtttctaaatatcagtggcttctgggtgactgagatatgtgctgctctcctttccccttggctgaattgtgtgtgtgtgtgtgtgtgtgtgtgrgtgtgtgtatgtgtgtgatgtgcagaggatgggtttctctttttggtactgaagttataacagcatcatataattggggacatttcatttttttcccctg

SEQ ID NO: 364275 - DNA, 201 bp, Homo sapiens
atcctcatctccctctccattctcttgcttcacttttcactttttatatcatattattctcacccagttcctttctgtttcctgggcttcctttccagtcttttttctttcttctgtttcctttgaattccctctctccctaggagccaatggtatgacacagaataacctgaggacttgggactgggtcttggttttgct

SEQ ID NO: 364276 - DNA, 201 bp, Homo sapiens
ggtcagtttccctgaggccagtggctacatgggggaggggctcaggaaggaaggaggagagttgtgggtactgttgtcaccatcagtgtccagtctacctyttgggtcaggatccttaagtttccacatccttccaggtcttggaattcccacctcctaaacatcttccaaattgtttcttttcccctgttttcattgctg

SEQ ID NO: 364277 - DNA, 201 bp, Homo sapiens
ataaattaagtacttcttctctcctgccaatagtgcacctcattatttgaaagacttgatacctcggaagtccaaaatttctgcaggttgagtgtggtccmtgggttttgttaagtctatatcatgctttagaattggttgcaagacttaaaaattagaagagttcactttaagaatccagatttggggattatctttttt

SEQ ID NO: 364278 - DNA, 201 bp, Homo sapiens
acctcctaaacatcttccaaattgtttcttttcccctgttttcattgctgctgcacttcaggcccttctcagttctcagctggacaatttgcagggcctcmtaatccctgcaaggcccctgcttccagcattaaccacctgcatctagagtgctctttcttgcctcctgcctagaatactttaatgtctagtcagcctctg

SEQ ID NO: 364279 - DNA, 201 bp, Homo sapiens
aaggccctcaaagccatatttttgttttgtgttgtttttaaccaaagtttacattcacctgaataaataggaatagtcttctttgttgtagagccaggctrttggtgaaatacctgctgcttctcagtttgagtctgcacaattctctgaagtcttgttccagactgaaccagatgtgaatatcttcccatcaaaatacaa

SEQ ID NO: 364280 - DNA, 201 bp, Homo sapiens
cctacgcaaatctcacctcgaattgtaatccccacgtgttttgggagggacctggtaggaggtgattgaatcatgggggcggttttccgcatgctgttctygtgatagtgagtgagttctcatgagatctgattatttaaaagtgtttggtagttctcttcacccccctctctctttcctaccaccttgtatagaaggtgc

SEQ ID NO: 364281 - DNA, 201 bp, Homo sapiens
cccttacagatgtattaattactctgtaatttttttttagcaacctaattaaactggtagtcaatttaaagctgaagttaatgaagatttcctttgttgtratagcaccttcccccaactccattaaaaaaaaaaggaagtttagatatgaaagaatcagacctcactgaaggactttacccaaaaggtgcagaacccaag

SEQ ID NO: 364282 - DNA, 201 bp, Homo sapiens
tctgggtggggtctgagtttggataaagttaaaaacctccattagctgagtcagatacatagaggagcctgagagccaagtgacctgggccaggtgggtasgtctgccgatctgtttccagattccttctctcttgcctcaccgcacttcctttaaagctctgtatatttaaggctgactctggctggcatcagctttgca

SEQ ID NO: 364283 - DNA, 201 bp, Homo sapiens
ttaaactggtagtcaatttaaagctgaagttaatgaagatttcctttgttgtgatagcaccttcccccaactccattaaaaaaaaaaggaagtttagatawgaaagaatcagacctcactgaaggactttacccaaaaggtgcagaacccaagattagatacagcgtagtcacgggtaaatcttttgccaccatattttta

SEQ ID NO: 364284 - DNA, 201 bp, Homo sapiens
gaattttccacattccctctcacctttttctgtgtgtagaaagccccacccacctccttttgtttgagtgatgtatcagctctcatgaaggagagttctgyctaggtttcacttttttgtgaagacttctccttgatgcggagctggagaggccctcttctgaccctaatccagactgcatttcattgcagtagtttttgt

SEQ ID NO: 364285 - DNA, 201 bp, Homo sapiens
aaatttgcttataattcttcatgtgcttttaacatctgtgaaatctgttgtgatatcaccactttaattcctgatgttggtgatttgtgttttctcttcatttttttttaatttatttttttcagagaaccaattttagattttgttgctttttctttgctatctgttgtctgtttcattgactgtactttttattctttt

SEQ ID NO: 364286 - DNA, 201 bp, Homo sapiens
taataatataataaaagacttaaaagctacgagaaaatgtgtttcctttgctgcatttcgattattttgtattgtaagctttataagttatttttccctcmagtagtctctgtacaaacccattttgataaggtcagtacaattgttgatcaccttctttttataaaaatattaaatcatttgcttcatcttcctggtaag

SEQ ID NO: 364287 - DNA, 201 bp, Homo sapiens
acccattttgataaggtcagtacaattgttgatcaccttctttttataaaaatattaaatcatttgcttcatcttcctggtaaggtaaacatagtagctcrttgccacagcactgcaaagattcaattttgggttatagtatttggtggtctttatttcgtggagcaggcaattcagtttgttcagccgggtactgagttc

SEQ ID NO: 364288 - DNA, 201 bp, Homo sapiens
aatacccagaccccttatatcagtttttattttcttatactcactgttgtaatccaaaacatgtctcagataggtctcaatcagtttaggggtttattttkcaaaaattaaggatcatgactcatgacacagcctcaggaggtcctgagaacatgcgcccaaggtggttgggttacagcttggttttatacattttgggga

SEQ ID NO: 364289 - DNA, 201 bp, Homo sapiens
atcatttgcttcatcttcctggtaaggtaaacatagtagctcgttgccacagcactgcaaagattcaattttgggttatagtatttggtggtctttatttygtggagcaggcaattcagtttgttcagccgggtactgagttcagtttgttcagccaggtactgaggactttattgacagcacaatcataatgaaatgcaa

SEQ ID NO: 364290 - DNA, 201 bp, Homo sapiens
gcctggcaacagagcaagaccccatctcaaaaaaaaaaaaaaaaaaaaaattggtgtgtaattgactgtattagacagaaaacaggaggatttttcaaaaratagattttatggcagcaaaacataaatacaatcacttgccaggtaaaggatgcgttaggcaataggccaggtgcaactactgttgattctgtcaatatg

SEQ ID NO: 364291 - DNA, 201 bp, Homo sapiens
gctgcagtgtgcagctgtgctaaccatgtgaattgtacatgctggagtaggtgtaactgtgtgggtggtgctgagcagggcacctggaccctgcttacttygcagctccctgggctggcttgctcctttgtgccagattacttggttagctaaaactacatttatgttcagcttctaggacagagtttaaatgaaccctaa

SEQ ID NO: 364292 - DNA, 201 bp, Homo sapiens
gatatgaggtgcagtactggagcttacaaagtattgggcaagatgatccaggagttaggttcttgcctgtgactacaggtgcaaactctttcctctagggscagagctgagagattggtccggctgttgaaagaggagcctctctctagttctggagcaagtattgattgtccctgtctttaatgtggaaagggctagcct

SEQ ID NO: 364293 - DNA, 201 bp, Homo sapiens
agcagttcccctgttaagtatgtgtaccctagagaggtgttctgtgcagcacttacgtaaaagtcagaaaaagaaattaacccagaattccattaacgggrgaatgaacaaataaattgatgcatattcattaagaaaaacccataagagaggtaacaggaagataagaattggagatttggagatggtgagtgtggacaa

SEQ ID NO: 364294 - DNA, 201 bp, Homo sapiens
atatattaattcgttttatcctttagaggagactttaaaggagattctattaaaaatgagtcactgagtagaaaagtaacttatttaaatcacataactcrtcagtggagaagatgggattcacattcatgttgtctggctctagagccagcacctttaaccaggatgccccattgaagctgtttgaaagtaaatggcgag

SEQ ID NO: 364295 - DNA, 201 bp, Homo sapiens
ttcttttcatttgtttttaatttactgtttattatactttattattatttactcttttgctgcatggtcaaatttctcttcaattctctgtcccctccccytattttttgtgacatctttgagtcatactgctttaattttttttttttttttttttagacagactctcactctgtcacccaggatggagtgcagtggtgt

SEQ ID NO: 364296 - DNA, 201 bp, Homo sapiens
gtcaaagaaaaggaagaatggaaatagttgaataagcaataacagcttatcttggttgagtgctaacaatggcccaggtcctagtgtatgcattttaaatrtattaattcgttttatcctttagaggagactttaaaggagattctattaaaaatgagtcactgagtagaaaagtaacttatttaaatcacataactcgtc

SEQ ID NO: 364297 - DNA, 201 bp, Homo sapiens
ttagtagagatggggtttcaccatgttggccaggctagtcttgaactccttacctcgtgatctgcccgcctcggcctccaaagtgttaggattacaggcascatttgtatttttagtagagacagggttttaccatgttgaccaggctgatctcaaactcctgacctctgctttagttttgtatcacttcatcattaacac

SEQ ID NO: 364298 - DNA, 201 bp, Homo sapiens
agaatgacggaataaaatgtaggattctgcgtgataccaagggttcccttgggttattgctaatgaatgtaaagcaagcccacctatggttgtgcaatgtragcctccagttatgttcagctccttgggtgctagcatggagaatgcggggaattggagttacccatgggtgtttttttttcctgtagatattatggaagc

SEQ ID NO: 364299 - DNA, 201 bp, Homo sapiens
tgtcattccttctacatttattagttggcattttattgtaaggacacatttctcttctttttatttattcacacatgtatttatattcacttggactcatrgatttttctcataggggttgtaatctgacactatcattttttttgttgttgttcagattgtcccaaatttgattagcgagagtcctgtcaagctggctcc

SEQ ID NO: 364300 - DNA, 201 bp, Homo sapiens
tgattgtttccattttcagtgaagtaatgaagatcttcagctgagagtgaggaagggaaaggagttgttggaagtttaaggacagaggagaaagtgtcaasaattattaaggagaatgacggaataaaatgtaggattctgcgtgataccaagggttcccttgggttattgctaatgaatgtaaagcaagcccacctatgg

SEQ ID NO: 364301 - DNA, 201 bp, Homo sapiens
ttttcagtggtttatgaaaacttgctgaatagtcatcagtgagcaattacactgaatctgcactgagtgttctggatccgggttttaacctttgagctacytctcttaggctaccaattgattattctatgtcaatgagattagaaagcctttgcctttgaattaagaggaatgtggatagcaatagttaaattttatttg

SEQ ID NO: 364302 - DNA, 201 bp, Homo sapiens; identical to SEQ ID NO: 78825

SEQ ID NO: 364303 - DNA, 201 bp, Homo sapiens
tttacaaattattggatttccgttgaatctgttagcctggataaaatattttttaaaatgaaaaaagcacatacacgtcagtaattatagagttctgatgraaattttgttttgcaacatgtatgttgagatggaaagtgaaaatgctgtatcataattattcagaataaagtaatagataacttacctttaaaataaact

SEQ ID NO: 364304 - DNA, 201 bp, Homo sapiens
gataacttacctttaaaataaactcatcaagacttttggctgggcacggtggctcacgcctgtaatcccagcactttgggaggccgaggcgggtggatcaygaggtcaggagatggagaccatcctggctaacacggtgaaaccccgtctctactaaaaatacaaaaaattagctgggcgtggtggcaggcgcctgtagtc

SEQ ID NO: 364305 - DNA, 201 bp, Homo sapiens
cctggttattgacaagcccatctgtagtggatgcctttggtgtacatttacaagggacaaaaataatttttacatactgctcattctcagtggtccatccrcatagctcttccctagatgttcttgtatgctctgttcctatactattttcttccaagtccttaaccatccatccacattgagtgttaacctttaccccat

SEQ ID NO: 364306 - DNA, 201 bp, Homo sapiens
aacaaagataacatttctctaattcttctgagatgggaatgaaaagcatttcctttggaattacaataatagtatatttaaaaaaaaaacatgaaaacacwcttatttttttccccgataactaaggtaagaaattctcctggcttaaaaagatcagaaaatatagaaaagcataaacaagaaaataaaattacctgcaat

SEQ ID NO: 364307 - DNA, 201 bp, Homo sapiens
atttctctaattcttctgagatgggaatgaaaagcatttcctttggaattacaataatagtatatttaaaaaaaaaacatgaaaacactcttatttttttycccgataactaaggtaagaaattctcctggcttaaaaagatcagaaaatatagaaaagcataaacaagaaaataaaattacctgcaataccagcactcag

SEQ ID NO: 364308 - DNA, 201 bp, Homo sapiens; identical to SEQ ID NO: 78808

SEQ ID NO: 364309 - DNA, 201 bp, Homo sapiens
ctctgttccatgtcttctttcagatatactttgagggcttactaggagtatgtgacctcagactctgtaaagcactgttgctgcctttgaggagttcatartacagtaggataagacacacaaatataaaaatgcaaatagctgaaggtacaggtttggcttgcccttcctcctgcagtgcacctttcatttgtccccctg

SEQ ID NO: 364310 - DNA, 201 bp, Homo sapiens; identical to SEQ ID NO: 78809

SEQ ID NO: 364311 - DNA, 201 bp, Homo sapiens
tttctcggtgtcctccctgcaggtgggctgtgtctcagcagaggccacggctcctatcacatggccctttcacaatcactggtctccctggattctgatgwtacctcccaccccttgctcttccaagtgtggtgttgggagcagctccctgttgttgccagcctcggggtactccaccatctcttgttgggctgtctgcct

SEQ ID NO: 364312 - DNA, 201 bp, Homo sapiens; identical to SEQ ID NO: 78810

SEQ ID NO: 364313 - DNA, 201 bp, Homo sapiens
ctttctttttttttttctaaaaatgattagagacaatttacaaacatgggcaagtataccacaacaaataaaactgggaataaaaaaggagaggagagtgkagctgtggttgcaggtggcaggggcagtagtcactacagtttctgtgttgaactgactgctgagtgatgcctgggacaagaatgccttgctccttagctc

SEQ ID NO: 364314 - DNA, 201 bp, Homo sapiens
cccttctccccacccccagcccttaaattaagccatctcaggcctctggtctgttcctatgaccttagcatttggatttgtagaactcttcctggttaggytctgtgagagagagtgtcttctgctcgagggaagctttaaaaaaattacataagagatggcttgcgtggaatttcttttcagaatgatacttattgcact

SEQ ID NO: 364315 - DNA, 201 bp, Homo sapiens; identical to SEQ ID NO: 78811

SEQ ID NO: 364316 - DNA, 201 bp, Homo sapiens; identical to SEQ ID NO: 78812

SEQ ID NO: 364317 - DNA, 201 bp, Homo sapiens
catcaaatggtaagtgatggtttgagacatcactatgaagctggaactggtgaggtggctgagactgaccccaagattgtgcaggatctcacattgatggyggagatgttcctgcaacatgtgtgaaataagtttcagaacatgtctgaccagatcattggaaaaattgatgatatgaatactctcattgatcttgagaaa

SEQ ID NO: 364318 - DNA, 201 bp, Homo sapiens
ttctggtgggatagtgaaataaagggaggactcttgcctgtagaagtttaactgttaggtggggagacatttatttataaaacaacagagtatgatatgasacaatttataatcaagtattgaatcatgtggtggagattcttaagaggtacagaaattcttgtaagaaattgtttcttatgtgccaaggtgaagttaatc

SEQ ID NO: 364319 - DNA, 201 bp, Homo sapiens; identical to SEQ ID NO: 78814

SEQ ID NO: 364320 - DNA, 201 bp, Homo sapiens
gctggaactggtgaggtggctgagactgaccccaagattgtgcaggatctcacattgatggtggagatgttcctgcaacatgtgtgaaataagtttcagamcatgtctgaccagatcattggaaaaattgatgatatgaatactctcattgatcttgagaaaaacgtcaaagatctcccttataacacagactgaggtgga

SEQ ID NO: 364321 - DNA, 201 bp, Homo sapiens
actgaggtggaagaactggaaggtgaaaacaagatacctatcctgcctggctgatttttttttttttttttttgtagagtcaagggtctcactatttgccycaggctggtcttagtgatccttctacctcagcctctcaaagtgttgggcatgatttttttgtttcttacatcaccagtcaggattgtttgaattgaaaat

SEQ ID NO: 364322 - DNA, 201 bp, Homo sapiens
gaagaatgaccttgtttttacatttttgcaactatgatatctagcttaacagaaagtagctggattgtcatagctactttatgcatcatctgttgtgataygccctgtgaccgctagaaaactctatgattgtgagagaagggcaaatgaaaaataacaaactaataacattaggaatatagatctgacttcatgcaccat

SEQ ID NO: 364323 - DNA, 201 bp, Homo sapiens
agtcacaagaccagtgtaaattcagaggatagggaaataaactctacgtctctcagtggggcggatgggagggttacaagattttgtgtccatatttagtscaccaccgacttacggctttgccatgtcagagttctgttggaagtgattgattttgcggtccgttctgggaacatactgacattcaccttaatcggtttt

SEQ ID NO: 364324 - DNA, 201 bp, Homo sapiens
cttgtgtacaggacattttcaagccttgaaagtggctaatggaaatgatatggccaattgcattgtaagaagtcaggactcaggtaggaattggcttcctkaagtaatagatttcaagggcagggtttcttgaccaaaaatattttccaaaataaaggtttctgaaatcttgcctttaaaaaaaaaataataataatcaaa

SEQ ID NO: 364325 - DNA, 201 bp, Homo sapiens
agaggagctgtcttatttatctgttgccatattataaaccactgcagaactcagtggcttaaagcagcaacaactctatttatctagtataattctgtccrttgaacaggcagctttttagctcgtcttgttcacgatttcatgaggctgtggtcagatgacagctgaggttgtgttatccagggggcctttctctttcgt

SEQ ID NO: 364326 - DNA, 201 bp, Homo sapiens
tgccctgtgaccgctagaaaactctatgattgtgagagaagggcaaatgaaaaataacaaactaataacattaggaatatagatctgacttcatgcaccaytgaaagggtctctaggccctccagccttcaagaatcactgctgtattagaaggagctcaggattttaagttagatatttctgggttggagtctctgcctt

SEQ ID NO: 364327 - DNA, 201 bp, Homo sapiens
catttctttcaggtttccaaatatccctccctgatatttggggtgttacccagttcattctctcaaatgtctcattagtggaggtccattattatcgaagmcaaaattttaatttatttattgatttcagaaagtccttgggcatgttatcattgtaccttattttgtggcatcttgtgaattccccattttggcagaggt

SEQ ID NO: 364328 - DNA, 201 bp, Homo sapiens
atttgtagagacagggtcttgctgtgttgcccaggctggtctcaaactcctggactcaagtgatcctcctgcctcggcctcccaaagtgctgggacaggcrtgagctatggtgcctggcctgataattacttttacaaattgttggatttctattgaatctgtagctggggttacaggcatgagccaccatgcttggcctg

SEQ ID NO: 364329 - DNA, 201 bp, Homo sapiens
gctactctgtgaattaatcctaaactcttgctgagaagtcaaagtccttgctgaaaccacagatcatatgcctgtgacctggctgtcagttattctgggarcctgattcctgcctccaccaagactcaaatagggggattgtttgcacattagcagaaggtttgatatgtacccagaacaaaaaggactaaagcgggaatt

SEQ ID NO: 364330 - DNA, 201 bp, Homo sapiens
gaccaggcagcaggctattgtccgagtcctagcaatagagaatgggagcatggaccaaggtggtgatgtggaaatataaagaagtagatggtttcagtagycagtgagaggtaaaattggtaggagaatcagtatgaggggtagaggagagggagctgtccagaatgaaacccaggcttgttcagttttttgaattcgatg

SEQ ID NO: 364331 - DNA, 201 bp, Homo sapiens
tataattacaagaagtttcagttcatgatgtcaggtaaccatcaagactctttttgtgcacactgcaggtttggaagccaagcccttctttcacctatgcyctagttaatacacacttgctggccttttcctgcttgatcccttttgcttctgctagtttcccagagctttgcccccagctttctgaaaccaagttcaact

SEQ ID NO: 364332 - DNA, 201 bp, Homo sapiens
ctaaactcttgctgagaagtcaaagtccttgctgaaaccacagatcatatgcctgtgacctggctgtcagttattctgggagcctgattcctgcctccacsaagactcaaatagggggattgtttgcacattagcagaaggtttgatatgtacccagaacaaaaaggactaaagcgggaatttctctaagaagatttggca

SEQ ID NO: 364333 - DNA, 201 bp, Homo sapiens
atcatatactcatcttttattcccaaaaagaacttgataaaactgttagtcattgattaaaggccaaaacagaataagaccaaaaaaagcagaattgaagraaccatctatttgattaaggatatgcgttcgggccatacacaagccattatacttagtggtgaaattttagaagcaatccattacagtcaggatgaagac

SEQ ID NO: 364334 - DNA, 201 bp, Homo sapiens
gtcttgaattcctagcctcaagcagtcctcccacctcagtctcccaaattgctgggattacaggcatgagtcactgcacccagcctaaatgacttttatamttacaagaagtttcagttcatgatgtcaggtaaccatcaagactctttttgtgcacactgcaggtttggaagccaagcccttctttcacctatgccctag

SEQ ID NO: 364335 - DNA, 201 bp, Homo sapiens
atatgtcctgtggctggggctgacttaaatagtccacatgctgctgagcatttaagttgttttcagctttttgcagataggtttaaaaactattttttttwaatgaaatgataggtgggtggttttttaaaccatttattttttttctttcttcactatgaaaaattacatatatactatagaaaatgggaaaaacatata

SEQ ID NO: 364336 - DNA, 201 bp, Homo sapiens
taccctatttgacttgccttttatttttcatcctactcaactgctgttgaaatagagatgtcctcctcttccttcatttgttctcccatcctccactgggycatttgtggtacattcagtgaagaacatgattttctgagtggtgtttccactattgatggtgatcacttgtgacttttcttgagctggttccttaatctt

SEQ ID NO: 364337 - DNA, 201 bp, Homo sapiens
gattctcctgcctcagccccctgagtagctgggattacaggcatgcgccatcaggcccggctaatttttttatttttagtagggatagggtttctccacgwtggtctcgaactcctgacctcgtgatccctctgcctcagcctcccaaaatgctgggattacaggcatgagtcaccgcgcccggcctctttttcctttttt

SEQ ID NO: 364338 - DNA, 201 bp, Homo sapiens
catttggatgtcacattataatcagtatgataattcaaccagggacccagcaagtactgctgctcttctttgcctctcttccaacgtcagcatcatctttstctttgtattttatttttaatttaatgttatttttaaaagatggggtcatgccatattggccagggtggtcttaaacttctggcctcaagcagtccttcc

SEQ ID NO: 364339 - DNA, 201 bp, Homo sapiens
tagcattttgggaggctgaggcaggtggatcacctgaggtcaggagttcaagaccagcctgggcaacatggtgaaaccccatctctactaaaatacaaaarttagctgggcatgatggtgggtgcctgtaatcccagctactcgggaggctgagatggtagaatcgcttgaacctgggagactgtggttgcagtgagtggg

SEQ ID NO: 364340 - DNA, 201 bp, Homo sapiens
taattggcattgtataaatgactttttcctttttttggtttttgtggtttttgtttttgtttttgagatggagtctcgctctgatgcccaggctggagtgyagtggcatgatcttggctcactgcaaactctgcctcctgggttcgagcgattctcctgcctcagccccctgagtagctgggattacaggcatgcgccatc

SEQ ID NO: 364341 - DNA, 201 bp, Homo sapiens
ggaaagtggggaactgcgccagcgcatgagtgctggatggaacgtggctcaaagtgggtcagctcctacctcgctgtggtgggaattgccccttcttcatwaaggagcacgaggaaatggaaactgagtggcttggccctgggggtccccagcatctggctaggagagtgtgggagcgattccatctctgccctcccctga

SEQ ID NO: 364342 - DNA, 201 bp, Homo sapiens
ggtgaaaccccatctctactaaaatacaaaaattagctgggcatgatggtgggtgcctgtaatcccagctactcgggaggctgagatggtagaatcgcttsaacctgggagactgtggttgcagtgagtgggtggctgagcgagactctgtctcaaaaaaaaaaaaattccatgatgataggaaaattatataaggttttc

SEQ ID NO: 364343 - DNA, 201 bp, Homo sapiens
tgagtttttactttagaagacctttctttttaattccgaagttaaagtaattcaatcaaactagatgactagtccccttaacttgcatcccagttgtctgyaagtttaaaaagcatgtttattcacctctcaatcaggagtaataaatgccctggcagctaaaaagccattgtgtttagaatttgccaagtgcaggccctg

SEQ ID NO: 364344 - DNA, 201 bp, Homo sapiens
acttaccgcttggaccaagccagttgtttctgtgcagcggagtggacctagtgttgatgtatcttccagtgtttcaagagaagtacaaaatctggatgttyatgtgaacttcctagaatttgaaatactagcaattaattttattataagaagactttgtgtgctaagttaaacatttctgatcaacagatttggcttgag

SEQ ID NO: 364345 - DNA, 201 bp, Homo sapiens
aaaaagctttatttaaaacaaattaaaattgggctaaacgtttggatgtgtgtctacctgcattttgtaacgcatctccttagagggtaaaatttaaactrgcattgcatgaagttgatcagtgtctgatgatagatgtgtttgaaaatggcgtgaacctgggtgacatgatgatacattttgcatctgctgtgatgaaat

SEQ ID NO: 364346 - DNA, 201 bp, Homo sapiens
ctcattattggagatgtcatgctgtagaagtccacttttgcttggtaccagacattatacaaaccttctctaaaccgggcccaagtttcctttccaggcasctggtcttaaggaaatctttgtgaagccacaggtgtggttgtatgctaggagtaggtgttagagatacctgagacatctgctcttgcaatttcttgtgcc

SEQ ID NO: 364347 - DNA, 201 bp, Homo sapiens
ttgatagaacatttctgtaaaggcccaaccttatagcttggtgggtcaggcaacattcagattattatgggcagctcaggtcgcatgttcatttgaaatcstttaatcaggctttgccagagcctggttgcaagctaggagccatttctcaaaatgacaattattatttccagaaaaggggtatggcttttatttcagaac

SEQ ID NO: 364348 - DNA, 201 bp, Homo sapiens
ccagagcctggttgcaagctaggagccatttctcaaaatgacaattattatttccagaaaaggggtatggcttttatttcagaacctcagaggtttgtgcygtgattctctggatcttgttggattcaactgattggatctgctgcatcacaagaccgagtggggtagtagtttgtgctgcagtctatctttgttgcagaa

SEQ ID NO: 364349 - DNA, 201 bp, Homo sapiens
caagtcactcatctctcggctctgagtttcctcatctataaaatgaggaaagactggctttccaggtatctaagaatcagaattgcctattttgcaatctrtgtcatcaaggacattcctttgttttttagtatagtagagtaattctcaagcttttcagtcttaggagccccttacactctaaaattattgaggacctgg

SEQ ID NO: 364350 - DNA, 201 bp, Homo sapiens
atattaattcagttaatatgcatctttagctataaatgatcataataaaatttctgctgcttaaataacatttaaaagcaagtttaggatgaacctaaaaygcgccatccatgtagatgttaacttcagatgcatggctttcctttcagaatacggcaggagaatgatatggttgattcagcgcctcagtgggaagctgta

SEQ ID NO: 364351 - DNA, 201 bp, Homo sapiens
gggagtttacatactaaaactcttcttatccatgagattttgcaaaaaaaagaaattgaatttatttggaattcaagttttgttcagtgttccttcggaasaggtaaaagtggagcctagtacaaatcccttatggtaggtcgtatggaggtttagtcactggaatagcattgattcttgattaagtggagggtctaacaa

SEQ ID NO: 364352 - DNA, 201 bp, Homo sapiens
agacccacatgagagtctgtaggatgttaaggtgattaaggtctctggagactagattatggcagaggggagagttgttacagctctgggcaataatgcaraagtgtatttttgatcttttgaaataaaagcagatgttttcttatgtttcttgcatattattaaagcactttctagcatagtatcttcatatcaggtgct

SEQ ID NO: 364353 - DNA, 201 bp, Homo sapiens
tatcaagtttttgatgatagtattaacctctacagttctcccatggatgcagtatttattttggttttctgttgtggtagggaggggaagttcagtcttcyagttggtcattcctatctgttgtaatagcccatattccatcgtcagggagccattgtgggacttctacccacaatgtggagtacgtttactgtcaagtgg

SEQ ID NO: 364354 - DNA, 201 bp, Homo sapiens
actcagttacatttacattcttaggactgaaagatgatactaggtcaggaaatagcatttgaaagtcattctcatctggagggatgaagccaagataaggyggaagccaggaaaaggtcagtttgaatagcctgaacctgcccggggctgaccgacctgtgtggattcagacccgtgcctggagtaagggcttctctgatc

SEQ ID NO: 364355 - DNA, 201 bp, Homo sapiens
agagtttgtggttgtatcgggagagggttcggaagagtattgttttccacattcttagtggtctcaaacctcacttctaatgaggaaccagaaatgaactyatcatattggaaattgtgttccaactgtgaaactcaacttgtgctgatagataaacacatttagcgctccagaagcctgtgaaacctcattttgaagtgt

SEQ ID NO: 364356 - DNA, 201 bp, Homo sapiens
ctggactcaagtgatcctcctgcctcggcctcccaaagtgctgggacaggcatgagctatggtgcctggcctgataattacttttacaaattgttggattyctattgaatctgtagctggggttacaggcatgagccaccatgcttggcctgatagttacttttacaaattattggatttccgttgaatctgttagcctgg

SEQ ID NO: 364357 - DNA, 201 bp, Homo sapiens
ttcagagtccatgctctttactacatatatggttttcaaagttgcctgtgtctggaaactttaaaaaatgctgatgcccacagcctgctgccgtgtacatsactgggggctcctgagaacaggcctgcattacctggtgccacctctcccagtgcccaaacacaactatgcaggggcctcgggattgccttgtcccatctg

SEQ ID NO: 364358 - DNA, 201 bp, Homo sapiens
cctgggcgacagagcaagactccgtctcaaaaaaaaaaaaaagaagactttcaaggatatttcttctatgtatccttgaatctgaagcaggaagtgagttktttcatattctaaactcaatcaacagttgttattccaaccatattaaccttagggggagcattaggaagaaaaagcttttgaaatcagctatatattgga

SEQ ID NO: 364359 - DNA, 201 bp, Homo sapiens
gtctggaaactttaaaaaatgctgatgcccacagcctgctgccgtgtacatgactgggggctcctgagaacaggcctgcattacctggtgccacctctccsagtgcccaaacacaactatgcaggggcctcgggattgccttgtcccatctgttgtcctaggcatgtgtgtgcaccatcaggatgcctcacaaaagatcca

SEQ ID NO: 364360 - DNA, 201 bp, Homo sapiens
ctaacaatctgtgagaattctagttgctctgcatccttgccattactcagtatcatccagctgttaaacttttgctgtcctgatgggtgatcctttttctrtgattgcaaggggattctagatttcctaataatcaaccatgggtacgtatcaggatcttagattaagaaattcttttctggttgacagttacagtctttg

SEQ ID NO: 364361 - DNA, 201 bp, Homo sapiens
tttgcagaagtcaacgaaaggttccgttgtccttgaccacgtattccatcacgtaaaccttgtggagatagattattttgggctacgttactgtgacagamgccatcagacggtgagtaaggtgactttgtgttaaatttttctggttataaatttcactctatctctggcttttcctgatatggttttaggtggttaggt

SEQ ID NO: 364362 - DNA, 201 bp, Homo sapiens
ctcattgttggcaaaggccaggtcagcgttcatgagaagaagtcctttgctgagtccgtatgtagcctccactctttccaccatggtcacttgttcttggmctattgaggaagaccggtgtgactgatgaaaaaggataacttctccacagccttgtaattttgttcacctggttattgacaagcccatctgtagtggatg

SEQ ID NO: 364363 - DNA, 201 bp, Homo sapiens
attttcttccaagtccttaaccatccatccacattgagtgttaacctttaccccatgattcagtgtaaagccataattctggccatttctcagtgtaggtraagaggacaagcaaatgtactagttacagttctgttgggatgatttcacatttcagggatgctcattattggagatgtcatgctgtagaagtccactttt

SEQ ID NO: 364364 - DNA, 201 bp, Homo sapiens
cggtgtgttttcccccaggaactctctgggctctttttgaccatttttctttctctccagtggactctacaattctcccagtgatcgcactaagtcgccaragttcccttacacgcgtcgccgaaacccctcctgtggaagtgacaatgattctgtacagcctgtgaggaggaggtaagcggaacacaatctctctgttag

SEQ ID NO: 364365 - DNA, 201 bp, Homo sapiens
cagcagctaggttgttcatctcagtggcttcctaaggcttctttgatttggagggggagggagaagagtaagacatctcctaattagatttattttgaccmgtcaggaatgtgacaaagaatgactgggatatttgttaggtgctttgaattccttaaataaagatgttttataaatgtacatattttccactctaaattt

SEQ ID NO: 364366 - DNA, 201 bp, Homo sapiens
gcgcctggtccactgttctgatatctatgatgagtttttctctcttgtcgaacttcatataaatgtaataacacaatatatactcctttaaaatactactwctttcactcaacatgtttttgagcttcatccatggtatcagtggtcatttaaatttttgtatatactgcaatatttttattcattctcttcttgatggac

SEQ ID NO: 364367 - DNA, 201 bp, Homo sapiens
atgattcagtgtaaagccataattctggccatttctcagtgtaggtaaagaggacaagcaaatgtactagttacagttctgttgggatgatttcacatttsagggatgctcattattggagatgtcatgctgtagaagtccacttttgcttggtaccagacattatacaaaccttctctaaaccgggcccaagtttccttt

SEQ ID NO: 364368 - DNA, 201 bp, Homo sapiens
agctctatctttatcttaagctaagactcctgaggatgtgagaggtgacacacccctccccactggtgcctggaggcttctgattagtcccttcctccatrtctccccaggggtttctaaaacaatttgttgagggtagaacaactcagttacatttacattcttaggactgaaagatgatactaggtcaggaaatagcat

SEQ ID NO: 364369 - DNA, 201 bp, Homo sapiens
gagcctcagattcctatcttcaacccagatgtttcaggagggactacactgtgttaaaattcaaaatctggattcagactgtatgggttcaaaccacagtytacctggagagctgtgtggcattgagtgagtctccctaacttttctatacttcagttcctctgtttataaagtgaagatagtaatagtaccagcttcata

SEQ ID NO: 364370 - DNA, 201 bp, Homo sapiens
acctgtgcatttaatattctaatactcctctttgtatagtttaactgattttaactctaaaatgctcatcgaaaacttcagtaatttaaaaagtgtaaagsagaaagtaatttcaatatgtaaagttaccattttttggtcaatggcctttcagacatctctttgtatgtacaatttcccagagaaaatttgtcatacata

SEQ ID NO: 364371 - DNA, 201 bp, Homo sapiens
gcatctcagctctcaggaagccacattcctaggaaaagggggagagtgctacatcacgggaacaccccatgggacaaaagaatctgaacagcagccttaarttccagatcttccatctaacatagtttactcaaaggagaaggaaccagaaaaacaattctggtaatatgataaaagaatgttcttcaacaccacccaaaa

SEQ ID NO: 364372 - DNA, 201 bp, Homo sapiens
cgtctttctactttgtttctatgattttgactactttagtacttcatataaatggaatcatctagtatttgttcaagccatttttcttctctgattttttkttttacaccaacatctctaccctcctctcctccccacctcagatcttcactgctctccagccctcttgggattttctatgactatgaattggaaagaaca

SEQ ID NO: 364373 - DNA, 201 bp, Homo sapiens
aaccaggatgccccattgaagctgtttgaaagtaaatggcgagtggtaaacaggaggaagaggagattgtggtaagagagcaaagtgtttggaggtggttrcagatgataaagtcgtaagtatgaggtaggttgctgagttgaagtggaggagattatgagagaagagataaagagaatttggagcctcagggtatgggaa

SEQ ID NO: 364374 - DNA, 201 bp, Homo sapiens
aattctcagcagtaagactcgaacaagcagaataaagaacttcagatctcgaagataaggttatcaaattaacccagtccaacaaagactaagaaaaaagmattaaaaaaatgaacaaaacctccaagaaatgtgagattacattaagtgaccaaatctaagaataattggcattcctgaggaggaagaggaatctaaaag

SEQ ID NO: 364375 - DNA, 201 bp, Homo sapiens
ggcacctgccagcacgcctggctaattttttgtatttttagtagagacggggtttcaccattgttaaccagaatggtctcgatctcctgacctcatgatcygcccgccttggcctcccaaagtgctgggattacaggcgtgagccaccgcgcccgagcaagctttgtctttttaatgtgaacaatatgtaaaatgaattgg

SEQ ID NO: 364376 - DNA, 201 bp, Homo sapiens
accattgttaaccagaatggtctcgatctcctgacctcatgatccgcccgccttggcctcccaaagtgctgggattacaggcgtgagccaccgcgcccgascaagctttgtctttttaatgtgaacaatatgtaaaatgaattggacactcttgattaattctaagtggcctcactagagttattattatttttacttgaa

SEQ ID NO: 364377 - DNA, 201 bp, Homo sapiens
tagaaggagctcaaagaacacctggcaaattgcaaaaagatcattacctaggcacattgtcatcaggttagctaaagttaagatgagggaaagaatcttartagctgtgaggcaaaagcattaggtaatctataaaggaaaacctatcagattaacagcagatttctcagcagaaaccctacaaggtagaagggattgggt

SEQ ID NO: 364378 - DNA, 201 bp, Homo sapiens
aatggatttaagctatactccagaacaaatggacttaacagatatttacataatattccttaatagagatggggtttcaccatgttggccaggctggtctsaaactcctgaactcaggtgatctacctgccttggtgctgggattacaggcgggagccaccacgcctggccatttacagaacattctacccaacaacttca

SEQ ID NO: 364379 - DNA, 201 bp, Homo sapiens
gcccgcctcggcctcccaaagtgctgggattacaggcgtgagccgccgcgcccggctgccctctgtgttttaattcttgaagtgggtggtggtttactgtrtgattatttgttaagctgtttatatatgtatgttatacccttttcttatgtctgatatttaaatgaaaaagcagtggtggtggggaaagatttatctaac

SEQ ID NO: 364380 - DNA, 201 bp, Homo sapiens
cacagaactagaaaaaacaatcctacagttcatatggaaccaaaaaagagcctgcgtagccaaagtgagactaagcaaaaagaacatagctggaggcatcrtattacctgatttcaaactatactataaggccatagtcaccaaaacagcatggtattggtataaaaatagggacatagaccaatggaatagaatagagag

SEQ ID NO: 364381 - DNA, 201 bp, Homo sapiens
agatcgtgccactgcactccagcctgggtgacagagcaagagtctatcttaaaaaaaaaaaacaaaaaaaaaaactgtacatgttaacagtgaacagtagwttaccattttgaatataaaggaaccatgaattaagtcatattactgattataccttatctcgtctacagtgggtatatgagagttatagcactgtcacat

SEQ ID NO: 364382 - DNA, 201 bp, Homo sapiens
acattctttctcactgctgtattccacaaatattcaattatgttctaaagggaagcccaaagctcagacagtgaaagggaggaagaagagaattctgttaycgggtgaataattaaaagctgcatgaacatctaaaagcaagttttcatacaaactcagcaaccgtgtgttcttaggtgagtccatgttgtggctctgaga

SEQ ID NO: 364383 - DNA, 201 bp, Homo sapiens
agaatggccattatcaaaaaaataaaaaaataatagattttggcatggatatgatgaaaagggaacacttctgcactgctggtgggaatgtaaactagtasagccactatggaaaacagtgtggagattccttaaggaactcaaagtataactcccatttgatccagcaatcccactactgggtatccacccagaggaaaa

SEQ ID NO: 364384 - DNA, 201 bp, Homo sapiens
actaagaaaaaagtagtcagtctaaagagaatgagggtgggagcaaacctaggtcttttcttaagctagttactcagggccttggttaacaggatgttcasctttactcagcttttttcagttggtgttattgacactgggtattggtctctctgctgtggccccctctcccagcctaggaaaacagccctaggacatgaa

SEQ ID NO: 364385 - DNA, 201 bp, Homo sapiens
gccaccactcccagctaatttttgtaggtttggtagagatggggttttaccaggttggccaggatggtctgcatctcttgacctcgggatccgcctgcctyggcatcccaaagtgctgggattacaggtgtgagccattgcgcccagccatatgtctttttttgtagaatgatttgtttccctttgagtatatatccagta

SEQ ID NO: 364386 - DNA, 201 bp, Homo sapiens
gtaacattctttggtgtactgtatgaataaaataggcaaaaatcacaaaaacatcctaaattgtagataatatatagattcttgtgtcgagatagaaacarttagaaaaaggtaactgatgatcagatactaagacagtaaagaaatctttttgaagtgcaaagtctaaattatctggagtctaaagtcatctggaatgtg

SEQ ID NO: 364387 - DNA, 201 bp, Homo sapiens
acacatcaacaatacaaaggatttaacaactacaactacagctgctaccactacagaaaaccaccaaactgtgataataataagaaaggaagaaaggaatraaagatatacaaaacggaaaacaacaaaacaacaggaataaattctcacacattaataataaccttgaatataaacagattgaatattccacttaagata

SEQ ID NO: 364388 - DNA, 201 bp, Homo sapiens
tttgtctgcattatagattttgtttacttccacgctactaagaagaattccacggtaaggaataatttcatttaaaatttggttgttaaaaaatatacatwcatacatatatatatgtatacacacaaatactttaaagagcttcattttcacatattgtcaagggagcatttttcttgtgaaatttaagtcactcaggct

SEQ ID NO: 364389 - DNA, 201 bp, Homo sapiens
ttgtttcttatgtgccaaggtgaagttaatcaggaaaggtattttagaaaaagtgaatacaggttgaactgtgccttatctgaaaccctcgtggctggctstgtttcaagatctaaaatatttcagattctagggtggtaatgtaatgtatgtattatatagcatccccaatcacctctggggaggcacctcataaaacaa

SEQ ID NO: 364390 - DNA, 201 bp, Homo sapiens
acaatacaaaggatttaacaactacaactacagctgctaccactacagaaaaccaccaaactgtgataataataagaaaggaagaaaggaataaaagatawacaaaacggaaaacaacaaaacaacaggaataaattctcacacattaataataaccttgaatataaacagattgaatattccacttaagatatagactga

SEQ ID NO: 364391 - DNA, 201 bp, Homo sapiens
catggtaaatgccaaatgtgtgttagctgccattattatatagtcatataatgccatgcctcatgagagatgatatagttagatagtgctgtgccttatgrgaggtgaaatcatgacagaatgtccttagacataggttctaagcaatgaagcaaggggcagtttttcttagaaggcttcttaatgtttacatttgcattt

SEQ ID NO: 364392 - DNA, 201 bp, Homo sapiens
attccacttaagatatagactgattcttttgtggcttcacatatagtctatcctgaacaaaagaagtcccaacaaattttttaaaaaatgcaattatatcrtatatcttcttagaccacaatggaataaagccagaaatcaataacatgaggagctttggaaatgctacaaatacatggaaattgaagaacatgctcctga

SEQ ID NO: 364393 - DNA, 201 bp, Homo sapiens
actggtcagtttgcctgcccaagcataaagaggtacatttaatttacttagccttgttcacttgatggagatgtgtttcaaaaatgaagcttaggcctcgygcagtaccttactcctgtgatcccagcactttgggaggccgaggtgggaggatcatttaagcccaggagtttgagaccaggttggacaacacggtgagac

SEQ ID NO: 364394 - DNA, 201 bp, Homo sapiens
tatttaaacaaatgaattaaaattaaacaaaatatataaagattgagtccctcagtcatacctgacacttttcaagtactctgtagacatgtgtggctagyggctgctctattggactgcatattacagaatatttctgtcatggcaacagttcggttgggcaatgctgttctacaccatgctgtctcccatccttcacac

SEQ ID NO: 364395 - DNA, 201 bp, Homo sapiens
ctagactctcagctaatctcttcaggatcagaaaagcacttgggaaagagattctacacagaatgtaaatttcccccacaagagacagctttgcagggccrtttcaaaatatgtcaaagaaatatattttggggtaaaatactttgatttccttttagggtctgctatttgttatgtgatgtatgtgatgttatataccaa

SEQ ID NO: 364396 - DNA, 201 bp, Homo sapiens
ccatcgacaaagcaaacaaaaacaaagtggggaaatggtgctgggataattggcaagtcacatgatggaaaatgaaactggatccttatctcttgccttaygcaaaaatcaactcaagatggatcaaggacttagatttaagtcctaaatcattaagacttaaaactataaaaattctagaagataacattggaaaaaccc

SEQ ID NO: 364397 - DNA, 201 bp, Homo sapiens
tggctaatttattgctttccacctaacgtgttggggttacagagtgacaacaaaatgcaccatttccccctgtgtttaatacattttgctgctctaagtgkaattcatggcttattagacatgccaagttgctagttttctaatcatacgcaaccaaaaatgatcagtaaaaattgcttaggctgactagtgtatcttgag

SEQ ID NO: 364398 - DNA, 201 bp, Homo sapiens
attgaatcctattcaccactttcttaccacctctgtcactgcaaaacaagtgatctgtaatgttactgagtgaaagaactctcgcctggactgtgtgggcmgctcactgggaggcgagggccttgacaagagcattcccacacctccccttcccacgcctgcatgctccctccttctcttatgaaaggcctctcctgctgt

SEQ ID NO: 364399 - DNA, 201 bp, Homo sapiens
cttaatgcctgggtcacaaaattaatcagtgcagcagaccctcatgacacgagattacctgtataacaaacctgtacctgtatccctgaatttaaaagttaaaaaaaaaaatgcttccatcgaacaacaattgaaaacaataaaggtacaaagtacttaataacaaaactatcaggaatggtagaaatgtcaacatataca

SEQ ID NO: 364400 - DNA, 201 bp, Homo sapiens
cctcctgggttcaagtgattctgctgcctcaccttcccaagtagctgggactaccggcatgcgccaccactcctaacttttgtatttttaatagagaaagrgtttcactgtgttggcctggctggtgttgaactcctgatctcaggtgatccacctgcctcagcctcccacagtgctgggattacaggcgtgagccaccat

SEQ ID NO: 364401 - DNA, 201 bp, Homo sapiens
tactaaggacagtgtctgacatgtcatgtaaagaacatgtatagtggatatccataagtgatgaatgaatgaatgatatcccagttttagagtctacctcyagaatattggcactccatgaccagtattctggatgtattccttaaaacagggatattgtgttcattggcaattttttgtgcccttttttctcttaaacta

SEQ ID NO: 364402 - DNA, 201 bp, Homo sapiens
agctgtataatattatactgtaactttgactaatttatgattttagtgaaatttaatttctatttcttattttagctggacctccatatactttgtatttyggtattaaattctatgctgaagatccatgtaaacttaaagaagaaataaccaggtatagtattgactttgtttttgaacagatacatgcattgcatatac

SEQ ID NO: 364403 - DNA, 201 bp, Homo sapiens
cagttgattgattgcctaatgggaaaacagtgattttagagttaatgattttagacattagaaaactagtttttttttaaatttagggtttcgacacaaarctctgataaattaaccttgatttaaccttattctgaatcttaagagaattttctccttgaatataataaacagtttaatcgtgatgtgtcagtagcctac

SEQ ID NO: 364404 - DNA, 201 bp, Homo sapiens
gcagcaagcagtgataattctcacagttgtctcttttgtttataaggttttttttttgtttgtttttttgagacagggtcttgctctgtcacccaggctgrggtgcagtggcgcaatctcagctcatggcaacctctgcctcctgggttcaagtgattctgctgcctcaccttcccaagtagctgggactaccggcatgcg

SEQ ID NO: 364405 - DNA, 201 bp, Homo sapiens
gccagttagccaagttgtgaatgcaaagaaaaaattcttgaaggaaatttggagagctactgtagtgaacacaaaaataataagaaacaaaacagtcttaytgctaatttggagaaagttcgaatggtctggatagaagatccaacaagctgcagcatttccttaaaccaaagtctgtaatccagagaaaggctctaactc

SEQ ID NO: 364406 - DNA, 201 bp, Homo sapiens
agtaaaagctaatgaaaagcaactaatttctttaattgtccttttcttcctcacacagtattggctggatcctgcaaaaacccttgctgaacacaaagaaytgatcaacagtaggtatttagcttttactttgttaaagggtggcttgaaaacgatgacaaagtccatgattagttgggtgcagaagtgggctttagtact

SEQ ID NO: 364407 - DNA, 201 bp, Homo sapiens
tttaacttattctgctggtgacctagctgcatgtggtaggaaaaacaaaagtatattccctaacttaaccgtaggtggtcagttttcccagtgaacccatrttaggggctaaaataaagcctaatacctcctttaaaaaagttgaaaatcatgtctttggtagcctgtggttttgtttctattccatgctttcatctgtct

SEQ ID NO: 364408 - DNA, 201 bp, Homo sapiens
ctagcacatttaaaataatgattttgtagcattggttaagattggctctatagcagacaccagagtttctttagtcgaaacttagaaatgtttaaaataartttttgatacatgtctttttcctagaaaattaaaatcagaagtctgcaaataatgtgtttacatatatcatgagtattatttacttctgagggtttatat

SEQ ID NO: 364409 - DNA, 201 bp, Homo sapiens
aaggaacacagccacatttgaaaagctcctattgtgcaattcctgctctcttcgctggcacctaaacccagtcgccaggcctgttgatttttccctccagyatctcttgcattcatatgctcttctcccttcattctccccccaccctgtcactttcttttatttacaaatgttttctgagtgcctactgcatgctaggta

SEQ ID NO: 364410 - DNA, 201 bp, Homo sapiens
tggtccatgggttttgttaagtctatatcatgctttagaattggttgcaagacttaaaaattagaagagttcactttaagaatccagatttggggattatmtttttttaaaaaaatgagaggatttggtaacactgtcttgtgatcttacatgtcaagtgcctgtgcttccaagtctttcccacctttctcttttcctcat

SEQ ID NO: 364411 - DNA, 201 bp, Homo sapiens
aggtccatagcagtatatgttcaatttaaatttactctgtacatgcaatgagagaaagaattatgctcttaaatctgtgaaaaataccttgacagtatccygttaatcttcaaataatagcctattaaaaatgaaaactttagtgaggaaatacatacacttcaaaggcttggagtatgttacagatagttttttacttag

SEQ ID NO: 364412 - DNA, 201 bp, Homo sapiens
atcagtttaggggtttattttgcaaaaattaaggatcatgactcatgacacagcctcaggaggtcctgagaacatgcgcccaaggtggttgggttacagcwtggttttatacattttggggagacagaagtcaggcaaagacataaattaatacatgtaaggtatacattggtttggcccagaaaggtgggacagcacaaa

SEQ ID NO: 364413 - DNA, 201 bp, Homo sapiens
tgtaaattcagaggatagggaaataaactctacgtctctcagtggggcggatgggagggttacaagattttgtgtccatatttagtccaccaccgacttayggctttgccatgtcagagttctgttggaagtgattgattttgcggtccgttctgggaacatactgacattcaccttaatcggtttttatatttcccctgc

SEQ ID NO: 364414 - DNA, 201 bp, Homo sapiens
tcaacccttgccccctctcctcctctagtggtccccagtgtctattgttcccatctttatgtccatgtgtactcaatgtttagttcccacttataagtgagaacatgcagtatctagttttctgtttctgtgttaattaacttaggataatagcctccagttgcgtccgtgttgccgcaaaggacatggtttcattctttt

SEQ ID NO: 364415 - DNA, 201 bp, Homo sapiens
agctgggtacggacttcaactggcagagactatagagtgaggataggcaattcaggtggagggagtgacatagagaaaagtgtaataggtagggcacatgytggcttatcttgagcatttgagtttgactggagtggaggcaggttggagataaacatagactgaggaattgagccacatagtagagaagctcaaatgcta

SEQ ID NO: 364416 - DNA, 201 bp, Homo sapiens
ggtctttaaggccctggacgtgtcaccttgaagcccatatacatttcactcagagcctatgaactcgaataagattggcagtcttattttgttaatactcrcaggggctagctgatctgatacctgagtctatagcaaagacaggctgggaggacctcaggtgaaagaaagaaaacccaccttctaggctgggcatggtgg

SEQ ID NO: 364417 - DNA, 201 bp, Homo sapiens
gttttgacctcatggatcccctaatggatcacattctgaaaatgcatgtgtgtgcatgtgtgtgtgcgtgcatccatccattggttattgtagcccacttytgtggttagctgatactgcttatagctttcagatgctttgacatttgctgtttcctcacagaattttgtgtagatcttagcacactgagcactgttgtgg

SEQ ID NO: 364418 - DNA, 201 bp, Homo sapiens
aaaaaaaaaaaaaaaaaaaaaaaaaaaaaatgcaatgtacctaactttaaagaatttttttctaccaggtgtgtttcatggaattacaacatatggttatrtctttgtgaataaatgatgtggcatcccaaaacgatggcagtcttggaaacagcaaaaataattgtggagtgtgtggctaacagtcttgttcttagtctt

SEQ ID NO: 364419 - DNA, 201 bp, Homo sapiens
ctgtgattatatgttctggaaagtacctataatgactgataaaatatgtataagtgataatgtgagtcctgttgcaaagaaaggaagattgtcatgctggrttattacagaatgaaacttactatgtgagatgtcttcaagcaactgttggaggaacagaggggaaagatcaagaagcagaaagttcctcttaggtaaccc

SEQ ID NO: 364420 - DNA, 201 bp, Homo sapiens
gtgtgttaagtacagatagagtggaagacagaatgctcctccccacctataactcaaaatctcaggggcagtgcatatacatcggtttgttagtttacataaggaggtaaccagaaactgcttcatgaagcctctgctgtgtaccacaatgtattctggaaacttccttgttaagtagatatttttagttagcatttttcc

SEQ ID NO: 364421 - DNA, 201 bp, Homo sapiens
tctctgttcctctgttcctctttccttttgtctttgaatcagatgtctgtcatttctgtatttggcaaaagatttgattgtctagtcagatgttaaagtctttttttttttttttttttttttttgagagaaggtcttattctgttgcccaggctggagtgcagtggtgcagttatggttcactgcaacctcaaccttctg

SEQ ID NO: 364422 - DNA, 201 bp, Homo sapiens
taccttgtctccatactatatatttcttcttaagcagaaggactgagaaactcatttttagctgcctcttaggatgtgtttgaaattatgaacctaaattygaccaagtgtttttcgggggctgttgggagaatggaatcaattaatgcttcaaagcacttgagaacccttaatgtaaaaaactgttatggaaagtgtata

SEQ ID NO: 364423 - DNA, 201 bp, Homo sapiens
tgtgatatctcaatactacttctggttttaagattagttttgaaagggaaagcgcttagcctgggctagagcctattttctgttccactctggcttgtgcyagtcaggttcgttcttgatccagactggtgtgtttggggatgtaggtctctcatattagggccttggtttgacttacagaaaattcccagaaattatagt

SEQ ID NO: 364424 - DNA, 201 bp, Homo sapiens
tgaacctaaattcgaccaagtgtttttcgggggctgttgggagaatggaatcaattaatgcttcaaagcacttgagaacccttaatgtaaaaaactgttayggaaagtgtatacctctctgtaaagccaactgtctgttattcccaaattcttatttgtgctttgtatgctagttgcttccaaatgggatctatttctatc

SEQ ID NO: 364425 - DNA, 201 bp, Homo sapiens
gggttatcactatgttgtccatgcttgtctcaaactcttggcctcaagcaatcctctttccacagcctcccaaaatactggggttacaggtgtgaaccacygtgcacaaagtcttaatagaggaagagaaatttgcatctctgacccatttcttaaaaaaatacacttcaggaaaagaaatttgaagatgccaatagagaa

SEQ ID NO: 364426 - DNA, 201 bp, Homo sapiens
tttagcggagcttggagattatgacccatataaacatactgcaggatatgtatctgagtaccggtttgttcctgatcagaaggaagaacttgaagaagccrtagaaaggattcataaaactctaatgtaagaatcattacaccatgtcttattgcatcatccatcagtcatcatcttctgatattcacaagaaaagtttct

SEQ ID NO: 364427 - DNA, 201 bp, Homo sapiens
tgaagttagcctttggtctgccttgttaattgcgaatgttatatactttttgcctttggactcaggttaaagtagttctaattttaatgtagttaaatctrtgatttttaatggattcttaatgtttttaagttaaaatcccttccttttcagaatagtcatctatattatcatcttttgttgacagttttatcgagatgg

SEQ ID NO: 364428 - DNA, 201 bp, Homo sapiens
ccacagttttcctaaattaaattacagaaattatataatatgggaagcttgtcttttatttctacagtctctccaccacctaaaatagtgcttagtgcatrgaaggtattgcacgaatgagtgaggttatttccatgttctaaacaacagcttacaaactttggtagcatgatttacttacttttttgagacagagtctca

SEQ ID NO: 364429 - DNA, 201 bp, Homo sapiens
gttttgttcagtgttccttcggaacaggtaaaagtggagcctagtacaaatcccttatggtaggtcgtatggaggtttagtcactggaatagcattgattmttgattaagtggagggtctaacaatctgttctatctacatctcatctgagtttattgattttcctccccacaccctctcccaagcttctatgtgtcagag

SEQ ID NO: 364430 - DNA, 201 bp, Homo sapiens
gaaaattctcctgtaaaaaatttgattgtcagtaggtcttaccacataagccttcgttttaacaggattgataatgtttattagactttttaaaaacactktgagattgggaataaaagttagttatcattaaaacaaaaattaaatcaatctgcaagtatatgagagaaatactgactttttaggaatactacaaaacag

SEQ ID NO: 364431 - DNA, 201 bp, Homo sapiens
tctttatactaaccatcacaatggctctccctgtccagtctttccttgtctgttctcagctggcaaataagaacttcacagtctgaaaactattaaagttrgttattaggttgtgagatgaagcatgtttgcagagatgaatgttgttttctctatttataggagaagccccgatatccaagcaaaagaagagttatggaa

SEQ ID NO: 364432 - DNA, 201 bp, Homo sapiens
tgtaaatgtaagatgaataggatttggggccattaaaagacttttttcctcccatagatggctgtacttgtggtgaatcaaactagacttgtagaaatgcrtttttcctgtacctaaatgatatttacctgcatgaaagccagggtcattcagttgctcaaattcagcagttgtggaataaattgttagtaaggtgaatgt

SEQ ID NO: 364433 - DNA, 201 bp, Homo sapiens
agcaggaaaccttcatgaaaacgaaaaaggccagtgtttatcagactctgagagtgaataaaaatgtgttagaaatgagcatagagagaaagatgggatcwgaccttacagcccacctggactttgttcaggattttggtccttagaccagtggttttttacaggaagtacaataacatcacatttgtgtttgtacagatg

SEQ ID NO: 364434 - DNA, 201 bp, Homo sapiens
aggaaaccttcatgaaaacgaaaaaggccagtgtttatcagactctgagagtgaataaaaatgtgttagaaatgagcatagagagaaagatgggatcagaycttacagcccacctggactttgttcaggattttggtccttagaccagtggttttttacaggaagtacaataacatcacatttgtgtttgtacagatgacc

SEQ ID NO: 364435 - DNA, 201 bp, Homo sapiens
actgctttattgagatataaattgtatactgtacaacttacccatttaaattgtccaattcagtggttgttcatatatttacggaattgtgcagccatcaycacaatcaattttataagattttcgtccctgcagaaagaaactgaaaaccactcttcacttccttccagccttccatcccctgcccccaccactgtgtaa

SEQ ID NO: 364436 - DNA, 201 bp, Homo sapiens
atacctgagactgggaaatttataaagaaaagaggtttaaaagactcacagttccacttggctggggaggcctcaggaaacttggaatcatggcagaaggsatgtcttcacagggcggcaggagagagaatgagtgccagcaggggaaatgccagacgcttataaaaccatcagctcttgtgagagttcactcactatcac

SEQ ID NO: 364437 - DNA, 201 bp, Homo sapiens
taagagatggacagggacaagagaaaagactatggatactagctttcaaagcatcttccattgaaacggttatatctcccaggcatgagactagagaatcycactgcaggaaatggactaggtacaagagaaaagacttacatatacttactttcaaaggatcatccagtgaaatgattgaggctgccctcatattactgt

SEQ ID NO: 364438 - DNA, 201 bp, Homo sapiens
atatttaataatttatcagcattagtatggtgtactaatatactgctactaattataataacttagttcagaagaaatttttaacatttagagctttatgrtcatgggaagtaaacactttatttttatattttgtcatagagaagtatgataaggtgataataaaaacttttttattagtttgttctcacattgctatga

SEQ ID NO: 364439 - DNA, 201 bp, Homo sapiens
accagcaagccttgtgggtttctgactgtcacatgaacacagaatggcttttaggtgtaggttctggctacaaaaatgtgtgtgtgtttacagcacacacrggtaccaacatgccattttcaaatgggagtgtttgtttcaaagaatgattaataattatgacctcaagtagtataccttctcatagttttcttcagatat

SEQ ID NO: 364440 - DNA, 201 bp, Homo sapiens
gtgagcagccatgatgggaatggtgtgtcttattcagctaatgcattatgccaccatatttaactttttgtacttctagatttctctcttaaaaaatgggrattatatttggcacctatttttaatgaaaactttgacaattagcttgactttttaagagtatttcaaagtaaaactatttattactattttgactagcac

SEQ ID NO: 364441 - DNA, 201 bp, Homo sapiens
aaaacaaattaaaattgggctaaacgtttggatgtgtgtctacctgcattttgtaacgcatctccttagagggtaaaatttaaactagcattgcatgaagytgatcagtgtctgatgatagatgtgtttgaaaatggcgtgaacctgggtgacatgatgatacattttgcatctgctgtgatgaaatatttctgtatcatt

SEQ ID NO: 364442 - DNA, 201 bp, Homo sapiens
taaaaatactgatgctacatcctgccaccccataagccttgttaaattcacttactagctctagaagcttttggttgggggcagtttcttacgattttctrcggttacaatcatatttgtgaacagttttccttgatttctagtctttctgtcttttatttctgttccttcccttacactggctagatcatgtagtacagt

SEQ ID NO: 364443 - DNA, 201 bp, Homo sapiens
agggttccagggtgctgcacacataagtatgtgtatgtaatattaataaatagtaacatagttcatatgttataaatacatgatacctttattcttgttcrttttaatttcttttccccagtttctaaatttgtgactttatttattcagttaagaatagcgagactggggttactttatcagtttagatagtatcgaaga

SEQ ID NO: 364444 - DNA, 201 bp, Homo sapiens
gaacccttaatgtaaaaaactgttatggaaagtgtatacctctctgtaaagccaactgtctgttattcccaaattcttatttgtgctttgtatgctagttrcttccaaatgggatctatttctatcggccacattctgaatatgacacttttcatttaaagtcagttgtacattatagaaatcctctaagaaacctgttta

SEQ ID NO: 364445 - DNA, 201 bp, Homo sapiens
gcctttagaaatgaagacccaaagaaatgagatatgtgtatattcatggacagtcatgcagaagtatgactagaggacaaaagggtatattctaatggtartaacctggaggggggcttagcaaaggttggttgtttggattcttcttggtttccctgtatgatatcccctccctctgggtaaagcaggatatctatcaca

SEQ ID NO: 364446 - DNA, 201 bp, Homo sapiens
catagctttgtctctgcctttgagttgtgtgtgaacacaaccttagactagtcgtttcttgaacctgctccttcttttggaagtcagcagtgggaattggytctacctcggcagttgtttgttgttgcaattcttgattttactaatgcattgggcaaatttacctgtttttttacccctcctgttcttgacaggtggggg

SEQ ID NO: 364447 - DNA, 201 bp, Homo sapiens
aaatgggatctatttctatcggccacattctgaatatgacacttttcatttaaagtcagttgtacattatagaaatcctctaagaaacctgtttagaaacygttctatccaaagtactttgcatagtttctaggttataagggatttgtttatggtgacaagattgactgctgaaatgtgtgcttgggagtgaatgcctca

SEQ ID NO: 364448 - DNA, 201 bp, Homo sapiens
ttgggaaagagattctacacagaatgtaaatttcccccacaagagacagctttgcagggccatttcaaaatatgtcaaagaaatatattttggggtaaaayactttgatttccttttagggtctgctatttgttatgtgatgtatgtgatgttatataccaaagtcaggttggaattggtatcttgttgctacaaaaaggg

SEQ ID NO: 364449 - DNA, 201 bp, Homo sapiens
gagaatttgaggaaagaattttaggtacataggataaaaggtgctcaataaatgatagctattagtatgtatgatatattatttgcaaatacatttatttytgaatttcagtttgggatatcgaatctctgccacccctgcctaaggttgcacaggttctccgaggggtatgagtggttgttagaagtgggagagcagtgg

SEQ ID NO: 364450 - DNA, 201 bp, Homo sapiens
gtcaatatgtgtgtttacttaatattcacacacactccttctcctggggcttggtgtcacagtcattatccttccatcggagactggctgcagcttcctgsggagaccagccgagcatttccttaattggctggtaaggtcagcatgcagttgacatgcacattcctgccgttttcccttcccccctttttgacatctccc

SEQ ID NO: 364451 - DNA, 201 bp, Homo sapiens
ccaggcctgttgatttttccctccagcatctcttgcattcatatgctcttctcccttcattctccccccaccctgtcactttcttttatttacaaatgttytctgagtgcctactgcatgctaggtaaggcgccaaaatggtctggagataaagtgtgagcacagcaggagacagagggagatagccattcttgagcagta

SEQ ID NO: 364452 - DNA, 201 bp, Homo sapiens
aacagtaacggaagaaagccttttactatttataaatagccacaaaaagtataagcaattctacaaaaagaataatgtgctttttagaagatatggcagastttttaaaaagccaaacttccaccatatctgtgcatattttcagttgctaattgtaactgtattgttggtaacttctgttattccgagaattagcagggg

SEQ ID NO: 364453 - DNA, 201 bp, Homo sapiens; identical to SEQ ID NO: 78823

SEQ ID NO: 364454 - DNA, 201 bp, Homo sapiens; identical to SEQ ID NO: 78824

SEQ ID NO: 364455 - DNA, 201 bp, Homo sapiens; identical to SEQ ID NO: 78826

SEQ ID NO: 364456 - DNA, 201 bp, Homo sapiens
gatacactgacaatgttagaccatccttggaagtaagaggaggaggggttcgcataagaagtagtagttgtgagttagtgtcattctcagagcctccaccmgtgatgatgggagatgtgtaaaacctaagttttacaaactagtggatgtggtgcccaggctctggtaatgagctgccctgtttctccgtatgagacaagt

SEQ ID NO: 364457 - DNA, 201 bp, Homo sapiens
ccccggacgggagccacaccccgcgacgagctgacctcccctcgctggtctgggtaaggagcctgctgccctttccgcctctcttccggctcctcggcgcytgcggctgggggacggggtagcggacggagcgacgaccttcgcctctgcccctgcgcccatggtcggggcgtcgtgggtgctcctcacacaaaagaaaag

SEQ ID NO: 364458 - DNA, 201 bp, Homo sapiens
tttacctttttaaaaaaccaacttctcatttcattgctccttgtattttctagtctcaatttcatttatttctgctctgatctttattatatctttccttygactcattttgggtttcgtttgttcttgtttttctagttccttggagatttttctcttccttggagatttctcaagtgactaaaaatagaactaccatat

SEQ ID NO: 364459 - DNA, 201 bp, Homo sapiens
aaggtctgcagagtggacagattcaatcctagacaaacttacaacatagtacttatttcaggtcctctcctagcactttttttctggtaattcttctgctrtattctcctctcacattcactggtgttctcttcccacctctggctatctagaaatcttccatcccaaatagatgggttcatgcttcccatgataggcaga

SEQ ID NO: 364460 - DNA, 201 bp, Homo sapiens
aagacgggtttgggcagaggcaagagctgatccgcacagggagctctagagctgagatggctcttcaaattcattctactttgggacaagggggttgaacytttacacattcacactcaccccatagaagtcactgggtaagggatgttctgggaagggggatttctcttcaactgagggcagttcctggggaggggctca

SEQ ID NO: 364461 - DNA, 201 bp, Homo sapiens
atttaacaacaggcttggcctctgtccttgtcacaaaagcatgccacaattattttgatggccatgtgtgtaacacagatgttgtctgctaaagctaatcmcattatcttctatgctaccttaaaagtgtatgtgttaaacacctacccacccttggcgtgtactaaattaaatatatttgcatatttataaatggtgtgt

SEQ ID NO: 364462 - DNA, 201 bp, Homo sapiens
agcccgttgttcgtcgtgttgtggttttcagtgtcatttgatcatggatcctttagaaaagccagttgtatctactgactctcatcccataaaaatgcatstaagcacatgtacagtttttggaccacgtaagaagcctgacaccagcagtatctatcatgtatggccctttttgtttttatcaatgactggagcaaggcc

SEQ ID NO: 364463 - DNA, 201 bp, Homo sapiens
caacttaatttatgattctagatactgttccagtcactaattctaaaactcattctctgcagttcaaaaacagatcttgtaccaccacttccggtgacccrttcttcggatgctcagggttctggggatgctacagttcatcaggttagtaatagtaaggtttgaagaaggtgttgtattgatgacaattttgagaagcat

SEQ ID NO: 364464 - DNA, 201 bp, Homo sapiens
acggaatacatggatttttgtataatttacaacccacaatattttcagtacaaccagttgtattgaaagttttagaccagcttgtgtagttaagaacacartgacatagatggcttgcaattagtgtccatgatttgttgcctaaaacatatggttgaatttaggtaagttaaatgtgcgtttaatacattgatatatgca

SEQ ID NO: 364465 - DNA, 201 bp, Homo sapiens
cttctagctcccacctcaacatagatttaggcctttggcgagtcatacccattgttttcccctgtagctgtcataagccttagcaactctccaacatccayttggaataatgatgaggaacgtataatgagttcttatgtgccaggcactattataaagcacctttgtatacacatcaatgctcagaatagcccctgtggg

SEQ ID NO: 364466 - DNA, 201 bp, Homo sapiens
tatatgcttacctacatatggatatattaattcagttaatatgcatctttagctataaatgatcataataaaatttctgctgcttaaataacatttaaaarcaagtttaggatgaacctaaaacgcgccatccatgtagatgttaacttcagatgcatggctttcctttcagaatacggcaggagaatgatatggttgatt

SEQ ID NO: 364467 - DNA, 201 bp, Homo sapiens
gcctgctcagctcatcaccaccaccactaacctcagcacatgctgtctggaagccaagtgttgttctaccaccactgcttccattgtccatgtcatgcacrctgcccagtgccctgagggcctgctcagcccgccactgccggcacccaagcaagttgcctggaggcccaagaatcagcttgcttggacccactaacacta

SEQ ID NO: 364468 - DNA, 201 bp, Homo sapiens
cacccaagcaagttgcctggaggcccaagaatcagcttgcttggacccactaacactagtgcctgcatatgccacccaggtgtccaaagacatgcttggtwcactgcttggttcaagcatgccaacaggcatgcttggttcactgctgccactgctgaggcctgaggactggtctagctggtgtccttgtccccagcaagg

SEQ ID NO: 364469 - DNA, 201 bp, Homo sapiens
gtcttaaacatgtgagcagccatgatgggaatggtgtgtcttattcagctaatgcattatgccaccatatttaactttttgtacttctagatttctctctyaaaaaatggggattatatttggcacctatttttaatgaaaactttgacaattagcttgactttttaagagtatttcaaagtaaaactatttattactatt

SEQ ID NO: 364470 - DNA, 201 bp, Homo sapiens
aatataaacagattgaatattccacttaagatatagactgattcttttgtggcttcacatatagtctatcctgaacaaaagaagtcccaacaaattttttwaaaaatgcaattatatcatatatcttcttagaccacaatggaataaagccagaaatcaataacatgaggagctttggaaatgctacaaatacatggaaat

SEQ ID NO: 364471 - DNA, 201 bp, Homo sapiens
tgattcttttgtggcttcacatatagtctatcctgaacaaaagaagtcccaacaaattttttaaaaaatgcaattatatcatatatcttcttagaccacartggaataaagccagaaatcaataacatgaggagctttggaaatgctacaaatacatggaaattgaagaacatgctcctgagtgaccattgggtcagtggg

SEQ ID NO: 364472 - DNA, 201 bp, Homo sapiens
ttaagaaggaaatttaaaaagttcttcaaacttgacataccaaaacctatgggtacagcaaaagcagtgctaagagggaagcttatagcaataaacacccrcatcaaaaaagtagaaatatttcatataacctaatgatgtatttcaaggaactagaaaagcaagaacaaaccgaacccaaaatgagtcgaaggaaagaaa

SEQ ID NO: 364473 - DNA, 201 bp, Homo sapiens
cagagtataaaattttgtcaccaagaagcaaaggccttcttgaaatacaaggacttaagtttgcattagtaaaaagtattatttgttttcccattgaatayaatgaagatagtttgcatccctgtaagtgcagtagctgctgtaaaataaggctctttgtttttgtgctgggtgtaggggtcagattccttctgaggctga

SEQ ID NO: 364474 - DNA, 201 bp, Homo sapiens
gtctctctctgtctctctctttttgttgctgggtccttgtctggttttggcatcagcgtaatgctggcttcatagactgagttaggaagaattccctcctyttcaggtttttgaaatagttttagaattggtgttagttgttcttcataagcttattagaatttggcagtaaaaccatccaggcctgggcttttctttgtt

SEQ ID NO: 364475 - DNA, 201 bp, Homo sapiens
ctactcctttgaagttctaagggaatgagcagatgccttcctagcctcacaaatccctttcttgtttttgaacctggcattctgacccacaaggaggactstctgtgagtacctccacaccctgtagctcctccacacactctgtagcactgggggaagggcagaggaggaagtgcctttatgtgcactcacagtcccaaa

SEQ ID NO: 364476 - DNA, 201 bp, Homo sapiens
aacaagaaatgctcctatgattctaacccctggctgttcttgggagtcacttggacagcgcagggtgaaaggtcagggattagcattgaaaaaacccaggyagttctcatacgccctcagaagcaggcaccttgtgggggccatggacagcatatcccttatggagttggtagcctccagctgctgtcactcatgttggtt

SEQ ID NO: 364477 - DNA, 201 bp, Homo sapiens
aatgctcctatgattctaacccctggctgttcttgggagtcacttggacagcgcagggtgaaaggtcagggattagcattgaaaaaacccaggcagttctmatacgccctcagaagcaggcaccttgtgggggccatggacagcatatcccttatggagttggtagcctccagctgctgtcactcatgttggttaagggac

SEQ ID NO: 364478 - DNA, 201 bp, Homo sapiens
gttttagccattttaaatataagatatttattccttatgctacctttagaatatattgagtctattggaattatatgtcactgaaacaaatgtgtattttraagttaaaagtaaactgaatctctgtgtatcaggtgatataacaaaatacatggatctggtcagctttttctttaatttcataagtctgattggtcaaga

SEQ ID NO: 364479 - DNA, 201 bp, Homo sapiens
gtgaatttttaaaggcataacgttataagaattttttgcagagttcatttcccctttgtgaaggagtaagctgtttgtctcagatgtaatagttatcattmtgtgaagctggcaggaacctgcctttctggtttgtaatgtcatgttaatctgcaaaggtgttattactcatttgaaatattctttgttctggttgaaagc

SEQ ID NO: 364480 - DNA, 201 bp, Homo sapiens
gattagcattgaaaaaacccaggcagttctcatacgccctcagaagcaggcaccttgtgggggccatggacagcatatcccttatggagttggtagcctcyagctgctgtcactcatgttggttaagggactggtggccacttgcttctgggggccgagggcccttgcctcccaactccatcagctggacttgcgaagatc

SEQ ID NO: 364481 - DNA, 201 bp, Homo sapiens
gtgaggaagatggagttgtccctccatgccctccattagaagaggaagctgggcacagagagttaagaaacttttccaaatttgtgtgagtattaagaagygggaactgagattggaactcaggcttgcttgacacagaatctgtggcttccttaccattttgggtaaggatttttaagaagagaaaggtagctccttcac

SEQ ID NO: 364482 - DNA, 201 bp, Homo sapiens
aatggaaacagtactgaagtttacacaatgaagagtgcaggcccctcctcaccctgtccacactccatcctcctaactgctgtctccgaaggtaatcactmttgatgatttttttctaaatctatatgaaaatatgcatattaacatatattgatacacagacccagaagtataatccttttttttttttaaacctatacc

SEQ ID NO: 364483 - DNA, 201 bp, Homo sapiens
tcagaagttaatcataatggggtaggccctgggcatttccttttgtgaatcagtttttacatagttttatgcacactaggataactattcctggctaaaaktttcagcgttaatgttgccattcttagtgtacagaattccagtttcataggtgtaattcttttgcgggagaaaggagcaaaaataatcagttaaagctac

SEQ ID NO: 364484 - DNA, 201 bp, Homo sapiens
agccactgataccctgcatcctgcttttttaaaacttaagacaatgcgagaggtacatcaacccttattttttcccttaaaaaagaaatgaatttagcaarttaccaaaatgtatcctattgtcatctttcagttctgcagaacctggttagtgcaaaaccgagacactgattgtgtacaggttaggctagcattttatgg

SEQ ID NO: 364485 - DNA, 201 bp, Homo sapiens; identical to SEQ ID NO: 78862

SEQ ID NO: 364486 - DNA, 201 bp, Homo sapiens
cttgctgctgacaatgctgcaggcaccgtgatggatgctagacagggaccactcttgctgacactgctggagataccaccactgtagccgaacaaagaacycccacttctcaggagtgcaagagttgatgccacaggtacaactagaaggaaaataacttttcctgttctctgccttcagatctaactggagtctctctta

SEQ ID NO: 364487 - DNA, 201 bp, Homo sapiens
ggaatcgcttgaacccaggaggtagaggttgcagtgagccgatatcaggccactgtactccagcctgggcaacagaatgagactctgtctaaaaaaaaaawatatatatatatagatatatatctatatatctatatatatatatagatatatatatatagatatatagatatatatatatctatagctatatatctcctt

SEQ ID NO: 364488 - DNA, 201 bp, Homo sapiens
tgtaggttggtactctcctctaggttctcctgtttcacattcagctagcacctaaaatcaaactcctccctgtccctacatccttcagttttctcagcagrgtcttaagtcattagaaggtgcactgcaggattctttggtgtaagcattcatgactgttcttggccaggaatcttacaggagccttctgttttgagcttc

SEQ ID NO: 364489 - DNA, 201 bp, Homo sapiens
tttgggacaagattagaaagggaaaactcacctgccgattgtgaaagatactagcatttataccagcaccacaactatcattttcttgcatattcctttayagaaaagaacttgtggatccatccggattgtccgaagaacaattaaaagagattccatacactaaaatagagtgagtgcctttcagaatcttctcaccaa

SEQ ID NO: 364490 - DNA, 201 bp, Homo sapiens
tgttaaacttattttcagttctgattcaaaacatgacatccttccctgtattgtgtgtccttcatagctctgtatcttccagatttgataagtataatacmtacatttgtttaaaagacaggcttgggaatcagaaaggctgagtgaggtctgcatccttgctttgtcattcactagttctgtaatcctgagaagattgca

SEQ ID NO: 364491 - DNA, 201 bp, Homo sapiens
tgcaccctcggtcattttcccattcttttaagatttaggttctgctgtactgtcactctctccagcactattctagtactcacataatggatctttacaawaacttggcttccaccacccaaccatagccacttaattcctaggtcatacccttaatcagtggttttccaactgggggcagttttgcttccaaggggacat

SEQ ID NO: 364492 - DNA, 201 bp, Homo sapiens
acggcgcggacaataaattaatgcatcgcgcttgagtggagggggcggctgggcgcctcggtggtagctttctctcctggctggagacgaccacaaccgayatgggctgtttctgcgctgttccggaagaattttactgcgaagttttgctcctggatgaatccaagttaacccttaccacccagcagcagggcatcaagg

SEQ ID NO: 364493 - DNA, 201 bp, Homo sapiens
ggtcgtatattctgaactccacccgtgtagaacatttctgacacatcagccagcttcctattaagcacttttaggtaggaaagctcctttgaaaagcactragaaattcaataagaaataataattccctgatggtctatgcagaataaatctgatctctctattctttattagtactgtagataattcgtgtcctcagga

SEQ ID NO: 364494 - DNA, 201 bp, Homo sapiens
ttccatctctacaacactgatggtaccacgctcttaggattttgctgagcattaagtgaggttgtgcctgtgtcacagcctttattagtaagttcccccasgtcttagttattctctagaaacactgcaaggtatttgtgtttttccttgagatgaggaggtggtgagaaatgaagagagtagataaggcaactcacaaaa

SEQ ID NO: 364495 - DNA, 201 bp, Homo sapiens
cagcctcccaagtagctgggactacaggcgtgtgccactacgcccggctaattttttgtatttttagtagagacagggtttcaccatgttagccaggatgktcctgatctcctgacctcgtgatctgcccgcctcagcttcccaaagtactgggattacaggcgtgagccaccgcgcccggccctgactctctttttaatt

SEQ ID NO: 364496 - DNA, 201 bp, Homo sapiens
tgttgaatacaagtggtaagaaagcagacatccttggctgctctttttcataaagggagagcattcaatatgtcacattatatatgatgctagctgcacartttaggaagatcccttctatttccagtttgctaagagttagtgaagagttttgatcatgaatgggtcttgagttttgttataaactttttctgcatctgt

SEQ ID NO: 364497 - DNA, 201 bp, Homo sapiens
ttggttgtcctttgagcaaaataatccaatctagaattatttattgcattttcttatgttttaaaagtctccttcattgtagaacagttacttgatacttygataaccatactatttttgaagagaataggccaggtattttgcacaatgtccctcaatttcggcttgtctgatgcttcttcattattaatttcatcttat

SEQ ID NO: 364498 - DNA, 201 bp, Homo sapiens
gccctcttgggattttctatgactatgaattggaaagaacaaacttcttacagtgtgttcattaacagtgatgacattgtgtgataattttaaagttcacrcagttaatcattccatcttctatgtaaggtggtttcccctatttgaagtaattagctgccaggcctacctgagtgcatttttcatgttaagcagacaata

SEQ ID NO: 364499 - DNA, 201 bp, Homo sapiens
ttgttttctttcgcttgggcaaatacctaggagtagaattgctggattagagggaatttgtgtgtttatttattttttttttttgagacagagtctcgctytgtcgcccaggctggagtgcagtggccagtctcggctcactgcaagctccgcctcccgggttccacgccattctcctgtctcagcctcccaagtagctgg

SEQ ID NO: 364500 - DNA, 201 bp, Homo sapiens
ttaaacaaaatatataaagattgagtccctcagtcatacctgacacttttcaagtactctgtagacatgtgtggctagcggctgctctattggactgcatrttacagaatatttctgtcatggcaacagttcggttgggcaatgctgttctacaccatgctgtctcccatccttcacactgtcgtcgtcttcgcccctatg

SEQ ID NO: 364501 - DNA, 201 bp, Homo sapiens
attataactaaatttcaaaacattatagattaacaaagaattctaaagatttggagggggcatgggaatatgggagagaaaaaaatatccatgtacaaatrgtgacaaatcaaaatgacattgggagccatgtacggtggctcatgcctgtaatcccagcactttgagaggccgaggtgggccgatcacctgaggtcagaa

SEQ ID NO: 364502 - DNA, 201 bp, Homo sapiens
caggcgatccagacacagatctcgttcgtatgtggactctttttataccttgattcaaaaacactgaatttgaagtagcatgtggatattcaggtcttctraagtgttttagttcaactaggattatttcattgtttatttgtcatatttaccttctaatatttgtgacatttattaaccatgtttgaagccatagaagtt

SEQ ID NO: 364503 - DNA, 201 bp, Homo sapiens
catgttgttctggacatctccttcagtgtctttctttttctcaccacacccatggtgggcgtctcttgtgctgaatgtgaatccatttacattctctgctkctttgatctcattactgctaaagaaaatcatctaacagtgtcagcataatttttcagtctcattccgaaactcaaatctgcatggcagtactctcactca

SEQ ID NO: 364504 - DNA, 201 bp, Homo sapiens
tctaacagtgtcagcataatttttcagtctcattccgaaactcaaatctgcatggcagtactctcactcattcttaggcagctctctgtttgtccctatarcagctgttataggcttttaagctccctggtatcctggtcttcccactcctcctcggtctcagcaaatgatctacaggcaatgctgcacaaactctttgca

SEQ ID NO: 364505 - DNA, 201 bp, Homo sapiens
tcagcataatttttcagtctcattccgaaactcaaatctgcatggcagtactctcactcattcttaggcagctctctgtttgtccctatagcagctgttayaggcttttaagctccctggtatcctggtcttcccactcctcctcggtctcagcaaatgatctacaggcaatgctgcacaaactctttgcacctccttccc

SEQ ID NO: 364506 - DNA, 201 bp, Homo sapiens
ctttctgaaacagtgatgcatatgagagtattatctcactctaaaggtattattattttgtatttccctgagaagctgtatagaatggtgcaccccaaagygctgagccctagatgatagcaaacttttttttcttccctgtgattttaggcaagttgtttaactccttggagtttaatgtgccttgcatatgttcccaag

SEQ ID NO: 364507 - DNA, 201 bp, Homo sapiens
catgtatctcaaaggtaacatattcaaaactgaagccatcttcccctccaaatctgctctttttaaaaaatgtttctgagatcagtgattttcaagatttytttttcttttagagatgaggtcacactatgttgcttaggctggtttcaaactcctgagctctagtgatcctcctgcctcagcctcccaaagtgctaggat

SEQ ID NO: 364508 - DNA, 201 bp, Homo sapiens
aactcctcagcatcaagcctagtatttggtgtcaacattgtgcgtagtaacagtattgaatgggatgggctctagtgagattttgtacaaggaataaatamatagcttgtttgggaattccttgaaacacagttttgatttgcacatatgtggttctgagtggacatatggaatccctaacagatatttgggagtttactg

SEQ ID NO: 364509 - DNA, 201 bp, Homo sapiens
taaatggacaaaggtggaggtgtcgcagatggtttcatgaaggagaagacttgaggaggactttgaaagctgggtacggacttcaactggcagagactatrgagtgaggataggcaattcaggtggagggagtgacatagagaaaagtgtaataggtagggcacatgttggcttatcttgagcatttgagtttgactggag

SEQ ID NO: 364510 - DNA, 201 bp, Homo sapiens
tgttctaaagggaagcccaaagctcagacagtgaaagggaggaagaagagaattctgttaccgggtgaataattaaaagctgcatgaacatctaaaagcawgttttcatacaaactcagcaaccgtgtgttcttaggtgagtccatgttgtggctctgagatgcttggaaagtcatgcccatagtatatggaattgtgggg

SEQ ID NO: 364511 - DNA, 201 bp, Homo sapiens
ttgttacaatagcttagtgaatggcaacaccatctacccaattgctcaagctagaatcttgggtgtcattcccaactacatcatctcacctctcctcatarccagtcaccaagtcctggcagctttactccttaattcctagattgaccatacagttcactcactaatccaggatacttttgagagtgaaaagggacactg

SEQ ID NO: 364512 - DNA, 201 bp, Homo sapiens
tcctattcaccactttcttaccacctctgtcactgcaaaacaagtgatctgtaatgttactgagtgaaagaactctcgcctggactgtgtgggccgctcaytgggaggcgagggccttgacaagagcattcccacacctccccttcccacgcctgcatgctccctccttctcttatgaaaggcctctcctgctgttcattt

SEQ ID NO: 364513 - DNA, 201 bp, Homo sapiens
gcactgttgtggttcaggacacagttggtttattggcttttagggtcagatatacagctggctgtttggactctaactgtcaaaatgctaaatattgggcrcctactcccagatccttctcctgggtgttcagaaagctgtaatgagcactggggacttaagaaaccatgtagacatgcagcacctctttcaaagccattg

SEQ ID NO: 364514 - DNA, 201 bp, Homo sapiens
gtcttgtacatttctgcagtgtggtctatggttgccatgtttctgtttatgaactactggggctaacgtttttggtgagaaccagaatgatctatactcamagtttgacttctgtcagttttttgtaacctctaggcattttattagttctttcacttttggtttcttttgttaggtaagagcatacaggctgggcgcagt

SEQ ID NO: 364515 - DNA, 201 bp, Homo sapiens
aggttgaagacttacaaatgtaattgcataaaacttttttctcagttgtggattttttgtgtatgtgtcaatttaatttgattcaactcagttttaattcragaatctatgcttgggggccaactctggacatgctgtgggccatttcagccatgccccaaagggagcctgtggtcaggctgtgccagataggcaagattg

SEQ ID NO: 364516 - DNA, 201 bp, Homo sapiens
tactaggtgctgtttagaatattcttgtctggttagaggtatagtggtgtagtatgtaataaaaggaggcatattatatgaggatttgagttcaaacaatstcatgtgtaactgtatgatggtggatcccatgattttaaaaaattgtttataataaatagcacttctaaaagtagatttttctatttcttcttggttaaa

SEQ ID NO: 364517 - DNA, 201 bp, Homo sapiens
aggctggtcttgaactccttgcctcaagtgattctcccacctttgtgtcccaaagtgctgggattacaggtgtgagccactgcacccagtctaagttgcarttcttaccacaagagaaacaggtatgtcttactgagtaggtacaggtagttttgacattgctacatccttaaaggtagttttagaggatatttatttctt

SEQ ID NO: 364518 - DNA, 201 bp, Homo sapiens
ttatttcaagatgaaatgatctcatagtctgtatacagtgatgcctcacttatccacattttaaaaatgtgttgcaacttcacttacccaaaatgtagtcraaactttccagagatctaaggtttcttaagcagcacagattgattattttagagtccactcacgggattcaggactttctcaaggaatctgtgatcccta

SEQ ID NO: 364519 - DNA, 201 bp, Homo sapiens
attgctacatccttaaaggtagttttagaggatatttatttcttagaatcatttaatttaaacacgaggagcttcttctttatagaagtcttgtttgagtrtataatgtcttgaattttttttaacaaagccttttctaatcatcctagtgagaaatgttgttcattattttgagtcttaatgtcttgtccaggaaagacc

SEQ ID NO: 364520 - DNA, 201 bp, Homo sapiens
gctcatcgaaaacttcagtaatttaaaaagtgtaaaggagaaagtaatttcaatatgtaaagttaccattttttggtcaatggcctttcagacatctcttygtatgtacaatttcccagagaaaatttgtcatacataggttcatgtatttatgatattacatagtggaatcattctgtaaatactagattttgcagtctt

SEQ ID NO: 364521 - DNA, 201 bp, Homo sapiens
agcattgattcttgattaagtggagggtctaacaatctgttctatctacatctcatctgagtttattgattttcctccccacaccctctcccaagcttctrtgtgtcagagatcccattgctcctgcattgctgttgtgaagagtctgcatggccaggtgctattgctaggttccgcatgtggcatgggtgttgagctcag

SEQ ID NO: 364522 - DNA, 201 bp, Homo sapiens
gtgatgactgttattgctctgctgcctatgaagatttgattgaatgtagaagttacatggtgtagatgtgtaaatggctattagtcatttgattgattctyaaaagtagagacaagcagggaaaggaataaaggaagtagtaatgaaaacagaagacagtgggcgagttcaggagagtactggcattttgcagtgtgaact

SEQ ID NO: 364523 - DNA, 201 bp, Homo sapiens
cggggtttggcatgcctttgaggtggattgggggcaccgaccctccacctgatcctggggatgttaatgttaggaaagagaggcagtcagtggaagatttygaatggtttggtgtatagtttaatttaaaaaaaattttttttaagagatggagtctcactgtgtctcccaggctggagtacagtggtatgatcatagctt

SEQ ID NO: 364524 - DNA, 201 bp, Homo sapiens
agttttctcatctgcacaatggagaatataatatactgtcttcatttttaaagtcttaacctaagttgttatacataaattacttagaatgagttaccgtrtagtgtttagaacagtgcatgacattactattataacaggttttcttttggcaacatggaatgagcagataataggcagagtgttatgtaatataggttg

SEQ ID NO: 364525 - DNA, 201 bp, Homo sapiens
taaagcatgatgttaacaagttaaaaataatacagagatgcataaagaaaaataatagcttcttaccacccatttaaaactctactctgcttttatagctraagtactttatgggcatcacttgagttcaacacacatttatctgactctccctttttttttttttttttatgagacggagtctcgcagtgtcacccaggc

SEQ ID NO: 364526 - DNA, 201 bp, Homo sapiens
tcctggacaagttatttcacccctgagtctatcagttttctcatctgcacaatggagaatataatatactgtcttcatttttaaagtcttaacctaagttrttatacataaattacttagaatgagttaccgtatagtgtttagaacagtgcatgacattactattataacaggttttcttttggcaacatggaatgagca

SEQ ID NO: 364527 - DNA, 201 bp, Homo sapiens
cttttaaaattaatgttctaagtctgggtgcggtggctcgtgcctgtaatcccagcactttgggaggctgaggtgggcggatcacctaaggtcaggagttygagaccagcctgggcaacatggtgaaatcccgtgtctactaaaaatacaaaaattatcttggcgcagcagcgcatacctgtaatcccagctactcgggag

SEQ ID NO: 364528 - DNA, 201 bp, Homo sapiens
aagaaaaaaaataaaactaatcaaagttacatgacatcctgattgatagagttccagggtcagattgcttgggttctagctctaactctgctgcttaattygttgtgaggtcctggacaagttatttcacccctgagtctatcagttttctcatctgcacaatggagaatataatatactgtcttcatttttaaagtctta

SEQ ID NO: 364529 - DNA, 201 bp, Homo sapiens
tgacctctgctttagttttgtatcacttcatcattaacacagaatttcctaccttttaaaaaatcctactgtggttactttctcactagaaactttcagarcagctgtaatttaaaattctatattgattacaaaaattaaaaataaatatccccccttagttttactgagatagtttagaatttttcgttctcatctgtt

SEQ ID NO: 364530 - DNA, 201 bp, Homo sapiens
gattattatagttcatttcctttgttttttttcttcccttcccagtgacatcgagtcaccttacaaaacagaagtcacaaaaggacaggctgaagtgtgtragagtgtgtgtgcatatgtgtaagtgctagcatctgaggatgatgtggatggttaattatgttggttcataaacctctggcccctctcagtccactagca

SEQ ID NO: 364531 - DNA, 201 bp, Homo sapiens
gtattcttggctaagttagcctatggtttccaatgatcttgtctctaaaatgaggaaaataataccttcttccttgaattgctatcatggttaaataagtwtcacatttatgagaagatgcagtgctattataacagtgcctgccacacacaaatagtatttagctgttattcttatctctaactcagggggctgctctga

SEQ ID NO: 364532 - DNA, 201 bp, Homo sapiens
ctttgagggctgtcaccggtgggtcgagggcggcggccgcgactctgcgcggtggggaggagaggccgctgtcccctgcgcgcagggagagggtggacgtrccagggtgagttaactttgagttccttcataaagcaaagttgagtttgacgtttctaagtttactcagcacaccggctcccagcagcaccccaaaactct

SEQ ID NO: 364533 - DNA, 201 bp, Homo sapiens
ggctcgtgcctgtaatcccagcactttgggaggctgaggtgggcggatcacctaaggtcaggagttcgagaccagcctgggcaacatggtgaaatcccgtstctactaaaaatacaaaaattatcttggcgcagcagcgcatacctgtaatcccagctactcgggaggctgaggcaggagaatcgctcgaatgtgggagtt

SEQ ID NO: 364534 - DNA, 201 bp, Homo sapiens
cctttcagaatacggcaggagaatgatatggttgattcagcgcctcagtgggaagctgtattaaggagacaaaaggaaaaaaaccaagccgaccccaacarcaggcgatccagacacagatctcgttcgtatgtggactctttttataccttgattcaaaaacactgaatttgaagtagcatgtggatattcaggtcttct

SEQ ID NO: 364535 - DNA, 201 bp, Homo sapiens
gccccatacgttctttttgaaggggttttattttacataaaatcttggctgggcacaatggctcatacctgtaatgtcagtgctttgggaggctgaagcasgaggatggctggagcccaggaattcagggttacagtgagctatgatcatgccactacactccagcctgggtgatagactgagaccctgtttcttaaaaca

SEQ ID NO: 364536 - DNA, 201 bp, Homo sapiens
atatatgcacttaacacgggagttcccaaatttgtaaaacaattactactagacttaagtaatgagatagagagcaacacagtaatagtgggggacttcartactgcactgacagcactagacaggtcatcaagataggaagtcagcaaagaaacaatggatttaagctatactccagaacaaatggacttaacagatatt

SEQ ID NO: 364537 - DNA, 201 bp, Homo sapiens
tttttactcctacattgtattccataattaactatatgctttggccatccaggttgtttccttttttaaaaaaattagggccaggtgcagtggctcacgcytgtaatcccagcactttaggaggccaaggcgggcagatcacgaggtcaggagttcgaaaccagcctgaccaacacagtgaaaccccgtctctactaaaaa

SEQ ID NO: 364538 - DNA, 201 bp, Homo sapiens
ttggatcaattagtactggaaataaatgtttgttagtttattgaggttcacctttagatgcaacatttgaaaattaatagatccacaacataaatgacaayggactctttttcctttttgagactttgatgactatgatgtaagagcacattttgactttttaaaaggtactatgtcaaaacaatgtttgtggtattttat

SEQ ID NO: 364539 - DNA, 201 bp, Homo sapiens
ggggaggtatgctataacaactgatccattttgttgaatgagttactgtaaagatcaaatgaaatgtaagaagtgagagcactttgaagtacagagccacrtagtcctatacccacttccagagttactcactgctacggcatctcctgtcctctcctccatcctcttccaacttttcttttggtcctatgtttcattttc

SEQ ID NO: 364540 - DNA, 201 bp, Homo sapiens
cacctcataaaacaagcacataaattggatattcacaaaagtagagactctaagtagccttatactagtttataacaaattttgctcctgcattatctatkgctatgtggcaaattatggacaaaacttagcagctttaaaagaaccagtatttatcatcaacaatttctgtggatctggcatccaggagccatttgttgg

SEQ ID NO: 364541 - DNA, 201 bp, Homo sapiens
atacttactttcaaaggatcatccagtgaaatgattgaggctgccctcatattactgtgaggccattaattaacgtgcactgcaccatccaaagggctccrgtcattttaacacttactgcttgaataggaagagagagccatgaacgcctgcatttgagcattgcttctgtctagaaaggcagagactaaaacaaacaaa

SEQ ID NO: 364542 - DNA, 201 bp, Homo sapiens
ttaatatttcttgtaggtattttctcccttaagagtttcttccccctttttcctggacagattagattggctttctttgtactgtgtaaaaagtatatttyagaataacggtgattctgaatgtttaatgcactttgtaaggctagtaatgagaaatagctttcaaaacacattccgacacgtttcatgcaaaaaatccaa

SEQ ID NO: 364543 - DNA, 201 bp, Homo sapiens
aaacatttttgggggagccaaaattgctcacagtaccattcgctactgaaaatgaaacactagtgaaaggttgccatcaaataattaaattgctcatactsatctggttgcactggctttaatatttcttgtaggtattttctcccttaagagtttcttccccctttttcctggacagattagattggctttctttgtact

SEQ ID NO: 364544 - DNA, 201 bp, Homo sapiens
tgtgaattttagtaagacatttgaaaaaatgtttaagcatgttaggaatattttatttctatgttttaaggactattttcctaaaatggaaaaaactatgwtatctttcttttttagcggagcttggagattatgacccatataaacatactgcaggatatgtatctgagtaccggtttgttcctgatcagaaggaagaac

SEQ ID NO: 364545 - DNA, 201 bp, Homo sapiens
aagttggattggataatctccaaggtctttctttaatgcttagaacccttgcgcttggcacaaattgaatcagtgatcctctaactacaaagcctgtgtartaatagcccagacagcattgtaagagtggacatttttttaggaaagcattctatgtggagccttctgaggctggaattacactagacagatgggagatct

SEQ ID NO: 364546 - DNA, 201 bp, Homo sapiens
attaactcagtatcttaaatttaagagcagcttggtttctgatgtaattaaaatacttcatttggctgttttcttctgaatctttctacatttttcaaatrtattttattttagagaagaaatgggtctaaagatagcctgatggaagaaaaacctcagacatctacaaacaacctggctggaaaacacacagcaaaaaca

SEQ ID NO: 364547 - DNA, 201 bp, Homo sapiens
gagggaggccgttaacaaatacacaatgtgtgtatgtgtttgtcaagttataactgctacgaagagaatggaaagctaggtatctttttgtgtgtggtggyggggggtgttcttttttatatacgctggtagaggaagcctcccccatctccagacagtgggggaaacaaatcataggatacctgatggtttgaagggcct

SEQ ID NO: 364548 - DNA, 201 bp, Homo sapiens
ccttttctgtttctgattttatttgcatattatttcttggttggcttagctagcagtttattgattttgtttacctttttaaaaaaccaacttctcatttyattgctccttgtattttctagtctcaatttcatttatttctgctctgatctttattatatctttccttcgactcattttgggtttcgtttgttcttgttt

SEQ ID NO: 364549 - DNA, 201 bp, Homo sapiens
ctagagagcagatgagatgggatactcaggggtgtgagaagactgagattagtaaagtcagcttcaaatgtcatgccagaggaatttcactgtattcatgsgcatattttttaaggcaaggaacactgcttgtgttttagaaaaggtgacacatggcattttggagggtaagaggcagggatgtggatgggaagaaggttg

SEQ ID NO: 364550 - DNA, 201 bp, Homo sapiens
gtgaccttaggtcaatcactttgcttctctgagcctccgtccttttgtctatgaaaggagacaggagtttcaccagtctgtggggatcttgtgatgactgmgatactgcatggaaacagttcaaacagagcctgaacatcttaagtgttcaataaatgttagcaattattagtagcattactgataaaacagtgcttaaca

SEQ ID NO: 364551 - DNA, 201 bp, Homo sapiens
atgcagaggaaagcgccttactccacctaactctgaacagcccactttgaagctttttgacctgcactttctcaaacaagtcgatgcaggttcaatttccrctgccccctccccatccatctttggtcttaaaattaacttaaaatgtgtttgtttctggatttgccactgctccttgaactagtaatgtgtgactgcttt

SEQ ID NO: 364552 - DNA, 201 bp, Homo sapiens
tttgtgcccaatcagtgcaaagccaggaggctttgttcctctacttgacagagtggttattcctgggccatattgacttcacgaaaatgaacatgactttyggggtgaggctgtaccctagtataggccagtgttttgtgaaacatttcctaaagttgtgttctctcctaaagtttgatctttgcttggtaggacatctgt

SEQ ID NO: 364553 - DNA, 201 bp, Homo sapiens
ggtatcttgttgctacaaaaagggtttgttttgtcagttttaggatctttattttaatattaataatggttggctgtgtgcctgaactccaaagggaggarcgtataataaggcacatctgactgtctgactgccctcaccccccaacccgttcccatcatggcctgaactagtttttcaggtttcactgggtccccttgg

SEQ ID NO: 364554 - DNA, 201 bp, Homo sapiens
tgcaactcatacggtgtgtgagtggaggggagagagtgggggagaaaacaggaccagagagtcaggcaattgagaagacagcattctctcctcatgaccawcctatccatttctgagaataggggctgcaaacacagcatcctggattgtctctgctttgtctgtcaatatgtgtgtttacttaatattcacacacactcc

SEQ ID NO: 364555 - DNA, 201 bp, Homo sapiens
tctctgttagcagctttcaacagaagcattttgtcccaggcctgactttataataggtgattcttataccgacattactgtttctctccaagataacaagmagcttactctttttgacataaaataagttaggaatcctgaagtatttatcgtaaacagccagagttttagagaataatttcataaaatattggcaggaac

SEQ ID NO: 364556 - DNA, 201 bp, Homo sapiens
ttttccattaggaatgccattttgtctgcattatagattttgtttacttccacgctactaagaagaattccacggtaaggaataatttcatttaaaatttkgttgttaaaaaatatacatacatacatatatatatgtatacacacaaatactttaaagagcttcattttcacatattgtcaagggagcatttttcttgtg

SEQ ID NO: 364557 - DNA, 201 bp, Homo sapiens
actatgacataaaaatgttaatgaagcctccctttatcttttaaacttagaatttcccccaggttaaagaaattttttcaaaaattacacaggtttaaagktgggaggctgagttataaacagtgtttctgccacagccacatcatggggctgctttgcctggcaaaaagtagtatgcaccatcttcagttagtataggtt

SEQ ID NO: 364558 - DNA, 201 bp, Homo sapiens
gtcagtggaaataaataatgagaaagtagcttgttttgtccatactccccttcaacctctctatctccagagcttttatctctcatgtgggataacttaarttcccaggctattcttgtagaatcggaaacaggctgttaacaggaggacataagccaatcccctgccccactgttactgcaattttaaagaattaccctt

SEQ ID NO: 364559 - DNA, 201 bp, Homo sapiens
tataatgtatcataaaacccatacttgcagcagaatcctggattatgttgtatgatggaatgcagatgactgctatagagtgggtcacagccttctccttyctcttttctcacacagctttcttccttcactggtctctgaaaaagggatgaaaggactgagagagttgggcaggatggaaagaagagagcaagatgcagg

SEQ ID NO: 364560 - DNA, 201 bp, Homo sapiens
tctcagtctttaactgtacagaagtatcacctgggagtcctgtgttttttctgctactttggcctcttcattagagattctgatttaactgtttctggtartgcccaggcatcagcattttaagctgcacagtgattccagttaatatgttgctaggattgaacaccactgtgtaaggaaagttgggtaagtcccattggc

SEQ ID NO: 364561 - DNA, 201 bp, Homo sapiens
taccacctactgtaggtatcactgcattaatagaaatatttttgcagatttttttcagtggtttatgaaaacttgctgaatagtcatcagtgagcaattacactgaatctgcactgagtgttctggatccgggttttaacctttgagctacttctcttaggctaccaattgattattctatgtcaatgagattagaaagcc

SEQ ID NO: 364562 - DNA, 201 bp, Homo sapiens
aaagcctttgcctttgaattaagaggaatgtggatagcaatagttaaattttatttgaggaaatgagccaggtactttattctttataggaaatgaattgytggagagtatttatagactgattttttttaatcaattggattatggaactcagtttttaaagaaccctaataaaactttatctagtgcaaataacactca

SEQ ID NO: 364563 - DNA, 201 bp, Homo sapiens
ctttccttgtctgttctcagctggcaaataagaacttcacagtctgaaaactattaaagttagttattaggttgtgagatgaagcatgtttgcagagatgmatgttgttttctctatttataggagaagccccgatatccaagcaaaagaagagttatggaagcacattcagtgagtaatagttttctttcttattgtttt

SEQ ID NO: 364564 - DNA, 201 bp, Homo sapiens
gaaaattagccaaaacctaatgtttttaactgtgtacttttaacatttttgcttaactgttcatactgaacatttgaaatgcgtgggcttggtgaataggrtgtaatctgtcatgttccaaagaatagaagcagctctgaggcctggagaaggcctcttccctttgtgcaccatctcagcagcatctgtgctcctccccgc

SEQ ID NO: 364565 - DNA, 201 bp, Homo sapiens
cctgtctctaggaaactgtagcctatggagagggacaactaccgggcaaatttgctttttagaacctcttttggagcccgtgatgtatccattggaactcyggacagagtcacttttactttctggaagttgcatgtggtctttgggatgttgctccctctgctactccttcttgcaggattttttttttttttttaaaca

SEQ ID NO: 364566 - DNA, 201 bp, Homo sapiens
catctccaaaacattttaatctccctaaactgaaactctgttccccattaaagcattttgctgaactgtgtgaattattgctaatcaaaacggagtggatkcttctggcattcattatccccattctgagtctgtattttctgtgcatgtcagcttgtttcctgtgatagtattggttgtgcgatgctccatggatccaag

SEQ ID NO: 364567 - DNA, 201 bp, Homo sapiens
tctttctcctccacacccattccttataatctaccctccagcttttcagtagaatgccttctttgatcttgcagtagcaaaattggtgtctaaaaagtctrtgtatatctagtaaaaaggcaactgcttaaatatcactcttggaactttagaaggcagaaacattttttgtgttttaagaaatggagtctcactctgtca

SEQ ID NO: 364568 - DNA, 201 bp, Homo sapiens
agggggcctttcatgcatagacatgttttcctagcatctttctcctccacacccattccttataatctaccctccagcttttcagtagaatgccttctttratcttgcagtagcaaaattggtgtctaaaaagtctatgtatatctagtaaaaaggcaactgcttaaatatcactcttggaactttagaaggcagaaacat

SEQ ID NO: 364569 - DNA, 201 bp, Homo sapiens
ctctttgtattttatttttaatttaatgttatttttaaaagatggggtcatgccatattggccagggtggtcttaaacttctggcctcaagcagtccttcytcccctgcctcccaaagtgctgggatttcaggtgtgagccaccgtgcctggcctattttttcttttactgttcttgctgcagaaaactcttatgtatgtt

SEQ ID NO: 364570 - DNA, 201 bp, Homo sapiens; identical to SEQ ID NO: 78807

SEQ ID NO: 364571 - DNA, 201 bp, Homo sapiens
tgctgtgtgtgatctgagtgtctgagaacctttctgcaaaccttgggcactaatgtcttgatggtatgttgtgttgctttcaaaacagtaacggaagaaarccttttactatttataaatagccacaaaaagtataagcaattctacaaaaagaataatgtgctttttagaagatatggcagactttttaaaaagccaaac

SEQ ID NO: 364572 - DNA, 201 bp, Homo sapiens
accattttgggtaaggatttttaagaagagaaaggtagctccttcacatatttaaagatgacttctgttacggaagatggcctgttgacctcaacaagatwcgtaaggtcaggaaatggaaacagtactgaagtttacacaatgaagagtgcaggcccctcctcaccctgtccacactccatcctcctaactgctgtctcc

SEQ ID NO: 364573 - DNA, 201 bp, Homo sapiens
cagtaaaatatgataagaaccaaatctgtaattttaaaattttcagctagttgcatttaaaaagtaaaaaggatgattttaataacgttttatttaattcratatatctaaaatattatttcaacatgtaatcaataaaaaattagcaattttgtttttatatggtcttcaaaatccagtgtgtattttatatttatagta

SEQ ID NO: 364574 - DNA, 201 bp, Homo sapiens
ggtactttgctggttcagcttcagtaatccatgtactagacatgtaatattataaagtcacttagccagcttgagccttgatttcttcatctgtcagatgrgttgctgtcatggggatgtgtctgaaatgggctgagtatcttgtcagaacttgtagaggcttggtacactttagtttccttctcctaaaccaaaaggatg

SEQ ID NO: 364575 - DNA, 201 bp, Homo sapiens
tttgtagtttataattcttttcttttttttttgagacaggatctcactctgtcacccaagctggagtgcaatggtgtgatcatagctcactgcagcctcaractcttgggctttcaaattatcttcccaacccagcctccagagtagttagggctacagttgtatgtcaccatacctggctaatttttaaattttttgtag

SEQ ID NO: 364576 - DNA, 201 bp, Homo sapiens
cttctttgcctctcttccaacgtcagcatcatctttctctttgtattttatttttaatttaatgttatttttaaaagatggggtcatgccatattggccakggtggtcttaaacttctggcctcaagcagtccttcctcccctgcctcccaaagtgctgggatttcaggtgtgagccaccgtgcctggcctattttttctt

SEQ ID NO: 364577 - DNA, 201 bp, Homo sapiens
tagatgtgtaaatggctattagtcatttgattgattcttaaaagtagagacaagcagggaaaggaataaaggaagtagtaatgaaaacagaagacagtggrcgagttcaggagagtactggcattttgcagtgtgaactgccacacataacatcctttttaggagtgccgaagtaagcaatggtaaatgaaatagcagcgc

SEQ ID NO: 364578 - DNA, 201 bp, Homo sapiens
tccctgattttctgaaaggttaatacttaaaaacagcagcaacaccatctgctttgttttttaggcctcggattacaaaggttcacttcaaggagactcartttgaactcagagtactgggaaaagatgtaagtttccaagcccttagcttaaattagaagaggggtgtcttgtgtgttcatttgtagcttaaaagacatt

SEQ ID NO: 364579 - DNA, 201 bp, Homo sapiens
tgagagagcttacaaagacaaaagcccattggtagaacttttgttctaatagcaatctttcctttttatattttatagaaatttcagatggaaaaaagtgttttttactaaaattattttgaattactgcttagcccataattccttaagggggtttgttgcctctgccatgaaactgggagggcccagtttgacaaaaag

SEQ ID NO: 364580 - DNA, 201 bp, Homo sapiens
ttgaattactgcttagcccataattccttaagggggtttgttgcctctgccatgaaactgggagggcccagtttgacaaaaaggctctggtgaactatttrtgtgttgtggttgtgtgtaggtctggcagttataaccctgtgatggaatttccttctggatgcggggtttggcatgcctttgaggtggattgggggcacc

SEQ ID NO: 364581 - DNA, 201 bp, Homo sapiens
catataattagacaacgtttttgataaaataagatttgtgggactgagtagagggtatttacttaataaggagtagttgagttgcctgttcacataaatamgtttttggaaagttctgtaagaaacagtaaagttatttgtaacttcatcttcttgggtcagagttcccttaaatagtgaagtcatgttaatgtagacagt

SEQ ID NO: 364582 - DNA, 201 bp, Homo sapiens
tctgcatgttttgtcttctggttacatcttccacatctctgatatttttacctacaatgtttgtttgatctttcagaactctgaatggattcttggcaackactatacttttttcatcttgtctattgaaactttaatttcagaaatcaaatagctttagaaagcctttcttgtcttctaattgtatcttcttgaaagtcc

SEQ ID NO: 364583 - DNA, 201 bp, Homo sapiens
atgcaccctgctttcctgtctctaggaaactgtagcctatggagagggacaactaccgggcaaatttgctttttagaacctcttttggagcccgtgatgtrtccattggaactccggacagagtcacttttactttctggaagttgcatgtggtctttgggatgttgctccctctgctactccttcttgcaggattttttt

SEQ ID NO: 364584 - DNA, 201 bp, Homo sapiens
taaaaactcaagtttacataagctgagagctattggttgtgtgttgagccctacaatagcttttagctgtttgtcttttgctgctatctgttgtttattcragtaaggatatttggtatggttggtctcagttgtttgagtaatgttctgggaaacttttgttgtatcctttctagttctctgtgctgagggaggtagata

SEQ ID NO: 364585 - DNA, 201 bp, Homo sapiens
agtgtaagagatcgttaatctctctttttgtttctcttttagatatcagtttttcttgcaggtgaagcaagatgtccttcagggccgtctgccctgtcccrtcaacactgctgctcagctgggagcgtatgccatccagtgtaggtgccacttaagcatatttgcctcagaaatgtctggagaaagtatttgcatttttaa

SEQ ID NO: 364586 - DNA, 201 bp, Homo sapiens
aatgttacggaggtatttgccttttttacttgctttaggggcaacctcaccttgatagcagaaagtcttattcatgcagttcacagtttgaaccttatccragatttaaaaactcaagtttacataagctgagagctattggttgtgtgttgagccctacaatagcttttagctgtttgtcttttgctgctatctgttgtt

SEQ ID NO: 364587 - DNA, 201 bp, Homo sapiens
gacattggggataggctataatgagccagaatggatttggtaaatgaaattaatataagtatcacttcagagtataaaattttgtcaccaagaagcaaagsccttcttgaaatacaaggacttaagtttgcattagtaaaaagtattatttgttttcccattgaatacaatgaagatagtttgcatccctgtaagtgcagt

SEQ ID NO: 364588 - DNA, 201 bp, Homo sapiens
ttagaaagtgctttgtttagagaacagtgggggccgtgagtgagggtcaggttgctgagctagcccagagagactatttgagttgttaaatcactcaggtyccaccttgaccttcatcagacctgtgtttgagaagcaggcttggaacctctgctgccttaattgcgacttgtcgaaattggtttttctctgccatcctcg

SEQ ID NO: 364589 - DNA, 201 bp, Homo sapiens
gaattggcttccttaagtaatagatttcaagggcagggtttcttgaccaaaaatattttccaaaataaaggtttctgaaatcttgcctttaaaaaaaaaataataataatcaaataaaaatacatataaagctacctgctacttttaggaaacatcataagccatcagatcaggtttgagatgaatcgtcagacttgatat

SEQ ID NO: 364590 - DNA, 201 bp, Homo sapiens
tgaggcaggagaatggtgtgaacccgggaggcggagctggcagtgagctgagatcgcgccactgcactctagcctgggcgacagagcaagactccgtctcaaaaaaaaaaaaaagaagactttcaaggatatttcttctatgtatccttgaatctgaagcaggaagtgagttgtttcatattctaaactcaatcaacagtt

SEQ ID NO: 364591 - DNA, 201 bp, Homo sapiens
cattgtgcagttaaagttgagaaccattgttctacatctgtactatttagcatggtagcttctagccacatatgcgtatttaaacaaatgaattaaaattaaacaaaatatataaagattgagtccctcagtcatacctgacacttttcaagtactctgtagacatgtgtggctagcggctgctctattggactgcatatt

SEQ ID NO: 364592 - DNA, 201 bp, Homo sapiens
atgttaggaatattttatttctatgttttaaggactattttcctaaaatggaaaaaactatgttatctttcttttttagcggagcttggagattatgaccyatataaacatactgcaggatatgtatctgagtaccggtttgttcctgatcagaaggaagaacttgaagaagccatagaaaggattcataaaactctaatg

SEQ ID NO: 364593 - DNA, 201 bp, Homo sapiens
tggccaggctggtctcaaactcctgaactcaggtgatctacctgccttggtgctgggattacaggcgggagccaccacgcctggccatttacagaacattmtacccaacaacttcagaatatacattttattcatcagtgcatggaactttctccaaaatagaccatatgataggccacaaaacaagtctgaataaattta

SEQ ID NO: 364594 - DNA, 201 bp, Homo sapiens
attgtgcagttaaagttgagaaccattgttctacatctgtactatttagcatggtagcttctagccacatatgcgtatttaaacaaatgaattaaaattaaacaaaatatataaagattgagtccctcagtcatacctgacacttttcaagtactctgtagacatgtgtggctagcggctgctctattggactgcatatta

SEQ ID NO: 364595 - DNA, 201 bp, Homo sapiens
aaaataaaacacagtatctttgcatccctgttaatgttacggaggtatttgccttttttacttgctttaggggcaacctcaccttgatagcagaaagtctyattcatgcagttcacagtttgaaccttatccgagatttaaaaactcaagtttacataagctgagagctattggttgtgtgttgagccctacaatagcttt

SEQ ID NO: 364596 - DNA, 201 bp, Homo sapiens
ttgtgcagttaaagttgagaaccattgttctacatctgtactatttagcatggtagcttctagccacatatgcgtatttaaacaaatgaattaaaattaaacaaaatatataaagattgagtccctcagtcatacctgacacttttcaagtactctgtagacatgtgtggctagcggctgctctattggactgcatattac

SEQ ID NO: 364597 - DNA, 201 bp, Homo sapiens
tgtgcagttaaagttgagaaccattgttctacatctgtactatttagcatggtagcttctagccacatatgcgtatttaaacaaatgaattaaaattaaacaaaatatataaagattgagtccctcagtcatacctgacacttttcaagtactctgtagacatgtgtggctagcggctgctctattggactgcatattaca

SEQ ID NO: 364598 - DNA, 201 bp, Homo sapiens
tttgaagtagcatgtggatattcaggtcttctaaagtgttttagttcaactaggattatttcattgtttatttgtcatatttaccttctaatatttgtgayatttattaaccatgtttgaagccatagaagttgaagcacagtcaaaacaaaatgtcatgaaaacaaggccctcaaagccatatttttgttttgtgttgtt

SEQ ID NO: 364599 - DNA, 201 bp, Homo sapiens
ttttgcaaaaattaaggatcatgactcatgacacagcctcaggaggtcctgagaacatgcgcccaaggtggttgggttacagcttggttttatacattttrgggagacagaagtcaggcaaagacataaattaatacatgtaaggtatacattggtttggcccagaaaggtgggacagcacaaagggaatgatggggttac

SEQ ID NO: 364600 - DNA, 201 bp, Homo sapiens
tggtttggcccagaaaggtgggacagcacaaagggaatgatggggttacatgtcataggggaatttaaagatttttctgactggcagttggtagacagagataaattattatataaagacctggaatcaatagaaaggagtgtctgggttaagataaggggttgtggagactaaggtttgtattatgtagatgaagtctca

SEQ ID NO: 364601 - DNA, 201 bp, Homo sapiens
tattatgtagatgaagtctcatatgtggccatctttagaggcaatagatggcaaatatttcctattgagatatataaaaggtgctagactctcagctaatytcttcaggatcagaaaagcacttgggaaagagattctacacagaatgtaaatttcccccacaagagacagctttgcagggccatttcaaaatatgtcaaa

SEQ ID NO: 364602 - DNA, 201 bp, Homo sapiens
tttcctattgagatatataaaaggtgctagactctcagctaatctcttcaggatcagaaaagcacttgggaaagagattctacacagaatgtaaatttccmccacaagagacagctttgcagggccatttcaaaatatgtcaaagaaatatattttggggtaaaatactttgatttccttttagggtctgctatttgttat

SEQ ID NO: 364603 - DNA, 201 bp, Homo sapiens
ctaaaattattgaggacctggaagaacttttgttcatatgggttatctctgtatctgtttaccattaagtggagagatttttgaaatcatccaaaaaaccyatttaaaaaattacttgtcaacaaaaatagttttatatttttacaaaaaagatgtattgtccaaaacataacaattttagaagaatgaccttgtttttac

SEQ ID NO: 364604 - DNA, 201 bp, Homo sapiens
acagaacttccttaaagcataagtctcacaggacctataaaacaaaaatataattaagaaaaaacaaggtatacaggcaacaaatagcacaatgaatggartagtacctcatatctaaatactaatgttgaatgtaaatagcctaaatgctccacttaaaagatacagaattgcagaatggataagaattcaccaaccagg

SEQ ID NO: 364605 - DNA, 201 bp, Homo sapiens
cggggtttcaccattgttaaccagaatggtctcgatctcctgacctcatgatccgcccgccttggcctcccaaagtgctgggattacaggcgtgagccacygcgcccgagcaagctttgtctttttaatgtgaacaatatgtaaaatgaattggacactcttgattaattctaagtggcctcactagagttattattattt

SEQ ID NO: 364606 - DNA, 201 bp, Homo sapiens
aaaatcatgtctttggtagcctgtggttttgtttctattccatgctttcatctgtctcagactttcttttttctttattctggactgcacacagaagaatragaagagggtaggctaattggacctttttcatcccactttgaagtgccatatttaggcctcatttttactttgttttattttatccctcaacttaagata

SEQ ID NO: 364607 - DNA, 201 bp, Homo sapiens
ttaggggtttctgaaactgagaatttttaatatatgctgggacattggggataggctataatgagccagaatggatttggtaaatgaaattaatataagtrtcacttcagagtataaaattttgtcaccaagaagcaaaggccttcttgaaatacaaggacttaagtttgcattagtaaaaagtattatttgttttcccat

SEQ ID NO: 364608 - DNA, 201 bp, Homo sapiens
aaccttcctcccaaatccgagaatgctcaaattccttatataaatggcatggtatttgcatataacctacacacattctcccatatactttaagtcatttytagattacttatgattcctaatctaagtgctatgtaaatagttgttatgctctattgctttttaaatttgtattattttttctgaatatttttgattcaa

SEQ ID NO: 364609 - DNA, 201 bp, Homo sapiens
gacctgtttcaggagaaaatgacagagggttgggagatgagaggggctttcttgcttctgctgttttctcaaatgccaaggtgttatagtttggggtagcrtgtcctgatctgagtcaggtggggagggcaacacacagaggctttctaagatgtacttgggcacaggtagttttcattgaatcaatttctagattctctt

SEQ ID NO: 364610 - DNA, 201 bp, Homo sapiens
ataaaaaatttactttttatatttaataatttatcagcattagtatggtgtactaatatactgctactaattataataacttagttcagaagaaatttttwacatttagagctttatggtcatgggaagtaaacactttatttttatattttgtcatagagaagtatgataaggtgataataaaaacttttttattagttt

SEQ ID NO: 364611 - DNA, 201 bp, Homo sapiens
ttttcttgcaggtgaagcaagatgtccttcagggccgtctgccctgtcccgtcaacactgctgctcagctgggagcgtatgccatccagtgtaggtgccayttaagcatatttgcctcagaaatgtctggagaaagtatttgcatttttaaaagggagtttacatactaaaactcttcttatccatgagattttgcaaaaa

SEQ ID NO: 364612 - DNA, 201 bp, Homo sapiens
cacaaaacaagtctgaataaatttaagaaaactgaaattatatcaagtactctctcagaccatagtggaaaaaattcttcaaactgaatgataatagtgayacaactatcaaaacctctaggatacagcaaaggcagtgctaagaggaaagttcatagccttaaatgcctgtatcaaaaagtctgaaagagcacaactaga

SEQ ID NO: 364613 - DNA, 201 bp, Homo sapiens
aaacttcttcacaagtagtcatcaaaacctgatcattatgttttatattctaatatatggtactaaatatctcagaatatcattttaatagtctaaagtgwatgttattttaacatctaaagatgtggagacttagttttaaagtctgaaaaaaatagcctagactcccaggacattgttatgttgagggtttagtacacg

SEQ ID NO: 364614 - DNA, 201 bp, Homo sapiens
tgagccctaaaagtagttgttattaccatggttgtcactatacaattaattaaaacagcaaaatactatgcattttaataattattaaacatattttctayggaaattgacagacagggggcaggactagattgcagttcccactcggacggatcgtgcagtgtgtagagacttgcattgtgaaattttgctccagaacta

SEQ ID NO: 364615 - DNA, 201 bp, Homo sapiens
gccactgagttttgaagttacttgttacaaagcaatagatagctgagaaaagcttatcagtgtgaagaaacttttatatatgaaaaatataaatattaatwgcacctagaaaaatacattttactcattttttaatgattaaatgaggattttcctcatctggagggtgagggtaactcttagacagaaacaatgggggcc

SEQ ID NO: 364616 - DNA, 201 bp, Homo sapiens
aaaattgcattttaaaataagtcttctgtttctttcatttccttatcactgtttcctctctcttccatctttccttctcctcctctgctagaatcaaacascatcagtaggataactgcaaacatggaaaatggagaaaatgaaggaacaattaaaattattgcaccttcaccagtaaaaaggtcagtgaagttaactgaa

SEQ ID NO: 364617 - DNA, 201 bp, Homo sapiens
ttgaaaagtaaaaggatacagtcacatacctgaagaaatagttcaaaaccagactaagaaaagtttgagatttagagaagactatgttttattttaagacrgaatactttgtttctccttccaagacttttggaagactcatggtaaacctgactcaaacccccaattccatcatttgtaagaattcaggacctgtattat

SEQ ID NO: 364618 - DNA, 201 bp, Homo sapiens
gatccatgggatccaataaatctctgggccaaataatacattaaaacaccaatgaaatataaaacatcaggacctgactctcttatttgaagaaagtgctytttttgtcacaaggtgaactcacagattgtctgtggtctgcattctccgcagaaaattaaaaatttcttgtgattttgaaaatggcatgatataatggac

SEQ ID NO: 364619 - DNA, 201 bp, Homo sapiens
tacctggctcctgtttcaattatgttaagcctccttttagtatttggatcactctgccaggaacaggataaaaaataggcagcttgtcctaaagctcactrtaagtggagagtgagttcatacttgtcatttgtacttggcagaaataattaggaagccagtggggaggcacttttgatcctttaatatatttgtacccaa

SEQ ID NO: 364620 - DNA, 201 bp, Homo sapiens
agctgttcatctgtgtgaatgagtagaaatgtgctaattggccatgtttatctggaagaggtttggtaagtgagagtggtagaaagagatatttgaaatgmcatggcagtggaattcatgccagcagttactctacatggcaaaagtacacagaatttattcagaatacctggctcctgtttcaattatgttaagcctcct

SEQ ID NO: 364621 - DNA, 201 bp, Homo sapiens
ctgtattaaggagacaaaaggaaaaaaaccaagccgaccccaacagcaggcgatccagacacagatctcgttcgtatgtggactctttttataccttgatkcaaaaacactgaatttgaagtagcatgtggatattcaggtcttctaaagtgttttagttcaactaggattatttcattgtttatttgtcatatttacctt

SEQ ID NO: 364622 - DNA, 201 bp, Homo sapiens
aaatacatgaaaaaactctcaacatcactaatgatcagggaaatgcacatcaaaaccacaatgcaataccaccttacccctgcaagaatggccattatcaraaaaataaaaaaataatagattttggcatggatatgatgaaaagggaacacttctgcactgctggtgggaatgtaaactagtacagccactatggaaaac

SEQ ID NO: 364623 - DNA, 201 bp, Homo sapiens
gtgctgtgattaagattgacaggcctgaagtggtaaggctgtctaactgctttacctcttctactctggcaaaggggcagagtccgagaggactgtcaccmtgactcctcagtgatggagtgtttaggatacagtatgttaggagtggactgtgcgacatcagagagcagggtctgtttgggttcattgttaccttcctac

SEQ ID NO: 364624 - DNA, 201 bp, Homo sapiens
aaaaataagacatgatgaaaaccagaataatgaacattttagtttttatttttagtttttagttgctacacttagatatgttggttactctactttttttwaaaaaaaagtcaaaaaatggaaactgctgtgagtgacaaataatgaagcttatatatgcatgaatagagtttagtatagttataaaatcttacagtaaaa

SEQ ID NO: 364625 - DNA, 201 bp, Homo sapiens
tctgtgttattacatggaaatttactcacttgctttaagagcagttgagctgatagacatgtactttatacagatttaaggctctgttatctcccatttaygtattttgagaaagtttttttgaacatgctatttaacgatttttttagtaaagccattgtatactcaccctgcagttaattttccttgtacatgatttta

SEQ ID NO: 364626 - DNA, 201 bp, Homo sapiens
tgagtggatcttagtatggaatttttcctagaggcaggtctttccttgattttgtctgtggtttttctgtatgcttgtctttaaaatttgaccttaaaacaaaaaaggcaaatagacattaacgggggtggtaggtgggctgcagggatgggtcataatgtccaagcttttaaagagcttgagtttcttgggttatggcat

SEQ ID NO: 364627 - DNA, 201 bp, Homo sapiens
tacagatttaaggctctgttatctcccatttatgtattttgagaaagtttttttgaacatgctatttaacgatttttttagtaaagccattgtatactcaycctgcagttaattttccttgtacatgattttattatctcatatgtattcatcttatataagtaattattgtctcaccacattgtattgtaattacatggc

SEQ ID NO: 364628 - DNA, 201 bp, Homo sapiens
aggcagagaggatggcttaaaacccaggaggcggaggttgcagtgacctgagatcccaccactgcactccagcctggatgacagagcgagactccatctcaaaaaaaaaaaaattgatgtatagtaagaataaaacaactggtattataattgacgaaacgttagtgactgaagaatccttacattttatctcatgaaatt

SEQ ID NO: 364629 - DNA, 201 bp, Homo sapiens
atggcctaactttgggccatgtcatcacctggaacttgttttgctttgcaagattttttaactcatcattcctctttgaccagaactttctgtcctgtccrtaaatgtcaccctctctgcctgttttcccactatcagcttcctctaggtttcatttatcttttccatgccattttggaccccatgttgttctggacatct

SEQ ID NO: 364630 - DNA, 201 bp, Homo sapiens
tcgtactatgtttgatgaatgctaatacttatttcattctatcctttttctagatgtatagtggaattacatcttcaataggggttagggtccaaaaatasttgagttaattttaagaagggataaaaaagatcattgttttataatgcattacttcacctctgttcaccacacacatgaacaggaatttcccaacagaat

SEQ ID NO: 364631 - DNA, 201 bp, Homo sapiens
gctatcataaacgtgcttatacataatcttttatgtattttttttgacatgttactatttcatacatattgtatggcctctttcgccatctaacccagtcttttttttttttttttttttgagacggagttttgctcttgtcacccagactggagggcagtggtgcaatctcagctcactgcaacctttgcctcctatgtt

SEQ ID NO: 364632 - DNA, 201 bp, Homo sapiens
cttgaacccgggaggcggaggttgcagtgagccaagattgcggcactgcactccagcctgggcgacagagctagactccatctcaaaaaaaaaaaaaaaaatacaaataatgctacagggaacttctcgtgcatatatatggtcatactattaatatatgcagtatttcagaaggacactgatgtaggaaaaaatacctgg

SEQ ID NO: 364633 - DNA, 201 bp, Homo sapiens
acctgcatgaaagccagggtcattcagttgctcaaattcagcagttgtggaataaattgttagtaaggtgaatgttcactgaaatccagcaaactaaatcrcatgattccttgggaaaattacttgagaagtttggcccagccccagggaaacctgccctggaatctgcatggaatgtatagagcagcagtgctttgcatg

SEQ ID NO: 364634 - DNA, 201 bp, Homo sapiens
aaaaaaatacaaataatgctacagggaacttctcgtgcatatatatggtcatactattaatatatgcagtatttcagaaggacactgatgtaggaaaaaayacctggaatgaatgtgataggaaaataaagtttcagattatgaaaaatgtacgttaatagaatcatcaacttggagtccccgcttgtgttctaagatgtt

SEQ ID NO: 364635 - DNA, 201 bp, Homo sapiens
taagaaaggtgaaaggtctagaatgatttgaaaatatacaacttctgttttttccccatgtgtgatttcttcagtagctctaacttgttttcaacaaataytcttgagaagaccatacattctgctcatttatagtcagagtcagcctacttttactttaagccatttttagaagaaaatgtataagttctttggggcatc

SEQ ID NO: 364636 - DNA, 201 bp, Homo sapiens
agtcatcatcttctgatattcacaagaaaagtttctagaatgataaattcttcacctgtgcatttaatattctaatactcctctttgtatagtttaactgmttttaactctaaaatgctcatcgaaaacttcagtaatttaaaaagtgtaaaggagaaagtaatttcaatatgtaaagttaccattttttggtcaatggcc

SEQ ID NO: 364637 - DNA, 201 bp, Homo sapiens
acttgttttcaacaaatattcttgagaagaccatacattctgctcatttatagtcagagtcagcctacttttactttaagccatttttagaagaaaatgtrtaagttctttggggcatcttacctagccaagagagagggggaaaggcagtaactgttaattgcaaggagcattaggtagaccatatagtcaggtgtatgt

SEQ ID NO: 364638 - DNA, 201 bp, Homo sapiens
ttatgtaacacttcctcttgaatatacttggtttcagatctattatagttaaggaaaaaaaacatggctgggcgtggtggctcacgcctgcaatcccagcmctttgggaggccgaggcaggtagatcacctgaggtcaggagtttgagaacagcctggccaaaatggtgaaatcccatctctactaaaaatacaaaaatta

SEQ ID NO: 364639 - DNA, 201 bp, Homo sapiens
cgtctccatggaagagtcattgacactagttgggtcaattcagctgcatttcttgggttacattgtgttcgatttctgttgtaggaggaaaaagggtgagrgtcaataaagatacaattacttggaaatagctataattttttataatacttaccagtagattttatacttcttcttaaattaagacatttgggtggagaa

SEQ ID NO: 364640 - DNA, 201 bp, Homo sapiens
aaatacgtcacttctataatatcagcggaactactcctgtgttgtttgtcatcacagagactggaaactacctaaatatccattagaaagaaactggcctrataaagtaatatatgttccccagcctctgccccacatgaaataccatgtctctgttacaagaaatctgagagcaggattggagcttgtgtcaatctgatt

SEQ ID NO: 364641 - DNA, 201 bp, Homo sapiens
taaatagggaatcctttccccatttcttgtttttgtcaggtttgtcaaagatcagatggttgtcgatgtgtggtgttatttctgagggctctgttctattycattggtctatatctctgttttggtaccagcaccatgctgttttggttactgtagccttgtagtatagtttgaagtcaggtagctagcatgatgcctcca

SEQ ID NO: 364642 - DNA, 201 bp, Homo sapiens
cctgtattgagtgcatatatatttaggatagttagctcttcttgttgaattgatccctttaccattatgtaatggccttctgtgtttcttttgatctttgktggtttaaagtctgttttattagagactaggattgcaacccctgctttttttttttttttttttttttgctttccatttgcttggtagatcttcctccat

SEQ ID NO: 364643 - DNA, 201 bp, Homo sapiens
gagcctatgtgtgtctctgcatgtgagatgtgtctcctgaatacagcacactgatgggtcttgactctttatccaatttgcctgtctgtgtcttttaattkgggcattttgctcatttacatttaaggttaatattgttatgtgtgaatttgattctgtcattatgatgttagctggttagttttcccattagtcgatgca

SEQ ID NO: 364644 - DNA, 201 bp, Homo sapiens
cagtcctttggaggagaagaggcgctctagtttttagaattttcagcttttttactctggtttctccccatctttgtggttttatctacctttggtctttkatgatggtgacctacagctggggctttggtgtggatgtcctttttgttgatgttgatgctattcctttctgtttgttacttttccttctaacagtcaggt

SEQ ID NO: 364645 - DNA, 201 bp, Homo sapiens
tgatgttgatgctattcctttctgtttgttacttttccttctaacagtcaggtccctcagctgcaggtctgttggagtttgctggaggtccactacagacsctgtttgcctgggtatcaccagcagaggctgcagaacagcaaatattgcagaacagcaaatattgctgcttgatctttcctctggaagctttgtctcaga

SEQ ID NO: 364646 - DNA, 201 bp, Homo sapiens
ctgttttgccaaatataaaattttccagctggatgcggtggctcacgcctgtaattctagcattttgggaggctgaggcaggtggatcacctgaggtcagkagttcaagaccagcctgggcaacatggtgaaaccccatctctactaaaatacaaaaattagctgggcatgatggtgggtgcctgtaatcccagctactcg

SEQ ID NO: 364647 - DNA, 201 bp, Homo sapiens
tgacttttaaaattaatgttctaagtctgggtgcggtggctcgtgcctgtaatcccagcactttgggaggctgaggtgggcggatcacctaaggtcaggakttcgagaccagcctgggcaacatggtgaaatcccgtgtctactaaaaatacaaaaattatcttggcgcagcagcgcatacctgtaatcccagctactcgg

SEQ ID NO: 364648 - DNA, 201 bp, Homo sapiens
cacattagcagaaggtttgatatgtacccagaacaaaaaggactaaagcgggaatttctctaagaagatttggcattagaaactcttttaatgtaactcaragctgaaaggacaaacatcatatactcatcttttattcccaaaaagaacttgataaaactgttagtcattgattaaaggccaaaacagaataagaccaaa

SEQ ID NO: 364649 - DNA, 201 bp, Homo sapiens
gaggtgggcggatcacctaaggtcaggagttcgagaccagcctgggcaacatggtgaaatcccgtgtctactaaaaatacaaaaattatcttggcgcagcrgcgcatacctgtaatcccagctactcgggaggctgaggcaggagaatcgctcgaatgtgggagttggaggttgcagtgagccgagatggtgccactgcac

SEQ ID NO: 364650 - DNA, 201 bp, Homo sapiens
gggaatttctctaagaagatttggcattagaaactcttttaatgtaactcaaagctgaaaggacaaacatcatatactcatcttttattcccaaaaagaasttgataaaactgttagtcattgattaaaggccaaaacagaataagaccaaaaaaagcagaattgaaggaaccatctatttgattaaggatatgcgttcgg

SEQ ID NO: 364651 - DNA, 201 bp, Homo sapiens
gtgaaatcccgtgtctactaaaaatacaaaaattatcttggcgcagcagcgcatacctgtaatcccagctactcgggaggctgaggcaggagaatcgctcraatgtgggagttggaggttgcagtgagccgagatggtgccactgcactgcagcctgggtgacagggtgagactccatctcaaaaaaaaaaaaaaaaacat

SEQ ID NO: 364652 - DNA, 201 bp, Homo sapiens
tagccgaacaaagaacccccacttctcaggagtgcaagagttgatgccacaggtacaactagaaggaaaataacttttcctgttctctgccttcagatctmactggagtctctcttaactagaacccagctggcaaagtgtccaggaatataaaatttccaggctttctatctctgcagtagagagtagattatagatgag

SEQ ID NO: 364653 - DNA, 201 bp, Homo sapiens
tgtcaattaaatttaattccagttaaatccccagcagaattgtttattcaattgggtagctggttcttaacgtccctgagtagagaaaaatgtttaagaastagcaaagatagttttgaaaaagaaagatggatatcaaacaaattaaactacatacatcaaaatcttgggggtattggttctggagtaacccatgagata

SEQ ID NO: 364654 - DNA, 201 bp, Homo sapiens
aagtcagtgattgcatatgtatgaagacttgtcatggtcctctgcatctgctttcccagggggcattccccagtggaaaagccttctcttaatatattacrtggattgtttccctgagagctaagccttgttttctgttaagacactgttgcagagtcattttttcttctctccaattatgttcacggaacagcattataa

SEQ ID NO: 364655 - DNA, 201 bp, Homo sapiens
attgcctgtaaggtaatatatttctgaaaactctaaatggcatattaataattttccccatttcatagttttggttaaaaacttaagtcaaaaactatagstgatgaatagttatgctggaagacctttattcctaaaaatatggatatgtctagtgtatctctggtcacaactaccaaaccagtgacagacctgtgttgt

SEQ ID NO: 364656 - DNA, 201 bp, Homo sapiens
catgtcatgtaaagaacatgtatagtggatatccataagtgatgaatgaatgaatgatatcccagttttagagtctacctccagaatattggcactccatsaccagtattctggatgtattccttaaaacagggatattgtgttcattggcaattttttgtgcccttttttctcttaaactatagagtaacaggctgctgt

SEQ ID NO: 364657 - DNA, 201 bp, Homo sapiens
ggtcacatctttcccttggttgaacgtaagtgggttttacatttcaagatcttggcttctgaaacctggtgacttgtgtttattatttatgttcttgggcwtttatcattgtctgacctctgtaacccctggtttccattttgatcaaatgagatttgtgtgtggccggctctagggtgatgcttagcatagcaaatgtgc

SEQ ID NO: 364658 - DNA, 201 bp, Homo sapiens
ccaatgtaagatttttaataaagtgcttttatctaattatatactttatattttcatcagaatcttagaattgcagatttagttcatttggcttatggaargtctccaacataaaactcttggacaaagccagtcattattaagccacttagccaaaccaacttgctttctgtcattttgtcaatttaaataaaaatgtta

SEQ ID NO: 364659 - DNA, 201 bp, Homo sapiens
tattataaggagatgcaatataattaagtatatattccttaatcttaatttccagaacccaagtttttatttataagcacaaacagaggctccttaagtgygcaaaaaatactctttttaaaaaaattgtctgtttcaattgaaataaaaggtacataacatataaaatggatccttttaaccatttttgtgtgcaattca

SEQ ID NO: 364660 - DNA, 201 bp, Homo sapiens
ataagcaacaagttagctactatcatagtgtatctagctttctaggctgatgtctttcaaaaattaaatccaatattaatgtaacaaattatatttgtatkgtcaattatagtttgacaaagagattttatgtgaatatgtggttataggcatatgtttgtttttgcagggagaaaacaagtctgagtatttcttaggatt

SEQ ID NO: 364661 - DNA, 201 bp, Homo sapiens
tttttcatttggttagcaaaacattttcaggaaaacaaaagtcacaagatttgattataaatttaattctcaaaattgctgctacaaatatgaaatagatkagtattttcattttggcaagattttaatcctctgagtagcatgatgaatgtttaggtgctcatttttccctatgagtattgactaaactaatgaaaccaa

SEQ ID NO: 364662 - DNA, 201 bp, Homo sapiens
gatccaggactattctgacttttagctccaaatggggatgagttggagagattgggaagcccatggctctgcactgtgtttgggaaggcagcactgccacmatctagggattctaaggtcattgtgcatttagtggagaagcataggacaatgagaatggagttttcattagagtgtatggggaaatctctctgtcgctgt

SEQ ID NO: 364663 - DNA, 201 bp, Homo sapiens
gacaggagaatggcttgaaccacctgggaggcagaggttgcagtgagccgagatcgtgccactgcactccagcctggcaacagagcaagaccccatctcaaaaaaaaaaaaaaaaaaaaaattggtgtgtaattgactgtattagacagaaaacaggaggatttttcaaaaaatagattttatggcagcaaaacataaata

SEQ ID NO: 364664 - DNA, 201 bp, Homo sapiens
taactcacatgcacaacttctcaaggaaggaaagggaagtgaatagaaatgagtgagagggtaatggagaaatgggcattttagatttagcaaaggaaagyaaaacctttctaaggcagaggagagaataggaggtgatcattgttgttagtgtaatttgctttccagtactctctgtgagggtagaaggtaggagttata

SEQ ID NO: 364665 - DNA, 201 bp, Homo sapiens
tccagcctggcaacagagcaagaccccatctcaaaaaaaaaaaaaaaaaaaaaattggtgtgtaattgactgtattagacagaaaacaggaggatttttcaaaaaatagattttatggcagcaaaacataaatacaatcacttgccaggtaaaggatgcgttaggcaataggccaggtgcaactactgttgattctgtcaa

SEQ ID NO: 364666 - DNA, 201 bp, Homo sapiens
gtaaattggtgcttatgcatgcacacactgagacacaggaataggagagctgcagctacatttggggtatggtatttggcagagtgcctcacatgtagtakgtacttcataagtatctgttgaatgatcaatgagctgatgcactgagacactgtgtgctgccacatcagaaaacctgatgctactctttgttctcctaat

SEQ ID NO: 364667 - DNA, 201 bp, Homo sapiens
tagattttatggcagcaaaacataaatacaatcacttgccaggtaaaggatgcgttaggcaataggccaggtgcaactactgttgattctgtcaatatgarggttaccacctactgtaggtatcactgcattaatagaaatatttttgcagatttttttcagtggtttatgaaaacttgctgaatagtcatcagtgagcaa

SEQ ID NO: 364668 - DNA, 201 bp, Homo sapiens
gtatatatatttatacatacatgtagattatcccctatgtggttttgtacatgcttttgtattttatattgtatcataagaattttcccttttttgctaawtttattcataggttcctgcatggtgtttgataagttttctttttatgtgttttactttttttcttgctattgtggatgcaatcttttctttctattatct

SEQ ID NO: 364669 - DNA, 201 bp, Homo sapiens
aaaagcacccttgatagatgccagtggttctcagtctttaactgtacagaagtatcacctgggagtcctgtgttttttctgctactttggcctcttcattrgagattctgatttaactgtttctggtaatgcccaggcatcagcattttaagctgcacagtgattccagttaatatgttgctaggattgaacaccactgtg

SEQ ID NO: 364670 - DNA, 201 bp, Homo sapiens
gtagtgatgaagaaagagacaggcgagggggtatgctgagcattactggggggtgactgagatatacagagataaggagcatcatgagaattggtccagtygattgggaagggagtgaggattgggtttccatgtctgcctattccctctggagatgtggggtagaagacctaaagaaggtggggtggttccagcacactg

SEQ ID NO: 364671 - DNA, 201 bp, Homo sapiens
ttttaatgaaaatatcactactgttttatcactatgtgttagttcttggttttaggaatacgtgttttttactaggtgctgaaattttttaaagtttattwtcagatggttgattttcactgaataccttgagaactaaggctgttacttgtttactcattcaacaacttaagcttatttcaaaatccaggcaagagatga

SEQ ID NO: 364672 - DNA, 201 bp, Homo sapiens
caaataaattgatgcatattcattaagaaaaacccataagagaggtaacaggaagataagaattggagatttggagatggtgagtgtggacaactctttggaggagttttggcacaagggaaataaacagaaatatagctggcaggtactgtgccagcatcaacatatgaggagggtgactttcaggatgacacccaccgt

SEQ ID NO: 364673 - DNA, 201 bp, Homo sapiens
tggggcccaggaggaagatctatatatttttgagagtccatttatcctttgagaaaataatacccaaagcttactgagcactgttctaagttctttacatrttttaactcatttaatcccctaattatcctataaaagaagtagtattattacaatatcactttacagatgcagaacctgaagctcacagaggtgaagtgg

SEQ ID NO: 364674 - DNA, 201 bp, Homo sapiens
taagagatcagtacaacaacccttcctcaggttttgagggcaaccgtattggtgatggaagtgataggaacacagctatagatacttttttttttttagayggagtctcactctgtcacccaggctggagtgtagtggcgcaatctcggctcactgcaacctccacctcccgagttcaagcgattctcctgcctcagcctt

SEQ ID NO: 364675 - DNA, 201 bp, Homo sapiens
aggcccctggagagaccaattcaatagatttggagtggaactctgaaatttgaaatcttgtgattttaacaagcaccccccaagtagtttttaggatcaartaagtttgagagagtttagatgagcttgattgctgctgtaactctttatagaataaaccagatcctgggtcctttctctcactttaaccttgctgtggaa

SEQ ID NO: 364676 - DNA, 201 bp, Homo sapiens
aggtaggaagatcgcttgaacccaggaggtcatggctgcaatgagccatgactgagccactgcactccagcctgggtgagagagagagaaaccctgtctcaaaaaaaaaaaaagaaaagaaaagaaaagaaagaaaagaaaatagcttttctatatttctcatgaatggcctggttgtttctactcattctcaaccccaca

SEQ ID NO: 364677 - DNA, 201 bp, Homo sapiens
tggaggggagattttccagaacacctaagtaatcatgatacatttattttgttgtgggcttattgtcaaagagtgcctttaaattatataaaagttaggcmgtggtaggctaattccttatccctaggtggaacatctttaaaagataatcttagagttacagcctcacaaaaattgttgtgttgccctgattagaaagaa

SEQ ID NO: 364678 - DNA, 201 bp, Homo sapiens
tatgtatttcttgttatagctcatatcacaggtaaatatatttaaactgatgttatttaattatcgaataggaaataattcacctgccataaaattcaaarggtatataaaaatacatagtgaaaagtcttgcttcaaaccttgtccccagtgacccagtcctcttccatggaggcaaactgagtttccagtttcttgtct

SEQ ID NO: 364679 - DNA, 201 bp, Homo sapiens
tatctggttttctgagaagctataagtttaaaagcttaaagcactgtgtgagtgctggggaaccaattacccctgacgtgactgaaaaatggagaaacaasacgggcctggatatctacgaaggatatggacagactgaaacggtacctgacctcactgaaaagacatagctggattccatttagtcagatgaataaaaac

SEQ ID NO: 364680 - DNA, 201 bp, Homo sapiens
aaaataaaaatcaaaaattgaaaaattcattaactagaaatagcataacaagtatgctaatataaatgcaaatgttaatatactcatgttttgataaatayggatatatgagtaattattgttataactatattttatacatatgcatgtatttatatgttatcactacattccatgagagtatagcattcattttgagcc

SEQ ID NO: 364681 - DNA, 201 bp, Homo sapiens
aggatatggacagactgaaacggtacctgacctcactgaaaagacatagctggattccatttagtcagatgaataaaaaccaaagtgtccacagtctcctyatgattatttgagggataggagttgagtggttagaaaatgtttaaaaaaacaatgcttgcaagaacctaattgcaaaaaagctctgttaacagatagttg

SEQ ID NO: 364682 - DNA, 201 bp, Homo sapiens
ccagaagtcacacagctaatagctgctagagttgggattcaatcccaagcagtctggctccaatatctgcactcttaaccacaacacaacactggtcctckcaggcaagggaggtcaagaccttctgagcaggtcaactaggcccgaagaggcttcagtttacagtggctgcagcactttccctctctgctcccaagcctg

SEQ ID NO: 364683 - DNA, 201 bp, Homo sapiens
gttgggattcaatcccaagcagtctggctccaatatctgcactcttaaccacaacacaacactggtcctctcaggcaagggaggtcaagaccttctgagcrggtcaactaggcccgaagaggcttcagtttacagtggctgcagcactttccctctctgctcccaagcctgcctggccatttccagcctctctgtatccac

SEQ ID NO: 364684 - DNA, 201 bp, Homo sapiens
cactactaccacctgatgcctagggggaattccagttccccatcagcaagctttatatagggttaaaattgttctcagatcaaccgagcttcaaagctggrtgtagccaaaggaacttaacactaatttggacactcctcaacttatgatagggttatgtcccaaaataataagtcatcataagttgaaaacatcctaagt

SEQ ID NO: 364685 - DNA, 201 bp, Homo sapiens
aaataaaaataaacattagctgagcataatgacatgtgcttgtagccccagatacttgggaagctgaggtgtgaggactgtttgagaccagaagtttgacsctgcagtgagctatgagctatgattgcaccactgcactccagcctgggtgacaaagtgagaccttgtctcacacacacaaaattttttttaagtcttcat

SEQ ID NO: 364686 - DNA, 201 bp, Homo sapiens
ttagtgccttatgtcctggggcagcctctcttgatgtgctggactccctgttacctggggtgtagagtgctgtgtgtaggctcgggtgccagtggcctggytctatcactggatccacctggtgttggaatgctgcagccctctacgggaacgtgtggggatgtcagcaaggccccagggatgtggagatgcaggggcaat

SEQ ID NO: 364687 - DNA, 201 bp, Homo sapiens
tttctgtaccatgtattcaagctccttatctcaaatcctaggtatagggcttcaagcacagggcacagggcagagttagaaggtatccaatctcaggggaygaaataggtcctgaagtttaaggcaggccaggcacagtggctcacacctgtaatcctagcactttgggaggctgaggtgggtggatcacctgaggtcagg

SEQ ID NO: 364688 - DNA, 201 bp, Homo sapiens; identical to SEQ ID NO: 78900

SEQ ID NO: 364689 - DNA, 201 bp, Homo sapiens
ccaaactgaactgatgacatatgggtaagaatcagaatctttgagattaaaatgaaaccctgaacctattttgtttggtcctttggcttactggactcacrgtaaatacttaatatcaagacaactttcctaacaatacccttttccctattttggctgttacccaaaacccattccaaagactattctaattcttccacc

SEQ ID NO: 364690 - DNA, 201 bp, Homo sapiens
agattgtagatgtaaatggcaatgttctacctcctggacaagaaggagatattggcattcaagttctacccaaccgaccatttggcctttttactcattasgtagtaagtgacttactaaataatctcattttctatttatttctcaagtgcttggtaacaatccctgtttgccacaaaacatacctaggataggtacttg

SEQ ID NO: 364691 - DNA, 201 bp, Homo sapiens
atataattggctttatgtaaagataaaaatttccaggctaattttcttccccttgatgccaacaggtagaatttattcaagagctgccaaagactatcagwgggaagacaaaaagaaatgaactgaggaagaaagaatggaagacaatttaaagttgtttcattaattaccatatctataaaacaaacatagtatctgtca

SEQ ID NO: 364692 - DNA, 201 bp, Homo sapiens
cggggaggttacagtgagccaagatcgtgccactgtgctccagcctggctaacagaacaagactccgcctcaaaaaaataaaaataaaaataaaaaagtttaaggtaaaaataggagatgtgcatgttacagtggagggtggatctccccccaggactgattcccctaactgatctttgatgccagaagataccctgttaa

SEQ ID NO: 364693 - DNA, 201 bp, Homo sapiens
ggggaggttacagtgagccaagatcgtgccactgtgctccagcctggctaacagaacaagactccgcctcaaaaaaataaaaataaaaataaaaaagtttaaggtaaaaataggagatgtgcatgttacagtggagggtggatctccccccaggactgattcccctaactgatctttgatgccagaagataccctgttaag

SEQ ID NO: 364694 - DNA, 201 bp, Homo sapiens
gggaggttacagtgagccaagatcgtgccactgtgctccagcctggctaacagaacaagactccgcctcaaaaaaataaaaataaaaataaaaaagtttaaggtaaaaataggagatgtgcatgttacagtggagggtggatctccccccaggactgattcccctaactgatctttgatgccagaagataccctgttaagt

SEQ ID NO: 364695 - DNA, 201 bp, Homo sapiens
ggaggttacagtgagccaagatcgtgccactgtgctccagcctggctaacagaacaagactccgcctcaaaaaaataaaaataaaaataaaaaagtttaaggtaaaaataggagatgtgcatgttacagtggagggtggatctccccccaggactgattcccctaactgatctttgatgccagaagataccctgttaagtc

SEQ ID NO: 364696 - DNA, 201 bp, Homo sapiens
aaacagcttcaactctacgaggcaatttctatatcactggggacagaggatatatggataaagatgggtatttctggtttgttgcaagagcagatgatgtyatattatcctctgggtaactttcttttccatatgtgcatatgtctgtgttaactgatcatcagtgttctagagtgaacctgccactcacctgtatgtatt

SEQ ID NO: 364697 - DNA, 201 bp, Homo sapiens
ttatcttactttttcttcttcttaactaggtgctaatctgtggaaattttaagggaatgaaaattaaacctggctcaatgggaaaaccttctcctgctttygatgttaaggtttgcacatccccttccaggagaatgtttaacaacccaatctgtacactacctacctaccgcttacccccatataaactttctttgttat

SEQ ID NO: 364698 - DNA, 201 bp, Homo sapiens
  misc_feature (1)...(201): n = A,T,C or G
gccatattctttaccagtggaacaagtggatatccgaaaatgactgcacacacccacagcagttttggtttaggattatctgtaaatggaaggtatacttncacaaaagtgcagcttgaagtgtcaaaactgcaaagatgatgacttatgtactggtcttttatatttattttcctatgtacatcagggctactctttgtt

SEQ ID NO: 364699 - DNA, 201 bp, Homo sapiens
ctgtttgccacaaaacatacctaggataggtacttgaccctttcttgagagattggttgtcctgaatagtaatccaaaagacaagaaattgaagaaatacycaaattcttgctgaagaaaagcatgctggtcccctgaggccagatcactgttccaggtccacgaaggcaagaggaagggaccctagaaagaggacagcct

SEQ ID NO: 364700 - DNA, 201 bp, Homo sapiens
tacaatcttcaaaagcaaactgcattatcaccaatgatgttttagccccagcagtagacgctgttgcatccaaatgtgaaaatctgcactccaagctgatygtatcagagaactccagagaggggtgggggaacctcaaggagttgatgaagtgagtagccacacttgttgtaaaacagcttcccaaaaggaaaggcaaca

SEQ ID NO: 364701 - DNA, 201 bp, Homo sapiens
gactggtttttctttcctcaggctggaaagaaaccttcaaatccagccttctggtggatcaacagaaatggagaagagatgcgatggagttttgaggaacygggatctctgtccagaaaatttgccaatatactttcagaagcctgttccctacaaagaggagatcgggtaattctgattctgcccagggtcccagagtgg

SEQ ID NO: 364702 - DNA, 201 bp, Homo sapiens
tggattcaccataacaacaaaatgctatttgttttgcaggataatccttcaaaaacagcttcaactctacgaggcaatttctatatcactggggacagagsatatatggataaagatgggtatttctggtttgttgcaagagcagatgatgtcatattatcctctgggtaactttcttttccatatgtgcatatgtctgtg

SEQ ID NO: 364703 - DNA, 201 bp, Homo sapiens
  misc_feature (1)...(201): n = A,T,C or G
gatgataatagtacccacttcacagggtttctctgaggatttaataagaaagtgtctataaaacactgagcactgtgtttggaacacagagtgtacgcagnaaatggtactatcatgatgattatcaatactaataacaaaacttagccactttggggtatggctaccttcaggacagaaacaaatatatgtcctttttgc

SEQ ID NO: 364704 - DNA, 201 bp, Homo sapiens
ttctaggttgacttaaaaaaaaaaaaggagaagagtgaaaagtaattccaagagtcagaaatggtagaaaaggaggcacagataaatctttggggaaaatrtaaaggatgcaagaattctcacttattggaaagaaaaatgatcaggctaaatgggaaatgatttgggccaaaagaaatgacatggcttccaacgtctaga

SEQ ID NO: 364705 - DNA, 201 bp, Homo sapiens
tgacttaaaaaaaaaaaaggagaagagtgaaaagtaattccaagagtcagaaatggtagaaaaggaggcacagataaatctttggggaaaatgtaaaggakgcaagaattctcacttattggaaagaaaaatgatcaggctaaatgggaaatgatttgggccaaaagaaatgacatggcttccaacgtctagaaataagga

SEQ ID NO: 364706 - DNA, 201 bp, Homo sapiens
ttctttatccattcatctcttgatagacatttaggttgattccatatcttggctattatgtacagtgctgcaataaacatggcagtgcagatatctcttcratagactgatttcctttcctttgaaaaaatacccagtggtgagactgctaaatcatatggtagttttatttttagttttttgagaggcccttatattgtt

SEQ ID NO: 364707 - DNA, 201 bp, Homo sapiens
gtgtttcagagttcccttttctccacatcctctcaagcatttgttatcttttgtctttttgacaatagccattctaactggggtaagatcatatctcatcrtggttttgatttgaattatcctgatgattaatgatgttgagcattttttcatatacttgctgccaattagtatgtcttttgagaaatgtctattcagatt

SEQ ID NO: 364708 - DNA, 201 bp, Homo sapiens
tctttgaatgcaaatatgatgaggctgagaggaaaacagtactttgcctgcatccccagtcatttttaactcttttccacgggccgttattatggggcttyttgttccttagctaagggcatctgcagtaacattctggcatctggggatgtgttccaaccaggtgaatatcagattcctacaacttcaaagcccaacctt

SEQ ID NO: 364709 - DNA, 201 bp, Homo sapiens
gaggttacagtgagccaagatcgtgccactgtgctccagcctggctaacagaacaagactccgcctcaaaaaaataaaaataaaaataaaaaagtttaaggtaaaaataggagatgtgcatgttacagtggagggtggatctccccccaggactgattcccctaactgatctttgatgccagaagataccctgttaagtcc

SEQ ID NO: 364710 - DNA, 201 bp, Homo sapiens
tttcccaggttctggctagatttgacaccctcagatgtgatgtggaatacctcagatacgggctgggcaaagtctgcatggagtagtgttttttctccgtrgatccagggagcatgtgtattcacacaccatttaccccgttttgagccgacttctatcttgcaagtaagccaaagcacaaagaggtcaatatttagaaat

SEQ ID NO: 364711 - DNA, 201 bp, Homo sapiens
acaaaacttagccactttggggtatggctaccttcaggacagaaacaaatatatgtcctttttgcttgtcttttagatgaactggtctctgtgcaaatccygagtgctaaagcttccaacaagactgatgctagctcgtgtcaccaggaagatgctacgtcatgccaagtgttttcagcgcctagcaatttttggttctgt

SEQ ID NO: 364712 - DNA, 201 bp, Homo sapiens
gggagggatgtttagggagctgtggggaggctaaagcccccttggctgtagggacaaagagcttgcatttcagatgagaccttaaatactttcagaagccyatctgaccaggggtggtactgtctttcttagaagagttttccttaccaatgtttctgtggctcagtataaaaatctggagtcaccctgggaaagttatct

SEQ ID NO: 364713 - DNA, 201 bp, Homo sapiens
gtctataagcttcatgggagcaagaccagccgtgtcttgttcacagctatattttcagcatttagtacaggtctggcatataccaagtgttcaataaatayacgggtaatgaataaatgcgttgtccaatttaaatatgtgtgtctgtttgtgtatacttccttgtctgtaaaatgaaaatactaataaataactgcaaaa

SEQ ID NO: 364714 - DNA, 201 bp, Homo sapiens
gatggagaggcctggtccttcccaaagtgaaaggatgagccagtgtcaagagtccaggaatgccagacatgtgttccccaatcttcttgcctactgtgtcrcctgggaagagtaaaacctattgtgaagtgaatgctttccatccctgtcttaagggtctgggacttaagggtggtggggcccaggaggaagatctatata

SEQ ID NO: 364715 - DNA, 201 bp, Homo sapiens
cagcctccagaacaaagaattatttgacccgaaatgtcaatagttccatggttagttgagagaccctgtattacataaatgtagaattctaggttgacttaaaaaaaaaaaaggagaagagtgaaaagtaattccaagagtcagaaatggtagaaaaggaggcacagataaatctttggggaaaatgtaaaggatgcaaga

SEQ ID NO: 364716 - DNA, 201 bp, Homo sapiens
ccagaacaaagaattatttgacccgaaatgtcaatagttccatggttagttgagagaccctgtattacataaatgtagaattctaggttgacttaaaaaaraaaaaggagaagagtgaaaagtaattccaagagtcagaaatggtagaaaaggaggcacagataaatctttggggaaaatgtaaaggatgcaagaattctc

SEQ ID NO: 364717 - DNA, 201 bp, Homo sapiens
tgcagtggcacgatctcagctcactgcaacctccgcctcccgggttcaagcgattctcctgcctcagcctcccaagtagctgggactacaaggtgcacgcyatcatgcccagctaatgtttgtattttttatagagacggggtttccccatgttggccaggatggtctcgatttcttgacttcgtgatccgcccgccttgg

SEQ ID NO: 364718 - DNA, 201 bp, Homo sapiens
ggacactcttaatcattatacttcatcttacagtgtaatatataaccagcaggaatagaaccacagaaaagatgaatgcctccacacttccttttggaaakaaatcataaagcaatcatgtacattttaagaggcactcagctgatgtggtgaagtgtacagttctggagtcaggctacagggttcaatccctgcactgtc

SEQ ID NO: 364719 - DNA, 201 bp, Homo sapiens
gtcaacccactgggacctctgaaggacctcctcaaagctgttcccagctaaagcaagaggtcctggcctttatatacccacattgatcagtaattggatgrggttgtccctaggagtcaagacctttaacaaagccactgtcttcagtcaaggcaatctctagagagtgctcccagcacctgtcactgaaggatcacagtc

SEQ ID NO: 364720 - DNA, 201 bp, Homo sapiens
taggaacacagctatagatacttttttttttttagacggagtctcactctgtcacccaggctggagtgtagtggcgcaatctcggctcactgcaacctccrcctcccgagttcaagcgattctcctgcctcagccttccaagtagttgggattacaggcacatgccactatgcccacctaatctttttgtatttttagcag

SEQ ID NO: 364721 - DNA, 201 bp, Homo sapiens
ggcacatgccactatgcccacctaatctttttgtatttttagcagatatggggtttcgtcatgttagccaggatggtctcaatctcctgacttcatgatcygcccgtctcagcctcccaaagtgctgggattacaggcgtgagccactgcgcccggcctatagatagtatttttaattaattaagataattatgaaatcat

SEQ ID NO: 364722 - DNA, 201 bp, Homo sapiens
aaagggacagagaataaatacttaaggcttgcaggccgtatagtcagtctcatcacaactactcaactctgccactgtagtgtgaaagcaaccacaggtamtacctcaatgaatgggcaataacattttatttacagaaacaagaggcaagtcagattttgccagtaggctgtagtgtgttggcccatcagtacccatggc

SEQ ID NO: 364723 - DNA, 201 bp, Homo sapiens
tcttgctcctccggattgtcagactgctcctccctcttctttagactgccacgaggaaaaagcagatgtgagaactcaaggttcagggctgctcttctaasaaacaagtctgccataatctccatctgtgttggaatctgttaactagtgagtacctcatctcccctcctgtgtaagatttcctgaactggcacatctgtt

SEQ ID NO: 364724 - DNA, 201 bp, Homo sapiens
cataggttatatgcaaataccatacaattttatataagggacttaagcattcctggaaccaatcctgcagacactgagggatgattctacaagaaaaggtmagaatgtatttacattaacataaacaatgtttaaattgtgctgcgtcaaccaaagacatttaagcacttatttaagttgtagtaagaccaagagtttgct

SEQ ID NO: 364725 - DNA, 201 bp, Homo sapiens
gacactctccaagtaccccatcacagtcttctgttcagcaccaactgtataccgaatgcttgtacagaatgatataaccaggtaagaaatgttagtaaatwggcatctagtggggagaggggagaagaggaagctataaaataaaagatctttctgcctgaaacatagctccaagccagtagacacaggatttagcaatct

SEQ ID NO: 364726 - DNA, 201 bp, Homo sapiens
ccaagcttctgttcctggcttagtctttcttgtgaccaacccctatacgggagccccattgagagtcgcctcatgagaacaaaagacaattctattacccwggaaattccatggaatttagaagctctgtatcagaaactagagtcaaaggcaaaatattagaacaaaagatactcctagcacacccatcacttgggaaat

SEQ ID NO: 364727 - DNA, 201 bp, Homo sapiens
tttcatgttaagccaaaagggtcatagactctgaaatcccttgaaaggcaaaagcagataagtgaaagcaagataaatagatatcttcctggtaaactgamtaactcactctgagaaatacagaatgtatagatggtatctacactactctaacataatgaagaataacatttcttctaaacactgtttcttttctgcccc

SEQ ID NO: 364728 - DNA, 201 bp, Homo sapiens
aacaggttagtaatgtttgctttccgatcatatttattactaagctggaggggagattttccagaacacctaagtaatcatgatacatttattttgttgtrggcttattgtcaaagagtgcctttaaattatataaaagttaggccgtggtaggctaattccttatccctaggtggaacatctttaaaagataatcttaga

SEQ ID NO: 364729 - DNA, 201 bp, Homo sapiens
tttttgttgccatgataggggcagaggcagttgctactggcatctaacaggtaaaagccagggattctgctaaatatcccataatgcacagggcagcctcyagaacaaagaattatttgacccgaaatgtcaatagttccatggttagttgagagaccctgtattacataaatgtagaattctaggttgacttaaaaaaaa

SEQ ID NO: 364730 - DNA, 201 bp, Homo sapiens
ggtacccccacctgctccccattaatttgagcccagtggttttctagagcagctatctttgaatgcaaatatgatgaggctgagaggaaaacagtactttkcctgcatccccagtcatttttaactcttttccacgggccgttattatggggcttcttgttccttagctaagggcatctgcagtaacattctggcatctgg

SEQ ID NO: 364731 - DNA, 201 bp, Homo sapiens
agaggcagttgctactggcatctaacaggtaaaagccagggattctgctaaatatcccataatgcacagggcagcctccagaacaaagaattatttgaccygaaatgtcaatagttccatggttagttgagagaccctgtattacataaatgtagaattctaggttgacttaaaaaaaaaaaaggagaagagtgaaaagta

SEQ ID NO: 364732 - DNA, 201 bp, Homo sapiens
gtacccccacctgctccccattaatttgagcccagtggttttctagagcagctatctttgaatgcaaatatgatgaggctgagaggaaaacagtactttgyctgcatccccagtcatttttaactcttttccacgggccgttattatggggcttcttgttccttagctaagggcatctgcagtaacattctggcatctggg

SEQ ID NO: 364733 - DNA, 201 bp, Homo sapiens
atccttatccctaaaatatttgcctaggggagtctcagagcctactctggctcaggatctgcccaattttattaaatttattataaaatttaaaaaatttwaaaaattaaaattaaaataaaaaataaaacatttgccttgatcaatgacttgaagcatttacactatattttcttcggttgttttatagttttgagtctt

SEQ ID NO: 364734 - DNA, 201 bp, Homo sapiens
ttgcctaggggagtctcagagcctactctggctcaggatctgcccaattttattaaatttattataaaatttaaaaaattttaaaaattaaaattaaaataaaaaataaaacatttgccttgatcaatgacttgaagcatttacactatattttcttcggttgttttatagttttgagtcttacatttaagtctataatcc

SEQ ID NO: 364735 - DNA, 201 bp, Homo sapiens
cggaccatgtactgaagaggatatcctttcctcagtgtatgttcttggcacctttgttgaaaatctgttgaatgtaaatgtgtgggtttagttctgggttmtctattctgtttcattggtctatgcatctgtttttatgccaataccatgctgttttggttactatagctctgtagtatgatttgaagttaggaagtgtgg

SEQ ID NO: 364736 - DNA, 201 bp, Homo sapiens
gtttttatgccaataccatgctgttttggttactatagctctgtagtatgatttgaagttaggaagtgtggtgtctctactaaaaatacaaaaattagccrggcatggtggtgcatgcctgtaatcccagctactagggaggctaagggaggagaatcactttaatctgggaggtggaggttgcagtgaactgagatcaca

SEQ ID NO: 364737 - DNA, 201 bp, Homo sapiens
agcatagctattcctgcacacttttggtttctatttgtttgaaatattattttccatctcttcattttctgtgtctttttttttttttttttttttgagayagcgtctcactctgtcaccaggctggagtgcagtggcacgatctcagctcactgcaacctccgcctcccgggttcaagcgattctcctgcctcagcctcc

SEQ ID NO: 364738 - DNA, 201 bp, Homo sapiens
cctttgtgagcaaaccgaacaagaagattgaacaatccgagaaactaaattaccctctcatctgtgggcgacccttccagtgcagcaggatgagtcatgaragagcagagatgggacctgtgcctttgctgtgaataaatggggctctcaatcttcaagtcttttaaggctataaatctgacaacttttaagagcacttta

SEQ ID NO: 364739 - DNA, 201 bp, Homo sapiens; identical to SEQ ID NO: 78916

SEQ ID NO: 364740 - DNA, 201 bp, Homo sapiens; identical to SEQ ID NO: 78917

SEQ ID NO: 364741 - DNA, 201 bp, Homo sapiens; identical to SEQ ID NO: 78918

SEQ ID NO: 364742 - DNA, 201 bp, Homo sapiens; identical to SEQ ID NO: 78919

SEQ ID NO: 364743 - DNA, 201 bp, Homo sapiens; identical to SEQ ID NO: 78920

SEQ ID NO: 364744 - DNA, 201 bp, Homo sapiens; identical to SEQ ID NO: 78921

SEQ ID NO: 364745 - DNA, 201 bp, Homo sapiens
ttagtacctttgtgagcaaaccgaacaagaagattgaacaatccgagaaactaaattaccctctcatctgtgggcgacccttccagtgcagcaggatgagycatgagagagcagagatgggacctgtgcctttgctgtgaataaatggggctctcaatcttcaagtcttttaaggctataaatctgacaacttttaagagc

SEQ ID NO: 364746 - DNA, 201 bp, Homo sapiens
cttgcagatgcacgggggctacggctacctgaaggattacgctgttcagcagtacgtgcgggactccagggtccaccagattctagaaggtaaaaattgcyagaggttattctcttcccttcagaacgggggcgggatcgctgctttccccactctctgtccccatgcctcctgggcctcagggtgcagtcaagccctgtc

SEQ ID NO: 364747 - DNA, 201 bp, Homo sapiens
gtccagaaccccggcggacatatgtccgcgaggggctgcagtctccccgttccatccagtcaccccggcgtcagctccccttccggccagtcacccccccsgcctggctccctactccggccggtcacccccggcctggctgccccctccggtcggtcaccaccatccgggtccccatctggcccgtcacccctgcccggg

SEQ ID NO: 364748 - DNA, 201 bp, Homo sapiens
caccggagcttgacctcctgcatcgaccgtaaggatctcctggcgggcagtaggacaggtgtccagaaccccggcggacatatgtccgcgaggggctgcastctccccgttccatccagtcaccccggcgtcagctccccttccggccagtcacccccccggcctggctccctactccggccggtcacccccggcctggct

SEQ ID NO: 364749 - DNA, 201 bp, Homo sapiens
aggtgaacttcccttgtctctaaccatacagaatgtggaggccctctttgagcttggctgtttgtggttctttcatgggtttatggcgggctgccagatcstgggctggggtaggaagggaagctgcttgctccacagtcttcccagagtccaagacgtctagtccctgtctccctgcagatctgcaaccaggccttgcag

SEQ ID NO: 364750 - DNA, 201 bp, Homo sapiens
ctctctgtccccatgcctcctgggcctcagggtgcagtcaagccctgtctgtctcgaggcttcctcctccctcccgttccgcagagctgttctggcagggscctggagtccagagccgcagcttcgtccctttcggggggcctcagatcgctctgctgctgcccttttcctctggagatctgcgagaagggtgaactgaga

SEQ ID NO: 364751 - DNA, 201 bp, Homo sapiens
acttgggttttgcagtgacacactctgagcagggtctgtttagagaagatttcctagaagatagaattgtgctgggctccctcgacctcactgactttctmaccttctctctgctgccttttgatccctcctcaggaagtgggagtgatgctgcctctcttctgacctccgctaagaaacagggagatcattacatcctca

SEQ ID NO: 364752 - DNA, 201 bp, Homo sapiens
aaggattacgctgttcagcagtacgtgcgggactccagggtccaccagattctagaaggtaaaaattgccagaggttattctcttcccttcagaacggggrcgggatcgctgctttccccactctctgtccccatgcctcctgggcctcagggtgcagtcaagccctgtctgtctcgaggcttcctcctccctcccgttcc

SEQ ID NO: 364753 - DNA, 201 bp, Homo sapiens
gcccaggggtcttgagagacatgagtcagatttggaacccagccctcctggaatcccacaaggatcaccttaagcttaaggatataaatgaactcatgagyggcctatgtgggagctctcatcgctggcttttaggcctgctgcatgccattatacacttcattatgtcactgttgtttggttgtgttctaggcgagaaac

SEQ ID NO: 364754 - DNA, 201 bp, Homo sapiens
gtagtccttattccaggaatatgttttaatccaccgtttgcctttaaagagtcttcccaattgtgactctccccttcccactcttctgctttactccactkccctgccctttgttctctttccccttctcccccatttttttttcttttccatctttatttctgtcattgtcttttcttcttggtgtacctatcagcatgt

SEQ ID NO: 364755 - DNA, 201 bp, Homo sapiens
acaactgcattttactaagtgctaggataagagatgtctggaagtcccctatcctgttctaggttgatctggatgtgtgctagaactgtcctttctccatrtgacaagtggaataacgacagaagctgccattctctagctgttaaaggctataccgtgtatgggaaatactacagtagatccactttcacaacttcgtgg

SEQ ID NO: 364756 - DNA, 201 bp, Homo sapiens
acctcaagtgatccacctgccttggcctccccaaagtctgggattacaggcatgagccactgcgcctggctggatcatatttatttttgtaaccccagcastgctacctagtaaacacccaataaacattcttttggaaatgatctttgagccatggtctacagtaacagcaacccttgtacaaaattgtgtgaataaatg

SEQ ID NO: 364757 - DNA, 201 bp, Homo sapiens; identical to SEQ ID NO: 78922

SEQ ID NO: 364758 - DNA, 201 bp, Homo sapiens
ctttctctaggcggctctctggctctgacttcatcagccagtggctgcttagattcttcaaacagtttttagtggctgaagtcttctgagggttggagtcwtccactttagctaatgcctcacctgagttctcagttttggtgcgttttcctgatagtcccttgtctgcaataggagaagcaaaaagaaaagatcatgctt

SEQ ID NO: 364759 - DNA, 201 bp, Homo sapiens
aatgtgtcatcttttcaatggctgtattaaaagaagaacgtttgttttaatggtctttctgattaaagaaagcccctgtggctttggaggcattgtgcccmcggtccaccaagttctgtggtctcttccgtcttacatggtcccaactccgacactcagggaaagacagatccctgccctgatttccctacatagtgcctg

SEQ ID NO: 364760 - DNA, 201 bp, Homo sapiens
tgctacagatgaatgctttgccgtaagtgattcctctggctctcctgggatggacagggaacagctgctaggcccaggggtcttgagagacatgagtcagmtttggaacccagccctcctggaatcccacaaggatcaccttaagcttaaggatataaatgaactcatgagcggcctatgtgggagctctcatcgctggct

SEQ ID NO: 364761 - DNA, 201 bp, Homo sapiens
gggtcgcaggtcccgccagtgcgagcgcaacggaggtcgaaggcgttcagactcttagctgaacgcggagctgcggcggctatgctgtggagcggctgccsgcgtttcggggcgcgcctcggctgcctgcccggcggtctccgggtcctcgtccagaccggccaccggagcttgacctcctgcatcgaccgtaaggatctc

SEQ ID NO: 364762 - DNA, 201 bp, Homo sapiens
tgggacttaatgaagagcagaaagaatttcaaaaagtggcctttgactttgctgcccgagagatggctccaaatatggcagagtgggaccagaaggtaggygtttttcttgtgcttagacgttctaacaacagatgtctcaggcagacctttatctttgtctcctgataatgtaattgttaaatgtctcctccacttacca

SEQ ID NO: 364763 - DNA, 201 bp, Homo sapiens
aagtaatagaaactactaatagaaagcacatataactctgatttttagaggctcgtgtaacctaactagaagtagtacaaacgtgctggtgagaagtaccwcagcctggttatctctgggtagtccttattccaggaatatgttttaatccaccgtttgcctttaaagagtcttcccaattgtgactctccccttcccact

SEQ ID NO: 364764 - DNA, 201 bp, Homo sapiens
cacttgggttttgcagtgacacactctgagcagggtctgtttagagaagatttcctagaagatagaattgtgctgggctccctcgacctcactgactttcycaccttctctctgctgccttttgatccctcctcaggaagtgggagtgatgctgcctctcttctgacctccgctaagaaacagggagatcattacatcctc

SEQ ID NO: 364765 - DNA, 201 bp, Homo sapiens
gccaggtggggtggaactcccagccaacacgagctgtgatcttcgaagactgtgctgtccctgtggccaacagaattgggagcgaggggcagggcttcctyattgccgtgagaggactgaacggagggaggatcaatattggtgagatacgcaggggtgtggcagggaggtagcggtccgggacaggcactgctgttttcc

SEQ ID NO: 364766 - DNA, 201 bp, Homo sapiens
ggagcgaggggcagggcttcctcattgccgtgagaggactgaacggagggaggatcaatattggtgagatacgcaggggtgtggcagggaggtagcggtcygggacaggcactgctgttttccagcttggttggaacgtcggcgctcttcccctctagcttcctgctccctgggggctgcccacgcctctgtcatcctcac

SEQ ID NO: 364767 - DNA, 201 bp, Homo sapiens
ttgacttctttgcagcaatgtctcgcccattccagcagcagtatctcagttaacttggttccttttcctccaggctcaaaacaaaatcaaactcttctacaaaaaaaaaagggaaaaaggaaggattagtttttaatgtcccctcttgaacaggaaagttgtgccaggcacaggtacatcttacatggtactaaggcgagc

SEQ ID NO: 364768 - DNA, 201 bp, Homo sapiens
tccccttgggagcccgcctggcacctgggttgttagggctcgtgggaggactacaacccccagggtgcagtgggacaggcgttgccgggtcgcaggtcccrccagtgcgagcgcaacggaggtcgaaggcgttcagactcttagctgaacgcggagctgcggcggctatgctgtggagcggctgccggcgtttcggggcgc

SEQ ID NO: 364769 - DNA, 201 bp, Homo sapiens
ggtctacagtaacagcaacccttgtacaaaattgtgtgaataaatggcctgaccccagtcagagaaccatgaattgtttatccctaactctgttcctgagrgtaatacccaacataggtttctgctctgagtttctcaaggcagcctaatcgttaatcctcagaactcttcatttctgactttcccattttaatgagagta

SEQ ID NO: 364770 - DNA, 201 bp, Homo sapiens
gtcctcctgcggccggtcaccctcggatgcttagagaagtgaagaaacttggggcttggttgttgttgggttggttggtttttaatcataacagtaggtcwtaaaagcagtgagaatataagaagctggctgggtgctgatggtgacaactgcacaagaactccaggtcatacaagatttgctcacacacaaagatttggt

SEQ ID NO: 364771 - DNA, 201 bp, Homo sapiens
aactcctgacctcaagtgatccacctgccttggcctccccaaagtctgggattacaggcatgagccactgcgcctggctggatcatatttatttttgtaamcccagcactgctacctagtaaacacccaataaacattcttttggaaatgatctttgagccatggtctacagtaacagcaacccttgtacaaaattgtgtg

SEQ ID NO: 364772 - DNA, 201 bp, Homo sapiens
gggaacagctgctaggcccaggggtcttgagagacatgagtcagatttggaacccagccctcctggaatcccacaaggatcaccttaagcttaaggatataaatgaactcatgagcggcctatgtgggagctctcatcgctggcttttaggcctgctgcatgccattatacacttcattatgtcactgttgtttggttgtg

SEQ ID NO: 364773 - DNA, 201 bp, Homo sapiens
aactcatgcaggaaaaataattattattgccagtgggaaactctaccagagctgacaaacttgagtgtctttaggctctgaacagtaatttgaatgtagcraggagtggtggagacccggccagtttgtgacttctctgccaagaatgtttataaacacttttttcttctgaaatatttttaaatttattttaaataaatg

SEQ ID NO: 364774 - DNA, 201 bp, Homo sapiens
cctgcagtcagctccacagccaatcttttaatccatatccaactttcatttcttccctgcacattcttaacccatctgccttgctgtacagccaatggggsctcagatatttggaaacaatatatagtctaatatatagactaggaaatcaactctgtttttacaaaagtcttaaaaacatgctctaaaaacaaatggcaa

SEQ ID NO: 364775 - DNA, 201 bp, Homo sapiens
cgggatcgctgctttccccactctctgtccccatgcctcctgggcctcagggtgcagtcaagccctgtctgtctcgaggcttcctcctccctcccgttccrcagagctgttctggcaggggcctggagtccagagccgcagcttcgtccctttcggggggcctcagatcgctctgctgctgcccttttcctctggagatct

SEQ ID NO: 364776 - DNA, 201 bp, Homo sapiens
ggcttggttgttgttgggttggttggtttttaatcataacagtaggtcataaaagcagtgagaatataagaagctggctgggtgctgatggtgacaactgmacaagaactccaggtcatacaagatttgctcacacacaaagatttggtatcttaacacctctggctataagacacttttagtgttgaaactcatgcagga

SEQ ID NO: 364777 - DNA, 201 bp, Homo sapiens
ttcagcaacccaagaaggacacttaggtactgtaagtaatttgaaaagtaagatacttctaggattaagagccgccatggccagggcatgaacaggagacytgtgatcatgtaaccgtaattggtaataagggctcaagacccattcagattttttagaccagatgctcaaagcagtcatctctctctagtttgtactgtt

SEQ ID NO: 364778 - DNA, 201 bp, Homo sapiens
aagaggtgctgccctggcctagcgcttagaatttgataacccagattaccctggttgataccgaagcagataaggaattatttagaggtgggttttgttaytgtttgcatcttgcttacacttgagtggctctgcagtcaaaggcttttcccatttcatttggagtgtttttctatttagctttacctttttagtgtatat

SEQ ID NO: 364779 - DNA, 201 bp, Homo sapiens
atacgctgtcgcatgtgcaagcctcctaatccctcactgtgccctctaaaaggaaggccgtctctgaatcagctgctgatcaccctgctctcttttgtacrtaggagctgttcccagtggatgtgatgcggaaggcagcccagctaggcttcggaggggtctacatacaaacagatgtgggcgggtctgggctgtcacgtc

SEQ ID NO: 364780 - DNA, 201 bp, Homo sapiens
ttggcatcttgagctctgctagtaactatgtattggcatcttgaactctgctagtaactggcaaagttcatgagtggtggtatttgttttgtttttatacygtatttccttctgggaacttgtgtttacttatgcatatgatttgcataaaactatttccttccattagaatgcaactcagatttatttcttaagcctgtg

SEQ ID NO: 364781 - DNA, 201 bp, Homo sapiens
ggctccaaatatggcagagtgggaccagaaggtaggcgtttttcttgtgcttagacgttctaacaacagatgtctcaggcagacctttatctttgtctccygataatgtaattgttaaatgtctcctccacttaccaactcttactgcaagtgagaataccggtagtggatgatttttcctagaaggcatcctgatcatct

SEQ ID NO: 364782 - DNA, 201 bp, Homo sapiens
gaaagaatttcaaaaagtggcctttgactttgctgcccgagagatggctccaaatatggcagagtgggaccagaaggtaggcgtttttcttgtgcttagaygttctaacaacagatgtctcaggcagacctttatctttgtctcctgataatgtaattgttaaatgtctcctccacttaccaactcttactgcaagtgaga

SEQ ID NO: 364783 - DNA, 201 bp, Homo sapiens
tcttactgcaagtgagaataccggtagtggatgatttttcctagaaggcatcctgatcatcttgtacataactttttttttgttagttgaataaagatttrgatataaaactaaggcagttctatagataataaaaagaaacttcttaatgccagaacaagtttttacaggacccatgttaactgataaccactgtaagat

SEQ ID NO: 364784 - DNA, 201 bp, Homo sapiens
tgccagtgatttgaggaagtaatagaaactactaatagaaagcacatataactctgatttttagaggctcgtgtaacctaactagaagtagtacaaacgtsctggtgagaagtacctcagcctggttatctctgggtagtccttattccaggaatatgttttaatccaccgtttgcctttaaagagtcttcccaattgtga

SEQ ID NO: 364785 - DNA, 201 bp, Homo sapiens
cctcagggtgcagtcaagccctgtctgtctcgaggcttcctcctccctcccgttccgcagagctgttctggcaggggcctggagtccagagccgcagcttygtccctttcggggggcctcagatcgctctgctgctgcccttttcctctggagatctgcgagaagggtgaactgagataatggatgagaaagcatgttgaa

SEQ ID NO: 364786 - DNA, 201 bp, Homo sapiens
tgtttgtggttctttcatgggtttatggcgggctgccagatcgtgggctggggtaggaagggaagctgcttgctccacagtcttcccagagtccaagacgyctagtccctgtctccctgcagatctgcaaccaggccttgcagatgcacgggggctacggctacctgaaggattacgctgttcagcagtacgtgcgggact

SEQ ID NO: 364787 - DNA, 201 bp, Homo sapiens
ctataccccagataggtactattattacctacctcacaggatttatttatatgaggatcaaacagcctggcccatagtaaacactaaagtaatgttcaatrcgtaaaataaaaattactctgctgctgggattgtaaattgctataatctctcttggggaaaagaatacctgaagcaagtggaacaatatcataacataac

SEQ ID NO: 364788 - DNA, 201 bp, Homo sapiens
gtacatcagcacctagatgagtacctagggaatctgcatcatggatatgagaaaaccttctgataataatttatagtaaatgtgttttaactctgagtagrcaagaaaaaaaaaagagaaggaaccattgaaatttagatatatttaaatgtttaaaaactgaaactggctttgttacatacatataagtcattctgccaa

SEQ ID NO: 364789 - DNA, 201 bp, Homo sapiens
gagttgcttcaactctggaatcttgaatttcaatatctcattctcaagcaatgatctgcttctgaaaagagctttctgtgttgtgatcaccatacttattmtctgaccttattcagtgctccagtctcttgcccctgttcattttctctcaatctatcagtcccctcttggcttcaataccatttctaactggcccaggtg

SEQ ID NO: 364790 - DNA, 201 bp, Homo sapiens
cctctaagatctggaacacaacaaggatgaccactgtcaccaatgttattcaacatagtactgaaagtcctaactagagtaatcagacaagagaaataggycaggtgcattggctcttgcctgtaatcctagcactttgggaggtcaaggtgggagcattgcttgacctcagcagtttgagaccagtgtgcagtgtgggca

SEQ ID NO: 364791 - DNA, 201 bp, Homo sapiens
aaaaccttctgataataatttatagtaaatgtgttttaactctgagtagacaagaaaaaaaaaagagaaggaaccattgaaatttagatatatttaaatgyttaaaaactgaaactggctttgttacatacatataagtcattctgccaatgcccatatctgtgatgctgacagcagctctttcatttccagaagaccccc

SEQ ID NO: 364792 - DNA, 201 bp, Homo sapiens
ctgtggaagattacatgctcatgcagattgatgccaataatgatctccaatttttggatagactctgaatcttaatacttctgtctgccctggtcatcttytcacagtcctcactccttcactcttcactatcctcctcaagccctctaacccacaatttccataccattttcagcacatgacatccattgctacctcaaa

SEQ ID NO: 364793 - DNA, 201 bp, Homo sapiens
gtgggtcacaccagccttctagtcaattttgatgagagaacctggataactctgttgctggcgaaggattcacacggttattgtgtttgtttttctttttcttttttttaattatactttaagttttagggtacgtgtgtgcaggtttgttacatatgtatacgtgtgccatgttggtgtgctgcacccattaactcgtca

SEQ ID NO: 364794 - DNA, 201 bp, Homo sapiens
atagtaaatgtgttttaactctgagtagacaagaaaaaaaaaagagaaggaaccattgaaatttagatatatttaaatgtttaaaaactgaaactggcttkgttacatacatataagtcattctgccaatgcccatatctgtgatgctgacagcagctctttcatttccagaagacccccaaaggaggaaagtgatatcat

SEQ ID NO: 364795 - DNA, 201 bp, Homo sapiens
gtgtaaatgcccatttttttctccattcatcaacattttctctcattgttagcagtgtaacatcccagtcacacggcaccaaagtatgttaccagtgggawatccatacgattctgtagcaacctcaattcttgcctcctcagaagaaagaatttgaccaagggacaaaaggcacagtgagagtccgaggcaagagtgaac

SEQ ID NO: 364796 - DNA, 201 bp, Homo sapiens
accaaacaggctttgtgtgagcaataaagcttttaatcatctgggtgcaggcgggctgagtccgaaaagagagtcagcgaagggagacaggggtggggcckttttataggatttgggtaggtaaaggaaaaaggtgggttgttctctggcaggcaggagtgggggtcacaaggtactcagtgggggagcttttgagccagg

SEQ ID NO: 364797 - DNA, 201 bp, Homo sapiens
ctgctcagagaattgcttcaaattttccaaacttgcttttttttttgagacggagtctcgctctgtcacccagactggaatacagtggcatgatcttggcycactacaacctccgcctcccaggttcaagcaattctcctgtctcagcctcccaagtagctgggattacaggtgcccactaccacacccagctaatttttt

SEQ ID NO: 364798 - DNA, 201 bp, Homo sapiens
attcaaaataaagacaagacagataaaattgtatttttttatattttttaagttatggggatgagctatgtttgaaaggtgaaagaaacctctagattttwtatatatatatatgtaaaatctctagattatatatatatatgtgtgtgtatgtgccactgcactccagcctgggcaacagagtgaaactctgtctcaaaa

SEQ ID NO: 364799 - DNA, 201 bp, Homo sapiens
tttcttttatgatcgaccactcttcacattcatcactcactgttataagaaaatcggtctctgagcattacatactcttccaatctatttgaacttgtccscattgccttgtgtagagacttactaatgtttcaatcatagtgatatttcattgttttgattgttaaagagaaattattcaaacacattttttaagtgtca

SEQ ID NO: 364800 - DNA, 201 bp, Homo sapiens
atagacatttaagaagaaatttccatctcatcgaatgagcattttggtgctatagtaattgtttcaatttaaaacattcatttgtacatattttctttcttttttttttttttttttttgagataggttctcactctgttgcccaggttggagtacagttcacaatcagctcactgtaaccttaaactcctgggttcaaag

SEQ ID NO: 364801 - DNA, 201 bp, Homo sapiens
tagacatttaagaagaaatttccatctcatcgaatgagcattttggtgctatagtaattgtttcaatttaaaacattcatttgtacatattttctttcttttttttttttttttttttgagataggttctcactctgttgcccaggttggagtacagttcacaatcagctcactgtaaccttaaactcctgggttcaaagg

SEQ ID NO: 364802 - DNA, 201 bp, Homo sapiens
ttcataaactgtatctgataataatagctatttcatatggatttgcaaagatcaaatgtgatcctaagtataaaataatgttttatattgtgcaatataatttttttttttttttgagatgaagtctagctctgtcacccaggctggagtgcagtggcacaatctctgctcactgcaacctccaccacccgggttcaagtg

SEQ ID NO: 364803 - DNA, 201 bp, Homo sapiens
gattattcattcacattgctgtgtaatactccatactgtgaatatgccatactttatgcattctgttgatgaagactttagtagtttccattgtgagtttyttaggactagagctgctatgagcattcttgagaatgtcttttgttaaacatacgtacacatttctttggggtatacttaggtgtgaaattgctttatgca

SEQ ID NO: 364804 - DNA, 201 bp, Homo sapiens
tcataaactgtatctgataataatagctatttcatatggatttgcaaagatcaaatgtgatcctaagtataaaataatgttttatattgtgcaatataatttttttttttttttgagatgaagtctagctctgtcacccaggctggagtgcagtggcacaatctctgctcactgcaacctccaccacccgggttcaagtga

SEQ ID NO: 364805 - DNA, 201 bp, Homo sapiens
aacaatggcttctctggtcagcttgtgttttcactgcttccggaaactttcagtgcctctcctccactccactctcaccacataactcacttcacagagargatgcaagacagtagaaagaacctgcctcccaccagaataacagacctaaattcagtgacacccatcagctcctctttccctactgctgtacagaggagc

SEQ ID NO: 364806 - DNA, 201 bp, Homo sapiens
gatgtatatattcctgcattctcttttctatagttagtcatcatttcattagaaagatatttaagaattcacatttatattacaacatttaatttgaaaaraactttttgcgggaaaggaaagtataatcagaaattcatctatcatcttaaagtcctaggtttcaccagtctgtgccatatgtgttcacattaactctcc

SEQ ID NO: 364807 - DNA, 201 bp, Homo sapiens
agtagggcctggtatagcttttaagcaatacatctctccagtcacacataataatgaatgaattctaactcactgcaagtactacagtgttcctgaaggtaataaaccatgtcagctatgtgaggcttggaaatttttttttaaaacatagtaaccaaaaatgttaccagttggcctttgattacaactacatcccccagg

SEQ ID NO: 364808 - DNA, 201 bp, Homo sapiens
tatgcaatgagaagaaacaggataagctcttagaatttaaaataattatattgttctttattggtgggctttcaatgaaatttctgaaattctgttttttctttactcattttgatttcatctatttttcttactttaatctctcacattagcaacaaacacaccaaaaagaaaaatttttttagaagagctggtgcttat

SEQ ID NO: 364809 - DNA, 201 bp, Homo sapiens
cagcagtgtggaggcagaatggacaagattcacatattcacataaaagatggcaggcagaggtctcaagcacttgcggtaagaatgtggaagcgacacacrtgaaagaggttgactgaggcaggttctccagactttatagattgatcttatgtgaggagtaagtgagatggagataagtctcgtgtttctggctagagtg

SEQ ID NO: 364810 - DNA, 201 bp, Homo sapiens
tgactcaaataatctctcctttggagagggtccaacctatgtctcccaaattgaaggtcactcatctatgtagaagaaacctcaagtggacaaagtgactrtccagcactgcaattctggcaatctataatctctcttgcctctcaggtattcaactttgacgtgcgccagttgaactggttggaatacattgaaaattat

SEQ ID NO: 364811 - DNA, 201 bp, Homo sapiens
atttatccaagagaggcaaggatggctcaacatgtgcaaatcagtcaatatgatacatcataccaacagaatgaaggacaaaaaccatatgatcatttcarttaatgctgaaaaaagcatttgataaaattcaacatccctttgtgataaaaacactcaaaaaactgggtatagaaggaacatacctcaacacaataaagg

SEQ ID NO: 364812 - DNA, 201 bp, Homo sapiens
tgtcactcaaagaggctggagagcagcaaagatgggtccctgctccttctcctgggacctctgacctcgaggggcaccagcctgatgccagtaggattgcycctgtatagagtgtctgacaaccccggtaggaaggtctcaccctgttgtggcattgggagtaggaccgtttaacgaaccactttgtcccttggtggagag

SEQ ID NO: 364813 - DNA, 201 bp, Homo sapiens
gacaaagcacctcatactgaacaggtggtgtctcgttcatcatagtatccccagcatgtagcacaatccctggaacatagtgtacatttaatcagcagttdaatgaatgaatgaatgaatgaatttcccaacttatatcaaatagctattgtggtgatagtagacattacctttcctattatctgctatgtcatttggata

SEQ ID NO: 364814 - DNA, 201 bp, Homo sapiens
tcaaatgtgatcctaagtataaaataatgttttatattgtgcaatataatttttttttttttttgagatgaagtctagctctgtcacccaggctggagtgsagtggcacaatctctgctcactgcaacctccaccacccgggttcaagtgattctcctgcctcagcctcccaagtagctgggattacaggcacccgccacc

SEQ ID NO: 364815 - DNA, 201 bp, Homo sapiens
aatgagcgggcacacctaggagtgtggagctcctgcgaggagtctggactagagatataaattatagtgttatcagcatacagatggtaattgaagccagsgggctagatgggataacccagggagaaggcaagagtgatgacagaaaaaaaaaaaaggatcagcactgagtcccaagacaagacacttcagcatttagag

SEQ ID NO: 364816 - DNA, 201 bp, Homo sapiens
cctgccctcttagaattacagtcttttctttaggtcttcacaagacatgtttgttttaaacacaattctcatagacatctactgccctttacatacgtgtragcatatatttgtatttgaatacagataccttctgaacaagatatgaaagggagtttgaggtctccttcatatacgctgtcatcattttggacaaggaaa

SEQ ID NO: 364817 - DNA, 201 bp, Homo sapiens
acttctattgcctattgaactttttcagattgttgcaacattccttcgagatttggtaccaggagcaattaagccagtatattccaaaggtgacgccagartttacctgatacaaatacttggctcatctgtgctaagactgattgagaaaatgtactgaaatgttccagatgctggcatatatttaacctggcacaaggc

SEQ ID NO: 364818 - DNA, 201 bp, Homo sapiens
gcatgtgaggagcacctcggactgactgcccaccatccaggaagtgagaagtgcctctgcccagctgcccactgtctgggaactgaggagcacctctgccyggccgctgccctgtctagtaagtgaagagtgtctctgcctggccgccaccccatctgggaagtgaggagcgtctctgccctgccgcccaactgactggta

SEQ ID NO: 364819 - DNA, 201 bp, Homo sapiens
atgttttaaataataaataaatattttaaaaatatctctgttttattttctaatatgctaaatattggtggctggaactacataaaagctctttgagggtrcttaatacattttaagagtatagagaaatcctgagacaaaatgtttggaaacagctagtttagctgatcatagtgagggaagggctattttacttatgct

SEQ ID NO: 364820 - DNA, 201 bp, Homo sapiens
aattctctaaaaaaaattacagtgtctctttcaccttgggacaccaaatattccacagagattgccccttagtttaagcaaccttactcatttattttccaaaaaaaaattaagcaaattttggtgggttattgggactacataatgtagttatttttgaagagaaagactttttgaagagaaagacgtagtaaaatgatt

SEQ ID NO: 364821 - DNA, 201 bp, Homo sapiens
aagtattattaaattgccttttcagtttatcttattatttttattttatttatttctttttttgagatggagtctcactgtgtcacccaggcttgagtgcrgtggcacagtctcagctcacttcaacctctgactcctgggttcaagcaattctacccactcagcctcctgagttgctgggattacaggtgcccaccacca

SEQ ID NO: 364822 - DNA, 201 bp, Homo sapiens
atttttattttatttatttctttttttgagatggagtctcactgtgtcacccaggcttgagtgcggtggcacagtctcagctcacttcaacctctgactcytgggttcaagcaattctacccactcagcctcctgagttgctgggattacaggtgcccaccaccatgcctggctaattttttgtattttttagtagagaca

SEQ ID NO: 364823 - DNA, 201 bp, Homo sapiens
aaaaaacctcttgctttatgcaaatgggttcttctaacagggagaaaaactcttaattgttgaaccctcttcttggctcagccaggggaggaagacttcaygtggcgggagggggcagtgaatgggaaacgctggccagctctccagccagctgtgtggggactttggcctccgagactgccttgggacccaaggctcatt

SEQ ID NO: 364824 - DNA, 201 bp, Homo sapiens
taattttttgtattttttagtagagacagggtttcatcatgttagccaggctagtcataaactcctgacctcaggtgatccacccacctcggcctcccagrgtgctaggattacaagcgtgagccactgcacccggccttattatatctaaaattattattgttttttttaaaacatggggtcctgctttgtcacccaggc

SEQ ID NO: 364825 - DNA, 201 bp, Homo sapiens
aatagttagatttcagcccttgtgcacatgtctttaatattttgtgtgatgaaatagaaagtatgtattaagaactgctgctgcattcctaagtaggatgkttgtctcaaagaaaacacttgtgtgattgagctgtcagctgaactaggtgaatcttttcatggaatatcattttttatctgacagaatgactggtaaaca

SEQ ID NO: 364826 - DNA, 201 bp, Homo sapiens
gtcctcatagcaaccgttatttccattttacaaagcagagatcacatccttcttattcactatcaccccttgctggctacataacaggtacttaataaatrcttgttgaatgaaggcctgaatgagtcattctatagtgtttagcagtgggacagatgttcatagaaaaactgggtatgattaatgtactagaatgaaaat

SEQ ID NO: 364827 - DNA, 201 bp, Homo sapiens
tgtgtggggactttggcctccgagactgccttgggacccaaggctcattcctgccctgcctggccattggacagagcatgcgcatgtggccaacttggccrtgtgccccagcagggggcatgggggggggtggtcagggagtcattgcttgcctgtgtgtcccatatgtacacccctaaccattgaggtgggggtgtggaa

SEQ ID NO: 364828 - DNA, 201 bp, Homo sapiens
gcatgaggagtgcctctgcccggctgctgccccatctgggaagtgaggagcacctctgcccagctgccaccccatctgggatgtgaggagcgcctctgccyggctgcccaaccatctgggaagtgtggagcgcctctgcccagctgcccactgtctgggatgtgaggagtgcctctgcccagctgccaccccatctggcaa

SEQ ID NO: 364829 - DNA, 201 bp, Homo sapiens
atctctttctctatcaaaaagacaaatgtttatattctcctgactccagctgtcgacagcgtggctcataagattcacttaccactgtttatacaaaatartataatttcagatattttaatgacaggttggagtcaaccttccctttagtaagcaaaaacataactcatgccagattccaagcattctggaagtcagagc

SEQ ID NO: 364830 - DNA, 201 bp, Homo sapiens
attaatcccatttcgttgatgagtaaactgaggctcagaaagattagataatttgcccaagtatttgttgagcacttcctgaatgtttgatactatagagraggatacaaatgaagcaaaatatggatccagtaaaactttttaaacttaacaaaaagtttaattaatatattttttaaatatctataattgaaattatga

SEQ ID NO: 364831 - DNA, 201 bp, Homo sapiens
gttccgggtgggcgtgggcttggcgggccctgcactcggagcactcggccggccctgccagccccggcaatgaagggcttagcacccaggccagctgccgmggagggtgtactgggtcccccagcagtgccagcccaacggcgctgcactggatttctcaccaggccttagctgccttcctgtgggacagggctcgggacc

SEQ ID NO: 364832 - DNA, 201 bp, Homo sapiens
ttattcactatcaccccttgctggctacataacaggtacttaataaatacttgttgaatgaaggcctgaatgagtcattctatagtgtttagcagtgggamagatgttcatagaaaaactgggtatgattaatgtactagaatgaaaataaagaccctgtttctaggcagaatgacattccaaacaatagctgggatttaa

SEQ ID NO: 364833 - DNA, 201 bp, Homo sapiens
gtgcagaataacttcttggatcccaaaggtagttattgaattaaattaatgtttgggtctaattcatccaaacgtcgaacggtgagaaaatgagccaatgrctgaaattttttgagggggtaatcctttttgtttcatttaatttaaaaaatctgtaagttcaaaagtttgatcaagtcatcctttaaaatatcctaggaa

SEQ ID NO: 364834 - DNA, 201 bp, Homo sapiens
tactagaatgaaaataaagaccctgtttctaggcagaatgacattccaaacaatagctgggatttaataagtgccaattagaaaatcccatcatattttcrctgcagtccatgctggggttgcaattttagcagctttgtgtgtggtggaaaaatcctcttatgtatctcttggtatttctccacaatttcattcacttga

SEQ ID NO: 364835 - DNA, 201 bp, Homo sapiens
gctgtgcccagctctggggaaaaaaaggtagtgagtgatgggagcaaatgagataagagttagacttttgtcagaaaataaggtgctgctggtcactaccrtattgcttttccaataatttcagtaaactctaggttgaattaaaaaatacaaaacctaggggaggaggggggaagaaataaggagagactggtcaacagg

SEQ ID NO: 364836 - DNA, 201 bp, Homo sapiens
aaaaacactgatttgatcattatacattgtatacatatatagaactatcacactgtaccctataaaaatgcacaattatgtgtcaataaaaacaaaacaarataataggaaatcttcttttgtagaataaatctgccaattaagagacatggctagtagaaacagatgcgcttttgttactaaactttaatattcggcaag

SEQ ID NO: 364837 - DNA, 201 bp, Homo sapiens
caggggcactgactccgttttggtgttctgagaaggcttgctctttgacaaagaaagatttcaattgctattggaaagaagcataggggttaacttgactaaaaaaaaaatcaacaaagagaaaaagcaatctgggcacaggaaattgcaaatgggaaggtcttaagagaaaacgcttgcagcattcaggggacagagaga

SEQ ID NO: 364838 - DNA, 201 bp, Homo sapiens
ctgaatctgacatctttccaacatttaaaagatgagattggtgatggtattaaaaatatcattttttatattacatgatgagatgtgtcaatattcggaaragctgcataactcagggaaccattattttccaagtgaccaatgcacgatgttaaaacattatgcatgggtaaaatattcatctaatgagcaagataggcc

SEQ ID NO: 364839 - DNA, 201 bp, Homo sapiens
gcaagataggccactggattttaatgtaacagaatatgaaaagttcactgatatggttttagattctacattgcactgcagtttaagaaaccataatttgmcaagttttgggtatattatcaaaggagaatatccacaattatctaaaaaaggctttttaaaatactcctcccttttcccactacatatatgcgtaaggcc

SEQ ID NO: 364840 - DNA, 201 bp, Homo sapiens
taataatcaagaaaagagagatcttttatgctacatttcctaaacttgacgttgaaatgcttttccagcagaacatctaagagagccagcattcagcatawcacgctttgggaaatgctgtcctatattaatagattaaaccttttaacatctacagttctctattaaccataagcttctctcatctctttaatcctactt

SEQ ID NO: 364841 - DNA, 201 bp, Homo sapiens
agaagaagaattttaatgaggagtggtagacagggataatttttgtattttcttaaaaataatttctcatacatccctgtagagtgacagggaagtggtgygctgatatttactcctatctgatggttatctcaggatgacaaagctcatgaatcggcttttaagaactgtttccatgttggagtatttcatcaaccggag

SEQ ID NO: 364842 - DNA, 201 bp, Homo sapiens
tgtcctatattaatagattaaaccttttaacatctacagttctctattaaccataagcttctctcatctctttaatcctacttagttggtggaaagcgggrgactggaattgactctgttaataggcattaagttgatgatgaaaacaaccctgctctgtggatgatattcagaaacaggatctgcagtctgattaaaagc

SEQ ID NO: 364843 - DNA, 201 bp, Homo sapiens
agaaagattaagctatgcacatgctacacatataatgtatgtgtgtgtacaaatataatgtgtggatgcttttgtatgtatgtacacatatgccaaaatgygtatgtatacatgtctccacttcatctttttttttcttcttctaatattgctgtggctttctattttgtatctgatggaaatctggaaagactttctcaa

SEQ ID NO: 364844 - DNA, 201 bp, Homo sapiens
tagattgatcttctttatttatttagattgatctagttattctgtacatcatggtttctgttttagtgtgtatatactactcagtatttttcccttctctkcaggaaaaaaaatgagtttgttctccctctccttcctcttatctctccagctaattctcttatttctttttttattctctcacactgaggtgttttttgc

SEQ ID NO: 364845 - DNA, 201 bp, Homo sapiens
caggagcttctctcctgtacaaacataatatttcactgtgcagccactgtacgctttgacgacactctcaggtacattcccatttccctctcatggcttgkatacatatgtgtgcatgtaaatttcttcatagtttctgtaaaaaaaaaagaaatacactctaaacaaaaaagacatacaaagaagcaaaactcctccaaa

SEQ ID NO: 364846 - DNA, 201 bp, Homo sapiens
ccttgctctttccttggcctgggacaccatgaccccagcccttctctgccttccaagcttcagctcagatgtcacagacactttgaaatttccagatgctkctatgtacccctctcaggtctccctttgttttagcacttactatattgtatttaagagtctctttattgtctgcctcctccattagactgcaagcaattc

SEQ ID NO: 364847 - DNA, 201 bp, Homo sapiens
ggcttatgttttgttttcctgtcaaagcactcagtgtactctgccacaggatttattgtgtttgggaaatatttggactctgggccttaggtgagattcaragctgtgctggcttcaggtgtgacccaatgcatttctggctgtgacagctgtggggacagactccttctgcttgaggacaggggagtgaagagtaggaag

SEQ ID NO: 364848 - DNA, 201 bp, Homo sapiens
ataagcattaggctcagaaataccctgcttcccactggaaagtttaagttgaccttgaagccaccttcaccaaaacgaggttggtcaacacttttcaccawtgccactggacactttacttccaattttgcttcctgctctaaaagataaccccttccttcctttcccacattctccctacaacctcgtcttcttttgagt

SEQ ID NO: 364849 - DNA, 201 bp, Homo sapiens
tcattctagaaatatcttcatagaaaatctgagaatcataaaagaaattagtctcagtaatctttttctagaagatggatgctattttggtcaacttatamataagaccctgagaatttatggaaacgacattagaagtggttttatagtttaccttaaagatgacttctaaagaaagaactgatattttgtattttacag

SEQ ID NO: 364850 - DNA, 201 bp, Homo sapiens
aaaaatgtgagagaagtcctacatatagtgaatgtgttaggagaaaatataatggattaattttgtgtaaacttggctgggccacagaaataaatttgtgmggggagccccagcatcctagaggagctctgtgatcacccttcctgaaaaacagaatttacagtggaagctcctgtcactgaattggaaaacctaactgca

SEQ ID NO: 364851 - DNA, 201 bp, Homo sapiens
ggaattgactctgttaataggcattaagttgatgatgaaaacaaccctgctctgtggatgatattcagaaacaggatctgcagtctgattaaaagcaaaaktgtttttcatttctacttctttggcaaggttctgcaggacctcatcaagatacattttgtgaagtctctgtttcatacatgtgacctgaggcataaacaa

SEQ ID NO: 364852 - DNA, 201 bp, Homo sapiens
aagttgtggtctttggtttatgtgacattctaacaagccaggactctcttccttaagccacacacatgaaaattaaaataaagtaattctcctaccacagygtaactgctttgcatttatcgtttttgcaggaaagcgatttatgctgcacacctaccctcctttgcaaagaagtattacctagttgagaggtaataattc

SEQ ID NO: 364853 - DNA, 201 bp, Homo sapiens
tctttttttattctctcacactgaggtgttttttgcagactttatcacaacctgacaatgttctcaatgtttcctttgatgctgagttctttttaaaagaygtatgaaatgtaaaatctcccttcctttcccagatcaatatttgaaataaaaagcagggcaaacaccttcaaaacgaaaagtctcctgtttcctgttgcc

SEQ ID NO: 364854 - DNA, 201 bp, Homo sapiens
gcgggctgagtccgaaaagagagtcagcgaagggagacaggggtggggccgttttataggatttgggtaggtaaaggaaaaaggtgggttgttctctggcrggcaggagtgggggtcacaaggtactcagtgggggagcttttgagccaggatgagccaggagaaggaatttcacaagacgatgtcatcagttaaggcagg

SEQ ID NO: 364855 - DNA, 201 bp, Homo sapiens
cctttccactctcatgtcctatgattctgcagcttctgctgagatagacttaataaatatgatttgaattctggtggtagagaaataaagaaatcaaaatscattcttagatttccagctgagtgactgagtgagcagtgatatcatttcaaaagaaacaggcaagtcaagaagagataggtgtgtggagactgggagaca

SEQ ID NO: 364856 - DNA, 201 bp, Homo sapiens
agttgtggtctttggtttatgtgacattctaacaagccaggactctcttccttaagccacacacatgaaaattaaaataaagtaattctcctaccacagtrtaactgctttgcatttatcgtttttgcaggaaagcgatttatgctgcacacctaccctcctttgcaaagaagtattacctagttgagaggtaataattct

SEQ ID NO: 364857 - DNA, 201 bp, Homo sapiens
acactgaggtgttttttgcagactttatcacaacctgacaatgttctcaatgtttcctttgatgctgagttctttttaaaagacgtatgaaatgtaaaatmtcccttcctttcccagatcaatatttgaaataaaaagcagggcaaacaccttcaaaacgaaaagtctcctgtttcctgttgcctattccagcagcaggac

SEQ ID NO: 364858 - DNA, 201 bp, Homo sapiens
gaacaggccattttcacttcttttgtggtggaatgtcatcagttaaggcaggaaccggccatctggatgtgtacgtgcaggtcactggggatatgatggcytagcttggggtcagaggcctgacaggtatatacccagtaatgggatggctgggtcaaatggtatttctagttctagatccctgaggaatcgccacactga

SEQ ID NO: 364859 - DNA, 201 bp, Homo sapiens
tccaagcttgctacagcaagggagtcagccaccatcacttaacattttagcagagactcaaaggcacgcaggagagtgggaaagcattatagtggaaaacrggaaggcttcagctctgccctgattggaggctgttgcatggggaagctataagcaggccagctagaggtggggcaccctgcgtgattggttaggggatgt

SEQ ID NO: 364860 - DNA, 201 bp, Homo sapiens
gctggagtgcagtggcatgatcttggctcactgcaacctccgtctcccgggttcaagcgattttcctgcctcagcctcccgagtagctgggactacaggcrtgcgccaccagtcccagctgatttttgtatttttagtaagagacggggtttcaccacgttggccaggatggtctcaatctcttgacctcgtgatccgccc

SEQ ID NO: 364861 - DNA, 201 bp, Homo sapiens
ctgtcatttgcctaagatcatagctagtaagtggtagagctaaaattcaaacccacatctgctttatttatgtgtcagtactcattaaattagtcatcccmtgaatcagaatggggttgggcttggggggtctccaaatctgcaagtttaataagtaaacttcccagatggttctttctgatttgcgttaaagtatgagaa

SEQ ID NO: 364862 - DNA, 201 bp, Homo sapiens
gtcatttgcctaagatcatagctagtaagtggtagagctaaaattcaaacccacatctgctttatttatgtgtcagtactcattaaattagtcatcccctsaatcagaatggggttgggcttggggggtctccaaatctgcaagtttaataagtaaacttcccagatggttctttctgatttgcgttaaagtatgagaacc

SEQ ID NO: 364863 - DNA, 201 bp, Homo sapiens
tgtagcagtttttcagtgttattccatgaatcaatagtcttcttggtggacttagtttatggtgctgaatcaatctccttttaagcaaggccttgttaaargtcttcacacatttaaactattttgtttccacttcatttccttggttgaataacacattgagatacggttgtaagaactaggaaacagaaattaccaact

SEQ ID NO: 364864 - DNA, 201 bp, Homo sapiens
ggggaacctgccccaatattcacataagttcttttctattttccttaagcatcggccagcttgagaaataaagggacagagtacaaaagagagaaattttwaagctgggcgtccgggggagacatcacatgtcggtaggttccgtgatgccccacaagccacaaaaaccagcaagtttttattagggattttcaaaagggg

SEQ ID NO: 364865 - DNA, 201 bp, Homo sapiens
aatattcacataagttcttttctattttccttaagcatcggccagcttgagaaataaagggacagagtacaaaagagagaaattttaaagctgggcgtccrggggagacatcacatgtcggtaggttccgtgatgccccacaagccacaaaaaccagcaagtttttattagggattttcaaaaggggagggagtgtgcaaa

SEQ ID NO: 364866 - DNA, 201 bp, Homo sapiens
gatagaccatatattaggtcacaaaacaggtcttaaaacattttaaaaaatggaaataatatcaagcatcttctctggccacaatggagtaaaagtagaartcaacaacaagaccaattttggaaactatacaaacacatagaaattaaacaatatgctcctgaatgaccagtgggtcaatgaagaaattgaaaatttaca

SEQ ID NO: 364867 - DNA, 201 bp, Homo sapiens
gcaggaaccggccatctggatgtgtacgtgcaggtcactggggatatgatggcctagcttggggtcagaggcctgacaggtatatacccagtaatgggatkgctgggtcaaatggtatttctagttctagatccctgaggaatcgccacactgacttccacaatggttgaactagtttacagtcccaccaacagtgtaaaa

SEQ ID NO: 364868 - DNA, 201 bp, Homo sapiens
agcacaaaatttccacatcatagtgtttgttgaatggttaaaagagaagaaaaaaatgaatgacatgtggatactaaaatctattccacactttaagctcytgctgttttggtaggtatgtggtgatagtgcagccaaatgctaccagaggctacagaacaggttctgaagacaaggaggccaatgaaatggaaaaaaagc

SEQ ID NO: 364869 - DNA, 201 bp, Homo sapiens
aacacaggcttatattaaggatatattctaaggtacaagacatgatctggaatgagaacagactcagtcaaattccctacaccaatttctcttacctcttrcttccgaatcagtgggaatgttcattaaaatgcatctacctgggccttatctcagccttccttaattaaaatctcagaaaatgagatctagtaaagagtg

SEQ ID NO: 364870 - DNA, 201 bp, Homo sapiens
tcagcttctggtttggtattcttggataaaaaggtgaattttctgcctcccaatgttgaggtagaaaatgtctctgttctatctcttgtcattgtagaacrgcgaagttgaagaaaaaataaaatcaaacaaacaaagacaccttctattcaaaaaagagaagacaggcaggcaagcagcagtccctagaatataaccata

SEQ ID NO: 364871 - DNA, 201 bp, Homo sapiens
tttaatgcagttgtaacttattcctaagtagggcctggtatagcttttaagcaatacatctctccagtcacacataataatgaatgaattctaactcactrcaagtactacagtgttcctgaaggtaataaaccatgtcagctatgtgaggcttggaaatttttttttaaaacatagtaaccaaaaatgttaccagttggc

SEQ ID NO: 364872 - DNA, 201 bp, Homo sapiens
aagaagaaacaactagaactgcctctatctagaaaaatagtaaaccaaaagcaataccacattcttggaaagattagagaccaataccaccatcacggatygtgcaaggctctccagaaagctgcacatgctctgaatcagtgtctaatatatggtgctgtttctcccagagccaggattcatgggtccaagatcaagggg

SEQ ID NO: 364873 - DNA, 201 bp, Homo sapiens
gttggcctttgattacaactacatcccccaggaaatgtgatcaaaaggacatctgttctatgtatcaaaattcagacatctgcttccttcttttccttttrtggtatgcatagatatcacatctgacttccagtttccctgctgtcaaagagaaactattaaatgggagatgctctagacaaagggattttaaaaaatcca

SEQ ID NO: 364874 - DNA, 201 bp, Homo sapiens
agaagaaacaactagaactgcctctatctagaaaaatagtaaaccaaaagcaataccacattcttggaaagattagagaccaataccaccatcacggatcrtgcaaggctctccagaaagctgcacatgctctgaatcagtgtctaatatatggtgctgtttctcccagagccaggattcatgggtccaagatcaaggggt

SEQ ID NO: 364875 - DNA, 201 bp, Homo sapiens
atatatagatacatatatctatgtatatgtattggtcatttctctggagaactctaaactaatacaatgataatctatttgaaaaagcctttaattctaakcaaagcataaaaaaatgtgttggcttactatccattcagttgaactcctgttctcattgggttttaatagatcaaccaatcttttatttgtaagctgatc

SEQ ID NO: 364876 - DNA, 201 bp, Homo sapiens
tgaggcagaagaatggcgtgaacctgggaggtggagcttgcagtgagccgagatcatgccactgcactccagtctgggtgacagagcaagactccgtctcaaaaaaaaaaaagatgggcttgattatataatattcacagaagagagaaagaatctgtgaacttgaaggtgtattaatagaaatgatcccaactgaagcaa

SEQ ID NO: 364877 - DNA, 201 bp, Homo sapiens
tatcatcttcataggctaatgctgtttgacttaccttttacaaacaatattaacaacagcttgcatttttataatgctttacatttagcaaggatgtttasacattcattggctacgcttaacatagtgtgtagcacatagtagacattcaatacatgtgtttaatctattatattgaaatggtggatttaggttatattc

SEQ ID NO: 364878 - DNA, 201 bp, Homo sapiens
atcacgtaaagtgcccccattatgtgatgagcaaggacagagtagggtcagaaaagtgaccagggaattcaggtagatcgtgcttttctgtttgctaggtygagagaaatttgacactgggcaaatggaaatttgagaattaccccgtggtttcaattacccatctctgtatattcccatttataagagctggagatttga

SEQ ID NO: 364879 - DNA, 201 bp, Homo sapiens
cctaggaaatgccaaatcaatttaaagtacacctagtctcttgccaaatacacctagtgaccttttgtaactctggtgcctcttaaagaggaactgagaaracaggcaagtcctctgtccccagactcctcccttaactactctctgacctcaaaacttatctttattccagctgtccttgttagcatgatggcaatacac

SEQ ID NO: 364880 - DNA, 201 bp, Homo sapiens
gctgtcctatattaatagattaaaccttttaacatctacagttctctattaaccataagcttctctcatctctttaatcctacttagttggtggaaagcgrgagactggaattgactctgttaataggcattaagttgatgatgaaaacaaccctgctctgtggatgatattcagaaacaggatctgcagtctgattaaaa

SEQ ID NO: 364881 - DNA, 201 bp, Homo sapiens
ggtaggaggtcatgtttgtacttagcttcataggcagaaatttaagtcttgaatttggacttgttaaagaatgtgctggtatgaaatgaaaattaaagaargttctagaaaaatggttcattgacagaaggaatttttcccactggatcacctttagcaaagcctggagaaatttttggtcatcacgcctggcagataggg

SEQ ID NO: 364882 - DNA, 201 bp, Homo sapiens
acttcaagaatgaagccacagaccttcacagcaggtgttacagcccttaaaggtggtgtagacccaaagagtgagcagcagcaagatttactgtgaagagygaaagaacacagcttccacgtatggaaggggacccgagtgggttgcagctgctggctgcagtggccagcttttattcccttatttgtccccttccacatc

SEQ ID NO: 364883 - DNA, 201 bp, Homo sapiens
tacagaagaggagcacctgaggatttttgtcagcttgccccagtgttggacagaaagagaagatggaagggttaggctgaaaagatgtctgcagtcaaacrtcaaaaaatggagtcagactctattgcacagggtgttcagattagcaagaaaaagattgtttagttaacatggaattgaagcaaagtatggtgacccctc

SEQ ID NO: 364884 - DNA, 201 bp, Homo sapiens
tgtgacattctaacaagccaggactctcttccttaagccacacacatgaaaattaaaataaagtaattctcctaccacagtgtaactgctttgcatttatygtttttgcaggaaagcgatttatgctgcacacctaccctcctttgcaaagaagtattacctagttgagaggtaataattcttggtttttggtacacatga

SEQ ID NO: 364885 - DNA, 201 bp, Homo sapiens
gagacaggtttttaccatgttgcgcaggctggtgtcgaactcctgggctcaagtgatctccctgctttggcttcccaaagtgctgagattacaggcatatrccaccatgcccagccagatgtcttctttaagtaatgttattacaactaaaaccagtttttgagtataattaagcaggttgttataaacaagaacaatgtg

SEQ ID NO: 364886 - DNA, 201 bp, Homo sapiens
aaccaacctcttatgcaatgatcctgtctgggtcagagtttcttctggtaggcatcagattctgcaaatatttattatctcatgttaatcaagtccccctstagattctgccatttaactttaacgagtttgacacaaacagagtgatttaatgcagttgtaacttattcctaagtagggcctggtatagcttttaagcaa

SEQ ID NO: 364887 - DNA, 201 bp, Homo sapiens
tacaaaagtcttttttttttctttttcttttttcttttttttttgagatggagtcttgctttgtcacctaggctagagtgcagtggcgagatctcagcgcmctgcaacctctgcctcctgggttcaagcgattctcctgcctcagcctctcgagtagctgggattacaggcgcccaccactgtgcctggctaatttttgta

SEQ ID NO: 364888 - DNA, 201 bp, Homo sapiens
atcttcctagccaccctagctcttttcctgcccagatgcaagaaacaattctcaaaggactgtgaaattgatctttggtgtggggaaaagaaaacataacmagatgatgaatcaagcactgtgttgcctttagcatttattgtagaatattatgtaaagtgaactaaaattttgttaaatacaaaattgtctttaagaata

SEQ ID NO: 364889 - DNA, 201 bp, Homo sapiens
tgtttgcatatgatatgatcttatatcttgaaaagctaaacactccaccaagaaactgttagaactgataaacaaattcagtaaagttgcaagataccaartcaacatataaaaatcagtagtatttctatatgcccacagtggacactctgaaaaagaagtccagaaggtaatcccatttacagtagctacaaataaaaa

SEQ ID NO: 364890 - DNA, 201 bp, Homo sapiens
cactaagaataacatttgcttgttgatttagctgtattatttcgaagtcctagatcattttgtatccttaactgctgcaggtttgcaaaagcatttttcawcctgcagttgataatatgtatcccctatggcttttggacatcttgcttttaaggcattttaacttcccaggcttctccagagacagccccaaaacattga

SEQ ID NO: 364891 - DNA, 201 bp, Homo sapiens
tgtaacatatccagcaatcccacagctaggtatataccccgatgaaaggaaatcagtgtatcaaagagatatctgcactcccatatttattgcagtgttawtcacaatagccaagatttgaaaacaatccaagtgtccatcaatagatgaatggataaagaaaatgtggtaaatatacacaatggagtactattcagccat

SEQ ID NO: 364892 - DNA, 201 bp, Homo sapiens
ataatatttcctgagccaagaaatgagaaatagttataaaaacaccccacattttagatcattttttaaaaatcgtgcactatttatcacaggtcattgtragggcacattccacagaagtgagcaaaaatcccaggtatccttgaaagcaagatccttggaaattaggatggcaattaagttatgtgtctggtcccaaca

SEQ ID NO: 364893 - DNA, 201 bp, Homo sapiens
atcctattaaagaagtagggtacctcaacatttttaaagaaataggcaaaatttatcatgaagtatagttatatttggtgaaaatacttggctgttatgayttattgagtgttaaattgtctccttttatttacaaaagaaaatgggtatacaaaatgtacgagacaggacatttaaaataaatgccaaaaagaaaagcta

SEQ ID NO: 364894 - DNA, 201 bp, Homo sapiens
tagctgttatatattttatttatgggaacttttgatatttctattatccaataagttcttctaaggtaaaaacattggaaataaaatattacatctgtgartgagcatttggatatcaaaccctctctcctctcggaaaaaaaagacattatgcatattctctcatgttttaatttataaatttcaaggcagtataacctt

SEQ ID NO: 364895 - DNA, 201 bp, Homo sapiens
atggagcacgtacaatacagaaatgctgatgtctgagctgagtcctgaagaccagagagtaagtagagcactgacttaagcaccaggaaaatgctactcamttggaatttagaattatttgatttggaaagctgatgaatgaataagacgtttggttatagacacagattttgttttgctttgtttttctaagaaaatcag

SEQ ID NO: 364896 - DNA, 201 bp, Homo sapiens
cttctggtactgcaatcaattgtaggtttggtctttttatgaagtcccatatttcttggaggctttgttcattccttttcattcctttttctctattcttstcggcatcttatttcagtaaggtggtctttaaactctgatatcctttcttccactcagttgattcagctgctgataactgtgtatgccttacgacattgt

SEQ ID NO: 364897 - DNA, 201 bp, Homo sapiens
ttagacaacaagatgatcttgaagctgtactcttggcattatattctcaagaaaatcaccatgacgacgtaaaatgaaactttatttttccagaaaatcarttgaatgggaattccagttctgggaaataaagaaggatatgcatttttggcccggacctttcctgtttgcttgggcagcagtggtactgctcagtgttgt

SEQ ID NO: 364898 - DNA, 201 bp, Homo sapiens
actcaaacttggtatcatgtgactgttctgaattccagaaccgaggctaaaaggtggaagttttgtttgattgtgtctcacattttccttttggtttattrtctaacatatgttactagaattctctttactctaccttttaggtggttagacgatgctattattgacgagattacacccaagctgatcagagattggccc

SEQ ID NO: 364899 - DNA, 201 bp, Homo sapiens
gctctctgagaagactggagagaatggaattcaaatgtaagtgggggcataagccttctatacgaagaggaacagcttttccctctgttgaaaatgatgcrtgcagatactagtatatttatttgtatgcttcattcatttggcaaacataatgtacacctaccatgcactatggacatcctgaagttctggggatacaga

SEQ ID NO: 364900 - DNA, 201 bp, Homo sapiens
gtgccaacttgatatataggcttttctgcaacgaggaatcaagccatatcttgaatgtggaggcaagaggtagaagaaacatctctgatgcagctttgtcstgaggggaggaattccttttgacatttttcagaatgacttaaattgattaaaatcatggacacaactcctctgccacctcctcatgacaattgggtaatg

SEQ ID NO: 364901 - DNA, 201 bp, Homo sapiens
cctgggagttttcctttctttcagtgcaacagagaaatgcctgggggaaagttgttgttgttgttgttgttgttgttgttgttaacagtaacttcaagggktctagtggctgccattgctcttagtaattcagcagttcttatttatttatttataaggaaccaggcgttagacaacaagatgatcttgaagctgtactct

SEQ ID NO: 364902 - DNA, 201 bp, Homo sapiens
ctccctttctttagcccctatctaaaaacttttagcattaccttggccctgaaatattccagaaagatgaagttagtacaaaaactttagcacattagcakaaatatattttaaaaataacttaaatcaggagttaatgcttttaatgagtatgacaagcctggccgttaatcagtgtttagcgactcattttcctggctc

SEQ ID NO: 364903 - DNA, 201 bp, Homo sapiens
aagttctaatttagtactactacaataaagtagtaatcagtactgataaagtagcagtagtgctaaagtaatactaataaagtagtactaatagtcctatrctatcattcgtaataaagtagtattgctattgattctatcggtctatctacctacctgcctgcctacctacctacctacctacctatctgtttggatggg

SEQ ID NO: 364904 - DNA, 201 bp, Homo sapiens
tttttgtatttttagtagagacgggtttcaccatgttgggcaggctggtttcaaactcctgacctcgagtgatctgcccgcctcggcctcccaaagtgctrggattacaggcatgagccactgtgcctggcccaaattttcttttatgatcgaccactcttcacattcatcactcactgttataagaaaatcggtctctga

SEQ ID NO: 364905 - DNA, 201 bp, Homo sapiens
ggatattaacagttaagtaaaggaagaaaagcttccctgatgatatgactttgagaaactcttgatttaacctacttaaccagttgtggttttgtttttgtttttttttttgttttgttttgttttgttttgttttttgagacagagtctctctctcttgcccaggctggagtgcagtggtgtgatctcagctcactgcaa

SEQ ID NO: 364906 - DNA, 201 bp, Homo sapiens
tcctgacctcgtgatccacccacctcagcctcccaaagtgctgggattacaggcatgagccatcacgcctggccataaaatagttttaatgcatagctgamcttgaggcaaaataaggaaatccgtaagtgtccagaaataacaagaaagtacacacctacacacaaaaagagtgagaaaagttgaacaagcacacaaata

SEQ ID NO: 364907 - DNA, 201 bp, Homo sapiens
ttaacagttaagtaaaggaagaaaagcttccctgatgatatgactttgagaaactcttgatttaacctacttaaccagttgtggttttgtttttgtttttktttttgttttgttttgttttgttttgttttttgagacagagtctctctctcttgcccaggctggagtgcagtggtgtgatctcagctcactgcaagctcc

SEQ ID NO: 364908 - DNA, 201 bp, Homo sapiens
ccaaactaaggttcttctagtccaattactttctgatgtctttcttcttctcctcctcaggatttatagctaagtgcagccaatcgaatatgaacccattrtactagggcaaaattccactttgggttcaggatttacccagcatgtggctcctctggcagttatcttgactgccctagagttggacggagagcttaaatt

SEQ ID NO: 364909 - DNA, 201 bp, Homo sapiens
aacaagaaagtacacacctacacacaaaaagagtgagaaaagttgaacaagcacacaaatatgacaagtatttattgagagccaaatgtatgtcaggcacwtattgctttgtgcctggggaacaggggcaataaagtagaaaataaaacaggcatggaattggcctcacagatcttaaagtccagtgaggcaaacgagttt

SEQ ID NO: 364910 - DNA, 201 bp, Homo sapiens
ccagcccaggggtcagcagctttggcccaaggctgaaatctggcccctgcctttttgtttattctttgaactaagaatggttcttatatttttaaaacttwgaaaaaatcaaaagaataatattctgtgacatgggaaaaattataggaaatttaacgtatatgaaatttaaccttcagtgtctataaataaagttttatc

SEQ ID NO: 364911 - DNA, 201 bp, Homo sapiens
gagttggacggagagcttaaattagcttctaactactctagtctcaaaattcacatgggtgatggtttcatatcttggctttcctactatagtttaagcayaccagaatgtccttgatggccaaattggtagtattacaactgccagggtaaacaagagtttcaaagctcacagaaggatctcagtttaggaatactaatt

SEQ ID NO: 364912 - DNA, 201 bp, Homo sapiens
ctgcaaaatgagaaatagacatttaagaagaaatttccatctcatcgaatgagcattttggtgctatagtaattgtttcaatttaaaacattcatttgtayatattttctttcttttttttttttttttttttgagataggttctcactctgttgcccaggttggagtacagttcacaatcagctcactgtaaccttaaac

SEQ ID NO: 364913 - DNA, 201 bp, Homo sapiens
cttaaagatggatggtattcagttagtgaaatcatagagcaatttgcctaaaacttaagagaaactgtttacttaaaataatatttgtttctgatagataytaagtaaatattaatgaaaccaacttgatgtcagtaaataataataagtaaaaaaaccaactttgtatttctctatttcactgtaactattgtctcattt

SEQ ID NO: 364914 - DNA, 201 bp, Homo sapiens
tgttttattttattacctctgagcagattggatttcctatgagtagtcgcctctgatttttatttcaataatgaagccaatctttttttattattaatgcrcacttttatatgaatagtggtagtttaggggtgacagcctcaattttgggtgacagaaatacaaatttctctgtccccaccttaaacctactgaatcaga

SEQ ID NO: 364915 - DNA, 201 bp, Homo sapiens
atcagaatctttggcgtgaggatccccagggctttcataagtagctgccacagcatagggggagattttggaatagctagtccaggtatttccatggaacrtagagtcagaaaataagaccttcgagacctggtgcttggctctgttactgctgtcataaaatattttcagacgagggtgtgctgtgtgatcacagagttt

SEQ ID NO: 364916 - DNA, 201 bp, Homo sapiens
tgtatgagatgctaattgaggtagactgtgggaggtgggtgtttccggtgcagaagaacccttgatatcaccttcacttcctgctatatggctgcgtatcraaaggcaagttacttaacttcctgctatatggctgtattcaaaggcaagttacttaacctttcagtcttcccaatgtattcatttgctagggctgctgta

SEQ ID NO: 364917 - DNA, 201 bp, Homo sapiens
aactgggcggcttaaccaaaagaagtgtattgtctcacagttttggaggctagatgtctgagatccaggtgtcagcggggttggcttctgagagctgtgasggaaggatctgttccagacctctctttgctaatagatggctgtcttctccttgtgtctcacatcctcttctttctatgcgtatatctgtctttttataaa

SEQ ID NO: 364918 - DNA, 201 bp, Homo sapiens
tcatcgaatgagcattttggtgctatagtaattgtttcaatttaaaacattcatttgtacatattttctttcttttttttttttttttttttgagataggktctcactctgttgcccaggttggagtacagttcacaatcagctcactgtaaccttaaactcctgggttcaaaggattctcttgcctcaacctcctgagtt

SEQ ID NO: 364919 - DNA, 201 bp, Homo sapiens
taataaaaatgtaattaatgacattctccaagaatcgttgagaattctcagatggctcatttttcatggtcatttctgctgttgcctgggatgaattaggyatgtttatgaatcatctttcatttctcatgggctccataccaagttgatccagaccaggccaaggccctttcttcagttgtcataaatttagaatcaaac

SEQ ID NO: 364920 - DNA, 201 bp, Homo sapiens
tttaagtcttccatttattgtaatctaggagaaaatgaggtcactgagtttgttaattcattatgctgagtttagtacacaaattctaagcaatatttcayagacatggctttttcttggtgcaataaatatgggcttttgtaaactgttttttgctttttggtcccacagctatgttttggatggttaaagatgctaaaa

SEQ ID NO: 364921 - DNA, 201 bp, Homo sapiens
taaccataaggaaatcctgattagcgagtattgagaagcttcctacactgggagtggggaaattccttaaatagcctctaaatctaatctctgggaggaamcttcttttccattattatttgtggtggctccatcctctggaaagttcttccttatttcttattccctggctgtcacctctgaagtggctgttaagaagtg

SEQ ID NO: 364922 - DNA, 201 bp, Homo sapiens
cagccactgtacgctttgacgacactctcaggtacattcccatttccctctcatggcttgtatacatatgtgtgcatgtaaatttcttcatagtttctgtaaaaaaaaaagaaatacactctaaacaaaaaagacatacaaagaagcaaaactcctccaaaatcccaccatctagaaacaaccatttactattgtggagaa

SEQ ID NO: 364923 - DNA, 201 bp, Homo sapiens
agaggagaatgaacatttcttgagcatttactacattacaggtcctgcactccatactctaccctgtaacacagtttcatttagacttcaccacacctctrtgaggcaagtattacttttgttaccccatttttatgaggcagatatctagatttaaacacagcaaataacttgcccatggtaattgcatagtaagtctaa

SEQ ID NO: 364924 - DNA, 201 bp, Homo sapiens
attcacccactaataaggaccaatttagaatgctatatgtactttacaagttcttttctagacctggaaaataagctccatcattactcataatgacattrtaggtaactgacgccagctgtcttcataagaacaaaattatctagcagaattgcacacacactgacaatttggtccaaatgaattctaggaaatctgatt

SEQ ID NO: 364925 - DNA, 201 bp, Homo sapiens
tagtatttgccaggtactgtcctgaatcatttgcatggtttaatctcttagtcctcccaacagtctattgggaggtattactaacagtctgtagggaagtrctattactagccccatcccaggattacagacagagaaactgagacacatagcagtttcaaagcttgtctgaagttactcaattataatatgtcaggtttg

SEQ ID NO: 364926 - DNA, 201 bp, Homo sapiens
caattataatatgtcaggtttgtgattggaacctagcactataacttttgagatgatgtgtttactacagtgcattcctacttctgtaaatctcttctccytcctttctctgagcaaacacataaaactgggaggtaggtaggagaattgggatgacattcatttgtggaagtccatatactgtgtcatattcttcatctt

SEQ ID NO: 364927 - DNA, 201 bp, Homo sapiens
gaagagtatgtggagtttgtgactagtgccaggtgaccctccctaaggaagagactgtcaattggcactaccacaacagtgtatgaagggtacaaaagtcttttttttttctttttcttttttcttttttttttgagatggagtcttgctttgtcacctaggctagagtgcagtggcgagatctcagcgcactgcaacctc

SEQ ID NO: 364928 - DNA, 201 bp, Homo sapiens
agaagagaggcgagaagaagtttgtctgacaggcgttaggacccaggaggcaagggtcaggatagataggatagaagggcaagtctcacttgggcgatgtractttgagagttccactcatggccacaaggtcaaccaacttgttgtcgggaccccgaagctgaatggctttcctctctggtgaccctcggctcagcccag

SEQ ID NO: 364929 - DNA, 201 bp, Homo sapiens
tgattgatccattttacagagcgttgattggtccgttttacagagtgctgtttggtccattttgcagaatgctgattggtgtatttacaatcctttagctrgacacagagtgctgatttggtgcgtttttacagagtgctgattggtgcgtttacaatcctttagcgagacccagagcgctgattggtgcatttttacaga

SEQ ID NO: 364930 - DNA, 201 bp, Homo sapiens
atatatatatatatatatgtatcaatgtgattaaacaatgcaattaaacaatgaaaattgattaaacaatgtggttaaacaatgaaaaaaaagccttactrtaattgccagacactaagaataacatttgcttgttgatttagctgtattatttcgaagtcctagatcattttgtatccttaactgctgcaggtttgcaaa

SEQ ID NO: 364931 - DNA, 201 bp, Homo sapiens
aagccgcggaccttcgcggtgagtgttacagctcttaaggatggtgtgtctggagtttgttccttcagatgtgtccagagtttcttccttttggtgggttygtggtctcgctgacttcaagaatgaagccgtggacgttcgtgatgagtgtcacagctcttaaaggtggtgtggacccaaagagtgagcaacagcaagatt

SEQ ID NO: 364932 - DNA, 201 bp, Homo sapiens
gagcagaaaccactttcatcttaaaacacagctcaggtcttagaataagtttgttttctgcttctttattcttctgctccattttactaagtttaccttgtttttttttttgtaaaaaactatataaaaagtattatagcagaaaaatggactatttcacaatgaatttgtcacattataattttatataatactgtattt

SEQ ID NO: 364933 - DNA, 201 bp, Homo sapiens
gcagacttacctaacaaagatgatatcaaaattagcagagagaatactttgtgaaagtatcaggactgtgcctaacacagaataggttatcaacaagaagttttttttttttttaatctccactatgattgacaactgcttttgattcaacaaacactaatacagtcaacacttctgcccaaaagttacatactaagacct

SEQ ID NO: 364934 - DNA, 201 bp, Homo sapiens
agaaatggtggtgcagcaagagagcaggaacctgaacattgccatcataaggccctccattgtgggagcaacttggcaggagcctttcccagtaagcccamttacctggattctgtgttttgcttccaaactaaggttcttctagtccaattactttctgatgtctttcttcttctcctcctcaggatttatagctaagtg

SEQ ID NO: 364935 - DNA, 201 bp, Homo sapiens
accaataaatttcatttagccatgctgacctcctgtccatcatcaactgggttaaacaagactgatcaacaccgagtgcttatgtcacaaaatgaagcaayagtcaatattgtctcaagccaaggaactttctgaaatgcattcgatttaaataaataacccgattacgagcctgaggaagtttatgaatgatgcaacagg

SEQ ID NO: 364936 - DNA, 201 bp, Homo sapiens
aggggacccaagtgggttgctgctgctggctggggtggcaagcttttcttcccttatttgtcccctcccatgtcctgctgattgatccattttacagagcrttgattggtccattttacagagtgctgattggtccattttacagagtgctgattgatgtgtttacaatcctttagctagacacagagcactgatttggtg

SEQ ID NO: 364937 - DNA, 201 bp, Homo sapiens
aaaatttcaaatgcaattcatggcatctcatgtgagacacacactcctggtctgctacatgaagaataaactaatgattttcatctggtggtcactgtaawattaatagtcctcagaaatagtggcctaaatggatgagattagttgtaaccattataacaataaaaaaaaaaaaagaaattggagtaaaattcattccca

SEQ ID NO: 364938 - DNA, 201 bp, Homo sapiens
ggacctagaaaggggagaagccatgttgtgcaactccagaggttggtataagaatttgaaaggcattgtctgatttcagaagccttttcctgtaaatgccrggcagcgtttcctactatccctgactggttagtgtaaaaacaacactcttcccctaagaaggtgcagagtcctcctttctcagcattgaggaggtctagg

SEQ ID NO: 364939 - DNA, 201 bp, Homo sapiens
aaactttacttttgttgaaaaccttgtaagtttgggatttcaattattctttgctattaataagacctcattcagcccatattaacttagaattggtataratggctccttcctgattctgtaagtactttaaggtttggctgagtgcaaacagctggcacgtttgagcagaccagttgttaggcaattttcctaaccctg

SEQ ID NO: 364940 - DNA, 201 bp, Homo sapiens
tgaagggagttcctccttggtctggtcagacctttgtatggtaattaagatttagatcccctgttaggaaacctgctgggttaaggatttttgttaggaargctatgggttgtcagtggcctcagtgctttcgggctatgcccttgtttacactgacaacaaggtggtactggagtaccacggagaagaccttcaattatc

SEQ ID NO: 364941 - DNA, 201 bp, Homo sapiens
tgtcagctatgtgaggcttggaaatttttttttaaaacatagtaaccaaaaatgttaccagttggcctttgattacaactacatcccccaggaaatgtgaycaaaaggacatctgttctatgtatcaaaattcagacatctgcttccttcttttccttttatggtatgcatagatatcacatctgacttccagtttccctg

SEQ ID NO: 364942 - DNA, 201 bp, Homo sapiens
tcagaaagttgctgatatacatcatgggaggaggaaagagcaaggacacttatatgtagcaggcttctcctgtgcctggaacattgggctaggtagttcasagattttatttccattcatagccacttgctgtgtacttaccctatgccaggttctttacatacattcccattaagcctcacaacaaagcaacaagccagg

SEQ ID NO: 364943 - DNA, 201 bp, Homo sapiens
ggacataaggtatttcactccatttaccttccctcttacagaaaagatcaagctgcaggatagtattgtaatttatacttccctcaggtgaccatttttcyccatcagagagagaatactggggccaggccatagtgcagaaaaaaatgtgttgcctctttttcagggtttgcgggtcaaattggtcccaatagcttagga

SEQ ID NO: 364944 - DNA, 201 bp, Homo sapiens
aagttcagttcatttttagttttgaaactgtttatcaaaattaaatagtttgacttatttttattagaaatatgattctaagtattcaacattgctttttwaaaaattatcatctagtttttcataaaatctgaggagctgctaggtaaatttcgcacaccaaatttcgtgtgttgaaatgtgaacatgctcaccacagac

SEQ ID NO: 364945 - DNA, 201 bp, Homo sapiens
catgcttgtaaatagtttcaagtggagagaggtctaagagaaattagggaaatatggtagaaatctgactattcagcaagaatgctgtggaaatgaaagaygcagaaaccaattggccaagttatatcaaatactctgagcacttcataaatacttgccagtcatatccaggaaaacacatatttatcttcagataatgtg

SEQ ID NO: 364946 - DNA, 201 bp, Homo sapiens
aggcaagggtcaggatagataggatagaagggcaagtctcacttgggcgatgtgactttgagagttccactcatggccacaaggtcaaccaacttgttgtygggaccccgaagctgaatggctttcctctctggtgaccctcggctcagcccagaagtacaggagatgtggaacctggttccaggcaaaccaacgcttcca

SEQ ID NO: 364947 - DNA, 201 bp, Homo sapiens
tttcatgactcctaagggcctgagctctttccaatacaccaatggttctcaacttcagggtatatcagaattactagagaccatgttcaaagaaaagatakatgcccaagcttggactaataactgttgaatgagaatcttcagggtcaggacataggtttgtttgtttgagcaacttcctgggcaaccctgctatatgcc

SEQ ID NO: 364948 - DNA, 201 bp, Homo sapiens
gaataaactaatgattttcatctggtggtcactgtaaaattaatagtcctcagaaatagtggcctaaatggatgagattagttgtaaccattataacaataaaaaaaaaaaaagaaattggagtaaaattcattcccagtaccaccactattttatgttcttaaaacttacattaagtgataatgttttaaaaagcatatg

SEQ ID NO: 364949 - DNA, 201 bp, Homo sapiens
ataggtttgtttgtttgagcaacttcctgggcaaccctgctatatgccgaaagttgacagccatactactacaccatgctgccttatggagttatagaaayggtcttcgctaaagcactaaaaacgtctagattaatcctttacatcttatgagagttactagtgaactagcaacaattttaacattttgtgaatttttgt

SEQ ID NO: 364950 - DNA, 201 bp, Homo sapiens
aataaactaatgattttcatctggtggtcactgtaaaattaatagtcctcagaaatagtggcctaaatggatgagattagttgtaaccattataacaataaaaaaaaaaaaagaaattggagtaaaattcattcccagtaccaccactattttatgttcttaaaacttacattaagtgataatgttttaaaaagcatatgc

SEQ ID NO: 364951 - DNA, 201 bp, Homo sapiens
atttttgaagagaaagactttttgaagagaaagacgtagtaaaatgattaaagatcaaagattctcatgattagaaaagattagattaccttcaatgagcyccaggaagtagagggcaaatctcctgtggatacttacaaaatgaggtcatgtggctaactagttcattgtaagagaccatgttaaaggcctctggattgt

SEQ ID NO: 364952 - DNA, 201 bp, Homo sapiens
cattctattgtagtaatagttctattactgatcttacaggaattaattttaattcaataagcaaaatttgagtcttttcaatgaatggcatactgtcaggsataaagagatgaataagaatcaaggagtttacaaagaaattttttaaaaagcctttaaaatagccacacataaaattaaatacctaggaattaacttgac

SEQ ID NO: 364953 - DNA, 201 bp, Homo sapiens
tttagaagacttgctttacttagatcttttaaaaaataatgggattagaaaataaaatgtaaaacaaatgtcactttccccctttttaaggggattatttkttctatctttgggaggaatgagagatttcttagagtgtggagatgctctgttttccgcagggcaccttacgtgcctataattgttatatttatgattctg

SEQ ID NO: 364954 - DNA, 201 bp, Homo sapiens
taagtaataatataaaaagaaaaatactattatgaataaaactctggataccagagtggacaattgagtctaacatattcccagagaagtatttgaagtaractaacacaaagaaatcttgccttgagaatctttacaatcttttacttaaacctttaataaagattcaaataaaatgttaagaaactttctaaatggttc

SEQ ID NO: 364955 - DNA, 201 bp, Homo sapiens
cctcaaaaaacaatagaaataccatatgggccaggtgtggtggctcatgcctgtaatcccagcactttgggaggctgagacgggtggatcactggaggtcrggagttcaagatcagcctggccaacgcagcgaaaccccatctctactaaaaatacaaaaattggccagacatggtggtgcatacttgtaatcccagctac

SEQ ID NO: 364956 - DNA, 201 bp, Homo sapiens
gagagatttcttagagtgtggagatgctctgttttccgcagggcaccttacgtgcctataattgttatatttatgattctggtgtttgtcaccagatttgrcccctttgatgctgagagctggtaaaacattttatttaaggcattttgactagcaattttaaaagaagttattagaacattgtgagaaagaatttgagag

SEQ ID NO: 364957 - DNA, 201 bp, Homo sapiens
gggccaggtgtggtggctcatgcctgtaatcccagcactttgggaggctgagacgggtggatcactggaggtcaggagttcaagatcagcctggccaacgyagcgaaaccccatctctactaaaaatacaaaaattggccagacatggtggtgcatacttgtaatcccagctactcaggaggctgaggcaagagaatcact

SEQ ID NO: 364958 - DNA, 201 bp, Homo sapiens
cgtgcctataattgttatatttatgattctggtgtttgtcaccagatttgacccctttgatgctgagagctggtaaaacattttatttaaggcattttgaytagcaattttaaaagaagttattagaacattgtgagaaagaatttgagagaaaatagaaacattacaatcaacatatctgaagcaaaacattgtcaatat

SEQ ID NO: 364959 - DNA, 201 bp, Homo sapiens
caccagatttgacccctttgatgctgagagctggtaaaacattttatttaaggcattttgactagcaattttaaaagaagttattagaacattgtgagaargaatttgagagaaaatagaaacattacaatcaacatatctgaagcaaaacattgtcaatatagataaataatggttcatcccctattcctgattcaatgg

SEQ ID NO: 364960 - DNA, 201 bp, Homo sapiens
acatcacacactggggcctatcgtggggtgggggtaggtggggagagatagcattaggagatatacctaatgtaaatgatgagttaatgggtgcagcacamcaacatggcacatgtatacatatgtaacaaacctgcatattgtgcacatgtaccctagaacttagagtataataaaaaaaaggaaaaaaaaaaaaagaag

SEQ ID NO: 364961 - DNA, 201 bp, Homo sapiens
gaattgggatgacattcatttgtggaagtccatatactgtgtcatattcttcatcttcagcacttttaatctctaaaacatagtgcagtatttagcaggtmatcaataatttttgttgttgggtaaatggctgatcgaatgaattaacaaaaggactggatactccatttctgatcaccatagagataaccaaattacgtt

SEQ ID NO: 364962 - DNA, 201 bp, Homo sapiens
acctggggagaatcgcttgaacctgggaggcagaggttgcaatgagccgagattgtgccgttgcactccagcctgggcaacaagagtgaaactccgtctcaaaaaaaaaaaaaaaagaactaatgaagaataagaattgctccaagatctggcagaaggtgacagtctcttgacttatttggctgagacacactttcttta

SEQ ID NO: 364963 - DNA, 201 bp, Homo sapiens
ccagtgtctgaatcaagtaatcagttgtaagctgtgattctactagtcaggtattatagaagggaccaccgttgatgggaataatatgggccattttctcyataaaatataaaactcttctatgactacttccaagaggagaaaagtggctgatgaaaaaagcaaacaaacaaaaaaaccttgcctttcaaagtagctggg

SEQ ID NO: 364964 - DNA, 201 bp, Homo sapiens
ctcttctatgactacttccaagaggagaaaagtggctgatgaaaaaagcaaacaaacaaaaaaaccttgcctttcaaagtagctgggctgaggagtatggrtattacagacttgggtgtttatctcatatttgcaatggaaaatcctctttaagagcaaccttgagacaattcaatagttcacaaaatcagtcaaggaaag

SEQ ID NO: 364965 - DNA, 201 bp, Homo sapiens
ataaactaatgattttcatctggtggtcactgtaaaattaatagtcctcagaaatagtggcctaaatggatgagattagttgtaaccattataacaataaaaaaaaaaaaagaaattggagtaaaattcattcccagtaccaccactattttatgttcttaaaacttacattaagtgataatgttttaaaaagcatatgcc

SEQ ID NO: 364966 - DNA, 201 bp, Homo sapiens
gccccaaggatgacttttatgggagagatacttggtctggggaatcttttctcttttcaaattgtatgtattttcctaagatcacatgtattattcattgtttatctatctatctatctatctatctatctatctatctatctatctatctattctctatctgtaaaatcgcctttgacttccattcatactcacaaaata

SEQ ID NO: 364967 - DNA, 201 bp, Homo sapiens
ccccaaggatgacttttatgggagagatacttggtctggggaatcttttctcttttcaaattgtatgtattttcctaagatcacatgtattattcattgtwtatctatctatctatctatctatctatctatctatctatctatctatctattctctatctgtaaaatcgcctttgacttccattcatactcacaaaatat

SEQ ID NO: 364968 - DNA, 201 bp, Homo sapiens
ccaaggatgacttttatgggagagatacttggtctggggaatcttttctcttttcaaattgtatgtattttcctaagatcacatgtattattcattgtttatctatctatctatctatctatctatctatctatctatctatctatctattctctatctgtaaaatcgcctttgacttccattcatactcacaaaatataa

SEQ ID NO: 364969 - DNA, 201 bp, Homo sapiens
aaggatgacttttatgggagagatacttggtctggggaatcttttctcttttcaaattgtatgtattttcctaagatcacatgtattattcattgtttatctatctatctatctatctatctatctatctatctatctatctatctattctctatctgtaaaatcgcctttgacttccattcatactcacaaaatataaaa

SEQ ID NO: 364970 - DNA, 201 bp, Homo sapiens
agagtataattggattgcttgtaactcaaaggataaatgcttgaagggatagataccccttctccatgatgtgcttatttcatatagcatacctgtataaraacatctcatgtaccccataaatatatatacctactatgtacccacagaaattaaagaaaaatagaaagagtttccctacaaaagaaaaaaagaatcaag

SEQ ID NO: 364971 - DNA, 201 bp, Homo sapiens
ggatgacttttatgggagagatacttggtctggggaatcttttctcttttcaaattgtatgtattttcctaagatcacatgtattattcattgtttatctatctatctatctatctatctatctatctatctatctatctatctattctctatctgtaaaatcgcctttgacttccattcatactcacaaaatataaaagc

SEQ ID NO: 364972 - DNA, 201 bp, Homo sapiens
aaagaggtgtaggcaaggtaaattgtcactgaattcttaaataccactcagagttcaagactgtacttcttttgaattacttccactctttcactgtgaamaattatatgggctggttcctaagaaccattgtaaaggccaatctagcatcttttttttttttttttttttttttttttttgagatggagtctcgccctgt

SEQ ID NO: 364973 - DNA, 201 bp, Homo sapiens
agtcagtgtttcccaattatggtacctggaccatcagatccacctgcagaggcggttaagaaatacaatttcctaggttacacacaaaactactgagccarggtctctgagggtggaataaagaaataatttttaaccaggttctttgatttttcatgcctacagtttgaaagctactgatgcgaagattgctctgggcag

SEQ ID NO: 364974 - DNA, 201 bp, Homo sapiens
atgacttttatgggagagatacttggtctggggaatcttttctcttttcaaattgtatgtattttcctaagatcacatgtattattcattgtttatctatctatctatctatctatctatctatctatctatctatctatctattctctatctgtaaaatcgcctttgacttccattcatactcacaaaatataaaagcct

SEQ ID NO: 364975 - DNA, 201 bp, Homo sapiens
tttttttttttgagatggagtctcgccctgtcgcccaggctggagtgcagtggcgcgatctcagctcactgcaacctccgcttcccaggttcaaatgattytcctgcctcaacctcccgagtagctgggattactggtgcccaccaccatgcccagctaatttttttctatttttagtagagacagggtttcaccatgttg

SEQ ID NO: 364976 - DNA, 201 bp, Homo sapiens
actcaataaccagtgtttatcttgttattatgcttagaatctttcaaatacatcttgtaacaattgagaaacagagagataaatttttagattagttttcctgacgttcacccgtagaattacacactaaaggttgaatgttttttcttttttaataaaagcacttattaaacacctcctttgagtcattaaggctaaaat

SEQ ID NO: 364977 - DNA, 201 bp, Homo sapiens
ctcaataaccagtgtttatcttgttattatgcttagaatctttcaaatacatcttgtaacaattgagaaacagagagataaatttttagattagttttcctgacgttcacccgtagaattacacactaaaggttgaatgttttttcttttttaataaaagcacttattaaacacctcctttgagtcattaaggctaaaata

SEQ ID NO: 364978 - DNA, 201 bp, Homo sapiens
ccttactgaccttctgtatattagtgaaactcagtcttttttgtgtttgtttgtttttacagtcgagtctggctctatcagccaggttgcagtgcagtggygcagtctcgactcactgcagtctctgcctcctgggttcaagccattctcccacctcatactcctgagtagctgggaccacaggtgcccgccaccatgcct

SEQ ID NO: 364979 - DNA, 201 bp, Homo sapiens
cccaagtagttgggattacgggtgcctgccaccacgctcggctaatatttttgtatttttagtagagacggagtttcatcatgttggccaggctggtctcwaactcctgacctcaggtgatccacccgccttggcctcccaaagtgctgggattacaggcgtgagccactgtgcctggccattaaattcttcatcttttat

SEQ ID NO: 364980 - DNA, 201 bp, Homo sapiens
ttctactaaaaatacaaaattagtcaggcatggtggcgcacgcctgtaatcccagctactcaggaggctgagacaagagaatcacttgaacccgggaagcrgaggttgtggtgagccaagattgcgccactgcacaccagcctgggcaacaagagcaaaattccatcttcaaaaaataagtaagtaaataaataaataaat

SEQ ID NO: 364981 - DNA, 201 bp, Homo sapiens
atttgccctaattgctttcattatttatgtaggatagtacctgagcacaagtttctagcccttcttgttagaattatacagcttagttctttatttattatttatttatttatttatttatttatttatttatttatttatttattttgagacggagtctcgctctgtcgcccaggctggagtgcagtggcgcaatctcgg

SEQ ID NO: 364982 - DNA, 201 bp, Homo sapiens
catgagttgccgtgcccagccaaaaatgtctttatcttgagcagaagaaaaacacggagacttaaggttttgggggcctttttgtttttcattttcttcamgtgcagaaacccagcaatgttcttcctgtagttactcagttttgacattctttgcagttaggtcaacaatgcttgtttttaaaagcattttaatgcaaga

SEQ ID NO: 364983 - DNA, 201 bp, Homo sapiens
gttagccaggatggtctcgatctcctgacctcatgatccacccgcctcggcctcccaaagtgctgggattacaggcgtgagccaccgcgcccggccttttwacgtaatttttatcagtggacaccttactgaattatagtacatttcagtttttttaaaaagctgcttctgttttccatgtatgcaattatataatccgac

SEQ ID NO: 364984 - DNA, 201 bp, Homo sapiens
agttactcagttttgacattctttgcagttaggtcaacaatgcttgtttttaaaagcattttaatgcaagaaagagtgtattctaaagcctgtcttccccrctgagtatggcaagctgagcttcaatttgcagttcacctgttgtttgataattgatatatttctgagttatggtctccttttaattcttctaaggataaa

SEQ ID NO: 364985 - DNA, 201 bp, Homo sapiens
tgatataaggacaaggtccaatttagtccataagaggtcataaaacaccacaaaaccattcatgattcctgctaagaaaaacaatcctggcaaaattctawtttttgcacagtcaaataaagtacagaaaatggccaatgctttgccattatcttttgagatcttaataatactgaattagatagttctattggctgggat

SEQ ID NO: 364986 - DNA, 201 bp, Homo sapiens
ggaaaccatgatgagcaaaagcagatagatgaattaaaactcctgccctcatggagtttaaagtccagtaagagaataatcataatcaattgtatcatacrgataagcataacattacaactgtggtaagtggtcacaaaaaaagagtatatggaaagggcttaaatgacagattagacagaatactgaaggtcagggaaa

SEQ ID NO: 364987 - DNA, 201 bp, Homo sapiens
gaacctagttttgggtaactctaaacccctgagttctttaaacagtatctgtatatttgcagatttctatacagcaaataatatttgttatattatatatraacatatgacaagtgatatttgttatatgtttacaaagtagctcaacattccataaaacattgcatttgtgcatgaaataccaacatcaactaatttgtc

SEQ ID NO: 364988 - DNA, 201 bp, Homo sapiens
actatttcacaatgaatttgtcacattataattttatataatactgtatttatatttaatatatactctttaaaaagttttagctaaatcaagagttcatkaccttcagggcaaacatttttatctcctccagctctgagaatagatatttttgtctgtcatgtaaaaatatccaggacaaagaagaatgaaagtcatcta

SEQ ID NO: 364989 - DNA, 201 bp, Homo sapiens
ttgatacatgcaagagggaaaggatagttaatcatgtagctctctgagaagactggagagaatggaattcaaatgtaagtgggggcataagccttctataygaagaggaacagcttttccctctgttgaaaatgatgcgtgcagatactagtatatttatttgtatgcttcattcatttggcaaacataatgtacacctac

SEQ ID NO: 364990 - DNA, 201 bp, Homo sapiens
gtttaaagcctcagagcattttcaggatggaattggtttctgtcagttaccctcttatggtgttgtctcttggtaaatgtgatgttttcatatttgatatrtccaggagaggggcagaccccttttgattccagactgtttcctgggactttctccactgctgatctctctaacacctgacaggtcatagtgcaatttgag

SEQ ID NO: 364991 - DNA, 201 bp, Homo sapiens
tgttgtgatcaccatacttattctctgaccttattcagtgctccagtctcttgcccctgttcattttctctcaatctatcagtcccctcttggcttcaatwccatttctaactggcccaggtgacataatttttaatcattctcctaaaccattttcttaaaccatacactccattttcttgctaccgtccctattttacc

SEQ ID NO: 364992 - DNA, 201 bp, Homo sapiens
atcagcacctgtgtacttatcttaagcagaaaccaggaagtcatccctcttcagcctcaccttctacatccagtagtcacaaagtcctgatgtttttgccktcttcttattaaatttctgtcccttctttcacccttttcacagctatattttgattcaggctctctatatttctctgttaaattactacacatagtctgt

SEQ ID NO: 364993 - DNA, 201 bp, Homo sapiens
tcagcacctgtgtacttatcttaagcagaaaccaggaagtcatccctcttcagcctcaccttctacatccagtagtcacaaagtcctgatgtttttgcctycttcttattaaatttctgtcccttctttcacccttttcacagctatattttgattcaggctctctatatttctctgttaaattactacacatagtctgtt

SEQ ID NO: 364994 - DNA, 201 bp, Homo sapiens
tatcttggagagtgtatgtttctctctttgaatgtgaactgaacaataaaaacaacacttatgtatgtttactatgtgccaagtttgatctaagtgttgtrcttgtattgactcattttgtcctcatagcaaccgttatttccattttacaaagcagagatcacatccttcttattcactatcaccccttgctggctacat

SEQ ID NO: 364995 - DNA, 201 bp, Homo sapiens
tgaaatttctgaaattctgttttttctttactcattttgatttcatctatttttcttactttaatctctcacattagcaacaaacacaccaaaaagaaaawtttttttagaagagctggtgcttatccaggttccatttgcaccatttcatcttgtcccttcagtcttgtcattattataaaaatagaaggtctgctataa

SEQ ID NO: 364996 - DNA, 201 bp, Homo sapiens
gtgataatgtctgtttcatagggttctttcaattcctaaattagaaaatgtatatgatatcatatagttatttttaaatgtaatttattacctcagtaagwcataattctctgccctattctaattttatttcatgtggataattcatagataattttaaatctatgtcagttttttactacaaaaggcagcatatggtta

SEQ ID NO: 364997 - DNA, 201 bp, Homo sapiens
atattgttaaaatgtccatactaccatccaaagcagtgtacagattcagtgcaatccttatcaaaatatcagtaacattattcatagaaatagaaaaaaacaatcctaaaatttatatggaaccgcaaaagactgagaatagccaaagctaacctgagcaaaaaagaataaaactggaggaatcacattacttgacttcaa

SEQ ID NO: 364998 - DNA, 201 bp, Homo sapiens
ttaacataaaaatatagttattattgaaagcataattttggttaggagagagttccaactcaaaaatctcctttgagaactaacctaaagaatgctttggrtgttgaaatattcccattttgtttgaatgtagtagacacatttctattaaaagtagcatcatatttgcctgaaaatcaatgaaaaatgattttcttcttt

SEQ ID NO: 364999 - DNA, 201 bp, Homo sapiens
gcccattcaacaaataattatcctgcccccatcctacgcgccaacctctcaacctccccctgccccatagacagaaggaaaaactgatgttcacatatgayacgagatttttccatgatgttctgggcttagcattagtctatatttcagacagtgctattaaacagcaacatcatgtgaggcgtaaatgcaagccacctg

SEQ ID NO: 365000 - DNA, 201 bp, Homo sapiens
catactaccatccaaagcagtgtacagattcagtgcaatccttatcaaaatatcagtaacattattcatagaaatagaaaaaaacaatcctaaaatttatwtggaaccgcaaaagactgagaatagccaaagctaacctgagcaaaaaagaataaaactggaggaatcacattacttgacttcaaattatactacaaagct

SEQ ID NO: 365001 - DNA, 201 bp, Homo sapiens
agtgcaggacttcagctgactccgtctactgttcctgtcactgtgtcatagagacaggagattggtctgatagactgttttacagaaagccaaatccatgytcatcattattttgtctcctctgatcttttaaggagttgcaaattgcaaataatcgcttgagattattttgtgttctctgatctttaaggagttgcgaat

SEQ ID NO: 365002 - DNA, 201 bp, Homo sapiens
aaaatttatatggaaccgcaaaagactgagaatagccaaagctaacctgagcaaaaaagaataaaactggaggaatcacattacttgacttcaaattataytacaaagctatggtaaccaaaatagcatggtaccagcataaaaacagacacacagaccaatagaacagaatagagaactcagaaaaaaatccacacacct

SEQ ID NO: 365003 - DNA, 201 bp, Homo sapiens
atttatttatttattttgagacggagtctcgctctgtcgcccaggctggagtgcagtggcgcaatctcggctcactgtaagctccgcctcccgggttcacrccattctcctgcctcagccttccaagtagctgggactacaggcgcccgccaccacaaccggctaattttttgtatttttagtagagacggggtttcaccg

SEQ ID NO: 365004 - DNA, 201 bp, Homo sapiens
ttacctttagttaaacaaattaaaatagcaataaaggaagagtagtttacctagctaacttgtttactcatataatcttaagactaacctttgatgtaccrtgggtgcttaagtgcgttttactcaggaagcccacaatgtcaattaccctctaatggtgttgactcaagcttttgttaattaatcttactgaataaatgt

SEQ ID NO: 365005 - DNA, 201 bp, Homo sapiens
caaagctatggtaaccaaaatagcatggtaccagcataaaaacagacacacagaccaatagaacagaatagagaactcagaaaaaaatccacacacctacwgtgaactcttttgacaaaggtgccaagaatatacactgcagaaaagacagcctcttcaataaatggtgttgggaaaacgatatccagatacagcagaatg

SEQ ID NO: 365006 - DNA, 201 bp, Homo sapiens
acggggtttcaccgtgttagccaggatggtctcgatctcctggcctcgtgatccgcccacctcggcctcccaaagtgctgggattacaggtgtgagccacygcgcccggcccggcttagttcttataactgttcttggtagtagtatttgcgtaatttttcttgctgaaacttccataaacattcctgtatttcctccagc

SEQ ID NO: 365007 - DNA, 201 bp, Homo sapiens
aatgcctattgatgttctttgcctatttttctattgaaacatttttttcttattaagacttcttgaaagtttcagcacagtaattcttaattttttttttkttgttgagacagtttcgttcttgttgcccaagttggagtgcaatggcaggatcttggctcactgcaacctccgcctcctgggttcaagcgattctcctgc

SEQ ID NO: 365008 - DNA, 201 bp, Homo sapiens
tgactttcaattgaaataaccctgaagtaagaagcgtatatatatataattttttatttggatttcagatacaaaccttttaatttttaagtctttaaacmcagcaaaccatagattttaaagtatattgagcctgtacatgtcaggtttagatcatgagaaagaggcaatcatgtcatcttgtctgaaaagatttaaggg

SEQ ID NO: 365009 - DNA, 201 bp, Homo sapiens
cagcatttagaggttgagcagaggaggagccagcagaggtgatttcacttctctgctagagttcaagattcatagtagttttatttttaattaattaattwatttatttatttattgagacggagtttccctcttgttgcccatgctggagtgcagtggtgcaatctcagctcactgaaatctccgactcccgggttagag

SEQ ID NO: 365010 - DNA, 201 bp, Homo sapiens
tgtgaggttgaaaaaagttatataaaacacttattgcagtgctagggagtgtttaacagcacttaatcaaataattcataaaaaagaactagaggctgggsgtggtggctcacgcctgtaatcccagcactttgggaggctgaggcgggtggatcacctgagtccaagagttcaagaccagcctaaaatacaaaaattagc

SEQ ID NO: 365011 - DNA, 201 bp, Homo sapiens
gaaataaccctgaagtaagaagcgtatatatatataattttttatttggatttcagatacaaaccttttaatttttaagtctttaaacacagcaaaccatrgattttaaagtatattgagcctgtacatgtcaggtttagatcatgagaaagaggcaatcatgtcatcttgtctgaaaagatttaagggaatgatttattc

SEQ ID NO: 365012 - DNA, 201 bp, Homo sapiens
ctacagtgctttccatacctagctgaaaaggacctgtagaaaatctgcagacacatttatgatcagggacttctttcccttcctaaccaaaatagaaaacmaagtctcagataaacaggccagatctccaagtcttgcgcatttctccagtcctgtctgcatttcccccatctctaccctgagccaggctcctaccagccc

SEQ ID NO: 365013 - DNA, 201 bp, Homo sapiens
cacttgaggcatgaagtgagcgtgcgtacaactccaataactggtaacaacactcccttaccaggggcgtattcctgtaaggtcatatacccgtaaaatcrgccgctttacctcttagtgcgcatgctcaagcccacttgcccaactccagagatcttatctggaagctaatcaccagtttcaggtttttctacttattgg

SEQ ID NO: 365014 - DNA, 201 bp, Homo sapiens
tattggctcattttgttttatcaaagagcttaaatgcagttgtgaatattcctgtttacccttatgataatttagaatgagtataattattgccattttcrcaagtacaattggaactaggtaatttatattcctgtttactcttatgagaatttagaatcagtataattattgccattttcacaagtacaattggaatga

SEQ ID NO: 365015 - DNA, 201 bp, Homo sapiens
gaggtcgattaattgagcatcagcttttataacagttcatgaagcacaggagtctggttggcataaataaaaatgaaagggaaatggaaagcaagagactcaaaacaaatgcttcggtttctttagtgacaatttttgtatttatatacaaatgtgtaattatcatccacaccgtacatattaagagatgtctttttcatt

SEQ ID NO: 365016 - DNA, 201 bp, Homo sapiens
tgctttggcttcccaaagtgctgagattacaggcatatgccaccatgcccagccagatgtcttctttaagtaatgttattacaactaaaaccagtttttgwgtataattaagcaggttgttataaacaagaacaatgtgataatgatggtgctattttttgtatattgatctatatttatgtttcagctatttgagaaagt

SEQ ID NO: 365017 - DNA, 201 bp, Homo sapiens
gaaaagtggaaacattatagtcgatgcccatgttctacctcaggatcaaatgaggcattaaaattgaaagttgtgattctgaataagtcttaacatcatgyacatcttagctgctcaaaaatttgtcatgtcagcaaagtggtaacagtgaagattttctacaatcaaaatagtatagttctgttctgttctataaaatag

SEQ ID NO: 365018 - DNA, 201 bp, Homo sapiens
tttgctaattcagaattaattaggacatccaggaccacctatccagcctcatctctctcagtcctccccttactttcatgctgcagtcacaaagaagtaargccttccctcctcatactctgcctgcctttgcactcgaaactgtttgtccctagagcttagttccccttctgcttcacttggttaattcttactcagata

SEQ ID NO: 365019 - DNA, 201 bp, Homo sapiens
accctagaggtgatgtgtccttcttatcatatcatatcaggggtttttgataggtagccacatgccattactggagatgttaaccttcatcacttagttcmggtagtgcttgcttaatttctcccctataaagttactatttttccttcttcatattttatgctttagaagcagagcactaagtctacccaaccttcaagg

SEQ ID NO: 365020 - DNA, 201 bp, Homo sapiens
aggtcgattaattgagcatcagcttttataacagttcatgaagcacaggagtctggttggcataaataaaaatgaaagggaaatggaaagcaagagactcaaaacaaatgcttcggtttctttagtgacaatttttgtatttatatacaaatgtgtaattatcatccacaccgtacatattaagagatgtctttttcattt

SEQ ID NO: 365021 - DNA, 201 bp, Homo sapiens
cgactgttggaatttccagggcatgttgaaaatacagattatcagactcttaactctgcagatgtatttagtgattctaaaatggtacccaggaatctggmtttttcccaggggccctgtgtaattcatatttatgagcaggcaagtttgggaaagactaccttaaggaggtttttcactgagcagtcttcatttgaaatg

SEQ ID NO: 365022 - DNA, 201 bp, Homo sapiens
cagatgttatatgctggtatgggtcctaccatttagtagactccactacttactagttgtatcaacttgaaaaagtcactcagtttctccctgtagatcttttttttttttttttatctgtcaatgagaataataattattctattccagggagctcttgggaggatttaatgagataaagtgcttagcacagtgattaga

SEQ ID NO: 365023 - DNA, 201 bp, Homo sapiens
tccagcctcatctctctcagtcctccccttactttcatgctgcagtcacaaagaagtaaagccttccctcctcatactctgcctgcctttgcactcgaaaytgtttgtccctagagcttagttccccttctgcttcacttggttaattcttactcagatatcaaggctccccagcgaagctctctggcttaggcacccttc

SEQ ID NO: 365024 - DNA, 201 bp, Homo sapiens
gcgcagctttggaggggaggatacagacatcaaaagttctgtttttatcttgctaagtttgagaagctctttagacaaggtgacaagtcaaatgagcgggmacacctaggagtgtggagctcctgcgaggagtctggactagagatataaattatagtgttatcagcatacagatggtaattgaagccagggggctagatg

SEQ ID NO: 365025 - DNA, 201 bp, Homo sapiens
ggtcgattaattgagcatcagcttttataacagttcatgaagcacaggagtctggttggcataaataaaaatgaaagggaaatggaaagcaagagactcaaaacaaatgcttcggtttctttagtgacaatttttgtatttatatacaaatgtgtaattatcatccacaccgtacatattaagagatgtctttttcatttg

SEQ ID NO: 365026 - DNA, 201 bp, Homo sapiens
gctgcagtcacaaagaagtaaagccttccctcctcatactctgcctgcctttgcactcgaaactgtttgtccctagagcttagttccccttctgcttcacytggttaattcttactcagatatcaaggctccccagcgaagctctctggcttaggcacccttcccaagtgctcccatagtacccagtgttcagctgtatta

SEQ ID NO: 365027 - DNA, 201 bp, Homo sapiens
gtcgattaattgagcatcagcttttataacagttcatgaagcacaggagtctggttggcataaataaaaatgaaagggaaatggaaagcaagagactcaaaacaaatgcttcggtttctttagtgacaatttttgtatttatatacaaatgtgtaattatcatccacaccgtacatattaagagatgtctttttcatttgt

SEQ ID NO: 365028 - DNA, 201 bp, Homo sapiens
cttgctcctctttgcatctccagctagggactcaatgctcactgaatgaatgaaaagcttttggtggcatagacgattattgttcatactgttttgactgyttttgtttgtttgttttgactgaagcaagaatagatgacagaattctgtaacaagctgatattttgggatgcagaagtcttatgtataaaatatctatcc

SEQ ID NO: 365029 - DNA, 201 bp, Homo sapiens
tcgattaattgagcatcagcttttataacagttcatgaagcacaggagtctggttggcataaataaaaatgaaagggaaatggaaagcaagagactcaaaacaaatgcttcggtttctttagtgacaatttttgtatttatatacaaatgtgtaattatcatccacaccgtacatattaagagatgtctttttcatttgtt

SEQ ID NO: 365030 - DNA, 201 bp, Homo sapiens
cagaattctgtaacaagctgatattttgggatgcagaagtcttatgtataaaatatctatccatatccccacatcttacccttgtttctggttgttcattyttttcttcttaaactttgaatgaaacctgtatgttaacttttgaatagcactttaaataaaacccagcaacccctcaccaactataccatgatctacgac

SEQ ID NO: 365031 - DNA, 201 bp, Homo sapiens
tggtgttctttctataggtttgggcaaatgtttaataacatgtttccaccattatagtatcttacagagctgtttcactgccctaaaaatcctctgtgctscatctatccattcctccctctccctaaaccctagcaaccactgatcatttttactgcctcgatagttctgccttttacagagtgtcatgtaagtggaatc

SEQ ID NO: 365032 - DNA, 201 bp, Homo sapiens
tactttactaataactgaggcatattattttaattgttctgattgtaatatacaggcaggatgaaattattctttgagaattttttatcagaaaaacagargtaatgtgctatcagttactatttaggagttttatttttgaagtctttgagcatcaaggacttttctttagttaccacaagatgggggtatttcctcctt

SEQ ID NO: 365033 - DNA, 201 bp, Homo sapiens
ttcctccagagcagaatactctgcactgatctctagcagaatactcaggcaaaatattgcaatcataaactgtccacacctcccaccaaattgccaattcyttaaagacagggaatatatcatatatattattattatttttttacctcagcacctaccacaatgcctagcaagtgttaaatgctaaataaatgtatttgt

SEQ ID NO: 365034 - DNA, 201 bp, Homo sapiens
aggctgatagattttgttgaattgtgtgtgggttgttaaagagaagaatcaaggatgaccccaaagtttttggctgaactactaaaaaaactgaattaccrtttggttagaggtagaagattagtgaagaagcaagtttgtgtatgcattgggaagggggtggttggtagtgggagtatcaggaggccaattttagagctg

SEQ ID NO: 365035 - DNA, 201 bp, Homo sapiens
tggtttataatatatgttccagtttgtgaattgtcttttcacttccttttttgtgtgtttttgaagcacagaagttcttactattaatgtagctgaagttrctgaatattttctctttgttttcaggtatttgtatcttgcttaaggagatgattccctatctgcttcacattttaagtaattagtatgtaaacctctcct

SEQ ID NO: 365036 - DNA, 201 bp, Homo sapiens
gtcataaacagattaacgatgactcatactgttggtttataatatatgttccagtttgtgaattgtcttttcacttccttttttgtgtgtttttgaagcayagaagttcttactattaatgtagctgaagttactgaatattttctctttgttttcaggtatttgtatcttgcttaaggagatgattccctatctgcttca

SEQ ID NO: 365037 - DNA, 201 bp, Homo sapiens
gcagagagatgttaaagaagcaggaaaaacaaaactaaactaaagatgtatctttcctgtgtcttttaaatcacagggacacagtagcaagctggacaccytagcagtaaaagcagtatgagtggagttccttacagaactatttacttgctgttgcctggtgtcataaacagattaacgatgactcatactgttggttta

SEQ ID NO: 365038 - DNA, 201 bp, Homo sapiens
agatcagagctatttatgcagatctcaatcagaatgactttgccatcagcaaagaggacatgcaggagcttctctcctgtacaaacataatatttcactgkgcagccactgtacgctttgacgacactctcaggtacattcccatttccctctcatggcttgtatacatatgtgtgcatgtaaatttcttcatagtttctg

SEQ ID NO: 365039 - DNA, 201 bp, Homo sapiens
cctataaaaatgcacaattatgtgtcaataaaaacaaaacaaaataataggaaatcttcttttgtagaataaatctgccaattaagagacatggctagtakaaacagatgcgcttttgttactaaactttaatattcggcaagaattaccctcaaccatttgaagcagcaaattacaccctaagccaaagaaggggaacca

SEQ ID NO: 365040 - DNA, 201 bp, Homo sapiens
caaaccatatcatgagcatgaggggtaggaaattatcctctgctctctgcattagtagtctgagaaaatatgaaaggaggccatgacccagtgagctgttstaaagtagaagggggaccttctagagttgcatatgtgctattattgactgtaaaactattttagtttaaaaaataattaatgtaattattttattgagtt

SEQ ID NO: 365041 - DNA, 201 bp, Homo sapiens
taatatattctgagttacattttacaagaatcactccggctgccacatggaggtcagactgtaggagtacaagggtagtggcagagaccatttaggacagwactgcaacactccaggctacagtagtggtttggatcagagacacagaaggtggaaattatgattctgggtatttttcaaacagaaggctgatagattttg

SEQ ID NO: 365042 - DNA, 201 bp, Homo sapiens
cagctttggaggggaggatacagacatcaaaagttctgtttttatcttgctaagtttgagaagctctttagacaaggtgacaagtcaaatgagcgggcacrcctaggagtgtggagctcctgcgaggagtctggactagagatataaattatagtgttatcagcatacagatggtaattgaagccagggggctagatggga

SEQ ID NO: 365043 - DNA, 201 bp, Homo sapiens
aatatattctgagttacattttacaagaatcactccggctgccacatggaggtcagactgtaggagtacaagggtagtggcagagaccatttaggacagtwctgcaacactccaggctacagtagtggtttggatcagagacacagaaggtggaaattatgattctgggtatttttcaaacagaaggctgatagattttgt

SEQ ID NO: 365044 - DNA, 201 bp, Homo sapiens
acacctaggagtgtggagctcctgcgaggagtctggactagagatataaattatagtgttatcagcatacagatggtaattgaagccagggggctagatgkgataacccagggagaaggcaagagtgatgacagaaaaaaaaaaaaggatcagcactgagtcccaagacaagacacttcagcatttagaggttgagcagag

SEQ ID NO: 365045 - DNA, 201 bp, Homo sapiens
atctttaggattctccatatggcagatgttgtgaaccaactttcccaatttacgtggttacctactggtgaaatcagtatttgaacctagttttgggtaaytctaaacccctgagttctttaaacagtatctgtatatttgcagatttctatacagcaaataatatttgttatattatatataaacatatgacaagtgata

SEQ ID NO: 365046 - DNA, 201 bp, Homo sapiens
tgtttaataacatgtttccaccattatagtatcttacagagctgtttcactgccctaaaaatcctctgtgctccatctatccattcctccctctccctaamccctagcaaccactgatcatttttactgcctcgatagttctgccttttacagagtgtcatgtaagtggaatcagacagtatgtagccttttcagaatggc

SEQ ID NO: 365047 - DNA, 201 bp, Homo sapiens
atgaaagggaaatggaaagcaagagactcaaaacaaatgcttcggtttctttagtgacaatttttgtatttatatacaaatgtgtaattatcatccacacygtacatattaagagatgtctttttcatttgttaacaacgtgattaagattcttaaatttttagctagcaacttttctaccctagcatttatagcagaggg

SEQ ID NO: 365048 - DNA, 201 bp, Homo sapiens
acaacttagccaatgtagagtttatctaaatttttaaagacctcatttggagctcataactcagttcttgagcaaggtgaaaaggaaacattgtgattatrgggaaaatatttgtatggggcttattaaataaagacaggaaaagaagaaaacccaaatattgtaggcagaaatgctaaaggttttaaaatatatcaggat

SEQ ID NO: 365049 - DNA, 201 bp, Homo sapiens
atttatttaaaactgtttattttttattgttttttattctcatatatttaaggagtgccagtgcactcctttcaagtattacatggatatattgcatagcrgtgaggtctgggcttttagtgtaactatcactcaaataatgtacattttatccgttaagtaatttctcatcccttaccttcccctcgtccttctgagtcc

SEQ ID NO: 365050 - DNA, 201 bp, Homo sapiens
aaggagtctggtattaaatgcctaacagaacaagctcctttagatccagcccttttctttttctgttgaatgaatagagagttaatgtggaaggagaaaaaagaagaagaattttaatgaggagtggtagacagggataatttttgtattttcttaaaaataatttctcatacatccctgtagagtgacagggaagtggtg

SEQ ID NO: 365051 - DNA, 201 bp, Homo sapiens
ctctctccatgtgagacactggctctccttcaccttccaccatgcttgtaaaattcctgaggcttcctcagaagcagatgctggcactatgcttcctgttyggcctgcaaaaccgtgagccaaataaacctcttttctttgtaaattacccagtctcgggtatcactttatagcaatgcaaactaacacacaggacattcc

SEQ ID NO: 365052 - DNA, 201 bp, Homo sapiens
atggaagggttaggctgaaaagatgtctgcagtcaaacatcaaaaaatggagtcagactctattgcacagggtgttcagattagcaagaaaaagattgttyagttaacatggaattgaagcaaagtatggtgacccctcttgaaatggtccatactatgaatggttaagtctaagtggcatctctgtctcacaacaatgta

SEQ ID NO: 365053 - DNA, 201 bp, Homo sapiens
aggagtctggtattaaatgcctaacagaacaagctcctttagatccagcccttttctttttctgttgaatgaatagagagttaatgtggaaggagaaaaaagaagaagaattttaatgaggagtggtagacagggataatttttgtattttcttaaaaataatttctcatacatccctgtagagtgacagggaagtggtgc

SEQ ID NO: 365054 - DNA, 201 bp, Homo sapiens
actaaaaatacaaaaaaattagccgggcgtggtggcgggcgcctgtagtcccagctactcgggaggctgaggcaggagaatggcgtgaacctgggaggcgsagcttgcagtgagccgagattgcgccaccacactccagcctgggagagagagtgagattccatctcaaaaaaaaaaaaaaaaaaaaaaaagaaaattatg

SEQ ID NO: 365055 - DNA, 201 bp, Homo sapiens
agatgtctgcagtcaaacatcaaaaaatggagtcagactctattgcacagggtgttcagattagcaagaaaaagattgtttagttaacatggaattgaagmaaagtatggtgacccctcttgaaatggtccatactatgaatggttaagtctaagtggcatctctgtctcacaacaatgtaagcctttttggattccagca

SEQ ID NO: 365056 - DNA, 201 bp, Homo sapiens
ggagtctggtattaaatgcctaacagaacaagctcctttagatccagcccttttctttttctgttgaatgaatagagagttaatgtggaaggagaaaaaagaagaagaattttaatgaggagtggtagacagggataatttttgtattttcttaaaaataatttctcatacatccctgtagagtgacagggaagtggtgcg

SEQ ID NO: 365057 - DNA, 201 bp, Homo sapiens
tacacacttttaaacaaccggatctcagaataactcactcattcactatcacgggaacagcaccaaggagatggtgctaacccattcatgagaacttcacycccatgatcccatcacctcccaccaggccccacctccaacaatggagattataattcaacatgagatttggtggagacacagatccaaaccatatcaagc

SEQ ID NO: 365058 - DNA, 201 bp, Homo sapiens
taggaaagagaagccctataaattcttgctatttacttctgtttatacatttttcttcaaaacattatttgatgttggagatgtcaatacattttctgacrcagtccttcttgcactttaaactgggtgtcaatacatcttttttggtaatttcttcaggttagtaaatctcatctgttatgggtagaataagactatttt

SEQ ID NO: 365059 - DNA, 201 bp, Homo sapiens
attttgtcaccaccaggcctgccctaaaagagctcctgaaggaagcactaaacatggaaaggaacaactgataccagccactgcaaaaacatgccaaattrtaaggatcatcaaggctaggaagaaactgcatcaactaacgagcaaaataaccagctaacatcatgatgacaggctcaaattcacacataacaatactaa

SEQ ID NO: 365060 - DNA, 201 bp, Homo sapiens
gaggcagaagaatcacttgaacccgggatgcggaggctgcagtgagccaagattgtgccactgtactgggtgtgacagagtgagactccgtcttaaaaacaaaaaaaaaaactatatcattcttataagtgggagagtcatttactactttcatgcctatagtgtgtgtgtgtatgtgtgtgtgtgtgcatatatatatat

SEQ ID NO: 365061 - DNA, 201 bp, Homo sapiens
ccatgtcaccatttaaaaggataaaaatgtatatattgtggaatattggtaacagcagagaaaattcctagtaataattatgtgatgcataaagagtaaartagtaaagatgagatcaattctgaaggactgtggctgatggtcctatatctatgctgagaacaaaagaatatactcaaagagaaatagaaaatattcaga

SEQ ID NO: 365062 - DNA, 201 bp, Homo sapiens
cagaaccaaatgttttaataatgccacaaatgtttcaataaatgcctatgaaccaggtgattcttgagactcttctttgtataggatttatattttcagayagattttagctggtatttttttaaggagggcaataatcatattaccataataagtgatatcatcataattgaataatgagcttaggcatatgctttgaaa

SEQ ID NO: 365063 - DNA, 201 bp, Homo sapiens
gacaggctcaaattcacacataacaatactaaccttaaatgtaaatgggctaaatgctccaattaaaaggcacagactggcaaattggataaagagtcaasaaccatcagtgtgctgtattcaggaaacccatctcatgtgcagagacacacataggctcaaaataaagggatggaggaagatctaccaagcaaatggaaa

SEQ ID NO: 365064 - DNA, 201 bp, Homo sapiens
tggttgttgccctttagggctttggtcacacacagttcatggagttgatggggattggggatcttgggttcattgactctgggaatctcttattgctctcatgtgtacagcagatgctgcaatgagataaggatctatgtcattttaagcctgattcagaaagggaaacttctacaaaattttacatgtgagcgcccactg

SEQ ID NO: 365065 - DNA, 201 bp, Homo sapiens
atctttgctattatgaatagttttgtgataaacatacaagtgcaggtgcctttttttatagaatgacttcttttcttttgggtagatactcggtagtggaytgctggatttctatgtttagttatttgagaaatctgcctactgttttccatagaggttgtactaatttacatttccatcaacagtatataagcattctct

SEQ ID NO: 365066 - DNA, 201 bp, Homo sapiens
accttacctcatgtgatgggtcacagtcaaaagacattcaaaactgtttcatacataaaattatttaaaatattatgtaagattaccttcaggctctgtgkatatggctaagtgtgtatgaaacagaaatgaattttgtgtttagacatgggtcccatccccaagatagctcattacatatatgcaaatattccaaaatct

SEQ ID NO: 365067 - DNA, 201 bp, Homo sapiens
atgaacattgatgcaaaaatcctcaataaaatactggcaaaccaaatccagcaacacatcaaaaagcttatccaccatgatcaagtgggcttcatccctgrgatgcaaggctggttcaacatatgaaaatcaataaacgtaatcctgcatataaactgaaccaaagacataaaccacatgattagctcaatagacggagaa

SEQ ID NO: 365068 - DNA, 201 bp, Homo sapiens
ggttgttgccctttagggctttggtcacacacagttcatggagttgatggggattggggatcttgggttcattgactctgggaatctcttattgctctcatgtgtacagcagatgctgcaatgagataaggatctatgtcattttaagcctgattcagaaagggaaacttctacaaaattttacatgtgagcgcccactga

SEQ ID NO: 365069 - DNA, 201 bp, Homo sapiens
aaataaagacaacagatgacaccttctactttctttattttcaaggttgtactatctctaagtaaaaagaggtaataattgtaaaaaatgtctacttgctktgaatagttcttttctaaaaaatatgctgttgttgaagggttaaactttgccctccatttttcagaagtagcttgaggaaggttgattgagcacactgaa

SEQ ID NO: 365070 - DNA, 201 bp, Homo sapiens
tcagaagtatgaacagtattgccttctgtgctagcccctttataagggaggaagtcttcttcagcgtgtttgtcatctttattagcagtgcaaatgactamaacttagccaatgtagagtttatctaaatttttaaagacctcatttggagctcataactcagttcttgagcaaggtgaaaaggaaacattgtgattatgg

SEQ ID NO: 365071 - DNA, 201 bp, Homo sapiens
actaaaaaatacaaaaaaaattaaccaggtatgatggcgggcacctgtagtcccagctactgaggaggctgaggcagaagaatggcgtgaacctgggaggyggagcttgcagtgagccgagatcatgccactgcactccagtctgggtgacagagcaagactccgtctcaaaaaaaaaaaagatgggcttgattatataat

SEQ ID NO: 365072 - DNA, 201 bp, Homo sapiens
atgaatcaatcattgttttccttcagcttttgcattttgggtattaagaagaccttcttggctgggtgtggtggctcacacctgtaaccccagcaattttsgaggctgaggaaggagtatcacttaagcccaggacttcaagaccagactaggcaacatagtgagaccccatcactacaaaaataaaatttaaaaacgttg

SEQ ID NO: 365073 - DNA, 201 bp, Homo sapiens
tcttcatcttcagcacttttaatctctaaaacatagtgcagtatttagcaggtcatcaataatttttgttgttgggtaaatggctgatcgaatgaattaamaaaaggactggatactccatttctgatcaccatagagataaccaaattacgtttctcaaactctgtcatgctgagggctgcagtgacaacattttaggac

SEQ ID NO: 365074 - DNA, 201 bp, Homo sapiens
agtcaatgataatgtacatttaaaaataactaagtaaatttcaaatgtctcaccaaaaaaaagataagtgatggctactgtatcctctgaatgtatgaaaktataacttgtaaatttaaaataatattaattttaaaaatgaaacaaactatttttggcattggagtcgtgacaatgccagtttttgttgatggctggtgt

SEQ ID NO: 365075 - DNA, 201 bp, Homo sapiens
tgtcaatataaggtattaatttaaaatagcaaataagtagttacaaggcaatagaagatttggcaccaaatgagtggtgcagaaaataagtgcaattaatwcccaagaagagaataaaataagctgaaatgctgagggaagcataagaggaaaggcccttagagatagcccttaaagttctgcaacagagatgaacaaaca

SEQ ID NO: 365076 - DNA, 201 bp, Homo sapiens
ggccaaaagtgacttgtagctaaaagacctaggttggggattagctatgggaccttgagcataatctctctgtaaaatggagatacataatatacatcctractatcttacagccatattgttaggatcaagtaagattgtatatgaaagttttttgtaaattgttataaagttgggaggtgcacaaagaagatctggtcc

SEQ ID NO: 365077 - DNA, 201 bp, Homo sapiens
tatgacttttttttttttttttttttgagaccatgtcttgctctgttgcccaggctggagtgcagtggcaagatcttggctcactgcaacctccgcctccygggttcaagcgcgtctcctgtctcaacctcccaagtagctgcgactacaggcgcatgccacgacgcctggctaatttttgtatttttagtacagacgggg

SEQ ID NO: 365078 - DNA, 201 bp, Homo sapiens
ttaaagtccttcctagtgaggcctcaccagaagttcagtaagttaagagtaacgagcaactttctttcactgtacgtgaaactctccactaaagataggcttttttttttttttaatgtccagggatgaatagacaaaaagtgatctgagagtgctgtatgtccaaggagagagaagagtgcccaattggaaggacaaaag

SEQ ID NO: 365079 - DNA, 201 bp, Homo sapiens
taaatagtaatccatattatcagtacctttgaaataatgactcaaataatctctcctttggagagggtccaacctatgtctcccaaattgaaggtcactcrtctatgtagaagaaacctcaagtggacaaagtgactgtccagcactgcaattctggcaatctataatctctcttgcctctcaggtattcaactttgacgt

SEQ ID NO: 365080 - DNA, 201 bp, Homo sapiens
gtctttctcatttcttgctcacagttcctggcataaagtctagcatgtagagagaactcaataaatattgattggaatgagtcgtattgcttaaaagccaygatgctctcactgtctgacctatttttttctgcattcaaagctcttggaagcaacagaaacattttaagtgactttgaatatgagaacttctgaagatgt

SEQ ID NO: 365081 - DNA, 201 bp, Homo sapiens
acttatttgtaggaactaaaaattaaaacaattgaactcatggacaaagagaataaaaggatggttagcagtggctgagagggatagtgttgaagggagtrggtaatgggaacaaaaatacaattaagcagaatgaataggatctagtatttgatatcaaaacagggtgactaagtcaacaataatttattgcaattttaa

SEQ ID NO: 365082 - DNA, 201 bp, Homo sapiens
agggcaagatgattcactacaatgttctcttatagtctcatattgcaagtggggaccaggctacctgcacaggtagaggaaggcagacaaaacaagacagyaacaagctgctggtggaaatcggtgttttcccaaaggagggaaaagagtgcttagtttcagtccagggcaggtgagattgtctatgtctggaaactacta

SEQ ID NO: 365083 - DNA, 201 bp, Homo sapiens
ctttgctattatgaatagttttgtgataaacatacaagtgcaggtgcctttttttatagaatgacttcttttcttttgggtagatactcggtagtggactrctggatttctatgtttagttatttgagaaatctgcctactgttttccatagaggttgtactaatttacatttccatcaacagtatataagcattctcttt

SEQ ID NO: 365084 - DNA, 201 bp, Homo sapiens
ccagcatctgttattttttgactttttaaatagtagccattctgactggcacctggtgatgtctcattgtgcttttaatttgcatttctctgataagtagwgatgtgagtattttttcatatgcttgttggccatgtgtatgtcttcttttgaaaaatatctgttcatgtcctttgcctactttttaatggaattggttcc

SEQ ID NO: 365085 - DNA, 201 bp, Homo sapiens
tggtgatgtctcattgtgcttttaatttgcatttctctgataagtagtgatgtgagtattttttcatatgcttgttggccatgtgtatgtcttcttttgaraaatatctgttcatgtcctttgcctactttttaatggaattggttccaggaaaattgaatttccttatgcagaagaatgaaactggactcctatttctca

SEQ ID NO: 365086 - DNA, 201 bp, Homo sapiens
taatgggtgcagcacaccaacatggcacatgtatacatatgtaacaaacctgcatattgtgcacatgtaccctagaacttagagtataataaaaaaaaggaaaaaaaaaaaaagaagtaggttcttcaaacttcattatctttactaatcaatttaccttctcctcagcaaaatgttctaatagtcctacattgcagcctt

SEQ ID NO: 365087 - DNA, 201 bp, Homo sapiens
gatttggcaccaaatgagtggtgcagaaaataagtgcaattaattcccaagaagagaataaaataagctgaaatgctgagggaagcataagaggaaaggcmcttagagatagcccttaaagttctgcaacagagatgaacaaacaagacttttgggtgcccagggaccacagtggcactttggggtgggaagtgtgcagaa

SEQ ID NO: 365088 - DNA, 201 bp, Homo sapiens
ataagtagtgatgtgagtattttttcatatgcttgttggccatgtgtatgtcttcttttgaaaaatatctgttcatgtcctttgcctactttttaatggarttggttccaggaaaattgaatttccttatgcagaagaatgaaactggactcctatttctcaccatataaaaaaagcaactcaaggtggattaaagaccta

SEQ ID NO: 365089 - DNA, 201 bp, Homo sapiens
gtggtgttgaggaacaaaaataaattggttggcgaaataaaggtgtcagaaactcaaagaattgtaagctttaggtctgtttttaaaaaagaaactaaagaaaaaaaaagaccaaatctatttgttacttaactcatttatttattaattcactccattttttcatttactcaaggaatctttattgtctaccaaatgctg

SEQ ID NO: 365090 - DNA, 201 bp, Homo sapiens
aggaaaggcccttagagatagcccttaaagttctgcaacagagatgaacaaacaagacttttgggtgcccagggaccacagtggcactttggggtgggaastgtgcagaaaaggaatatctggatgcagctgaagttttatgtaaggaaaaggctggagataagtctgtaacagaaattccctctagctagcttcattcat

SEQ ID NO: 365091 - DNA, 201 bp, Homo sapiens
tgggaaaagagacagctctttcagaaaaggaaagctcatttttatttgagaaaattgtttatattaactagttgaaagatgatctagaaaaaaggaaatamgaatgatagctaaaactgtcatgcttatattaacaacttttatgatatttgaacaaaaagtcaaaattactcagtggcttataacacaggctgaggaaat

SEQ ID NO: 365092 - DNA, 201 bp, Homo sapiens
aaagaaataacagagtgaacagacaacctgcagaatgggaaaaagtatttaaactatgcatgtaacaggggactaatatctagaatctacaagggacacaracagctcaagaacaacaaccagaaaaaccatctcattaaaaagtaaactgtatatttttaaatatgcttataagtaaaagaacaaagtagattcttgcct

SEQ ID NO: 365093 - DNA, 201 bp, Homo sapiens
cattgtatacatatatagaactatcacactgtaccctataaaaatgcacaattatgtgtcaataaaaacaaaacaaaataataggaaatcttcttttgtakaataaatctgccaattaagagacatggctagtagaaacagatgcgcttttgttactaaactttaatattcggcaagaattaccctcaaccatttgaagca

SEQ ID NO: 365094 - DNA, 201 bp, Homo sapiens
attccctctagctagcttcattcatgtaataaataattaggcccattctgtgaccagacactgtgccagcttttccacatttggtgttgaacaaagcagaygtgttccctatttttttggaacctacagacatttacaaaataaacatgtaggaatacattgtgggaagtagcgtggagaagaacagaatgctgtaagaaa

SEQ ID NO: 365095 - DNA, 201 bp, Homo sapiens
ttagataatttgcccaagtatttgttgagcacttcctgaatgtttgatactatagaggaggatacaaatgaagcaaaatatggatccagtaaaactttttraacttaacaaaaagtttaattaatatattttttaaatatctataattgaaattatgaaaggcagtttctagcctatggtttcattataccttaaactaat

SEQ ID NO: 365096 - DNA, 201 bp, Homo sapiens
tccatttcctaagagctatcaaagtcctgtttttttgtatctagaaaagtattaattgactagattatctggccaatgtgccacagctaaatgaatcaactgtgtgtgtgtgtgtgtgtgtgtgtgtgtgtgtataaaactttgtgtccttttactcaaagttaaaaattttatcccttggctaagagggcagagcatctt

SEQ ID NO: 365097 - DNA, 201 bp, Homo sapiens
aaataattaggcccattctgtgaccagacactgtgccagcttttccacatttggtgttgaacaaagcagatgtgttccctatttttttggaacctacagayatttacaaaataaacatgtaggaatacattgtgggaagtagcgtggagaagaacagaatgctgtaagaaaaaaatcaggggcactgactccgttttggtg

SEQ ID NO: 365098 - DNA, 201 bp, Homo sapiens
caagtagatgtgacattgctgcctctttatttatagctgcgaacagctgtgtactttcaaaataacaaatttttaatgagaaaaaagaaaagcaaaaaacmtgcttggagagtttctttttatgcttactgttttgacacagttttgcgcataggtgatatatttatattctctccattattctgttttttattttaattt

SEQ ID NO: 365099 - DNA, 201 bp, Homo sapiens
ccatttcctaagagctatcaaagtcctgtttttttgtatctagaaaagtattaattgactagattatctggccaatgtgccacagctaaatgaatcaactgtgtgtgtgtgtgtgtgtgtgtgtgtgtgtgtataaaactttgtgtccttttactcaaagttaaaaattttatcccttggctaagagggcagagcatcttg

SEQ ID NO: 365100 - DNA, 201 bp, Homo sapiens
aagatctcagccgggcgcggtggctcacgcctgtaatcccagcactttgggaggccgaggcgggtggatcacgaggtcaggagtttgagaccatcctggcyaacatggtgaagccccgtctctactaaaaatacaaaaaaattagccgggcgtggtggcgggtgcctgtagtcccagctactctggaggctgaggcaggag

SEQ ID NO: 365101 - DNA, 201 bp, Homo sapiens
gtatttgaggcctttcccttggcttcactccatttagaactgggtgactcaaaatgacaaataaggtgtagtaatgaagacaaaaagcttctttaaaaaarttattgttaatccacttctctttttgacctctgaacagcattatactagggagtttacccagtcctctcagtgaataagcttgtgctgaaatcctgtgtt

SEQ ID NO: 365102 - DNA, 201 bp, Homo sapiens; identical to SEQ ID NO: 78927

SEQ ID NO: 365103 - DNA, 201 bp, Homo sapiens
gagaaggcttgctctttgacaaagaaagatttcaattgctattggaaagaagcataggggttaacttgactaaaaaaaaaatcaacaaagagaaaaagcartctgggcacaggaaattgcaaatgggaaggtcttaagagaaaacgcttgcagcattcaggggacagagagaaggcaggccttgtgactgcacttaggtga

SEQ ID NO: 365104 - DNA, 201 bp, Homo sapiens
taccacccatcccttccattccagcctcattgactcaactgtaaaacacgccagtttctgtccgcacttttttttttttttgagatggagtctcactctayggccatgctggagtgcagtggcatgatcttggctcactgcaacctccgtctcccgggttcaagcgattttcctgcctcagcctcccgagtagctgggact

SEQ ID NO: 365105 - DNA, 201 bp, Homo sapiens
agctggcaaggagactaagaaggagccaccaggcagataagaagaaatcaagtggtgtagaaacgaagagaatagagtttcaaagccgaaagagtggcacrgctgtcaactatgactcagaagtaaggtacatgggatctgaaagtattcgacaatcagtcttcttctaaatttgggatgctctctctctcctacctcttg

SEQ ID NO: 365106 - DNA, 201 bp, Homo sapiens
acagatatagctcctgtctttctgacttgagcacatagatggaatatggtgtaatttcctaaaatgagaaaaattagggaagaaagatctgatcctctccraaataattattccaaaacataatttactcccctgcttaaaaccctgtcattcctctgccttgtctatagcagtttttcctaaactgcagtctatgaatta

SEQ ID NO: 365107 - DNA, 201 bp, Homo sapiens
gtacaaagaaaaggtacctatgtttcaaaagttttggcaatccctatattctctacccacaagatacctgatacagtatcaagtattacagagttgaagartcacggcctgaggcaactaatactagaaaaagttaaggcaaatgggcacacaattcagaaaaacacttcttgcgattttcaactaacatcattacttcca

SEQ ID NO: 365108 - DNA, 201 bp, Homo sapiens
gagtctcactctatggccatgctggagtgcagtggcatgatcttggctcactgcaacctccgtctcccgggttcaagcgattttcctgcctcagcctcccragtagctgggactacaggcatgcgccaccagtcccagctgatttttgtatttttagtaagagacggggtttcaccacgttggccaggatggtctcaatct

SEQ ID NO: 365109 - DNA, 201 bp, Homo sapiens
aagtttattaatcattggtatgctattctattatctgtgcatgcatttgcactatatttttaaacatcatttaaaaagccatttgtttcaacttttaacaytggaaagcaagaactcagagaaaaaaaaagatcaagttttaaaaactttcagttattgatttgaaaagatatctcaacatttcacctcttctaatttcac

SEQ ID NO: 365110 - DNA, 201 bp, Homo sapiens
acagaaatcaaaaggaaatcaaaattcactttagatcgataaacaaaataaacacagatatttgccctatatacaaaacaggtcaataataaattgcatcrgcatataaattctaaaataaagggtcaaattaagaactatatcgcagagtgtagaccataaaacagcagacttaataatatgaaaaaattaaattcttgt

SEQ ID NO: 365111 - DNA, 201 bp, Homo sapiens
ttgttgctttcatggagaaatttgaggttctccattgacttatacagtggaacccaccatatgcaaatcacccttgttgctgtgactgggtatgttactayaagtttatgcattttactgtgtccaggaaatagtacttgtttgtcgcttaccagatctgaattattacagagattttcagaggtatggatagaggtctgt

SEQ ID NO: 365112 - DNA, 201 bp, Homo sapiens
aatatggaatagcagtaacttctgtcttttaaagtcataaaaaccaaaggcaaaagaaaatctaaatatgactacttacatcatatgtaaggaaccccatygtgagaagggtggatgctgaaaccatctcctacttcttgctttccagtagtcagaagtcttcacaggccaaagtgaaagagtccacagaaccctaagtaa

SEQ ID NO: 365113 - DNA, 201 bp, Homo sapiens
atgaacactgaggcaaaaatccccaacaaaatactagcaaactgaaatcaagaacacattaaaaagatcattcaccatgatcacatggaatttatccaagrgaggcaaggatggctcaacatgtgcaaatcagtcaatatgatacatcataccaacagaatgaaggacaaaaaccatatgatcatttcagttaatgctgaa

SEQ ID NO: 365114 - DNA, 201 bp, Homo sapiens
atttatgcagatctcaatcagaatgactttgccatcagcaaagaggacatgcaggagcttctctcctgtacaaacataatatttcactgtgcagccactgkacgctttgacgacactctcaggtacattcccatttccctctcatggcttgtatacatatgtgtgcatgtaaatttcttcatagtttctgtaaaaaaaaaa

SEQ ID NO: 365115 - DNA, 201 bp, Homo sapiens
tcaatcaggctggtgggaaaaatattagagatagttatagaaatagacacaaatcttgttggaaggctgagaagtttgcataactttggtaatagatctgrctggaggcagcctgatccctttacctttagttaaacaaattaaaatagcaataaaggaagagtagtttacctagctaacttgtttactcatataatctta

SEQ ID NO: 365116 - DNA, 201 bp, Homo sapiens
aagagtagtttacctagctaacttgtttactcatataatcttaagactaacctttgatgtaccatgggtgcttaagtgcgttttactcaggaagcccacartgtcaattaccctctaatggtgttgactcaagcttttgttaattaatcttactgaataaatgtgagtctgactagctgatcagggccagtcgcaactgtt

SEQ ID NO: 365117 - DNA, 201 bp, Homo sapiens
gtctgactagctgatcagggccagtcgcaactgtttacaggactcagcagggagtctataagcggctcgaacacagctggactggcagaggagaatatctstgtgtcagtgtactttattcatccgtcaccaggtcaggggtctgcaagggacagactccctgcagctggtgcccccttgagaggagtgctgccgcaacta

SEQ ID NO: 365118 - DNA, 201 bp, Homo sapiens
attaccagagaaaaataagtatactatttgaagtttattgttcttctaacatggaacaagttcctatggagacaattttggtagggaaattattagctttaattcatcatttgttcttcataaagaactaataactttattagttatttcataattcataatatttcataatatttcataataactaataactaacataca

SEQ ID NO: 365119 - DNA, 201 bp, Homo sapiens
cgcaactgtttacaggactcagcagggagtctataagcggctcgaacacagctggactggcagaggagaatatctgtgtgtcagtgtactttattcatccktcaccaggtcaggggtctgcaagggacagactccctgcagctggtgcccccttgagaggagtgctgccgcaactatcccttccaccctgtctagcatttg

SEQ ID NO: 365120 - DNA, 201 bp, Homo sapiens
aaacaggatctgcagtctgattaaaagcaaaattgtttttcatttctacttctttggcaaggttctgcaggacctcatcaagatacattttgtgaagtctmtgtttcatacatgtgacctgaggcataaacaatggggaagactccccagggcctcttaggtcccgtggtaggcctgggccttatctgatctttgtaagcc

SEQ ID NO: 365121 - DNA, 201 bp, Homo sapiens
ggcataggaaatcaccagggtattgattggggaagtgataagtgtccatgaaatctttacaatttatgtttagagattgcagtaaagacaggcataagaamttataaaagtattaatttgggcaactaataaatgtccataaaatcttcacaatccacgttcttctgccatggcttcagccggtccctccgtttggggtcc

SEQ ID NO: 365122 - DNA, 201 bp, Homo sapiens
ttcacagatgctgccattatttgcacctgagcctgccctcttagaattacagtcttttctttaggtcttcacaagacatgtttgttttaaacacaattctyatagacatctactgccctttacatacgtgtgagcatatatttgtatttgaatacagataccttctgaacaagatatgaaagggagtttgaggtctccttc

SEQ ID NO: 365123 - DNA, 201 bp, Homo sapiens
ttatatgaatagtggtagtttaggggtgacagcctcaattttgggtgacagaaatacaaatttctctgtccccaccttaaacctactgaatcagaatcttyggcgtgaggatccccagggctttcataagtagctgccacagcatagggggagattttggaatagctagtccaggtatttccatggaacgtagagtcagaa

SEQ ID NO: 365124 - DNA, 201 bp, Homo sapiens
attaatttgggcaactaataaatgtccataaaatcttcacaatccacgttcttctgccatggcttcagccggtccctccgtttggggtccctgacttcccrcaacagtttttcatgcaatagtagtacaataagtttattaatcattggtatgctattctattatctgtgcatacatttacactacatttttcaacatcat

SEQ ID NO: 365125 - DNA, 201 bp, Homo sapiens
ctgagcctgccctcttagaattacagtcttttctttaggtcttcacaagacatgtttgttttaaacacaattctcatagacatctactgccctttacataygtgtgagcatatatttgtatttgaatacagataccttctgaacaagatatgaaagggagtttgaggtctccttcatatacgctgtcatcattttggacaa

SEQ ID NO: 365126 - DNA, 201 bp, Homo sapiens
agttttagcatcttaaagatggatggtattcagttagtgaaatcatagagcaatttgcctaaaacttaagagaaactgtttacttaaaataatatttgttyctgatagatattaagtaaatattaatgaaaccaacttgatgtcagtaaataataataagtaaaaaaaccaactttgtatttctctatttcactgtaacta

SEQ ID NO: 365127 - DNA, 201 bp, Homo sapiens
cacgttcttctgccatggcttcagccggtccctccgtttggggtccctgacttcccgcaacagtttttcatgcaatagtagtacaataagtttattaatcrttggtatgctattctattatctgtgcatacatttacactacatttttcaacatcattaaatagccatttgtttcaacttttaacatcaggaagtaagaac

SEQ ID NO: 365128 - DNA, 201 bp, Homo sapiens
atatatttgtatttgaatacagataccttctgaacaagatatgaaagggagtttgaggtctccttcatatacgctgtcatcattttggacaaggaaaatgytaccagcctgatttcagacagttataccaaaccatctggccccttaactcaagtgccttcttcctctatatgtagacttgagtccggggcataaatggag

SEQ ID NO: 365129 - DNA, 201 bp, Homo sapiens
atcatagagcaatttgcctaaaacttaagagaaactgtttacttaaaataatatttgtttctgatagatattaagtaaatattaatgaaaccaacttgatrtcagtaaataataataagtaaaaaaaccaactttgtatttctctatttcactgtaactattgtctcattttgaattgaatattatttcacttgtgttttg

SEQ ID NO: 365130 - DNA, 201 bp, Homo sapiens
ccctccgtttggggtccctgacttcccgcaacagtttttcatgcaatagtagtacaataagtttattaatcattggtatgctattctattatctgtgcatrcatttacactacatttttcaacatcattaaatagccatttgtttcaacttttaacatcaggaagtaagaacccaaagggaaaatactttttaaaactttg

SEQ ID NO: 365131 - DNA, 201 bp, Homo sapiens
cccttaactcaagtgccttcttcctctatatgtagacttgagtccggggcataaatggaggtcaagtaatagactcatcaagggaagaactttacttcctrttgtgtattacagtgaaacttataagatgaattcaccataatgtgtataatggcattattcatgttttgaattgtgactgatgactttgctatacctggg

SEQ ID NO: 365132 - DNA, 201 bp, Homo sapiens
ttacttcctctaagataagtggaaaaaccccattatcttcagctatctgtctttatttctggaggcaagatcaaaaaccaaccatctgccctataagtccktacttattctcctgaactagatgagtacaggcattgtctgatgagaggatttctagctttcaacagattctcacagaattcatgaccagaacaacatggg

SEQ ID NO: 365133 - DNA, 201 bp, Homo sapiens
ttcagttaccaaaaaagagaaaattatacaaattttagataagcttacccaaaaatattcaacatatgtttgttgtacaattaacattaactatcaagagkgaaaacatctgactctagaagaaaacatttagcatgcttatgattgattaatattagaaaaactgttaaagatctttctggaagagatgtaccccagggt

SEQ ID NO: 365134 - DNA, 201 bp, Homo sapiens
tactttcagtcttgattcattcattcattgattcaacaatagttattgagctactttgcattgttctgtgctggttagtgtgtgacggctaatatgaaacaaaaatacagtctctgtttcaagtgtttagttggtcagggtaacaagatgtgtcttcactatgtatgtattaatacataaccactaggtagttagatccag

SEQ ID NO: 365135 - DNA, 201 bp, Homo sapiens
attattacagagattttcagaggtatggatagaggtctgtcaaacagggataaagcattattttatctagtctcagcaaagaacatgtctgataatttccrgtgttcttgatgtgttataccaaaatttgttctcttaccctacgtgttctgctgatctgaagcacaaaatttccacatcatagtgtttgttgaatggtta

SEQ ID NO: 365136 - DNA, 201 bp, Homo sapiens
atgtaattaattaaaattaaataaaaataaaaactcaattttccagtcacactagccaccttttaagtgctaagtcgtttggctagtggttactgtattgracagtgcagatttccaccactacagaaagttttattggacagcactgcaccagaagactgttgattgtttctgttagttctcggctttggatgatgactc

SEQ ID NO: 365137 - DNA, 201 bp, Homo sapiens
acttcctctaagataagtggaaaaaccccattatcttcagctatctgtctttatttctggaggcaagatcaaaaaccaaccatctgccctataagtccttmcttattctcctgaactagatgagtacaggcattgtctgatgagaggatttctagctttcaacagattctcacagaattcatgaccagaacaacatggggt

SEQ ID NO: 365138 - DNA, 201 bp, Homo sapiens
tctgactctagaagaaaacatttagcatgcttatgattgattaatattagaaaaactgttaaagatctttctggaagagatgtaccccagggtgtttttaytgggtaataaaaagttgatctcaagtagtcagagaaatcatgtctcatttgtatcaggcaagagcatgttcagaagccattctgaggatttaatgaagat

SEQ ID NO: 365139 - DNA, 201 bp, Homo sapiens
actttgcattgttctgtgctggttagtgtgtgacggctaatatgaaacaaaaatacagtctctgtttcaagtgtttagttggtcagggtaacaagatgtgtcttcactatgtatgtattaatacataaccactaggtagttagatccaggagcaaaatagctggatctgaccagattctgttctggtcagaccagttggat

SEQ ID NO: 365140 - DNA, 201 bp, Homo sapiens
aatatgaaatgacataaggcagttcatgtttacttgccaaaggactgatgtaactacagtgggcttggtggagagagacacacctggcatcccagagtagygtgggcaggcatcagggatgaagtcagatttggtgtgagcatcggataggtcagtgattctcaacccaccctggacataagggccatctggaaagatttc

SEQ ID NO: 365141 - DNA, 201 bp, Homo sapiens
tggttgtttaaagaagcctggaacctccttccctctcttttgctccctctctctccatgtgagacactggctctccttcaccttccaccatgcttgtaaamttcctgaggcttcctcagaagcagatgctggcactatgcttcctgttcggcctgcaaaaccgtgagccaaataaacctcttttctttgtaaattacccag

SEQ ID NO: 365142 - DNA, 201 bp, Homo sapiens
ttattatcacaatggaaaatgagatgaaactatctgcaaaccactttctgtgtactaaaaaaaagtacatatatttttggtatggattaatagtgaacatragtaatgactactgacttcaccaagagtttcttctccacatgatctttattattttttaggtataacatctgtgtggaaaagtgaatatatcacaaatgc

SEQ ID NO: 365143 - DNA, 201 bp, Homo sapiens
ctttgcattgttctgtgctggttagtgtgtgacggctaatatgaaacaaaaatacagtctctgtttcaagtgtttagttggtcagggtaacaagatgtgtcttcactatgtatgtattaatacataaccactaggtagttagatccaggagcaaaatagctggatctgaccagattctgttctggtcagaccagttggatc

SEQ ID NO: 365144 - DNA, 201 bp, Homo sapiens
tgacttctaagtcacagattagccaagttcaaacatagattagctttaccagtttttggagtttgtataaatgaaattatatagtaatacttttttttacrtctggcttatttactcaatattatgtttgtgagatctttcaaattattgtgtgtatttgtagattattcattcacattgctgtgtaatactccatactgt

SEQ ID NO: 365145 - DNA, 201 bp, Homo sapiens
attcttttcttcttcatttctcttaaacttgatttttttaaaaaagacttattaatgtgctaagcagaagcaatctaagaagaatgtattgaggtgattgmtaaatttggtgttcttaagaccagctttgactatctctccccagctgggaccatttccaaattggtttttcttgactatggagtattgctaatccaatta

SEQ ID NO: 365146 - DNA, 201 bp, Homo sapiens
ttcttcagaaagcctgtcacttattttgaaggggtcacctgattaggtcaggccagccaaagacaatctcccctttaaattacttaaaggcagttaaggascttaattgcatctgtgaaatctcttcacttttgacataataagtaacactcatggaagtatggtccatcagctttgctgtattgttgttagaagcaagtt

SEQ ID NO: 365147 - DNA, 201 bp, Homo sapiens
tacttttttttacatctggcttatttactcaatattatgtttgtgagatctttcaaattattgtgtgtatttgtagattattcattcacattgctgtgtartactccatactgtgaatatgccatactttatgcattctgttgatgaagactttagtagtttccattgtgagtttcttaggactagagctgctatgagcat

SEQ ID NO: 365148 - DNA, 201 bp, Homo sapiens
ttacttaaaggcagttaaggaccttaattgcatctgtgaaatctcttcacttttgacataataagtaacactcatggaagtatggtccatcagctttgctktattgttgttagaagcaagttataggacctgcctgttcacaaggagaggggattacacacggagtgagtcactagggttcatcttagaattctaccttcc

SEQ ID NO: 365149 - DNA, 201 bp, Homo sapiens
attagaattctgcatttcattttaaatcacgggcacacagtagcagtctggatgcctcagaatgaacacatttaaggatcaagtcatttaaaacatatctyactataatgacttctgcagcccattttgactgtgaatagcctaggctgttcagtgttaaggtcaaatgctcatttaatctgcttgcaggaacctaatttc

SEQ ID NO: 365150 - DNA, 201 bp, Homo sapiens
gtgcagtggcacaatctcggcctccccagttcatgccattctcctgtctcagcctcccaagtagctggcactacaggggcccaccaccacgcccggctaattttttgtatttttagtagagacaaggtttcactgtgttagccaggatggtctcgatctcctgacctcatgatccacccaccttggcctctcaaagtgctg

SEQ ID NO: 365151 - DNA, 201 bp, Homo sapiens
agctgccttcctgtgggacagggctcgggacctgcagcctgccatgcctaagcctcccacctcctccgtggtctcctgtggggccccagcctcctcgacgwgcaccaccccctgctccagggcacccagtcccatcgaccacccaaggactgaggagtgcgggtgcacggcgcgggactggcaggtagctccatctgtagc

SEQ ID NO: 365152 - DNA, 201 bp, Homo sapiens
aaattgaaaaataaagcaaaataccaaaatttaatatcaaaagtaaaagctaggtgacctcagtttatgaaatttaaaaggttggaaattttaaatttgcrcttctgtagttttataagatacgtacatagtaattaaattttcaaaagcactaaacatagcaggaagtattttaagatcatcattatcatcatttaattt

SEQ ID NO: 365153 - DNA, 201 bp, Homo sapiens
ctgtgaggaagacacttccacagacatttaattccataacgtaatattgtaaggttgatattattatcactgctatactaatcacggagcaaaaagctcaraatggctaagtaactccttgaaagtctctcagacacaatttttatccatggccacttgattctgaagcccatggtctttccagtctactcacgtacttgg

SEQ ID NO: 365154 - DNA, 201 bp, Homo sapiens
ctctaacagatttcctgataaactactaggcttgcccacttgttgcataagaaaattgagggtatcaggggaggggaaatacatatgcctcttggtaattyattcagtaaatacataaataaaccattaatgatataatcatgttgattcaataagtttgaaaccaaaattgataatatttagaagaaattgtgtatgtgt

SEQ ID NO: 365155 - DNA, 201 bp, Homo sapiens; identical to SEQ ID NO: 78928

SEQ ID NO: 365156 - DNA, 201 bp, Homo sapiens
gcttcagctcagatgtcacagacactttgaaatttccagatgctgctatgtacccctctcaggtctccctttgttttagcacttactatattgtatttaasagtctctttattgtctgcctcctccattagactgcaagcaattccttgaaagcaggaatcatgtctttctcatttcttgctcacagttcctggcataaag

SEQ ID NO: 365157 - DNA, 201 bp, Homo sapiens
gcccagacctgaaagtcatttacatccttgtgaggcccaaggctggccagacactgcagcagagggttttccagatcctagacagtaaggtatgccttatrggaaagcgtgtgtgatgggcaatgccttagggcaagatgattcactacaatgttctcttatagtctcatattgcaagtggggaccaggctacctgcacag

SEQ ID NO: 365158 - DNA, 201 bp, Homo sapiens
ctctagtaagtctttaacatcatgttgagttcaggatgtattcttcttggaatatcaatgagtttaaaggcatctgcagttgttaaaaactcaataataaraacctttaaaagatgagagacaaagcacctcatactgaacaggtggtgtctcgttcatcatagtatccccagcatgtagcacaatccctggaacatagtg

SEQ ID NO: 365159 - DNA, 201 bp, Homo sapiens
actcagtgtactctgccacaggatttattgtgtttgggaaatatttggactctgggccttaggtgagattcagagctgtgctggcttcaggtgtgacccartgcatttctggctgtgacagctgtggggacagactccttctgcttgaggacaggggagtgaagagtaggaaggactttgtcttgtggcttcagtgccagc

SEQ ID NO: 365160 - DNA, 201 bp, Homo sapiens
ctctgggccttaggtgagattcagagctgtgctggcttcaggtgtgacccaatgcatttctggctgtgacagctgtggggacagactccttctgcttgagsacaggggagtgaagagtaggaaggactttgtcttgtggcttcagtgccagctcagccaatgtagaaaagagcatcaagttaaattcttaaggttcctgtc

SEQ ID NO: 365161 - DNA, 201 bp, Homo sapiens
gagctccagctctgagccatgaactgaggagtaggacagacacagaggctactgaagaaccctgttctagttgcatgactttgacgagtcttagactgttygtgtgatgagtctccaattgtgcatgaaccaagatgcagagagatgttaaagaagcaggaaaaacaaaactaaactaaagatgtatctttcctgtgtctt

SEQ ID NO: 365162 - DNA, 201 bp, Homo sapiens
attcaagatcacctgagaactatctgttgtgatcagatggtacttaacagcctgggcttcagaggcagacagacctgggtgtgaatctccatacgaccaaytgtgagttgtgtgatagtggactagatatatactttgctgagccttggtttctttatctgtaaaatgctgtaataataccttgcttacccagggagtctc

SEQ ID NO: 365163 - DNA, 201 bp, Homo sapiens
aggtttttgtggcccaggcccagaagtgcctatcacatctgtccatattccattctcagaactgtcactgggcatctaaccacaaggatggctggaaaatkcatagctgtgtgtccaggagaaaaggaaaataggattgttgaacaactaatgaggttctgccatggccttctttttaggtcgccaaatatctgctttcct

SEQ ID NO: 365164 - DNA, 201 bp, Homo sapiens
ttttggtcaacttatacataagaccctgagaatttatggaaacgacattagaagtggttttatagtttaccttaaagatgacttctaaagaaagaactgayattttgtattttacagagaagaggagcactttataaaatttcattttgttaaatttttatcttaaagttgtggtctttggtttatgtgacattctaacaa

SEQ ID NO: 365165 - DNA, 201 bp, Homo sapiens
aagtaattctcctaccacagtgtaactgctttgcatttatcgtttttgcaggaaagcgatttatgctgcacacctaccctcctttgcaaagaagtattacytagttgagaggtaataattcttggtttttggtacacatgatagaatcatccaagatgagttcctggtgtgaaatgtaattagtgggaatggtctacatac

SEQ ID NO: 365166 - DNA, 201 bp, Homo sapiens
ataaggagagattgaaggcagaaagattagctaggtggccattcattctttgacgcattcattcaacgagtatttattcaatgattattgtaccaagtatwgtattaaattctgtgaatattaagaagagtaaaacacagtcattgccctgaaggcatttgcaatccagtggagaaaatagacaactaagtagtcacttac

SEQ ID NO: 365167 - DNA, 201 bp, Homo sapiens
tgccttcctgtgggacagggctcgggacctgcagcctgccatgcctaagcctcccacctcctccgtggtctcctgtggggccccagcctcctcgacgtgcrccaccccctgctccagggcacccagtcccatcgaccacccaaggactgaggagtgcgggtgcacggcgcgggactggcaggtagctccatctgtagcccg

SEQ ID NO: 365168 - DNA, 201 bp, Homo sapiens
ctaccctcctttgcaaagaagtattacctagttgagaggtaataattcttggtttttggtacacatgatagaatcatccaagatgagttcctggtgtgaamtgtaattagtgggaatggtctacatacttatacttgggcccaagaaaatctctaagtcacagcaattgtattaggcctgtatggtcatccacctctgagg

SEQ ID NO: 365169 - DNA, 201 bp, Homo sapiens
ttgtctctgatcctcagtttcctcatctgtgaataacaacatctacactatttatctcccaaggtttttgtgagaagatactgaaatatgtgcatgaaatkctttgagaattgttaatataaagtctaagatgtaaattataagagttgctgatatattaatagtaaatggtattgacagtatctaagactgataaggtct

SEQ ID NO: 365170 - DNA, 201 bp, Homo sapiens
ggatatggaaactagagaaactacattagagaacttattcaaaaaatatcttcctttgctgacaatatatggcttaatttacgtgtttattgaatgttctstcttaatttcactggatgaatttgctagggctgctacagcaagataccactgactggatggctgaaacagcagacatgcattttctcacagttctggagg

SEQ ID NO: 365171 - DNA, 201 bp, Homo sapiens
ggttaaaccttgtctttacttaaaaaaaaaaaaaaatgcaaaaattagccaggcgtagtggcaggtgcctgtagtcccagctactcgggaggctgagacamgagaattgcttgaaccctggaggcagagattgcggtgagccgagatcgcaccactgcactccagtctgggtgacagagcgagactccatctcaaaaaacg

SEQ ID NO: 365172 - DNA, 201 bp, Homo sapiens
gtgtgaaatgtaattagtgggaatggtctacatacttatacttgggcccaagaaaatctctaagtcacagcaattgtattaggcctgtatggtcatccacytctgaggtgactgaatccatttcattccccacaatattgttttacctgaatgaaaaactatattttggtgtaggagtgaaggatacaattgggcatggtg

SEQ ID NO: 365173 - DNA, 201 bp, Homo sapiens
tgttgctgttgcccgtcacctccagattattccctgatatttatcaaatatgtggctcacatatgtcctctcctttcctacttctgagagtattcttaacwttgaagtccatgtggatgaacattcagcactctgatgctttgacctcacactttcatcagttttcattttaagcactaaagcacccgatttttagaaacc

SEQ ID NO: 365174 - DNA, 201 bp, Homo sapiens
aggagtgaaggatacaattgggcatggtgtgtgagaaccaccagaagctcataaatggtagaagattctcaggtagatgaaaattatgtcggccgggggcrgtggctcacgcctgtaatcccagcactttgggagacagaggagggtggatcacgaggtcaggagatcgagaccatcctggctaacacagtgaaaccccgt

SEQ ID NO: 365175 - DNA, 201 bp, Homo sapiens
ttgaagtccatgtggatgaacattcagcactctgatgctttgacctcacactttcatcagttttcattttaagcactaaagcacccgatttttagaaaccyacttccaaggcaagtcctcaggctttgacattgctccagacagctatatctgaaatctctaaatctgacagttcactcttggacagtgaccttctttact

SEQ ID NO: 365176 - DNA, 201 bp, Homo sapiens
ccacccaggaaaacataacctcactaaacgaactaaataaggcaccagtgaccaatccaaggtaacacagagaaggaatttagaatactatcagatacatwtaacaaagagatcgaaataattaaagaatcaagcagaaattctggagctgaaaaatgtagttgacatactgaagaatgcatcagagtctcttaacatgag

SEQ ID NO: 365177 - DNA, 201 bp, Homo sapiens
cccaagtagctcggattacaggcatgcaccaccatgtctggctaattttactactttctaagaaattctttttaaagtaagtattattaaattgccttttyagtttatcttattatttttattttatttatttctttttttgagatggagtctcactgtgtcacccaggcttgagtgcggtggcacagtctcagctcactt

SEQ ID NO: 365178 - DNA, 201 bp, Homo sapiens
ataacttggcaagtagcacagtcaacttgcagcaacttttttctgctatttgagtatagcagcaagtgggaaagatgtctgcgtacaaaatggaaataaayttgttctccagacagatgcagattttttcacatttttttttcaagtacctcctctaaaccaggactatgttggccctgaagagacagtgaagacacggcc

SEQ ID NO: 365179 - DNA, 201 bp, Homo sapiens
gttcacgaattatcctgacaatttggtgctttatttagtcacttctatgttgacattttgccttattcagtaaggaagtttgctttagataaatatatgayggtaaattgcagctttgaccaatgactagagagagtatcaaagcattaactattacacctcgtgtaagaaacaagaactttaaggatagtgatgggaatt

SEQ ID NO: 365180 - DNA, 201 bp, Homo sapiens
gcctgagaaatcatttggttttctcattttcttctcataatccttctgtgtacagaaagaatatcagtttgtgatatatcttcttacatttttggtgtggkaggaggatggcagcttctttttttatcttttccaagcacatatatttttacataatcaatatatgttgtatctagttttattacccttaaatattcatta

SEQ ID NO: 365181 - DNA, 201 bp, Homo sapiens
ttcaagacatagccaatacaataatacataaaaagaaaaagttaaaaagtggcaagatgaagttaaagtgtagagtttttattagttttctttttgtgtgttttttttttgtttatgcaatcagtgttaagttgtcatgggtttaaaataatgggttataagatagcatttgcaagcctcacattaactgcaaattgaaaa

SEQ ID NO: 365182 - DNA, 201 bp, Homo sapiens
ggaaatttagcatcaaagttctcggatgagctagcttcctctccctgttcttttgtcctccaccctcactccctccctagcccaactcttggtaccagcargcctagtttccatctccctcacagggtgtgatattggtgacatactggtcatccaacatctgaaggcccttggtattctggacaccccggctggccctgc

SEQ ID NO: 365183 - DNA, 201 bp, Homo sapiens
ggagacacagatccaaaccatatcaagctctatacctgctcagctgccatgtgctcttacaagatctttttcttgatggaatcttagtgatggtccatttrtgatatcaaaataattacaaaactttttacattgttgctttcatggagaaatttgaggttctccattgacttatacagtggaacccaccatatgcaaatc

SEQ ID NO: 365184 - DNA, 201 bp, Homo sapiens
ttttttacgcaggattccagaaagtagcagagggtgggatcttgataacgtgtcagtcaagagtaaacacagatgccagggaagtctttcctgcacagttrgtttatcccgcttgaaaccagaggccagctgggagttgctgaactttggttctcgctccataaaagggaagcctgcaattagatgaacctttgcctttgc

SEQ ID NO: 365185 - DNA, 201 bp, Homo sapiens
aaataacaaaatggcagagggaagtcattacttatcaataataacattgaatgtaaatggactatgctctctaatcaaaagttatagagtgactgaatggrtgaaaaaacaagacctcatgatctgttgcctacaataaacacacttcacctataaagatacacataaactgaaaataaagggatggaaaaagatatttca

SEQ ID NO: 365186 - DNA, 201 bp, Homo sapiens
aaataaaaataatcaaccgggtgtggtggcgtgcacctgtagtcccagctacttggaggctgaaagtgggaagatcaattgagccccggaggtcaatgctrcagagctaggatcatgccactgcactccagcctgggtgacagagtgagaacctctctcaaaataaattaattaaatatttattagttaattagttaaatt

SEQ ID NO: 365187 - DNA, 201 bp, Homo sapiens
aggattccagaaagtagcagagggtgggatcttgataacgtgtcagtcaagagtaaacacagatgccagggaagtctttcctgcacagttagtttatcccrcttgaaaccagaggccagctgggagttgctgaactttggttctcgctccataaaagggaagcctgcaattagatgaacctttgcctttgctgacagaaat

SEQ ID NO: 365188 - DNA, 201 bp, Homo sapiens
cacaaaacatgtatacaaatgaataaaataaaaagcaggaggaaacaagcaccagaaaaataaacttcatacaaacttagaacattataccgggtgaacamcaagaatgattttgtagttcagccctcaataagccatcattagacattaggtaaatatattaataaaaaagcaatttttataaaatcaagacaaaaaagg

SEQ ID NO: 365189 - DNA, 201 bp, Homo sapiens
atagcagaggcttcaacaccccaccttcagcattggacagacctctcagacagaaactcaataaagaaacattgaacttaatctgcactgtagatcaaatrgtcctaatagatatttacagaacacttcatccaacagctacagaatacacattcttctcctcagaacatggatcattctcaaggatagaccatatattag

SEQ ID NO: 365190 - DNA, 201 bp, Homo sapiens
aatggtagctatctcccaggagtagaagcataataaagatgcaatttattaaatagtgtttccctttcatttactctcagatactcactagtcattgctgrgaagcatattcagccagtgagaatggttctataccacttatttgtctgacttgtttcccaagggaatggatgaggaccacccaaagatccagcagtcctc

SEQ ID NO: 365191 - DNA, 201 bp, Homo sapiens
agatgaacctttgcctttgctgacagaaattactgagatttatgatactgtgagggtacgtgggggaccttatattcttagcaaatgtcaaattaccctgrtgatatttctggtcagctcatttctggggatggagagcagtgtgcttactgacagactaggccctgtgaggcatcctcatttggtgcatgttcagatgtt

SEQ ID NO: 365192 - DNA, 201 bp, Homo sapiens
atcactatgaaactatatttttcttctagttcacccactaagtatattataaaaaatatttatgcttctgcttttaaaacacaatttcccaatttttccaytgttgttttcttttagtattttagtgaggtccataaaacctcacctttagcttcgggtctatcaccacccagcttttctgcccttaattttcatttattt

SEQ ID NO: 365193 - DNA, 201 bp, Homo sapiens
gtaatcctagcactttgggaggtcaaggtgggagcattgcttgacctcagcagtttgagaccagtgtgcagtgtgggcaacatagtgggatcctgtctcaaaataaataaataaataaataaataaataaataaataaataaataaaggagagagagagagaggaggagagggagagggagaaagagagaaaaggcagcta

SEQ ID NO: 365194 - DNA, 201 bp, Homo sapiens
caacagcaagatttactgtgaagagcaaaagaacaaaactttcacagcgtggaaggggacccaagtgggttgctgctgctggctggggtggcaagcttttmttcccttatttgtcccctcccatgtcctgctgattgatccattttacagagcgttgattggtccattttacagagtgctgattggtccattttacagagt

SEQ ID NO: 365195 - DNA, 201 bp, Homo sapiens
taaacaggccagatctccaagtcttgcgcatttctccagtcctgtctgcatttcccccatctctaccctgagccaggctcctaccagccccgcaagggaawagggagtaaaacagcctttcaatatgcttaggaggatttgtcacaggtgattctccataaaagtgtaaggagaaaacttgtaatgccatatatgaactga

SEQ ID NO: 365196 - DNA, 201 bp, Homo sapiens
taatcctagcactttgggaggtcaaggtgggagcattgcttgacctcagcagtttgagaccagtgtgcagtgtgggcaacatagtgggatcctgtctcaaaataaataaataaataaataaataaataaataaataaataaataaaggagagagagagagaggaggagagggagagggagaaagagagaaaaggcagctaa

SEQ ID NO: 365197 - DNA, 201 bp, Homo sapiens
aatcctagcactttgggaggtcaaggtgggagcattgcttgacctcagcagtttgagaccagtgtgcagtgtgggcaacatagtgggatcctgtctcaaaataaataaataaataaataaataaataaataaataaataaataaaggagagagagagagaggaggagagggagagggagaaagagagaaaaggcagctaaa

SEQ ID NO: 365198 - DNA, 201 bp, Homo sapiens
ggttctcaacttcagggtatatcagaattactagagaccatgttcaaagaaaagatagatgcccaagcttggactaataactgttgaatgagaatcttcarggtcaggacataggtttgtttgtttgagcaacttcctgggcaaccctgctatatgccgaaagttgacagccatactactacaccatgctgccttatggag

SEQ ID NO: 365199 - DNA, 201 bp, Homo sapiens
atcaaagttctcggatgagctagcttcctctccctgttcttttgtcctccaccctcactccctccctagcccaactcttggtaccagcaggcctagtttcyatctccctcacagggtgtgatattggtgacatactggtcatccaacatctgaaggcccttggtattctggacaccccggctggccctgcagagacgggaa

SEQ ID NO: 365200 - DNA, 201 bp, Homo sapiens
tttatctaattatccattgatgatcacttaggttgattgcatatctttgctattatgaatagttttgtgataaacatacaagtgcaggtgcctttttttayagaatgacttcttttcttttgggtagatactcggtagtggactgctggatttctatgtttagttatttgagaaatctgcctactgttttccatagaggtt

SEQ ID NO: 365201 - DNA, 201 bp, Homo sapiens
ggttgataatataaatggacctaatggaatcattattgcggtatgtataatgatgaagaaataactccctgaaatgtagtagagaaatagtaacaaaattsttagtgctggcttagcttcattgatccaaaaacataaatgttactttactaataactgaggcatattattttaattgttctgattgtaatatacaggcag

SEQ ID NO: 365202 - DNA, 201 bp, Homo sapiens
atgaatattccgcagtgacttaggctttctgttacatattcattgtgatgccagttggcagaggactaagctggccattccaaatatgatttcttttttawctcttgtaaaactgtattggctgggctcatgcctgtaatcccagcactttgggaggccaaggtgggcagatcatgaggtcagaagtttgagaccagcctg

SEQ ID NO: 365203 - DNA, 201 bp, Homo sapiens
aaaataaataaataaaagacaaattctcaaagtacgttcagaaatattttatcctattttttgagaacaaatacctattcatcaagctactaccaataaarttatatgaatctaatcctgagacaacttaaagcaaatacttaaaaatctggcttccacttctacctctgccttaaaattaaaatgaatatgttcttttag

SEQ ID NO: 365204 - DNA, 201 bp, Homo sapiens
atcctagcactttgggaggtcaaggtgggagcattgcttgacctcagcagtttgagaccagtgtgcagtgtgggcaacatagtgggatcctgtctcaaaataaataaataaataaataaataaataaataaataaataaataaaggagagagagagagaggaggagagggagagggagaaagagagaaaaggcagctaaat

SEQ ID NO: 365205 - DNA, 201 bp, Homo sapiens
taggagaaactagattttatcaaaagagctacaaagcactttggtgtacaatggtagatgtgtgctcagatattcacagtactttgccaaagaaactaaaygaataacaataatgcaacaccagagctatccgtcataaggtaaggctctctaatcgctggcatttaaagactaaaagaaaatgacacatttaaaaaatat

SEQ ID NO: 365206 - DNA, 201 bp, Homo sapiens
cagtttgagaccagtgtgcagtgtgggcaacatagtgggatcctgtctcaaaataaataaataaataaataaataaataaataaataaataaataaaggaragagagagagaggaggagagggagagggagaaagagagaaaaggcagctaaattggaaaggaagaagttaaatcagccttgtttgcatatgatatgatct

SEQ ID NO: 365207 - DNA, 201 bp, Homo sapiens
gaaactaaacgaataacaataatgcaacaccagagctatccgtcataaggtaaggctctctaatcgctggcatttaaagactaaaagaaaatgacacattyaaaaaatattttggctctttagtataacttacccctaccaggcacatggttaaaatgtaggagattaggatattctgactagaatgtaggaaaaatagat

SEQ ID NO: 365208 - DNA, 201 bp, Homo sapiens
agtttgagaccagtgtgcagtgtgggcaacatagtgggatcctgtctcaaaataaataaataaataaataaataaataaataaataaataaataaaggagrgagagagagaggaggagagggagagggagaaagagagaaaaggcagctaaattggaaaggaagaagttaaatcagccttgtttgcatatgatatgatctt

SEQ ID NO: 365209 - DNA, 201 bp, Homo sapiens
gttaatgcaattattacagggtcctgaggcgacatacatcctcctcagctgacaggattaagagattaaagtaaagacaggcataggaaatcaccagggtrttgactggggaagtgataagtgtccatgaaatctttacaatttatgtttagagattgcagtaaagacaggcataataaattataaaagtattaatttgag

SEQ ID NO: 365210 - DNA, 201 bp, Homo sapiens
ttttaaaatgcacataactgaccaagaaaggcagggttttatggttggtgctttccttattttttaggtcaaggtaactcctcttagggaaagcagtgtaraagaaaagggcttttgtgcctgtataaaaacctgaaataactggaagcaggtactagaaaaatggaatcacaaatatttattgctctattgagcatatgt

SEQ ID NO: 365211 - DNA, 201 bp, Homo sapiens
tagcttctttgctttaggttagaacatgctcctttagctcatcatagttttatattactcatcttctgaagcctacttctgtcaatttgtccatctgatcytccgtccagttctgcatccttgatggagagatgttgtgatcatttggaggagaagaggcactctggccttttgggtttttggcattttttccattgattc

SEQ ID NO: 365212 - DNA, 201 bp, Homo sapiens
ctgaagttccagaaagacaggaaaaagaatagggcagaagaaatatttgaaaagaatcactaagagttttacaaaattggtttttaaaatgttaactcacwtggtaaaaaatcttaggttatgccagtcaggatgaacacaaagaaaataacacctagaaaatgactgtaaaacaaaaatacagagaaaaatcttaaaagc

SEQ ID NO: 365213 - DNA, 201 bp, Homo sapiens
aagaaagcttgattcctttcaaaatctcatccactcctagcatcagagctcacttcttcaaaattgtcttgtaacaatgcttttcaaggcaaggtaacaarttcttgtatagagactactactcctttaaaataaatagtggactcttacttatcagaaagtcagttgcctgactatttgtattggttgattaggactttt

SEQ ID NO: 365214 - DNA, 201 bp, Homo sapiens
caaagatgggtccctgctccttctcctgggacctctgacctcgaggggcaccagcctgatgccagtaggattgctcctgtatagagtgtctgacaacccckgtaggaaggtctcaccctgttgtggcattgggagtaggaccgtttaacgaaccactttgtcccttggtggagagggtgtgtttcactggggggaaaccca

SEQ ID NO: 365215 - DNA, 201 bp, Homo sapiens
aacacctagaaaatgactgtaaaacaaaaatacagagaaaaatcttaaaagcagctagaaggggaaaaagttatatttaggaaaagcacagtgagcataayggcaaacttctcagaaaccatgaaaatcagaagataatggaatgatatattttaaatgctgaaaatagaaaccttccgtgttagaattttatttatttat

SEQ ID NO: 365216 - DNA, 201 bp, Homo sapiens
cttggtgggtcacaccagccttctagtcaattttgatgagagaacctggataactctgttgctggcgaaggattcacacggttattgtgtttgtttttctttttcttttttttaattatactttaagttttagggtacgtgtgtgcaggtttgttacatatgtatacgtgtgccatgttggtgtgctgcacccattaactc

SEQ ID NO: 365217 - DNA, 201 bp, Homo sapiens
ttggtgggtcacaccagccttctagtcaattttgatgagagaacctggataactctgttgctggcgaaggattcacacggttattgtgtttgtttttctttttcttttttttaattatactttaagttttagggtacgtgtgtgcaggtttgttacatatgtatacgtgtgccatgttggtgtgctgcacccattaactcg

SEQ ID NO: 365218 - DNA, 201 bp, Homo sapiens
tggtgggtcacaccagccttctagtcaattttgatgagagaacctggataactctgttgctggcgaaggattcacacggttattgtgtttgtttttctttttcttttttttaattatactttaagttttagggtacgtgtgtgcaggtttgttacatatgtatacgtgtgccatgttggtgtgctgcacccattaactcgt

SEQ ID NO: 365219 - DNA, 201 bp, Homo sapiens
ggtgggtcacaccagccttctagtcaattttgatgagagaacctggataactctgttgctggcgaaggattcacacggttattgtgtttgtttttctttttcttttttttaattatactttaagttttagggtacgtgtgtgcaggtttgttacatatgtatacgtgtgccatgttggtgtgctgcacccattaactcgtc

SEQ ID NO: 365220 - DNA, 201 bp, Homo sapiens
gtgtttgggatttggggttctaattggtgtggagttgttacattgcctttttaagcacaatatagtatttcaataggcaatgtactagagacatgttattytaagttataatacaaaatcttggcatgtcaattttctcttgctctctccgtaggttaaccattgacccctgcagacatttaagcttgctcatcctaatgt

SEQ ID NO: 365221 - DNA, 201 bp, Homo sapiens
tgactttgccatcagcaaagaggacatgcaggagcttctctcctgtacaaacataatatttcactgtgcagccactgtacgctttgacgacactctcaggkacattcccatttccctctcatggcttgtatacatatgtgtgcatgtaaatttcttcatagtttctgtaaaaaaaaaagaaatacactctaaacaaaaaag

SEQ ID NO: 365222 - DNA, 201 bp, Homo sapiens
tttaccagccctgttaggtctggagctccccacagacactgatctcagtttcccccgagagtgtgagtgtaggcctctacaggcagctgcctctggggagytggggagcctaggggttaactctagacccccctcaaccctctggaccaaagtctgtccaggaaaataggatgccggagcccaggagtcgtcagcctagca

SEQ ID NO: 365223 - DNA, 201 bp, Homo sapiens
gtgggaactctctctagggttgttgccccctagaaggggttggggctgccagggtaggaaaatgagggcgatttcagatgtctacccagtcacgtgtttcrtctaggacactcccttgaacagtgaatacgattttgccctggtcaacattggacgattagaggctggtaagttgggggggggtttggtgaaggggttcac

SEQ ID NO: 365224 - DNA, 201 bp, Homo sapiens
aaccacagagcacagatgactcccaatgagctgatctgtctttaggtttctccctttccctgacccttccctgttctctaggggctgggagtggggatgcygacacagtagggggagctccttcgcattttgcacaaagcacaagtctgaacagcctatgctctggccagagccatttctaagagctttaaaccggaagac

SEQ ID NO: 365225 - DNA, 201 bp, Homo sapiens
  misc_feature (1)...(201): n = A,T,C or G
ttggcaaagagagtggagcaacacatgggctccatttccttcttttcacttactcagcctaagccaaaaggatggaatgtcctttcctctgcaggtgaccntggccattgtccaagccagagctcagagcaatcaagcccaacagtattcggggataaccctgagcaaggctggtgagtgagagtgctttagggtaaggaa

SEQ ID NO: 365226 - DNA, 201 bp, Homo sapiens
agtgggaactctctctagggttgttgccccctagaaggggttggggctgccagggtaggaaaatgagggcgatttcagatgtctacccagtcacgtgtttygtctaggacactcccttgaacagtgaatacgattttgccctggtcaacattggacgattagaggctggtaagttgggggggggtttggtgaaggggttca

SEQ ID NO: 365227 - DNA, 201 bp, Homo sapiens
tatagtccctgggtgtccctaggaagacagaagacctagaatagcacagagggcaccctttttgtccttcctcaagtctgtttactcatcttcctgtctcrtgcacacataaggtgccctaaaatcaaccttaatcagtcccgaggcctagttgaagcctaatgaggagggtagaagagttctcatggggaggcttgtagt

SEQ ID NO: 365228 - DNA, 201 bp, Homo sapiens
tgggctgcaagagtcccttctggagagactctggtccatggttacactgttctgtacctcttgacttcagtgagcggcttgtcccgagtccagctcctccrtccagggtccctgcataaatttatccctgaggagattctgattcatggccgagacttccggctgctcagagttggttttgaggctggaggcctagagcct

SEQ ID NO: 365229 - DNA, 201 bp, Homo sapiens
cactctccaaagacttccaaatttcatcctacgccaatcttgtttcatgccctcaccaaagatacccctgtgttcctctcgtggctcgaagtacgtctgcmtgaggctcgctgtcctccctgacagcctctagagctggctgagagctggaccttgacattccttctgtttccttgaccctgttaccccttttcaaattta

SEQ ID NO: 365230 - DNA, 201 bp, Homo sapiens
taaccacagagcacagatgactcccaatgagctgatctgtctttaggtttctccctttccctgacccttccctgttctctaggggctgggagtggggatgyggacacagtagggggagctccttcgcattttgcacaaagcacaagtctgaacagcctatgctctggccagagccatttctaagagctttaaaccggaaga

SEQ ID NO: 365231 - DNA, 201 bp, Homo sapiens; identical to SEQ ID NO: 78942

SEQ ID NO: 365232 - DNA, 201 bp, Homo sapiens
ccagctcctccgtccagggtccctgcataaatttatccctgaggagattctgattcatggccgagacttccggctgctcagagttggttttgaggctggargcctagagcctcaggcttttcaggtaagaggcccctaacctgaggctttctcctcacctcagaaccttgggatcctctccctgacaatttctgagactcc

SEQ ID NO: 365233 - DNA, 201 bp, Homo sapiens; identical to SEQ ID NO: 78944

SEQ ID NO: 365234 - DNA, 201 bp, Homo sapiens; identical to SEQ ID NO: 78945

SEQ ID NO: 365235 - DNA, 201 bp, Homo sapiens
aaatcgcattctcacctcgccttgctgctgctttaattccaagttctatttcttcccttatagttttctatgggaatgaggcggatacaggaaacaccctrtctcctctgtatttttgtagtggaatttctatttaaggggctcattaaagcatagtatttatacacattgctggcattgtttcttgtgtttgaataaagg

SEQ ID NO: 365236 - DNA, 201 bp, Homo sapiens; identical to SEQ ID NO: 78949

SEQ ID NO: 365237 - DNA, 201 bp, Homo sapiens
atgtatcattgataatcagtgggaactctctctagggttgttgccccctagaaggggttggggctgccagggtaggaaaatgagggcgatttcagatgtcyacccagtcacgtgtttcgtctaggacactcccttgaacagtgaatacgattttgccctggtcaacattggacgattagaggctggtaagttggggggggg

SEQ ID NO: 365238 - DNA, 201 bp, Homo sapiens
gaaatgggcagaaaaattccttagttaaggaggggtgtgtgagtgaagggggaaggtagaccctttaaccccaagtgagggatgatatcatctctcaggcytaaatttaagtgcacttagttcctttaatccagggcaactggggtacctactgaagtttttaatggagaggggagattttcagggttcttgtttttccct

SEQ ID NO: 365239 - DNA, 201 bp, Homo sapiens
cagagcaatcaagcccaacagtattcggggataaccctgagcaaggctggtgagtgagagtgctttagggtaaggaagagtctgaaaaagcagaggatggstgatgacaaagagctgagaagctgtctctgattttctccttcctcctctatgtctcactcctgttctaggccagggttctggctccagaaaaccaccaat

SEQ ID NO: 365240 - DNA, 201 bp, Homo sapiens; identical to SEQ ID NO: 78951

SEQ ID NO: 365241 - DNA, 201 bp, Homo sapiens; identical to SEQ ID NO: 78939

SEQ ID NO: 365242 - DNA, 201 bp, Homo sapiens
gtgtaggcctctacaggcagctgcctctggggagttggggagcctaggggttaactctagacccccctcaaccctctggaccaaagtctgtccaggaaaayaggatgccggagcccaggagtcgtcagcctagcagttgcctggcctccagatgcctcccaggtaataatgccctatcactctccaaagacttccaaattt

SEQ ID NO: 365243 - DNA, 201 bp, Homo sapiens
cctctcctgttcctgggaactacctgcgagctctactctcatccttcagtgctacctctgcctccccatcacaacttgtggtccctgacactaggatggtyttagcccctttgttcctttccttccatcagcggatggagactggggttggggtgggaagggcagtgtggaagctggtttgagaattgtgattctgcccct

SEQ ID NO: 365244 - DNA, 201 bp, Homo sapiens
ctttactgtttaccagccctgttaggtctggagctccccacagacactgatctcagtttcccccgagagtgtgagtgtaggcctctacaggcagctgcctytggggagttggggagcctaggggttaactctagacccccctcaaccctctggaccaaagtctgtccaggaaaataggatgccggagcccaggagtcgtca

SEQ ID NO: 365245 - DNA, 201 bp, Homo sapiens
ctgtctctgattttctccttcctcctctatgtctcactcctgttctaggccagggttctggctccagaaaaccaccaattcctctcatggagacagcggamgactgggagactgagcggaagaagcaggcagccagaggctggagggtcagcacggtcaacgagaggttcgacgtagccaccaggtgatcccccagtgcac

SEQ ID NO: 365246 - DNA, 201 bp, Homo sapiens
gtaatcatggtggcagtagtggtattgctttggccatcttgataggagggctacataaaaaaaaaaacagaacttatgaatacacaaagatgtttttcttmaatttcttacttcacaaaataactcaacccaagtttccttagtgagttaacctagcatattcaaagtatggtttgacttacaaatttttttaatgtatca

SEQ ID NO: 365247 - DNA, 201 bp, Homo sapiens
ctgtgtggcgccgtggtctaggcacttcttggacagcatgtctcacctgcggatgaaactcctgtgcaagaagatacaaaagcggaacctcaaattgcggmagcagaacctaaagttgcagggggcctcaaatctgaccctatcagaaactcaaaatggaaatgtgtctgaagaaacaatgggaggtggaaaggttaaaaa

SEQ ID NO: 365248 - DNA, 201 bp, Homo sapiens
gtgagagagccctcctggttacaggttggagaactaggctttaggccaccctccaagtagacgtatcctgtgaaaggcacacagtgaacacccatgcccarctccccttcacttcgcatcggggcagcattgttagctggtctggtactagaaccagagctgggggctcttaaaacacccgctttggcctggcgcggtggc

SEQ ID NO: 365249 - DNA, 201 bp, Homo sapiens
ctgtgagagagccctcctggttacaggttggagaactaggctttaggccaccctccaagtagacgtatcctgtgaaaggcacacagtgaacacccatgccyagctccccttcacttcgcatcggggcagcattgttagctggtctggtactagaaccagagctgggggctcttaaaacacccgctttggcctggcgcggtg

SEQ ID NO: 365250 - DNA, 201 bp, Homo sapiens
atcacttgagcctaggaggaggctgcagtgagccaagatagtgccactgcactccagcctaggaaacagagtgagatcttgtcttaaaaaaaaaaaaaaaagtcattcacattgtgaattacttattgccactgaattgcacacgtgaaactggtgaaatggtcaattttatattatgtatattttaccataataaaaaaa

SEQ ID NO: 365251 - DNA, 201 bp, Homo sapiens
aagtaaagttattagagatggcaaagtttatgtggaaaattatcccagaagcagtagcctacctagaaaatttgacctcatgtaaattaatttgtaacacyatccttctctatatgacaaaattatttttgttataattgtaaaaggaaataatagcaatgggcaccataagtggaataacttattgccattttcttaaaa

SEQ ID NO: 365252 - DNA, 201 bp, Homo sapiens
ggcaggtaaccttttgctatttcagttccagctgggtagaagctggcctgtgacttcaaagttatgggaagcagaggtcttacatgtggtgttatctgacwtcatcttaaactgtctttaggaccaaggaggacccatgaggttggaacaaagttattctggggatgaaaggagctaagctatgcctccgttaatcaaaac

SEQ ID NO: 365253 - DNA, 201 bp, Homo sapiens
gattacagctcactgtaaccttgaacccctaggctcaactgatcgtcttgcctcagcttcttgagtagctagcactacaggcatgtaccaccacacccagmtttttatttatttatttttgtaaagatggggtcttgctatgttgcccaggctggtcttgggctcctggcctcaagtgatcctctgccttgacctcccaaa

SEQ ID NO: 365254 - DNA, 201 bp, Homo sapiens
gaacccgggaggtggaggttgtagtgggctgagatcgtgccactgcactccagcctgggtgacagagcgacactccatctcaaaaaaaaaaaaaaaaaaaaaaaaagaaaccctggagagttgtgtcggagttcctactgagcatcactgtgccatcacgtactagccatggtttcctaggaaacgtattggcctttctaa

SEQ ID NO: 365255 - DNA, 201 bp, Homo sapiens
ggaacccgggaggtggaggttgtagtgggctgagatcgtgccactgcactccagcctgggtgacagagcgacactccatctcaaaaaaaaaaaaaaaaaaraaaaaagaaaccctggagagttgtgtcggagttcctactgagcatcactgtgccatcacgtactagccatggtttcctaggaaacgtattggcctttcta

SEQ ID NO: 365256 - DNA, 201 bp, Homo sapiens
cattctcaggcatatctaatgaaaaacatatctattgtttctaagaactatttgatgtacatccatgggcaataaatctggtgaattctcaaaaaaaaaaatgttatggaaaacacctactggcttaaagaagttaacctttctcccaaattggacaaatcctcatgagagcaaatagtacatggtatttaaagacctatt

SEQ ID NO: 365257 - DNA, 201 bp, Homo sapiens
tgcacagtggctcacgcctgtaatcccagcactttaggaggccaaggcaggtggatcacctgatgtcaggagtttgagaccagcctggtcaacatggtgaraccccatctctactaaaaaatacaaaaattagtcaggcgtggtggtgcatgcctgtaatcccagctactcaggaggctgaggcaggagaattgcttgaac

SEQ ID NO: 365258 - DNA, 201 bp, Homo sapiens
aaacagcccagatcatcttctcagagcctttagcaggggcttctaaatctccttaatactttaattggggtttttcatgtaaggagaaataatagttcccycctccacccccaagccctgcaagtagaaaaacctaaggcttatcatcttaacatatattcaagttataattgtgtgcctcttttagggtagtttctagac

SEQ ID NO: 365259 - DNA, 201 bp, Homo sapiens
catgtaaatgtaagagactcatccaaagtaatactttcttgcctttattatgaacacatgtaaaaccacccctttatttaagggtaaacattgacctcctwtcagggaaatgctattgtctccaagtgaatgcctcatccctttaaccatcaaattactatgtggttagcatgacatacactggagaagacgccaataaat

SEQ ID NO: 365260 - DNA, 201 bp, Homo sapiens
tacaattgctggcgtgaaagctcctcctttcagcatttgccaaatcataaaccaaatgccggacttacatggggaagttgaaagttgtttggtttgcaggwcttggagctatggtggagctttctgtggcttggggactctttgattccaaagcctacttttcttttttttgagacagagtttcactcttgtcgcccaggc

SEQ ID NO: 365261 - DNA, 201 bp, Homo sapiens
attttagatgttttccaaagattctgattacatacgggttttccagaaacatgtcattatataaaagcaggatttgcttacttgagtataggagtacaagkaaagttattagagatggcaaagtttatgtggaaaattatcccagaagcagtagcctacctagaaaatttgacctcatgtaaattaatttgtaacaccatc

SEQ ID NO: 365262 - DNA, 201 bp, Homo sapiens
agaaggtaactggggtgtaagcctgttgaaaagaaaatggatagctcacatgttcaaaattatgtattttagatgttttccaaagattctgattacatacrggttttccagaaacatgtcattatataaaagcaggatttgcttacttgagtataggagtacaagtaaagttattagagatggcaaagtttatgtggaaaa

SEQ ID NO: 365263 - DNA, 201 bp, Homo sapiens
tgcctccgttaatcaaaacaaggcatcggatgggtgggagaagcatctaacatcctttgcccagaacaccaaatatccctttatgggagcttctcacttcygttttaagaataaaaaaagaagagaaggtaactggggtgtaagcctgttgaaaagaaaatggatagctcacatgttcaaaattatgtattttagatgttt

SEQ ID NO: 365264 - DNA, 201 bp, Homo sapiens
gaccaaggaggacccatgaggttggaacaaagttattctggggatgaaaggagctaagctatgcctccgttaatcaaaacaaggcatcggatgggtgggaraagcatctaacatcctttgcccagaacaccaaatatccctttatgggagcttctcacttccgttttaagaataaaaaaagaagagaaggtaactggggtg

SEQ ID NO: 365265 - DNA, 201 bp, Homo sapiens
attctgaaaaatactgacttatataggattttagtggttttcaaccctggcttacattagatacagtggagaagctcaaaaaaaaaaaaaaaaaaaaaaarggtcccatgcctgtatgccaaaaccccaaaacaatcaaatcagaacatccagcgcatgagacccaggcaacaggcattttcttaagcttcccaggcgact

SEQ ID NO: 365266 - DNA, 201 bp, Homo sapiens
tactgcaatgattaggtgtcattcattcagctattttcacacatgcctactaagggaaaccactattcagcaggtagctctcaaagtcctgcatgcagaaraatcatatggaaagtgttttgaatgcaaattccagggcctcactccctctattcccaccctcattctaccccaactaccaggagtccaattcagcaggct

SEQ ID NO: 365267 - DNA, 201 bp, Homo sapiens
ctgggtgtggtggcaggcacctgtaatcccagctactcaggaggctgaggtagaagaatcgcttgaacccaggaggcggagcttgcagtgagccgagatcrtgccactgcactccagcctgggagtcagagtgagactccatcagagagaaagaaaagaaaagaaatcagcaacatagttcaggctctctccatttaaact

SEQ ID NO: 365268 - DNA, 201 bp, Homo sapiens
aattagctgggtgtggtggcaggcacctgtaatcccagctactcaggaggctgaggtagaagaatcgcttgaacccaggaggcggagcttgcagtgagccragatcgtgccactgcactccagcctgggagtcagagtgagactccatcagagagaaagaaaagaaaagaaatcagcaacatagttcaggctctctccatt

SEQ ID NO: 365269 - DNA, 201 bp, Homo sapiens
ttttcaatatcacttcacggtccaagatgcctgctagaatcccagccattacatctgagaccagcagaaagaggaaaggagaaagaaacaaaatgtctacctttcttaaagggccaagttcaatagcctttctggagcttcccacaacactttgacttacatcagcttgaccgcaaaggaggctgagtatagcctttaact

SEQ ID NO: 365270 - DNA, 201 bp, Homo sapiens
tattctcactcataggtgggaattgaacaatgagaacacttggacacagggtggggaacatcacacactggggcctgtcgtggggtggggagaggggggargggatagcattaggagatatacctaatataaacgacgagttaacgggtgcagcacaccaacatggcacttgtatacatatgtaacaaacctgcacattgt

SEQ ID NO: 365271 - DNA, 201 bp, Homo sapiens
acatatacaccatggaatactattcagccacaaaaaatgatgagttcatgtcctttgtagggacatggatgaagctagaaaccatcattctgagcaaactktcgcaaggacagaaaaccaaacaccgcatattctcactcataggtgggaattgaacaatgagaacacttggacacagggtggggaacatcacacactggg

SEQ ID NO: 365272 - DNA, 201 bp, Homo sapiens
acaggttggagaactaggctttaggccaccctccaagtagacgtatcctgtgaaaggcacacagtgaacacccatgcccagctccccttcacttcgcatcrgggcagcattgttagctggtctggtactagaaccagagctgggggctcttaaaacacccgctttggcctggcgcggtggctcacgcctgtaatcccagca

SEQ ID NO: 365273 - DNA, 201 bp, Homo sapiens
agcaatattcacaatagcaaagacttggaaccaactcaaatgtccatcagtgatagactggattaagaaaatgtggcacatatacaccatggaatactatkcagccacaaaaaatgatgagttcatgtcctttgtagggacatggatgaagctagaaaccatcattctgagcaaactttcgcaaggacagaaaaccaaaca

SEQ ID NO: 365274 - DNA, 201 bp, Homo sapiens
aacaacaccatcaaaaagtgggcaaaggatatgaacagacacttctcaaaagaagacatgtatgtagccaacagacacatgaaaaaatgctcatcatcacyggccatcagagatatgcaaatcaaaaccacaatgagacaccatctcacaccagttagaatggcgatcattaaaaagtcaggaaacaacaggtgctggaga

SEQ ID NO: 365275 - DNA, 201 bp, Homo sapiens
taaccatcaaattactatgtggttagcatgacatacactggagaagacgccaataaatccaaaggagataatttaagaataataaaacaacatacatgaarcaaataataaaaccaacatccagactaatgatccttaagtgtctggataccaattccaactgaaagagttttcctattaactccaagggaaaccagttct

SEQ ID NO: 365276 - DNA, 201 bp, Homo sapiens
ttgcatttttccatgttctaggaataccaatgtataaaccaaccactgctgaaatttataacatcaatctgatacagtaagtttccttctgtaaatcaaascaggattcttaactatagtctaaagcgccctctagtgttcctatgcaaaaactcccgagataatgtgccatccttataactagggtctttttctgccctg

SEQ ID NO: 365277 - DNA, 201 bp, Homo sapiens
cagagtcatggccattgtaacttacagctgaatggaacataaactttctccacaaataaattctgttttgcattgcttgacccagggccagccttggaaavttcttccatgtctctatcaccagagactctgccaaggagagaggaaggctgcaacatcaagctcttccgcatccccttcaaaactccaggtgagctagag

SEQ ID NO: 365278 - DNA, 201 bp, Homo sapiens
cgcatccccttcaaaactccaggtgagctagagcccttaagtgccttcgagaacagcagctgggtgcgtaagggggcgtgtcccatctggtcctgcttaasaccagcaagagcagagctggctcctctgtccttcttccttttttctcttttctacatcacacccaaatggttggagctggtggccagagataagaactta

SEQ ID NO: 365279 - DNA, 201 bp, Homo sapiens
attcctcactgaaaccagttttagtcctaggacttcagcatctattcatattctctggttctactaggggtggacgtatttgtcaccccaaaggagcctgsttcctggagcagcccctggagggacacagagagagcctccaccgtctcctgagtcggtcttagagaacgagtctgccagggagctgaagcaatttttcct

SEQ ID NO: 365280 - DNA, 201 bp, Homo sapiens
tgcagtcaggcctgggtgaaagagtgagactccgtctcaaaaaaaaaaaaaaaaaaaacttctctctcccattctccccggattcctgaggctcacattgygtggtatgagcctgtcatatacgtgcccaaaatggcatcccttctctactctccactccaactctataactcctgcttcattagttcaactggggtagac

SEQ ID NO: 365281 - DNA, 201 bp, Homo sapiens
attcaattaggaaaagaggaagtcaaattgtccctgtttgcagatgacatgattgtatatttagaaaaccccatcgtctcagcccaaaatctccttaaacwgataagcaacttcagcaaagtctcaggatacaaaatcaatgtgcaaaaatcacaagcattcccaaataccaataacagagagccaaatcatgagtgaact

SEQ ID NO: 365282 - DNA, 201 bp, Homo sapiens
tgttatctgacttcatcttaaactgtctttaggaccaaggaggacccatgaggttggaacaaagttattctggggatgaaaggagctaagctatgcctccsttaatcaaaacaaggcatcggatgggtgggagaagcatctaacatcctttgcccagaacaccaaatatccctttatgggagcttctcacttccgttttaa

SEQ ID NO: 365283 - DNA, 201 bp, Homo sapiens
cagcatagtggtggagatgagggcgagaattaggatgcagaagcatctcaagacacatgttctgtcctcaatcagatattgaatgaataaaccaaaatacraacttgaaactagttacaaatagataccaaaccctagtctcacctctatttaattactgccttattctctagcaagcagactcagaaaaaaaaaaaaaat

SEQ ID NO: 365284 - DNA, 201 bp, Homo sapiens
attttatgaggccaacatcatcctgataccaaagcctggcagagacacaacaaaaaaagagaagtttagaccaatatccctgatgaacatcgatgcaaaawtcctcaataaaatacagacaaaccgaatccagcagcacatcaaaaagcttatccaccacgatcaagttggcttcatccctgggatgcaaggctggttcaa

SEQ ID NO: 365285 - DNA, 201 bp, Homo sapiens
  misc_feature (1)...(201): n = A,T,C or G
gctccctcattttataaagaaactgacaggcaaattaaatggcttttgcacctctcatattcattcatgaaaaatagataccagagtctaagtgtttcatntagtgtggaaattaaggggaaaaaacatttcccccttagccaaaaggaattaagtacactggattaatgggttaataaacagcccagatcatcttctcag

SEQ ID NO: 365286 - DNA, 201 bp, Homo sapiens
gacccaagatggttttgaatgcagcctaacacaaatttgtaaactttcttaaaacattatacaattttttttgcaattttttttagctcattggctgtcaytaatgttagtgtattttatgtgtggcccaagaaaattcttcttcttccaatgtggcccagggaagccaaaagattggacacccctgaactagagcaccct

SEQ ID NO: 365287 - DNA, 201 bp, Homo sapiens
aagcaggaaagatctaaaattgacaccctaacatcacaattaaaagaactagagaagcaagagcaaacacattcaaaagccagcagaaggcaagaaataamtaagatcagagcagaaccaaaggagatagagacacaaaaaacccttcaaaaaatcaatgaattcaggagctggttttttgaaaagatcaataaaactgat

SEQ ID NO: 365288 - DNA, 201 bp, Homo sapiens
tcctcttcaccagcctcctctttttttgagcatcactaaggtcataaaactcactactttctactcagtcctatccttctttttgtaccatctactgccaytacatctttcaatacctggagcccacatccatcatccacttacatacctctatgttgtccccctacctcctctacagtaagaggaaaacagaggttccag

SEQ ID NO: 365289 - DNA, 201 bp, Homo sapiens
tggggtgggggaaaatcaggctataaggaatgagattgtggaaacaatgaggatgtgtttcaaaagaagaaaatcactgacatgtcagcatattggccacrcctgtcctagtcttatttgctcttcaaagagctataatcatgggtcaaacaggaaaggaaactattagacttctccatgtaacagagtacacagaatagg

SEQ ID NO: 365290 - DNA, 201 bp, Homo sapiens
accccaacactttaggaggctaagacaggatgattgcttgaggccaggagttagagaccagcctgggcaacagagcaagaccttgaaaaaaaaaaaaaaaaggaaagaatgaaagaaagaatgaagggaagggaggcaggaaggaaggaaggaagggaggaaaaaaaggaaaaagaaaagagaaaagaaaagaattagctg

SEQ ID NO: 365291 - DNA, 201 bp, Homo sapiens
acccatgcccagctccccttcacttcgcatcggggcagcattgttagctggtctggtactagaaccagagctgggggctcttaaaacacccgctttggcckggcgcggtggctcacgcctgtaatcccagcactttgggaggccaaggcgggcggatcatgaggtcaggagatcgagaccatcctggctaacacggtgaaa

SEQ ID NO: 365292 - DNA, 201 bp, Homo sapiens
cagtaagccatgatcacaccactgcactccagcctgggtgacagagtgagaccctgtctcaaaacaaacaaacaaataagtaagataaaaaaaaataatgrggggggggggcgggaagagcaactcaaagaattgcatacaaaaaatagttaatattttaaatgtagacattgactacatgcaatatctatttatcaacaa

SEQ ID NO: 365293 - DNA, 201 bp, Homo sapiens
gggttcacatcatggctcccctgaatatcagctgtctagtccagagtaaggacataaaactcactactagtttcacagcctgtctgatcctaggtttcctwactagaaaatgcagataatgaaacatccctgtctgacagctttgaaaagagttgtagttctcccagcatggagtttgagatctgagaacggacagactgc

SEQ ID NO: 365294 - DNA, 201 bp, Homo sapiens
tgattttctccaaggcaccaaggagagcacaaagtcaggctcccagcagcagagtgacagtcagacaggcataaactggacccgatcagacaagagccacrtgggtatctgccagtataaacaaggttcctgtgagagagccctcctggttacaggttggagaactaggctttaggccaccctccaagtagacgtatcctg

SEQ ID NO: 365295 - DNA, 201 bp, Homo sapiens
tctgacagctttgaaaagagttgtagttctcccagcatggagtttgagatctgagaacggacagactgcctcctcaagtgggcccctgacccctgagtagsctaacagggagacacctcccagtaggggccgactgacacctcatacagctgggtgccactctgagatgaggcttccagaggaaggatcaggcagcaacat

SEQ ID NO: 365296 - DNA, 201 bp, Homo sapiens
cctctctcccaactccacacataattcagtcaaggctggctgctttttcaccaaccaatccaaggataaaaagctaggaatgaacaacattcaggtaaaakgaggcctctccttctatgagtgtcaaattatataaacctatgagacagcctctcagagtcatggccattgtaacttacagctgaatggaacataaacttt

SEQ ID NO: 365297 - DNA, 201 bp, Homo sapiens
tgatccaccagccttggcctctcaaaatgctgggattacaggcatgagccactgcacctggctaacaataagatttctggaagaacataaaagttcagacrgtagcagggatgtctagatgggctggcaaagaacctgcaggatcatgagccttctggattttatagctctgatcctagaacataagccactgggtggtgt

SEQ ID NO: 365298 - DNA, 201 bp, Homo sapiens
tttgtgggctgttgttttgtgtttctttttatgtttatcactttatttttatttcaatagcttttggggtacaagtggttttggctacatggatgaattgyatagtggtgaagtctgagattttagtgtacctgtcacccgagtagtgtacattgtacccactatctagttttttatccctcacccattctccccgttctg

SEQ ID NO: 365299 - DNA, 201 bp, Homo sapiens
gctggctcctctgtccttcttccttttttctcttttctacatcacacccaaatggttggagctggtggccagagataagaacttagaggcatttctaccgstagccccctgggctccccactctcccattgcttcctttaaagggaccattcatgcatttaccctcaaattgaaaatggcccacactgtattatgcaaaat

SEQ ID NO: 365300 - DNA, 201 bp, Homo sapiens
ctgctcaccaagcaaaagttgaagagcctgtccacacatcacttgctgccagaaacacacacacacacacacacacacacacacacacacacacacagagrcagagagagaaagaatcaagcaagttagtgtttattacatccctaccatgtataccaagtgctgggcttggggctttacgtatattatttcacttaatct

SEQ ID NO: 365301 - DNA, 201 bp, Homo sapiens
aaaaaaaaaaaaagtcattcacattgtgaattacttattgccactgaattgcacacgtgaaactggtgaaatggtcaattttatattatgtatattttacyataataaaaaaatacaacaaaagaaatgtttaaatagggggacaatctcatccattcctccccaacctgtagtaggacctcccccattcctcactgaaac

SEQ ID NO: 365302 - DNA, 201 bp, Homo sapiens
aatctcattttctaagaacctggaatgtcatgcagtacatgtccagcttattgatgtgttgaaattttttgcctttttaggaaacttaagttgttatccartgcaaagtacaaaacataattgaatttgcaatggcaagaaaatattttattcagcccttaatcattcaaaattttgtctgttttgcaaactggatagact

SEQ ID NO: 365303 - DNA, 201 bp, Homo sapiens
ataagttccagatgttcacgggattgtcttgcatcacaatcatccaaaatatatttgcttactgcctttcgcgtatgtgcagcatagtggtggagatgagrgcgagaattaggatgcagaagcatctcaagacacatgttctgtcctcaatcagatattgaatgaataaaccaaaatacaaacttgaaactagttacaaat

SEQ ID NO: 365304 - DNA, 201 bp, Homo sapiens
tttgagatggggttttgctctgtcgcccaggctggaatgcaatggcatgaaaatggctcactgccagcctccacttcccaggcttaagcaatcctcccacytcagccctcagagtaggtgggactacaggcacatgccaccacactggctaatttgttttgtagagacagggcctccctatgctggccaggctggtttcaa

SEQ ID NO: 365305 - DNA, 201 bp, Homo sapiens
tgttttgtagagacagggcctccctatgctggccaggctggtttcaagcagtccacccgccttggcctcccgaagtgctaggattacaggcatgagccacygtgcccagccccaaaaaagcattttttaaaggaatggccagagcagtaagaggaaaagcaagtgagcaagtgggtgtcatacatgaaagccaagtgaaga

SEQ ID NO: 365306 - DNA, 201 bp, Homo sapiens
tggcaagaaaatattttattcagcccttaatcattcaaaattttgtctgttttgcaaactggatagactccaaaggaataaattatatgagatgcatgaayactcaaacatgaaaacaattgtgtattttaattagagtagacaacataattagatatatacctgtggttaggctactaataataatgattgttgaaggac

SEQ ID NO: 365307 - DNA, 201 bp, Homo sapiens
tgggcacggtggctcacccctgtaatcccagcactttgggaagctgaggcgggcagatcacctgagatcaggagtttgagaccagcctggccaacacagcraaacaccgtctctactaaaaatacaaaaattagctgggtgtggtggcaggcacctgtaatcccagctactcaggaggctgaggtagaagaatcgcttgaa

SEQ ID NO: 365308 - DNA, 201 bp, Homo sapiens
gaaagaaaagaaaagaaatcagcaacatagttcaggctctctccatttaaactttctctctgtgacttgaatcaacctcatttttttatgttgtcccaagytgttaccggccttagatgatgagtgtatgacattaaacacaaaaaactcgacaccattaccttctgccatggctgaataagctaaagacatttaaccaca

SEQ ID NO: 365309 - DNA, 201 bp, Homo sapiens
ctattgagcataccagaggtagtgggtaatactgagaacaggggaggccatgaatgtgtggggacagggagtatatggaatatcccatatgctttcctctyaattttgctgtgaacctaaaactgctctgaataagtagtctttaaaatgaaaaaaaaaaaaaatccttgttgtttttgtttgtttgtttgtttttagctc

SEQ ID NO: 365310 - DNA, 201 bp, Homo sapiens
gtgattcttatgatggggtttgagaaatgtgtctgtcttactcaactgagtcagaaatactgatcccagcaaagctgcttcaagggattttttttttttttgagacaactcaagggatttttgactccagttttgaagcccctattccatgaatttagctccaatatgacctgggtcttcccaaagagacggaactcacct

SEQ ID NO: 365311 - DNA, 201 bp, Homo sapiens
ccttggcctctcaaaatgctgggattacaggcatgagccactgcacctggctaacaataagatttctggaagaacataaaagttcagacggtagcagggaygtctagatgggctggcaaagaacctgcaggatcatgagccttctggattttatagctctgatcctagaacataagccactgggtggtgttgtgtgggtta

SEQ ID NO: 365312 - DNA, 201 bp, Homo sapiens
caaactcatggatgctgactcacactaatagaaatgagtatgatatagaaaaacaggatgccacatcatcaggcaaacccaacatgctaggcttgctggartggggtctgagagtctccatttctaacaagttcccaggtgatgccagtgctcctggcccatggaccccactttaaacagcaagggtctagacaagctata

SEQ ID NO: 365313 - DNA, 201 bp, Homo sapiens
ccacttttattactaatacaacaggacatttctcccagatttaacacttagtgctacataccaggcacatggtattacaagcacttcatctattaactaayttaatgttcataacagtgctatgactaggaactattcttagtgctaactctacagactttttaaaaacggaggcatagaggctaagtaaattgactaagt

SEQ ID NO: 365314 - DNA, 201 bp, Homo sapiens
ggtagtgactttcactgatggcaataaataataatatttaaaattgtcctacacttcattcttttttattgagttcctgccatgatttatctgcaaatctktaaagcaagcattaccaaaaaattaattacctgattgaaatcgacggatgagtttattatttttcaaaccttccactgtatgttttatcttccctggaca

SEQ ID NO: 365315 - DNA, 201 bp, Homo sapiens
tgccagaaacacacacacacacacacacacacacacacacacacacacacagagacagagagagaaagaatcaagcaagttagtgtttattacatccctamcatgtataccaagtgctgggcttggggctttacgtatattatttcacttaatctgcaagtcagatataatcctattgtcatgaacacactatactgcctc

SEQ ID NO: 365316 - DNA, 201 bp, Homo sapiens
ttgtcctacacttcattcttttttattgagttcctgccatgatttatctgcaaatctttaaagcaagcattaccaaaaaattaattacctgattgaaatcracggatgagtttattatttttcaaaccttccactgtatgttttatcttccctggacatgtagggctaagtagatgatgtataccggaaaaatcagaacta

SEQ ID NO: 365317 - DNA, 201 bp, Homo sapiens
ttacatttcccatctttagtgttatctacttaaaatccatacctattgttttcccttcatatattataaagtcataatctcctttatgtgctaggctgagsatgacttctctgttggcaaacaacgcaatacctgcttgaaactcacttaatgttcaaaggaagaaacaccaccaaatgtttagtacattctcaggcatat

SEQ ID NO: 365318 - DNA, 201 bp, Homo sapiens
ggaaggatcacttgagcccagaagtttgaggctgcatcccagcctcagtgacaaagcaagaccctgtctcaaaaaaaaaaaaaaaaaaaaaaaaaaaaaamaaacataactaatgattgccctttcttgttaatgttttgcaaaaatgtgtatctatccgagactcctttgaggagtgttatggacctgatggtgttcccc

SEQ ID NO: 365319 - DNA, 201 bp, Homo sapiens
gcatgagccactgcacctggctaacaataagatttctggaagaacataaaagttcagacggtagcagggatgtctagatgggctggcaaagaacctgcagsatcatgagccttctggattttatagctctgatcctagaacataagccactgggtggtgttgtgtgggttatggacagctttgggcccaacagcataaagt

SEQ ID NO: 365320 - DNA, 201 bp, Homo sapiens
tataatatgctaggcatgctaacatctgttattccacctaaactaaacaaccttgcctggctgtgcacagtggctcacgcctgtaatcccagcactttagraggccaaggcaggtggatcacctgatgtcaggagtttgagaccagcctggtcaacatggtgaaaccccatctctactaaaaaatacaaaaattagtcagg

SEQ ID NO: 365321 - DNA, 201 bp, Homo sapiens
tataaataagcatataatattttgtaaatacaaactatgatttataatcatctttcactcaataaataatacattcaagacagcatgcaggcaataaaagkgtttgggtctactttagaacatccctcaaaaaggtaactcagctggtcttggtcacttataatcctagcactttgagagcctgaggtgggagaattgctt

SEQ ID NO: 365322 - DNA, 201 bp, Homo sapiens
agtaggacctgggtattcccaaggtagtctttacgtatttactatgcttactccagcacttacactgctgtattgtaatcattggcttactcacacgtctytcatacaaaactggagggcagaaaatgtgtgtcttttctaagattatgcttcatatagaaagtattcaataaatataactataaataagcatataatatt

SEQ ID NO: 365323 - DNA, 201 bp, Homo sapiens
agtgagttaacctagcatattcaaagtatggtttgacttacaaatttttttaatgtatcatctgcaacagatgacttctgtaatttggggaaaagtcctakggaaatcccggtacaggatcacttcatcagttcatctccctcctccatcagtttatacattagaacaatggttctaattcttgtggcaaccataggcccc

SEQ ID NO: 365324 - DNA, 201 bp, Homo sapiens
tgaggatggcaaatactgcctggacctgctcacccaggcgggcgacgacttcataatcttggactcatcccaagggaactcaagtgtatcagatcgccatwgtgcattacatcaaacagaagtaccccaacctccaggtgattggggggaacatagtgacagcagcccagggaaagaacctgattgatgctggtgtggacg

SEQ ID NO: 365325 - DNA, 201 bp, Homo sapiens
cactgtgacagaggccgacatggccattgcgatggctctgatgggaggtattggtttcattcaccacaactgcaccccagagttccaggccaagaggtgcwgaaggtcaagaagtttgaacaggggggcttcatcacagacctggtggtgctgagcccctcgcacactgtggttatgtgctggaggccaagatgcggcatg

SEQ ID NO: 365326 - DNA, 201 bp, Homo sapiens; identical to SEQ ID NO: 365292

SEQ ID NO: 365327 - DNA, 201 bp, Homo sapiens
ggaggatttagtgggtagaaatgtgggaagacaatggagagaaggaggaagaagggcctactgggcaaaaggaattacatgagcaaagtcagagaggtggwtaagaggtaagctttgttgatggcagagaacaagtttctccatcccaggcttttaattaaaaaataaaaataaaaaaataaaaactttaaaactcaggaa

SEQ ID NO: 365328 - DNA, 201 bp, Homo sapiens
agaaagggaagctgcctatcgtcaacgatctcgatgagctggtggccattatcgcctgcaccgacctgaagaagaaccgagactacccgctggcctccaakgattcccacgagcagctgctgtgggtgtccttctacaggaccttggacaatatatatgttgcagcatatacatatatatgcagctgtgggcactcatgag

SEQ ID NO: 365329 - DNA, 201 bp, Homo sapiens; identical to SEQ ID NO: 78980

SEQ ID NO: 365330 - DNA, 201 bp, Homo sapiens; identical to SEQ ID NO: 78984

SEQ ID NO: 365331 - DNA, 201 bp, Homo sapiens
gtcacaggggagccccaggaggcctcttgtcactcgccctgtgcccgcagtgtggtcatatttttgagactccttcatttcttgcccaactcttaccaccrgccacagctattccttagcaacctcctcttccctccttagatacctgggcctaagccacagtgcctctggctagcagggtgggaattggtttcactactg

SEQ ID NO: 365332 - DNA, 201 bp, Homo sapiens; identical to SEQ ID NO: 78986

SEQ ID NO: 365333 - DNA, 201 bp, Homo sapiens; identical to SEQ ID NO: 78985

SEQ ID NO: 365334 - DNA, 201 bp, Homo sapiens
gataagggctcatatcagcctttgggatctgtggcccagactccctggctctgttgtgggctttgctgcctcagcctccagactggcctgccagggacagyggggcctcagccaagttgcccagacagtggagtagccttagagcgttggagccagtgtggaagagccgctgcaccatgatgtgctccccttacagatgga

SEQ ID NO: 365335 - DNA, 201 bp, Homo sapiens
agcctttgggatctgtggcccagactccctggctctgttgtgggctttgctgcctcagcctccagactggcctgccagggacagcggggcctcagccaagktgcccagacagtggagtagccttagagcgttggagccagtgtggaagagccgctgcaccatgatgtgctccccttacagatggagacactgagagggtga

SEQ ID NO: 365336 - DNA, 201 bp, Homo sapiens
gcaagactggacctgattgtccttctgcacgctctgtaatttgcccctggaataagcattaagtcatttggaggccgatgccaaagataagggctcatatyagcctttgggatctgtggcccagactccctggctctgttgtgggctttgctgcctcagcctccagactggcctgccagggacagcggggcctcagccaag

SEQ ID NO: 365337 - DNA, 201 bp, Homo sapiens
caggtattagaagttacagccacgccagccccacgtggagactttcttcttgatgtactcagaaggactgattgacttgaaaaaggcagaacgtcctccgygcatggctggggactcctcagtgctggtctggatgcagcctcaaggtgtctgagcatccgaatgtcctgcttgggggtgcacgccaggggacctgaagct

SEQ ID NO: 365338 - DNA, 201 bp, Homo sapiens
ccggctagtcctgagagaagctctgaggccaactgcctagagaagccagggatattaacccctggtgatggcatctgttctcctcattaccttgttttgcytctgtaggttttagtttccacagcaactctagcttggggtgtgaatctccctgcacatacagtcatcatcaaaggcacccaggtgtacagtccagagaag

SEQ ID NO: 365339 - DNA, 201 bp, Homo sapiens
gttttctggggagtcattactctgtccaaagtcgaggtagctcagaggccttcaggccgctgatacttccagaaggccacctccccatcatcactgcaggmggccagtagccctggctccttggggttccaggccacacagttgacatcctgggaatgggcctgatgcaagtgggctgtcagggagaaggtgggctgctgt

SEQ ID NO: 365340 - DNA, 201 bp, Homo sapiens
tgcagagattcataaacagagtcgtcccgtgatttgtccgtgtctccccgtattaacattttactcttacttggcgaagggagttgggcttcctgagcatkgtctccgtgttgaggtggcttttccttctttccctgcttctgtcaccagctatgtggattaccccatctatgacgtgcttcagatggtgggccacgccaa

SEQ ID NO: 365341 - DNA, 201 bp, Homo sapiens
ggctctcggtttcaccccaaagccatttctctacccattgagctaatttagggtgacttgagggagaggttctgtggtgatgcaggatcagctccagatcrtggttgagttggggtcatttccacaggaaggtgatgaagacgtatacggggaggttcgagaagaggcatctgatgatgacatggaaggggacgaggctgt

SEQ ID NO: 365342 - DNA, 201 bp, Homo sapiens
tctgctgctgtgtgctcctactgtaagcgccaccctgcctgctgttttcttgtagaatatggtgtggagtttccgttgcaagattgttttttatttccacycccaccccctaattctttgtcctttgatggaagagaggttaaatagtaggataaagtgcccaggacaagctctattctctatttgggaaataagcccatg

SEQ ID NO: 365343 - DNA, 201 bp, Homo sapiens
ccatcaatgtggatgacttcaagattatctacattgcccccatgcgctccttggtgcaggagatggtgggcagctttggaaaggtgagggagtagaacttycctgcagaggatactgggtgcacctatgaaagtgttgtggacaggcctggacctcaccgcttcttgtattagggcatctctggcatgcctcctgggattg

SEQ ID NO: 365344 - DNA, 201 bp, Homo sapiens
tcagatattaacttcttgccatgaagctgaggagaggagggtgggcttgatccagtcttcccttggggacgaaaggttctgccattcaatatcacattgcwtgtccattaggcgaagaaagcgtgatgaggaccggcatgacatcaacaagatgaagggttatactctgctgtcggagggcattgatgagatggtgggcat

SEQ ID NO: 365345 - DNA, 201 bp, Homo sapiens
cctggagttagaggcttggatgccttagctcctctgtctgcactccagaactgcctgacttcatttcgtatgttgtcctttgttttgacaattgatccatstcccagtccgtctcttcttccttcttgatacttacactgcttctttctgttggtttccagtgtttaacactgtatacaacagtgacgacaacgtgtttgt

SEQ ID NO: 365346 - DNA, 201 bp, Homo sapiens
ggagcctttttacacgggtcaggagcccactgggatgagaggtgcgcccgtgtttgtcagcgggatgacactgcaggggacagcaggggagcccgggcagwtctgctccttctctgcctggttttagcttctctcacatttcctttttctgtcagagctcttcagcatgtccctcaatgccaagaccaaggtgcgagggct

SEQ ID NO: 365347 - DNA, 201 bp, Homo sapiens
gtttattggagcctcattggagattcttctgccagaatcacttcctgtcactctttggcccttgaatctgcctgtttggggcatgcttagagtgatctctkttttgctggcatggctgagccagcccgtggctgcatgagtgttagcactttctggtcagaggagcagtccatcagctgtagttttgccttggtgttcctg

SEQ ID NO: 365348 - DNA, 201 bp, Homo sapiens
tgaaacaaatgtaaacagatagacaaaaaaccatcatatccaacatcatttagggttttataagtaaaagaatccattctctgagggaatgagtgaggaakcaggatattgtattccatatacacagaaacttccagagattagtgactaagtctgagtatagtttaagttgtctgggaaaagcaagaaaggagacttcac

SEQ ID NO: 365349 - DNA, 201 bp, Homo sapiens
gaaggtcaaggatgctcctcctggtcctctcaggggctggtaaagtcttatatgacgttttctggggagtcattactctgtccaaagtcgaggtagctcaraggccttcaggccgctgatacttccagaaggccacctccccatcatcactgcaggaggccagtagccctggctccttggggttccaggccacacagttga

SEQ ID NO: 365350 - DNA, 201 bp, Homo sapiens
acacatgtacttgcttaatggaacccacccttcgacccctcaggggtagcccttggtacttaattatagaacgtgtatttgtggcatccttgtactgcgcrttgcccctttaaaagtgtttgtttgctttgatcattctggtggtccccatgtaaagcactgtctttctgtttcacgacttactagtcagcacctgtgact

SEQ ID NO: 365351 - DNA, 201 bp, Homo sapiens
agtaaatccatggtgtttactaaaatagagtaacagaacacatgtacttgcttaatggaacccacccttcgacccctcaggggtagcccttggtacttaaytatagaacgtgtatttgtggcatccttgtactgcgcattgcccctttaaaagtgtttgtttgctttgatcattctggtggtccccatgtaaagcactgtc

SEQ ID NO: 365352 - DNA, 201 bp, Homo sapiens
gatcgtcaccaagaccattgagaacaagcaggatgctgtggactacctcacctggacctttctgtaccgccgcatgacacagaaccccaattactacaacytgcagggtcagtgggcttgggagcacacgtgatcctttggtggttctcacagtctttgctgggcatcttcttgaggctccccactcacctctcgcctcca

SEQ ID NO: 365353 - DNA, 201 bp, Homo sapiens
ctctggaaagtcctcacaagaaggtgggctatggattgtcaagtagaacttggttgcagggtggtggcaaagtgatcgaggctggcagagacctggtgagmtaaatgcctggttacttttatagctcgtagcctcaggtgaactgatgagttccaagaagaaggatttgcaccctcgggatattgatgcattttggctgca

SEQ ID NO: 365354 - DNA, 201 bp, Homo sapiens; identical to SEQ ID NO: 79003

SEQ ID NO: 365355 - DNA, 201 bp, Homo sapiens
ggcaagctagaggaggtctgccaagtgactaccacctggagtgtggcaagctgttgtggaagctgtgtcctgctgcttgaggccacctagctaatcttttyaaaaacagacaagtcttcctttagttgtggcatcagcattaatgagaaaggtcagagcctagtatgtggcaggttttgaagaggtgtggctcttcacatc

SEQ ID NO: 365356 - DNA, 201 bp, Homo sapiens
gcccaccctgagtgagattgagcttttcagggtcttctcattgtcctctgagttcaagaacatcacagtgagagaggtgagcctatgcagcatgatggggyggggagttggtgctcaccaagtcactgaatggtgtccctcctcggccacaaggctttcccttgaccttttcctccttgtggcaggaggagaagctggagc

SEQ ID NO: 365357 - DNA, 201 bp, Homo sapiens
aagatgtagccacctttctacgtgttgaccctgccaagggtctcttttactttgacaacaggtatcaggaaagactgggcaaagttctgccaaggtgaccrtcctgctctctttcctcttttccaaggagtgctactgggttgggttttagaagggcctttgggttttgatgtggtgtgaatcataaaggaggaatattgc

SEQ ID NO: 365358 - DNA, 201 bp, Homo sapiens; identical to SEQ ID NO: 79004

SEQ ID NO: 365359 - DNA, 201 bp, Homo sapiens
agccgcggccatggcggatgtaaccgcccgtagtctgcaatacgagtacaaggcggtgcgtttggtcttggggaaggattccaggctcaggagtccaatgrggagggggaggctgaaaaagggagtttcagtctgaaggcctacaggagagccacgaaaacgaaggggaaatggaatcggggtgaaggtgggggttatacg

SEQ ID NO: 365360 - DNA, 201 bp, Homo sapiens
tccatcccattaccacccacatgcctcagggtgttgaagggctgtgtgagcctgggccacgtggtgctttggcctgagctggtctcaggcagggtcacctrttcatcaccagctatttttcttccactttgtagttggctcagaaggtcccccacaagctgaataaccctaagttcaatgatccgcacgtcaagaccaacc

SEQ ID NO: 365361 - DNA, 201 bp, Homo sapiens
tcggggagagcacgggccctgggtccttagtgccagcgggcggccagaaccagagtgcgggggtctagggattcggggacccagacgcaccaggcccacayatcccgctcagaagggtgcggaaagccgcgcgcacacggcagggacacgccccagacacgccccgccccgcacttctggggcgcgacccggaagcggaag

SEQ ID NO: 365362 - DNA, 201 bp, Homo sapiens
tcttcttgaggctccccactcacctctcgcctccataggcatctcccatcgtcacttgtcggaccacttgtcagagctggtggagcagaccctgagtgacytggagcagtccaagtgcatcagcatcgaggacgagatggacgtggcgcctctgaacctaggcatgatcgccgcctactattacatcaactacaccaccat

SEQ ID NO: 365363 - DNA, 201 bp, Homo sapiens
agtcagatacggaggaaatccttagtaaggtagagtgtgggtgtggggcagaggggtcagtggtgctctaaacatctcagctccaactccgcccacttttrtactccttttcctgttcaggcaatccggctcatccaggcctgcgtggatgtcctttccagcaatgggtggctcagccctgctctggcagctatggaactg

SEQ ID NO: 365364 - DNA, 201 bp, Homo sapiens
gcagggacacgccccagacacgccccgccccgcacttctggggcgcgacccggaagcggaagggaacccgtttcttttccttccccagtgcgtctttcctrcgtcgttccggcgcggcgggagcagagatctgcggccgtttgcagcttgcggtagggaggcgtggtggtctgaagcctccgagcagccgcggccatggcg

SEQ ID NO: 365365 - DNA, 201 bp, Homo sapiens
ttctgcaggctgtacatgaaacatggtgttatctgcttctgggaaggcctcagggaaggcaaaggggaagcaggcatcttatatggcaggagtcaggaccragagagtgagtggggaggtgctacacacttttgaacaaccagatctcgtgagaactcattcactagacagtaccaagggtgggtggtgctaaaccattca

SEQ ID NO: 365366 - DNA, 201 bp, Homo sapiens
atgtgcagtttgagtctgatgaggaggtgagtgataaacatacccagtccattcttgtttttgacgttgattaaggtaaagggaccccttctagtgtaaasaagctctctagtttaaaccagataaattttatggtgttgtatgggtttcagacttgggcattatatgttcttttgcttaaaaaaaagtgcagttatcttt

SEQ ID NO: 365367 - DNA, 201 bp, Homo sapiens
ggcgggtggatcacaaggtcaggagttcgagaccagtctggccaatgtggtgaaaccctgtttctactaaatatacaaaaattagcctggtgtggtggcaygcgcctgtaatcccagctacctgggaggctgaggcaggagaatcgctggaacccaggaggcggaggttgcagtgagccgagatagcaccactgcactcca

SEQ ID NO: 365368 - DNA, 201 bp, Homo sapiens
ccatcgtgtcgcagaagaaggcagatgaagtattggagattttgaaggtatggccaagatgacaatagttgtatatttagtgtatcttagcacatggggayagcgtatgaagtggcagatggctttggccttaatggtggtgttacctgctctctgcagacggccagtgatgatcgggaatgtgaaaatcagctggttctg

SEQ ID NO: 365369 - DNA, 201 bp, Homo sapiens
tgggctgcagcctcagtactctcatttccttgtaggggagcttatccgcatgccaaagatggggaagaccatccacaaatatgtccatctgtttcccaagytggagttgtcagtgcacctgcagcctatcacacgctccaccctgaaggtggagctgaccatcacgccagacttccagtgggatgaaaaggtgaggctttg

SEQ ID NO: 365370 - DNA, 201 bp, Homo sapiens
ctcttgcccttaaacgttcctatgtcctgggcacctcaaaggagaacctaacttaccttccctcaccctcatcttcaactgattatgagtctgtgtctccrttcgtgtccccatccctgcttatctgccttacacactatagccagactggcgtttctcaagcagaattccgaggaaacatccctgttctgttgcagactg

SEQ ID NO: 365371 - DNA, 201 bp, Homo sapiens
tgctatgggattagaacgtagcttgagatctgcaggtcaacaggtctgtttggcatctcaggttttcctcacataagtgaaagatgcctggtatggcctartgttgttctgcctccctcctctgcccgccaggtatacatggactggtacgagaagttccaggacaggctcaacaagaaggtggtactcctgacaggcgag

SEQ ID NO: 365372 - DNA, 201 bp, Homo sapiens
ttccacaggaaggtgatgaagacgtatacggggaggttcgagaagaggcatctgatgatgacatggaaggggacgaggctgtcgtgcgctgcaccctctcrgctaatgtaagttcagtttgctcttcctcattgctacaaggttacttctgggtgttagtgcttcttccccatgcctaggtcctgttacatttattgagcc

SEQ ID NO: 365373 - DNA, 201 bp, Homo sapiens
agcccttggtacttaattatagaacgtgtatttgtggcatccttgtactgcgcattgcccctttaaaagtgtttgtttgctttgatcattctggtggtccycatgtaaagcactgtctttctgtttcacgacttactagtcagcacctgtgactcaagtattagctaagcaggggcagaaaaggacaagaacctatgatac

SEQ ID NO: 365374 - DNA, 201 bp, Homo sapiens
  misc_feature (1)...(201): n = A,T,C or G
agccttttgagtttattctcagcagggatcagtatccttgcctgaaatgcagggatgctggaaagctagcagatcagaggtctagttctgtaatgtagatncctgcatcaaaattcagacattctcttgacatagcattcttggttcgctgtctctgatctagatgctgggacgtgccggaagaccccagtatgacaccaa

SEQ ID NO: 365375 - DNA, 201 bp, Homo sapiens
cactttgggaggccaaggcgggtggatcacaaggtcaggagttcgagaccagtctggccaatgtggtgaaaccctgtttctactaaatatacaaaaattarcctggtgtggtggcacgcgcctgtaatcccagctacctgggaggctgaggcaggagaatcgctggaacccaggaggcggaggttgcagtgagccgagata

SEQ ID NO: 365376 - DNA, 201 bp, Homo sapiens
  misc_feature (1)...(201): n = A,T,C or G
agaacaatctggtcaagtacgacaagaagacgggcaacttccaggtgcgtggggtgagggttttgaggcaaaggtctcagcaaaagttgttggcccagganaaaatttttcagattgctctcttgatgtgagtactgcctatctaatcacctgttgcttagaacagcagaaaaatgggtagcttttcccataacttgaggt

SEQ ID NO: 365377 - DNA, 201 bp, Homo sapiens
gagcccaggggacaatattgatctctggactgacctttaatggaaagttatgcaaagagattgccagggaacaaaatcctggcaatcccacaataacgttytgctcaaggatgctgccaacatgatattgatggcacttcttttcttctagcaactgcttccagtggaaaagctgccaaagtatgcccaggctgggtttga

SEQ ID NO: 365378 - DNA, 201 bp, Homo sapiens
tttcattaattactggttcatatttatcatcccatttgataaaaaatctccagcatttccttttgcacgtgtataaaatccaagttagctgttaccatgtygtgtatgatgtttctttcccttgctcctttttcaggcttcatcccatgccacttgccccatcacctgtaatgctaattctagttattttgttgttatttt

SEQ ID NO: 365379 - DNA, 201 bp, Homo sapiens
actttgtactgtttcacagtgaaattacacttccattgtaatcagaataaatcttttttttttcttctcctcctaaggtccaagaaactggagacattgtyatttcaaatgcatatgtggatcttgcaccaacatctggtacttcagctaagacaccctctgaggtaggttataaaaattagtatccaagccacttcctca

SEQ ID NO: 365380 - DNA, 201 bp, Homo sapiens
atactatggatttttgtttgaatattgtttttgtttgaataaataataaaatgagccgagttttaaaaggcacgtactataattagttgtgtagagttaastctgcatatctggactaaatccaagcctccattatgtactatatatgtactgtatgatgatgtgactggatgaggatgttctttgactgttagaggttat

SEQ ID NO: 365381 - DNA, 201 bp, Homo sapiens
aagctaaagttcgtcgtttacactgggattcaccctttgtgttgtacaaatgtatgggttttcacaaatgcataaagttatgtatccactgttataatgtyatgcagaatggttttactgccctaaaaatcccctgtgcttcacctgtttgtctctccccttttcttcctgaattctcagggattgaagctcatttctttt

SEQ ID NO: 365382 - DNA, 201 bp, Homo sapiens
ttactgccctaaaaatcccctgtgcttcacctgtttgtctctccccttttcttcctgaattctcagggattgaagctcatttctttttatttttcagtaayattccgtggtatgaatgtactacaatttgtttattcatacacctattgggggagatcttggttgcttccagtttttggcacttattaataaagctgccat

SEQ ID NO: 365383 - DNA, 201 bp, Homo sapiens
aaaattccccctaacaattggaaatcgtaaatggtgttcatgcatcttggaacttgaatcctagtcttcttaaccttgactttttcaagccgtatgacacrgtaaagctgaccttcatttgtcttctcatcaaccacctccccttcttcttcttcctttttttttttttttaaaatccttttgggttctgaggaagactgg

SEQ ID NO: 365384 - DNA, 201 bp, Homo sapiens
tgggaatatatctaagtgtggcattttagtaatgaaaaatcactaatttcttaactctctgaaaggataaaagcttactttgttgtggaaaatttacttamattattctataataaaattttgcctctattataaatgattgagaagtagatattagctacttgaattttttatgtttactttggtttaaatcaaccctaa

SEQ ID NO: 365385 - DNA, 201 bp, Homo sapiens
attatagtaatccaagtaaaagtgctgcatatgagggttagaaaagaggagtcaaggatgaagatgtttgttctggataattgggatatgtatatatatakagagagagagatgggtgcatatatatacattgtatatagttatacattgtatatagttatacattacacatatctatatgtaatgtataattatgtatag

SEQ ID NO: 365386 - DNA, 201 bp, Homo sapiens
tcttttttcctccaaaatatgatgagatgtagtcaagagaatgatcttcttgattgttaaaaatcaaagttttaataaacgctatgttaaactttagaaayttatcctatacatttgtagcaataacaatttttatgaaagaatagccattggaataatttgaaatgaaggactgggaattagaatttgaattcctttaat

SEQ ID NO: 365387 - DNA, 201 bp, Homo sapiens
atgttataggaataattatgtagcatattgtagcttttcttagtcacatctttaacaaagctttattttttttgtttttcatttttcattttagaatcaastggcagtataattgaagttctgagtaaaatagattcagaaggaggagtttcagcaaatcatactagtcgtgcaacgtctacagcaacatcaggatttgta

SEQ ID NO: 365388 - DNA, 201 bp, Homo sapiens
tagaattaagctaagaagagcttttagtttctgcttcccttgtaacaactggggtaaaaaagaagctgagaaagataggatttgctggcaaagggggcctmtgttggtgcttttcttggtgctgcaacgggactgaggtatttccttctctgattccatcctactaagccactactcctgactacccttctccctctcttt

SEQ ID NO: 365389 - DNA, 201 bp, Homo sapiens
gatactccttacttgcatataatttttggtaggctccattggggggtgtgatgaatcaggttagctgcctgagtggtgctttagccaacctcatttttacsccctgcaatgctgtttggaaattgactcagggaggtactgaatggaagaggaaaaaagggagtagtacctcaactgttgataaaatgaactgtggctaaa

SEQ ID NO: 365390 - DNA, 201 bp, Homo sapiens
gcaaagacttaaatgttagactagttatatacatactaattttgttcctattttaaaggtctctgaattacctataattttataagtaagaaattcttagraagtaaaatgattgataagatatgtgtatattctttatttcagatcttgtggaagccctgaagccagagtatgtggcacctcttgtcctttggctttgtc

SEQ ID NO: 365391 - DNA, 201 bp, Homo sapiens
ttgtgaggagaatggtggcttgtttgaggtatttgcaccttcctgttttctcttattagttttctccagttgcttacatttgtaaaaatctgtaccagtgsacatcacttgtatatttttaaatattgtgtctatgttataattaaaagtgttgactaatatccattttttggaaagtaatagtaactttataaattctgt

SEQ ID NO: 365392 - DNA, 201 bp, Homo sapiens
tgaattcttattctgggaattgcagatttgaccttcgtgagctttagttttctggggctttcttgtgacaactacaagtcatattttaaacccttggcatraggcctaatacatagcactcacccaccaattttaattatcagtatagcaggaatttaatcttgtgtgataggtcaataaatataacattatttattttta

SEQ ID NO: 365393 - DNA, 201 bp, Homo sapiens
atactttcaaatagaaatatattgtttgtatgtatccaatacctgtaaaataatattactgaaactttttataaagatttatttccatgtgttgaatacartgttgctgagcaaaatctgttttgttttctttaggatgataggtttaagctggttagcattgagcagtttggttgttttcctcctgaatttaaatttggt

SEQ ID NO: 365394 - DNA, 201 bp, Homo sapiens
gatgagaggtaggggtctattttcattcttttgcatatggatatccagttttcccagcaccatttattgaagagactgtcatttcccccacatatgttctyggcacctttgtagaaaatcaactggttttaaatgcatggatttatttctgtgttatctattctgttccattggtctatgtatctatttttatgtcactac

SEQ ID NO: 365395 - DNA, 201 bp, Homo sapiens
gtgtttcccgtatgttttcttctagtagtttcatagtttcaggtcttatgtttaggtttttaataaattttgtgttgatttttgtatatgatgagaggtargggtctattttcattcttttgcatatggatatccagttttcccagcaccatttattgaagagactgtcatttcccccacatatgttcttggcacctttgt

SEQ ID NO: 365396 - DNA, 201 bp, Homo sapiens
tgagtttggttaaagagaataatgataatttgtatttaagatttaacatgtaatgtcttaattttaggtagctgtagccatacctaatagacctcctgatrctgtacttacagataccacctctcttaatcaggtaagattgtatttttgaaaaatgataaatccacctggttgatgacactttttaatttatagctctga

SEQ ID NO: 365397 - DNA, 201 bp, Homo sapiens
tcatatacttcttggccatttatatgtctttttttttttttttttttttttttttttaagaaagagtgttactccgttgcccaggctagagtgcaagtggkgtcatcttggctcactgcagcctccacatcccgggttcaagcgattctcctgcttcagcctccttagtaactgggactacaggcacctgccaccacaccc

SEQ ID NO: 365398 - DNA, 201 bp, Homo sapiens
gatcatgagtcagggtcattttgtagaaaaacttttttttctcatagtaatgtaatatttaaagtttgatagaagaatatatttgaaaaatgactattcgkttttttttttctccttaatgatactttcctacctactggaatactcactgaaattttcattatgcttattctcaatcagatgataacatgattgttatgt

SEQ ID NO: 365399 - DNA, 201 bp, Homo sapiens
tgtatttttacaaaaattaaaaatttttggttatggttttgtctgagttcagaaggaagcccatgtctctaaggtttgtgagaaaggtcccagggccttcrgaatatcttatggagatgtggatgccccatgagcctcctttattaaccttttagacctgcagaaaagcagcttttgatccctgtctggagtcattggtta

SEQ ID NO: 365400 - DNA, 201 bp, Homo sapiens
ttttcatatacttcttggccatttatatgtctttttttttttttttttttttttttttttaagaaagagtgttactccgttgcccaggctagagtgcaagkggtgtcatcttggctcactgcagcctccacatcccgggttcaagcgattctcctgcttcagcctccttagtaactgggactacaggcacctgccaccaca

SEQ ID NO: 365401 - DNA, 201 bp, Homo sapiens
ttgaacattttttcatatacttcttggccatttatatgtctttttttttttttttttttttttttttttaagaaagagtgttactccgttgcccaggctaragtgcaagtggtgtcatcttggctcactgcagcctccacatcccgggttcaagcgattctcctgcttcagcctccttagtaactgggactacaggcacct

SEQ ID NO: 365402 - DNA, 201 bp, Homo sapiens
aattgactttccagagcatctcttctactgtttttattttacagatgatggaactaaatcccaggaaaacctaaactagccagtgtttgagccaagaagtrattcatgttgtctatttctggaaggaggtggctttcaactaaatagtcttccctctagatagcaatatgaatgggatggtagggagaagattaataggca

SEQ ID NO: 365403 - DNA, 201 bp, Homo sapiens
tgcattttcctcatgattagtgatgttgaacattttttcatatacttcttggccatttatatgtctttttttttttttttttttttttttttttaagaaaragtgttactccgttgcccaggctagagtgcaagtggtgtcatcttggctcactgcagcctccacatcccgggttcaagcgattctcctgcttcagcctcc

SEQ ID NO: 365404 - DNA, 201 bp, Homo sapiens
ccatctcaaaacaaacaaacagaaaccattatgaggcagtcaaatttacatccattaagcagtgttttactcatctgtttacagtgaactttatacattagatcttacaagcaatttactatccttaataacaaattcattattttttggatttttgggtagctaatagttgctgaattagagacaggaaagttgagtatg

SEQ ID NO: 365405 - DNA, 201 bp, Homo sapiens
agtatgaaagacacattgtatgaagaaaactgacttatgtacagagttttaaaaaatcttttttttgcacatgttttataatcacttttctccatgagttrtttttacagaacttttaaagtttattttgttgtcgttgttagggcgggaagcttcagagtacctttgtatttgaggaaataggacgccgcctaaaggata

SEQ ID NO: 365406 - DNA, 201 bp, Homo sapiens
tattctaacctcacctttattttcctagagattcttcaattaggttgaaaagatgaaaatggataggaggtagagcagtaagtccctgaattccctttcarcagagtctgttgcttgtcacagttatcttactgtattatggtcatttataattgtatgttttctctcatttgactttgggcttaatcctgagaaatggct

SEQ ID NO: 365407 - DNA, 201 bp, Homo sapiens
gatttgcattttcctcatgattagtgatgttgaacattttttcatatacttcttggccatttatatgtctttttttttttttttttttttttttttttaaraaagagtgttactccgttgcccaggctagagtgcaagtggtgtcatcttggctcactgcagcctccacatcccgggttcaagcgattctcctgcttcagc

SEQ ID NO: 365408 - DNA, 201 bp, Homo sapiens
actgcactccaatctgggtgatggcgcaaaaaaaaccctgtttctcacagaaaagggtggggacaagcatttattgtataaaaggaaattcttgacttcastaaattgtaggctgtaattttttgagacaggaggtttgtctactggtgcgagatcaaaagagagcccctgtaagtgtattgataaaagtaagaaataact

SEQ ID NO: 365409 - DNA, 201 bp, Homo sapiens
tttctgtgcctggcttattttacttaacataatttcctccaggctcatccatgttgctgaaaatgacaggatttcatttttttaatggccaaatagtattscattatgtattgtgtgccacattttctttatccatgcatctgttgatgaacgcttaggccggttccatatcttgactattgtgaatagtgctgcagtaaa

SEQ ID NO: 365410 - DNA, 201 bp, Homo sapiens
gtcatcttggctatatgcatctttatctaatcttcagcttcttaaacataaggcaaattcatcaagtcaaaatgaagtatttttaagtcatgatatttgasagttacaaaattattttattcataccaaaacaataatttggattatcttaattatcaatataaaatcactattttctagatatatacagattatggtcaa

SEQ ID NO: 365411 - DNA, 201 bp, Homo sapiens
gagtctccctcttttgcccaggccggactgcagtggcgctatctcggctcactgcaagctccacctcccgggttcacgccattctcctgcctcagcctccyaagtagctgggactacaggtgcctgccaccgtgcccagctaatttttttttttgtatttttagtagagatggagtttcactgtgttagccaggatggtct

SEQ ID NO: 365412 - DNA, 201 bp, Homo sapiens
gatggagtcttgctctgttgcccaggctggagtgcagtggcgtgatcttggctcactgcaacgtctgcctccgggttcaagcagttctctgccttagcctyccaagtagctgggattacaggcgcctgccaccaagcctggctaatttttttttttttttttttaagtaaagatgcggtttcaccatcttggccaggctgg

SEQ ID NO: 365413 - DNA, 201 bp, Homo sapiens
aatagatattgtactacagcaatgtacatttttattatttcattgacctggcaatcagcacactttctttttgtagctataaatagctctgttgcacatgyaccaggaaggatgcacagttgcaattttgacagattaactgggttgctttataaattaattaggtgcatatattatatatatatatatatatatatatca

SEQ ID NO: 365414 - DNA, 201 bp, Homo sapiens
tttagtaacattttctgactctttagaaaaggatatctagtttagtgctcttttgggtccgtttcttttaagggaagcatcgatattgtattttagaactmtttcaacatggctgcaagtaaaatgcttcccattgagtcagaaattcgagaacaattgtgatagctcatgtgaaatttgcctatttactgttcctgtttg

SEQ ID NO: 365415 - DNA, 201 bp, Homo sapiens
ccaaatgtcttttctgtatcatgttttctttcacaaatagataactgcaaaattcttcttacatggttgctttactcctaattcctttctgctggttgcawtatcattttcctgcttaatttgtacatattgtttattttacttttcaaattcctcctgtccttcaggcttaagttcaagctccactttgctcttagagac

SEQ ID NO: 365416 - DNA, 201 bp, Homo sapiens
taaaagacagtttttgttaacacagttgaccaggctaatactttttggcttgatcatttcatgctatatagagcatattaaacaactccaatgataatagkaacagctttcatttattgagaacctataaactggcaatagtattttctttaatatgcataataaatctgtatgtaaatataagaaaatctaggttcctaa

SEQ ID NO: 365417 - DNA, 201 bp, Homo sapiens
gtgagcacatgctgttggaaaaatgacactgatagacttgcctgatgtagagttgccacaaaccttcaatttgtgaaaaacgcaatatttgcatagcatgrtaaagtggaatataataaaatgagatatgcctgtatttcacatcactttcctcttggttacatggtttcagaaaggaagtgtgacataattcttatcctt

SEQ ID NO: 365418 - DNA, 201 bp, Homo sapiens
accctggatgatttcatggttacaaccaaaactaaacaaaacaattgtgtttccagatctctcacattcttttcctgttttgttttttttttttctttctktctttatttcataatttcctcccaggaaatactctttaaaaaatatctactgtgtttcttaaaatagatggtataattcctgctaatgcagtctaaggac

SEQ ID NO: 365419 - DNA, 201 bp, Homo sapiens
aagatataagaaacattttaaaccagtgttttaaaatgatttgcttgatttggtaacaataaagtaatttactgaagtgcattttgttcattaattatctstttccatgcttttcaatgtatgtaatttgaagtaaagtgaacaaattacttgaaagatcttttttcctccaaaatatgatgagatgtagtcaagagaatg

SEQ ID NO: 365420 - DNA, 201 bp, Homo sapiens
gtagacttgagcaggttatttaataagctctctgaaattcagtttctcatctgtcaactggggtaagaactgctgatgtgcccacttcaaattgacagctrtaattcttaaatgagattatatttgtggagctgctttgtaatgctcagtgtatgtaggtatcactattttttccatttagctagaaatctagaggctttt

SEQ ID NO: 365421 - DNA, 201 bp, Homo sapiens
acgttcttctgccatggtttcagccggtctctctgtttggggtccctgacttccctcaacaccttgtctttctattctcttaatctcctttacttttgaargataagttcgttggatacagaattctctgttggtggcttttttctttcaacactttaaatacaggcatatcttggagatgttgcaggtttgattgtagat

SEQ ID NO: 365422 - DNA, 201 bp, Homo sapiens
tttaggattattatgacttcatcagcttcaggaatatatggcaactttggccaggccaattatagtgctgcaaagttgggtcttctgggccttgcaaattytcttgcaattgaaggcaggaaaagcaacattcattgtaacaccattgctcctaatgcgggatcacggatgactcagacagttatgcctgaaggtaagtaa

SEQ ID NO: 365423 - DNA, 201 bp, Homo sapiens
agatcatgccactgcactccagcctgggcgacagagtgagactggatctcaaaaaaaaagaaaaaaagcaaaactttctctctctctctctctctctctcmatatatatatatatataatttctttttggatatataaatttacaccttgtagctttgagtcagaattaaatattttctgtatttgatgactgtgtagtca

SEQ ID NO: 365424 - DNA, 201 bp, Homo sapiens
tgggcgtggtggcgggcgcctgtagtcccagctactcgcgaggctgaggcaggacaatcacctgaacctgggaggtggaggttgcagtgagccgagatcaygccactgcactccagcctgggcgacagagtgagactggatctcaaaaaaaaagaaaaaaagcaaaactttctctctctctctctctctctctctatatat

SEQ ID NO: 365425 - DNA, 201 bp, Homo sapiens
ttctaatgtgtttttcccgagatactctatgcctataaaacttctctcttggctggggatggtggtggctcacgcctgtaatcccagcactttgggaggcygaggtgggctgatcacgaggtcaagagatcgagaccatcctggccaacatggtgaaaccccatctctactaaaaatacaaaaattagctgggcgtggtgg

SEQ ID NO: 365426 - DNA, 201 bp, Homo sapiens
aaattaatccaattaactgaatcagttaaaaggttgctatctctggagggcattgctgtagtagtataatatttttagaattaatggtcattttctctaawtgttaaagtggcttatattcttgaagcatttttgagtgtcttattgcattcatttaaaaaaggaacataaggttttgcagtaaaagctatatctggcact

SEQ ID NO: 365427 - DNA, 201 bp, Homo sapiens
ccactttttccattagagccctaagcacagtaatcatagttattttaaattccttgtctggtactctccaaatctctgccatatatgaatctggttctaaygtttgtctctttagcctgtgctttttcttgccttttaacatgggttgcaatttttttgttgaaagtaaaaaataatactattgagtaataatagcaagtg

SEQ ID NO: 365428 - DNA, 201 bp, Homo sapiens
aaggaaagaatattgagtcattgggaaagtaaataatctatagaaccattatatggagtcatggggaaggaaaagagcttattggaattatacaaagcatrttaaaaagaatgatgctttcttatgaattatagaatattttctataaataaaacttgttaaaaataatcagtagtttaaaagtaataaaagatcagtaat

SEQ ID NO: 365429 - DNA, 201 bp, Homo sapiens
ggacttaaaaagcactagtttcctgagcctatttatttagcatttagtttaacttaatggtacaattttaaaaaatcaaattaaggaatagtttacctgtrtgcagattatcctcccacctacttttaatatgcaaaataatatatagctatttttctttttcttatttttttggtggttgttatttataatgacttattt

SEQ ID NO: 365430 - DNA, 201 bp, Homo sapiens
agaatcttaagcaaacagcgttttggagaaaaatagattaaaaagttgaatatcctgtacctttttcttgatttaaaggtttatataaagttttgtatgcraatatataaaccagcagcgtgtataatttattaaaacattgtattatttattagcatgctgagacttttgataaaaatgtttatattctatctctgaaat

SEQ ID NO: 365431 - DNA, 201 bp, Homo sapiens
tttaaaaataaaataaattatctttcaggatcattaatttcctctcttgcttctttttttcttcatccagtctccaaaggtgatatctttgttttattctsttctccccgaaagtgatacctttctggaattgccactggaagactagtgtactattaattattttcattgtagtcagtgctgtaatcttccaggattcat

SEQ ID NO: 365432 - DNA, 201 bp, Homo sapiens
atcaaaaataaatcattgagaaaccaaaaaaattaccatacattttataactactacctgtttttttttttttaaacaatgatttattattttccaagacwctgggttgactgggtgatctttctgctacaaatggtgtagctgcttttagatggcagctgggcagggctggaaggttccaagatggcttcttttgcatat

SEQ ID NO: 365433 - DNA, 201 bp, Homo sapiens
taatatgcacaacaaacccccatgacacacaattatctatgtaacaatcctgcacatgtactcctggacttaaaagttaaaaaattttttttggtatgttygatatgaaaacttctgcaggacttatgtttcctagcaaatagaattgtaatctcataagccagagagaattaaagttggtacatatgtattttttttctg

SEQ ID NO: 365434 - DNA, 201 bp, Homo sapiens
gtgaagccctgtgccataaacgagtttctagtctgttaacagtaaaactaccatcgcggcactgtccatcttaaatgccctttgtatacatggcatacaawggattttgtggaataaaaggtactcagaattttttaatttttaatttttatttgtttatttttaatcaggcagccctcagaatcaagacaggttcagaga

SEQ ID NO: 365435 - DNA, 201 bp, Homo sapiens
agcccagctagacatttactagaaagaaccagggaaagagatagctaagaaaagccctcctgggattgtaacaaacctcaaagtctggcctcaacgactayccttgcaaagaggcttgaatttaattggatcagattgttgaacaatttataccccaggacactgttgaaaaaaatagaacagtaatctagcaattagtgg

SEQ ID NO: 365436 - DNA, 201 bp, Homo sapiens
agtggagactttaccctacctgtggcaggttgagaatactggggccctgattgcacttgccctagctttcccgtagcgtggaggttccgtggttggagagycagcagagaagaacagaagctactacacctgccctgcttccttcttgtaaagcaagtgtatcatttggaaagaagtatgtcactactcctgcagaaattc

SEQ ID NO: 365437 - DNA, 201 bp, Homo sapiens
agctttgtcctttaatagtcttaaaaatttatttcataatttatctctgttgatgtatgtgttattaacaactgaaaggaacgttcgtgtatgtgctctaracttagtgattgcatataatctgttatggttcttatgattattgttcttttctcaggtatttatctttatactgattttcataaagcaaacaatgttaaa

SEQ ID NO: 365438 - DNA, 201 bp, Homo sapiens
tgaatatcctgtacctttttcttgatttaaaggtttatataaagttttgtatgcaaatatataaaccagcagcgtgtataatttattaaaacattgtattmtttattagcatgctgagacttttgataaaaatgtttatattctatctctgaaatattaactttgtaatgttgaggtttcgatacccatgatctttaattg

SEQ ID NO: 365439 - DNA, 201 bp, Homo sapiens
ttataggcaaattttcttatacatctgccacccctgggacaccaagaccaatccctcttcttcctcctcctcttcctcctcctcagcctacccaatgtgargatgatgaggatgaagacctttatgatgatctacttccacttactgaatagtaaatattctttcattttttatgtttttcatgacattttatttttccta

SEQ ID NO: 365440 - DNA, 201 bp, Homo sapiens
cagaggttgcagtgagccaagatcatgccactgcactccagcttgggcgagagagcgagactccatctcaaaacaaacaaacagaaaccattatgaggcartcaaatttacatccattaagcagtgttttactcatctgtttacagtgaactttatacattagatcttacaagcaatttactatccttaataacaaattca

SEQ ID NO: 365441 - DNA, 201 bp, Homo sapiens
aacaattaaagacctttgaaggtaggtaaatcttacctttttaggtaagttttttttcttttcccgtgggaatgaataggtttgggaatgtccaaaggggkgtgtgtgtgtgtgtgtgtgtgtgtgtgtttgtgtgtgtgtgtaagagatgtagggaatcaattgaaatgaaaataacctgttttaagatttcattgtaat

SEQ ID NO: 365442 - DNA, 201 bp, Homo sapiens
taggaaaaactttcctctgatatttatctcaaaaagtatttctgcctcaaaagtgttaaacttattaaaaagctatctaattgaattattataactaattrtaagtgaaaagatacctctatttgaagcacaatttttaaaaaatgatcttttcgataagaattgactttccagagcatctcttctactgtttttatttta

SEQ ID NO: 365443 - DNA, 201 bp, Homo sapiens
cactctttttccctcctctccttgcaggcattctttagtggcaggctgaaggccagagggaacatcatgctgagccagaaacttcagatgattcttaaagmctacgccaagctctgaagggcacactacactattaataaaaatggaatcattaaatactctcttcacccaaatatgcttgattattctgcaaaagtgatt

SEQ ID NO: 365444 - DNA, 201 bp, Homo sapiens
gttgtagtagtcgttaatgatcttttttatttctgtggtatcagttgtaaatgcctttttttcatttctgattttatttgtgttttctctttttttcttaktctagctaatgaattgtcagttttgtttatcttttcaaaaaaccaactttttgtttcagtgaccttctgtaattttttagtctcaattttgtttatttct

SEQ ID NO: 365445 - DNA, 201 bp, Homo sapiens
tcagtttccaaggttttgcctagtagccgagtggggcttggagaatggaggtaacccactcagcttcttctcctggttggaaacagagctgctgaaagctyatcatgaactttttagagggatactccttacttgcatataatttttggtaggctccattggggggtgtgatgaatcaggttagctgcctgagtggtgctt

SEQ ID NO: 365446 - DNA, 201 bp, Homo sapiens
gctgtctgttactgctcttttctttcttgggagactttttatacccgcttcaatcttgttctttgttattgacctgttcagattttctatttcttctgagktgaatcttggtagtaggtcatatgtctatgtccagttttcctccagtttgttggcgtagagttgttgtagtagtcgttaatgatcttttttatttctgtg

SEQ ID NO: 365447 - DNA, 201 bp, Homo sapiens
tcttggcattctttcatcctgggaagaatggaaatcagttgagaggaggaatcagtgatctctccatcagacaaattgcatgtctatagacaagtatttcmctttaaaggttgtaaaatagcttaaagacattggaaagcccagtgccgccttagaatcagataaccagggaaggatatgctagacaatgtcttgtatttc

SEQ ID NO: 365448 - DNA, 201 bp, Homo sapiens
atgatcagatggtttttttctcctttgttttgttgatgtgatatcacatttattgatacacataaccatcgttacatctctggctaaatctcacttgattrtgatatattatcttctaattggattcagtttgctagtattttgtttaggatttttgtgactgtgttcatcagggatattggacttcagttttcttttttt

SEQ ID NO: 365449 - DNA, 201 bp, Homo sapiens
ctttttcatttttagtgatgtgtgtataatttttttaaaaagtatatactttcctccttttaccctatacaacattgattttttagaattctgagggatcrttcctttgctaggataagtgatgaagactggggtaagttgtttttagtatttctctggggaacatacttatccatttagcctttttagtatttgataaat

SEQ ID NO: 365450 - DNA, 201 bp, Homo sapiens
aaagaattaagatcttttataaataaaggacatttacaaatctataagcaagtatcccaaataaaatgtgaactaaataggcaaaacaataataaatatamatataagccatgaaaataaaatattactttactagtgctcaaaaaaatgtagactaaaataatgagctacaaattataatcatgtaattgtcagactgaa

SEQ ID NO: 365451 - DNA, 201 bp, Homo sapiens
atgtaatcttatagcatagagacttggtaatacgtactttgaaattgtgtgtgttccttgaatttgaagtgctgtttatgtttatatattctctgtacaasatattttatatatagaaaagccttgctgagttaagtataatgtatctgagataattatgggaatatttgttattttcttgtacaatctttgcagacccca

SEQ ID NO: 365452 - DNA, 201 bp, Homo sapiens
aacatgtaatgtcttaattttaggtagctgtagccatacctaatagacctcctgatgctgtacttacagataccacctctcttaatcaggtaagattgtakttttgaaaaatgataaatccacctggttgatgacactttttaatttatagctctgataccttataacattatgcatctaatgcataatgaataatatgtt

SEQ ID NO: 365453 - DNA, 201 bp, Homo sapiens
taggataggttgagagtatcattaaaatgtaattaattgttcaccaatttctttaaatggggattgagttgagcggaccaaaaaaattatgctgacatttsttcaactttctgattattttgtttttgattaggattgggccgagcctatgccctggcttttgcagaaagaggagcgttagttgttggtaagttggtgtgt

SEQ ID NO: 365454 - DNA, 201 bp, Homo sapiens
ttttatggtcatagtttctttgtgtaaaaggaaagacttttttgtgtagctttccaatatacataagagtaaagaaagttaagaactgtttgtacccatcsttcagcttcagcaaatggtcaacagccaattttgtttcattttttgatcaccttctcccttttcttctgcattatttcaaagtaaatcctagacattata

SEQ ID NO: 365455 - DNA, 201 bp, Homo sapiens
gatggtatttcctatgttttattctagaattttaatactttgaggtcttacatctaaatatttaatccatcttgagttaatttttgtatatgatgaaaggwgggagtctagtttcatttttctgcatatggctagccagttatctcagcaccgtttattgaatagggagtcctttccccattccctatatttgtcaacttt

SEQ ID NO: 365456 - DNA, 201 bp, Homo sapiens
aatatttttcttaaacctttttatttttctaaaaaatgtatgagatttttattgcttgaagctgaatagctttatttcagtgtaagtattatagcataagktttcaaaacagctctttttatgtgaaacagtacactttgtggtgattgtgcattgatcaaatatctgctggatacccagtatttgcaaggcacagtatta

SEQ ID NO: 365457 - DNA, 201 bp, Homo sapiens
tttaccctacctgtggcaggttgagaatactggggccctgattgcacttgccctagctttcccgtagcgtggaggttccgtggttggagagtcagcagagragaacagaagctactacacctgccctgcttccttcttgtaaagcaagtgtatcatttggaaagaagtatgtcactactcctgcagaaattctgcctagag

SEQ ID NO: 365458 - DNA, 201 bp, Homo sapiens
aaccttgactttttcaagccgtatgacacagtaaagctgaccttcatttgtcttctcatcaaccacctccccttcttcttcttcctttttttttttttttwaaatccttttgggttctgaggaagactggtaaactggccctctgcagtgaaagtgggatcatttgagtgtatgcttcaagttttggttttcctgtcctgt

SEQ ID NO: 365459 - DNA, 201 bp, Homo sapiens
tttttctagcctaaactgttgtatattagacccccccccattttaaattatctgtggtaataatgaacctgttgtatacagaacctgttgtaaacctggcycaatttaaagtgagggatatattagcttatttcatttgaatgaaaagctgatgggtaagttaagacaaaaaaaacagtttgcatatctctgagcagatat

SEQ ID NO: 365460 - DNA, 201 bp, Homo sapiens
  misc_feature (1)...(201): n = A,T,C or G
tgagctatgtgatttatgattatgccttaactgatgttagtgttgggtgccagttatatttataaaaatcttggattttatattagcaaaatttttatatnaagtaggcataaaataagggcgtagcattatatttagatgtgtataggcattacattaattttacaaattatgaggagagctgttgtagttctaagtgtg

SEQ ID NO: 365461 - DNA, 201 bp, Homo sapiens
gtgatgtttattttttgtttagtatgagtgaaatatgtaagtataatatgatactgagatatttcataaataactaacatattttatagtatttattactrttaatttctaaacccagccagaagttgttgtagtaaaccctttgaatcctattttattgttctaagcaacggtaaaaaatcggaggaaatgaaagatgac

SEQ ID NO: 365462 - DNA, 201 bp, Homo sapiens
cttgctaatattacctaccaaattcatattaaaattttctagttgtctagaaagagatatttttcgagttggtttattccactaaggatccaaacaaggtscacagacatttttgttgttatagctcttaagtttcctttaaaacataatagttcatcttctctttttttaaaaaaagtcaagctggacagggtggtttgt

SEQ ID NO: 365463 - DNA, 201 bp, Homo sapiens
agcacaaaggaaaaaataaaaaatgacccataattctaccacatcgataaaaactttcattctttttctctgcatattcataattttttttttgttttacrcaatggggtaatattcttcctgtttcataataattattgtaaaaatacattattttttagagcagttctagatttacagaaaaattgtacagagaattct

SEQ ID NO: 365464 - DNA, 201 bp, Homo sapiens
tttaattgaggtggcaattttatggatatagtgttgagtttgtttttttgcaccttaagtgctttaaaaaacttacgagcgtttactcagtgccctttttwaaataattcagttaaacctcaaagatgtttataagattaaaaaataaaccaatattttggcaatagagtacccagtggattcttttggataattataata

SEQ ID NO: 365465 - DNA, 201 bp, Homo sapiens
  misc_feature (1)...(201): n = A,T,C or G
agaagtggcatgtcacttctaccgacatttcattggccaaaggaaatcatttggctaagccaaaagttaggggcatcatttaagatagtctccaattttgngttaatatgattgctatgttttatattccataatataaagcttatgggatatttaaatttggtataagaactgctaagccttaggctgatactgtaaaaa

SEQ ID NO: 365466 - DNA, 201 bp, Homo sapiens
tcctgttcactttatggaataatggttctaaaatttccatttgtctgtaaacaaaatgaatatcatagaatttggcccacaggttttaaatatgcaatttrtcagtattttaggcaaagacaatcctatactttcaaatagaaatatattgtttgtatgtatccaatacctgtaaaataatattactgaaactttttataa

SEQ ID NO: 365467 - DNA, 201 bp, Homo sapiens
gtcagggttcactgtgggatacagaaaccactagatattttaagcagcaaaggattcaatacaggcaattaggttttaggcaggtcttcttagaataactyctgaaacaataggaaattgatccattagaggaggcaatacctctgaggctgtcattggagctgtgccacagcccaagtagcactggcactagggacctga

SEQ ID NO: 365468 - DNA, 201 bp, Homo sapiens
cttgaaaattaaaacataggtactcttatctgaaactccagaaaccaaaaagctctaaaaataaacagttttttttctcatgattcactggtggtgaagtstgacttgaacttatatgatgctgttgattgtctttaactcagctagtgtgagttagacaagtatagaagtaatatgcacgtttatagattgttgcaccat

SEQ ID NO: 365469 - DNA, 201 bp, Homo sapiens
ttttttatgtttttctctttcctttttttttttgtctgactgggttatttcaaaagtcctgtctttgagtttaaatattctttcttttgcttgatgtagtmtgttgttgaagctttcaattgtatttttaaatttcattgattgaattcttgtttttttttttctttttcctatcagttgggcaatgtgcttatttcatga

SEQ ID NO: 365470 - DNA, 201 bp, Homo sapiens
atatatatatatatataatttctttttggatatataaatttacaccttgtagctttgagtcagaattaaatattttctgtatttgatgactgtgtagtcarggttcactgtgggatacagaaaccactagatattttaagcagcaaaggattcaatacaggcaattaggttttaggcaggtcttcttagaataactcctga

SEQ ID NO: 365471 - DNA, 201 bp, Homo sapiens
ggcttcgaatggtgaagaaacttgcccattaatggtagagctggctttgaatctagatctgactagtaccaaatcccatgatctagcatgtgtttgataawttcctgtcacaatttcaggccctgaaatgtgtttttctttcatttgtatacatcatgatatatatttgctaacattttattatataaagtgcttttaaaa

SEQ ID NO: 365472 - DNA, 201 bp, Homo sapiens
caagccttagctaaaaatgagtctagatttatattacatgtatacatggtatgttggttgaagttgcccaattaagtgatttctagacatcagggttaacrtagcttaaaaaaaaagataacctgagattgccgagtgttgaggcactaaaattcaaaatttaaccatgtaagatctgtttgtagcttcattcaaaatcca

SEQ ID NO: 365473 - DNA, 201 bp, Homo sapiens
atggcactcctaggccaaaccatatacctaacagtttcatttatgaagtagttcaaaacaattagttttttgtgttcaaccagtatgactgtatttccctyccaaattaacagtattgggaaagtgtccctgagagagtttgctgtgatgtccggtgcatggcagtgcagagtttggaaactggcaatatggacgtatggt

SEQ ID NO: 365474 - DNA, 201 bp, Homo sapiens
atggctgcagtttgtctatttctagcttctagtatagtcaataacacataataactagcctgattctgtatatgttggaatgagtgctaaaagccatgtaraaagcatagttttagaaaatagtatggctgccttttaaaaaaaaggttctgaaattgatgctttaccttctattaaaataatgtttattgtatggatagt

SEQ ID NO: 365475 - DNA, 201 bp, Homo sapiens
acgcacaacagagttgtgttatttagggactgttgttatgccttttatagatgaggagattgaaactcacagaggccacgtatctaagcattttctcaagytcaccttgctattaaggggcacagcctggattttaactcaggcattctgatgctacagctgtgatctattcaacattgtgttatattctctaatttgtca

SEQ ID NO: 365476 - DNA, 201 bp, Homo sapiens
gtgttcaaccagtatgactgtatttccctcccaaattaacagtattgggaaagtgtccctgagagagtttgctgtgatgtccggtgcatggcagtgcagartttggaaactggcaatatggacgtatggttaagggctttaagaaataagaaaatagataggaggaaagatttatgtacaaaattcttctgctcaaaaatg

SEQ ID NO: 365477 - DNA, 201 bp, Homo sapiens
ctttgggaggccaaggcaggaggattgcttgagtccaggagtttgagcctgggtgagacagtgagaccctgtctctaccaaaaaaaaaaaaaaaaaaaaaaattagcctggtgtggtggcacacacctgtagtcccagctacttgagaggctgagttgggaggatcacttgagcccaggaggcttaggctgcagtgagtgt

SEQ ID NO: 365478 - DNA, 201 bp, Homo sapiens
tgtttgcttttagaagcagcaacttccctcatgatctttttttatgttttgggtgtggcggggtttgtgaggataagtttgggaatatatctaagtgtggyattttagtaatgaaaaatcactaatttcttaactctctgaaaggataaaagcttactttgttgtggaaaatttacttaaattattctataataaaatttt

SEQ ID NO: 365479 - DNA, 201 bp, Homo sapiens
ttcagagaatgggaggattggttcattcaatgaacatttgagtatttatatgccaagttctctgctaggtggagactacaaatatgcattgacaggatgccttttttttttttttaaatccatagggataattatttacaggctgtgtgtcaggaaaggtgaaatactggggttgaggaaacaaaggttgttgcattgcag

SEQ ID NO: 365480 - DNA, 201 bp, Homo sapiens
tttcttttgtttttttttcagatgactaaaactttttgttagttttaaggtaggttttaatattttgctgcgtgacaaaagacggtttttaaatcaacaayatttttgtgtgaataatgggcactcatcatttggcagaggttcttggccattttgtattgtatgataattagagaatataatggaggctatataccagtt

SEQ ID NO: 365481 - DNA, 201 bp, Homo sapiens
tcttacctttttaggtaagttttttttcttttcccgtgggaatgaataggtttgggaatgtccaaaggggggtgtgtgtgtgtgtgtgtgtgtgtgtgtttgtgtgtgtgtgtaagagatgtagggaatcaattgaaatgaaaataacctgttttaagatttcattgtaatccttgaaagtagtttaaacagtcatcttgg

SEQ ID NO: 365482 - DNA, 201 bp, Homo sapiens
caaacattggatttggattgaaatgagtgtctcatgcatttatagaaaagtcttgaaagattttccttgaaaaggaatatgctctccagttaggaatgggrgcctgtttgttggaggtgtatctgcctcagggttactctctattcccaaagcaacagtgactgtttcttctcttactaacagcagctcctgactgcgtgc

SEQ ID NO: 365483 - DNA, 201 bp, Homo sapiens
aaatcttacctttttaggtaagttttttttcttttcccgtgggaatgaataggtttgggaatgtccaaaggggggtgtgtgtgtgtgtgtgtgtgtgtgtgtttgtgtgtgtgtgtaagagatgtagggaatcaattgaaatgaaaataacctgttttaagatttcattgtaatccttgaaagtagtttaaacagtcatct

SEQ ID NO: 365484 - DNA, 201 bp, Homo sapiens
gggaacccgggaggtggaggttgcagtgagccaagattgcactactgcattctagcctgggcgacaagtctgtctcaaaaaaaaaaaaaaaaaacaaaaaacaaaaaaaacccaaaacttaagttttagagctgtaaagaaattcagacttcatgtaatttagtattattttataaataaaaaaaatgagaccatagaagt

SEQ ID NO: 365485 - DNA, 201 bp, Homo sapiens
cagatatatgcacctccactttcctaatcacagccattgggtgtgaattgtggcatagtagaggtagaaagaactttacaactctgttttatagaagaggraaatttaataatctcaagccatctgtaattcagaattttgcctgctctacttttacctcattaaggaatttttaaaaactatttatcttttacagttatg

SEQ ID NO: 365486 - DNA, 201 bp, Homo sapiens
ttcccctcttccctgctacccttcccagcctctagtaaccagtattatactctgtacttctgtgagatcaacttatttagcttccacatatgagtgaaaamatgatgtatttatctttctgtgcctggcttattttacttaacataatttcctccaggctcatccatgttgctgaaaatgacaggatttcatttttttaat

SEQ ID NO: 365487 - DNA, 201 bp, Homo sapiens
attattgtacttatttcataaagggtttaattgaggtggcaattttatggatatagtgttgagtttgtttttttgcaccttaagtgctttaaaaaacttaygagcgtttactcagtgcccttttttaaataattcagttaaacctcaaagatgtttataagattaaaaaataaaccaatattttggcaatagagtacccag

SEQ ID NO: 365488 - DNA, 201 bp, Homo sapiens
aatcacgggaacccgggaggtggaggttgcagtgagccaagattgcactactgcattctagcctgggcgacaagtctgtctcaaaaaaaaaaaaaaaaaamaaaaaacaaaaaaaacccaaaacttaagttttagagctgtaaagaaattcagacttcatgtaatttagtattattttataaataaaaaaaatgagaccat

SEQ ID NO: 365489 - DNA, 201 bp, Homo sapiens
actggaatttgaactctgcagtgttctctgtcttctagttacactgtaggcttgagatttgtgtagttttatttgttctcattatttgtattttttttttygaggatatgaggacttaaaaagcactagtttcctgagcctatttatttagcatttagtttaacttaatggtacaattttaaaaaatcaaattaaggaata

SEQ ID NO: 365490 - DNA, 201 bp, Homo sapiens
tcaagggggatttaagatgttgtgtctgggggttcttgtgtacagggaaagattatgtgaagtgttgtgaaatgatttatgacattgaggaatatgtacarccttttaacatatggttttggcacataccctcattaaattggtataatttagtcacagattggctgagctggaaagctttatatttattttttacctctt

SEQ ID NO: 365491 - DNA, 201 bp, Homo sapiens
gaatcacgggaacccgggaggtggaggttgcagtgagccaagattgcactactgcattctagcctgggcgacaagtctgtctcaaaaaaaaaaaaaaaaaacaaaaaacaaaaaaaacccaaaacttaagttttagagctgtaaagaaattcagacttcatgtaatttagtattattttataaataaaaaaaatgagacca

SEQ ID NO: 365492 - DNA, 201 bp, Homo sapiens
ataagccaccatgcccagtcttctttactttttgaaagaggaaaaacactgcacagttaaaaatttcatgagaacaacctgtatttaaatagttttgctgyttctttatgtctgtattcaaaaatgaagaggaatgttttgaaaatggctgtgttgtgtttagtaagatgggatagggtaggaaggaactgggcagatgac

SEQ ID NO: 365493 - DNA, 201 bp, Homo sapiens
ccattggttatcaactctccatttccagcatctcactagttcctggcaaccatcattctattttgtgattctatgagttttgatattttagataccgcacrtaagtggaatcatgccagtatttgtccttttgtgactcacttatttcgtttaacatagtgtcttcagagtttattcatattatcacatattgcagtattt

SEQ ID NO: 365494 - DNA, 201 bp, Homo sapiens
agtcggcgtccagcggctctgcttgttcgtgtgtgtgtcgttgcaggccttattcatgggctcaccgctgaggttcgacgggcgggtggtactggtcaccrgcgcgggggcaggtgagcatgcgaaggttggaggccgcgccccttgctgaggcgcagctggctgctcttttcgggccggcatacgcgcgcagccgcagct

SEQ ID NO: 365495 - DNA, 201 bp, Homo sapiens
tccagatatgtatgcctgcctggactgtctgtcttccatatacagttctcattctacccgttcatagttctttatctctttaaggatagctttaaattgastttaagtagatttgagttgtgtgggaatttgtatttgggaggggagactatgacaccatgacttctggaggttatatgctcccaggttctttgttgtgtt

SEQ ID NO: 365496 - DNA, 201 bp, Homo sapiens
cttagctatttgtcattttaagagctagagtagttcttagcaagtcgttattttgtcatttgccagttttaaaaaaagtaataaggttaatagacttaacmtcaaatagattcatttattcatctaacatgtatttattaagcgtctattatgtagcaaacactgttctagatgccagaggaatatagtgggaataaaaca

SEQ ID NO: 365497 - DNA, 201 bp, Homo sapiens
tgttcaccaatttctttaaatggggattgagttgagcggaccaaaaaaattatgctgacatttcttcaactttctgattattttgtttttgattaggattkggccgagcctatgccctggcttttgcagaaagaggagcgttagttgttggtaagttggtgtgtttttctttttaatctgtagctgataactgaaatacaa

SEQ ID NO: 365498 - DNA, 201 bp, Homo sapiens
gtttggagtcaaggaatctaaagtatgggtttcttgactctttcatcaaaacttttcagctggaagtgttttaaaaaaatttaattgagggggcagttacrtgagtttttgtttgtggaggggtcagatggaagatactgtattgaagaatcctaaaggtgggaggttttagtaatctgcatggtttggactgatctaatg

SEQ ID NO: 365499 - DNA, 201 bp, Homo sapiens
gatcatgccactgcactccagcctgggcgacagagtgagactggatctcaaaaaaaaagaaaaaaagcaaaactttctctctctctctctctctctctctmtatatatatatatataatttctttttggatatataaatttacaccttgtagctttgagtcagaattaaatattttctgtatttgatgactgtgtagtcag

SEQ ID NO: 365500 - DNA, 201 bp, Homo sapiens
ctctcaagcaggtacagcccgcttctccccagcaccccggtgtgggcttcccaaggtcctgcctgagaggagaggccaggctgggctgctgattgcaaaastgggtgaaagttctccctgacccttatctgtgggcatcgattgttactcttcctgcaattaactctcttagatctttgcctagtcttttaaaggactgaa

SEQ ID NO: 365501 - DNA, 201 bp, Homo sapiens
taactacatttcccaggattccaagggagccgcgcgctctgcgctcatcttcctaccagaaatcggcaagtcactgaccctcgtcccgcccccgccattcsccgcctcctcctgtcccgcagtcggcgtccagcggctctgcttgttcgtgtgtgtgtcgttgcaggccttattcatgggctcaccgctgaggttcgacgg

SEQ ID NO: 365502 - DNA, 201 bp, Homo sapiens
tgcattatttttactgtttagagcatttaacatttatgtattatttccacttttctgtatcttttagttttagatttgcagttgaatatgtcaaccctttkgccaaagcttcttagtcagctcttagttggatgaagctccttctgtggaaggtttcccaagaacggctcctgtgtatagtgttgccttggtttctatatc

SEQ ID NO: 365503 - DNA, 201 bp, Homo sapiens
tgcatcatactttcagaattctaatctatatttgtaactcattgagaccactttgctatattcgagatttctgaattgcagtctgggaactgctgtcagawggaagctgtacaattgtagaactcatcttgtttgtttcttttctgtaaagaattgtagtcctgcattgcctgctgtccaatgtctaggaacagtggtaac

SEQ ID NO: 365504 - DNA, 201 bp, Homo sapiens
aatcaggcagccctcagaatcaagacaggttcagagaactcttggtactcagaaattttaaaagactgctcgggacctatagattgaagtcaggtcctccraaacctagtagaatgcattgaaaatgaatttgtaaataaaacctgcaaaatacactggatgcaactgaaacaaaggagtgtaattgatgcaatgattttt

SEQ ID NO: 365505 - DNA, 201 bp, Homo sapiens
agaacagccatgatcctgccctcatgtggcttataccttcattcccacttatttcctctccatgctcttcttgactgctttggcagaatgtttgaaagttygagtgtggttacctgtactttctagtgggattatttgaaatgtttaaggtggaaataattgggatctgaatagcagttggagagccttaagaaaagtgaa

SEQ ID NO: 365506 - DNA, 201 bp, Homo sapiens
tgaacttatgatgtggtttaaacaccacagccacattttatttgcagtgggaaaaaagattgtagtagtttaataaatgttgaaatactagtaattaaacrtaaggtgaagatatgatgcttaaaatttgtaaattttacgctgggtgcggtggctcacgcctgtaatcctagcactttgggaggctgaggcgggcggatc

SEQ ID NO: 365507 - DNA, 201 bp, Homo sapiens
aagaggactgaggttctgagtgatgtatacaaataagaaagtatgaaagacacattgtatgaagaaaactgacttatgtacagagttttaaaaaatctttwttttgcacatgttttataatcacttttctccatgagttatttttacagaacttttaaagtttattttgttgtcgttgttagggcgggaagcttcagagta

SEQ ID NO: 365508 - DNA, 201 bp, Homo sapiens
atgtttcctatttttcatttaatgtattctaacaaaacactgagttctagttatgtttatgctttctccacaggctgctttgtaccgcctcagtggagacyggaatcccttacacattgatcctaactttgctagtctagcaggtgagttgtctttaatatgtatcaatgaaaaatattagctattcgatatttaattaaa

SEQ ID NO: 365509 - DNA, 201 bp, Homo sapiens
ctgagatgtggaaggaaggaaacagaattcattttcaaaccaaggtatgaattttgctttttcacccttctcacatgctttatcattgtgttccatcttaycatttttttttggttagtactatggatagaaagttctttttaagtaatggtaaattttaattaaaaataagatacagcttgtctggtgttttcaaaattt

SEQ ID NO: 365510 - DNA, 201 bp, Homo sapiens
gatagtcctcacttgacaattaggctgtgttttaggtattctttaatgtgttagctatttggaacttggaacatatttgaacactaaattattcttataartggtagttaggctcctagacttgtgcttttataagtttctagacttgaacttatgatgtggtttaaacaccacagccacattttatttgcagtgggaaaa

SEQ ID NO: 365511 - DNA, 201 bp, Homo sapiens
tgtgttcaaccagtatgactgtatttccctcccaaattaacagtattgggaaagtgtccctgagagagtttgctgtgatgtccggtgcatggcagtgcagagtttggaaactggcaatatggacgtatggttaagggctttaagaaataagaaaatagataggaggaaagatttatgtacaaaattcttctgctcaaaaat

SEQ ID NO: 365512 - DNA, 201 bp, Homo sapiens
aaggcggaaatattggggctaagtggagtaagttatagccctgattttataatattctaaggtaattcttagtaaataaagtatctttttaacaattaaasacctttgaaggtaggtaaatcttacctttttaggtaagttttttttcttttcccgtgggaatgaataggtttgggaatgtccaaaggggggtgtgtgtgt

SEQ ID NO: 365513 - DNA, 201 bp, Homo sapiens
gtgaaaacaggcctctcactaactcatttgcaaatggtaacaatagggatctagtgagtattttgtaaatatttcttaatgagctatgtgatttatgattrtgccttaactgatgttagtgttgggtgccagttatatttataaaaatcttggattttatattagcaaaatttttatatgaagtaggcataaaataagggc

SEQ ID NO: 365514 - DNA, 201 bp, Homo sapiens
tatctctttccatgcttttcaatgtatgtaatttgaagtaaagtgaacaaattacttgaaagatcttttttcctccaaaatatgatgagatgtagtcaagrgaatgatcttcttgattgttaaaaatcaaagttttaataaacgctatgttaaactttagaaacttatcctatacatttgtagcaataacaatttttatga

SEQ ID NO: 365515 - DNA, 201 bp, Homo sapiens
ctctgttgcacatgcaccaggaaggatgcacagttgcaattttgacagattaactgggttgctttataaattaattaggtgcatatattatatatatatakatatatatatatcagtacgtatgccttgaaaactcaagatttgctttttttaactgttttatcattttcattaatttaattaaaaatgttaagtggctga

SEQ ID NO: 365516 - DNA, 201 bp, Homo sapiens
caaaaatgtgaaatcatagggtgaaaatagccacaagagggttgaaccttaaaaaataattattttctttcatagtgagaaaataattatgtatcaagatraggcatcagtttgtaactctaatggttttctttttggactttttacttttgagtggcaagggaaaaatgtaactttaacttgctaagtgaattttgaggt

SEQ ID NO: 365517 - DNA, 201 bp, Homo sapiens
gtgctgcaataaacatacgtgtgcatgtgtctttatagcagcatgattataatcctttgggtatatacccagtaatgggatggctgggtcaaatggtattkctagttctagatccctgaggaattgcaattttagttttatgttagtgttgtacagatgaagaatatttacctctgtgcgttttgtggtttggggtggttt

SEQ ID NO: 365518 - DNA, 201 bp, Homo sapiens
gtattagtgatttcacattagatggtataatgttttccccctctttttggtaggttggagcaggatggattggaaaatgtaagtctctctcagtttttggyttgtatagattatttccttatctttaaacctacatatccagttgagatgggtaagatttttgtcaaatgcctaaccattggatatagtgcttgcatattc

SEQ ID NO: 365519 - DNA, 201 bp, Homo sapiens
tagaatccctttttttctgaatttcctttctctttaaaaatgaaagggttcttatgcatcttactttctgtctctcaactatgtgctcagtatgttagttktgtttctataaccagtacgctgggagcggactcttggagctattgtaagacaaaagaatcacccaatgactcctgaggcagtcaaggctaactggaagaa

SEQ ID NO: 365520 - DNA, 201 bp, Homo sapiens
cagggtcattttgtagaaaaacttttttttctcatagtaatgtaatatttaaagtttgatagaagaatatatttgaaaaatgactattcggttttttttttctccttaatgatactttcctacctactggaatactcactgaaattttcattatgcttattctcaatcagatgataacatgattgttatgtcataaatggt

SEQ ID NO: 365521 - DNA, 201 bp, Homo sapiens
aaatgtttctttaaattgaccttatcctagtgggtttgttgggaaaaattcattttaaggcttatggtaaaactctttaggagttagaatccctttttttytgaatttcctttctctttaaaaatgaaagggttcttatgcatcttactttctgtctctcaactatgtgctcagtatgttagttttgtttctataaccagt

SEQ ID NO: 365522 - DNA, 201 bp, Homo sapiens
ttgtaaaatagcttaaagacattggaaagcccagtgccgccttagaatcagataaccagggaaggatatgctagacaatgtcttgtatttcattgaagatrtccatttatttttggcctatttcagtctttcgcaattttttccttcaatagcctgacatacattcagttcatgagtggcaatggaggctctgtagcaggt

SEQ ID NO: 365523 - DNA, 201 bp, Homo sapiens
taggtatcagtattgttatttgtatcattctcagggcaaccctgccttccctgtagcatgtagcactagggactcttttctatttttttttttttttttttctggttggaggataccttctttatctcagtaatgctttaaaagaatctcatttctggaagcagaagtattcctcagagtacttggctcactgtaatgcta

SEQ ID NO: 365524 - DNA, 201 bp, Homo sapiens
tacttaggcttttgtgagtcaactttttttgatataggtatagacttttgttttgaaagcactctttacctattatatttactttttcatggttaaaaaaygccagttttgagagaaatgtgagttgtaagcaaatgcaaactaatatgcttgcttttagatgtaacttgtatctttttatattgtagatgttgtggtcaa

SEQ ID NO: 365525 - DNA, 201 bp, Homo sapiens
cagatttgaccttcgtgagctttagttttctggggctttcttgtgacaactacaagtcatattttaaacccttggcataaggcctaatacatagcactcamccaccaattttaattatcagtatagcaggaatttaatcttgtgtgataggtcaataaatataacattatttatttttacataaaaaatgaacttttctgt

SEQ ID NO: 365526 - DNA, 201 bp, Homo sapiens
tattttattcataccaaaacaataatttggattatcttaattatcaatataaaatcactattttctagatatatacagattatggtcaaaggtgtttgttwatctaatctagggaaattatctattagagtgccatgcacccaatataaaacatcttgccgcagaaagaaagcagtcatatttcttttcactgatgtggag

SEQ ID NO: 365527 - DNA, 201 bp, Homo sapiens
tttaccaaaaataagtaagaatgcttaaaaaacttgacaattaaaatctagaattgtctgtctgaatgtttcataagtggtctgttcgttagattgaaatytgtgaaaacaggcctctcactaactcatttgcaaatggtaacaatagggatctagtgagtattttgtaaatatttcttaatgagctatgtgatttatgat

SEQ ID NO: 365528 - DNA, 201 bp, Homo sapiens
ataatattgttagattgataggctttgtgtatgacataatacttcaccatagaagttgattaataagttagtatttgtcttccaatttgttagaaaacaarataagcatttttaaactctttaagaaaaataaagaaggagggggagaagcatttatttctgggcttaggctgggaagggtgaggcatttcattggattta

SEQ ID NO: 365529 - DNA, 201 bp, Homo sapiens
ttttgacaagcccatattacatggattatgtacatttggattttctgccaggcgtgtgttacagcagtttgcagataatgatgtgtcaagattcaaggcarttaaggtaaatgtgtattactacgtaatttgaatattacttcctttttctatctttagagaagaaaaggggttttagtgatttaattgaaaatagatatt

SEQ ID NO: 365530 - DNA, 201 bp, Homo sapiens
ttgtgtttagtaagatgggatagggtaggaaggaactgggcagatgactgaagagatgtgctagtaattagaatttcattttccacacacacacacacacattttgaaagtctagaataattaattgttgtttgcttgtttttgcattacagtgaatgatttgggaggggacttcaaaggagttggtaaaggctccttagc

SEQ ID NO: 365531 - DNA, 201 bp, Homo sapiens
tgataggctttgtgtatgacataatacttcaccatagaagttgattaataagttagtatttgtcttccaatttgttagaaaacaagataagcatttttaawctctttaagaaaaataaagaaggagggggagaagcatttatttctgggcttaggctgggaagggtgaggcatttcattggatttaagacaacataaccaa

SEQ ID NO: 365532 - DNA, 201 bp, Homo sapiens
gataaactatactaagagctgtgcataatatcctgacttaaaccttgaaagtaaattgccactttttgaagttctgatagatatctagagtggcagatacmaatattttttggctcagctggagcaattgtttttagcacctgagaggaacttgtagcttattacttcgcttccaaaatacagtaaaaagtggtagttatt

SEQ ID NO: 365533 - DNA, 201 bp, Homo sapiens
tggaaaggtaggaaatgtgttcagaaaatagtgcacttgaaattcagattatggtggagggaagttcccgctagtgcgaggtctaggataggaccacgagrgtgggtgtgtgagttatcacaaaggacaaggtcattggagagagagcaaggaactgaaaggttagggaaggatcatgtacctgtgtggatgttgagagta

SEQ ID NO: 365534 - DNA, 201 bp, Homo sapiens
tctagtgggattatttgaaatgtttaaggtggaaataattgggatctgaatagcagttggagagccttaagaaaagtgaaagaactgctatttcatagttwagaaaggatttttgaagctcctcttctctctgcctttcagattctggtatgaatggattaaaatgaatgctttgtaatccaaacttggacacctttacat

SEQ ID NO: 365535 - DNA, 201 bp, Homo sapiens
taaggtggaaataattgggatctgaatagcagttggagagccttaagaaaagtgaaagaactgctatttcatagttaagaaaggatttttgaagctcctcytctctctgcctttcagattctggtatgaatggattaaaatgaatgctttgtaatccaaacttggacacctttacatgttagaactctttcagtaattgga

SEQ ID NO: 365536 - DNA, 201 bp, Homo sapiens
ctcccccaacaaatgtgatttttttttttttttttttttttttttttttttgcttagtggaactaatgatctttttagggtaaaagaaacttgcttaacayatttgaggagcagagtggtactgtagtaggtccaatttctagtgtaaattttgccgtttcttatagacttagggacccgtggtaggataatcttttccaa

SEQ ID NO: 365537 - DNA, 201 bp, Homo sapiens
agaaaggatttttgaagctcctcttctctctgcctttcagattctggtatgaatggattaaaatgaatgctttgtaatccaaacttggacacctttacatrttagaactctttcagtaattggattttgtttttgaaaccttgacaggaattgttgaacctatcttggttaactagttatgccttttggtggtaacttctt

SEQ ID NO: 365538 - DNA, 201 bp, Homo sapiens
tgcaggcattctttagtggcaggctgaaggccagagggaacatcatgctgagccagaaacttcagatgattcttaaagactacgccaagctctgaagggcrcactacactattaataaaaatggaatcattaaatactctcttcacccaaatatgcttgattattctgcaaaagtgattagaactaagatgcaggggaaat

SEQ ID NO: 365539 - DNA, 201 bp, Homo sapiens
gactcattatcagttctaggagccttttggtagatggagtctttagtgttctctaggtatagaatgatatcattggtgaagagagataatttgacttcttytcctgtttggatgtcttaacatttttttttttttattgccagattgctctgggtaggagttgcagtattgtgttgaataggagtagaaatttaagaaaga

SEQ ID NO: 365540 - DNA, 201 bp, Homo sapiens
  misc_feature (1)...(201): n = A,T,C or G
aggttcttcatggagagcagtacttagagttatataaaccacttcccagagcaggtgagttattgatatactaattccataataccatacttttatttccngattaaccttttaaacaacatcagtgtgttaaactggtatagagtgacctaatgaaacatatcacaaattgttatgcacatgtgagccattagagtagac

SEQ ID NO: 365541 - DNA, 201 bp, Homo sapiens
taggttcttcatggagagcagtacttagagttatataaaccacttcccagagcaggtgagttattgatatactaattccataataccatacttttatttcyagattaaccttttaaacaacatcagtgtgttaaactggtatagagtgacctaatgaaacatatcacaaattgttatgcacatgtgagccattagagtaga

SEQ ID NO: 365542 - DNA, 201 bp, Homo sapiens
ttgggggattgattatttttcaatcacatgattaagaagaagccaaacagagatagataacttggagagaaatgtgagcctgtggatggtaaaatgtcacytgcgagtaacagtatccataggcagaacctgtggagcaagaaagtttgctaataaaattttgtttaccctaacataggttcttcatggagagcagtactt

SEQ ID NO: 365543 - DNA, 201 bp, Homo sapiens
ctttttccctcctctccttgcaggcattctttagtggcaggctgaaggccagagggaacatcatgctgagccagaaacttcagatgattcttaaagactaygccaagctctgaagggcacactacactattaataaaaatggaatcattaaatactctcttcacccaaatatgcttgattattctgcaaaagtgattagaa

SEQ ID NO: 365544 - DNA, 201 bp, Homo sapiens
gccctcctaagatgaaacaagtccacattcagcctctagcaatttgtcggttactgtttaagtgttctaactgcttgggctctgggggcttctatctcagyaagctgggttttctgaatttgcctgtgtctccagttttcctgatggtggtttgccctgtgacctgaattctctggtgctgataagcagagttgttgattt

SEQ ID NO: 365545 - DNA, 201 bp, Homo sapiens
  misc_feature (1)...(201): n = A,T,C or G
ttcattccaagtgacacgggcagcatgggaacacatgaagaaacagaagtatggaaggtagagttgcatgtggttgtcaagggggatttaagatgttgtgnctgggggttcttgtgtacagggaaagattatgtgaagtgttgtgaaatgatttatgacattgaggaatatgtacagccttttaacatatggttttggcac

SEQ ID NO: 365546 - DNA, 201 bp, Homo sapiens
ttatactatcaaaaaaaaatctcagtccacattttgaaaaactcatttcctgtttttaaaaagttaagtgaaaatatatatgccttagctaattttaggcrttggctttttctccatattatcccattacttatttatccaattccactttcaactctcaccccagttttaaaaagagcagtttttcagaagaaaaaaaaa

SEQ ID NO: 365547 - DNA, 201 bp, Homo sapiens
ctcctgagtctggtggggacatggagaacctttatgtcagggattgtaaatacaccaatgggcactctgtatctagctcaaggtttgtaaacacaccagtsagcaccctgtgtctagctcagggtttgtgaatgcaccagtggacactctgtatctagctgctctggtggggccttggacaacctttatgtctagctcagg

SEQ ID NO: 365548 - DNA, 201 bp, Homo sapiens
gcctcagagggtttttgtcacttccttgctgaattttcatgttctctcttagacattctacctgaagtgctgttatttgttgttttgattcttctctgcgsaggagacaaggattgggcacctctagttggccatcttgatgacatctaaccagtattttctagttaagattttaatttctgtgatttcgctctggtgata

SEQ ID NO: 365549 - DNA, 201 bp, Homo sapiens
ctcctgtgcagctcgagcctccctgaggagtgccaccccctgctccacggcgcccagtcccatcgaccacccaagggctgaggagtgcgagcgtaccgcgygggactggcaggcagctccacctgcagccctggtgtgggatccactgggtgaagccagctgggctcctgagtctggtggggacatggagaacctttatgt

SEQ ID NO: 365550 - DNA, 201 bp, Homo sapiens
agggctcgggacctgcagcccgccatgcctgagcctcccaccccctccatgggctcctgtgcagctcgagcctccctgaggagtgccaccccctgctccayggcgcccagtcccatcgaccacccaagggctgaggagtgcgagcgtaccgcgcgggactggcaggcagctccacctgcagccctggtgtgggatccactg

SEQ ID NO: 365551 - DNA, 201 bp, Homo sapiens
ttagggaatgacatgtagaagtgagaggtgacagcgtgctggcagtcctcacagccctcgctcgctctcggcgcctcctctgcctgggctcccactttggyggcacttgaggagcccatcagcccaccgctgcactgtgggagcccctttctgggctggccaaggccagagccggctccctcagcttgcagggtggtgtgg

SEQ ID NO: 365552 - DNA, 201 bp, Homo sapiens
tttctttgttcttttttctttttgagatggaatctcactgtatcgcccagcctggagtgcagtggtgcaatctcagctcactgcagcctctgcctcccagrctcaggtgatcctcctgcctcagcctcccaagtagctgggattacaggtgcccgccaccacacctggctaatttttgtattttcagtagagacggggttt

SEQ ID NO: 365553 - DNA, 201 bp, Homo sapiens
atgtcctgggcccgcatttaaaaaaaagttgtcctcacttattgcttggatgtgaaaaaattaccttgacaggtattaaatgggtattatttacgtgaagytgtatctattcacaggtagcaaattatgagttattaagaaccctaaggcaagttgtgcaatgcagaaacatgcagtggcattctctgaatgaaaagcttg

SEQ ID NO: 365554 - DNA, 201 bp, Homo sapiens
cataggctttggtatattgtgtttttattttcatttgtttcaagaaatgtttacattttcttcttaatttctttgctacccgttggttattcaggaatatrttgtttagtttgcatgtatttgtactgtgtccaaagttcttgttattgatttctagtttttcttcattgtgattagaaaaccaaaatcatatcaaataaa

SEQ ID NO: 365555 - DNA, 201 bp, Homo sapiens
gcccttaatgcctcattttcccatttaatccatgactatctagttttttagttttgattgctgttctttggcttcgtttcttgtataacagtcaaaagagsttattttactttttcccctcttattgttcccattttgggggatgcattatttttactgtttagagcatttaacatttatgtattatttccacttttctgt

SEQ ID NO: 365556 - DNA, 201 bp, Homo sapiens
aaatgcatggatttatttctgtgttatctattctgttccattggtctatgtatctatttttatgtcactaccattgctgtttgagtagctatagctttttkttttcttcttttgagacagcatctcgctctgtcgcccaggttggagtgcaatggtgtgatctcggctcactgcaaccttcacctcctgggttcaggtgat

SEQ ID NO: 365557 - DNA, 201 bp, Homo sapiens
tgcagatacctctttgacatactgatttcctttcctttgggttatatatacccagcaatgggattaattcatatggtagttctgtttttagtttttttgartaacctccatactattttccataatggctgtactaatttacatttccaccaataatatatgagagtttcattttcttcacatttttgtcatcctttgtta

SEQ ID NO: 365558 - DNA, 201 bp, Homo sapiens
ctccaggctcatccatgttgctgaaaatgacaggatttcatttttttaatggccaaatagtattccattatgtattgtgtgccacattttctttatccatkcatctgttgatgaacgcttaggccggttccatatcttgactattgtgaatagtgctgcagtaaacatgggaatgcagatacctctttgacatactgattt

SEQ ID NO: 365559 - DNA, 201 bp, Homo sapiens
taaataaaggttgcctttgttgtccagaattattagctcaattgtattcagtctgaataatcttaaaaaaaaaaaaaagaaataaactataacatggtaayagttggcactctttttccctcctctccttgcaggcattctttagtggcaggctgaaggccagagggaacatcatgctgagccagaaacttcagatgattc

SEQ ID NO: 365560 - DNA, 201 bp, Homo sapiens
ctgccaccaagcctggctaatttttttttttttttttttaagtaaagatgcggtttcaccatcttggccaggctggtcttgaactcctgacctctttttaraagtggcatgtcacttctaccgacatttcattggccaaaggaaatcatttggctaagccaaaagttaggggcatcatttaagatagtctccaattttgtg

SEQ ID NO: 365561 - DNA, 201 bp, Homo sapiens
ttattaaattgtcattgctaaataaaggttgcctttgttgtccagaattattagctcaattgtattcagtctgaataatcttaaaaaaaaaaaaaagaaakaaactataacatggtaacagttggcactctttttccctcctctccttgcaggcattctttagtggcaggctgaaggccagagggaacatcatgctgagcc

SEQ ID NO: 365562 - DNA, 201 bp, Homo sapiens
gtacaccatagacaccgtgtttccaagttgcatcacacacactaattttttttttttttttgagatggagtcttgctctgttgcccaggctggagtgcagkggcgtgatcttggctcactgcaacgtctgcctccgggttcaagcagttctctgccttagcctcccaagtagctgggattacaggcgcctgccaccaagcc

SEQ ID NO: 365563 - DNA, 201 bp, Homo sapiens
gcactttgggaggctgaggcaggagagtcacttgagctcaggagtttgagaccagcctggggcaagaacttgtctccactaaaagtaataataataataawaaaattagccgagcatggtggcatacgcctattgtcccagctactcaggaggctgaggtggaggatcacttgagcctggtaaatcgaggctgcagtgagc

SEQ ID NO: 365564 - DNA, 201 bp, Homo sapiens
gagatcatgccactgcactccagcctgggcgacagagtgagactggatctcaaaaaaaaagaaaaaaagcaaaactttctctctctctctctctctctctmtatatatatatatatataatttctttttggatatataaatttacaccttgtagctttgagtcagaattaaatattttctgtatttgatgactgtgtagtc

SEQ ID NO: 365565 - DNA, 201 bp, Homo sapiens
gtaaaggctccttagctgctgataaggttgttgaagaaataagaaggagaggtggaaaagcagtggccaactatggtatggtatttgagagaactatactrtttattttccttcaactaatgctatttgtcacattaataatctttgagcaaatatctcagtattccagtataattatgattttctaagtctgccaaagtt

SEQ ID NO: 365566 - DNA, 201 bp, Homo sapiens
gcctctaaatgtttctaaatgagcaattgaggcttcgaatggtgaagaaacttgcccattaatggtagagctggctttgaatctagatctgactagtaccmaatcccatgatctagcatgtgtttgataatttcctgtcacaatttcaggccctgaaatgtgtttttctttcatttgtatacatcatgatatatatttgct

SEQ ID NO: 365567 - DNA, 201 bp, Homo sapiens
gaagactggggtaagttgtttttagtatttctctggggaacatacttatccatttagcctttttagtatttgataaatttatacatttaaggaaaaacctkcttctatctacttttgctgctaatataaatgatgagtaaactgtatactgaagacaatgaatagttagaagtagcctcttttagaaaacatttaatactt

SEQ ID NO: 365568 - DNA, 201 bp, Homo sapiens
gttctaagtgtgaagtattgattagtagcataactggaataaaggcaaaatactcattggggtgtgacagtaggcaattttatacattaggtataaaatgracatctttgtataaatacaacattgcttatgttgattcttagacatgcctaagtttttacaaaatatttaataaaaataatttattgttttagatataat

SEQ ID NO: 365569 - DNA, 201 bp, Homo sapiens
tttacttaatggtgtcccattactaccataggctttcttcattcttttttatgtttttctctttcctttttttttttgtctgactgggttatttcaaaagwcctgtctttgagtttaaatattctttcttttgcttgatgtagtctgttgttgaagctttcaattgtatttttaaatttcattgattgaattcttgttttt

SEQ ID NO: 365570 - DNA, 201 bp, Homo sapiens
  misc_feature (1)...(201): n = A,T,C or G
acattgattttttagaattctgagggatcgttcctttgctaggataagtgatgaagactggggtaagttgtttttagtatttctctggggaacatacttanccatttagcctttttagtatttgataaatttatacatttaaggaaaaacctgcttctatctacttttgctgctaatataaatgatgagtaaactgtatac

SEQ ID NO: 365571 - DNA, 201 bp, Homo sapiens
  misc_feature (1)...(201): n = A,T,C or G
gatgcttcacttccccctctaagctgccatgcagagtttctgtgcctcagagggtttttgtcacttccttgctgaattttcatgttctctcttagacattntacctgaagtgctgttatttgttgttttgattcttctctgcggaggagacaaggattgggcacctctagttggccatcttgatgacatctaaccagtatt

SEQ ID NO: 365572 - DNA, 201 bp, Homo sapiens
ttgccttgtgatttctttggctgtaatcaacatcaacagtgtctgtatgtgcctcagtggccttgactttggggtttgtggagacagtggcatggttttgmtgggaacagggattgccagatgggttagttgtctgtccctggtgggtgagcatggtgcatggtagatcctccatgggagggggaagggttgctggtggtg

SEQ ID NO: 365573 - DNA, 201 bp, Homo sapiens
gagagactgcaggaagtgaaggagtgcgccttgaggagatctgctgtcgcggcatccctggcagaagaagcagctgaagccaggttactgaggctgcagcwggcatggtatgttttagggttaggaagggagccagtgtggttatatagcgagcaaggtcataagggagacaaaagtgagagatgagggcagaggggtcct

SEQ ID NO: 365574 - DNA, 201 bp, Homo sapiens
cctatacaattgagacttgaacagcatgagtttgaactgcatgagcccacttataggcaaattttcttatacatctgccacccctgggacaccaagaccartccctcttcttcctcctcctcttcctcctcctcagcctacccaatgtgaggatgatgaggatgaagacctttatgatgatctacttccacttactgaata

SEQ ID NO: 365575 - DNA, 201 bp, Homo sapiens
aggagagactgcaggaagtgaaggagtgcgccttgaggagatctgctgtcgcggcatccctggcagaagaagcagctgaagccaggttactgaggctgcakcaggcatggtatgttttagggttaggaagggagccagtgtggttatatagcgagcaaggtcataagggagacaaaagtgagagatgagggcagaggggtc

SEQ ID NO: 365576 - DNA, 201 bp, Homo sapiens
ttggttattcagttgcctatgtgataaaaataaaaatcttatttgaactacattggcatgcctttccttatttttgtttataattagatttttctttagtrtgcaatttaaaatcatatttctagttttgcagagctagatatgaaacagataataatctgtccctagtaagttagtaaatagagggacagctgtcttatt

SEQ ID NO: 365577 - DNA, 201 bp, Homo sapiens
tgggaataaaacagagtccctactttcatggtgcatatattctagtggggagtagtggagggacagataatcaagaaatacatatgtaaaaatataatagrtgtaggtgctgtggagaaaaaaatgagtgaatggaacagaaaatgctttaaggagagactgcaggaagtgaaggagtgcgccttgaggagatctgctgtc

SEQ ID NO: 365578 - DNA, 201 bp, Homo sapiens
gctgaggcaggagaatggcgtgaaccctggaggcagagcatgcagtgagctgagattgtgccactgcactccagcctgggtgactgagcaagactctgtaycaaaaaaaaaaaaaaatttgtacattttataaattaaattttaaaaattaaatttaaatttaagtttaaatttgtaagttttaaagtttaagaacaaaaa

SEQ ID NO: 365579 - DNA, 201 bp, Homo sapiens
aactcatccttttttatggctgcatagtattccatggtgtatatgtgccacattttctttatccagtctattattgatggacatttgggttggttccaagyctttgctattgtgaatagtgccacaataaatatacgtgtgcatgtgtctttgtagtagaatgatttataatcctttgggtacatacccagtaatgggatt

SEQ ID NO: 365580 - DNA, 201 bp, Homo sapiens
catcagatggtggaacccaattcacagcatcctagcagctaagtagaatggtaggaagtggtagtagaataggtggaaaaatacagttttaagctttccarcctctgcaagcagaagagagtggataggttgagaatgtcagtgataggataggttgagagtatcattaaaatgtaattaattgttcaccaatttctttaa

SEQ ID NO: 365581 - DNA, 201 bp, Homo sapiens
ctatattaggtatttctcctaatgttatccctccccttgtcctgcacaccttgacaggccccggtgtgtgatgttcccctccctgtgtccatgtgttctcrttgttcaactcccacttatgagtgagaacgtgcgttgtttgattttctgatcttgtgatagtttgctgagaatgatggtttccagcttcatccatgtccc

SEQ ID NO: 365582 - DNA, 201 bp, Homo sapiens
taggtagtttttcagttcttgctctccctactctagtagtccccattgtctgttgttcccatctttatgtccacgtgtacccagagttcagctcccacttrtaagtgaaaacacacagtatttggttttttgttcctgcattaattcacttaggataatgacgtccaactgtatccatgttgctgcggagcacatgatttt

SEQ ID NO: 365583 - DNA, 201 bp, Homo sapiens
tatagtaatccaagtaaaagtgctgcatatgagggttagaaaagaggagtcaaggatgaagatgtttgttctggataattgggatatgtatatatatatakagagagagatgggtgcatatatatacattgtatatagttatacattgtatatagttatacattacacatatctatatgtaatgtataattatgtatagtg

SEQ ID NO: 365584 - DNA, 201 bp, Homo sapiens
gccgaggtgggtggatcacgaggtcaggagttccagaccatcctggccaacatggtgaaaccctgtctctactgaaaatataaaaaaaaattagccaggcrtggtggcacgggcctgtagtcccagctactcgggaagctgaggcaggagaattgcatgaacctgagaggcagaggttgcagtgagccaagatcatgccac

SEQ ID NO: 365585 - DNA, 201 bp, Homo sapiens
ttacttaacattatgagggactgggcgcagtggctcacgcctgtaatcccagcactttgggaggccgaggtgggtggatcacgaggtcaggagttccagamcatcctggccaacatggtgaaaccctgtctctactgaaaatataaaaaaaaattagccaggcgtggtggcacgggcctgtagtcccagctactcgggaag

SEQ ID NO: 365586 - DNA, 201 bp, Homo sapiens
gttgtgtttagtaagatgggatagggtaggaaggaactgggcagatgactgaagagatgtgctagtaattagaatttcattttccacacacacacacacayattttgaaagtctagaataattaattgttgtttgcttgtttttgcattacagtgaatgatttgggaggggacttcaaaggagttggtaaaggctccttag

SEQ ID NO: 365587 - DNA, 201 bp, Homo sapiens
taagaagctgaatgataaggtggaaagatgaagcttggagtttagagtcaaccaggccagattttgaattcttattctgggaattgcagatttgaccttcrtgagctttagttttctggggctttcttgtgacaactacaagtcatattttaaacccttggcataaggcctaatacatagcactcacccaccaattttaat

SEQ ID NO: 365588 - DNA, 201 bp, Homo sapiens
aaacagttaaatcttgtagttgaattttgagagattacttatatattaatattattttagttacataaatcatgatcgtaagaagctaatgacagtacacwtagttgcttttgataggtgcagtagtaccaaaacagagttagagttgcaatgttatcaaattatggaaaagatgatattgagagattgattttcttttta

SEQ ID NO: 365589 - DNA, 201 bp, Homo sapiens
atatttaataaaaataatttattgttttagatataatccacagagttcatttgcggggttcattccaagtgacacgggcagcatgggaacacatgaagaawcagaagtatggaaggtagagttgcatgtggttgtcaagggggatttaagatgttgtgtctgggggttcttgtgtacagggaaagattatgtgaagtgttg

SEQ ID NO: 365590 - DNA, 201 bp, Homo sapiens
tacacttccattgtaatcagaataaatcttttttttttcttctcctcctaaggtccaagaaactggagacattgtcatttcaaatgcatatgtggatcttkcaccaacatctggtacttcagctaagacaccctctgaggtaggttataaaaattagtatccaagccacttcctcatttaggaatttcagttaaggtgact

SEQ ID NO: 365591 - DNA, 201 bp, Homo sapiens
ggaggccgaggtgggctgatcacgaggtcaagagatcgagaccatcctggccaacatggtgaaaccccatctctactaaaaatacaaaaattagctgggcrtggtggcgggcgcctgtagtcccagctactcgcgaggctgaggcaggacaatcacctgaacctgggaggtggaggttgcagtgagccgagatcatgccac

SEQ ID NO: 365592 - DNA, 201 bp, Homo sapiens
aaatcacagttaagaattttttttttcttttgctcctctttgtgcttactttcattggccatcagaactaaaatgaacagtggtggctgagacagagggargcatggcaactgaggtgaaacaattgtatcattgtttatagagtgtgttttgggggaatagtgcctgactgtcttttggaagaagagttagtgtctttga

SEQ ID NO: 365593 - DNA, 201 bp, Homo sapiens
atataatacagggagaaagatcataagaaggcacatgtgaattccagctgataataaatgagccgtacatgaaatacccacatctcccttggatacctccrtgactatcaccaatctggattatgggggaaaacctttgaataaatttagagtagctcttagctatttgtcattttaagagctagagtagttcttagcaag

SEQ ID NO: 365594 - DNA, 201 bp, Homo sapiens
agatgagggcagaggggtcctagaaggccagatcacataggacctttagttcagagtaaggactaacttttaccctgagatggggtaaaaagcaatgtacrtaatagtcatcaagtaatattgatgctcagatatgaactttatttctctctcaacatttcagtaaaggaatttatgattcatatcttatgtaacaaagaa

SEQ ID NO: 365595 - DNA, 201 bp, Homo sapiens
acgtttgtgctccgataacatgagcagtgcaaagtcatgggggccagtggactcttacagagctgtattattttcatctcctgttgccttgaattctaatactgctagtagaggagctgacttttttctaattaaaacaattgtattagtgatttcacattagatggtataatgttttccccctctttttggtaggttgga

SEQ ID NO: 365596 - DNA, 201 bp, Homo sapiens
gccagggtagtcagtagacaaatttgtatcaagccttggtctctgacatcagattcattcttttctattacatgcatttctacttcattgtactgttttaygtttgtgctccgataacatgagcagtgcaaagtcatgggggccagtggactcttacagagctgtattattttcatctcctgttgccttgaattctaatac

SEQ ID NO: 365597 - DNA, 201 bp, Homo sapiens
atttacaggactatatacaccatcttttttactttaacacattaatacaaaattgtattttgtcatttcacaatttttgcatttatttgatcttttagatraaattgtatgatttgtaagacacaaattgtatctcatttgagccttggaacaacttggtggaataggaagcagaagcatttaaattactagcttactgat

SEQ ID NO: 365598 - DNA, 201 bp, Homo sapiens
gatcatccctttgttagatttttacctttagtcactttttgccatcggttctagactttttgggaagccgtacgttttcaagaaagtacttaaaacttcasattttaaatttgtttttctttgggaatatggtatcatttatttgaacagatctggaccactaaaggcattaggtaaatgtttaatcctttatgcctacca

SEQ ID NO: 365599 - DNA, 201 bp, Homo sapiens
tggtaacagttggcactctttttccctcctctccttgcaggcattctttagtggcaggctgaaggccagagggaacatcatgctgagccagaaacttcagrtgattcttaaagactacgccaagctctgaagggcacactacactattaataaaaatggaatcattaaatactctcttcacccaaatatgcttgattattc

SEQ ID NO: 365600 - DNA, 201 bp, Homo sapiens
gccagtatggataaatggagtgagcacatgctgttggaaaaatgacactgatagacttgcctgatgtagagttgccacaaaccttcaatttgtgaaaaacrcaatatttgcatagcatgataaagtggaatataataaaatgagatatgcctgtatttcacatcactttcctcttggttacatggtttcagaaaggaagtg

SEQ ID NO: 365601 - DNA, 201 bp, Homo sapiens
tagtttctggcattttagaagatagtatacacattgaggattcggttataccttattctgtaacccgaatattatttcatgtcttaccagctggggagagrtgaatggctagtccctgctggctggtgctagtcagacgtgagttagtctttataaactgtttaggaactgtaggacccctcatgattgctcctagataag

SEQ ID NO: 365602 - DNA, 201 bp, Homo sapiens
gtgaattgtgttgcagtgaacattggagtgctaatatcctttgttatttgaagagaatttcaagtcagtttttcttctgatttcagttcttttggataaaratgtggaagtaggattgatcgatcttatagtagttttgttttcctgtgtatttaatcttaaagcgattttcacattttttcttttcttttgctgaaaagt

SEQ ID NO: 365603 - DNA, 201 bp, Homo sapiens
ggttgtttccacatcttagctattgtgaattgtgttgcagtgaacattggagtgctaatatcctttgttatttgaagagaatttcaagtcagtttttcttytgatttcagttcttttggataaagatgtggaagtaggattgatcgatcttatagtagttttgttttcctgtgtatttaatcttaaagcgattttcacatt

SEQ ID NO: 365604 - DNA, 201 bp, Homo sapiens
ttaggttgtttccacatcttagctattgtgaattgtgttgcagtgaacattggagtgctaatatcctttgttatttgaagagaatttcaagtcagtttttyttctgatttcagttcttttggataaagatgtggaagtaggattgatcgatcttatagtagttttgttttcctgtgtatttaatcttaaagcgattttcac

SEQ ID NO: 365605 - DNA, 201 bp, Homo sapiens
tggatttttagtagagacggggtttcaccatgttggccaggctggtcttgaattcctgacctcaggtgatccacccgcctcgacctcccaaagtgttgggmttacacgcatgagccaccgcgcccggcccaacgtaattggtactttatacccattggttatcaactctccatttccagcatctcactagttcctggcaac

SEQ ID NO: 365606 - DNA, 201 bp, Homo sapiens
aaacagagtgggtcaaaacttctgtgctggtcagtagtgggatcatgcctgtgaattgccactgcactccagtctgggcaacatagcaagaccccatcttaaaaaaaaaaaaaaaaactaatgggaaagtgaaattctacaggggccttgttataacatacctggctataatagagagtgcttgatctctgttcagatggg

SEQ ID NO: 365607 - DNA, 201 bp, Homo sapiens
tcccagtcccgcggagcgctagctgccgggcggacgcggaagcccgagagtcctggtcttcccgtccaagtttaatccgcgcctacgcggtaaattcctgsaggtgctcccagcctagcccgctgcgcccggctccgcgcctgggcaacccgggctccctcccgtccctggcgccctccgcacccgcctaaggcgcggcgg

SEQ ID NO: 365608 - DNA, 201 bp, Homo sapiens; identical to SEQ ID NO: 79038

SEQ ID NO: 365609 - DNA, 201 bp, Homo sapiens
ggtatggggatgtagactggagtggaggaaggcatttaggttgccccaggcaatgggatttgctgaggacgctcgtggatctcattggaaaaccctgcagygctggtgcccgtgccctcggtgctggcatcccaccttcctgccataggaatggtgctggcaggaatggtgactgagcttcactctgccctcttttctgct

SEQ ID NO: 365610 - DNA, 201 bp, Homo sapiens
ctatcctgtgccatatttaaggctttctttgttcattttaggccctagtgccctgttcccttaaggagttaattttattccctccttcatgtctgcttatrtttgaacatgtcttccccatccctacctcctatagggttctagtaattgattcctctaaggccttatgtttccctttgaagagctgacttttggaagaca

SEQ ID NO: 365611 - DNA, 201 bp, Homo sapiens
ccagtgaaatcttaggagaagacaaactcaaatgtttccttgttctgtttttatttaactccaaatagctaataacataaaaacattttaaaaaaatctcyaatacccaactattacttttggttgacaacatttgattatttagttcttgcttgtttcccacatgtagtacagaatctatcataatattttaaaagtttg

SEQ ID NO: 365612 - DNA, 201 bp, Homo sapiens; identical to SEQ ID NO: 79052

SEQ ID NO: 365613 - DNA, 201 bp, Homo sapiens
ggacacttgggttgtttctaccttttggctactatgaatatatgctatgaacatgaatatatgtattagtccgttctcatgcttctataaaggactgcccragagtgggtaatttataaaggaaagaagtttaattgactcacagttccacatggctggggaggcctcaggaaacttacaatcttggcagaaggggaagca

SEQ ID NO: 365614 - DNA, 201 bp, Homo sapiens
gtttttgtttacctctgatttcatttaaaaataggaatctgtaaataagagaggtgtgaggtgctattctgcccacatggcccattagtggcactaacttsgtccacagatcctgctgctgggccagcctggcagcttcctgccccagccatagaggctcaggtgggggctctggctcattgggctccaaatccacagaat

SEQ ID NO: 365615 - DNA, 201 bp, Homo sapiens; identical to SEQ ID NO: 79055

SEQ ID NO: 365616 - DNA, 201 bp, Homo sapiens; identical to SEQ ID NO: 79042

SEQ ID NO: 365617 - DNA, 201 bp, Homo sapiens
ggcagaaggggaagcaaacacatccttcttcacatgatggcaggaaggagaggtgccaagcaaaagggggaaaagcccctcataaaaccatcagatctcaygagcactcactcactatcataagaacagcagcatgggggtaactgctcccatgagtcaattacctcctggcaggtccctctgacgacctgtggtgattat

SEQ ID NO: 365618 - DNA, 201 bp, Homo sapiens
attaacatgatttagcccagtgcctcttggcccctaaattagtattcattcatgttagctactatttttattaatgtctctgatcttcaatttcttcttcrgtaaaatggggcactaaaaactactctgtaaagaacttaacgtgataaaatatgcaaaaccctagtccaacaatacatgacatccagtagaaactcagta

SEQ ID NO: 365619 - DNA, 201 bp, Homo sapiens
gctggtcagaattaaaccatgtgtctacttttctctcaccagacagtggtgcactccatagagctccaagcaactgatgggcatgaccgtccactcaccarctgctcgatcatcaacagtggcaagatagacgtgaaaacgccttttgtggttgagatcgctgattggtgacacaactggcagaaaacaaggatatgcttt

SEQ ID NO: 365620 - DNA, 201 bp, Homo sapiens
cattaacatgatttagcccagtgcctcttggcccctaaattagtattcattcatgttagctactatttttattaatgtctctgatcttcaatttcttcttyagtaaaatggggcactaaaaactactctgtaaagaacttaacgtgataaaatatgcaaaaccctagtccaacaatacatgacatccagtagaaactcagt

SEQ ID NO: 365621 - DNA, 201 bp, Homo sapiens
ctctgctattttcaagttttgtaacctctgtttcccattgtaaaataggacggagaatacctactcttcagggttgttatgagaattcggtgtgggtatayattgaatgcttggtgcatcctggttgggtgctgagtaacacccaatcctggataagtcacaggactgtcctgagctttgagcctcaggaaacaggtgcac

SEQ ID NO: 365622 - DNA, 201 bp, Homo sapiens
gagaaactgcttctcttgtaagccggctctgcactgaccaggcccatgggtgtgttgaagcaccttcctatcccaagccatgctgaattgcactcctttawtacactgccccttctcatgcattctataaagctcttctatataagtaataataaaagttttgctgctttggccatgtaaaaattgtaaaatgccacatgg

SEQ ID NO: 365623 - DNA, 201 bp, Homo sapiens
tatgctatgaacatgaatatatgtattagtccgttctcatgcttctataaaggactgcccaagagtgggtaatttataaaggaaagaagtttaattgactyacagttccacatggctggggaggcctcaggaaacttacaatcttggcagaaggggaagcaaacacatccttcttcacatgatggcaggaaggagaggtgc

SEQ ID NO: 365624 - DNA, 201 bp, Homo sapiens
ccccagtgcaggccattatgaccttattcttcaactggtataagagccccagattctctttctctccgtttgagtaacattcccagagcctcgcttgaccytattctttgtcttctctcttttgcctaacaaaactcatgcttacgtcagcatctctcctctgccttctggaactggtgggcagcttctttcctggccccc

SEQ ID NO: 365625 - DNA, 201 bp, Homo sapiens
atggtacacggaagggttatctgtttgaagttgcggaggggcatgatgtgatgctctgcgtctaagaattattattttatctgctataaggagaatttttrtagggctaaaagtggaagcagtccttatcaggaaacccaaacatttataactttttggaatttctcactcctgggactggctttagaaagtgatccaaaa

SEQ ID NO: 365626 - DNA, 201 bp, Homo sapiens; identical to SEQ ID NO: 79035

SEQ ID NO: 365627 - DNA, 201 bp, Homo sapiens; identical to SEQ ID NO: 79036

SEQ ID NO: 365628 - DNA, 201 bp, Homo sapiens; identical to SEQ ID NO: 79040

SEQ ID NO: 365629 - DNA, 201 bp, Homo sapiens
aaataccagactactagtcagtagccatacagaaaaatatctttcataggaaggaaaaggtgtggaacatgaagctgcgttcccctgggatggcagcgtgmggcagaggtgggcgttgcaggaggaagacgggcctcatgccaggagattgagactagagttagcagcagggtcacagcgcactttcctccttctttcaaa

SEQ ID NO: 365630 - DNA, 201 bp, Homo sapiens
cagtgtctgcccctttgtttaaacgcctctcctggctgggcgctgtggctcatgcctgtaatcccagcactttgggaggccaagatgggcggatcacttayggtcaggagttcgagaccagcctggccaatatggcgaaaccccgtctctagtaaaaatacaaaaattagccaggtgtggtggtacacacctgtaatccca

SEQ ID NO: 365631 - DNA, 201 bp, Homo sapiens; identical to SEQ ID NO: 79041

SEQ ID NO: 365632 - DNA, 201 bp, Homo sapiens; identical to SEQ ID NO: 79030

SEQ ID NO: 365633 - DNA, 201 bp, Homo sapiens; identical to SEQ ID NO: 79044

SEQ ID NO: 365634 - DNA, 201 bp, Homo sapiens
cagggagcaataagtcagtgaagtcagagaaagcgaatagacagtgaaggggtggtcagcggggactgaaggaagtgagggagcaccaagccatggggacgggggggggaactgtgtggaggcagagaggataggaacagtggtcatcagtgatgggcaggctgggtgggctcaggaaacagcaaaggggccagatgaaca

SEQ ID NO: 365635 - DNA, 201 bp, Homo sapiens; identical to SEQ ID NO: 79046

SEQ ID NO: 365636 - DNA, 201 bp, Homo sapiens
attttacagatgaagaaagggagttcagagtttaattaacttgctgaagtttccatggccattgagtggtggagctgcatttgagaacagtttcttccacwtcgcagctcatgtactgggtgtgttccctagttactttggaaatggaatcaggattaattccacaggggtttgggtcaggctgtgtaagtgcctcctccc

SEQ ID NO: 365637 - DNA, 201 bp, Homo sapiens
aaggaaaaaaaaaattcccaccctagttagattaggatgcagaggactcacagatttggaggatttggaggacccaaattaccaaaaccccttctattacmcacttgtaaagttttattagcagtcaggtacgttttcaggtacgtttccacccccattaacttttcagagcatgtgaggactttcttcctggagcatggt

SEQ ID NO: 365638 - DNA, 201 bp, Homo sapiens
tcttgactgcctcctcctgctgacctttagctggccactggggaactaaaaacactgtttctactccttagggtttccctggctcgacccggagagccctrttaacaataaaccagtttagctagaggcagccttgaaattctggctctcacactcatagtagggaaaccttggtaaatcacttaacctccctaattccca

SEQ ID NO: 365639 - DNA, 201 bp, Homo sapiens
aaccagttctcatgggaactaacaaagtgagaacccattcactactgagatggcaccaagccattcatgagggatctacacccatgactcaaacacctcgmattaggccccacctccaacattaggatcaaatatccaaaccatagcagcaggtaaagcacatagtccatagtccctgatttcagaagtcacttgttagtg

SEQ ID NO: 365640 - DNA, 201 bp, Homo sapiens
caaattcacataagtaaatgcaaatggtgggattttttaactatagttttacttttttcagtttttaatttttctctagggtacatttctttttaataatyagaaaaagaaaacaattctctttaattttaaataaagataacatggaggaaaaattggaaacaaatgacctcttgtacatgcaaaagtgctttacatcac

SEQ ID NO: 365641 - DNA, 201 bp, Homo sapiens
ctctcttttaacttattcacattaatactctacttccataacatatttattttttggtcagctaatgataaatttctctcagtaaaccatagctgggatakaatcaagttctgtaggcattttgtttaattttctcagtttgtcctttctagatcaacactgagtttatctttcagtatggcctctgttacttgttattca

SEQ ID NO: 365642 - DNA, 201 bp, Homo sapiens
ttctatttttaagagcaccattctaatggaaatgtccctgccctgaattaagctgggactgtgcactttaccactagctagagctgttatatatcatagcrtttaggttaaattggtaggtattgatttccttgactgtgacttcgaaacttgcttctgcttcttttagccatgtaggatttctacctgggctgtagatga

SEQ ID NO: 365643 - DNA, 201 bp, Homo sapiens
gatccatacagctttttttttttaaaaagagaatagcactttatatactgatacagaaagattgccaagatattgttaaataaaaaaaaatagaaagcaaygggtattgcgtgctaccatttttgtaaaagaggagaaattaaatatatgtacactaaacatacaatatctgcttgtatgtagatgaaatattactcaaag

SEQ ID NO: 365644 - DNA, 201 bp, Homo sapiens
ttacagtctagtgggggaagacagagaataaacaaggaaacaaataaaaagggtgatgagtgctgtgaaaaaaaaatatgcccatgtctgccagagaggcygggagagaagcatcgtcggagtggaaggcctcttgggcccctcttggttctcttgggcctctggagggatggcatttgtgctaaggcctgaaggaagggt

SEQ ID NO: 365645 - DNA, 201 bp, Homo sapiens
tttctagatcaacactgagtttatctttcagtatggcctctgttacttgttattcaactgaagtaatctctttagaaaggatatggatataaaggaagcargtttcatcgtgtcatcaaggatttcatgattcaaggaggtgacatcaccactggagatggcactgggggtaacgtctttgcatttttcctttcccattta

SEQ ID NO: 365646 - DNA, 201 bp, Homo sapiens; identical to SEQ ID NO: 79051

SEQ ID NO: 365647 - DNA, 201 bp, Homo sapiens; identical to SEQ ID NO: 79053

SEQ ID NO: 365648 - DNA, 201 bp, Homo sapiens
cctaatacaggtgtgtatcagagtgaactgggtggtgtttctaactacccaaggacaggtctctggccagatttattgattcagaatcccaagtgattctratgcaaatctctggtttagaactactgtttcaggattgtagaggttgccagggatgtgagactagtaactggtatgtgtgccaaaagctctcctgcaccc

SEQ ID NO: 365649 - DNA, 201 bp, Homo sapiens
atttgcttttttgtgactggcttatgtctctgaatgtcttcaaggttcatctgtgttgcagcatgtgtcagaatttcctttttatccattcatccattgcyggacacttgggttgtttctaccttttggctactatgaatatatgctatgaacatgaatatatgtattagtccgttctcatgcttctataaaggactgccc

SEQ ID NO: 365650 - DNA, 201 bp, Homo sapiens
gcttatgtctctgaatgtcttcaaggttcatctgtgttgcagcatgtgtcagaatttcctttttatccattcatccattgctggacacttgggttgtttcyaccttttggctactatgaatatatgctatgaacatgaatatatgtattagtccgttctcatgcttctataaaggactgcccaagagtgggtaatttataa

SEQ ID NO: 365651 - DNA, 201 bp, Homo sapiens
tattttctgctttgatagtagccatcctcacaggtgtgccagaattcttcttgatgcagcacttcaagcagccattgtcaatcgatcaaagttgacaaatragatgaaaaccatctgttatttcaaaagtgtgatcatatttctctaaactgattaagagagctcaacttcttttcaatgggaacttataactgtaactgt

SEQ ID NO: 365652 - DNA, 201 bp, Homo sapiens; identical to SEQ ID NO: 79031

SEQ ID NO: 365653 - DNA, 201 bp, Homo sapiens; identical to SEQ ID NO: 79033

SEQ ID NO: 365654 - DNA, 201 bp, Homo sapiens
ttcccctgggatggcagcgtgcggcagaggtgggcgttgcaggaggaagacgggcctcatgccaggagattgagactagagttagcagcagggtcacagcrcactttcctccttctttcaaaatctttcatcatattgacaaaacagtgaaaaacaagtccaagagaacttttaagatttaacctgcaaaaaagtgactca

SEQ ID NO: 365655 - DNA, 201 bp, Homo sapiens
tatatgacttcatttatataaaatatctaaagtggtcacattgatagaaacagaaagtagaatggtagttgccaggggctggggatggggtaaatgggatrttgtatttaataggtataaggttttagttttgcaagatgaaaaattctggctattggttgcacaacaatgtaaatatactcaacaccactgcactgtgca

SEQ ID NO: 365656 - DNA, 201 bp, Homo sapiens
tagggcacagaaactccagacttgatttaaccgtgtctgcttgaagcatagcctctcttacaaagacttcagaactcctgaattggctccaagccttgtgygaggtgctctctgcttgccactggccatccctgggtactcaatgtggggctcttttgggaagccatctccagatgcttccttactctgagctgtacctgc

SEQ ID NO: 365657 - DNA, 201 bp, Homo sapiens
atttcactgaacaactgaatgaatgaatatacaacttcccaattatgtatagtgcatctattgagaccactacccaaacttgtccttcctgcttcttcagrgtcttttcctgtgacctcatataacaaacacccccaagagttgaacagatgttctcttggtactggattctgaaggagttatgaaagtcaataaataatt

SEQ ID NO: 365658 - DNA, 201 bp, Homo sapiens
aacatagtgccttaatccagtggggggacccaaatgcatttcactgaacaactgaatgaatgaatatacaacttcccaattatgtatagtgcatctattgmgaccactacccaaacttgtccttcctgcttcttcagggtcttttcctgtgacctcatataacaaacacccccaagagttgaacagatgttctcttggtac

SEQ ID NO: 365659 - DNA, 201 bp, Homo sapiens; identical to SEQ ID NO: 79037

SEQ ID NO: 365660 - DNA, 201 bp, Homo sapiens
gaatatatgtattagtccgttctcatgcttctataaaggactgcccaagagtgggtaatttataaaggaaagaagtttaattgactcacagttccacatgkctggggaggcctcaggaaacttacaatcttggcagaaggggaagcaaacacatccttcttcacatgatggcaggaaggagaggtgccaagcaaaaggggg

SEQ ID NO: 365661 - DNA, 201 bp, Homo sapiens; identical to SEQ ID NO: 79063

SEQ ID NO: 365662 - DNA, 201 bp, Homo sapiens
gagagtttcaaatctccttcagcttattgtttctcattcaggattatagctatccagctccatacactgttttctcttaaaagtttagttcttttcttgawcatacaccatatatgtaactccaaataatttaaatttactttagatttaagatttttaattcaacaaatactggtttcggtggatatttgttgtccattt

SEQ ID NO: 365663 - DNA, 201 bp, Homo sapiens; identical to SEQ ID NO: 79064

SEQ ID NO: 365664 - DNA, 201 bp, Homo sapiens
cagcacagaaggaagtggcccagaagacagaaaggttccgaaaacatcatttagctgctgtgtccagctgtgcccaaagctaatccacacttagcttttckctgcgtaaactaatacattttcttttttctcaagccaaggcaaactgatttcctttgacttgcaacctaaaagtcttcaccaaatatagcaatattgaaa

SEQ ID NO: 365665 - DNA, 201 bp, Homo sapiens
catgatcttggctcactacaacctctgcctcccaggttcaagcgattctcctgcctcagactcccaagtagctgggattgcaggcgcccgccaccatgccyggctgattttttgtatttttagtagagatagggtttcaccgtgttagccaggatggtctcaatctcctggccttgcgatctgcccgcctcagcctcccaa

SEQ ID NO: 365666 - DNA, 201 bp, Homo sapiens; identical to SEQ ID NO: 79068

SEQ ID NO: 365667 - DNA, 201 bp, Homo sapiens
aggaagcccagggcaagtcaacgtcacaggcaacttgcatggcaggaggaaactgcagggcatgtttggaaaaacaagtcttctagtttggctaaagcatraattttgtggagttacgagttggacaaaaaggatggaaaagtaagttgagccagatggaagacagccctgaagagcaggctaaaatttattctggaggca

SEQ ID NO: 365668 - DNA, 201 bp, Homo sapiens; identical to SEQ ID NO: 79070

SEQ ID NO: 365669 - DNA, 201 bp, Homo sapiens
tgttctcaaagaaaactgtagatgatataccccatgagtctagtattttctttcctctcacctctcttttataaagcattcaatttgaggtccatgttgtyaagatgtaaaataattgggaaaaggcaaatgatggcttgatgatccaaattacttttgaagtatttccagttatgcatgtggcccctattcatgatcaca

SEQ ID NO: 365670 - DNA, 201 bp, Homo sapiens
agggataaaataaaatgtggtgagatcagaaggacctttgctataagtttggtaactcccaactatgtcttactgacttcccactagaaataggtctggaraggtctgttgcatagaatgtctcttgcttttaatcagtagaatccattgaattgggtattgctagatatttagaagaaataaaaattgttgtattgctcc

SEQ ID NO: 365671 - DNA, 201 bp, Homo sapiens
actctgatcccctgtacttcaaagacccattctcctatcatatcacctcttctcattgtcccattttgtttcagtaactaacattctttacttcatcacayatgaacatgcattaaggacaccagaatgaaatacttttctattccttagagttaaactccacttttccattccttaggtggcccaaaggaatgggtaacc

SEQ ID NO: 365672 - DNA, 201 bp, Homo sapiens
ccagaacctcaagcctcagagagaaacgggtcatctaccgttagttagcattaaatagcatttcatgaagagcacacacatttttatcaaaaggatacagmgactgttctcaaagaaaactgtagatgatataccccatgagtctagtattttctttcctctcacctctcttttataaagcattcaatttgaggtccatgt

SEQ ID NO: 365673 - DNA, 201 bp, Homo sapiens
cattggaatgatactcaacactcatcagctttgctttgtcactggagaaccaccagtgccactggatcatacagacaggtatagcagagctatactagaawctcataattaatagaaatttctgcctgatacaaaaacccaggactttctacataaagaagcagagactgtgctttacaagtgttgtcacaacattagaga

SEQ ID NO: 365674 - DNA, 201 bp, Homo sapiens
cacatcctgtgactatggctaccacaggcgatttgcatgtactgcacacacacaggtatgttggcaccctgaaatccagaacctcaagcctcagagagaawcgggtcatctaccgttagttagcattaaatagcatttcatgaagagcacacacatttttatcaaaaggatacagagactgttctcaaagaaaactgtaga

SEQ ID NO: 365675 - DNA, 201 bp, Homo sapiens
ttctgtcttgaagacacatcctgtgactatggctaccacaggcgatttgcatgtactgcacacacacaggtatgttggcaccctgaaatccagaacctcamgcctcagagagaaacgggtcatctaccgttagttagcattaaatagcatttcatgaagagcacacacatttttatcaaaaggatacagagactgttctca

SEQ ID NO: 365676 - DNA, 201 bp, Homo sapiens
ctctgatcccctgtacttcaaagacccattctcctatcatatcacctcttctcattgtcccattttgtttcagtaactaacattctttacttcatcacacrtgaacatgcattaaggacaccagaatgaaatacttttctattccttagagttaaactccacttttccattccttaggtggcccaaaggaatgggtaacca

SEQ ID NO: 365677 - DNA, 201 bp, Homo sapiens; identical to SEQ ID NO: 79073

SEQ ID NO: 365678 - DNA, 201 bp, Homo sapiens
ctttctaccctcccattaggggtgctgctttggtctgccattctgacactatgtctggcatagcagaggtcttccctcaggaacctgtggtcaagtaatarcagtttcagacttctctagtctagggaataagctgttcatgggcacatgcagagcctttttcagatgagggataattacattctttcgtttcctgcttct

SEQ ID NO: 365679 - DNA, 201 bp, Homo sapiens
ctcgacgtggctgcctgggcgcggcgggccccggtcctcgcagatccgatccctcccccacgcgcctgcagtggcagccctggaatccagtgcaaaccgcscgtctggcccctcctgcttccttttcacattgctttgcagtcccgggcgtccccagttctcttgctgtcctccgctccactctgcagtcccggtgggcga

SEQ ID NO: 365680 - DNA, 201 bp, Homo sapiens
tagagttatttcctcagtttgcagctcattaacttttttaaaagttttgttaagtttgaagtttgtaataaacatctatgaattattttttttattggggrattatttccacttcagtttcactcattcatatgatcaaacttgaattgattctaaagtttacttctgacatttagatttttaatgcttattatgttttta

SEQ ID NO: 365681 - DNA, 201 bp, Homo sapiens
catgaacatgcattaaggacaccagaatgaaatacttttctattccttagagttaaactccacttttccattccttaggtggcccaaaggaatgggtaacmaagccagatacatttaaaagttattatttctggaattcttctactcagtttgtttatactttttttttttcagtttggtcttgacacacagacaagtgtg

SEQ ID NO: 365682 - DNA, 201 bp, Homo sapiens
aaggatagcactgaaaaaacagagtcacatacattcttctgaacatgcccacagcacagaaaacctggcaggttttatggcccatattgtgtggagttggktatagtagaaccaacccccgacccccaccgccagaacaccattataatttaagctaaaataatttgcacttaaataaacagattagttttttcttaattt

SEQ ID NO: 365683 - DNA, 201 bp, Homo sapiens; identical to SEQ ID NO: 79067

SEQ ID NO: 365684 - DNA, 201 bp, Homo sapiens
aaaccactgccataaagtaagcaactgaagagttcagccccctctggtctgtacaaatcaagatgtcatatatttgagttctagaaccattgatactaggraaatactctgcaaaagattgaggtgtgtggaggtttcttcataatattcctactcctgagactcttcttagaatgaaatactggaagatatctattcaca

SEQ ID NO: 365685 - DNA, 201 bp, Homo sapiens
tgtcagactcttgtaagtactaacttaaaatttaatttgcaaataatagcatattatttatcatagtctgaccacataccataattttaaattttttattktgtttatcttagggattgagtcctggctgttatgatacctatggtgcagacatagactgccagtggattgatattacagatgtaaaacctggaaactata

SEQ ID NO: 365686 - DNA, 201 bp, Homo sapiens
tccctgcttgatttagctaagtcctcattaacaatttccttattgtagccctatggaaaaagaaatactgaggaactctttgtgttgcccaggtcagtgtraaccccagctacctggttcctgaatctgactataccaacaatgttgtgcgctgtgacattcgctacacaggacatcatgcgtatgcctcaggctgcacaa

SEQ ID NO: 365687 - DNA, 201 bp, Homo sapiens
gaggagatgtaacttacccacacattattcatgtgtgcatatacagattcccttttcagtgatctgcaagtcctgtgcaagggacctagagtttatttgcyccatttacaaaaagaggcactctggacagctcactctgaaatatttgaagctgggattgtagacattatagcacttctggttcccccccttctttggggt

SEQ ID NO: 365688 - DNA, 201 bp, Homo sapiens
aaccggcttagtaaataactgtaaaaaaagatatctctgttttttcacctgtgaaaccattccttccttctgttttatgctgaaaatagaatagtggttgsggttagcaaatggaggaaaaataagtttctttaaaagcactttaaaaagttgcctcttttaataatgcaaataagagcagaaggacaccatttctttctc

SEQ ID NO: 365689 - DNA, 201 bp, Homo sapiens
gggatccagtgtaaactttctaccctcccattaggggtgctgctttggtctgccattctgacactatgtctggcatagcagaggtcttccctcaggaaccygtggtcaagtaatagcagtttcagacttctctagtctagggaataagctgttcatgggcacatgcagagcctttttcagatgagggataattacattctt

SEQ ID NO: 365690 - DNA, 201 bp, Homo sapiens; identical to SEQ ID NO: 79075

SEQ ID NO: 365691 - DNA, 201 bp, Homo sapiens
ttttcttttttcaaaatcacagtacagcatacagggcagatgtcagagattatgatcacagggtgctgctcagatttccccaaagagtgaaaaaccaaggracatcagatttcttacccagccgaccaagatattcctgggaatggcacagttgtcatcagtaagtaaatgggcctcctgggtacttttgggttgcttttc

SEQ ID NO: 365692 - DNA, 201 bp, Homo sapiens
tttttcttttttcaaaatcacagtacagcatacagggcagatgtcagagattatgatcacagggtgctgctcagatttccccaaagagtgaaaaaccaagrgacatcagatttcttacccagccgaccaagatattcctgggaatggcacagttgtcatcagtaagtaaatgggcctcctgggtacttttgggttgctttt

SEQ ID NO: 365693 - DNA, 201 bp, Homo sapiens
tacccttgggtaagttatttgatcttagtgtgccttagttttctcatctataaaatggagataatagcccctcatgtagttgtgaaaattgaatttttatacacacacacacacacacacacacacatataaatgtttacgattgttcctgccacatactatttaataaatgttagttattcaaagatacaacgtaaactc

SEQ ID NO: 365694 - DNA, 201 bp, Homo sapiens
tcccattttgtttcagtaactaacattctttacttcatcacacatgaacatgcattaaggacaccagaatgaaatacttttctattccttagagttaaackccacttttccattccttaggtggcccaaaggaatgggtaaccaagccagatacatttaaaagttattatttctggaattcttctactcagtttgtttata

SEQ ID NO: 365695 - DNA, 201 bp, Homo sapiens
acccttgggtaagttatttgatcttagtgtgccttagttttctcatctataaaatggagataatagcccctcatgtagttgtgaaaattgaatttttatacacacacacacacacacacacacacatataaatgtttacgattgttcctgccacatactatttaataaatgttagttattcaaagatacaacgtaaactct

SEQ ID NO: 365696 - DNA, 201 bp, Homo sapiens
aaataaatttgtaacccatttctcatattacctacacacagaaaaacaaaatttgatatcctggggtttatttgctgagggcgcttcccataaaagcgagwgagtgtgcgttgggaaatgtgtctggttaactcttttatggataaactttagtcacaatcctcccccgcccccctctcacccccagcaccctcccaacct

SEQ ID NO: 365697 - DNA, 201 bp, Homo sapiens
tacagcaattgacttcaataaaatttactccaatgcattacagataggatttctttaaaagtccattacagccaagatcatctaaagttagttagcattaratagcatttcataaagaccacacgttttttatcacaagcattcagaaaccattctcaaagaaagatgtagatgatacatcccatcagctcagaaggacct

SEQ ID NO: 365698 - DNA, 201 bp, Homo sapiens
atacagcaattgacttcaataaaatttactccaatgcattacagataggatttctttaaaagtccattacagccaagatcatctaaagttagttagcattraatagcatttcataaagaccacacgttttttatcacaagcattcagaaaccattctcaaagaaagatgtagatgatacatcccatcagctcagaaggacc

SEQ ID NO: 365699 - DNA, 201 bp, Homo sapiens; identical to SEQ ID NO: 79076

SEQ ID NO: 365700 - DNA, 201 bp, Homo sapiens
cattgctttctctgtatgtaactgaccaccatctttttgttttgtgggacatcagacattaccacagtatggatgagtttagccactatgacctgcttgakgccaacacccagaggagagtggctgaaggccacaaagcaagtttctgtcttgaagacacatcctgtgactatggctaccacaggcgatttgcatgtactg

SEQ ID NO: 365701 - DNA, 201 bp, Homo sapiens
gtaggggaagtgagagaattacacatataactgtaatagagatacaatatgagaagtttcatgagggataaaataaaatgtggtgagatcagaaggacctktgctataagtttggtaactcccaactatgtcttactgacttcccactagaaataggtctggagaggtctgttgcatagaatgtctcttgcttttaatcag

SEQ ID NO: 365702 - DNA, 201 bp, Homo sapiens
cccgacccccaccgccagaacaccattataatttaagctaaaataatttgcacttaaataaacagattagttttttcttaatttttataattccttaattwattcatccattctccatttatttattcatttgcactctcatttttgtactgtttgttgatgccctgagctagatattactgaataatgcaaacataaata

SEQ ID NO: 365703 - DNA, 201 bp, Homo sapiens
ctatttataaacaatctaatctaatctaatctgtcttattttaaagaacttcaggggaaaatatgcagtctctttccataacgtctccagagtttaaccamttacttaagttaaaatcccttccctgcttgatttagctaagtcctcattaacaatttccttattgtagccctatggaaaaagaaatactgaggaactctt

SEQ ID NO: 365704 - DNA, 201 bp, Homo sapiens
agcaaaaagggataaacactgtaaaagctatccacaataaaaagtatcatggacgttcaaagcacaagaaggtaatttccaaaaggggaaactggggaggrtttcactgagaagaggacatttgagctaagataattattatgtggcctttattcctgaactgttaaaattctagaactttggtagaggcctattttgttc

SEQ ID NO: 365705 - DNA, 201 bp, Homo sapiens
tttctttaaaagcactttaaaaagttgcctcttttaataatgcaaataagagcagaaggacaccatttctttctccacacatatatatttaaatctacagyataattgatgtcagatgttgtttggatggatttttttaaagtagtgctgaactaagcagtttgcatgttttatcattggaaaatgcgtgtcagttaaaat

SEQ ID NO: 365706 - DNA, 201 bp, Homo sapiens
gtttctgtcttgaagacacatcctgtgactatggctaccacaggcgatttgcatgtactgcacacacacaggtatgttggcaccctgaaatccagaacctmaagcctcagagagaaacgggtcatctaccgttagttagcattaaatagcatttcatgaagagcacacacatttttatcaaaaggatacagagactgttct

SEQ ID NO: 365707 - DNA, 201 bp, Homo sapiens
tagagatagatgaagcctgtgatagcaaaaggatagcactgaaaaaacagagtcacatacattcttctgaacatgcccacagcacagaaaacctggcaggktttatggcccatattgtgtggagttggttatagtagaaccaacccccgacccccaccgccagaacaccattataatttaagctaaaataatttgcactta

SEQ ID NO: 365708 - DNA, 201 bp, Homo sapiens; identical to SEQ ID NO: 79074

SEQ ID NO: 365709 - DNA, 201 bp, Homo sapiens
gttgattaaaaacaaagcttattttctgcattttccaataatattgtaaaaaatacttcatacccttcattgtttgggtttcatgtcttcattacattccytttacttcgtattatcttttaagattttgtagaagaatttcacttgggtaactgtaggcttaaatgatgcaatgctttctggaatccaggggtgactgac

SEQ ID NO: 365710 - DNA, 201 bp, Homo sapiens
cattttttaccaaaattcaaacttcatgaaaccctggcatttcatcctttgccttccatcctcatggccaccatcaaagtccacatctttattatcttacrtgtgaacagctgtaataacctttccagttattaattctttaaacaccacttttagcctgatgcatttcttttcaagaacctacggtatgtttatagtcca

SEQ ID NO: 365711 - DNA, 201 bp, Homo sapiens
atgtaaacatgtgttttaaaagctgtgtgttatggcgttccttcctttatgggttccaggtggagaatctgattctctcattgcctgagaaaagacccacwggggtcccagcgccactcccctgtagttctgcctttgtcttgggatgctaatgggatgtcatgaggggaggtggaggggggctggaagagaagaaaattc

SEQ ID NO: 365712 - DNA, 201 bp, Homo sapiens
aggcccgggtgtcccctgggctttggggtgtgccaatttgccctgtaaaccagtacccccggcccggagccgcggcgcgccggggcctcgcggactggctstcttcccgcggacaacctgtcgcgtcggggatgcccgcggccccgccatgcagctctggccgcttctatctgctgcgtgctgtcccggggacaaagacag

SEQ ID NO: 365713 - DNA, 201 bp, Homo sapiens
tgtcactcacccatacccccaacctcaccaatcctccaaagtggattagttgttgcttaggtgtgttttgtctttatattgcgtaaatattgtgaagaagkctctttcctctgtggtgctacaaagataattttttttcccgttacagtcaagctacaacttcaagcagaagagagaggagttgtgtctatcaaaggagtg

SEQ ID NO: 365714 - DNA, 201 bp, Homo sapiens
tccaggtgctgtctctctcaggttagcttgggctttttcagtggctggatctcaagaggaaagggttccaagagagcaagctccattgtgtaagccgctgkttgcatcctgtttgctaatatcaaaattgccaatgtcacatcagtcaacatgtctaggactagattcagtttgggaagagctacagaagatataaatatc

SEQ ID NO: 365715 - DNA, 201 bp, Homo sapiens
ctgcatagttcccctggtataatttagaatgtgtcatgcagctgcagtcaagtggtcacggggacaagaatatctgaaatggctttacttacatgtccaayaccttagcagggataactggaatcctaatgatatctttctccaggtgctgtctctctcaggttagcttgggctttttcagtggctggatctcaagaggaa

SEQ ID NO: 365716 - DNA, 201 bp, Homo sapiens
ccgctcccccatccttgcatccaaccaattgcttggatcaaagcacaattttagtattatttcaacctgctatgtcttgttggatggcaaatgaagagatracagagtggcatgcttcaaaggggcagtgtggttcagcattcagcaaaagaagaggattaggactgctgatcttgaccctagattgctgggtaactttaa

SEQ ID NO: 365717 - DNA, 201 bp, Homo sapiens
tatgtctttttagtgtaagaaataagaacacatagtataagaagactttctttggggagagaagacttcttggtattttcatccattcccctacttccccygctcccccatccttgcatccaaccaattgcttggatcaaagcacaattttagtattatttcaacctgctatgtcttgttggatggcaaatgaagagataa

SEQ ID NO: 365718 - DNA, 201 bp, Homo sapiens
agggagcaaaaaaaccaacatgaccagttttttgtggcacaggggaaggaaacacattcaatagttgtgattttaggcttcttttttgggatggaagtgtmagtactggagccagaaactatttcctttactacctgtgtacttgcttttatgacgcttagaaaatgtatacactatagctattaactatgtctttttagt

SEQ ID NO: 365719 - DNA, 201 bp, Homo sapiens
caggataagggaagtagaaagtagaagagggaaaggaagaaagagaaaaaaacaaaaacaaaataaagtgagaacaagcaagagaagatttaggttgaaayagacattcatattcaaaactcccaagtagctagttgtatgggactcttagcgctctcttcagagagcggttccaaatctcacaagaagaagggagcaaaa

SEQ ID NO: 365720 - DNA, 201 bp, Homo sapiens
acaacatcaagaaagtgaaaagaggccgggcgcggtggctcatgcctgtaatcccagcactttgggaggccgaggcgggcggatcacgaggtcaggagatygagaccatcctggctaacacgtgaaaccccgactctactaaaaatacaaaaaattagccgggcgtggtggcgggcgcctgtagtcccaactactcgggag

SEQ ID NO: 365721 - DNA, 201 bp, Homo sapiens
gcccacttgaggctggagacctcatattgctaataacaccagtttggatgaatgtatcatttccagaacattgtgtatgttgaacattgtgtatgttcaasaatgtatgttcaagaatgcagaagctggctgggcgcggtggctcacgcctgtaatcccagcaatttgggaggccaaggtgggtggattgcttgagctcag

SEQ ID NO: 365722 - DNA, 201 bp, Homo sapiens
tggctaacacttgctgagggcccacttgaggctggagacctcatattgctaataacaccagtttggatgaatgtatcatttccagaacattgtgtatgttsaacattgtgtatgttcaacaatgtatgttcaagaatgcagaagctggctgggcgcggtggctcacgcctgtaatcccagcaatttgggaggccaaggtgg

SEQ ID NO: 365723 - DNA, 201 bp, Homo sapiens
ttagttatctattatttaaaataatatattagcttattttaaagctaatcccagatattatgtttcattttgcatgtctgttgctgtcttggtaggaaaawttttaaaacataaattactatgacataatgatatctaacaaagttaattatttaagaaactttcaaaagttgctttttcatgccgtttccctagctacct

SEQ ID NO: 365724 - DNA, 201 bp, Homo sapiens
caacaaaaaatcccccacaaaaaccccattcaagggtcagcagcctcaaagactgaaaatagacaaactcacaaagatgagaaagaatcaacgaaaaaatkatgaaaacccaaaaggccaaagtgcctcttctcctccaaatgatcgcaatgtctctccatcaagggtgcagaactgtatggaggatcagatggacgaatt

SEQ ID NO: 365725 - DNA, 201 bp, Homo sapiens
tttttcccctttgaggtcagtaagtatcttcagtgctaccctgtgaagttgctttttgaacaatttatctttttttttttttttttttgttttgttttgtwtttttgagacggagtctcgctgtgtctcccaggttggagtgcagtggcgcgatctcggctcactgcaagctccgcctcccaggttcatgccattctcctg

SEQ ID NO: 365726 - DNA, 201 bp, Homo sapiens
ataatgtggtgtgacaagtcatctttctcaggatcttattttatgaaaatctttcatcacacttattttatgaaaatcatttgctgtgtaagcaaattaartataagcattttgtgtttccactagatagatatttgcacacaaaaaaatagacatcaaaatcccatatagaaagctaaatgcatctatagttcattgaag

SEQ ID NO: 365727 - DNA, 201 bp, Homo sapiens
tagccttctactgctgcttctgataaaagtaaaaatgatccctgattggtaacctaccttgggactgggaagagtgtggatggatcataaatactgctggragctatagctttgggcttcccatagcatatttcttcttactgggtatgtccctccttgtgtttaacacctgacctgtctgttttggagctggagaattgt

SEQ ID NO: 365728 - DNA, 201 bp, Homo sapiens
tatcaacacccaaatcaaccaagtagaagaaaggatatcagaatttgaagaccaccttgctgaaataaggcatgcagacaagactagagaagaaagaatgkgaaggaatgaagaaagcctccaagaaatatgggacttcataaaaagaccgaacctactatcgattggagtaccagaagaagacagggagaacagaaacaa

SEQ ID NO: 365729 - DNA, 201 bp, Homo sapiens; identical to SEQ ID NO: 79090

SEQ ID NO: 365730 - DNA, 201 bp, Homo sapiens
tcattgatttttttgtagggtttttcgtgtctctatctccttcagttcttctatgatcttagttatttcttgttttctgctagcttttggattagtttgtkcttccctctttagctcttttaattatgatgttagggtgttgatttgagatctttcaagctttctgatgtgggcatttagtgctaaaaatttccctcttaa

SEQ ID NO: 365731 - DNA, 201 bp, Homo sapiens; identical to SEQ ID NO: 79091

SEQ ID NO: 365732 - DNA, 201 bp, Homo sapiens
tcaataccctttgtttctttctcttgcctgatttccctggccagaatttccaatactatgttgagtaggagtggtgagagaggcatccttgccttgtgccrgttttcaaagggaatgcttccagcttttgcccattcaatatattggctgtgggtttgtcacaaatagctcttattattttgagatatgttccatcaacac

SEQ ID NO: 365733 - DNA, 201 bp, Homo sapiens
cgacccgctctctccgcctcatttccatttcgtgggttctcgcccgctctctcccctccagcctgcaccctcctcccggatcttcactgcgaccctagcgstccgtgtggtttctggccgcgcggccctcggcggtttcgggttcaccactcaccccctcctttccgggctgcggcgtaggcccgggtgtcccctgggctt

SEQ ID NO: 365734 - DNA, 201 bp, Homo sapiens
cgtgcacataggtatacgtgtgccatgctggtttgctgcacccattgacccatcctctaagttccctcctttcactccccaccccacaacaggccctggtrtgtgttgttccccactctgtgtccatgtgttcttattgttcaactcccacttacgagagagaacatgcggtatttggttttcttttcctgtgttagtttg

SEQ ID NO: 365735 - DNA, 201 bp, Homo sapiens
ttgatatggttagtttaaatctgacattttgctatttttctttttttaaaatttcttctaaaaaaatgggatacatatgcagaacgtgcacataggtataygtgtgccatgctggtttgctgcacccattgacccatcctctaagttccctcctttcactccccaccccacaacaggccctggtgtgtgttgttccccact

SEQ ID NO: 365736 - DNA, 201 bp, Homo sapiens
gaggccgggcgcggtggctcatgcctgtaatcccagcactttgggaggccgaggcgggcggatcacgaggtcaggagatcgagaccatcctggctaacacrtgaaaccccgactctactaaaaatacaaaaaattagccgggcgtggtggcgggcgcctgtagtcccaactactcgggaggctgaggcaggagaatggcgt

SEQ ID NO: 365737 - DNA, 201 bp, Homo sapiens
atttaaagctgtaactttcccattaaacatgctgagttttcattatcataaaactagaaatattttctaaatttctttgtgatttattttctctgtttttktttgtttgtttgtttgttttgttgttgttgttgagacagggtcttctctgtcatccaggctggagtgcattcgtgctatctcggctgactgcaacctccg

SEQ ID NO: 365738 - DNA, 201 bp, Homo sapiens
atacaaatatttaaagctgtaactttcccattaaacatgctgagttttcattatcataaaactagaaatattttctaaatttctttgtgatttattttctytgtttttgtttgtttgtttgtttgttttgttgttgttgttgagacagggtcttctctgtcatccaggctggagtgcattcgtgctatctcggctgactgc

SEQ ID NO: 365739 - DNA, 201 bp, Homo sapiens
gttagtttttcttcttcaggatttctgaaaataggaataataatcttattccagaagaaaggacataattatgttaaacaaaaagggaacattcccaactwgatcacagtgatcgtgatgtggagatgttgtgggctgctgttgcctgtattctggagacttgtggtcacagcagtaaacaattgctgctgggcctgttgt

SEQ ID NO: 365740 - DNA, 201 bp, Homo sapiens
ccccacaatatggagggcaatctactctactcaaagtccactgattcaaatgtaaatttcattctaaaacacccttacagaatcatccagaataatgtttracctaatagctgggcactatggcccagccaagctgacacataaaattaaccatcacaaggcatttgttgacataaaccctagactggcctgactgtccaa

SEQ ID NO: 365741 - DNA, 201 bp, Homo sapiens
gggagtgctacaggtgtatcttggactgaccccatggactgggtttggtctatgagcagcagtattcactggaagtcaacctggctttggagtctcatcayagaggatgaccttgctatgtggaataggctgcctggggctgggactgatgacctgatgacctagcaactcgatttttaggaggcttgtttcagtctgggc

SEQ ID NO: 365742 - DNA, 201 bp, Homo sapiens
tcagcacaactgctttactttccttcaggaaatgatacttaattagtatttgaaagcagtacattatcttgaattcactgtctattctaaggcaaagcacmccaaaaatctaaaatcaaatatattctccatgatgtatttacttttctaaggtgagagaattataaccgtattctttgggaatgtcctcttatactcacg

SEQ ID NO: 365743 - DNA, 201 bp, Homo sapiens
tcctcactcattcatctgccccttggcttatttcttttcaagtcccacacagagaagcaaggccttgatcattatcagcacaactgctttactttccttcrggaaatgatacttaattagtatttgaaagcagtacattatcttgaattcactgtctattctaaggcaaagcacaccaaaaatctaaaatcaaatatattc

SEQ ID NO: 365744 - DNA, 201 bp, Homo sapiens
tcctttgtcagttatctatgcattaaacggttttcagtgcctggtcttcagcattggattggatgatggctgatggaagaaaaaaaaacagtggttatacmttggaatttagttttcagttactggtgaattttagatccaaggagactactaaacctggctcagttatttttggacaccaaaacataattttattggaaa

SEQ ID NO: 365745 - DNA, 201 bp, Homo sapiens
cagaagaagttcctgtttcgggaaacacttgtggactggggttttttgccgtcagtcacacgatggatgcacgggtgggctgtggagcactcctgggaagsgggcatggtcaggcctgtgcccgcgcattacaaggggcgcattcctcactcattcatctgccccttggcttatttcttttcaagtcccacacagagaagc

SEQ ID NO: 365746 - DNA, 201 bp, Homo sapiens
gaatggtcacttctttacctatgtatttgtgaattttttaaaagaatgtatccatgtattatttatgcaaaattttctgagaagaatgaatgggaagtgargaagtggatgcagatgttgaatacttttctctgaggtgcatgaatgtgaagggaaggagagagataggatagcagccagaagaagttcctgtttcgggaa

SEQ ID NO: 365747 - DNA, 201 bp, Homo sapiens
aaatctctctcagactattttcctgaacatagtaagtgatgtatggacatatcttcaaagaagatattgtgggtttggttccagaccaccgcaataaagtraatatcacaataaagcgagccacataaactttttggtttcctaatgcatatgaaagctatgtttacattgtactgtaatcggttaagtgtacagtagcat

SEQ ID NO: 365748 - DNA, 201 bp, Homo sapiens
cactcttcctgcacaaggtgacttttgacttgaccggtgtatctttgatacttactcatttacagaaatgtataatggatgtgtgtgtgtgtgtgtgtgtrtatgtgtgtatttgtatttttatagagctattgacttctgcaatttaacctctaagatgaattatccaatagaattctgaaatgaaaagttcacagattt

SEQ ID NO: 365749 - DNA, 201 bp, Homo sapiens
tcttctgtcactcttcctgcacaaggtgacttttgacttgaccggtgtatctttgatacttactcatttacagaaatgtataatggatgtgtgtgtgtgtrtgtgtgtgtatgtgtgtatttgtatttttatagagctattgacttctgcaatttaacctctaagatgaattatccaatagaattctgaaatgaaaagttc

SEQ ID NO: 365750 - DNA, 201 bp, Homo sapiens
caaagcaggtagggtgcaaagccaacatatttgagtgctatatactaaaagtttatatatgggtgtgtacatatgtatatacacacacacacacacacacmaaaagatctataacaactgtttcccatcgtacaggtgagaaggtaagctcagttacttggagatgaaggctgattttgaatccaggtctgactccaaaat

SEQ ID NO: 365751 - DNA, 201 bp, Homo sapiens; identical to SEQ ID NO: 79089

SEQ ID NO: 365752 - DNA, 201 bp, Homo sapiens; identical to SEQ ID NO: 79092

SEQ ID NO: 365753 - DNA, 201 bp, Homo sapiens
tagtgtaagaaataagaacacatagtataagaagactttctttggggagagaagacttcttggtattttcatccattcccctacttcccccgctcccccayccttgcatccaaccaattgcttggatcaaagcacaattttagtattatttcaacctgctatgtcttgttggatggcaaatgaagagataacagagtggca

SEQ ID NO: 365754 - DNA, 201 bp, Homo sapiens
tgtaatctcagctacttgggagactcaggcacaaaaattgcttgaacctgggaggcggaggttgcagtgagccaagattgcaccactgcactccatcctgkgcaacaaagtgagactctgtctcaaaaaaaaaaagaaaaaaaaaagatacagtaaaagttgtgagttgagcaaaatgttatatatttgtttctggtcttg

SEQ ID NO: 365755 - DNA, 201 bp, Homo sapiens
ggtggctcacgcctgtaatcccagcaatttgggaggccaaggtgggtggattgcttgagctcaggagtttgagaccagcctgggcaacatggcaaaacctyatctctactaaaaatacaaaaattagctggatgcagtggcacatgcctgtaatctcagctacttgggagactcaggcacaaaaattgcttgaacctggga

SEQ ID NO: 365756 - DNA, 201 bp, Homo sapiens
ggggctgggactgatgacctgatgacctagcaactcgatttttaggaggcttgtttcagtctgggctttccagagaaactgaatgaataggagatcactcyatctatctatctatctatctatctatctatctatctgtctatctaatctatctatctacctacctacctagagggatttattttaaggaattggctcatg

SEQ ID NO: 365757 - DNA, 201 bp, Homo sapiens
ccagtctggccttgaactcctgggctcaagccatccttctgccttggcttcccaaaattttggaattacaggcataagttaccatgcccagcctccagaakgttttcaatttactttacccagatccattggaggaattactatctatggcagctatacccttacaaaatacatttcttaaatcttaagacttaaagtaga

SEQ ID NO: 365758 - DNA, 201 bp, Homo sapiens; identical to SEQ ID NO: 79081

SEQ ID NO: 365759 - DNA, 201 bp, Homo sapiens
acacccagctattttaaaaattttttgtagagacagggtctcactatgttacccagtctggccttgaactcctgggctcaagccatccttctgccttggcwtcccaaaattttggaattacaggcataagttaccatgcccagcctccagaaggttttcaatttactttacccagatccattggaggaattactatctatg

SEQ ID NO: 365760 - DNA, 201 bp, Homo sapiens
gaacatttatcttaaataatgtggtagctattaaattccattacttggagtattatttccaggtctttttgaaagccagctatccttttttttttttttttgataaatagttgaattgaaattaaaaggcaaagtccctccctcctgaaagagactgccagaaatcagtatgatacttacttattcctcattgtctaacag

SEQ ID NO: 365761 - DNA, 201 bp, Homo sapiens
ccggaaaagtgtctaaaaattaaactcctctttcctttattgactctcctgtattttcaaatggtatcaccatcttccttgccaaccaggcccaggtgttrgagtgaatttctactatgtcgttttccccactcctcacttctcttctcaggccctgtccatttcatttctgcagcacattcacacttgtgccggtcactg

SEQ ID NO: 365762 - DNA, 201 bp, Homo sapiens
tttgagtgctatatactaaaagtttatatatgggtgtgtacatatgtatatacacacacacacacacacacaaaaagatctataacaactgtttcccatcktacaggtgagaaggtaagctcagttacttggagatgaaggctgattttgaatccaggtctgactccaaaattcatgcatttgacaccatgttatttactc

SEQ ID NO: 365763 - DNA, 201 bp, Homo sapiens
tcatatccagccacactaaccttcaaaagcgaaggagaaataaaatcctttccagacaagcagatgctgagggattttgtcaccaccaggcctgccttacmggagctcctgaaaggagcactcaatatggaaaggaaaaaccggtaccagtcactgcaaaaaacacaccaaaatataaagaccaatgacactatgaagaaa

SEQ ID NO: 365764 - DNA, 201 bp, Homo sapiens
tggcggcagggagtacagttaggaaatgatttcagttatccaattgagaaatgtaaatctctctcagactattttcctgaacatagtaagtgatgtatggrcatatcttcaaagaagatattgtgggtttggttccagaccaccgcaataaagtaaatatcacaataaagcgagccacataaactttttggtttcctaatg

SEQ ID NO: 365765 - DNA, 201 bp, Homo sapiens
ggagcactcaatatggaaaggaaaaaccggtaccagtcactgcaaaaaacacaccaaaatataaagaccaatgacactatgaagaaactgcatcagctagygtgcaaaataaccaaatagcagcatgacgacagaatcaaattaacacattttgctatttttctaattatcctatctgtcctttaccttctgtctttccct

SEQ ID NO: 365766 - DNA, 201 bp, Homo sapiens
ccaggcagacagggcggggaagggcaggaaggccaaggaggcagggccaggtctggcatgttttgggaaccaaaagaagtttggaatggcaagaagtaagrcctgctagctaggcagggactggattatgatgggccttgcaagccatactgaacaattcgtctttatcctagaagtggtggggagtcaatggagggtttt

SEQ ID NO: 365767 - DNA, 201 bp, Homo sapiens
tcaaacaggagtgacactgaacagaatgtttggaatcaagtagatgtttgccaggcagacagggcggggaagggcaggaaggccaaggaggcagggccagktctggcatgttttgggaaccaaaagaagtttggaatggcaagaagtaagacctgctagctaggcagggactggattatgatgggccttgcaagccatact

SEQ ID NO: 365768 - DNA, 201 bp, Homo sapiens; identical to SEQ ID NO: 79088

SEQ ID NO: 365769 - DNA, 201 bp, Homo sapiens
tttgttttggtatattgtcaatatctttgtaactcaccttaaatattacttgggatcaaacacattatacctcaataaaaataatatattgattaatttgytatttttaaccacaaagtaccactatattatacagagcattgggtgctggagatgaaaaagtcaaggcccttgtcccttaaaatgtgttttgtttggcac

SEQ ID NO: 365770 - DNA, 201 bp, Homo sapiens
ccaaacgtgaattggcagaagaatgggcaatacactttcatatgagctgagtctttattgcttccaaaatagcaacctgcaagagaggcaagtatttaatktttttcaggcttgccataatttaaaaattttatcaatcacttaatcccgtaaaactgaaaagatgcttgtaacctattagatgggttagtgctagttctc

SEQ ID NO: 365771 - DNA, 201 bp, Homo sapiens
cttcagatgattatgctaaaccaaagttatgttttttgctagaccgtccacccaacttttaacagcaaagtaactaattcctgtgtagcaggaaaattcayttagttatttccatatatattttgcaactcaactaatttttcttggaagatactgcaggaagttacattattcaaagttagatattctctgttttagtga

SEQ ID NO: 365772 - DNA, 201 bp, Homo sapiens
ggtagagtatagtaagtgaaatgtatgctgcttatgtacacttagtattcaatttattccaggtgctcttatttacaaaaaaaaaaaaaaaaaaaaaaaaygagagtagttagaagtactgtatctacccttgggcttctcccaggaggtgactgcctgtgtgccacacttctttgcttgcaggctccagaggacgctgag

SEQ ID NO: 365773 - DNA, 201 bp, Homo sapiens
ctattggcttttcaaaacatgatctctttgtccataacaactggtgattgtgcattctagacttcttagtgtttagaatacaagttcatggccagaattcygcatggacaaactagcagaaatttgaacagaaataatgatttaagcaaataatttaaactctttcagaggctttgccatgtccagcaaagttgaagtgtg

SEQ ID NO: 365774 - DNA, 201 bp, Homo sapiens
tttacaaaaaaaaaaaaaaaaaaaaaaaatgagagtagttagaagtactgtatctacccttgggcttctcccaggaggtgactgcctgtgtgccacacttytttgcttgcaggctccagaggacgctgagacttggaaaggcagacctgcccaccccagtgtggagcaggggtggcttgtaggtgggcctgacccctgggc

SEQ ID NO: 365775 - DNA, 201 bp, Homo sapiens
gctcactaaatgtcagctgatgaggaaaacattctctgtggaacttgctgtgaaataactactcatgaggcatatgctgtataaagcttggtcaaagtttmcagttttcttggtgtcttgacatctgtgtttagatacttggtcaatctttaaatgaagataattatatatagcaaagttatatttgggaaacatttcgga

SEQ ID NO: 365776 - DNA, 201 bp, Homo sapiens
tactatagtatgaggcatataaaatggtaaattgaatgcaacagcactgtagttcttttctgcaaacacctttaacattattcaagggaagcaataaaggyaaagcgtagtcatttgttggatcactttttattttggaaacttttcagctgttaagtaacatattaatatttctagccaacattaatgctcagttctaga

SEQ ID NO: 365777 - DNA, 201 bp, Homo sapiens
taattttatgtcccccagttttactggaaattcctagctggcaagaaatttttatttttaaaaaatccagaccacattacccagtagttctttactctttyctattctgagggtctgaggctgaatttactcatcccagggtccttttggcttcattgctgaatgagtgaccagtctgagtcccatgaaaaggttcactct

SEQ ID NO: 365778 - DNA, 201 bp, Homo sapiens
gcaaacactttaatcttccacctgcagtgactagctttgagaccttgagccgacgcttaaccccagagccggtttcctcatcgctcacgtggggctaatayattactaccttgcagcaggcttgaggatgaaatgagaattgcagttttgctttctgtaagaaacaatgtttgtggttctagaaagaacactggcctaaat

SEQ ID NO: 365779 - DNA, 201 bp, Homo sapiens
agggagaattaatggtttttactgttttcccatatacttggtacatagtctgaacacagaacttcatgctttctgtaatagttagtggtttatgtgtctgrcttctgcactgggactgtgaactctttgtaggcaagcactggatcccatttgctgcatctatcctcacacacagtggccactcaaagaatgtttgttaaa

SEQ ID NO: 365780 - DNA, 201 bp, Homo sapiens
ctcctcaggcggttatacttttgcccatccaactgtctttttttccactttcttctgttttttttttgcatttgtattcccccaaggttctgtttttagcyttctactcttctttctgtgtacttgtattccttcagaagatcatgtattgtctctgtctctgtcttgattccccatctcaatttcccactgcttggaggg

SEQ ID NO: 365781 - DNA, 201 bp, Homo sapiens; identical to SEQ ID NO: 79083

SEQ ID NO: 365782 - DNA, 201 bp, Homo sapiens
cgcgcggccctcggcggtttcgggttcaccactcaccccctcctttccgggctgcggcgtaggcccgggtgtcccctgggctttggggtgtgccaatttgycctgtaaaccagtacccccggcccggagccgcggcgcgccggggcctcgcggactggctgtcttcccgcggacaacctgtcgcgtcggggatgcccgcgg

SEQ ID NO: 365783 - DNA, 201 bp, Homo sapiens
aaaaaacacaccaaaatataaagaccaatgacactatgaagaaactgcatcagctagtgtgcaaaataaccaaatagcagcatgacgacagaatcaaattmacacattttgctatttttctaattatcctatctgtcctttaccttctgtctttccctttctgccttcttgggttaattgagtagttttaaaatatttcat

SEQ ID NO: 365784 - DNA, 201 bp, Homo sapiens
aaaaacatcgtggacttgaaagacttcaatctcctggtacgcacattgcccccagagctcacagatgtttcaagtctgtaaaaatcagaaaacataggaargttaccagcagatgtgtggttgtcatagatataaaaaagtgggatacagggtgtttttggaaactctaggtaagtagtaagcttgatacagatctctgaa

SEQ ID NO: 365785 - DNA, 201 bp, Homo sapiens
cagcagctaataaaagtttcttaaaaattcagctggtttcttcgtggtcccatttttggcaagtttattcctccttctatcagagatgaagcagctatgcrtctcttttttgggaagaggtcatctgtatatcgaatttatttaggagatgaagcagctatgcatctctattttgggaagagatcatctgtatattgaatt

SEQ ID NO: 365786 - DNA, 201 bp, Homo sapiens
gctgcaataaacacacatgtgcatgtgtctttatagtagaatgatgtatattcctttgggtatatacccagtaatgagattgctgggtcaaatggtatttytggttctagatccttgaattgccgcactgtcttcaacaatggttgaactaatttacattcccaccaacggtgttaaagtgtttctatttctccacagcct

SEQ ID NO: 365787 - DNA, 201 bp, Homo sapiens
ttcttattgttcaactcccacttacgagagagaacatgcggtatttggttttcttttcctgtgttagtttgctgagggtgatggcttctagcttcatccaygtccctgcaaaagacatgatctcattcctttttatggctgcataatattccacggtgtgtgtgtaccacattttcttgatccagtctatcattgatgggc

SEQ ID NO: 365788 - DNA, 201 bp, Homo sapiens
gggaattctgatttccttaaaagtatttaagatttttatcatgtactattgttgtaggaaaatcctggttcttgtcacacgcccaggaaagattaggctcwcagacactttggagggtgaggggttatggaatttattggtcagaaagaaaaaaggaaaaacaacacagcaaagcaataggggttcatattaacaggcccc

SEQ ID NO: 365789 - DNA, 201 bp, Homo sapiens
taaaaagctcagtactttttactcagagagtgctcactaaatgtcagctgatgaggaaaacattctctgtggaacttgctgtgaaataactactcatgagscatatgctgtataaagcttggtcaaagtttacagttttcttggtgtcttgacatctgtgtttagatacttggtcaatctttaaatgaagataattatata

SEQ ID NO: 365790 - DNA, 201 bp, Homo sapiens
ctctgtctgaattttccacaggcattgcaatttcactgtgtctgaagggaacatatatcattgtcttctcttgccaactttcccctcctgctgctccaacmacctccaagttatccaagacagaaaaacctgggacctatttctgaactatttgctttattctttcctcccttcttctctccttcctttttgccctctttt

SEQ ID NO: 365791 - DNA, 201 bp, Homo sapiens
aggagttgtgtctatcaaaggagtgtgtgctaaccgttacctggctatgaaggaagatggaagattactggcttctgtaagcatactttctgttttcacaygttttttgttagcttttattgctgttaatttaccagcattgttgtttatcaaatctttataaaggattttacgtgtatcatcgtcatagtcaccctgtaa

SEQ ID NO: 365792 - DNA, 201 bp, Homo sapiens
tcttagaagccagaccagtctcattctaaacaccttcagaatatttttagtttgaagaaattggaagggcctggaggcaacagacagccaatattcagtgwttatgtctcatccagctgtcttctgtcactcttcctgcacaaggtgacttttgacttgaccggtgtatctttgatacttactcatttacagaaatgtata

SEQ ID NO: 365793 - DNA, 201 bp, Homo sapiens; identical to SEQ ID NO: 79079

SEQ ID NO: 365794 - DNA, 201 bp, Homo sapiens
atagaaccattgatttaataatacacgtactagattctctccccccacctctctttggtaatatctggcaagtggatagcaataattttacttaatgaacktgatatttactgtaataaatattgggtgcagtaaacaaatgaagtcagaatctaatagctcatttaatcttggaaatcatgtaatcagtacagcaatgaa

SEQ ID NO: 365795 - DNA, 201 bp, Homo sapiens
ccatctcttcactactgcctttggggtaaatagaaccattgatttaataatacacgtactagattctctccccccacctctctttggtaatatctggcaartggatagcaataattttacttaatgaacgtgatatttactgtaataaatattgggtgcagtaaacaaatgaagtcagaatctaatagctcatttaatctt

SEQ ID NO: 365796 - DNA, 201 bp, Homo sapiens
tttccatctcttcactactgcctttggggtaaatagaaccattgatttaataatacacgtactagattctctccccccacctctctttggtaatatctggyaagtggatagcaataattttacttaatgaacgtgatatttactgtaataaatattgggtgcagtaaacaaatgaagtcagaatctaatagctcatttaat

SEQ ID NO: 365797 - DNA, 201 bp, Homo sapiens
tttgaagagttcttactagtttacgggtgcctcaggttgatttcctggggttttggataaagccacctttccatctcttcactactgcctttggggtaaayagaaccattgatttaataatacacgtactagattctctccccccacctctctttggtaatatctggcaagtggatagcaataattttacttaatgaacgt

SEQ ID NO: 365798 - DNA, 201 bp, Homo sapiens
tctggtttacccatctctttttacagaagaggatactgaagctcagaaaagtcaccaattactcaagttcacttgtgggtttcctctttttttatcctgartgagcttcttaccacctggtcccttgccttctcttcctgccatccctcagcctcagtgcgctcttcattccaccatagagtgtgccctgctggaccccac

SEQ ID NO: 365799 - DNA, 201 bp, Homo sapiens
tccatatacatgtatgaagatgtaaagtttttcattttcagcaaatgagttcctttttttttttccttttactttgttttctttttggagacagagtctcratctgtcacccaggctggagtgcagtggtctggtctcggctcactgcaacttccgcctcctgggttcaagtgattctcctgcctcagcctcctgagtagc

SEQ ID NO: 365800 - DNA, 201 bp, Homo sapiens
tttgtagttgttactggaatggtgcgagggtgtatatactaatgctgtgcttgatactcaatgagtgcttcataaatgcttgctggatgaagaatataagmaaaacttacctaattccttatcttttataaactaaaatggacaatattgataggagttaaatgaaagaatgaacgttcttatatattaaatggagagaga

SEQ ID NO: 365801 - DNA, 201 bp, Homo sapiens
ttacatgagtaagttctttagtggtgatttgtgaaattttgttgcacccatcacccaagcagtatacactgaatccagtttgtagtcctgtccctccccarcttcccaccctttcttcccaagtccccaaagagactactctttttttaaaggatacctgtaccaggcaatagactgacaagaatacaaatctaaaaatga

SEQ ID NO: 365802 - DNA, 201 bp, Homo sapiens
tagcacagtacctggcacatagctgttacccataaatgttaattgaattaatgagtaaatgtattcaccatttatggaaacactgacttgtctgtttccaraaaccatattctttcaccagggacagatctctctaaatatcagcttccttatttctaaatagggaaggtgtactggatgatcccttacactgctgataaa

SEQ ID NO: 365803 - DNA, 201 bp, Homo sapiens
ctcaggttgcccttttataggtgcactcactccctcagccccaccttgggaaactacccatctgttctccatttctataattttgtgggcaacttatttttagaaacatttctccaacagctggcccctgagaagaaaagaccatttaacacatatagggttgatgcgttttgtaggtggaagccaggtatttatagatgc

SEQ ID NO: 365804 - DNA, 201 bp, Homo sapiens
gttaataaagtgccatagctttgtttcagtagtgaaaagaagtgcaaacactttaatcttccacctgcagtgactagctttgagaccttgagccgacgctwaaccccagagccggtttcctcatcgctcacgtggggctaatatattactaccttgcagcaggcttgaggatgaaatgagaattgcagttttgctttctgt

SEQ ID NO: 365805 - DNA, 201 bp, Homo sapiens
tgtatgctgcttatgtacacttagtattcaatttattccaggtgctcttatttacaaaaaaaaaaaaaaaaaaaaaaaatgagagtagttagaagtactgkatctacccttgggcttctcccaggaggtgactgcctgtgtgccacacttctttgcttgcaggctccagaggacgctgagacttggaaaggcagacctgcc

SEQ ID NO: 365806 - DNA, 201 bp, Homo sapiens
cagatccattggaggaattactatctatggcagctatacccttacaaaatacatttcttaaatcttaagacttaaagtagaaattacttcttgaaccatcrgctgcaaaatggatgttgtgttagcaggcatgaaaatgttaaccttgtacctctccatcaaagctcttgagtgactagctatgttgctagccaacagtat

SEQ ID NO: 365807 - DNA, 201 bp, Homo sapiens
ttttttttgagcagtagtctcaaaagtgggtttaaaatattcagtaaaccacgatgtaaacagatgtgctgtcatccaggctttgttattccattgatagrgcacaggcagagtagatttagcataattcttaaggccctgggattttcagaatggtaaatgagcattggcttccacttaaagtcgccagctgcattagcc

SEQ ID NO: 365808 - DNA, 201 bp, Homo sapiens; identical to SEQ ID NO: 79078

SEQ ID NO: 365809 - DNA, 201 bp, Homo sapiens
atttttggttgctgtaacctggaagggtgctactggcatctggcaggtagaggccggggatgctgctgaacatcctacaatacacattataataccctcarcaaaaacatttttgaccccaaatgtcactagtactcaggttgagaactctgctaactttataactagctaaggacaagacattaaaagggaaatgtagaa

SEQ ID NO: 365810 - DNA, 201 bp, Homo sapiens
taaattaaattaatatttggggcttcccctaatactctttttttttcagactctattagttgctgaatcattttttctttgaagattttgatacccgattygccttagaataaaactatgtagaggttagccagtggacataattttgaattgcataccacattaccaccgttgtaaaaacaaccgttaactttttcttcc

SEQ ID NO: 365811 - DNA, 201 bp, Homo sapiens
aagagaggcaagtatttaatttttttcaggcttgccataatttaaaaattttatcaatcacttaatcccgtaaaactgaaaagatgcttgtaacctattasatgggttagtgctagttctctattctggtaacttgaactcatctatttcaaaaaattatctttgtgattgaagtttgttctgcagttgtctgctacgcca

SEQ ID NO: 365812 - DNA, 201 bp, Homo sapiens
cgaaccgccgaactcagaggccggccccagaaaacccgagcgagtagggggcggcgcgcaggagggaggagaactgggggcgcgggaggctggtgggtgtsgggggtggagatgtagaagatgtgacgccgcggcccggcgggtgccagattagcggacgcggtgcccgcggttgcaacgggatcccgggcgctgcagctt

SEQ ID NO: 365813 - DNA, 201 bp, Homo sapiens
aagagaaatattctattttgaatgtgtttctaagtgttagttctccttacatatttatatatatctacattactctgaactcagtaatgggagtataattsaagtgagattgggaagataattttgttaactgttttaattgagtgtactaatgtataaagacatagacagaaggtgttggattgaaaaataacgaattac

SEQ ID NO: 365814 - DNA, 201 bp, Homo sapiens
ttttgtccacattgaaaatctgttgttagtgtagctaccttcatcagtgatcttagctagatcttctagataacttgcgctagcttctacatcagcactgkctgtgttaccttgcatgtttatgttatggagatggcttgttttgttaaacctcatgaaccaagctctgctagcctccaacttttcttctgtagcttcctt

SEQ ID NO: 365815 - DNA, 201 bp, Homo sapiens
ctgtttcatgcctcagtcctggaatgacattctacccagaatatcattctcttttgtctctcccttgccaataccttgctcatgtggttatcttctatctrtactccaaaacttagctcaaaactcacccctcctagaaatattcccagccttttcatttaataatggatatgtcctattctgtagtctcctagcacctgt

SEQ ID NO: 365816 - DNA, 201 bp, Homo sapiens
atacaaacacagaaaatcacgtttaaaaatttgtactttagggaattattcctatgtgaacattcttataactgttgctcaggtcataaaacagaactttrccagccacctcagaagcgttctatgccctgtctctatcacagactgtcttccccaatgaaagtgtagacttatttcagtcacttctttatttttcttaat

SEQ ID NO: 365817 - DNA, 201 bp, Homo sapiens
attctttcaccagggacagatctctctaaatatcagcttccttatttctaaatagggaaggtgtactggatgatcccttacactgctgataaattggtatkgtatgattctaagattcatcatcctggggcatatacaaaagaaaatgatgtggattgtggaagatattccaaaataggagttccaaaatattttaagcaa

SEQ ID NO: 365818 - DNA, 201 bp, Homo sapiens
cctactggcatcaggttggtgctcctcgaggtcagaggacacagaagaagcaggcacccatctttgctgttctctagcctccttgagtaacatctccaggwgcaggagcaaatcagatagaatagggcctaaagtgaacccccagcaaactgcagaagccctcagaagagggacctgaccattgaaagacaaaaaaaaaaa

SEQ ID NO: 365819 - DNA, 201 bp, Homo sapiens
ataggggctagaattgatttcttagctagaatgtgttgaacagctattattaaaagtagagaaaatgcaaaagtgcaatcatgtggcttttcttcctggcyctaaccctagcctcagccctttctttctttcttctcatttctctggtgagctcattctcacagtttcatctttcacatatgtgcaggtaacaggtagact

SEQ ID NO: 365820 - DNA, 201 bp, Homo sapiens
ctggaggttcagtttttggggaaggctgataatatcattagaagtaggtatggccaatagaaaagagtataatcccagaaaagagggtacttcacaccagstctgtcactggagatggtcagagactgtttaacaaccctttgatcctaaagcaaataggcatgtgaagctaaattctgttagccgaaatatggcttaaat

SEQ ID NO: 365821 - DNA, 201 bp, Homo sapiens
ggaagagattaaaacggtcaaataatgcttccatttaaaaaattacttttggaaacatatcacttgataaacactttgcttttgaattagaaatgcaaatratctttctactgcctgctatatatcttttaatccaatacttgctgcatgtcttcatgtattcttactttttctattaattatgttacttttcttgcctag

SEQ ID NO: 365822 - DNA, 201 bp, Homo sapiens
aacttcctttctgaccttcccttcacgtctcctgtcttccttgtcatcttagcctttaaccaggcagttttccttaagctgaaatgtcctgtctgtcctcrtaccttatcccatttccagtcatgctttgggccttatttctttcacatcatcctgtatccatctttccttttctgtgtgctatctaaaaattctctctaa

SEQ ID NO: 365823 - DNA, 201 bp, Homo sapiens; identical to SEQ ID NO: 79084

SEQ ID NO: 365824 - DNA, 201 bp, Homo sapiens
ttttactattaacttgcctagtaaattaaggtgcttttcttgtaaacaacatagttaggttttgttttttcatcttgttgacaattgtttccttttagtgrtgtgttggacatttatattcagtgttattattgatatggttagtttaaatctgacattttgctatttttctttttttaaaatttcttctaaaaaaatggg

SEQ ID NO: 365825 - DNA, 201 bp, Homo sapiens
ttatgagagcaccagtagtcttctaatttaatcatgtggccttttccaatttttcatgctactctgacatgtggcagtattgtctgcctctgacttcttgrtaattccttggcttctattacatcacatcaacctggttctccttttgaaactgcctttgcaaaagttatatctgagaaaattatgacactgccagagata

SEQ ID NO: 365826 - DNA, 201 bp, Homo sapiens; identical to SEQ ID NO: 79085

SEQ ID NO: 365827 - DNA, 201 bp, Homo sapiens
aatgaactctttcaactcaataataaaaagacaatctaaaaatgaatcaaagatctaagtagacagttcttcaaagaaggtaaccaaatagccaataagcrcatgaaaagatgctcaacattattacccatcgaagaaatgcaaatcaaaaccacagtgagatattacttcacactcaactaggatgcctataattgagaa

SEQ ID NO: 365828 - DNA, 201 bp, Homo sapiens; identical to SEQ ID NO: 79087

SEQ ID NO: 365829 - DNA, 201 bp, Homo sapiens
acctgtttgaaaagttgaaaaatctatggtctcattcctcagactgttttgtccaactgacctgaacatctgtcactggaattttttttcctttggcatgwcactttgtgcctacatgttttctaaactgcaggtaacttttgaaaggccaagttcaaccattatcagattttaacatttagtatggattaaattgtgagt

SEQ ID NO: 365830 - DNA, 201 bp, Homo sapiens
ctcttcctgcacaaggtgacttttgacttgaccggtgtatctttgatacttactcatttacagaaatgtataatggatgtgtgtgtgtgtgtgtgtgtgtrtgtgtgtatttgtatttttatagagctattgacttctgcaatttaacctctaagatgaattatccaatagaattctgaaatgaaaagttcacagattttc

SEQ ID NO: 365831 - DNA, 201 bp, Homo sapiens
gtttggagattgttaatcatatgtaatataatgttccaatattatttttggcattatataccaatagctattttctgtacaataaactattcattattatsccttaaaaaacattagccacttaaaactttttgttaaaatttggggaattaactcttcttgtgagtaaagtattaacaaacctccttctgtatggaaaga

SEQ ID NO: 365832 - DNA, 201 bp, Homo sapiens
tgtcttctgtcactcttcctgcacaaggtgacttttgacttgaccggtgtatctttgatacttactcatttacagaaatgtataatggatgtgtgtgtgtrtgtgtgtgtgtatgtgtgtatttgtatttttatagagctattgacttctgcaatttaacctctaagatgaattatccaatagaattctgaaatgaaaagt

SEQ ID NO: 365833 - DNA, 201 bp, Homo sapiens
tagaagcttccccaaatctcctgcctccccacgctgagttatccgatgtctgaaatgtcacagcacttagtcttactcttctatggcctactttctactgstatttgtgttactcatgctacccatcttatctccctcagtgtgtgagacgctggcatcagatttggcatctcccacacactcaacattatgtgttgcaca

SEQ ID NO: 365834 - DNA, 201 bp, Homo sapiens
ccagacctcaggttatctgtccacctcagcctcccaaagtgctgtgattacaggcgtgagccaccgtgcccagcctggggcacaaatcttaacctcatcargatattctgtccaaacaaatgtattttgttctgttttatttttgagtttgtccttttctgtgctctgaaattaggatctggtctagtacttaatttgtat

SEQ ID NO: 365835 - DNA, 201 bp, Homo sapiens
ttaattaataagctgtgggttctatcatgtatccacttagtccctggtactgtttcttttctctgaaatattaggaactggctgaaaaggcaaatgttatwggaatagttagtattctagtatgccaagcattgtagggagtgccagctagcaaggtggggcatccgggaagctgatagaacaccaacaaatgaacatatg

SEQ ID NO: 365836 - DNA, 201 bp, Homo sapiens
gtcactgaagatgacttggaaactcagaatggagacaattgaaaattgtacatatgttgctctgttagacatctacttttcttgaccactaaattttggcsctactactcatttttttaaaaaaatgcagtttgttttcaagagcaaaacagttgtttagtaaatttgcattgctgaacattcagcacagatgtaagtttc

SEQ ID NO: 365837 - DNA, 201 bp, Homo sapiens; identical to SEQ ID NO: 79080

SEQ ID NO: 365838 - DNA, 201 bp, Homo sapiens
ttcttgggctcaagcgatcctcctaccttggcctcccaagtaggtgggactacagatgcatgccaccatactctactaatttgtttttatttttagtagaratgaggtctcactatattgcccaaattggtctcgaactcctgggctcaagaatcctcctgccttggcctcccaaagtgctgggatgacaagtgtgagcca

SEQ ID NO: 365839 - DNA, 201 bp, Homo sapiens
ggtccctcccgcaacacatgggaattcaagatgagatttgggtgggggcacagccaaaccatataacctagtaatcatggtgactctgtaagataattgcyggtggaatttttcatctcctcaggagcactggctgaatattgattcattgacaatgataaaaagacccattgttgttaaaagtgatgaaaacagaaattg

SEQ ID NO: 365840 - DNA, 201 bp, Homo sapiens
tgggtaactgtaggcttaaatgatgcaatgctttctggaatccaggggtgactgacacacagaggtgactcagacatgaaatgttcaacaaaattctaagrttgtcttttttttaaattgtaaattcttaaacattcataaaagtagtgagattagaataatgaaatcctgtgcttctaatgactgttaacacaagtgaat

SEQ ID NO: 365841 - DNA, 201 bp, Homo sapiens
catatctgcatgcaaaagaatgaagttgtgccacataccacatacaaaaattaactcaaaatgtattaaaacctaaatagaaggggtaaaactaaaacttrgaggaatgcataggtgtaaaccttcatgaccctagattaggcagtgattttttagatatgacaccaaaagtacaagcaacaaaagaagaacattgataaa

SEQ ID NO: 365842 - DNA, 201 bp, Homo sapiens
atttttaggaggcttgtttcagtctgggctttccagagaaactgaatgaataggagatcactctatctatctatctatctatctatctatctatctatctrtctatctaatctatctatctacctacctacctagagggatttattttaaggaattggctcatgtgattacagaggctggcaagtccaagtccaggccagc

SEQ ID NO: 365843 - DNA, 201 bp, Homo sapiens
gcctggccttctctgtgttttatttggaaatgcattgcctaatttccaaatatttggggattttccagatatcatattgctaacatttctactttaatacrtcatatgatttcagtcatttcaaatgtattgaggcttgttttatggtcaagcatataatttattcttgggaacgttctatgtgcccttgaaaagaatgta

SEQ ID NO: 365844 - DNA, 201 bp, Homo sapiens
gtattttcagtcatgtttaatatgatgcacagttggtatttttattctagattgctttaaagttttaacaatgctaacattgttacatatggatgtaacawagttaactccctttttaattgagaaattctctctccctccttgaactcactcatgaatgtgcttattttcagttgtgtttaatatgacacacagttggta

SEQ ID NO: 365845 - DNA, 201 bp, Homo sapiens
tctttactggaagtcaattgattatggactttaatcacatttacaaagtaccttcacagcaacacatagattagtgtttcattgaattactggggactgcwgcctagccaagttgatacattaaaaaaaaatcacactgcatcttttgattttctttctgaatctctgcttttctttttcctaattttggcctctgtaaac

SEQ ID NO: 365846 - DNA, 201 bp, Homo sapiens
cctcagaagcgttctatgccctgtctctatcacagactgtcttccccaatgaaagtgtagacttatttcagtcacttctttatttttcttaatagtttttrtcatagaaataggtattctaaaatagtctactttagtttggcctttgaaaatatatgaatttttagctgttttcatgtcatgtcttccttccatcctttt

SEQ ID NO: 365847 - DNA, 201 bp, Homo sapiens
tacctggcacatagctgttacccataaatgttaattgaattaatgagtaaatgtattcaccatttatggaaacactgacttgtctgtttccaaaaaccatrttctttcaccagggacagatctctctaaatatcagcttccttatttctaaatagggaaggtgtactggatgatcccttacactgctgataaattggtatt

SEQ ID NO: 365848 - DNA, 201 bp, Homo sapiens
gttagatgtattctctgagtgctctcaaagtagcctgtgtatatttttctcatggcacttacagtattgagctttagttatccgtgtaccagtcctcatcrcctcaaccatgctgtatgttccttaaggctaaagaccaatgttatattttcctttgggcttcctattgcttagcacagtacctggcacatagctgttacc

SEQ ID NO: 365849 - DNA, 201 bp, Homo sapiens; identical to SEQ ID NO: 79086

SEQ ID NO: 365850 - DNA, 201 bp, Homo sapiens
gaaacctctctattcaggctgggttagatgtattctctgagtgctctcaaagtagcctgtgtatatttttctcatggcacttacagtattgagctttagtyatccgtgtaccagtcctcatcgcctcaaccatgctgtatgttccttaaggctaaagaccaatgttatattttcctttgggcttcctattgcttagcacag

SEQ ID NO: 365851 - DNA, 201 bp, Homo sapiens
atataagatgctttctttttgttcccgttctttcttttccttactattgctaattctttcagtctccaatcatttgtcactgcttccaggaaacctctctrttcaggctgggttagatgtattctctgagtgctctcaaagtagcctgtgtatatttttctcatggcacttacagtattgagctttagttatccgtgtacc

SEQ ID NO: 365852 - DNA, 201 bp, Homo sapiens
aagtctatgaccatgaaacggagcaaggcaaatctgtatctttggggcacatatctttttctttttttctttttgagacacagtcttaccctgtcacctargctggagtgcagtggcacaatctcagctcactacaacctctccttcctgggttcaagcaattcttctgcttcagctgtgattacaagcacctgccaccgc

SEQ ID NO: 365853 - DNA, 201 bp, Homo sapiens
tggtagagtatagtaagtgaaatgtatgctgcttatgtacacttagtattcaatttattccaggtgctcttatttacaaaaaaaaaaaaaaaaaaaaaaaatgagagtagttagaagtactgtatctacccttgggcttctcccaggaggtgactgcctgtgtgccacacttctttgcttgcaggctccagaggacgctga

SEQ ID NO: 365854 - DNA, 201 bp, Homo sapiens
gctgaagatgtcaggttatgtgagtacttgttctctatagactaatatagtgagccttgaaatatagtattagacaactgctttctgattatcttagtacsctaaattgagagtttcagtttgcttgggtttcaaattacttaaatgagaaataatattaacactggcccaactaatgaaaaattatgcaattgccactaa

SEQ ID NO: 365855 - DNA, 201 bp, Homo sapiens
gattttgatttaaagtgaaagacaatgagactcttcctttcacttgaacactgagaggccattgtaggtttactaattggcctaactttaatattgttgtrtcttagggaacagggaggccctaagagtggtggagacaggggaacattcgtcagtggagcagtcagaacacacacgtttattaagtttgctgtcttatat

SEQ ID NO: 365856 - DNA, 201 bp, Homo sapiens
aagtgaaagacaatgagactcttcctttcacttgaacactgagaggccattgtaggtttactaattggcctaactttaatattgttgtgtcttagggaacrgggaggccctaagagtggtggagacaggggaacattcgtcagtggagcagtcagaacacacacgtttattaagtttgctgtcttatatgggtgtagtttg

SEQ ID NO: 365857 - DNA, 201 bp, Homo sapiens
acactccatgctacctaattgctggaagttccttagatgtgctaggctttctctccctttctcctttggaagttatataagatgctttctttttgttcccrttctttcttttccttactattgctaattctttcagtctccaatcatttgtcactgcttccaggaaacctctctattcaggctgggttagatgtattctct

SEQ ID NO: 365858 - DNA, 201 bp, Homo sapiens
ggttgcccagggttgggatgagtggtattagggacgtgtaaaatgactgctaaagaatgtagggtgacgaaaatgttctataattgattgtgatggttgcmcaatgctgtgattatagtaaagcacattgaactgtatgcatgttttaaatgagtgaattgcatggcatgtgaattatacctcaataaggctataacaggt

SEQ ID NO: 365859 - DNA, 201 bp, Homo sapiens
tttcattaaaagctctcattctttcatgctattacacactaccaaactccttaacatagtattcagagcctctggtatctccagcctcatttagtcccccwtacccccttccacaacacacacatacatacccctacactccatgctacctaattgctggaagttccttagatgtgctaggctttctctccctttctcctt

SEQ ID NO: 365860 - DNA, 201 bp, Homo sapiens
ttttttgtattttttgtagagacaggttcttgccatgttgaccaggctggtctcgaattcctggcttcaagcaatccacccaccttggcctcccgaagtgmtaggctacaggcgtgagccactgcacccagccttacttcttacatatctgtggcacctttgtcaaaactaagaaattgatactggttacaacgctggttc

SEQ ID NO: 365861 - DNA, 201 bp, Homo sapiens
aacttttttttttttttttttttttttttgagacaagatcctgctctgttgcctaggctgaagagcagtggcccaatcatggttcactgcaacctccaccyacccaggctccagtgattcttgtgcctcagcctcccaagtagctgggattacaggcatatgccaccacgcctggctatttttttgtattttttgtagaga

SEQ ID NO: 365862 - DNA, 201 bp, Homo sapiens
ttaaaagaaactttttattttggaataattttagatctacagaagatttacaaagactttacaaagttcctctatacccttcacctagatttccctaaggktaacttttttttttttttttttttttttttgagacaagatcctgctctgttgcctaggctgaagagcagtggcccaatcatggttcactgcaacctccac

SEQ ID NO: 365863 - DNA, 201 bp, Homo sapiens
ttcagctatctgaggaacaatttttgtctttaaataatcctctcccctcttctaattactaaaagtgcaaccaacaggtagcaaaagtgatatttgagctycatccttcttttcttctgtccccgtaccctcaccttctagtgaaattactcagagactatgaagaatagggattggaagaaattgagagctcatggtggc

SEQ ID NO: 365864 - DNA, 201 bp, Homo sapiens
gccatgatcttcttttactgtgatcctgttttattcctttaaatactcagcacagctgaagaagaggtcctgttttcttactgaagactttcaggcaaagragccgtttccaacttcctactaagtccacccagcatatgtcatgcaggggatgcggggaagaattttccttgcaagggccttctcagaagttttggagat

SEQ ID NO: 365865 - DNA, 201 bp, Homo sapiens
cctgctgcacttgggttacgcatccatacccacgtggtctgtttttgtagttgttactggaatggtgcgagggtgtatatactaatgctgtgcttgatacwcaatgagtgcttcataaatgcttgctggatgaagaatataagcaaaacttacctaattccttatcttttataaactaaaatggacaatattgataggagt

SEQ ID NO: 365866 - DNA, 201 bp, Homo sapiens
catctttattatcttacatgtgaacagctgtaataacctttccagttattaattctttaaacaccacttttagcctgatgcatttcttttcaagaacctayggtatgtttatagtccagattgcattaaacctaacctttctgttatagggcccttttctgaggcccttatttatcttgctctgcaccatttatataacta

SEQ ID NO: 365867 - DNA, 201 bp, Homo sapiens
aaataagtctgccatcagataaacaattaattcctcgcttttatgagcatggaattggtgctagatcataaactgactatcctcattttaccaactttccsttaattgttttctgtgtcagtttttcatatttccaagttgaaaccccctaaacacaacatttttttccactgctcattttttaccaaaattcaaacttca

SEQ ID NO: 365868 - DNA, 201 bp, Homo sapiens
gactgtatcatattccacttaatggccgtgctatattttattttagtgtactcggtactggtcatttgggtgtttctagttttttactcttacaaacaatmctgctgtgaatatttttggacagttttgtggtaactaaaattaaaacttttttttttttttttttgagacggagtttcgcccttgtagcccaggctggag

SEQ ID NO: 365869 - DNA, 201 bp, Homo sapiens
gcagattgcttaagcccagaaatttgagaccagccggggcaacatggcaaaatcccatctctacaaaaaagaaaaaaaaattagccaggcatggtggaacrcacctatctactactactcaggaggatatagtgggaggacacattgagcccacaaattcaagaacagcctgggcaacaagacagaataaattctgtctct

SEQ ID NO: 365870 - DNA, 201 bp, Homo sapiens
gaccggctcacagagaccatggagggtcagtatggtatccatagctgttaacaaaagcatagatcagctggctatgggagtgaaccctgagctatcttagrccatctcatctgcctttttcctcctgttatacagatggcaagaccatggactatgctgaagtatcaaacacatttgtgcgactggcagacacacactttg

SEQ ID NO: 365871 - DNA, 201 bp, Homo sapiens
agaggtaagggggacactggttgggtttgggatcacatacttcctatccccagtgaagtaatttgatcattatgtaagccaccaatataaccacaccttgkcatacttttccccattttttcactggactcctatggatctcatgtaatactgctctttaccttaaaataacctactgtttaattcctaccgatgcaaatt

SEQ ID NO: 365872 - DNA, 201 bp, Homo sapiens
cagagaccatggagggtcagtatggtatccatagctgttaacaaaagcatagatcagctggctatgggagtgaaccctgagctatcttaggccatctcatmtgcctttttcctcctgttatacagatggcaagaccatggactatgctgaagtatcaaacacatttgtgcgactggcagacacacactttgtacaacgctg

SEQ ID NO: 365873 - DNA, 201 bp, Homo sapiens
gcggagcatggtggtgcatgcctgtagttccggctacttgggggactgaggtgggaggattgcttgagccggaggtggaagttgcagtgagctgatatcaygccaccgcactccatcctaggtaacagagcaagacccagtctcaaaataaataaataaaataaacacaggtactgaatgactaggaaacaggaaagtgta

SEQ ID NO: 365874 - DNA, 201 bp, Homo sapiens
tgactgaggggtcaccatgtctgaccccaggcccggatccaaccaaacccaaatgaggtgagcgcccttatgtggctgacaccagatgtagctgctgcagkggctgccgcagaggatgggacagagacacccggacttctcccccaggacctaccaccctctgtcctgtaagtaagagcttctccctcagcctctaataca

SEQ ID NO: 365875 - DNA, 201 bp, Homo sapiens
ctctttttgaacatgttgagtttcagattatttcatcagttacttgagtttcttatagctcttcagccccctaagcaactctgatctagaggcagctacakatgtctttggaatgaaagacacctgctctcatgtttggtcatttcctgtcatcatatgagatatagtctaagtgtttaattgtttgtttggcagggaaag

SEQ ID NO: 365876 - DNA, 201 bp, Homo sapiens
ttagtgtactcggtactggtcatttgggtgtttctagttttttactcttacaaacaatcctgctgtgaatatttttggacagttttgtggtaactaaaattaaaacttttttttttttttttttgagacggagtttcgcccttgtagcccaggctggagtccattggcgcaatctcggctcactgcaacctctgcctccca

SEQ ID NO: 365877 - DNA, 201 bp, Homo sapiens
tttagtgtactcggtactggtcatttgggtgtttctagttttttactcttacaaacaatcctgctgtgaatatttttggacagttttgtggtaactaaaattaaaacttttttttttttttttttgagacggagtttcgcccttgtagcccaggctggagtccattggcgcaatctcggctcactgcaacctctgcctccc

SEQ ID NO: 365878 - DNA, 201 bp, Homo sapiens
gctgagcatttagaggtattcttctttgtggtttaatattatacccatgggtcatcctcaaaagatgtgcccttatttccccggggactttcggaaacccsgctacgaccccgcggaacgttccgaggggaagcttctctaggccaccagagggcgccaggcgggccgcagcgactccagagtcgcgttatggccgaggtg

SEQ ID NO: 365879 - DNA, 201 bp, Homo sapiens
taatcctagaactttgggaggttgaggcagaaggatcccttgaggccaggagttgaagaccaacctgggcaacatgacaagacccccgtctctacaaaaaatttttttaaaaaattagttgggtgtggtgccatatgcctgtagtcacagctattcgagaggctgaggcaggaggattgcttgagcccaagagttgaggtt

SEQ ID NO: 365880 - DNA, 201 bp, Homo sapiens
acagatgtctttggaatgaaagacacctgctctcatgtttggtcatttcctgtcatcatatgagatatagtctaagtgtttaattgtttgtttggcagggraaggtaaaaggaggagatcatctgatgaagatgctgctggggagcccaaggccaagagaccaaaatatactacagataacaaggaggtaatggggcttct

SEQ ID NO: 365881 - DNA, 201 bp, Homo sapiens
caatgtaattgttactgtgtaggaaaagaaatggtgaaccattaaatccaagctcctcaccagaaaactttacactatagctaaatgtttctctaaatctyttcctcagcccattccagatgatgggatttattggcaggccaaccttgacagattccaccaacacttccgtgaccaagccattgtgagcgcagttgctaa

SEQ ID NO: 365882 - DNA, 201 bp, Homo sapiens
tgacatcacaaagcagtaggaatttttcagctccagtataatatgggaccacagctgcacacggtccgttgttgactaaaatgttatatggtgcatgactrtgtttaaatattcctatatttttatattgtttattttaaagttctatggccaggtgcagtgactcacacttgtaatcctagaactttgggaggttgaggc

SEQ ID NO: 365883 - DNA, 201 bp, Homo sapiens
agccctacagcacacctagactgaacgggatagcctatggcttctaggctgtaaacctgtacagcatgttactgtactgaatactgtaggcagttgtaacrcagtagcatctgtgtatctaaacatctaatcacagaaaaggtacagtaaaaatatggtatgaaaaattaaaaaccacacctgtttagtgcacttaacatg

SEQ ID NO: 365884 - DNA, 201 bp, Homo sapiens
acagagtgagactctgtctcgggaaaaaaaaaagaaaagaaaatatataacgagagacgggattcatctgggagtttaggcctcatgtttctttgagaaggtggcatttgagctaagatttgaagtagaagctaacagtgaggtaacaggaaaagcatttttggcagagggaatagtatgtagtaaaaaaatagcatttga

SEQ ID NO: 365885 - DNA, 201 bp, Homo sapiens
cggaacaatgatattaaagacactggcagcatgacaaccaaaataaacgaagttgaaacagtacgtcctgccttcttcctaaagccatttccttcaacagygataggagtgcagaccgtctgcaagtcattagtacgctgctgtcttcactgtcacaaggaccctggaaaccactgaagagcaaaatcccccttttcgccc

SEQ ID NO: 365886 - DNA, 201 bp, Homo sapiens
ccctggaaaggtgcagaatgagccaggcctaactacagggccatgagcctctagaagcttaggggggaataagaaacactgtgaacttagatatataaatrgagagagacccaagcaataggccgggcctgactcccagacccctgcagatcatggctaaggccttacatcctcctctgtcatactggagtaggaggcagg

SEQ ID NO: 365887 - DNA, 201 bp, Homo sapiens
tccgttcagttaacactctctctttttcttaatagctagagtttgttggaaagtctggcgacagtggtggaggaatgtatgtcatcagtatccttaccagktatttccttagagtcaggcagcctgacctataaatcagaatggtgccttaggaaagaaagatttggtaatgtttattatactaaataaattagaaaattg

SEQ ID NO: 365888 - DNA, 201 bp, Homo sapiens
ggccccactgttgttgcaggtgggcacgtggaacttgaggaggaggtaaccagtcagctgatccaacctgagccaagagacccatgcctgggaccatcttkggtgtgggctgagggagaggcaagcaaaaggacttggaagagtcaggcactggcccctctgatgtgtcttctctgactcccagctgctggacggagggct

SEQ ID NO: 365889 - DNA, 201 bp, Homo sapiens; identical to SEQ ID NO: 79098

SEQ ID NO: 365890 - DNA, 201 bp, Homo sapiens
gcctcccaagtagctgggactacaggcaagtgccactgcgctggcttaattttacttgagtcatgtgtctcaaatctggcctttcatcttggtccacacgcaggccttcatcacctctttcctagaccttcacatttcagtgcacaatttgtgcacctctttcattaaatttatttcttaagtatttttttggatactagt

SEQ ID NO: 365891 - DNA, 201 bp, Homo sapiens
gggcctcaggggaaatttcctctagaaataggaatcaatagacgctgggcctggcagggtggctcatgcctgtaatcccagcacttcgggaggctgaggcrggtggatcacttgaggtcaggagtttgagaccaacctggccaacatggtgaaaccctgtcttcactaaaaatacaaaaattagctgggcatggtggcggg

SEQ ID NO: 365892 - DNA, 201 bp, Homo sapiens
acaataattgaatttttatattttttcagcttgcttctgtcacttaatatattatgagtaattttttttgtttttttttgttttggagacagaatctcgcrctgtcgcccgggttggagtgcagtggcgcgatctcggctcactgcaacctctgcctcccggcttcaagcgattctcctgtctcagcctccctagtagctg

SEQ ID NO: 365893 - DNA, 201 bp, Homo sapiens
tttttctttctattggacaaataggaaattcccaaaacaccagaccatgccccatccaggaccttctatttatatactgtgaacatcctgtcagctgcccraatgttgttgcacaggtgctacaaggtaactcaatctggaccttctccccatttcctccatacggtcaagtacccctcatgtgcccacttcgccctgagc

SEQ ID NO: 365894 - DNA, 201 bp, Homo sapiens
aacccgggaagcggaggttgcagtgagccgagatcgtgccactgcactccagcctgggcaacagagccagactccgtctcaaaaaaaaaaaaaaaaaaaawtagccaggtatggtggcatacgcctgtaatcccagctactcgggaggctggggcaggagaattgcttgaacccaggagacagcgattgcagtgagccaag

SEQ ID NO: 365895 - DNA, 201 bp, Homo sapiens
tgtccttagaaggtgacattatctactttgatcaggaaaatggtaaagggtggtgggtagtgcctcagacacacgtggtaagagaatctcccaggttaggraagatgtctcagagttgtgtttgtttgacaggcgtctactagaaaaatctcagagggtagaagccatcattgcatctatgcaggctactggtgcagagga

SEQ ID NO: 365896 - DNA, 201 bp, Homo sapiens
atcttactcactgtgttccctctactgactttatctcttaaacatgtcaaactctttctggtctttagactttggctccggcttcaaatgtttgtccccaratcttcatgtagtggtctctgtttttatcatttctatcttaaatgctgttttcatagacttcaagcaccattgcccactcctacactagttcctaccaca

SEQ ID NO: 365897 - DNA, 201 bp, Homo sapiens
ttgtgcgaaccatgctccgaatgagtgagattaccacttcctctagtgctcccttcacccagccattgtcttccaatgaggtgagtttcatgttcttgcastaactttctgacagattcttgggtgttatcaacgtttattatacacagatcctgagtttgggttgaggtctgagccttgaaagagaagggcatttgatgt

SEQ ID NO: 365898 - DNA, 201 bp, Homo sapiens
ctctaagaaatgggaagaatgatgcaaaacaaaattagaaggagaaaacccagttactccttttatagtgtctgctatgttttaaagggaaaaaaaaaaamccagttaggaggctattgtagtaatccagatgggccaagatttagagtctgaaataaggtaatgataggagaaagaaaagtagacatctgataaatataa

SEQ ID NO: 365899 - DNA, 201 bp, Homo sapiens
tgacaattgacatttcagtacaatagtggaaatgggttgcgtaaatctaggtagagatacaactgagatggccaactgtttgagaagcttggctgtgacastaaggaaaagaagagaaggcatagggttgaaagagaattctagagtagaaagagacttggacagggtaaaggctgataagaaggcggtagagaaggaaag

SEQ ID NO: 365900 - DNA, 201 bp, Homo sapiens; identical to SEQ ID NO: 79095

SEQ ID NO: 365901 - DNA, 201 bp, Homo sapiens; identical to SEQ ID NO: 79096

SEQ ID NO: 365902 - DNA, 201 bp, Homo sapiens
tgcaaaagtggcagaaaaaccggtgggcggctacagcggcgcccgagtccgccccggccgccgaagcctccgccatttttgccctccgccgcggccgtccsagagggcagccggcccgtccctcgccaggccgctacctcccgagctgcagtcgtcgccgccgccgccgcctcggtgcggcccaccgcttcagagcccgcg

SEQ ID NO: 365903 - DNA, 201 bp, Homo sapiens
gaacctgggaggcagaggttgcagtgagccaacattgtgccactgcactccagcctgggcaacagagcaagactctgtctcaaaaataataataatacgaytttttgtaaagatcaaatagaatttacctggcacatagagttgttcagtaaatgttagttgccctccctttcttccccagctcaggatgctgacagtcaa

SEQ ID NO: 365904 - DNA, 201 bp, Homo sapiens
gtgtactcggtactggtcatttgggtgtttctagttttttactcttacaaacaatcctgctgtgaatatttttggacagttttgtggtaactaaaattaaaacttttttttttttttttttgagacggagtttcgcccttgtagcccaggctggagtccattggcgcaatctcggctcactgcaacctctgcctcccaggt

SEQ ID NO: 365905 - DNA, 201 bp, Homo sapiens
agtgtactcggtactggtcatttgggtgtttctagttttttactcttacaaacaatcctgctgtgaatatttttggacagttttgtggtaactaaaattaaaacttttttttttttttttttgagacggagtttcgcccttgtagcccaggctggagtccattggcgcaatctcggctcactgcaacctctgcctcccagg

SEQ ID NO: 365906 - DNA, 201 bp, Homo sapiens
tcaaactgccttccacagtggctgaactaatttacattctcaccggcagtgtataggcattcccttttctccacaaccttgccaacaactgttattctttractttctaataatagctattctgactggtgtgagatggtatctcgctgtggttttggtttgcatttctctgacgattagtaatcctgagcattttttcat

SEQ ID NO: 365907 - DNA, 201 bp, Homo sapiens
tagtgtactcggtactggtcatttgggtgtttctagttttttactcttacaaacaatcctgctgtgaatatttttggacagttttgtggtaactaaaattaaaacttttttttttttttttttgagacggagtttcgcccttgtagcccaggctggagtccattggcgcaatctcggctcactgcaacctctgcctcccag

SEQ ID NO: 365908 - DNA, 201 bp, Homo sapiens
aaccctgtctctactaaaaatacaaaaattagctgggcgtggtgccgtgtgtctgtaatcccagctactcaggaggctgaggaaggagaattgcttgaacstgggaggcagaggttgcagtgagccaacattgtgccactgcactccagcctgggcaacagagcaagactctgtctcaaaaataataataatacgattttt

SEQ ID NO: 365909 - DNA, 201 bp, Homo sapiens
accagaaaactttacactatagctaaatgtttctctaaatcttttcctcagcccattccagatgatgggatttattggcaggccaaccttgacagattccrccaacacttccgtgaccaagccattgtgagcgcagttgctaacaggatggaccaggtaatacctaagtgggtctgtcattggtcatcagggacatttact

SEQ ID NO: 365910 - DNA, 201 bp, Homo sapiens
gccttaccatcaccaacctatggagctgtagaataattttctgatcactgttcctgtctggtactggcttcacacatggaatagaacaaccaccccatctrtgactgggaactaaagctgatctatgttagcatgccatttgctttcttcattcctttccagatttgggtctcgctgtgctagaatattccgtctagtttt

SEQ ID NO: 365911 - DNA, 201 bp, Homo sapiens
gtattctcagcactttgggaaaccaaggcgggatgatcacttgagcccaggaattcaagaccagcctggaaaatatagtgagaccatgtctccaccacccscaaaagattaaaaaattagcggagcatggtggtgcatgcctgtagttccggctacttgggggactgaggtgggaggattgcttgagccggaggtggaagt

SEQ ID NO: 365912 - DNA, 201 bp, Homo sapiens
ccagggtttagggccggcggcttagaagtgggcagcaggtattcggcagaccgatgtcgggcgagtcaatgatgtgcagaaagctccagacccagttccgrgaaatcggggccaggaatctatgaggttcccaagtatagagaacacagcgctcttaccggtagtttggggctgacctcgcccttgcaaaagtggcagaaa

SEQ ID NO: 365913 - DNA, 201 bp, Homo sapiens
gaaattgcaagcaaaggaagttgtttatgaagctctgaaacatgacagctggccccagggagaattcatggctgtgcagcaacatggtgctgctgtcatcraggctcaaaaaccatccaggacaatgtccactacaagagccatctccaaccacctcagagacatctggcttggaaccccatagggagagtctgtgtccag

SEQ ID NO: 365914 - DNA, 201 bp, Homo sapiens
agatggagtctcatgctgtcaccctgctggaggagtgctgtggcataatgttggtttattgcagcctcgaacaccacttggactcaagcaatcctcccacytgagcctcccaagtatctgggactacatgcacgcaccaccacacctggctaatttttgtattttttgtagagacaaggtctccttatgttgcccaggctg

SEQ ID NO: 365915 - DNA, 201 bp, Homo sapiens
atgtccactacaagagccatctccaaccacctcagagacatctggcttggaaccccatagggagagtctgtgtccagtggggttatctctaatagtgactyctatggtattcccagtcatcgttctactcattctctgtcgtattcaagaataagacctggaaatttgttgaagctctctccattaatgattcctcatgta

SEQ ID NO: 365916 - DNA, 201 bp, Homo sapiens
ttactcttaaacttggtgtgactgctgacaatgtacagaatattacatatctggggaaaccattccttcactcagtatccagatgtcaaccaagccaagaygaaattgcaagcaaaggaagttgtttatgaagctctgaaacatgacagctggccccagggagaattcatggctgtgcagcaacatggtgctgctgtcatc

SEQ ID NO: 365917 - DNA, 201 bp, Homo sapiens
tggtgtacagctcagtaaggttaagcatatttcacattgttgtgaaacagagctccagaactttttcatcttgcaaaactaaaactctgtacccattaaaygacaactccctattcccctcccccagcccctggcaaccatcattctactttttgtttctgtacatttgagtactctagatacatcatgtaagtggaattg

SEQ ID NO: 365918 - DNA, 201 bp, Homo sapiens
atccatcttcaatgagaacttcagttgcttgacttgtttggatcacaaccaaactcaagttcaaattactcttaaacttggtgtgactgctgacaatgtamagaatattacatatctggggaaaccattccttcactcagtatccagatgtcaaccaagccaagatgaaattgcaagcaaaggaagttgtttatgaagctc

SEQ ID NO: 365919 - DNA, 201 bp, Homo sapiens; identical to SEQ ID NO: 79112

SEQ ID NO: 365920 - DNA, 201 bp, Homo sapiens
agtaaattgtgtaatgtgcctgacgatgagaagtgctgtggaggaaaataaagccggaaaggaggtaggcaatgctggatttgaggcctgccactttaaayaggggagtcatagaaggctttgagttaagatcagtaggagaaggggtaggaatatctgggaacaaggctttctaagcaaagggaacagctggtgctacag

SEQ ID NO: 365921 - DNA, 201 bp, Homo sapiens
gcgaggcgcttgcgggccagctggagttccgggtgggtgtgggcttggcaggccctgcactcggagcggccggctggccctgccggcctcaggcaatgagrggcttagcacccgggccagcagctgcggagggtgtgctgggtcctccagcagtgccagcccactggcgctgcgctggatttctggctgggccttagctgc

SEQ ID NO: 365922 - DNA, 201 bp, Homo sapiens
cagataagagaataaaagcaggctgccggagccagcagtggcaaacccttctggctccttttctttgggagggtgatttgttgtttcgctctttgcaatarattctgttgctgctcggtctttaggcccacactgcttttatgagctgtgctatttgccgggaaggtctatagcttcatttttgagctagcgcagacccca

SEQ ID NO: 365923 - DNA, 201 bp, Homo sapiens
gaaggaaaaagcctcagccgcgccaccttatagagctgttacactcacagtgagagtctatggcttcattcttgaagtcagtgagaccaagaacccaccarttccgaacacagtagcagttccttagttaataggcaatgaagaatcccactgcacagtgatccatgaacaaaatggggaatgataactttttttcccacg

SEQ ID NO: 365924 - DNA, 201 bp, Homo sapiens
gactacagcctggttatcaattaccagtgctgcaggggggaacaaaatcttcagagctgtcaagaggatttcagtcagtagcagagagacattgagagttmggtgtttctctagccctgtgccattgccagggatttgctgagaaaacttgtttccatattgtattattaaaatactaggatttatctgtaagaaatgtct

SEQ ID NO: 365925 - DNA, 201 bp, Homo sapiens
tactcgctttcatccccaccgttggcatttaggagctggagcagattttgtcatgctgggaggaatgttttcgggtcatacggagtgtgctggagaagtgwttgagaggaacggacggaagctcaagctcttctacgggatgagctctgacaccgccatgaacaagcacgcaggaggagttgctgagtacaggtgaggagg

SEQ ID NO: 365926 - DNA, 201 bp, Homo sapiens
agtgagggcttgtcgctccctgtgcccagtttctcctggttttttttccttgccttttttcatgtgcgtccgtgtgaagagaccaccaaacaggctttgtktgagcaacatggctgtttatttcacctgggtgcaggcgggctgagtccgaaaagagagtcagcgaagggagataggggtggggccgttttataggatttg

SEQ ID NO: 365927 - DNA, 201 bp, Homo sapiens
ttgagaggaacggacggaagctcaagctcttctacgggatgagctctgacaccgccatgaacaagcacgcaggaggagttgctgagtacaggtgaggaggygaccccggggcgcaccctcgaggcctggccttgcttttcttacggagatgggatggaagcaggtctgaatagcagctctgtgtatattaaagtaccgtgg

SEQ ID NO: 365928 - DNA, 201 bp, Homo sapiens
ctggtgatttccacgtaagctggtaggacctgcgctatccattttatgtcctcctcgtcctggtcgtcccccttgaagacacttgatttctgatcttagascagacaggcgggaggtgaagctctggacttttcctgttgttgacgtaggaggacaggaggctgtttccaggggggaatcggccagggccattctgggggc

SEQ ID NO: 365929 - DNA, 201 bp, Homo sapiens
gcagggtgttatgggtccctgactccttcaagcgctgctcaccaggactttcctctccgcaacatgcagggcagccagcaatgagcccgtgccctttgggmgggaggaatgtgttcatctgagatgctggtgatcatcttggcacttggtagaaatgtggggatggggtcagagggtggggtctggttttctgagtgcctt

SEQ ID NO: 365930 - DNA, 201 bp, Homo sapiens; identical to SEQ ID NO: 79120

SEQ ID NO: 365931 - DNA, 201 bp, Homo sapiens
gagcttattctttccggagcagatatcatcaaagtgggagttggaccaggtaagacttgttaggagcacagcagaggacgtgtgtggggaagaatgggatmtggggcttgcggggactgcagatcactggaggggatgcatgaatgactcattcacagatatttaaagcatgctttttctggaagcataattgagcttctc

SEQ ID NO: 365932 - DNA, 201 bp, Homo sapiens
ggctgacactaatttgggtttagagttgagcagttcaggctggggagatgaggaaaccccgccaaaaagggcagtattcacagaactgaatgcacaggtaycaagttcaaatgcactaactaaaggatttaccccactcctgggccagaaaactgaaagagtaggtggttcctgtaagaaccagagaaaacctgtgcaccg

SEQ ID NO: 365933 - DNA, 201 bp, Homo sapiens
tactttgctttttaataaggctgaagagcagatacacaagtcagttttctttggaaaggcaagcaatgaccctggagtagagaagatccacagggtgctgstgtgccagggtgaatgaatggcctgattgtccacagtgaccgatggcatgagaagggtccaaccagagctgtcacactctgggataatacaggcccactg

SEQ ID NO: 365934 - DNA, 201 bp, Homo sapiens; identical to SEQ ID NO: 79114

SEQ ID NO: 365935 - DNA, 201 bp, Homo sapiens; identical to SEQ ID NO: 79115

SEQ ID NO: 365936 - DNA, 201 bp, Homo sapiens
gtatgtgggtctttagggaagtggatagaaggaggcagtggggttggagaggctgggaaagtaggagagagcttccgattccgaggcttgtcttgacggcsgaatttccgctctggtgtctttggaatacctgtctttgacccctaagagaatccagggacctttgtcttgttcctactcgctccaaactccagaaattct

SEQ ID NO: 365937 - DNA, 201 bp, Homo sapiens
gagcttcttggtaactgctctgaagacaacagcttgagctagtgtcacctaatacttggtattctggaggacagtatgttatcttggtaaggattactgtraacaacacttccaacgaaggccttcagattggccacagaaaaggagacaggctcattggccatccagacagcaaacaaactaaagggaaagaaaacgtgg

SEQ ID NO: 365938 - DNA, 201 bp, Homo sapiens; identical to SEQ ID NO: 79116

SEQ ID NO: 365939 - DNA, 201 bp, Homo sapiens
tcaccgtctgctactggttggcctgagggggatgagaacatggcagagtggctgggaggaaggatacctgtgttttagtccaagctctgtcactaattactttttttttttttttttaacctttgcctgtatgctggtttcctggggctgctgtaactgaggaccacatacttggtggcttaagtaacaagaatttattat

SEQ ID NO: 365940 - DNA, 201 bp, Homo sapiens
ctaatgaattatgtgttagtataaaagtgaggggaaccagggagcagtcaagtctgattaattcacataatagattatagtccaggaaaaacctaggactygctgtgctcttcccattttcctaggaagtctccctgctaacagaatagcatagactggtgtagctaaccatgggtggctactgtgaattttccgtttcta

SEQ ID NO: 365941 - DNA, 201 bp, Homo sapiens
aggtaagaagtgaagggattgttccaggaggagggccatggttggcaaggaagagtggagcagatcctcccaggaggggaatggtttctatagggcttgcrggtggggcgaagataacatgtatgtgggtctttagggaagtggatagaaggaggcagtggggttggagaggctgggaaagtaggagagagcttccgattc

SEQ ID NO: 365942 - DNA, 201 bp, Homo sapiens
aaaagtattgtccagtcctttttaagttggtggctgagcttggtgaagtgtgtttttaaaagacctttagtccgttctacttttcctgaagactgaggacygtaagggatataaaggtttcactgaatactaagagcctgaaaaactgcttggctgatttgactaataaaggctggtctgttatcagactgtatagaggtg

SEQ ID NO: 365943 - DNA, 201 bp, Homo sapiens
ggagtgaatgtcaggtggatcagagagatacagtcatgggggtcaggtgtggtatcaggaataacgtgggagggtggattgaagtccgggccaggaacaayggtaattgtgggacttaacaaagagtgagtacagctgaaggagccggggagcagaaagtatatgcgtcaggtatgaggaagaaaatagattttggaagtt

SEQ ID NO: 365944 - DNA, 201 bp, Homo sapiens
ttcccaccggcaagatttaatggatttaccttttagcaagaagtgttccggttgtgagcacaagagaaagctttcagggataaggtggggttcttcagggycggctaagcagaagtttgtgttaggatggtccttctgggcaggggacctgctgcctggttttctctttggaccatcagtgctgcttttggcctaatacag

SEQ ID NO: 365945 - DNA, 201 bp, Homo sapiens
gggagcagaaagtatatgcgtcaggtatgaggaagaaaatagattttggaagttatgagaaatgtagagagtaagttgagcatagtttgtgattttgaggrcctctaaaagtattaggacggcggcagccgctgcacggagacatgatggctaggctaaaacagtaaggtcaagttgtttgcacagaaaggctacagggtg

SEQ ID NO: 365946 - DNA, 201 bp, Homo sapiens
tggctgccaggtgagttagacagtccgatttccagtggggtcccgcacagatgggactcagcttaggaggaatcctgggctgcaggcattccttggcctgrtggccagatttctggcacttgtagcaagctcctgggggaggaggttctggaggaacgcctggctgctgcggttcaggcgtttggaagttcttgtgtgctg

SEQ ID NO: 365947 - DNA, 201 bp, Homo sapiens
ggctgcaggcattccttggcctggtggccagatttctggcacttgtagcaagctcctgggggaggaggttctggaggaacgcctggctgctgcggttcagkcgtttggaagttcttgtgtgctggagatgtggctggggtttgtctcacagtggaggcaaggaattgcaacttttctctattattgtacaccttgaaggcg

SEQ ID NO: 365948 - DNA, 201 bp, Homo sapiens
ggggtttgtctcacagtggaggcaaggaattgcaacttttctctattattgtacaccttgaaggcgaggttaattaaatcctgttgtggggtttgagggcyggaatttaatttttggagttttctttaatgtcgggagcagattgggtaataaagtgtattttgagaataagacggccttttgaacttttagggtctaggg

SEQ ID NO: 365949 - DNA, 201 bp, Homo sapiens
aagacggccttttgaacttttagggtctagggctgtaaagcgtctcagggttgctgccaaacgagccatgaactgggctggatttttatatttgatgaaamagagcctaaacgctatccgatttgggataaagaaaaaggagcattaaccttgactatgcctttagctccagccacctttttaagagtaaattgctgggca

SEQ ID NO: 365950 - DNA, 201 bp, Homo sapiens
ttgaacttttagggtctagggctgtaaagcgtctcagggttgctgccaaacgagccatgaactgggctggatttttatatttgatgaaaaagagcctaaaygctatccgatttgggataaagaaaaaggagcattaaccttgactatgcctttagctccagccacctttttaagagtaaattgctgggcaggtggggaggg

SEQ ID NO: 365951 - DNA, 201 bp, Homo sapiens
gtgccagaatgtaagtggagctttcatgggtgagcagcagctaggtgctttgcctggagtacctttttcaccctcgtggctgcatctgttttgggttcttwaaaaaattatagaatcaagaagaccagagcaggctatggcacaaacagaaaccaaagagctgaaagaaaaaacgtcttctgtaatttcagcagggtttag

SEQ ID NO: 365952 - DNA, 201 bp, Homo sapiens
ctttatgtctaactcagggattgtaaatacaccaatgggcactctgtatctagctcaaggtttgtaaacacaccaaccagcatcctgtgtctagctcaggktttgtgaatgcaccaatccacactctgtatctagctaatctggtggggacgtggagaacctttgtgtctagctcagggattgtaaacacaccaatcagcg

SEQ ID NO: 365953 - DNA, 201 bp, Homo sapiens
tgcctcagactcccaaagtgccgggattacaggtgtgagccactgcacccagctgataagaattaaaacaaaaacaaaaaataaacccctaaaaaacttaytaataaattatcaggcattgaagagaatcgcagcaaattactcattttgtttaaggacagagaagacacaacagatgttcagtctgcttaaaacttcata

SEQ ID NO: 365954 - DNA, 201 bp, Homo sapiens
ccccgcgcaggcgcccccgccccgccgtcgccgccgccgcagccaggagccgctgcaccatgccccgcatagatgcggacctcaagctcgacttcaaggaygtcctgctccgacctaagcggagcagcctcaagagccgagccgaggtgggggacgttcggaagtcgcagtggggtgggatttttttttccgggtggcgcg

SEQ ID NO: 365955 - DNA, 201 bp, Homo sapiens
cgggccagctggagttccgggtgggtgtgggcttggcaggccctgcactcggagcggccggctggccctgccggcctcaggcaatgaggggcttagcaccygggccagcagctgcggagggtgtgctgggtcctccagcagtgccagcccactggcgctgcgctggatttctggctgggccttagctgcctccctgcgggg

SEQ ID NO: 365956 - DNA, 201 bp, Homo sapiens
aagcaggctgccggagccagcagtggcaaacccttctggctccttttctttgggagggtgatttgttgtttcgctctttgcaatagattctgttgctgctyggtctttaggcccacactgcttttatgagctgtgctatttgccgggaaggtctatagcttcatttttgagctagcgcagaccccaaccccaccagaagga

SEQ ID NO: 365957 - DNA, 201 bp, Homo sapiens
ctcaaatcctaaggaacaggtggagaccggactggaaatagcctgaggctgggggaagggaggccagtccctgaaggataaactagttgcctgaaaggcaragtgccccggggtggtgtgcgctggtgactggctttgctgagagctggagaggaaggtgaggaaaccggacacggttgaaggctggggctgaaggagtaa

SEQ ID NO: 365958 - DNA, 201 bp, Homo sapiens
caggcgtgaggggcagcaggagataagcttgagggcaagtatggacaagagctgtgggatccacctttaaggatgggacttctccaagagcactagggagmtattgcagaggtctgagtaggagagtgcccaactcactgccttgggtcagattgaaaggggcaaaataaaaaagagagcccagctgggacgcgttagtaa

SEQ ID NO: 365959 - DNA, 201 bp, Homo sapiens
attgaacattaatgtaatagggccaggcacagtagctcacacctgtaatcccagcactttaggaacctgaggtggaaggattgcttgaggccaggagttcraggccagcctaggcaacaaagcaagacctcagctctacaaaaatttaaaaaatcagccagggcagttgtgcacacctctagtcccagctatttggaaggc

SEQ ID NO: 365960 - DNA, 201 bp, Homo sapiens
tgcacttcagcctggacaaccctgtctctaaagctaaaatgaaatttatgtaatagaatgaattactccttctcggggaatactatcacatcatgcgacamtgtcatgcaacacttggcttcataatttgggcagattgtaactaatgttccagtttgggatagcatctttgcaatcttcatgtacacattgcagtgagaa

SEQ ID NO: 365961 - DNA, 201 bp, Homo sapiens
atgaatgcgttagaatcgcctggggaaacactccaaaatacacataatatgtccagcacaaaggtggtgattcatgaagtttgaggcagctggagcacgartattttggaaccagttctaagaggattctgatgtgtacccgggtgtgctggaccagcctctgaagccctttccatttgtggaaccctgcggctctctggt

SEQ ID NO: 365962 - DNA, 201 bp, Homo sapiens
ggcagctggagcacgagtattttggaaccagttctaagaggattctgatgtgtacccgggtgtgctggaccagcctctgaagccctttccatttgtggaamcctgcggctctctggtagcactgcagctgggcatgagcttctcacgagcctgataactgatggtgaggctttcagggcttggatccacattcagaggtct

SEQ ID NO: 365963 - DNA, 201 bp, Homo sapiens
tgaacttttagggtctagggctgtaaagcgtctcagggttgctgccaaacgagccatgaactgggctggatttttatatttgatgaaaaagagcctaaacrctatccgatttgggataaagaaaaaggagcattaaccttgactatgcctttagctccagccacctttttaagagtaaattgctgggcaggtggggagggc

SEQ ID NO: 365964 - DNA, 201 bp, Homo sapiens
ccgaggtgggcggatcaccaggtcaggagatcatgaccatcctggctaacacggtgaaaccctatctctactaaaagtacaaaaaaaagaaaaaattagtygggtgcagtggcgggcgcctgtagtcccagctactcgggaggctgaggcaggagaattgcatgaacctgggaggtggagcttgcagtgagccgagatcgc

SEQ ID NO: 365965 - DNA, 201 bp, Homo sapiens
ggtgcagagataagaggtcagggcacagaaataagggattggggtgcagagataagaggtcagggcacagaaataagggattggggtgcagagataggtcrgggcacagaaataagggattggggtgcagagataagaggtcggggcacagaaataagggattggggcacagagatataagaggttggggtacatgcccct

SEQ ID NO: 365966 - DNA, 201 bp, Homo sapiens
acttctttctctgtgcaggttctgtgtgcaccacccgcaccaagacgggagtggggtacccccagctgagtgccgtcattgagtgtgccgactctgcccayggcctgaagggccacatcatctctgtgagtctccacccggggctgaggctggggtgtcttgggaggcccctgctccctcgctgctcttctttcactggct

SEQ ID NO: 365967 - DNA, 201 bp, Homo sapiens
cgcctcttcacagagaggcggacacattgaatgttccttgaaagcttggggcaggtctggggcctcaccattcaagtgtccctcccctgaggtacaagggrtgtgtatggctgagagcacctctcaggccgtgttccctggattttctgtattcacccactttctggaaccatggctgaaagctacaaaggtgatgttctc

SEQ ID NO: 365968 - DNA, 201 bp, Homo sapiens; identical to SEQ ID NO: 79113

SEQ ID NO: 365969 - DNA, 201 bp, Homo sapiens
ggtaggccaggccacagcttgctagaacagttgtaataaagccccacagactgggggcttcaatttcagtgtctcaccattctggagacgagaagcccaayatcagggtgttggggggggcatgctccctctcagggccccagggaaggatctgttgcaggcctctctgtgaccttctgctggttccttagcttgtggcgt

SEQ ID NO: 365970 - DNA, 201 bp, Homo sapiens
gaaccaaatctcagtcactgcatctggggcgagtgacctgagaggggcaggcgtgaggggcagcaggagataagcttgagggcaagtatggacaagagctrtgggatccacctttaaggatgggacttctccaagagcactagggagctattgcagaggtctgagtaggagagtgcccaactcactgccttgggtcagatt

SEQ ID NO: 365971 - DNA, 201 bp, Homo sapiens
cgccctgacaaaacagaccactcactctaccaatcagcaggatatgggtggggccagataagagaataaaagcaggctgccggagccagcagtggcaaacycttctggctccttttctttgggagggtgatttgttgtttcgctctttgcaatagattctgttgctgctcggtctttaggcccacactgcttttatgagct

SEQ ID NO: 365972 - DNA, 201 bp, Homo sapiens
accaggtcaggagatcatgaccatcctggctaacacggtgaaaccctatctctactaaaagtacaaaaaaaagaaaaaattagtcgggtgcagtggcgggygcctgtagtcccagctactcgggaggctgaggcaggagaattgcatgaacctgggaggtggagcttgcagtgagccgagatcgcgccactgcactccggc

SEQ ID NO: 365973 - DNA, 201 bp, Homo sapiens
tcatttctgatttggtcttttcctcttttcccttattttgcccttcttgatttcaaacttgaattgacagctttttgttcctgccaatggaaactcccccktcctcctggaagcattcttgctgtgctgtccctcatggttgaggcatttcataatcactttgggtttttccagacagtagcagtgaccacatttggacca

SEQ ID NO: 365974 - DNA, 201 bp, Homo sapiens
ctatgtgtaaaatttacacctagtaaattttatgtgtatttgaccacaattacaaaaaaactaaaaagaatgggtaaaggagcaatatacagaaagtactyttaaatggagggactaacatttataaagcaccaccaagagctgggccctgtgctaagaatttgagagaactttctttgtaaaccttttaaggactaaaag

SEQ ID NO: 365975 - DNA, 201 bp, Homo sapiens
cttgatttcaaacttgaattgacagctttttgttcctgccaatggaaactcccccgtcctcctggaagcattcttgctgtgctgtccctcatggttgaggsatttcataatcactttgggtttttccagacagtagcagtgaccacatttggaccatggacagattcagcagccacacaggtagctgatgggatggagaga

SEQ ID NO: 365976 - DNA, 201 bp, Homo sapiens
ctcagctccctgctagaatgcctcccgggttcaagcgattctcctgcctcagcctcccgagtagctgggattacaggcacgcgccaccacgctcagcccatttttttttttgtatttttagtagaggcagggtttcaccatgctggccaggctggtctcgaactcctgacctcatgatccgcccgcctcagcctcccaaag

SEQ ID NO: 365977 - DNA, 201 bp, Homo sapiens
ctcgagcaatccacttacctcagcctcccaagtgctgtggttataggcgtgagccactgcacttggccaagtttttagtttttatgtagacagctctgtcrttatgttttttcacttttatgcttattgaaagtattcaaggtttccttctgaatttggggagtataactttaattttaattctttaatctacctctagtc

SEQ ID NO: 365978 - DNA, 201 bp, Homo sapiens
atgggaaaagcaggatgggaaagatcgatggggactgcaccaatcagaaatgagggattcactccttccaggtagcccccgaggccctctttcccccaagyggtccctgatagaggaggaggttgcatggttgggtaaggaggaggcactaagctggacctatgttcaagaagcttcgtgctttaccagcaactgttgtca

SEQ ID NO: 365979 - DNA, 201 bp, Homo sapiens; identical to SEQ ID NO: 79117

SEQ ID NO: 365980 - DNA, 201 bp, Homo sapiens
gaagaatccacagggcagtgagttgtaataaaaagggctatttttgcactcctacactcctgcagtgaaagagcttgtactgtttccaaaccagacacatscttctggttgatagattctgccacttcctggaggcttgtgtgttcttaggccaaagcttcatgttctgtaaactgagcacgtgctgatgctatgtggtcc

SEQ ID NO: 365981 - DNA, 201 bp, Homo sapiens
tgtcccccagctgcctggtggctttaggacatgcacatcctcgtgttcaggtgtggggttcctcacctttataccagcaatagtagttcatgatcatcagstgtattctttctgtctcaggcagggaacgtggtgacaggagaaatggtagaagagcttattctttccggagcagatatcatcaaagtgggagttggacca

SEQ ID NO: 365982 - DNA, 201 bp, Homo sapiens
tccggagcagatatcatcaaagtgggagttggaccaggtaagacttgttaggagcacagcagaggacgtgtgtggggaagaatgggatctggggcttgcgrggactgcagatcactggaggggatgcatgaatgactcattcacagatatttaaagcatgctttttctggaagcataattgagcttctcggggaagcccct

SEQ ID NO: 365983 - DNA, 201 bp, Homo sapiens
caggcaggagggtgctggtgtgagccctggcctggaagtgaacctcgggctaggctgcaagggacttgaggtggggcagccaggagggagatggacaaacrgctgggccctgtggagcacagagctgagtgagagcaggtgagggtatggagggtgtcgtgctgcaggccaggccctgggccaagcggtatccctccctgt

SEQ ID NO: 365984 - DNA, 201 bp, Homo sapiens
  misc_feature (1)...(201): n = A,T,C or G
tgagtgtgccgactctgcccatggcctgaagggccacatcatctctgtgagtctccacccggggctgaggctggggtgtcttgggaggcccctgctccctngctgctcttctttcactggctgggcatcctgtgggcatgggagggagctgggcactgcggtcacagcgctgacattcagcagaaacagaggccctgctgc

SEQ ID NO: 365985 - DNA, 201 bp, Homo sapiens
  misc_feature (1)...(201): n = A,T,C or G
tctgcccatggcctgaagggccacatcatctctgtgagtctccacccggggctgaggctggggtgtcttgggaggcccctgctccctcgctgctcttcttncactggctgggcatcctgtgggcatgggagggagctgggcactgcggtcacagcgctgacattcagcagaaacagaggccctgctgcccacggattccac

SEQ ID NO: 365986 - DNA, 201 bp, Homo sapiens
gaggtgggcggatcacctgaggtcaggagctcaagaccagccaggccaacgtggcgaaatcccgtctctactaaaagtacaaaaattagctgggcttggtkgtgggcacttgtaatccagctactcaggaggctgaggcaggagaattgcttgaacccaggaggcagaggttgcagtgagccgagatcacgccattacact

SEQ ID NO: 365987 - DNA, 201 bp, Homo sapiens
cccgctaccatgttctggtgcctttctggttgtgaatgaaattgctttttttttttttcagggtaggaggttagaacctattttatgtagcagtttgttcrttggacttaccacattgaattatttaggaatgtggtaggttgtcctctatttgtactttttttttttttttttttgagacaaggtctcactcttgtcact

SEQ ID NO: 365988 - DNA, 201 bp, Homo sapiens
cgccagcccatttgcacttttgagcccctgacatgttgggtggcaggactggctttaatgaaggcctgttagagagcagcagagatgtgtgtttgtgggtsggggaggggactttgttactttatgttccctttcaggtcaggcttagacagggaatctaatctatatttggcgtattggccggctgtgccagactaagtg

SEQ ID NO: 365989 - DNA, 201 bp, Homo sapiens
aaatagacatggggtcttgccatgttgctaggctggtctcaaactcctgggcttaagtgatcctcctgcctcggcctcctaaagtgctgggattacaggcrtaagccaccatgcctgggcaacttaaactgcttaagctccatttatgcccacgaagctaataatgctgttcaaagttgttccaaaaattaaatgaaacga

SEQ ID NO: 365990 - DNA, 201 bp, Homo sapiens
taatcccagaactttgggaggccgagtcgggtggatcacctgaggtcgggagttcgagtccaacctgcccaacatggagaaaccctgtctttactagaaayacaaaattagccgggcgtggtggcgcatgcctgtaatcccagctactcaggaagctgaggcaggaacattgctttaaccccggaggcagaggttgcagtt

SEQ ID NO: 365991 - DNA, 201 bp, Homo sapiens
gggagggttatgaaaatattctaaaatctatcatgatggttacagaactctaaatatactaaaaatcattgaattgtgcatgttgaatgggtgaactgtayggtatgtcattatatttcaagaagccattaaaaaaaaacaacagaaagccttgctgcaacatgcctgcacttgctcctgccacattcaggtggttctgag

SEQ ID NO: 365992 - DNA, 201 bp, Homo sapiens
aaggtaagaagtgaagggattgttccaggaggagggccatggttggcaaggaagagtggagcagatcctcccaggaggggaatggtttctatagggcttgsgggtggggcgaagataacatgtatgtgggtctttagggaagtggatagaaggaggcagtggggttggagaggctgggaaagtaggagagagcttccgatt

SEQ ID NO: 365993 - DNA, 201 bp, Homo sapiens
gccaccatgcccggcctccctccaccttctttaagggagtttttggcaatgtattgttaactggaactgtggctttcattaccaagtgtgatacatcgacytactacacagcccgccaccaaataaaaggcgaattcaaaagggataatgttaaaaacttagtagcagtgagagaaggcaaccaatctcaagttccatata

SEQ ID NO: 365994 - DNA, 201 bp, Homo sapiens
aggtatgaaattctgtgttccttttttgtcccccagctgcctggtggctttaggacatgcacatcctcgtgttcaggtgtggggttcctcacctttatacyagcaatagtagttcatgatcatcagctgtattctttctgtctcaggcagggaacgtggtgacaggagaaatggtagaagagcttattctttccggagcag

SEQ ID NO: 365995 - DNA, 201 bp, Homo sapiens
tggggtttcaccatgttggccaggctggtctcaaactcctgacctcaggtgatctgcccgccttggcttcccaaagtgctaggattacagcatgagccacygtgcctggccaaagtttagataatttaatgaatgaatcccctttacctctgctgttgcatgtgtcttgagcaggtgcactgtgcatttgattagggtaga

SEQ ID NO: 365996 - DNA, 201 bp, Homo sapiens
acatttccaccagccttccataaatgaacatgaatgagatgaatctgaggtcacctctgagaggcaaagaatacaggtagcagtggcccaggtggccttcscctggattctccagggaggcattcatctctcaaatgtccagcccctggcatggaagaataaagcgccacagggtcatgtggggacatttggataatcttt

SEQ ID NO: 365997 - DNA, 201 bp, Homo sapiens
atatattaaatgtgtggaagcacttcatgccatccccaaatcccttgctttttcttctcctcaaacttgtgtgtattttattttctctccttttacatctrctgcccatggttttgttctgcctgatttcccctgtaacataacccctggttaccaaatgctggaaagtcagataagatgggaatgctctatggcgtttca

SEQ ID NO: 365998 - DNA, 201 bp, Homo sapiens
tagtttggtttttgttcctgtttatttatgctgttttatttaaaacaagggggcaatatgtgtatatctaaaccattaatgaaatcagcccttttttgttstatagcgatcacttattttgttgttaaatttaaagtgaagatggtgtgagtttgatcgagtagcaggataagcaggtgaaaattttatgagtttgatgga

SEQ ID NO: 365999 - DNA, 201 bp, Homo sapiens
atgcattatttttaaatggagtctttttcccctccagggcagatcttgaaccttctggatgagctgagattggctaatgataccctcatctacttcacatyggaccagggagcacatgtagaagaagtgtcttccaaaggagaaattcatggcggaagtaatgggatctataaaggtgagaaatgctgggatggagaagct

SEQ ID NO: 366000 - DNA, 201 bp, Homo sapiens
ccaggggtcagcatgtagaccaggccccatgtctccaccctgacttgacatggggctaagaggcagtctccccatgtcttcaggaagaagaaaatgaaackgccttgctgaacatatagcagtgattttcctactgcaaacagtgattttcaaatttgttttaaagctgaggaatatttcagatgaaattttatgagaagc

SEQ ID NO: 366001 - DNA, 201 bp, Homo sapiens
ggggtttcaccgtgttagccaggatggtctcgatctcctgacatcgtgatccgcccgcctcggcctcccaaagtgctgggattacaggcgtgagccaccgygcccggccctgggagagactttcaacttagctgcaggtcctgcccagcacagtgttcacagtctgcaaggaaggtagcagggtattgcatgggattttat

SEQ ID NO: 366002 - DNA, 201 bp, Homo sapiens
tccccttgcataaacaaggaagggcactggaggcccatgagaattccatctgtacctggaactgaaggatggcagatgacaagccaggcagggaggaatgracctggattcctggtgaaggacgtggatatatcttgtggggtataacttggtatggtccaaaaactaaaagatattaattcctaaatgacttcccaaaat

SEQ ID NO: 366003 - DNA, 201 bp, Homo sapiens
tgctttaaaaaaaaaaaaaaaagaaagaaagaaagaaataggcaatttctcatttctttccaagcataaatattagcttaagcattaagatagacaaggtytttgttgtgatggcattgtataactggattatttcatgcagtcttatgtgaggaattcagtaagaagttactttgcatcagctttatctgtatttagcat

SEQ ID NO: 366004 - DNA, 201 bp, Homo sapiens
taaaatggtctgcacctgaactaacccttttaccacaaagcatagaaaatggaaatgaatcttctccaaggagcgcgcgcgcacacacacacacacacacagatatgtatgtgtgtgtgtgtgtgtgtgtgtgtgtgtgtgtgtgtatatatatatatataaaatggatcccttctatgatggcatcttggtgtggaacaa

SEQ ID NO: 366005 - DNA, 201 bp, Homo sapiens
ataaaatggtctgcacctgaactaacccttttaccacaaagcatagaaaatggaaatgaatcttctccaaggagcgcgcgcgcacacacacacacacacacagatatgtatgtgtgtgtgtgtgtgtgtgtgtgtgtgtgtgtgtgtatatatatatatataaaatggatcccttctatgatggcatcttggtgtggaaca

SEQ ID NO: 366006 - DNA, 201 bp, Homo sapiens
tcgcttttgtggctgtttcaaaacatctaaatgacctataattaaattttgttgccaaattatttgttaattatcatcttcctatcaagtttattgcatcrggagatgtcattcactgtctaaaaggtggagtgaggaagagcatcatgcatatgtgttgcagagtgggaaagaatgcttgttttgttgggtttctgtctc

SEQ ID NO: 366007 - DNA, 201 bp, Homo sapiens
gcaaaagacatgagcccattcttttttatggctgagtagtattccatggtgtgtgtgtgtgtgtgtgtgtgtgtgtgtgtgtgtacacacaatgcgtggtdtagatagatagatagatagatagatagatagcacattgtttttatccagtcatcgttgatggacatttacattgattccatctccttagctccaggtaga

SEQ ID NO: 366008 - DNA, 201 bp, Homo sapiens
atccaggcacaaaaaaacagtacatacattgctttatgcttagatttatggaatgcttttttggttaataaaaaaagaaatggatagattcatgaccttcwtatatgactgtgcatgctgtgtactgcacaactccaggaggcagcattaacataatccgcagtgggaagaacattttctaaatttgtgcagtgcacaacc

SEQ ID NO: 366009 - DNA, 201 bp, Homo sapiens
tctagacctgcactggttgaattcatattctttttttttttcttttttttttttgagatgggggtttcactctgtcacccaggctggagtgcagtggcgcratctcagctcactgcaacctgcgactcccaagctcaagcgatcctcccaccccagcctcccgagtagttgggaccacaagcatgcaccaccacgcccagt

SEQ ID NO: 366010 - DNA, 201 bp, Homo sapiens
tatattccttttttcaatacaacatatactatattgctcatggaatactcatagatggaatctatgtaattagagcagttggttcttctacattgagcacraaagagtccattgaagtgagcattgaaaggattgaaatctccctgttgcctcttacctcttttttgatcttttaggaggaaaagcaaacaactgggaagg

SEQ ID NO: 366011 - DNA, 201 bp, Homo sapiens
tttaggaaaacttgaccacatctggggtaacaaattaaggcccaggggccaggagtttggtagaagcagcgtgaatcagaagctctgggggaaatggagtsgtccccaaaagcaggcaccagctgcaggtgcatgagtgaggagggagggatggtgcatttatacactgcattagggctagcgaaacctttatacagtgca

SEQ ID NO: 366012 - DNA, 201 bp, Homo sapiens
attgcttcataggcaccaagcctgtttcctcaactctcctggttaagagccatcctggtaataaaataataccaacgaagataatagccattttttgtgcstctcttgcaggcactgagcttggcagttgggataatcattccatgtaataatcacgtggaaacatagtgggaatatgagatacagaaagctgaagctatt

SEQ ID NO: 366013 - DNA, 201 bp, Homo sapiens
actgctcttttcatagcctataactttaaatttgtttttttctgtaaacattttcaactggccacatatgtcttgagtagacagaggctaattgtcagctyttgctttctgggttgttctattagggtgctatggcatagggtcctattaggatcctatggcaaagagcaacagtgagggtaagtggaaatttttaggaaa

SEQ ID NO: 366014 - DNA, 201 bp, Homo sapiens
ccatcttgtccaggccactgtggtctgccctttggacttctccagtgtgcttcttggtggtctccctaattctttgttctcacactccgttctctacccasacactggagtgagctttcgtaaacatagtgtcaatgtactctattgaatttctgaggactgacataactgttagcaccacaaactgggtgacttaaaaac

SEQ ID NO: 366015 - DNA, 201 bp, Homo sapiens
attctttttattcctgcaccaccgaccgcagatagtcgccactcacccatgacaattagcagttaaagctgactgctcttttcatagcctataactttaartttgtttttttctgtaaacattttcaactggccacatatgtcttgagtagacagaggctaattgtcagcttttgctttctgggttgttctattagggtgc

SEQ ID NO: 366016 - DNA, 201 bp, Homo sapiens
ctgatttcaatgctgttgggtatatttccaggagtggggttgctagatcacaaggtagttccattttttaatttgtcaaggaaattctgtactgtttttcrtagcaacagcacctttttgcatttccaccagccatgtgcaaagaaattctccacatccccactaacacttgtctcttgttttttgtttttttaagagcag

SEQ ID NO: 366017 - DNA, 201 bp, Homo sapiens
gtaacaaaccaaccttcacgtgaatcctcaaacctaaaataagttaaacataaataaataaataaaataaaatataccagacttcttgttaaaaaaaaaaatctatgggctaaatttggtagaatggctaggattaaatcatccttccattaaattcaataggttattccttttaataagaggtacattacatgtctgctg

SEQ ID NO: 366018 - DNA, 201 bp, Homo sapiens
ggtttggaaatactttctccccttccataggttgccttttcactccattatttcctttgctgcacagaagcttgttagtttgacgtagtcccacttgtctrtttttgcttctatggcctgaagcctattcacattcttaaaagtatcttttgatgaatagaaatagttgcttcattttaccttttactctttacattttaa

SEQ ID NO: 366019 - DNA, 201 bp, Homo sapiens
cctatgtaacaaaccaaccttcacgtgaatcctcaaacctaaaataagttaaacataaataaataaataaaataaaatataccagacttcttgttaaaaaraaaaatctatgggctaaatttggtagaatggctaggattaaatcatccttccattaaattcaataggttattccttttaataagaggtacattacatgtc

SEQ ID NO: 366020 - DNA, 201 bp, Homo sapiens
agtgatcactctaggcaatgaagaagaaacttgatgaggacatgttaaatatcatggtcatttgaaatattggaatttggaggagatatccagggataagyattaagatggggaaggatgcaggatatttcagttgagagaatctgcataataaatgcagctgtaaatttgtctggagttaaaaataggcaagaggagaag

SEQ ID NO: 366021 - DNA, 201 bp, Homo sapiens
tttttaaatggagtctttttcccctccagggcagatcttgaaccttctggatgagctgagattggctaatgataccctcatctacttcacatcggaccagkgagcacatgtagaagaagtgtcttccaaaggagaaattcatggcggaagtaatgggatctataaaggtgagaaatgctgggatggagaagctctggcctc

SEQ ID NO: 366022 - DNA, 201 bp, Homo sapiens; identical to SEQ ID NO: 79140

SEQ ID NO: 366023 - DNA, 201 bp, Homo sapiens
atttaaaaatgagggcaacgggcacagtggctcatgcctgtaatcctagcactttgggaagcctaggtgggaggatcacttgagctcaggagttcaagacsagcctgggcaatacagcaagaccctgtgtctacaaaaaataaagaaatattagccgggcatggtggtgtgtgcctgtagtcccagctacttgggggactg

SEQ ID NO: 366024 - DNA, 201 bp, Homo sapiens
tgttgcctcttacctcttttttgatcttttaggaggaaaagcaaacaactgggaaggaggtatccgggttccaggcatccttcgttggcccagggtgatayaggctggccagaagattgatgagcccactagcaacatggacatatttcctacagtagccaagctggctggagctcccttgcctgaggacaggtactctga

SEQ ID NO: 366025 - DNA, 201 bp, Homo sapiens
caaactgaattaaaggagaggatgaggaaagagattatttgcttctaccagaactttcttttttctttttttcttcttcttttttttttttttttttttttgagaaggagtttcactctgtcgcccagcctggagtgtggtggcacgatctcggggatcactgcaatctctgcctactaggttgaagcaattttcctgcct

SEQ ID NO: 366026 - DNA, 201 bp, Homo sapiens
ggtgtgcccttgtaatcccggctacttgggaggctgaggtggcaggattgcttgagcccgggaggttgaggctgcagtgagccgtgatcacgccactgcaytccagcctgggtgaaacagtgagaccctgtctcaaaataaataaattaattaataaaaataaaaaggtcctaagtgtgtagttttatcttcaaaataata

SEQ ID NO: 366027 - DNA, 201 bp, Homo sapiens
gtctctttgcagtcagctcttctctcactgacctgcctgttgcacgcttgcaacgtattttcatactctctctaataaatctgctttttttttttttttttcttaacctacaactgtcttggtaaattctttttattcctgcaccaccgaccgcagatagtcgccactcacccatgacaattagcagttaaagctgactgc

SEQ ID NO: 366028 - DNA, 201 bp, Homo sapiens
tggacctcatcaggatgctgatctgccgtgccagcctacctacacccagtcgttaaaaactcctttcagggtcagctggattcttcctcttctccctactsctgctaccaggggtgaaagcaactgaaggtttcttctttgtaggaaggttcatcacatcctggattctagttcatttatgttttttctgcatcttcagcc

SEQ ID NO: 366029 - DNA, 201 bp, Homo sapiens
cattctcctgttgatagttatttggattgtctccagtttttggttattgtgactaaggctttgggtggatagatagttttatttctcttgtttaaacatcragtagtgtaattgcttgacagtaagatacatgtatattcaattgtataggaaatggccaaacttttctctaaaacgtttgcatgagtttacacttcaaca

SEQ ID NO: 366030 - DNA, 201 bp, Homo sapiens
tatatggcttcatgctttacagttagatatttcatctgtggaggaaattctgtacgtgtgtgtgtgtgtgtgtgtgtgtgtgtgtgtgtgtgtgtgtgtgtctgtgatggaccatgtgttatttgcctattcttgtgaatttgggtcttgattgatcagtactcttggctggtgtgggacctcttaaaacttgggtaggac

SEQ ID NO: 366031 - DNA, 201 bp, Homo sapiens
gtatatggcttcatgctttacagttagatatttcatctgtggaggaaattctgtacgtgtgtgtgtgtgtgtgtgtgtgtgtgtgtgtgtgtgtgtgtgtgtctgtgatggaccatgtgttatttgcctattcttgtgaatttgggtcttgattgatcagtactcttggctggtgtgggacctcttaaaacttgggtagga

SEQ ID NO: 366032 - DNA, 201 bp, Homo sapiens
tgtatatggcttcatgctttacagttagatatttcatctgtggaggaaattctgtacgtgtgtgtgtgtgtgtgtgtgtgtgtgtgtgtgtgtgtgtgtgtgtctgtgatggaccatgtgttatttgcctattcttgtgaatttgggtcttgattgatcagtactcttggctggtgtgggacctcttaaaacttgggtagg

SEQ ID NO: 366033 - DNA, 201 bp, Homo sapiens
atgtatatggcttcatgctttacagttagatatttcatctgtggaggaaattctgtacgtgtgtgtgtgtgtgtgtgtgtgtgtgtgtgtgtgtgtgtgtgtgtctgtgatggaccatgtgttatttgcctattcttgtgaatttgggtcttgattgatcagtactcttggctggtgtgggacctcttaaaacttgggtag

SEQ ID NO: 366034 - DNA, 201 bp, Homo sapiens
ttttgtagttaaaccttcatgatgtctggggcttgtaattggaagattttttttttttaaagcttttcttactcccctacaaattacaggttgagtatcctaaatactcaaatattcatccaaaatactcaggaccagaagtgtttcagatttggaatgctttcagatttgggaatatttatattatactcaccagctcag

SEQ ID NO: 366035 - DNA, 201 bp, Homo sapiens; identical to SEQ ID NO: 366034

SEQ ID NO: 366036 - DNA, 201 bp, Homo sapiens
tactggggaggctgaggcaggagaatcatttgaacctgggaggcggaggttgcagtgagccgagatcgcaccactgtactccaggaagaaaaaaaaaaaawatatatatatatatatatatgtgtgtgtgtgtgtgtgtgtgtgtgtatgtgtgtgtgtgtgtgtgtatatgtgtgtgtgtgtgtgtatatatatgtgtgt

SEQ ID NO: 366037 - DNA, 201 bp, Homo sapiens; identical to SEQ ID NO: 79134

SEQ ID NO: 366038 - DNA, 201 bp, Homo sapiens
tgtgggggttgggggtggcggttgttgataccgctatctgatttatgccatactctaattaccagcagcagaaggtagccagaaggaattcacagacatcyctatttgcattcctgttattccctatgcccactgtagttggaacaatactacaataataaaggtcagacactcagatgaagattattattccgaagatcc

SEQ ID NO: 366039 - DNA, 201 bp, Homo sapiens
gtgaggcttgcaggttaggtacacccacctcaggttacagaattcataatgggtgagcatgagttccaatgcaggtgtcccacctagaacatgaaatctayaccactttgtttcttttctttccatgtaataagaaagcgtgcatcatgtcagtgcacaaccaacaacatatctccgggacagatctagttcattcattag

SEQ ID NO: 366040 - DNA, 201 bp, Homo sapiens
aaatctcatcttgaattgtaatccaaattataatccccacatgttgggagagggacctcatgggaggtgaccggatcatgggggtggtccccccatgctgytctcatcgtagtgactgagttctcacaagatctgatggttttataaggggcttccccccacttcgttctgcacttctctctcctgtcgccatgcaaagaa

SEQ ID NO: 366041 - DNA, 201 bp, Homo sapiens
caagctctgcctcccaggttcgcgccattctcctgcctcagcctcccgagtagctgggattacaggtacccgccaccacacccggctaattttttttttttggatttttagtagagatggggtttcaccgtgttagccaggatggtctcgatctcctgacatcgtgatccgcccgcctcggcctcccaaagtgctgggatt

SEQ ID NO: 366042 - DNA, 201 bp, Homo sapiens
tggtatgctggaatcagctcctgatcgttcagaaatcttgccagcttgttattaaaccattgtctgttttcatttggctgtgttgtgggtgtttacaccayggcaattggcaaacacaacaaatacaggttgcctttctccctcagagccctagattaacaacagtttgttggtatcagtagaactgactgcagatgtttt

SEQ ID NO: 366043 - DNA, 201 bp, Homo sapiens
attgttcatagcctctggccattctcgactcacagtcctccctcccttgtggctcagtctggaggtttaaggttgcacctccagttggatattgctggagragttctggctgatctgtgtccagagctttgcattgacttctgtcatagaaatgatgcaatgagcatctgtgcaacctcctactccatggcacaggctggg

SEQ ID NO: 366044 - DNA, 201 bp, Homo sapiens
atgtacaaggtgtcagcaaaggaaaacatcattttcaattttgtatcttcagctttagagatggtaaaatccaatgcaaagacctagttgtagcatgaacrtgagtctcgatggtgtggtagagcatcataaatatgaagaattctgaagggctttgtttcccagtccattgttcatagcctctggccattctcgactcac

SEQ ID NO: 366045 - DNA, 201 bp, Homo sapiens
tttcagatttgggaatatttatattatactcaccagctcagcatccctaatccaaaaatctgaaactcaaaatgctccaatgagcatttcctttgtgtgarcatcatgttgacactcaaaaagttcaggacttaggagcatctcagatttcagattttcagatgtagaatactcaacctatatgtatacaccctttccctt

SEQ ID NO: 366046 - DNA, 201 bp, Homo sapiens
caatggtagtattagtggaatttactcaaatgctttcaaatttaaaaatttccagttacaactggtgccttgtttagatattttaacatatatatatatatttgtacacagctgcttctcagttcatctgtcaaaggtggtgaggaaaatgatttaaaactcctacttctaaaatttatagcctttctctacactgtgtta

SEQ ID NO: 366047 - DNA, 201 bp, Homo sapiens
cctggctgtttatcccacaggatcattgatggacgtgatctgatgcccctgcttgaaggaaaaagccaacgctccgatcatgagtttctcttccattactrcaacgcctacttaaatgctgtgcgctggcaccctcagaacagtgagtaaacagacctttccacgctcctcatgctccgtgcaacctatgccatgggaata

SEQ ID NO: 366048 - DNA, 201 bp, Homo sapiens
tgagcattgaaaggattgaaatctccctgttgcctcttacctcttttttgatcttttaggaggaaaagcaaacaactgggaaggaggtatccgggttccasgcatccttcgttggcccagggtgatacaggctggccagaagattgatgagcccactagcaacatggacatatttcctacagtagccaagctggctggagc

SEQ ID NO: 366049 - DNA, 201 bp, Homo sapiens; identical to SEQ ID NO: 79142

SEQ ID NO: 366050 - DNA, 201 bp, Homo sapiens
atggaaatgaatcttctccaaggagcgcgcgcgcacacacacacacacacacagatatgtatgtgtgtgtgtgtgtgtgtgtgtgtgtgtgtgtgtgtatrtatatatatataaaatggatcccttctatgatggcatcttggtgtggaacaaattcataatcttaatcctccagtatttttaattgttccctacccagct

SEQ ID NO: 366051 - DNA, 201 bp, Homo sapiens; identical to SEQ ID NO: 79143

SEQ ID NO: 366052 - DNA, 201 bp, Homo sapiens
tctgaatgttgtgatttgctctcaagccagcctttaagttcatgccagattttggttgtataaagaccatagtcttaaaccatgctttaaaaaaaaaaaaraaagaaagaaagaaagaaataggcaatttctcatttctttccaagcataaatattagcttaagcattaagatagacaaggtctttgttgtgatggcattg

SEQ ID NO: 366053 - DNA, 201 bp, Homo sapiens; identical to SEQ ID NO: 79131

SEQ ID NO: 366054 - DNA, 201 bp, Homo sapiens; identical to SEQ ID NO: 79132

SEQ ID NO: 366055 - DNA, 201 bp, Homo sapiens
gagaaatagagaatgggtttagagaaggcagagtgacatgcattttgttctgttgcaatttgggtattcttatgccttagtttgtctctgatatcttttarccaaggggaagaggctggcaaggtttccattaaaatttattttcacctttacttataccaatttggtagatatagcaggcgagcagtttcctaccttgaa

SEQ ID NO: 366056 - DNA, 201 bp, Homo sapiens
accaaaaaaattctacttcaaaatgttattgattttctccagaccctaattatgtatattctatcatttgcagtgcataccctttgtctgtctttgcaaamtgtcaattcagataatatagtgtcttagtgaattgttgccacaataatgtcatgtaccaattctcttccaagctcaacagattaacacaacagtgtatat

SEQ ID NO: 366057 - DNA, 201 bp, Homo sapiens
agcacaaagagctgccccaggctgttgaccccatacactttgagttttgaaaggtttctgtgtttcccttagaaagctactaaaccaggacaggcacagtsgttcaggcctgtaatcagcactttgcaagggtgtggcaggaggattgtttgagcccagaagttcaagaccagcctgggcaacataacaagaccttatctt

SEQ ID NO: 366058 - DNA, 201 bp, Homo sapiens
gcaatggtagtattagtggaatttactcaaatgctttcaaatttaaaaatttccagttacaactggtgccttgtttagatattttaacatatatatatatatttgtacacagctgcttctcagttcatctgtcaaaggtggtgaggaaaatgatttaaaactcctacttctaaaatttatagcctttctctacactgtgtt

SEQ ID NO: 366059 - DNA, 201 bp, Homo sapiens
tgtttaaaaaggaaagtaagcccttggggagtagaatactgacattaaaatttcactttctcttcctaataatgtggagatgatggcataaaaatagttcyatggagagcttcatcacatgaaagatcaatacaaactgaattaaaggagaggatgaggaaagagattatttgcttctaccagaactttcttttttctttt

SEQ ID NO: 366060 - DNA, 201 bp, Homo sapiens
acagatgtcatgtcctgctctcgcagaatcagctatgccacagactgcagtcgtctcattatgaatcttctttaatatattaatctaaacgtattcacctygctttccctgtctttctcagctttaaaaaaaacccacatacacaaagaggctgacttttaccatcactaaccttgtccaaggttaggggcgatttgggga

SEQ ID NO: 366061 - DNA, 201 bp, Homo sapiens
ttgatgcctggctgtttatcccacaggatcattgatggacgtgatctgatgcccctgcttgaaggaaaaagccaacgctccgatcatgagtttctcttccrttactgcaacgcctacttaaatgctgtgcgctggcaccctcagaacagtgagtaaacagacctttccacgctcctcatgctccgtgcaacctatgccatg

SEQ ID NO: 366062 - DNA, 201 bp, Homo sapiens; identical to SEQ ID NO: 79137

SEQ ID NO: 366063 - DNA, 201 bp, Homo sapiens
gttttcttaatttgggggaggatttttaaaatctcagtagaattattgtcctcaccactacttagactacttaaacaagtaaaaaaaaaaaaaaaaaaaaactgtccactttaatttccctgcattctttataccaaatttaatcattccttttccaggtcattggatctcagttataaatgagtctaagttcccagtttg

SEQ ID NO: 366064 - DNA, 201 bp, Homo sapiens
gtgtattgggaattcttttacagtcttgagcgtagaaagcaggctcttccccatcctgttttaaacattaatacagtcataatattaataatggtaatagyagttaaaacctattatgtaccaagctctatggtaagactacactcacaatctcatttatttctcctaacaactttatgagtgaggcactcttatcagcat

SEQ ID NO: 366065 - DNA, 201 bp, Homo sapiens
acaaaagagatgagctaatcccaccccctcactttctagatggggtaactgagcccagggaggggaagaaactcatccaagctcatatatctagtaagagrtagaggaggcattccaaacccaaatagtcagagtgcaaaccctcacagtaaacacaagactctaagctcccagtgtgcctccagccatctcccctgttca

SEQ ID NO: 366066 - DNA, 201 bp, Homo sapiens
gctgagatgtctctggaaccatgtggctctggcagtgtggaaaatttccttctagtgtgatgaatcctaaggcctagcattctgaaggaggcttccttatstagactgttaggactaggaaccagacatgcaactccttcatctgagtgtacgaatagcctgtacttaaaataatagtgagttaattctttttgtttggat

SEQ ID NO: 366067 - DNA, 201 bp, Homo sapiens
cctgttttattttccttgttcacatcacaaggactgacgaaagaaatagccattcaaattaagactctttcaaagattttagtaaaatcaataattatctyattattaagttgattactgctctatgtttcatttcaaaaatcctaaaaacattcttatcaaagttatgtatactaaagcctcattaatctacacagtgta

SEQ ID NO: 366068 - DNA, 201 bp, Homo sapiens
agactctttcaaagattttagtaaaatcaataattatctcattattaagttgattactgctctatgtttcatttcaaaaatcctaaaaacattcttatcaragttatgtatactaaagcctcattaatctacacagtgtaatttcactgagttttctttttcttctttgctcccaggaagctcagagctaggttttaaact

SEQ ID NO: 366069 - DNA, 201 bp, Homo sapiens
tctggcagtgtggaaaatttccttctagtgtgatgaatcctaaggcctagcattctgaaggaggcttccttatctagactgttaggactaggaaccagacmtgcaactccttcatctgagtgtacgaatagcctgtacttaaaataatagtgagttaattctttttgtttggatagttttatgacttcttttgaaagaact

SEQ ID NO: 366070 - DNA, 201 bp, Homo sapiens
ctgtatcattttttagtcctgatcaccttctagcctagagtgacacatgttatgaagatcctttcagctgtttcttcataactcgttttttagtggcttgwctgctcttttttcttcagttggaaaaaaataaaactaaatttgaaaagaacaacaaccaaaagaaaaaaaaacccctcctgtcctaatgggccctctgtt

SEQ ID NO: 366071 - DNA, 201 bp, Homo sapiens
gctgtctgtttcccttcagtcacgcggagaaacattaacaggacacacccagcactttaagctagatggggaagctccacagtagaatggtccaggaaccyatttggaacatctggaattcaaggacaacatttctcatggcctaattactatttcttttctctggaagtgctggacaatgagattttaagggtaaaacga

SEQ ID NO: 366072 - DNA, 201 bp, Homo sapiens
ggatatcattgcccaggtaacaccgtgcagctccctggagcgtgctttgggtctgcattccattttcttcttcatttcttcagtgctgcttgagctctcartatgtgcaaggcaccatcataagtaccttgctaaagacagaacctgctccaaggtacctcacaatttaggtggaagaaacagaggggaatgtagacaagc

SEQ ID NO: 366073 - DNA, 201 bp, Homo sapiens
aagagttaaaattggggaggatagcagggcaagctgaagacccatagaggaagcatttatttgagctctttaagttcaggttttgatatttttgctctgcrtggtgaaaacaaattaataatgttaatatttgtagcccatggagaaaactcttcttaatctcttctctgaaacctacaccaggcctatgattcatctttg

SEQ ID NO: 366074 - DNA, 201 bp, Homo sapiens
cagtaaagaatatttggaaactacagacaagcacacacttgaaagaaaacaaaaatatctcaattccacaacccagggaacccattgttatcatttgggtraggttcttttgtatttattctatgcatacaacatatgcaaacacaaatacatatctaaaggatgggattataatcacatttgtttttactgtgaactctc

SEQ ID NO: 366075 - DNA, 201 bp, Homo sapiens; identical to SEQ ID NO: 79159

SEQ ID NO: 366076 - DNA, 201 bp, Homo sapiens
tataaggatgaactcatttaatcctcaccacagcccaacatgtcagatcctattatcctcaatttacagacaaggaaactgaggctttgggaggttgtgcmatgtacccgaggtcacctagcttataagtgtcagaaccaggactcagaaccaggccatctgagagagcctcagctctcagaccctgctttgttaataaaa

SEQ ID NO: 366077 - DNA, 201 bp, Homo sapiens
ggagatgtgctggcaagacggatttccagcagcagccaggggatttcagagcaaagtctatttttgttccttggtttgttttttcaacctccccttagccytaccaccccaccctcctccttattcctgtctcctttttagtaaaaaagcctctcagccgcaaacctctatagccgtggaaggccatttgggtgaagttgg

SEQ ID NO: 366078 - DNA, 201 bp, Homo sapiens
ttacccgggtgtgctggtgtatgcctgcagtcccagctactcagggacctgaggcaagggaatcacttgaacccaggaggtagaggttgcagtgagccaakatggcgccactgcactccagcactccaccctgggtgacagagctaggctctgtctcaaaaacaaacaaacaaacaaacaaacaaaaccagcttgtgcttt

SEQ ID NO: 366079 - DNA, 201 bp, Homo sapiens
tttattatattctcccattcctagtaattataataatgctaacactagctaccactgattgaacatctactatgtgttagccatgtgattagtcttacctrttctttacgaactctctgatataattagaaaataatcattcagttgctccataaccagtagtcttaaaatggagaaaaataaatgtagattcgcattcct

SEQ ID NO: 366080 - DNA, 201 bp, Homo sapiens
attcgcattcctataatgaataatttaaatgtgaaggaagtaagataacaagaaaagaaagacatttaaaggtaaaattacagcatatgaggaaagggtawggaatgggagaaacagaaacatgggagaaagaggtaagggagacctaggggaagaaagacaaaggaaaagagtttaaagtttggaggtaactttgccaga

SEQ ID NO: 366081 - DNA, 201 bp, Homo sapiens
gataagaacttggcttttcctaccagaggctagttttcggggccataagaaaagtctagaagacctgatagactggaatggaagtttcttgggaggtgagrccagcaaggcacttcatatcttgcactcttaaaattaacccagtttctctcttgcccacatccccctacccgccactctgttttttttttccccctggga

SEQ ID NO: 366082 - DNA, 201 bp, Homo sapiens
gcactcttaaaattaacccagtttctctcttgcccacatccccctacccgccactctgttttttttttccccctgggaatttatttccaactgtaggcacycaagtggatgagggggttcgctcagccagcaagcgcatcgtggcgcccccaggcggccgttctaatatcacatctctgagttaagcaagccttcctcaaa

SEQ ID NO: 366083 - DNA, 201 bp, Homo sapiens
gctagtatgacctatgagattagggatttttaacctgtatcatttttgctgtagagatcaaacccttactatcatataacaatggcatccttagacaaggmtaaggcatttctaggagcaaggatgtattggtactcaggctgggagcttagggtgtgaaaacatgttcatgtatatgtatatatgtttctgtgtgtttgc

SEQ ID NO: 366084 - DNA, 201 bp, Homo sapiens
tccccctgatgttcacaggtctggatatagcatttgcccctttgctgacatttcatgcttgttgaagggagtgatgatcacaccagtggctcagggctgcrtgtccttaggctggtcatatttcataactggtctcagttcagacagaaactggcccctttccaaaacccagtttagttcagttctttgctgggaagatga

SEQ ID NO: 366085 - DNA, 201 bp, Homo sapiens
gccggcttctctggcctggtccccggggagggacggagacccggggtccgggtggcggagcgcggcggtcagtccagccggcgccacacagactgagcgaycctggggtttggggaaaacaaaacaaagaggaaacccaaacagtggcacggagaactttggattatttatcctcccttcccaccgccggtagttccccag

SEQ ID NO: 366086 - DNA, 201 bp, Homo sapiens
cctgggatggcagggaaaggatgaccccctcagaggatgatattttctttccatcccctccttaccccacaagccctgcaaaatctttggtgacacagaaygtgagattaactccttctttctgtatttgcgtttatactgggcatctcaaccggcgtagaaaatcgaacggctttaacactcacttctttatcaaagagc

SEQ ID NO: 366087 - DNA, 201 bp, Homo sapiens
  misc_feature (1)...(201): n = A,T,C or G
gatatttacatggaagatggcttaataaagtatgtatatggaattcttctctttattgttttgcacttcctccttcattaatggctcataaaggaggttgnattacatgaatgtagtgaaaaaaatcttaatttaatcaacagaatgaagtgagatactgagggcaaatttgggcagaaagtattgatgagcattctacgg

SEQ ID NO: 366088 - DNA, 201 bp, Homo sapiens
aaaatctttggtgacacagaatgtgagattaactccttctttctgtatttgcgtttatactgggcatctcaaccggcgtagaaaatcgaacggctttaacwctcacttctttatcaaagagcctggatcattccatggataatgtagaggcttttgggaagggtagtgtttgggaagactgccctgagttgaaccactctg

SEQ ID NO: 366089 - DNA, 201 bp, Homo sapiens; identical to SEQ ID NO: 79156

SEQ ID NO: 366090 - DNA, 201 bp, Homo sapiens
agacaaaggaaaagagtttaaagtttggaggtaactttgccagaggtcacattctgctagtcataagcaatttttttcaaagtttttgcctttttttttttgttgttgttgttctctggctaccttaattcttaagcttttagaggctcctttctgaatagacccaagcacacattgaaatttctttttgtgctgttgtca

SEQ ID NO: 366091 - DNA, 201 bp, Homo sapiens; identical to SEQ ID NO: 79158

SEQ ID NO: 366092 - DNA, 201 bp, Homo sapiens
aaataagggaaaacttctaatttcttaataaatgccactgggttggttagcatatttgaaaacatgaattctacattagggtaagatgggagagatcaatwataaaacaagtctttgtgttgagaaacctgggaattattttcgtaagaaatgcctcctaaaattaaccctttgctgaccacttactgctgcaggaaagga

SEQ ID NO: 366093 - DNA, 201 bp, Homo sapiens
cttcatcagtcgggatttagcctgtcaggtgagtgggacaggctcatcaaaagataagagaagggggaaggggaagatcaatgttctgaggccacagggtrttcctcagaactcaacctgaaggagttttccagcctagcactggtgtcaactttagggagaaggttactggggcaagcaggaagggtccctgaattgaca

SEQ ID NO: 366094 - DNA, 201 bp, Homo sapiens
taaagtgttcatttgttattttaaattttgagcaggtatgtgctgattcttagccaggttattccttttcctcaaatactaggagaaggcctcaggtatakaaagagccctgaacattagtagctgtgaccaagccagctgggcattgggaggaattctgaagaaatagatttcctgagagaattcaagtctatgtggcaa

SEQ ID NO: 366095 - DNA, 201 bp, Homo sapiens
cgggaggggggcggaggcgggcggaggcggcggcgcggccagcgcaccattcactccacctgatctcggggcgctgtgcgctgaggaaggcgcgggcgagycggagcagaagaaggagggagggagccagccgctgcagccaccaccgccaccatgtcctaccaaggcaagaagaacatcccgcggatcacggtgagtccg

SEQ ID NO: 366096 - DNA, 201 bp, Homo sapiens
tggagtgcagtggcaccatctcagctcactacaacctccacttcctgggttgaagcgattctcctgtctcagtctcctgagtagctgggactacaggcacrcgccaccacaacccggctaattttttgtattttcagtagagacagggtttcaccatgttggccaggctggtcttgaactcctgacctcaagtaatccacc

SEQ ID NO: 366097 - DNA, 201 bp, Homo sapiens
aggtacgttcctctttctctacccttactgtggctttgcttctcacccctgcctctaggcggcagagtacaacatctttgaagggatggagctgcgcgggkctcctctggttgtcatctgccagggcaagatcatgctggaagatggcaacctgcacgtgacccagggggctggccgcttcataccctgcagcccgttctc

SEQ ID NO: 366098 - DNA, 201 bp, Homo sapiens
aaaacaaaaatgcgtataaataaatatattcacatatttatatttattgtatttattgtattatactttctatacacacactatatatatatatatatatwcacacatatacagatatacgtatatatatgtgtttgtatatatatgtgtattagccctaccctaggattgtggaatttgagctccacactccagtttggg

SEQ ID NO: 366099 - DNA, 201 bp, Homo sapiens
tcagatgacaatgctgtgctatactattttactagtgagggatagaggcactgggaagctgagtaaagtgacacagttaggaagtggtagatctgagatgkggatataggctatctaattccagatcctgccaaaattatccataacctttgtgcagcactgcatcctcacagttcgtggaggtgggagccaccagtttga

SEQ ID NO: 366100 - DNA, 201 bp, Homo sapiens
attccatggataatgtagaggcttttgggaagggtagtgtttgggaagactgccctgagttgaaccactctgggtagggaagttctcaaattacaacccasttttggcccagaatactgtgggctgagaaggctctaatggttagagaccaaaattatccccctttcctcaaaatgattctcagttccccagtcccaccta

SEQ ID NO: 366101 - DNA, 201 bp, Homo sapiens
ccaagaacaactacacagacttaatgtactattaaagagggtgttgaaaatttttgttcaaagagagctttttttcccaaatgacttttcccacatttttrtagtactttattaaaaataatttaaattcgaataattcaaaataaggccagtgtatttttttaaaaaataaatgactcttcaagtctgaaggtgagaacc

SEQ ID NO: 366102 - DNA, 201 bp, Homo sapiens
atggttagagaccaaaattatccccctttcctcaaaatgattctcagttccccagtcccacctatttctgtaaatcactgtattagtagtttatttggggwgagatctaaatagatctttacatataaaccttacaacttaagatatttaagcacaaggtaaaacctgcccattagttccctaagggtaggatctgtatct

SEQ ID NO: 366103 - DNA, 201 bp, Homo sapiens
atgtacagcatcctggatagttatccagcttctctttgaacactacccaagacaaaagttgacttccacttgaggaccttattaaagaccggacacttctktttgctaggaagtttagtcttgtcttagtaaatctgtctccggtgccttctacccactggatgcttgcagatgcatggtgagcttttcctggcttacctg

SEQ ID NO: 366104 - DNA, 201 bp, Homo sapiens
gctaacattgctttaatgcaggtacttacccagagcctaggaggaagcagttgctcaatacattttgttgagtgaaatggcttaaagagcatgagtgaatwaacaaatgagataagcaagtatagtttcagaggcagctgagactgagagagatgaacaataagtgacctggtatgattcttgaagggcagtatagacaaa

SEQ ID NO: 366105 - DNA, 201 bp, Homo sapiens
atgatataatctggccaggattgaggccacagtgcagatgcaggtcacacctcctgagccactgagactaacacaagttattttagagaaggggttgagtrggtctccaaagcatattggccaccatggccttcatgaccctggctgtgtccctgctccctgttgacttctgcttcttttctccactggtgttaacttggg

SEQ ID NO: 366106 - DNA, 201 bp, Homo sapiens
acctgtcctcgccgtgtccccttcttgcctgcgttcagtccgactcatgtttcaatgtatcgtttatgggactggacagctaacgtggctgcagtgggaakgatcaactttatgtgtgtgtgtgtgtgtgtgtgtgtgtgtgtgtgtgtgtgtgtgtgccttcgatgcactttacatttttcatttcttttctccctcaca

SEQ ID NO: 366107 - DNA, 201 bp, Homo sapiens
gtctgcccttgctcttctctttgctggcttctctgtcatccacaccactccccggtatccctccaacctcctccctctggcaaccccaaccccatagcaaygtcctttgatccttctgatcgaagctcatctatttagaagggccttcactgaccacatccattgtcactctatcatcacatcctcctttatttattttat

SEQ ID NO: 366108 - DNA, 201 bp, Homo sapiens
ttttcttcttcatttcttcagtgctgcttgagctctcaatatgtgcaaggcaccatcataagtaccttgctaaagacagaacctgctccaaggtacctcasaatttaggtggaagaaacagaggggaatgtagacaagcaatgaaactagaagatgaggtaaaacagaaagagggctggccattgttggagaatcagaaaa

SEQ ID NO: 366109 - DNA, 201 bp, Homo sapiens; identical to SEQ ID NO: 79145

SEQ ID NO: 366110 - DNA, 201 bp, Homo sapiens
aaacagtctaagacgacagcatctttagccattcgttcaacaaatatttgttgagcatctactatacgccaagccttggacggggaagatgtaaaagacarggttcctttcctcatggaccaagctacagttgtgtcatgacccaaactgtgatgtaactgtagctgtgatgaatgccacaacaggcccactgctatcccc

SEQ ID NO: 366111 - DNA, 201 bp, Homo sapiens
cctgaggaggcagatggacttcaatccaaagtctgcgttctcagtttatttcctcttgtgaatccttagagtggaagtttctctggtttcccctcccgctrctatttccctaccttgggaagatctgttctcagtcaggaaaagagtaggggcatttttccatttggatgagtttattgtgtgtgtttattaaattcagct

SEQ ID NO: 366112 - DNA, 201 bp, Homo sapiens
ttgtgcagcaagcgaatggtgaagctagcattgaaacccagacaagctgactctaaactgatgttcttaattattggcagtacagtaatgcctcttgctgrttgagtaaatgaaggaggtagggagaaatcccatttttggtggcaatggcctttgcttaaatattgtgtcatctcatgttatttaatttggagctagagg

SEQ ID NO: 366113 - DNA, 201 bp, Homo sapiens
ttctagatccctgaggaattgccacactgtcttccacaatggttgaactagtttacactcccaccaacagtgtaaaagcattcctatttctccaaatcctytccagcatctgttgtttcctgacttcttaatgatcgccattctaactggcgtgagatggtatctcattatggttttgatttgcatttctctagtgaccag

SEQ ID NO: 366114 - DNA, 201 bp, Homo sapiens
gaggttgcagtgagccaagatggcgccactgcactccagcactccaccctgggtgacagagctaggctctgtctcaaaaacaaacaaacaaacaaacaaamaaaaccagcttgtgctttcatcaatcatagcaattctgacactgttagtctcctttgagagtaaggagacttacttactctcatatcttacatatcttgt

SEQ ID NO: 366115 - DNA, 201 bp, Homo sapiens
tctaaggtgtaaatgttttcatcctttgatgaaatcagtgcatctaatcagaaggagacaggaaatttgaatatgtcattacctcttgtgatggatatatktgtttgtttgtttgtcttttgttttttgagacggaggtttgctcttgttgcccaggctggagtgcagtggcgcgatctcagctcacggcaacctccgcct

SEQ ID NO: 366116 - DNA, 201 bp, Homo sapiens
ataaaaactaacgttttttagtttagcacgaagcagtgcggttgtgctttgtctatagtgaattggatggtgtgtgtgtgtgtgtgtgtgtgtgtgtgtgkagtgggggaatgggtggctactccatctttgcaagctgaacaaaggaagtgatcagctggcccctgggaggctctgcagccgccctagggcagagcttta

SEQ ID NO: 366117 - DNA, 201 bp, Homo sapiens
gctgggatggtcatttacaaaaatagaataaataaaaactaacgttttttagtttagcacgaagcagtgcggttgtgctttgtctatagtgaattggatggtgtgtgtgtgtgtgtgtgtgtgtgtgtgtgtagtgggggaatgggtggctactccatctttgcaagctgaacaaaggaagtgatcagctggcccctggga

SEQ ID NO: 366118 - DNA, 201 bp, Homo sapiens
tgagtaagtaaatgtaagaacatatagaaaaaaatgcatacttcggggcagtaacttctatcttaaaccatgtgtttgaccattttacctgagtagtcacracagcccagctaattcgagcttgctgagtgaggttctgtagctcaccagcttttcaggtggctcctttttgtatttctatgcctttgtgggttgtctttc

SEQ ID NO: 366119 - DNA, 201 bp, Homo sapiens
ttctatttcagctctatgagatcttcacctgcctgggagagctgggggccattgctcaagttcatgctgagaatggggatatcattgcccaggtaacaccrtgcagctccctggagcgtgctttgggtctgcattccattttcttcttcatttcttcagtgctgcttgagctctcaatatgtgcaaggcaccatcataagt

SEQ ID NO: 366120 - DNA, 201 bp, Homo sapiens
ctctggctgcagatggcagacctgcatgccgtcccaaggggcatgtacgatgggcctgtgtttgacctgaccaccacccccaaaggtggcacccccgcagkctctgctcggggctctcctactcggccgaacccacctgtgaggaatcttcatcagtcgggatttagcctgtcaggtgagtgggacaggctcatcaaaaga

SEQ ID NO: 366121 - DNA, 201 bp, Homo sapiens; identical to SEQ ID NO: 79160

SEQ ID NO: 366122 - DNA, 201 bp, Homo sapiens
cgcggatcacggtgagtccgggcgccgctgctccctccctcctcgctcgctccctgtccgctgcgctgcgggcggggtcggctcggatcccgccggcttcyctggcctggtccccggggagggacggagacccggggtccgggtggcggagcgcggcggtcagtccagccggcgccacacagactgagcgaccctggggtt

SEQ ID NO: 366123 - DNA, 201 bp, Homo sapiens
ctagtgctgactgtcttgtctttccaaagagctgtggaaattatcatccaaaaaaagaaagaaagaaagaaaaaagaaaaaaagaaagagaaaaagctgaytgggacaaaagctcaatttttacttatctccccaactcaggagattgaaccacagctctcatgctattctatgctggaggtatgccacatgtatctgcca

SEQ ID NO: 366124 - DNA, 201 bp, Homo sapiens
aaaaaaagaaagagaaaaagctgattgggacaaaagctcaatttttacttatctccccaactcaggagattgaaccacagctctcatgctattctatgctrgaggtatgccacatgtatctgccacttgctttaacatccagtatatatttgctagttttcctgtttgggataggcagagaaccgatattttttttccctc

SEQ ID NO: 366125 - DNA, 201 bp, Homo sapiens
actggcagttttgggggttcgacagatcacagcaagggatcttcactgtctcgcgatgggcctggtttacagatacataatgattatcacttaaatggatkaattgatttaaaattgttcctaataatagcccatacctgttgagtgtttattttgtcaggtattatgtttttttatgccttacatgccttgtttcgttga

SEQ ID NO: 366126 - DNA, 201 bp, Homo sapiens
cttaaacctacatacccaactgaaattaaaatgcatgtccctcaccatcacactctttttggtgtctccgcctctgcctctctaccattgctgttacttgrcattggtagggcaaatggtttccagaccatctgcactgctgggaggcatatttttcttgtcactgtcaacaaatcccacaacatggtctttcctaccttt

SEQ ID NO: 366127 - DNA, 201 bp, Homo sapiens
ggttgttgtagaaaggtagttaagatatgtggtatgaatcaaaccaacctaaaaagaaatgaaaagtcaagttacttttcagggataaaggagagggaagrtaggcactaggtggaaggctttgacctgagaagatttagggagattctagcttctaaaggaactcacatttattgagaatctgggcttcatcctcacagc

SEQ ID NO: 366128 - DNA, 201 bp, Homo sapiens
ggaactcacatttattgagaatctgggcttcatcctcacagcattcctttgaaaaagatattattttcctcgctttacagtcaggactccaaagcccttcyctttcccaccattccatcaggctaactggcactgattcatcacttgaattcttggactgctttaacaatgaggaccctctttgcactcctgtatgataga

SEQ ID NO: 366129 - DNA, 201 bp, Homo sapiens; identical to SEQ ID NO: 79155

SEQ ID NO: 366130 - DNA, 201 bp, Homo sapiens
ttgagaatctgggcttcatcctcacagcattcctttgaaaaagatattattttcctcgctttacagtcaggactccaaagcccttctctttcccaccattycatcaggctaactggcactgattcatcacttgaattcttggactgctttaacaatgaggaccctctttgcactcctgtatgatagacctaatctttgagg

SEQ ID NO: 366131 - DNA, 201 bp, Homo sapiens; identical to SEQ ID NO: 79161

SEQ ID NO: 366132 - DNA, 201 bp, Homo sapiens; identical to SEQ ID NO: 79144

SEQ ID NO: 366133 - DNA, 201 bp, Homo sapiens
ggtgtggaggagcggatgtctgtcatctgggacaaggctgtggtaaggcatggaggtcatgggagggtggccagagccaaaacatccatgggccagatcakaacctcctgccaccagttgggctggtgacactgcgagtgcagatgggatctcgtacttgctgagatgtctctggaaccatgtggctctggcagtgtggaa

SEQ ID NO: 366134 - DNA, 201 bp, Homo sapiens; identical to SEQ ID NO: 79149

SEQ ID NO: 366135 - DNA, 201 bp, Homo sapiens
gtgcccactgcaccttcagcactgcccagaaagcaattgggaaggacaacttcacagccattcctgagggcaccaatggtgtggaggagcggatgtctgtyatctgggacaaggctgtggtaaggcatggaggtcatgggagggtggccagagccaaaacatccatgggccagatcagaacctcctgccaccagttgggct

SEQ ID NO: 366136 - DNA, 201 bp, Homo sapiens
cttagataaataagtagcaaacatccttggaaccaaaattttgtatacagcctcatttatttccctaggaataattcgtaggtgtgggaataaatgttgggttaaggtttgaaaaatgtccgggttttttatgtatatttcagagctgctctctggaaagttgtccttagctgtactttgtccttacttgtactttgcctc

SEQ ID NO: 366137 - DNA, 201 bp, Homo sapiens
gaccagtctggttcgtttcgggtttatggaaagcccaagccggagtattctgtattctctttctgtggatgccttatatagtttctttatcgcaagcacgycttcactttaatgacaagatgtctagaattgccatcagtgggctgccttatggaaacgtgaattcaagattcaacacagctttagtcatgcttagtgaca

SEQ ID NO: 366138 - DNA, 201 bp, Homo sapiens
attccaaaaaaaatctagggagttgcatgccattggattactgaaccaatagcattccagggcagtccttcctgtcccaaaggaatcctgatgaattgggycccatcccagtgctggccccaaacttggtcaggcagagagcactgtttattttaacaccatatacatcccctgagaacacaggacagcctgagctgtaga

SEQ ID NO: 366139 - DNA, 201 bp, Homo sapiens
ttgctgagtgaggttctgtagctcaccagcttttcaggtggctcctttttgtatttctatgcctttgtgggttgtctttctctgagttcagaagccctgarttgatatatatgtagctatagatatagatataatttcttatatttcaataggccacagggaaaatggacgaaaaccagttcgtggctgtgacaagcacaa

SEQ ID NO: 366140 - DNA, 201 bp, Homo sapiens
aggccacagggaaaatggacgaaaaccagttcgtggctgtgacaagcacaaacgctgccaagatcttcaacctgtatccccgcaagggaagaatatctgtsggttctgacagcgacctcgtcatctgggatccagatgctgtgaagatcgtctctgccaagaaccaccagtctgtaaggcccgctctggtgggagtggagt

SEQ ID NO: 366141 - DNA, 201 bp, Homo sapiens
tggctgataaatggtcaggaaagggtggaattgggagtgaagacttaggtgggaaataacccagacagaatcttttgttaggagcaaagatgaccccacttaaaagatagctgagttcccatacctgttctttaaatgatttactattatcttcttcagtctcttctaacagtgcactattttatactctttagattcttc

SEQ ID NO: 366142 - DNA, 201 bp, Homo sapiens
ctgtgggttctgacagcgacctcgtcatctgggatccagatgctgtgaagatcgtctctgccaagaaccaccagtctgtaaggcccgctctggtgggagtrgagtagaatggagaatgcatgcaaggaacttggtcaggagaaatgtgtttatgtggtgtgccagggtagttagactaggacgggttgcaataataatcca

SEQ ID NO: 366143 - DNA, 201 bp, Homo sapiens
gagatcttcacctgcctgggagagctgggggccattgctcaagttcatgctgagaatggggatatcattgcccaggtaacaccgtgcagctccctggagcrtgctttgggtctgcattccattttcttcttcatttcttcagtgctgcttgagctctcaatatgtgcaaggcaccatcataagtaccttgctaaagacaga

SEQ ID NO: 366144 - DNA, 201 bp, Homo sapiens
atgagtgaataaacaaatgagataagcaagtatagtttcagaggcagctgagactgagagagatgaacaataagtgacctggtatgattcttgaagggcartatagacaaaaaatagtctaacagacaactatctttcttctaataaaaacaaatcacccttgaatgttttttctttttatccttttagttgagtctaccc

SEQ ID NO: 366145 - DNA, 201 bp, Homo sapiens
attctttagatctttagatcagaacataccagcgtaatttttccaaatctcacttgagcttattgaagaactattttcttttttcatttcaggagcaaacscgcatgttggaaatggggataactggcccagaaggccatgtactgagcaggccagaagaggtaagttacaggggatgaaggtgcacacacaacgcatgaa

SEQ ID NO: 366146 - DNA, 201 bp, Homo sapiens
tcagaacataccagcgtaatttttccaaatctcacttgagcttattgaagaactattttcttttttcatttcaggagcaaacccgcatgttggaaatgggrataactggcccagaaggccatgtactgagcaggccagaagaggtaagttacaggggatgaaggtgcacacacaacgcatgaataaacattgttaaaaggc

SEQ ID NO: 366147 - DNA, 201 bp, Homo sapiens
gaactcatttaatcctcaccacagcccaacatgtcagatcctattatcctcaatttacagacaaggaaactgaggctttgggaggttgtgcaatgtacccraggtcacctagcttataagtgtcagaaccaggactcagaaccaggccatctgagagagcctcagctctcagaccctgctttgttaataaaataagggaaa

SEQ ID NO: 366148 - DNA, 201 bp, Homo sapiens
gtttattaaattcagcttgagcagaaagatttttatcacattgtttaaatgaaggcagctgctatactcagaatttcttgctgcacttattcaaaagtgartatatgagagaggaatctttgcctttgggtacaaacaaggatgattttcaagaatttcaagttggcaaaacagtctaagacgacagcatctttagccatt

SEQ ID NO: 366149 - DNA, 201 bp, Homo sapiens
cccagaaaaattgcaccaaagccataaaaggtgcaattcagggtgcaattctccagctgaagggtggaagcctgctgacttctcagcagctgcctgctgaygaaagtcctggtgttgccccagacattagtaatgtagctccacgcatttgctttccgataagtgcactcaggctgcttttgatagaagactacgggaatg

SEQ ID NO: 366150 - DNA, 201 bp, Homo sapiens
aacttacaaagaaccacaaaagcaattgtgtccttcatagataaattaggaaacctagagatgcaaaaagaaaataaacctcctaatcccacatcgctgtkagagtttggctgtatattgtacacatttttaaaatcctatttggccaaactaggatcacagtatatgtattatattttaaccttccatttttgctaaata

SEQ ID NO: 366151 - DNA, 201 bp, Homo sapiens
tctctaaggtgtaaatgttttcatcctttgatgaaatcagtgcatctaatcagaaggagacaggaaatttgaatatgtcattacctcttgtgatggatatwtgtgtttgtttgtttgtcttttgttttttgagacggaggtttgctcttgttgcccaggctggagtgcagtggcgcgatctcagctcacggcaacctccgc

SEQ ID NO: 366152 - DNA, 201 bp, Homo sapiens
gaaaatgtgtcaaagctacaagacattctctgtcataaagaaagaccgtaaggcagcatttctcagaagccagagattggatccaagtctgtggaactcayagccttagataatagagaatttaggtctcatgaggagcaaaggtctcactggattcctagaaatcatattgagaaacttgaggaaagagtgacgaaagtg

SEQ ID NO: 366153 - DNA, 201 bp, Homo sapiens
tgacatcttctgatatgttaggctaggatgggtgagaaatctgcatttctacaaaaacaattcaggcaattctgatgtaagtgatgagtggcccacacttygggaaacatagcactaaattataagccccgtgaggtcaggggctaacattgctttaatgcaggtacttacccagagcctaggaggaagcagttgctcaat

SEQ ID NO: 366154 - DNA, 201 bp, Homo sapiens
tgctgtccctctcctccacattctcttgcttctggcgtgttatctatttgtacttatctgtgtctggaacgctgttgaagattaacagaccattatcgggrgctaggattagggtgctccccacagtccattcccccatccactgtgacccagggcaggccacatcacttgtcaggccctttgataatgacatctttaaaa

SEQ ID NO: 366155 - DNA, 201 bp, Homo sapiens
catttctacaaaaacaattcaggcaattctgatgtaagtgatgagtggcccacacttcgggaaacatagcactaaattataagccccgtgaggtcaggggmtaacattgctttaatgcaggtacttacccagagcctaggaggaagcagttgctcaatacattttgttgagtgaaatggcttaaagagcatgagtgaataa

SEQ ID NO: 366156 - DNA, 201 bp, Homo sapiens
tacattggtgtggtatgcttgttacaatagatgaaccaatattgatacattgaagagagtccagtttacattagaactcactcattgttgagtagttctaygggtcttaacaaatgaaaaatgtcatgtgtctatcattgcagtatcgtctaggacagtttcactgctctgagccacttcagtgctccgcttactcaccag

SEQ ID NO: 366157 - DNA, 201 bp, Homo sapiens
cgggaaacatagcactaaattataagccccgtgaggtcaggggctaacattgctttaatgcaggtacttacccagagcctaggaggaagcagttgctcaawacattttgttgagtgaaatggcttaaagagcatgagtgaataaacaaatgagataagcaagtatagtttcagaggcagctgagactgagagagatgaaca

SEQ ID NO: 366158 - DNA, 201 bp, Homo sapiens
gagcgaactcttccctttctttccttacccatattcttttatagaaggtgtgtttgggttgttgtagaaaggtagttaagatatgtggtatgaatcaaaccaacctaaaaagaaatgaaaagtcaagttacttttcagggataaaggagagggaaggtaggcactaggtggaaggctttgacctgagaagatttagggaga

SEQ ID NO: 366159 - DNA, 201 bp, Homo sapiens
tgagaacgatggcttctagcttcatccatgtccctgcaaaggacatgatctcattcctttttatggctgcatagtattccatggtgtatatgtaccacatwttctttatccagtctatcattggttctatgtctttgctattgtaaatagtgctgcaataaacatacgtgtgcatgtgtctttatagtaggatgatttata

SEQ ID NO: 366160 - DNA, 201 bp, Homo sapiens
acacagacttaatgtactattaaagagggtgttgaaaatttttgttcaaagagagctttttttcccaaatgacttttcccacatttttatagtactttatkaaaaataatttaaattcgaataattcaaaataaggccagtgtatttttttaaaaaataaatgactcttcaagtctgaaggtgagaaccgagaatccacac

SEQ ID NO: 366161 - DNA, 201 bp, Homo sapiens
ttcataccctgcagcccgttctccgactatgtctacaagcgcattaaagcacggaggaaggtaaaaagcattggagctctgaggtggtgcaggagctttgygttccactcacgctcagagatagtaaccatgaacacagggcactgtgatctctagactctcacagagaaattcagtgacagtcttgtccccaagaacaac

SEQ ID NO: 366162 - DNA, 201 bp, Homo sapiens; identical to SEQ ID NO: 79147

SEQ ID NO: 366163 - DNA, 201 bp, Homo sapiens
tgacatggagtggttgctccactgggtatgagtcattgggcgagaaccaggaaagcagcccagtgctcctcactcattcttggagaaaagcaaagaaaagwaaaagaagaagtgtgtaggaactccttctgccctcacccagtgccgcacacacacacccctgccaactgtgaccacccaccgccctcatgccctctgctg

SEQ ID NO: 366164 - DNA, 201 bp, Homo sapiens
acagagtactagagagtgcactagccactgaggcatatgttatcccactttaaatatttagtgcctactgaatcagaaaatataatataaaggatgtctcmcttacttgagtagatatgtttccaggtggctataatattaatacattgcagaagcaagaggtgaaaccctagaataatttgaattaagggcaaacaagaa

SEQ ID NO: 366165 - DNA, 201 bp, Homo sapiens
ccctaaggtgatatacctcagtgggtatctttactcagagatggcatatctgggatcccttgcctcccaagcccagctgcaggcttgtgggcaggcagtaycccagccatgcagggctccagctgttgtgatttcagactctccatgttgtcttgctggtgggggaggtgaggtaagtgtacagtttcctctcaccatgac

SEQ ID NO: 366166 - DNA, 201 bp, Homo sapiens
tcaggggctaacattgctttaatgcaggtacttacccagagcctaggaggaagcagttgctcaatacattttgttgagtgaaatggcttaaagagcatgartgaataaacaaatgagataagcaagtatagtttcagaggcagctgagactgagagagatgaacaataagtgacctggtatgattcttgaagggcagtata

SEQ ID NO: 366167 - DNA, 201 bp, Homo sapiens
gcaaacccgcatgttggaaatggggataactggcccagaaggccatgtactgagcaggccagaagaggtaagttacaggggatgaaggtgcacacacaackcatgaataaacattgttaaaaggcgacgagaatgtgagtaccaggttgcagtattggaacatttcttccaaagaccacttctgattgactctaactcagg

SEQ ID NO: 366168 - DNA, 201 bp, Homo sapiens
atgggtgattcatctaccaaactggcctgtgaaactccacgtgtgagtgattgcagtagctaaaaatagtctcagctgacgctgatggctgagtgttcagmtgcctggccttctggcacagggtgaccctatttttcttacaagaggggaggctttcacattgtctagacactcttcctagctgacagattctggggcacc

SEQ ID NO: 366169 - DNA, 201 bp, Homo sapiens
gggtgaccctatttttcttacaagaggggaggctttcacattgtctagacactcttcctagctgacagattctggggcacctccttccttcctctgttctycgtaggcctgctgttttctccttagcttttagaagtttcaactgacatggagtggttgctccactgggtatgagtcattgggcgagaaccaggaaagcag

SEQ ID NO: 366170 - DNA, 201 bp, Homo sapiens
ctagtgtgatgaatcctaaggcctagcattctgaaggaggcttccttatctagactgttaggactaggaaccagacatgcaactccttcatctgagtgtaygaatagcctgtacttaaaataatagtgagttaattctttttgtttggatagttttatgacttcttttgaaagaactggatataatcctttgaaatgataa

SEQ ID NO: 366171 - DNA, 201 bp, Homo sapiens
ggccaatagaggcttcctctctacatatgttttcatgattgctgagacaggggaacatgacctggtgaatggtctactggctctgaaagcttcccctagaygtggtgtacgtcactgcctctcacatggcactggtcttagccagtcctgtggctatacctaacttccggaagtcagggcgtgcaatgatcctttgtgcct

SEQ ID NO: 366172 - DNA, 201 bp, Homo sapiens
catgattgctgagacaggggaacatgacctggtgaatggtctactggctctgaaagcttcccctagatgtggtgtacgtcactgcctctcacatggcactrgtcttagccagtcctgtggctatacctaacttccggaagtcagggcgtgcaatgatcctttgtgcctggaaagggaaagaataggaaataactggtaaac

SEQ ID NO: 366173 - DNA, 201 bp, Homo sapiens
aaaattgcaccaaagccataaaaggtgcaattcagggtgcaattctccagctgaagggtggaagcctgctgacttctcagcagctgcctgctgatgaaagycctggtgttgccccagacattagtaatgtagctccacgcatttgctttccgataagtgcactcaggctgcttttgatagaagactacgggaatgagtgat

SEQ ID NO: 366174 - DNA, 201 bp, Homo sapiens
ggctctgaaagcttcccctagatgtggtgtacgtcactgcctctcacatggcactggtcttagccagtcctgtggctatacctaacttccggaagtcaggrcgtgcaatgatcctttgtgcctggaaagggaaagaataggaaataactggtaaacagcagtgatgacttcttcacgatgagtttcacatggaggatgata

SEQ ID NO: 366175 - DNA, 201 bp, Homo sapiens
tagccagtcctgtggctatacctaacttccggaagtcagggcgtgcaatgatcctttgtgcctggaaagggaaagaataggaaataactggtaaacagcastgatgacttcttcacgatgagtttcacatggaggatgataattaaagtgcagtacctaacagaaacgggctcgacactgttgttaaaaatagttaatatt

SEQ ID NO: 366176 - DNA, 201 bp, Homo sapiens
aagaatgaaaagtggaggtgcttttctggaaaaataagcctgtaacctttctttgttttctgtagagctggagatagtgaccatttcacttctcatggttrcttttagtatgtgcattttcctttctactcctcttttagagatttctattactaaaaacaaaaaacagaacgttcttttccaggtggtaagaatccttac

SEQ ID NO: 366177 - DNA, 201 bp, Homo sapiens
ccacatacaggcacacatatgcacaatgtgctcagcattgtaaggcggcctgggggtcttagagaagtgtaagtaatggcctttgctgaacacccaaggcraaagaaaacaggctcatgaagaacaacagaataaatgtcatagtgtgcaagaaccattaccaaaggagtagtctagacacaaatgctaggagtccactgg

SEQ ID NO: 366178 - DNA, 201 bp, Homo sapiens
ttaaagcttctactgggacgctggtcatgtcataaaagcaactggcgctggaggcatctgcatctttgacttccacttgcatttagtgcttatggtctgcrctgtattttgaccaattcatatctttaacatttggcaagctgtaggagtggtttctcttgtttttaaattttgttttgttttgttttttctattgcaatt

SEQ ID NO: 366179 - DNA, 201 bp, Homo sapiens
cactcttcctagctgacagattctggggcacctccttccttcctctgttcttcgtaggcctgctgttttctccttagcttttagaagtttcaactgacatrgagtggttgctccactgggtatgagtcattgggcgagaaccaggaaagcagcccagtgctcctcactcattcttggagaaaagcaaagaaaagaaaaaga

SEQ ID NO: 366180 - DNA, 201 bp, Homo sapiens
gaaaggatttgaggaaccatgatgcctaactgccttggctggttattttagacataatggtttgctattgtgtttgcccagagattctgtcctgagaagaytgaggagcaaaggctttcattcagatgtcacctttgtgataaccacagaggctaaggaaaaagtacttaccctctgccagacattgctctcagatgacaa

SEQ ID NO: 366181 - DNA, 201 bp, Homo sapiens
agaagaacatcccgcggatcacggtgagtccgggcgccgctgctccctccctcctcgctcgctccctgtccgctgcgctgcgggcggggtcggctcggatsccgccggcttctctggcctggtccccggggagggacggagacccggggtccgggtggcggagcgcggcggtcagtccagccggcgccacacagactgagc

SEQ ID NO: 366182 - DNA, 201 bp, Homo sapiens
ttcagtcacgcggagaaacattaacaggacacacccagcactttaagctagatggggaagctccacagtagaatggtccaggaacccatttggaacatctrgaattcaaggacaacatttctcatggcctaattactatttcttttctctggaagtgctggacaatgagattttaagggtaaaacgagattttatttttta

SEQ ID NO: 366183 - DNA, 201 bp, Homo sapiens
gcgcctactatgttttattgtcaaatggtttatttcttttgccgcaccatacctttttcatgcaactgagcttcacttcacacaaatgcaccccacccctmccagcttcccagctggtgctggggaagaaacactccccagggagaagagttgaggccagcagggatccttttgcctggtagaggctttgggttttaactg

SEQ ID NO: 366184 - DNA, 201 bp, Homo sapiens
gcagctttcttaaacggcaagaggaggaacatgcctaaatttccatctaccaaacaagctccaaacccctcataagcccagtgaaagtgtgaggctcttcrcctgcaggaccaggagggccttctgctgattggaataatcctactgccttgcctctgactctccccctaagaaattcatgacatgcgtttgctttagaca

SEQ ID NO: 366185 - DNA, 201 bp, Homo sapiens
gtcttgtccccaagaacaactacacagacttaatgtactattaaagagggtgttgaaaatttttgttcaaagagagctttttttcccaaatgacttttccmacatttttatagtactttattaaaaataatttaaattcgaataattcaaaataaggccagtgtatttttttaaaaaataaatgactcttcaagtctgaag

SEQ ID NO: 366186 - DNA, 201 bp, Homo sapiens
ctggccaaagttaagaaatgggtggaggttgtgtgccgctgccatgggtggtcttgcagtgtttgtccagttgactgtaagcccctttgcaggaggtaccrtgtttcccatggccaaaggccctagtgcctggcacaaggcctagcagagcatgtgctgggtggaagttgctggctggctccacagtcccagggcaagttc

SEQ ID NO: 366187 - DNA, 201 bp, Homo sapiens
ggtaccgtgtttcccatggccaaaggccctagtgcctggcacaaggcctagcagagcatgtgctgggtggaagttgctggctggctccacagtcccagggmaagttcacagccacagacagaggtcagtgggtcagaccacagacactcacttcaaggcctgcccaccctggtgtgtgctgaagagtgtgagggtggagct

SEQ ID NO: 366188 - DNA, 201 bp, Homo sapiens
gtcagaccacagacactcacttcaaggcctgcccaccctggtgtgtgctgaagagtgtgagggtggagctcccatgtgatcccatcctggccaggacctgygacctcgtgtcatgacctacccttcctatccctctgctccagctgtactgctgttcttctatttcataatcactcccacttcagctgtctgcccttgctc

SEQ ID NO: 366189 - DNA, 201 bp, Homo sapiens
cacaccactccccggtatccctccaacctcctccctctggcaaccccaaccccatagcaacgtcctttgatccttctgatcgaagctcatctatttagaarggccttcactgaccacatccattgtcactctatcatcacatcctcctttatttattttatactacttctcccttcctcaaattatctttattattgttaa

SEQ ID NO: 366190 - DNA, 201 bp, Homo sapiens
  misc_feature (1)...(201): n = A,T,C or G
tccctccaacctcctccctctggcaaccccaaccccatagcaacgtcctttgatccttctgatcgaagctcatctatttagaagggccttcactgaccacntccattgtcactctatcatcacatcctcctttatttattttatactacttctcccttcctcaaattatctttattattgttaattcctagctcccaccac

SEQ ID NO: 366191 - DNA, 201 bp, Homo sapiens
caaacccaaatagtcagagtgcaaaccctcacagtaaacacaagactctaagctcccagtgtgcctccagccatctcccctgttcatgtggagcttttctyctttgccagcggggatctgcagctatctgggagtgcccactgcaccttcagcactgcccagaaagcaattgggaaggacaacttcacagccattcctgag

SEQ ID NO: 366192 - DNA, 201 bp, Homo sapiens
cactgaccacatccattgtcactctatcatcacatcctcctttatttattttatactacttctcccttcctcaaattatctttattattgttaattcctakctcccaccacacactgtattcactaatatatttatgatacctagaacagaccctaaaatgctgaatgaatgaatggtgacatgctcttctctggctgcag

SEQ ID NO: 366193 - DNA, 201 bp, Homo sapiens
acatccattgtcactctatcatcacatcctcctttatttattttatactacttctcccttcctcaaattatctttattattgttaattcctagctcccacsacacactgtattcactaatatatttatgatacctagaacagaccctaaaatgctgaatgaatgaatggtgacatgctcttctctggctgcagatggcaga

SEQ ID NO: 366194 - DNA, 201 bp, Homo sapiens
attatctttattattgttaattcctagctcccaccacacactgtattcactaatatatttatgatacctagaacagaccctaaaatgctgaatgaatgaawggtgacatgctcttctctggctgcagatggcagacctgcatgccgtcccaaggggcatgtacgatgggcctgtgtttgacctgaccaccacccccaaagg

SEQ ID NO: 366195 - DNA, 201 bp, Homo sapiens
tttattttcttttgcctcaaattttaatttgcctcaaaatttgagaattaacactgcatctaacaaccaatggcttcttttaatctagagaatacaaactkggtcacatttagcagataggaaagcaggggctttaaaaaggtgggaacatggacttgaacccaggtcagtctgactctgagacacagtcctgggtaggct

SEQ ID NO: 366196 - DNA, 201 bp, Homo sapiens
  misc_feature (1)...(201): n = A,T,C or G
caagttggcgggggggtcaggtgttctgagagctcacctgtgcagccaaacgggtttgtcaatcagttgtgcaatgaaatttgttcactgacttcccaacntgccttcctttgcactaaggaggtggtccttcctctcacatacttcctctgctcttctaaccccagtggaatttccccagtgccatgatcacccggaagg

SEQ ID NO: 366197 - DNA, 201 bp, Homo sapiens
cacactctgatcctcctgatcccctcctctgctttgctttttcccccagaacacctaaaactacctaccctatcactatttgtaggccttttcagtgggcmgggctaggagatatacatatatgtgtacacatgtgtacacacacaataaaatgctgcagaaattcctatagaaacttcgaattcaaattcagtcctatag

SEQ ID NO: 366198 - DNA, 201 bp, Homo sapiens
tgcaatgaaatttgttcactgacttcccaacatgccttcctttgcactaaggaggtggtccttcctctcacatacttcctctgctcttctaaccccagtgraatttccccagtgccatgatcacccggaaggtgggggccgccctggcagccggctgtactgtcgtggtgaagcctgccgaagacacgcccttctccgccc

SEQ ID NO: 366199 - DNA, 201 bp, Homo sapiens
acactctgatcctcctgatcccctcctctgctttgctttttcccccagaacacctaaaactacctaccctatcactatttgtaggccttttcagtgggcasggctaggagatatacatatatgtgtacacatgtgtacacacacaataaaatgctgcagaaattcctatagaaacttcgaattcaaattcagtcctataga

SEQ ID NO: 366200 - DNA, 201 bp, Homo sapiens
catttttagtaataaacttttattttagaatagttttacatttacagaaaaattgcatagatgggctatttcccacataccccacattcaatttctcctaytactagcagcttacattagtatagtatatttgttacaattaatgaatcaatagtgatacgttgttattaactaaagtccatactttaaaatccattctca

SEQ ID NO: 366201 - DNA, 201 bp, Homo sapiens
gaggttgcagtgagccaaggtcatgccactgcactccagcctgggtgacagagcgagactccatctcaaaaacaaataaataaataacaactacttgagawtatgtgtgtcagaaagcaacaaaaactcagttcaggaaataggacaacatgggatccaagaagctagaaataaccgcagaatgcaatgaaagcaaatcca

SEQ ID NO: 366202 - DNA, 201 bp, Homo sapiens
gagacacacagtggaggcacagccagcccctggatgcaactgaagaaccagaagcaagtgacagccaagtcagtactcatcatgggaagcacagccccacygctgttcctcaacctcctcagagcctgagaaccaagccctgactccatggctgcctccaccccgtgggcagtcaactcagctgaacccacatccattgcc

SEQ ID NO: 366203 - DNA, 201 bp, Homo sapiens
catgagacagcagaggcatttgttctgggcaggacagcttttctgaagaaatatagtaggtatctaggcagactacagcttcaagagcgaggctaggtacmtcagggtagggctctctcgactttgccttttggggaagggagctgcccttatgtgaagcctgcaagttagaataaacccaagcttaaaacagcaaagacc

SEQ ID NO: 366204 - DNA, 201 bp, Homo sapiens
ggcggccttgctccatttatagtatttgacagtgccaacgtggaccaggctgtagcaggggccatggcatctaaatttaggaacactggacaggtgagtcytggagagtatttcaggatgtgtgtttgcgtgtgcatgtgtgagtgtgtgtatgtgtgtgtgtgtgatatgtgtgcatgtgagtgtgtgtgtgtgtgcgtg

SEQ ID NO: 366205 - DNA, 201 bp, Homo sapiens; identical to SEQ ID NO: 79215

SEQ ID NO: 366206 - DNA, 201 bp, Homo sapiens
gcttaggccttggtttgtgctcctcatacatttggagggcaaagggttgagcctcactgaggatggctctagtgttaaaatccagtctcagtgccactccyccaccccaagtatcctttccgctggggtattttgcagttccctctattggaataggttggggagaagaggctgctggtgttgccattgcctacacttgtt

SEQ ID NO: 366207 - DNA, 201 bp, Homo sapiens
cctacatgttggtctgcttttttcttgttctcttaggagagatgaagccagtattgatttgagcatgctagccttaatcgctgagttatatcggggaatgstgctgctttcttctgcaatctgctcttggatctctttgcaaaactctgatttactccttgtgattatttgggaaacaaatcagaagaaaacaaaactggt

SEQ ID NO: 366208 - DNA, 201 bp, Homo sapiens
tgtattctctattttcttctgatataaagcattgctcttgaaaattcagatggtaacctaagtttcttgcccttataagtcaacttttttttttacctagmtacacaaaagtgtttggtttggtttttttccccctttatctttaaagaccaataatgtcactagaatatgtctttgtgatgattgctttgagtccatact

SEQ ID NO: 366209 - DNA, 201 bp, Homo sapiens
tgaaaattcagatggtaacctaagtttcttgcccttataagtcaacttttttttttacctagatacacaaaagtgtttggtttggtttttttccccctttrtctttaaagaccaataatgtcactagaatatgtctttgtgatgattgctttgagtccatactctaggtatgcagtgtgctctttcagtatgtagtttcca

SEQ ID NO: 366210 - DNA, 201 bp, Homo sapiens
gtaacctaagtttcttgcccttataagtcaacttttttttttacctagatacacaaaagtgtttggtttggtttttttccccctttatctttaaagaccartaatgtcactagaatatgtctttgtgatgattgctttgagtccatactctaggtatgcagtgtgctctttcagtatgtagtttccagactttttgtttta

SEQ ID NO: 366211 - DNA, 201 bp, Homo sapiens
tttttttttacctagatacacaaaagtgtttggtttggtttttttccccctttatctttaaagaccaataatgtcactagaatatgtctttgtgatgattrctttgagtccatactctaggtatgcagtgtgctctttcagtatgtagtttccagactttttgttttatatctctataaagttttcaggatttgttcctca

SEQ ID NO: 366212 - DNA, 201 bp, Homo sapiens
tggtttcctttcctctcccccttacattttttatgacctatcttaactttggcaggttcgatacagaggaggaggctatagcaatcgctaacgcagctgaygttgggttagcaggtaggtgtttgtccttgttcaataccagtcataatcatttttctccagctcatgccagatttacccttttaaacatcaccctgggtt

SEQ ID NO: 366213 - DNA, 201 bp, Homo sapiens
attcctttttatggctgagtagtattccatcctatgtataaaccacataggatacagtttatccacttgttgattgatgggcatttgggtttgttccatgyttttgcaattgtgaattgtgctgctataaacgtgcatgtgcaagtatcttttctgtataatgacttcttttcctctgggtagatacccagtagtggggtt

SEQ ID NO: 366214 - DNA, 201 bp, Homo sapiens
gcccaggctggagtgaaatgacacagtcttggctcactgcaatctccgcctccctggttcaagcgattctccttcctcagccctccaagtagctggaattrcaggcacacaccatcatgcccgtctattttttgcatttttagtagagacggggttttgccatgttggccaggctggtctggaactcctcacctcaagtga

SEQ ID NO: 366215 - DNA, 201 bp, Homo sapiens
ccactgaaggaggcacatggagaaattctctattccgcctttttcctagagtggttctctgaggaagcccgccgtgtttacggagacattatccacacccyggcaaaggacaggcgggccctggtcctcaagcagcccataggcgtggctgcagtcatcaccccggtaggtgacaggatcagcaagatcctagggtgggag

SEQ ID NO: 366216 - DNA, 201 bp, Homo sapiens
tttgtcacctgttcctggtttcctgatgcttttgctggatgtggaagtgtgtttcctagtcctctgtgatgatgttaggtgtggtggcagtgagtggaatkatgcatttctaatgcctgcaaaagtgggatgagccgcaggaggacccaggggctcttctgacttggcatggaggcttcttcctggcattgcctagcacct

SEQ ID NO: 366217 - DNA, 201 bp, Homo sapiens
gatgccactatagctctatagaagcttcccctctagctgtaagagaactatttataccaagaggaatgataagcatgctatgaggtcccttagagttatcrtaaagctggagtaagatgtgtgcacaaggacgtttataacactgagttcagcatttgtctcttccttctcgatggggtgatggtggaggaagacgtaccc

SEQ ID NO: 366218 - DNA, 201 bp, Homo sapiens
ggtcccttagagttatcataaagctggagtaagatgtgtgcacaaggacgtttataacactgagttcagcatttgtctcttccttctcgatggggtgatgktggaggaagacgtaccctgaactaggtcataaatgatgggcagaattctggttgtgcagaagctggaggagagagattctgggcagagggcaccaaggga

SEQ ID NO: 366219 - DNA, 201 bp, Homo sapiens
tcaaataattttcatccttgccttggcctttggtaattaagtttttcccttccacataacctaaataagcttggttttgtctgaaataagtatattttccytcataaatacaaaatgtcaatatatgttaccatcaattacactgtaaggctacaacttggggacaggtatggtggctcagaactgtaatcccagcatttt

SEQ ID NO: 366220 - DNA, 201 bp, Homo sapiens
tgtatcatgtggaaagctttttttcttcctcattacacaggtggagaaacaggtgaatgatgccgtttctaaaggtgccaccgttgtgacaggtggaaaaygacaccaacttggaaaaaatttctttgagcctaccctgctgtgcaatgtcacccaggacatgctgtgcactcatgaagagactttcgggcctctggcacc

SEQ ID NO: 366221 - DNA, 201 bp, Homo sapiens
tcagttgtgcaatgaaatttgttcactgacttcccaacatgccttcctttgcactaaggaggtggtccttcctctcacatacttcctctgctcttctaacyccagtggaatttccccagtgccatgatcacccggaaggtgggggccgccctggcagccggctgtactgtcgtggtgaagcctgccgaagacacgcccttc

SEQ ID NO: 366222 - DNA, 201 bp, Homo sapiens
gggaacaatacttgaagacactatgctgagtgaaataagccagtcacaaaagggcaaatgctgtatgattctacttaatatgaggtacctagagttgtcarattcatagagacagaaagtagaatggtccaggcatggtggctcatgattgtaatctcagcactttgggaggccaaggcaggaggatcgcttaaagccagg

SEQ ID NO: 366223 - DNA, 201 bp, Homo sapiens
aggcatggtggctcatgattgtaatctcagcactttgggaggccaaggcaggaggatcgcttaaagccaggagtctgaggttgcagtgagctatgattgcrccactgcactccagcctgggcatcagatcaagaccgtatctaaaataataataataataataataataataataataacgtagggaactatatacctttg

SEQ ID NO: 366224 - DNA, 201 bp, Homo sapiens
gtctcttttttaaaatttttttaaatttttgattttttttatttgtgtgcttttcattgtccaaacccagaccctgtctcaaaaacaaacaatcaaaaaamacagaaggtcaatgtatgtttccccaagcatcttactcagggttgtccagaaaaatagaaccaatgttttatatatatatatatatgtgtgtgtgtgtgt

SEQ ID NO: 366225 - DNA, 201 bp, Homo sapiens
ctgggtcctgccttctactaggtcccatattaacctctctcctgtatctgtcagctggtctcgagacgtctgtgtttttcctgctcagcatagttacagasagaatccccctgattgcctagactggctaggtttgacttgaaggtcactatttactaaatgtgcaaccttggccaaattacttaactgcactgtctccgt

SEQ ID NO: 366226 - DNA, 201 bp, Homo sapiens
tttcttttctttcgtgtgtgtgtgtgtgtgtgtgtgtgtacaggtgcttattgccaactaatcactgatgcatagcagctgtgtagcatagcagctgtggmgggaactggaggggaacatgcactgactcagtgcttttatctttggggccaagcccacgtgaggaggaaaatggcagtttgagcacatgacaaccaccga

SEQ ID NO: 366227 - DNA, 201 bp, Homo sapiens
aatggaagatgaagccagaaatgttgattgaaactacttgtgggggagagggtgttgaatacccactaatgaatttaaccttattttataatcaggagtcrtcgaaaggcttgggcaaaaatgtcgtgtggaaatctaacaggtgtgcaggtggattgaatagtagaaaacaggaagagggtctcgataggagatagtgag

SEQ ID NO: 366228 - DNA, 201 bp, Homo sapiens
taagaaagggtgaggagaatttggctgacaggtttggagaggatggttggtgattggagtaatggaagatgaagccagaaatgttgattgaaactacttgkgggggagagggtgttgaatacccactaatgaatttaaccttattttataatcaggagtcatcgaaaggcttgggcaaaaatgtcgtgtggaaatctaaca

SEQ ID NO: 366229 - DNA, 201 bp, Homo sapiens
tttaaccttattttataatcaggagtcatcgaaaggcttgggcaaaaatgtcgtgtggaaatctaacaggtgtgcaggtggattgaatagtagaaaacagsaagagggtctcgataggagatagtgagagtagaattgaagcaagaggtgactttcaaaggttttgagatgaaaaagtggacaagaccaacctgggacttt

SEQ ID NO: 366230 - DNA, 201 bp, Homo sapiens
taaatgggaagaatagagtaagaagaaaactaagaaagtagtttcttccttctaatattatattattaaacctggagtcaacgcagtgaaattttttaccstgtccttcaaagctctccctctgaaggaatgcatccagcgatccctacgagtacaagagagtcttagcactcattcatccatcagctgtttactgagcac

SEQ ID NO: 366231 - DNA, 201 bp, Homo sapiens
tttaaaatttttttaaatttttgattttttttatttgtgtgcttttcattgtccaaacccagaccctgtctcaaaaacaaacaatcaaaaaaaacagaagktcaatgtatgtttccccaagcatcttactcagggttgtccagaaaaatagaaccaatgttttatatatatatatatatgtgtgtgtgtgtgtgtgtgggt

SEQ ID NO: 366232 - DNA, 201 bp, Homo sapiens
ggatgtggaagtgtgtttcctagtcctctgtgatgatgttaggtgtggtggcagtgagtggaatgatgcatttctaatgcctgcaaaagtgggatgagccrcaggaggacccaggggctcttctgacttggcatggaggcttcttcctggcattgcctagcacctctgaaaagatcttccagtatttatcatttttaaaaa

SEQ ID NO: 366233 - DNA, 201 bp, Homo sapiens
taaaagattgtatcatgtggaaagctttttttcttcctcattacacaggtggagaaacaggtgaatgatgccgtttctaaaggtgccaccgttgtgacagrtggaaaacgacaccaacttggaaaaaatttctttgagcctaccctgctgtgcaatgtcacccaggacatgctgtgcactcatgaagagactttcgggcct

SEQ ID NO: 366234 - DNA, 201 bp, Homo sapiens
  misc_feature (1)...(201): n = A,T,C or G
acccggaaggtgggggccgccctggcagccggctgtactgtcgtggtgaagcctgccgaagacacgcccttctccgccctggccctggctgaggtgagccnctctccctgtgtttgtacaaagcagacaaagttcaaaaattgatgtttatctgggacagaaagaagcaattttggagcctacttctttgcttacgcctcc

SEQ ID NO: 366235 - DNA, 201 bp, Homo sapiens
ataggaagatcaaacagctagaagatatcaaagaccaaggaggaaggtggcactcttgcttctgaatctctgcaaatgtggttccttctacaaaaggaaaycagcatgctttattgttaacctactttttttgaaaaagaaaaaaaatggaactagttatagttttctgcagtttaaacattctaaaagattgtatcatgt

SEQ ID NO: 366236 - DNA, 201 bp, Homo sapiens
taagaagtatgttctaggcttaaagtataataataataaaaaaagaagtatgttctaggaaatgaagcaatgaaaacaaagagtctgtagaaattagacayatgactgtcacaagattcggtacctgaagtagatgataaaatttcggagatcttatggagtttaaagcaaactatagagaggcaaaaaatataatagaaa

SEQ ID NO: 366237 - DNA, 201 bp, Homo sapiens
atacccgtccagtagtaggagttctggagtgaaataattgggaaaatggaggaagtgacattaccaagtaaataatagatggaaacttctcagagttaggrgaaaataattattctgcagattgaaagatttcactgcttaccaagtaggatgaatgaaaagggaatatatatatatcttctctatatatatatattctat

SEQ ID NO: 366238 - DNA, 201 bp, Homo sapiens
gagtcctggagagtatttcaggatgtgtgtttgcgtgtgcatgtgtgagtgtgtgtatgtgtgtgtgtgtgatatgtgtgcatgtgagtgtgtgtgtgtgygcgtgtgtgtgtgttacaaagatcccaccacctctactgccttatatcccataaggaaacttttgggttccttccattattcattctttattcattgact

SEQ ID NO: 366239 - DNA, 201 bp, Homo sapiens
catgtttgctgtttctctttatagcttgcaagccaggctgggattccttcaggtgtatacaatgttattccctgttctcgaaagaatgccaaggaagtagrggaggcaatttgtactgatcctctggtgtccaaaatttcctttactggttcaacaactacaggaaaggtatgtgactcaagtttcaaagaaaacaaatgt

SEQ ID NO: 366240 - DNA, 201 bp, Homo sapiens
ctcggcctcccgaagtgctgggattacaggcacgagccactgcgcccagccccacactcagataatttctgtgtgtgtgtgtgtagagacagatctcaccrcattgcccaagctggtgttgaactcctggccacaagcaaccctccctccttggccttccaaagtgttgtgattacgggcatgagccgccacacctggtcc

SEQ ID NO: 366241 - DNA, 201 bp, Homo sapiens
acaagcaaccctccctccttggccttccaaagtgttgtgattacgggcatgagccgccacacctggtcccataatattgttaataatccaatgtatccctktatctgttttttgttcattggaattttttaaattatggcaaaatatgcataacataacatttaccattttaaccatttttaagtgtacatttcagtggta

SEQ ID NO: 366242 - DNA, 201 bp, Homo sapiens
tacctaagcatatcataaagctgttcagaaataactcagagccagtctcgtggatggaaatgtagtgcctgagtcacattctgcttaaagttgtaacagayacagaggagttaaaaaaatagctgagcgtgatgatgtgtgcctgtggtcccagctactcagtagtaggctgagctggggggatcacttgaaccaaggaag

SEQ ID NO: 366243 - DNA, 201 bp, Homo sapiens; identical to SEQ ID NO: 79212

SEQ ID NO: 366244 - DNA, 201 bp, Homo sapiens
tttattctttaatagtatccaaaaatagattttgtttgcaactatatgaataactgctgtttcaccattctgatttttttccatgttactgttttggttgtttttttttttaaacttgtttttgtacattttttaatgtaccaatacttcttccatagatataataaattatttcatatcgtggttacaatacttagaaga

SEQ ID NO: 366245 - DNA, 201 bp, Homo sapiens; identical to SEQ ID NO: 79213

SEQ ID NO: 366246 - DNA, 201 bp, Homo sapiens
ggcatgtgcatgtaatcccagctactcaagaggctgaggcaggagaatcgcttgaaccctgggggcggagattgcagtgagccgagatggtgtcactgaactccagcctgggcaacagagtgagactcagtctcaaaaaaaaaaatcacaacctcacactctgatcctcctgatcccctcctctgctttgctttttccccc

SEQ ID NO: 366247 - DNA, 201 bp, Homo sapiens
gcatgtgcatgtaatcccagctactcaagaggctgaggcaggagaatcgcttgaaccctgggggcggagattgcagtgagccgagatggtgtcactgaactccagcctgggcaacagagtgagactcagtctcaaaaaaaaaaatcacaacctcacactctgatcctcctgatcccctcctctgctttgctttttccccca

SEQ ID NO: 366248 - DNA, 201 bp, Homo sapiens
tcgtgtggaaatctaacaggtgtgcaggtggattgaatagtagaaaacaggaagagggtctcgataggagatagtgagagtagaattgaagcaagaggtgwctttcaaaggttttgagatgaaaaagtggacaagaccaacctgggactttatctgggagcagggaagactccaggcccaagtggctggacaaaaagtcat

SEQ ID NO: 366249 - DNA, 201 bp, Homo sapiens
gatttacttctttcttctgattctttcctatattccttcacctcatttccaaagttttctagcctcagttcatgttggttgttcttttgtgtcttgatgtrattttcttgtcatcttttaccttgttttgaaattgtaagttacagtttgggtctggtttttaatgttgtttgttttgttttgttttgttttgtttttgag

SEQ ID NO: 366250 - DNA, 201 bp, Homo sapiens
catgtgcatgtaatcccagctactcaagaggctgaggcaggagaatcgcttgaaccctgggggcggagattgcagtgagccgagatggtgtcactgaactccagcctgggcaacagagtgagactcagtctcaaaaaaaaaaatcacaacctcacactctgatcctcctgatcccctcctctgctttgctttttcccccag

SEQ ID NO: 366251 - DNA, 201 bp, Homo sapiens
atgaggtcccttagagttatcataaagctggagtaagatgtgtgcacaaggacgtttataacactgagttcagcatttgtctcttccttctcgatggggtratggtggaggaagacgtaccctgaactaggtcataaatgatgggcagaattctggttgtgcagaagctggaggagagagattctgggcagagggcaccaa

SEQ ID NO: 366252 - DNA, 201 bp, Homo sapiens
aaattcagtcctatagagtttttacttaatttattttatattatatctgcacctccttctttcctggttcctttttttttttttttttttttttttttttkgagacagtctcgctctgtcacccaggctggagtgcagggtcgcaatcttggctcactgcaacctctgcctcccaggttcaagcaattttctgcctcagcc

SEQ ID NO: 366253 - DNA, 201 bp, Homo sapiens
cttacattttttatgacctatcttaactttggcaggttcgatacagaggaggaggctatagcaatcgctaacgcagctgatgttgggttagcaggtaggtrtttgtccttgttcaataccagtcataatcatttttctccagctcatgccagatttacccttttaaacatcaccctgggttttgagacagaaacttcaatg

SEQ ID NO: 366254 - DNA, 201 bp, Homo sapiens
ttatatctgcacctccttctttcctggttccttttttttttttttttttttttttttttttgagacagtctcgctctgtcacccaggctggagtgcagggkcgcaatcttggctcactgcaacctctgcctcccaggttcaagcaattttctgcctcagcctcccgagtagctgggattacagatgcccgtcaccacaccc

SEQ ID NO: 366255 - DNA, 201 bp, Homo sapiens
aataataataacgtagggaactatatacctttgtatggtaaaattaaagttgttcttatttaccataagcaataatagctgtttccacaaaacttattttmtcttttataatttatgacgcagtatacctctttagatgcaacttgaaattggatctctattactcatcaaagaagggtcagttagcatgagcaatatagt

SEQ ID NO: 366256 - DNA, 201 bp, Homo sapiens
tgggtttcaccatcttggccagactggtcttgaactcctgacctcgtgatccacccgcctcggcctcccaaagtgctgggattacaggcatgagccaccaygctcggcctctttcctggtttctaaagactcaggaaatgactgaattaatattctgtatgtactcattatacagaacaacagcttctgaatatcaatttt

SEQ ID NO: 366257 - DNA, 201 bp, Homo sapiens
cagctggcagctggtgctatctgtaccgtcttatccaggaccagaaatctttcttattatgtacttcactggccttgttacatcttgcttatgaagtttakttttattccactgttggggaaatggacccttgaagaactttcatcttctttgttttaataaaaactttttacataaaatgtgaactggacattttcacag

SEQ ID NO: 366258 - DNA, 201 bp, Homo sapiens
atgtatgtttccccaagcatcttactcagggttgtccagaaaaatagaaccaatgttttatatatatatatatatgtgtgtgtgtgtgtgtgtgggtgtayatatatatgtgtgtgtgtgtatatatatgtgtgtgtgtgtgtatatatataatcatagatatgtaggaatataggaagagacttcttataaaggactggc

SEQ ID NO: 366259 - DNA, 201 bp, Homo sapiens
tctggcatgtccagcattgggttcacagagacagctggcagctggtgctatctgtaccgtcttatccaggaccagaaatctttcttattatgtacttcacwggccttgttacatcttgcttatgaagtttatttttattccactgttggggaaatggacccttgaagaactttcatcttctttgttttaataaaaactttt

SEQ ID NO: 366260 - DNA, 201 bp, Homo sapiens
acaaaaagtcatcaatggtgccctcatctttaggcatgatgtctttaatgactcttctaaatgccatatatgtccttttatcctgtgacaggttatttttmctctcaagacccagcccagatctggagagtggcagagcagctggaagtgggcatggttggcgtcaacgaaggattaatttcctctgtggagtgccctttt

SEQ ID NO: 366261 - DNA, 201 bp, Homo sapiens
aagggtgaggagaatttggctgacaggtttggagaggatggttggtgattggagtaatggaagatgaagccagaaatgttgattgaaactacttgtggggragagggtgttgaatacccactaatgaatttaaccttattttataatcaggagtcatcgaaaggcttgggcaaaaatgtcgtgtggaaatctaacaggtgt

SEQ ID NO: 366262 - DNA, 201 bp, Homo sapiens
ccaccacgctcggcctctttcctggtttctaaagactcaggaaatgactgaattaatattctgtatgtactcattatacagaacaacagcttctgaatatyaattttatttgttttaaatattaattttaatatcaccaatgtgcctattgaaaatggtttacttttttggtattttctctttccattctcatttttagta

SEQ ID NO: 366263 - DNA, 201 bp, Homo sapiens
attagctgggcatggtggcaagtgcctatagtcccacctacttgggaggctgaggtggaagaatcacttgagccctggaggtcaaggctgcagtgaactcrtcactactgcactccagcctgggcgacagagcgagaccctgtgtcagcaaaacaaaagactataagttggtgttggaccacattcctcttagcctctgct

SEQ ID NO: 366264 - DNA, 201 bp, Homo sapiens
cagcttacattagtatagtatatttgttacaattaatgaatcaatagtgatacgttgttattaactaaagtccatactttaaaatccattctcagattttwgtctgtacctagtctcctttttctgtttcaggatctggtccaggatatcccattacatttagttgccttgtctccttaatccctcttggctatgaacatt

SEQ ID NO: 366265 - DNA, 201 bp, Homo sapiens
gattccttaggaatattttcccttcttaaatgttgacagtagtctgggcctatcgtgcttataaatcagttttgctaggtataaaatccttggctcacattttttttttttacttgattatcttaaatgtattctctattttcttctgatataaagcattgctcttgaaaattcagatggtaacctaagtttcttgccctt

SEQ ID NO: 366266 - DNA, 201 bp, Homo sapiens
attgctcttgaaaattcagatggtaacctaagtttcttgcccttataagtcaacttttttttttacctagatacacaaaagtgtttggtttggtttttttycccctttatctttaaagaccaataatgtcactagaatatgtctttgtgatgattgctttgagtccatactctaggtatgcagtgtgctctttcagtatgt

SEQ ID NO: 366267 - DNA, 201 bp, Homo sapiens
tttttgtcattatttttccagatattcttcttcctttcatttatgcttttctagccttccaagtagtctattattgtgatacttctacttctgtgccctasttctcttgtctcttcattccatctcttcattcctgattcattcctgatgccttctgcgagtccctcccctcatctgccagcatattaatgcattcttcag

SEQ ID NO: 366268 - DNA, 201 bp, Homo sapiens
gcgggcagatcacaagctcaagagattgagaccatcctggccaacatagtgaaaccccgtctctactaaaaatacaaaaattagctgggcatggtggcacrcacctgtagtccctgctacttgggaggctgaggcaggagaatcacttggactgagaggcagaggttgcagtgagccaagatcatgccaccgtactccagc

SEQ ID NO: 366269 - DNA, 201 bp, Homo sapiens
acctgtagtccctgctacttgggaggctgaggcaggagaatcacttggactgagaggcagaggttgcagtgagccaagatcatgccaccgtactccagccrggtgacagagcaagactccatctccaaaaaaaaaaaaaaaaaaaaaaaaaaaataatagtctctaatctcatccagcccactgcaaatgccattaattca

SEQ ID NO: 366270 - DNA, 201 bp, Homo sapiens
ggagaatcacttggactgagaggcagaggttgcagtgagccaagatcatgccaccgtactccagccgggtgacagagcaagactccatctccaaaaaaaawaaaaaaaaaaaaaaaaaaataatagtctctaatctcatccagcccactgcaaatgccattaattcattcctttttatggctgagtagtattccatcctat

SEQ ID NO: 366271 - DNA, 201 bp, Homo sapiens
cacttggactgagaggcagaggttgcagtgagccaagatcatgccaccgtactccagccgggtgacagagcaagactccatctccaaaaaaaaaaaaaaawaaaaaaaaaaaataatagtctctaatctcatccagcccactgcaaatgccattaattcattcctttttatggctgagtagtattccatcctatgtataaa

SEQ ID NO: 366272 - DNA, 201 bp, Homo sapiens
tggtaaagtgcccagcaagcctattttgtaaacaatggagaaacctgagaaaagtgaattctgcctaccagttatatgaatcgggttgttgtctggtcatragctgctatagccctgccattgcaccaagtccccatgcggtctgtcactgtagctctttactgtcctccctaaattttgttatagtgatgataattctat

SEQ ID NO: 366273 - DNA, 201 bp, Homo sapiens
tatcttggagaaagttccatgcactaataaatagaatgtatattctgcagctattggataatgttctgtaaatatctgctaagtccatttgttccagggtrtagtttaaatctagtgtttctttgttaactttctgtcttgatgacctgtctagtgctgtcaatggagtattgaaatcccccattattattgtgttgctgt

SEQ ID NO: 366274 - DNA, 201 bp, Homo sapiens
taaaatatataaatctgcccaggcgtggtggctcacacctgtaatcctcacactttgagaggccaaggcaggaggatcacttgagcccaacctagacaacmtggtgaaaccctgtctctacaaaaaaaaaaattagctgggcttagtggcacacacatgtagtcccagctacttgggagggtgaggtgagaggatcacctg

SEQ ID NO: 366275 - DNA, 201 bp, Homo sapiens
agtccatttgttccagggtatagtttaaatctagtgtttctttgttaactttctgtcttgatgacctgtctagtgctgtcaatggagtattgaaatccccyattattattgtgttgctgtctatctcatttcttaggtctaatagtaatcattttagaaatttgggagctccagtgttacatgcatatatatttaggattg

SEQ ID NO: 366276 - DNA, 201 bp, Homo sapiens
caggagaatggtgtgaacccaggaggcggagcttgcagtgaggtgagccgagatcacaccactgcactccagcctgggcgacagagtgagactctgtctcaaaaaaaaaaaaaaaaaaaaattaaaaattaaaaaaaataaataataaaaaaatgtccaaaagagaaaaaatcaaggtggaacaaaatttttgtttatggt

SEQ ID NO: 366277 - DNA, 201 bp, Homo sapiens
ctgacaacaggaggaaatggatgtcctagctcatgcagagagtgaatttgctcttcctctgccactttgttcttttcaggttctcagcagattggatgatrcccacctgaatttgtgaaggcaaatcttctttattcagtctactgattcaaatgctaatctcttccgaaaacactcacggacatacccagaaatgatgtt

SEQ ID NO: 366278 - DNA, 201 bp, Homo sapiens
aaatggatgtcctagctcatgcagagagtgaatttgctcttcctctgccactttgttcttttcaggttctcagcagattggatgatacccacctgaatttktgaaggcaaatcttctttattcagtctactgattcaaatgctaatctcttccgaaaacactcacggacatacccagaaatgatgttttaccagctatctg

SEQ ID NO: 366279 - DNA, 201 bp, Homo sapiens
tcaaaaattgatgtttatctgggacagaaagaagcaattttggagcctacttctttgcttacgcctcctgatgcatggtgttgtgtattaatctactggtrattactttaagtcagctgtagctcttttgggaaaaaaatggatgagggatcttctgacatctgcaggccatatgttttcagcctactgtaaaatggtatc

SEQ ID NO: 366280 - DNA, 201 bp, Homo sapiens
caaagcaggaggatcacttgagcccaggagttggagaccagcctgggcaacagagtgagactctgtctctacaatttttttttttttttttttttttttgkgtgacagagtctcactctgttgcccaggctgaagtgtagtggcatgatgtcagctcactgcaacctccacctcccggattcaagagattctcctgcctca

SEQ ID NO: 366281 - DNA, 201 bp, Homo sapiens
tattgaaaatggtttacttttttggtattttctctttccattctcatttttagtaataaacttttattttagaatagttttacatttacagaaaaattgcrtagatgggctatttcccacataccccacattcaatttctcctactactagcagcttacattagtatagtatatttgttacaattaatgaatcaatagtga

SEQ ID NO: 366282 - DNA, 201 bp, Homo sapiens
ccattcaacaaataggaagatcaaacagctagaagatatcaaagaccaaggaggaaggtggcactcttgcttctgaatctctgcaaatgtggttccttctrcaaaaggaaaccagcatgctttattgttaacctactttttttgaaaaagaaaaaaaatggaactagttatagttttctgcagtttaaacattctaaaaga

SEQ ID NO: 366283 - DNA, 201 bp, Homo sapiens
agatcaaggtaaaatgcttattttaacagatcaaggtaatcgttgtaagatgtatataacatgatgttaacttggtagtctaagtgtttagctatcaagcyggattccttagtagaccaaatcttgttatcgaagtgttcttgagctatacccttgatgtttagaaaaaaagtatttgttacctcttgtagggtctgcttt

SEQ ID NO: 366284 - DNA, 201 bp, Homo sapiens
aggagaatggtgtgaacccaggaggcggagcttgcagtgaggtgagccgagatcacaccactgcactccagcctgggcgacagagtgagactctgtctcaaaaaaaaaaaaaaaaaaaaattaaaaattaaaaaaaataaataataaaaaaatgtccaaaagagaaaaaatcaaggtggaacaaaatttttgtttatggtg

SEQ ID NO: 366285 - DNA, 201 bp, Homo sapiens
acccaggaggcggagcttgcagtgaggtgagccgagatcacaccactgcactccagcctgggcgacagagtgagactctgtctcaaaaaaaaaaaaaaaamaaaattaaaaattaaaaaaaataaataataaaaaaatgtccaaaagagaaaaaatcaaggtggaacaaaatttttgtttatggtgtttctcttcagatgg

SEQ ID NO: 366286 - DNA, 201 bp, Homo sapiens
gatcagtgggtcttacaatgcaaacttatccgcagaaagattcaaatgttactacgaagtagttagaaagaaagagggaagcctgggagaaagcgttgtamatccttctcattcaagccagagaaatttccaggatactgggcgaagggcagcaactcagttttctcagcaaactatcctcatctaacagggctccaggaa

SEQ ID NO: 366287 - DNA, 201 bp, Homo sapiens
tggagtgacccaacagtgagaatcatttttgcactgaagcaaatccaggaaaagtcaatgacgtttcttaaaaatttttaaataaaaacataaaaaaagtktaaatagttatgttgcgtccgataaagaaatatgtttagtcttaaaacttgaactactttgttgaacagtaatgtttcagagaagattgttactaccatt

SEQ ID NO: 366288 - DNA, 201 bp, Homo sapiens
ggccaaagcaggaggatcacttgagcccaggagttggagaccagcctgggcaacagagtgagactctgtctctacaatttttttttttttttttttttttktgtgtgacagagtctcactctgttgcccaggctgaagtgtagtggcatgatgtcagctcactgcaacctccacctcccggattcaagagattctcctgcc

SEQ ID NO: 366289 - DNA, 201 bp, Homo sapiens
gccaaagcaggaggatcacttgagcccaggagttggagaccagcctgggcaacagagtgagactctgtctctacaattttttttttttttttttttttttkgtgtgacagagtctcactctgttgcccaggctgaagtgtagtggcatgatgtcagctcactgcaacctccacctcccggattcaagagattctcctgcct

SEQ ID NO: 366290 - DNA, 201 bp, Homo sapiens
ggaatcgaatggaattttcaatgatgttttcatacaaaaaccacaaaggttaaaataagtaaaaaattaataatagctaaaaaaaatgatgttaaaaggcaaaaaaaaaaaatgaaaacaaaaaagtcattttggtaaagtgcccagcaagcctattttgtaaacaatggagaaacctgagaaaagtgaattctgcctacc

SEQ ID NO: 366291 - DNA, 201 bp, Homo sapiens
tcgggaggctgaggcaggagaatcgcttgaacctgggaggcagaggttgcagtgagccaaggtcatgccactgcactccagcctgggtgacagagcgagaytccatctcaaaaacaaataaataaataacaactacttgagaatatgtgtgtcagaaagcaacaaaaactcagttcaggaaataggacaacatgggatcca

SEQ ID NO: 366292 - DNA, 201 bp, Homo sapiens
gaggaaggtggcactcttgcttctgaatctctgcaaatgtggttccttctacaaaaggaaaccagcatgctttattgttaacctactttttttgaaaaagaaaaaaaatggaactagttatagttttctgcagtttaaacattctaaaagattgtatcatgtggaaagctttttttcttcctcattacacaggtggagaaa

SEQ ID NO: 366293 - DNA, 201 bp, Homo sapiens
ctaatatctttaatacggtttttttgttttggtttgggtttttttttttttttttttttttgatggagtctcgctctgtcacccaagctggagtgcagtgktgcgatctcagctcagtttaacctctgcctcttgggttcaagcgattctcctgactcagcctcctgagtagctgggattacaggcgcccgccaccaggcc

SEQ ID NO: 366294 - DNA, 201 bp, Homo sapiens; identical to SEQ ID NO: 79218

SEQ ID NO: 366295 - DNA, 201 bp, Homo sapiens
attacaggtgtgagccaccgcacctggcccagtttgggtctgttttgtgggcatgtctttctggtatgcttttgttgtctatagggatattattctacttyttattattttttctatttttttcttttttttcttagacagaggctggagtactgtgttgctatcacggctcactgcagcctcgacctcccaggctcaagc

SEQ ID NO: 366296 - DNA, 201 bp, Homo sapiens
tcatttctgaaatgatttacttctttcttctgattctttcctatattccttcacctcatttccaaagttttctagcctcagttcatgttggttgttctttygtgtcttgatgtaattttcttgtcatcttttaccttgttttgaaattgtaagttacagtttgggtctggtttttaatgttgtttgttttgttttgttttg

SEQ ID NO: 366297 - DNA, 201 bp, Homo sapiens
tgactcttctaaatgccatatatgtccttttatcctgtgacaggttatttttactctcaagacccagcccagatctggagagtggcagagcagctggaagwgggcatggttggcgtcaacgaaggattaatttcctctgtggagtgcccttttggtggagtgaagcagtccggccttgggcgagaggggtccaagtatggc

SEQ ID NO: 366298 - DNA, 201 bp, Homo sapiens
catttctcattttaccgctctggagggtagaaatcccagatcgaggtgttgtcagagttggtttcttctaaggcctctcattggcttgcagagagctcagyttttgtctttgtatctcatcagacctcaattttagactcatggagtctgagatgtctgttcacgcccaagtgaggatgtaaagtaagcagttggttatat

SEQ ID NO: 366299 - DNA, 201 bp, Homo sapiens; identical to SEQ ID NO: 79216

SEQ ID NO: 366300 - DNA, 201 bp, Homo sapiens
tccttgttcaataccagtcataatcatttttctccagctcatgccagatttacccttttaaacatcaccctgggttttgagacagaaacttcaatgaggtrtgtgttttgttgctttccaagtggtggaatggatttggatttgtgcaagtatgtgtacttttcccttgtccccatgatacacatttgggagctctctaat

SEQ ID NO: 366301 - DNA, 201 bp, Homo sapiens
ctaaatttaggaacactggacaggtgagtcctggagagtatttcaggatgtgtgtttgcgtgtgcatgtgtgagtgtgtgtatgtgtgtgtgtgtgatatrtgtgcatgtgagtgtgtgtgtgtgtgcgtgtgtgtgtgttacaaagatcccaccacctctactgccttatatcccataaggaaacttttgggttccttcc

SEQ ID NO: 366302 - DNA, 201 bp, Homo sapiens
gtagctgaaatatctccgcagctgcagggagcccacgcaggaggctgcttcagcggcccttgagaaggctggtagtgagggcccctggccagaatcatggratcggaaacggagagaactgtagaaagatttgggttttgtgcaggggaagagagaaatccaggagcgttctccaggttttcaccctaaatggataaatgc

SEQ ID NO: 366303 - DNA, 201 bp, Homo sapiens
agattccttaggaatattttcccttcttaaatgttgacagtagtctgggcctatcgtgcttataaatcagttttgctaggtataaaatccttggctcacattttttttttttacttgattatcttaaatgtattctctattttcttctgatataaagcattgctcttgaaaattcagatggtaacctaagtttcttgccct

SEQ ID NO: 366304 - DNA, 201 bp, Homo sapiens
tttgcagtgagtgttacagctcttaaagatggcatggacccaaagaatgagtggtagcaacatttattgtgaagagcaaaagaagaaagcttccacagcgyggaaggggacccgagtgggttgtcgctgctgggtgggtggggcgtggtggccagctttttattcccttatttatcccttccagtgttccgtttctgtccc

SEQ ID NO: 366305 - DNA, 201 bp, Homo sapiens
tcagaggaggtcatagggagaaggggaagagtgggtggaacatgtaggacctgtgagttattctaaggacttggtttttactttgagtaaagagggggctrtgtcagggttttaagcagagatatgatctgatttacattttgaaaggccactctaaccacagtgctgagaatagatgaagagtggtggaagcagagagac

SEQ ID NO: 366306 - DNA, 201 bp, Homo sapiens
cagagagacaggttaggaggttgttgcacggatttaggtgggaggccacggtggcttgaaccagggtggtagcagtggacaaggtgaagagttatcccataaaaggatgtattttgaaggtagagcccactggattttctgatggatcattatatagaaagtaggtgaaggagaggggttagtgatgactccagggctttt

SEQ ID NO: 366307 - DNA, 201 bp, Homo sapiens
ccttatttatcccttccagtgttccgtttctgtcccatcagaatgcctttttttcaatcctccctgcgattggctacttttaggatcctgctgattggtgygttttacagagcgctgattggtgcattttacagagcgttgattggtgtattttacaatcctcttgctagctacagagcgctgattggtgtgttttttaca

SEQ ID NO: 366308 - DNA, 201 bp, Homo sapiens
tagctacagagcgctgattggtgtgttttttacagagcactgattggtgcattttacaatctccttggtagctccagatcgctgattggtgcattttacartcctcttgctagctacagggtgctgattggtgtgttttacagggcgctcgttggtgcattttacaatcctcttgtaagacagaaaagttctccaagtccc

SEQ ID NO: 366309 - DNA, 201 bp, Homo sapiens
tggctcacacttgtaatcccagcactttgggaggctaaggcaggtggatcacttgaggtcaggagttcaagtccagcctggccaacatggcgaaaccccayctctactaaaaaatacaaaaatcagctgggcgtggtggtgggcgcctgtaatcccagctactcaggaggctgagccaaggagaattgcttgaacctggga

SEQ ID NO: 366310 - DNA, 201 bp, Homo sapiens
ataaagcattgctcttgaaaattcagatggtaacctaagtttcttgcccttataagtcaacttttttttttacctagatacacaaaagtgtttggtttggtttttttccccctttatctttaaagaccaataatgtcactagaatatgtctttgtgatgattgctttgagtccatactctaggtatgcagtgtgctctttc

SEQ ID NO: 366311 - DNA, 201 bp, Homo sapiens
tgtagttgccaattctgcatgtactagtcctctagaaataggttaaactgaatcaacttgatggaaggaactctccacagggcttgttttccaaagaaaastatagtttggagaagcaaagttacaagcctacctaagcatatcataaagctgttcagaaataactcagagccagtctcgtggatggaaatgtagtgcctg

SEQ ID NO: 366312 - DNA, 201 bp, Homo sapiens
gggaaagccactgaaggaggcacatggagaaattctctattccgcctttttcctagagtggttctctgaggaagcccgccgtgtttacggagacattatcyacaccccggcaaaggacaggcgggccctggtcctcaagcagcccataggcgtggctgcagtcatcaccccggtaggtgacaggatcagcaagatcctagg

SEQ ID NO: 366313 - DNA, 201 bp, Homo sapiens
gaaacttatactctaagaattttgtttgtttgtttgtttttttgagacagggtcttgttctgttccccaggctggagtgcagtggcgcaaccttggctcaytgcaacctccacctcctgggctcaagtgatcctctcaactctgcctcccaaagcgctgagattacaggcatgagccaccatgtccggtagaaattttatt

SEQ ID NO: 366314 - DNA, 201 bp, Homo sapiens
gatggctctagtgttaaaatccagtctcagtgccactcccccaccccaagtatcctttccgctggggtattttgcagttccctctattggaataggttggrgagaagaggctgctggtgttgccattgcctacacttgtttcccatggctggtgtacctgctgggcacgagcactggctcactgccccaagccagccctgc

SEQ ID NO: 366315 - DNA, 201 bp, Homo sapiens
tgggaaatcacctatggaaaggctttgcactgctgccctgcacctagtaggtgctcattaaatgccccttttcactttcccacccttgattctacaggtgmatcaagtaacttttttcttggcatctcctttgatttttctcagggcagaaattcaggtttttttatttgcttctttattagtttgaacagaccgtggcat

SEQ ID NO: 366316 - DNA, 201 bp, Homo sapiens
tcccacatcagcctcccaaagtgctggggttacaagcatgagccaccacacccagcctcttttcttttaacaactttttatgggatttgacctcagtgttyttgtcagaattttatttttatgtgaagttagttttctgaacttttggaagaaggcccagttaggaatatagcttcttttccttcacagtgtaccttttgc

SEQ ID NO: 366317 - DNA, 201 bp, Homo sapiens
tcagaaaactgaatcatgagtggtcattgacttgagcgaaacagaaattgtgggctggccagtgacctaggacaagtagcctggcatagaagggtgggctrggtcagggccttttcctctaggaattcccctctccttcactagagaagagagagagctgttttgctttctgtttctttctctttcttttgcctattaaac

SEQ ID NO: 366318 - DNA, 201 bp, Homo sapiens
gctgtggctatttttcctttttaaaaaaaacatttttattctcttccaccatttctgtctcccgtggtataggttgtgctgctttatctttcttagtctcrgagctcctcagacatcttgtaattttccctgtgagctcatctttaaccccttgcaccgtcggcagccttggcttgtaatatctcccatgggttgtggtaa

SEQ ID NO: 366319 - DNA, 201 bp, Homo sapiens
ccatctcaataataataataaataaagttctagaaacatatgtgctgacacaagaggatcttcacattagagtgttacattaaaggagcaagatataaagkgttatgaaaattttaagatagacgtcccaaatatgtgattcattgggaagataaagcaggttacgaaacggtataattatataattataccatcctgttt

SEQ ID NO: 366320 - DNA, 201 bp, Homo sapiens
cattttacaatctccttggtagctccagatcgctgattggtgcattttacagtcctcttgctagctacagggtgctgattggtgtgttttacagggcgctsgttggtgcattttacaatcctcttgtaagacagaaaagttctccaagtccccactcgacccaggaagtccagctggcttcacctctcataaggacattca

SEQ ID NO: 366321 - DNA, 201 bp, Homo sapiens
tgaaaccccgtctctactaaaaatacaaaaattagctgggcatggtggcacacacctgtagtccctgctacttgggaggctgaggcaggagaatcacttgractgagaggcagaggttgcagtgagccaagatcatgccaccgtactccagccgggtgacagagcaagactccatctccaaaaaaaaaaaaaaaaaaaaaa

SEQ ID NO: 366322 - DNA, 201 bp, Homo sapiens
gtggacccactagcaggcactgggccaggttctagaggtaaaaaggctaagaaataaggtatcacatctgcctggatggggctgcagtatatttgtggaaygcccagctttccttctgggtcctgccttctactaggtcccatattaacctctctcctgtatctgtcagctggtctcgagacgtctgtgtttttcctgctc

SEQ ID NO: 366323 - DNA, 201 bp, Homo sapiens
agaaataaggtatcacatctgcctggatggggctgcagtatatttgtggaacgcccagctttccttctgggtcctgccttctactaggtcccatattaacytctctcctgtatctgtcagctggtctcgagacgtctgtgtttttcctgctcagcatagttacagacagaatccccctgattgcctagactggctaggttt

SEQ ID NO: 366324 - DNA, 201 bp, Homo sapiens
cctggagagtatttcaggatgtgtgtttgcgtgtgcatgtgtgagtgtgtgtatgtgtgtgtgtgtgatatgtgtgcatgtgagtgtgtgtgtgtgtgcgygtgtgtgtgttacaaagatcccaccacctctactgccttatatcccataaggaaacttttgggttccttccattattcattctttattcattgactcttt

SEQ ID NO: 366325 - DNA, 201 bp, Homo sapiens
ctcgagacgtctgtgtttttcctgctcagcatagttacagacagaatccccctgattgcctagactggctaggtttgacttgaaggtcactatttactaamtgtgcaaccttggccaaattacttaactgcactgtctccgttttcttgaacttgcaaatgaggttaatatcaacctcattgggttgtgataaggatttaa

SEQ ID NO: 366326 - DNA, 201 bp, Homo sapiens; identical to SEQ ID NO: 79233

SEQ ID NO: 366327 - DNA, 201 bp, Homo sapiens; identical to SEQ ID NO: 79235

SEQ ID NO: 366328 - DNA, 201 bp, Homo sapiens; identical to SEQ ID NO: 79234

SEQ ID NO: 366329 - DNA, 201 bp, Homo sapiens
aatagtgctgggagggggtgagggtaaacttctttatctgtcactgtcatttttttttaaaggtcctattgcttttacacttctaaccctaaaaaagcctygtcacgcacccagcattcccctagctctgggcttccagagcactgttattcaacagagagtttctatagaaatccaaagtactatctccaaatagcagaa

SEQ ID NO: 366330 - DNA, 201 bp, Homo sapiens
ccaggccccagctttgttccctggtcccctgaagcctgcaaacgtcgtcattaaagggaagggtggggggcagctgtggtgggtagctattaaatgacaaytaaaagatacactagtaaaaaaaaaaattgactgctctgaaaacgagtctactgggcagtgacattcacatttctgaaattaatgcatactctatttgca

SEQ ID NO: 366331 - DNA, 201 bp, Homo sapiens
agtggggctaccaggccccagctttgttccctggtcccctgaagcctgcaaacgtcgtcattaaagggaagggtggggggcagctgtggtgggtagctatwaaatgacaattaaaagatacactagtaaaaaaaaaaattgactgctctgaaaacgagtctactgggcagtgacattcacatttctgaaattaatgcatac

SEQ ID NO: 366332 - DNA, 201 bp, Homo sapiens; identical to SEQ ID NO: 79241

SEQ ID NO: 366333 - DNA, 201 bp, Homo sapiens
gcgacaaaggtagtgcctgagggggaatgggtgagaccatggctgctctgtgggtctacgacaacttatcctgcataggggtttatatcctttttccttaytccatatcatttcaccaacattttctaacagtctgttactcttaaagatgtgttggcaagtgatgtgcatagattcactgaaaatacaaaaggtgaccca

SEQ ID NO: 366334 - DNA, 201 bp, Homo sapiens
cagatgtaacctctggactgattgggggagaagacggccgagtatatgtatataatggcaaagagaccacccttggtgacatgactggcaaatgcaaatcrtggataactccatgtccagaagaaaaggtaagtgttctacaaaattctataacttattgggaaaggatcactaattgctgattccttgttaactcatgtc

SEQ ID NO: 366335 - DNA, 201 bp, Homo sapiens
tcaaccaggatgggcacggtgacctcgtggtgggcgcaccaggctacagccgccccggccacatccacatcgggcgcgtgtacctcatctacggcaatgamctgggcctgccacctgttgacctggacctggacaaggaggcccacaggatccttgaaggcttccaggtgagacaccatctcatcctttctcttctagtgg

SEQ ID NO: 366336 - DNA, 201 bp, Homo sapiens
ggtcccttcacttccctaagggcaatgacctcagctgacctcaaccaggatgggcacggtgacctcgtggtgggcgcaccaggctacagccgccccggccrcatccacatcgggcgcgtgtacctcatctacggcaatgacctgggcctgccacctgttgacctggacctggacaaggaggcccacaggatccttgaaggc

SEQ ID NO: 366337 - DNA, 201 bp, Homo sapiens
tggtgggtcccttcacttccctaagggcaatgacctcagctgacctcaaccaggatgggcacggtgacctcgtggtgggcgcaccaggctacagccgcccyggccacatccacatcgggcgcgtgtacctcatctacggcaatgacctgggcctgccacctgttgacctggacctggacaaggaggcccacaggatccttg

SEQ ID NO: 366338 - DNA, 201 bp, Homo sapiens
tcacctatacaatattgatttattgtgtctcacaggcaatggggaaactgggtacttccctttccagtggccacgtactgatgaatgggactctgaaacargtgctgctggttggagcccctacgtacggtaggtcacacactgtgaaactgtgcttcctttcagtcatgtggctgcttgtacacgtcgtattggaggaaa

SEQ ID NO: 366339 - DNA, 201 bp, Homo sapiens
ggaagcagaagggaattgtggctgcgttttattctggccccagcctgagcgacaaaggtagtgcctgagggggaatgggtgagaccatggctgctctgtgkgtctacgacaacttatcctgcataggggtttatatcctttttccttattccatatcatttcaccaacattttctaacagtctgttactcttaaagatgtg

SEQ ID NO: 366340 - DNA, 201 bp, Homo sapiens
aaggaagttttctcacctatacaatattgatttattgtgtctcacaggcaatggggaaactgggtacttccctttccagtggccacgtactgatgaatggractctgaaacaagtgctgctggttggagcccctacgtacggtaggtcacacactgtgaaactgtgcttcctttcagtcatgtggctgcttgtacacgtcg

SEQ ID NO: 366341 - DNA, 201 bp, Homo sapiens
aggcaaagatataaatgacatcatttctgcattgtggactctcatagtctgatggaagtgacagactttaaaaaaattcctttcagcccagcagcaatgcrcagaatggatttctgtctgtcattaagctcccaatcattgggggtggtgataatttgacaaggtctcgctttaattaaaagtttttttcgtggacacagg

SEQ ID NO: 366342 - DNA, 201 bp, Homo sapiens
tttccgaggccgtggctcagcccaggggaagtaaacttgtgcctcttcagccctcaggtcggtttggctcggccttggctgtgttggactttaacgtggayggcgtgcctgacctggccgtgggagctccctcggtgggctccgagcagctcacctacaaagtaaggctgctgctggatagggttggaggagaatggggtg

SEQ ID NO: 366343 - DNA, 201 bp, Homo sapiens
attccatgatgtgtctgagagcactcactggactccgtttcttaatgcaagcgttcattatatccgagagaactatccccttccctgggagaaggtaggcrtggtcctccaatccttaaaatatttagcaccaaacctgccatgcactgtgtttgcacccgcattgaccccatttgtaccgctctgtaagggctgcccacc

SEQ ID NO: 366344 - DNA, 201 bp, Homo sapiens
tgctctttccgaggccgtggctcagcccaggggaagtaaacttgtgcctcttcagccctcaggtcggtttggctcggccttggctgtgttggactttaacrtggacggcgtgcctgacctggccgtgggagctccctcggtgggctccgagcagctcacctacaaagtaaggctgctgctggatagggttggaggagaatg

SEQ ID NO: 366345 - DNA, 201 bp, Homo sapiens
accaggtagccgggcttgcgattccgtgagccagtttaggctccgtccctcttactgtagggctctttttagtcatcaggcagacagtaccatgcgtattycaaaatctcagctggctcttccgttttagaggcttcttttgaaagtcgacagaagaaactgaggggcatggagggaaggaggagaagggacacagcagcg

SEQ ID NO: 366346 - DNA, 201 bp, Homo sapiens
attgtttttaccctagcatctgcaaaggaggtaagatgaaagtttgcagactgaatgaagtcacttttacttggttaataggaatagctatgactttaaawatatatatatgtgtgtacaatatatttttaattgcacagtatattttccattattgttgagaacaatttgtttcccaacaatattgttggttaatgactt

SEQ ID NO: 366347 - DNA, 201 bp, Homo sapiens
gttttgtcttggattatgtgtgaattttaatcatttatttactttatgcctgctttccttcctttttccctttcattccatctatacccccatatttctarcatctcatcacagaaaattggtggggcctatactccccaggctgttgactcctgccccttaatctctgtattttcttgctctgcagctgttactagaaca

SEQ ID NO: 366348 - DNA, 201 bp, Homo sapiens
taaggttcttgggtcaccaccagagcctcatgtctatctgctgtttgtccttatctagggtgccgtgtatgtctactttggttccaaacaaggaggaatgwcttcttcccctaacatcaccatttcttgccaggtatgtttaccactttagccaggtgcagaaacctagaactcgctgtatcctaactgccaccagggctg

SEQ ID NO: 366349 - DNA, 201 bp, Homo sapiens
acaggtgagcctttttatagaaagcaaaaaatatctggagacaactttgcttgcatctctacacaaatttcatgttaaaatgaaatccagaaaaaacctcrgtcagaagatgcagtgcttctggcctaaggcttttcagatttcagtttatcctcccaaccccaccccccaggagcacagagtttgtttgctgttctggtg

SEQ ID NO: 366350 - DNA, 201 bp, Homo sapiens
aaactccatctcaaaacacaaacaaacaacaacagcaacaaaaacaacagctctgggtcagtaaaacaaccttaaggcctcagggaaatcctgctttactrgattgacagagaaaatgaaagaagatgaaatttaaacaagtgttttctgctgtttctaaattagcctctctgtgtttggtagggaagaatctgaagttat

SEQ ID NO: 366351 - DNA, 201 bp, Homo sapiens
acagtagctttgttgattatgctacgtgtctttactgtctataatgattcttttatttcaggattccatgtcctttatctacaaggctttggaaaggaacrtaaggacaatgttcataggtggctctcagttgtcacaaaagcacgtctccagccccttagcatcttacttcttgtcatttccttatgcgaggcttggctg

SEQ ID NO: 366352 - DNA, 201 bp, Homo sapiens
tcccttgaaagactgaagaaagaaaaattaccaaaacaatgccccttggtttattttaaacggataaagtattacactatgttcttcaaagcccattaacrgacggcatgttttacaggccagctcaaggtttgggagctccctcatcaccgtgaggtccaaggcaaaggtgagcccaaggactgaacttcattgatgttt

SEQ ID NO: 366353 - DNA, 201 bp, Homo sapiens
agttttacagggggttgttttctcagtcgtaaccagtttattcctctttctcttcaacagctcaaaaatgcagaaaaatgattttcacagaaatttgactwcatccctaactgaaagtgttgacaggaatataaactatactgaaagaggagtgttctttagtgtaaattcctggaccccggtaagaattttctgctctaa

SEQ ID NO: 366354 - DNA, 201 bp, Homo sapiens
gaagagtgagattcaatgacattggggtcctgggatcagcatggggacatataagacctctggcaaaaactcagcaaaatgaacccacttctattaggctrcgagaaggaccctttcttttcatcccagtagtcctctcacttaaagtattagtaaaaaggatgagttgtcttctttagaaaaactgaacgtggaggcagc

SEQ ID NO: 366355 - DNA, 201 bp, Homo sapiens
gacggccgagtatatgtatataatggcaaagagaccacccttggtgacatgactggcaaatgcaaatcatggataactccatgtccagaagaaaaggtaartgttctacaaaattctataacttattgggaaaggatcactaattgctgattccttgttaactcatgtccactataaagtgcttacctgaattcatacctc

SEQ ID NO: 366356 - DNA, 201 bp, Homo sapiens
taatggcaaagagaccacccttggtgacatgactggcaaatgcaaatcatggataactccatgtccagaagaaaaggtaagtgttctacaaaattctatamcttattgggaaaggatcactaattgctgattccttgttaactcatgtccactataaagtgcttacctgaattcatacctcctagggtcaggacaccatca

SEQ ID NO: 366357 - DNA, 201 bp, Homo sapiens
ttctacaaaattctataacttattgggaaaggatcactaattgctgattccttgttaactcatgtccactataaagtgcttacctgaattcatacctcctrgggtcaggacaccatcatctgtccatgttttgtgggccccagctgcctgcagttcttacagttctgcaacatttgtgcccagagctaaagtcccactgga

SEQ ID NO: 366358 - DNA, 201 bp, Homo sapiens
tagacacaactttcctcatttcctaatccacagcaattttttcattagtgcctgctttttatcacaaccatccctgaatatgcagctttgcaaagatgtgkcatcactgaaacgaatgcaggactctcgtgtcgtaactgtgaccggcctccacccagtagttcgtgtggtgtcagatgtcactgttatctttgaaatgtc

SEQ ID NO: 366359 - DNA, 201 bp, Homo sapiens
gatatgcacatatgtgcgtgcttgtttgtgtgcgtgcgtacgtgcgtttgtgtgtccgtttttctcttttcactgtgaatcattgaaaattttataaaaaaccagctgtgggccaggtatggtggctcatgcctgtaatcccagcacattgggaggctgaggcaggagaatcgcttgaacctgggaggttgcagtgagctg

SEQ ID NO: 366360 - DNA, 201 bp, Homo sapiens
aaggacgtcatcttacactaaaacacaggtagcaactataaactgatatgcacatatgtgcgtgcttgtttgtgtgcgtgcgtacgtgcgtttgtgtgtcygtttttctcttttcactgtgaatcattgaaaattttataaaaaaccagctgtgggccaggtatggtggctcatgcctgtaatcccagcacattgggaggc

SEQ ID NO: 366361 - DNA, 201 bp, Homo sapiens
tttgggtcatctgctattatcccattcctttaattcagtgatgtctttgggactgaaatgaactatctggggctaatcactcctgcagttagaatcccagrcagctagcttttgtatttctcatatttataaggagttttgttctgtttccctcttagtctgttaactatcatttctcaatcctattattttgcctgcatg

SEQ ID NO: 366362 - DNA, 201 bp, Homo sapiens
tttatgagaactttagtataagaagcatcctgcaatcacaaaagtggaactagttgatattttgaaatcatacttgatttaaccaccttcagaaattctayaaaacactagcaacttccttttatcagacttatgaggtagttacattatttttccttttattgacatgattcatcaaaaaattattttatccaagctcat

SEQ ID NO: 366363 - DNA, 201 bp, Homo sapiens
aggggagctgggagaatatataccccaacttctgtgtcttctttttctctgatctgtcagttctctttattggccaaacccaacccaatcaaagccagagrgccacgaagctagttgaagcaggtgacctcagagtcaccctacaaggtagagaaggatggggagtgggtctggaaggacaaatggaggcccccagcacgc

SEQ ID NO: 366364 - DNA, 201 bp, Homo sapiens
gaatcacctgtagtaattgctattgatgaatgaagtaggaaacaaaagcctttgccaggatgaaatcacagccgactaaaggagatactaatattatttgyaagaggttgggttaggatccagtagcggaacaaggaaaagatgacagtgaggagtcaaatacttccttctgtcggtttttattgttttcagatgaaatca

SEQ ID NO: 366365 - DNA, 201 bp, Homo sapiens
ctaaggtggcattcctgaccgtgaccctacaccaaggcggagccactcgcatgtacgcactcatatctgacgcgcagcctctgctgctcagcaccttcagyggagaccgccgcttctcccgatttggtggcgttctgcacttgagtgacctggatgatgatggcttaggtaagaaaggaacaggaccctttgacaagaatt

SEQ ID NO: 366366 - DNA, 201 bp, Homo sapiens
aactgtggttcgtttcagatgacgtgtctaaggtggcattcctgaccgtgaccctacaccaaggcggagccactcgcatgtacgcactcatatctgacgcrcagcctctgctgctcagcaccttcagcggagaccgccgcttctcccgatttggtggcgttctgcacttgagtgacctggatgatgatggcttaggtaaga

SEQ ID NO: 366367 - DNA, 201 bp, Homo sapiens
tgatttatggttatgctgactgtacccattaggctgatgccctttggatttaggcaatttttggtcaaggtgaacttaaaatggcagttcttgtccaagayggcaatgcttctgctctgtcattatcagtaaacttgtctcatgagtcgtatcagtcagagccccagcaggacccagaagtcacactcaaactgagtaatt

SEQ ID NO: 366368 - DNA, 201 bp, Homo sapiens
tgctcattaaacggtagttagtggctgggcacagtggctcatacgtgtaatcctagcactctgggaggctgaggcaggaggatcccttaagtccaggagtycaggaccagcctcagcaacatagtgagacccctatatctacaaaaaatgaacaaaattagccaggtatggtggtgtgtgcctgtagtcccagctacttgg

SEQ ID NO: 366369 - DNA, 201 bp, Homo sapiens
agtgatcagtgtcacttgaggatggggtgctattccgtgttctgtaatgccttcctttctgtgaggccagcaggaactgtggttcgtttcagatgacgtgwctaaggtggcattcctgaccgtgaccctacaccaaggcggagccactcgcatgtacgcactcatatctgacgcgcagcctctgctgctcagcaccttcag

SEQ ID NO: 366370 - DNA, 201 bp, Homo sapiens
gagagtggacactccaaggaagttttctcacctatacaatattgatttattgtgtctcacaggcaatggggaaactgggtacttccctttccagtggccaygtactgatgaatgggactctgaaacaagtgctgctggttggagcccctacgtacggtaggtcacacactgtgaaactgtgcttcctttcagtcatgtggc

SEQ ID NO: 366371 - DNA, 201 bp, Homo sapiens
gaagcaggcgacagctttaaccctagtgctcagtgcataccatggtgggtcccttcacttccctaagggcaatgacctcagctgacctcaaccaggatggkcacggtgacctcgtggtgggcgcaccaggctacagccgccccggccacatccacatcgggcgcgtgtacctcatctacggcaatgacctgggcctgccac

SEQ ID NO: 366372 - DNA, 201 bp, Homo sapiens
gttttcttaagtgtagattttccctattaattgacactgggtattaagggataagataagcacagggctaagcatagtgtctgacccatgatacaacctcmacaaattttagctattattattatttctagatttcatcagtagttttcaaaattaaataagaaactgtcatatcctgctctgaccaaaatactgtcagcc

SEQ ID NO: 366373 - DNA, 201 bp, Homo sapiens
ccattacgcacagtaggtacgatgccaagggcccataaaacttttaggagcactcacaaatgtttaatttattctaaaatctgaagaaaagaagttttagrtggcatattaatatgttaatcttacaccaatgcagatgtaaaatgtgatttctatttattgtttacttatttttgtgacaggaagtacttcacaaaggca

SEQ ID NO: 366374 - DNA, 201 bp, Homo sapiens
ctgtaatcccagcacattgggaggctgaggcaggagaatcgcttgaacctgggaggttgcagtgagctgagattgcgccactgcactccagcctgggtgamaagagcaaaactccatctcaaaacacaaacaaacaacaacagcaacaaaaacaacagctctgggtcagtaaaacaaccttaaggcctcagggaaatcctg

SEQ ID NO: 366375 - DNA, 201 bp, Homo sapiens
cagaaaggactcccaaaataatgcacagaactggcctgtcaaggagctgctactcctgccattgacaggcattcactgccccatttgctacaaattcaackgtctcatacacggtttgtaaaataagaagccaccacctcacctattggttctgggacctcatcaccacctcgggcacctgccttactaacaatatggttg

SEQ ID NO: 366376 - DNA, 201 bp, Homo sapiens
tgcctggactaccataggaactcaatagatgttatgaatgagccatgaattctgtcttgtgtcccttacagaaccaagtcgtcattgctgctggaaggagytctttgggagcccgactctccggggcacttcacgtctatagccttggctcagattgaagatttcactgcatttccccactctgcccacctctctcatgct

SEQ ID NO: 366377 - DNA, 201 bp, Homo sapiens
ggccatagtgcctgtgacaacttaatcccaggcgctctgactttagggcccatgatcataacccttccacaataccgccgtgaaccatatccttcataccrtaggaggcaatggagcttctagctgtcgtccaaggaatgaaagcaggcgcctccagatgaggccacttcccatgaacataattcctgtaatcagccaaaa

SEQ ID NO: 366378 - DNA, 201 bp, Homo sapiens
taggacctaatgttttattttattgtttagcacttctaaaaactcatttcctttacacaagtccaatactttggacaggaaacagtagctttgttgattakgctacgtgtctttactgtctataatgattcttttatttcaggattccatgtcctttatctacaaggctttggaaaggaacataaggacaatgttcatagg

SEQ ID NO: 366379 - DNA, 201 bp, Homo sapiens
tcctaacggtttgttaggatgctccttcctgatccaagtccatccagtctgaggctatttttcaattccatgcttctatctgccagaagagtctttttagrtaaagaagccatctaaataaagcagaagtattaattttagtatcttttttaaaagaaaagccactagtaaaatgatgtattatgtaactactcagtgaag

SEQ ID NO: 366380 - DNA, 201 bp, Homo sapiens
aaaagaatacctgcctggagggaaatcactgaagctctctggtgtttgtgccttggtgcccaagctggttgtacctccctgactgccggagatgaccagcwccgaaaccgactgtcctgtaggatcccgagtgatcagtgtcacttgaggatggggtgctattccgtgttctgtaatgccttcctttctgtgaggccagca

SEQ ID NO: 366381 - DNA, 201 bp, Homo sapiens
tgcagcagaagtctttgctggtggagtcagggaagggcctgcagagatcatgggcccggagctgcatctggaaagatgactagactctgacaaaacagagwgaagccgaaggccaggcaaatttagtaaatgagtaattccataaattgggaaagagagggagaataaagtaccatttgatgctgttttcttaagtgtaga

SEQ ID NO: 366382 - DNA, 201 bp, Homo sapiens
ggccagcaggaactgtggttcgtttcagatgacgtgtctaaggtggcattcctgaccgtgaccctacaccaaggcggagccactcgcatgtacgcactcayatctgacgcgcagcctctgctgctcagcaccttcagcggagaccgccgcttctcccgatttggtggcgttctgcacttgagtgacctggatgatgatggc

SEQ ID NO: 366383 - DNA, 201 bp, Homo sapiens
agtctaggtgggaaaatacagcaggcccacaagaccatccaggttggtgtatgatgaccaagagccaaacgaggtcagacagcaactgcagcagaagtctytgctggtggagtcagggaagggcctgcagagatcatgggcccggagctgcatctggaaagatgactagactctgacaaaacagagagaagccgaaggcca

SEQ ID NO: 366384 - DNA, 201 bp, Homo sapiens
ggatgaagcaatctatgcatggcctgccagtgagattagaatgggcaaagcagaaggcatactcgtgcctgaaagatcctcagaccctgtgcttttgcagmgcctgagccatctgggctgccttcatgctctgagccaactgtgctctgctttggagcagacctaggaaatcttgtttggtctcatgtcacccttgggcag

SEQ ID NO: 366385 - DNA, 201 bp, Homo sapiens
ccacttcagcctcccaaagtgctgggattataggcgtgcactactgcacccagcaaaactcttcatttgtattagtttacctaatactgaattagcctttrtaattacagtaacaaggacatctggtttaaacaggattagaagtgggtctgattgaccctttgtgagctatggtatagacaggtaagttcaagtctctgg

SEQ ID NO: 366386 - DNA, 201 bp, Homo sapiens
ccgtgaccctacaccaaggcggagccactcgcatgtacgcactcatatctgacgcgcagcctctgctgctcagcaccttcagcggagaccgccgcttctcycgatttggtggcgttctgcacttgagtgacctggatgatgatggcttaggtaagaaaggaacaggaccctttgacaagaattgagtccctttgcccaggg

SEQ ID NO: 366387 - DNA, 201 bp, Homo sapiens
atgacagtgaggagtcaaatacttccttctgtcggtttttattgttttcagatgaaatcatcatggcagcccccctgaggatagcagatgtaacctctggrctgattgggggagaagacggccgagtatatgtatataatggcaaagagaccacccttggtgacatgactggcaaatgcaaatcatggataactccatgtc

SEQ ID NO: 366388 - DNA, 201 bp, Homo sapiens
cattagtttttttcaagtgtctgactctatacaagaaaataataaaaagagtatcagaagtttcctgtaactaccataaaaaaaacttcagtatccacggsgctgttcctaacggtttgttaggatgctccttcctgatccaagtccatccagtctgaggctatttttcaattccatgcttctatctgccagaagagtctt

SEQ ID NO: 366389 - DNA, 201 bp, Homo sapiens
aatagattgggaggcaggtttgccctacacggttcccagcttgacttttccctttagtttagtgattttggggttctgagatttattttcctttacaatayttttatactttggtatacttttttgtatactttatatactctgaaattaagatgtcagggtgaggagacatttttataatagtgtttttaaaataattct

SEQ ID NO: 366390 - DNA, 201 bp, Homo sapiens
tggctattggccagttagctcagttgtggtgctaatgacaccagggtcgcaggttcagtccccttacaggtcagttgttttggccaggcatggtggcgcaygcctgtagtctcagctgcttgggaggctgaggcaggagaattgcttgaacttggaaggcggaggttgcggtgaaccgatatcgcaccactgcactccagc

SEQ ID NO: 366391 - DNA, 201 bp, Homo sapiens
ccttccttccacctcccaagtggaattgacatctttgcttcagctgcaggaatctgaccttgcaacaggctctggataagccctattagaacagccagagrtagagagaccaggagtggctgctcttgtgtaatcccatacaagtgtcagtatctgttgccaaatactgaaaaggaagccagttccagctgattaccataa

SEQ ID NO: 366392 - DNA, 201 bp, Homo sapiens
tgtgcctggccgtaacttgatttttctttctacctaacaatataccgagaacattttcttatgttatctgatattcttatataatatgatatttaccggcygatgagtattttatctacagacaaaccatagtttatttacccattattcaggcaaccattgttagtcaattgtgccatttccaattttcattgttttaaa

SEQ ID NO: 366393 - DNA, 201 bp, Homo sapiens
caggcgacagctttaaccctagtgctcagtgcataccatggtgggtcccttcacttccctaagggcaatgacctcagctgacctcaaccaggatgggcacrgtgacctcgtggtgggcgcaccaggctacagccgccccggccacatccacatcgggcgcgtgtacctcatctacggcaatgacctgggcctgccacctgt

SEQ ID NO: 366394 - DNA, 201 bp, Homo sapiens
atacttccttctgtcggtttttattgttttcagatgaaatcatcatggcagcccccctgaggatagcagatgtaacctctggactgattgggggagaagayggccgagtatatgtatataatggcaaagagaccacccttggtgacatgactggcaaatgcaaatcatggataactccatgtccagaagaaaaggtaagtg

SEQ ID NO: 366395 - DNA, 201 bp, Homo sapiens
tctgtcggtttttattgttttcagatgaaatcatcatggcagcccccctgaggatagcagatgtaacctctggactgattgggggagaagacggccgagtwtatgtatataatggcaaagagaccacccttggtgacatgactggcaaatgcaaatcatggataactccatgtccagaagaaaaggtaagtgttctacaaa

SEQ ID NO: 366396 - DNA, 201 bp, Homo sapiens
agtacaacttgtttccttagttttagggcacagaaatggaaacaattctagcctctattctaaccaggtagccgggcttgcgattccgtgagccagtttasgctccgtccctcttactgtagggctctttttagtcatcaggcagacagtaccatgcgtattccaaaatctcagctggctcttccgttttagaggcttctt

SEQ ID NO: 366397 - DNA, 201 bp, Homo sapiens
cacttgagtaaagggatgtttttctcagtactgggtcttttcattagacggatgcatttatatagtgtcagtttttatgcttcactaaatgataaggcctstgtttaaacatgaccattatttacctcacgatttatatttttctcaatgcctgaatacacccaatagcaagcaccaggtggaggttaagacccacaaaaa

SEQ ID NO: 366398 - DNA, 201 bp, Homo sapiens
gcgtgtacctcatctacggcaatgacctgggcctgccacctgttgacctggacctggacaaggaggcccacaggatccttgaaggcttccaggtgagacascatctcatcctttctcttctagtggttagtagctactcttgcattttgtggcagattctccaggatgagtaactaataacaagaataattacagtaacaa

SEQ ID NO: 366399 - DNA, 201 bp, Homo sapiens
ctaaagagcctagcgacactgctagttttaagccatctcatgagggacctttgtcgcattaggttacaacttgtgccaaaagaactagagggaaaagatgyggcctgagccacacgctactgtaagggccggagaggaaagcaggccttggcctcgcttgttcctgggctgtttttcgtaggatggatttcatttgtcagt

SEQ ID NO: 366400 - DNA, 201 bp, Homo sapiens; identical to SEQ ID NO: 79261

SEQ ID NO: 366401 - DNA, 201 bp, Homo sapiens; identical to SEQ ID NO: 79262

SEQ ID NO: 366402 - DNA, 201 bp, Homo sapiens; identical to SEQ ID NO: 79263

SEQ ID NO: 366403 - DNA, 201 bp, Homo sapiens; identical to SEQ ID NO: 79265

SEQ ID NO: 366404 - DNA, 201 bp, Homo sapiens
tgcactccagcctgggcaacagagtgagaccctattttttaaaagataaataataatagaaaataagtttaattataacttttatgtatgtatataatatrctaatttataaagtgtgtataagtatactaatatataatataaatgtatataatatgtatatattatatatacatgtatgtgtctatatataatgtatga

SEQ ID NO: 366405 - DNA, 201 bp, Homo sapiens
tctactgaggaggctgaggtgggaagatcacttgagcccaggagttcaaggctgcagtgagctatgatcacacccactgcactccagcctgggcaacagartgagaccctattttttaaaagataaataataatagaaaataagtttaattataacttttatgtatgtatataatatgctaatttataaagtgtgtataag

SEQ ID NO: 366406 - DNA, 201 bp, Homo sapiens
gacacttgagtaaagggatgtttttctcagtactgggtcttttcattagacggatgcatttatatagtgtcagtttttatgcttcactaaatgataaggcytctgtttaaacatgaccattatttacctcacgatttatatttttctcaatgcctgaatacacccaatagcaagcaccaggtggaggttaagacccacaaa

SEQ ID NO: 366407 - DNA, 201 bp, Homo sapiens
ttgtttagggacaattattggtagcccaacctatctgaagaattacttttaattaaaaggatggttatttttaggggaccagaaattacttagttgtattmacttatgagttgagcagttagagcagactctgacatctgacacttgagtaaagggatgtttttctcagtactgggtcttttcattagacggatgcattta

SEQ ID NO: 366408 - DNA, 201 bp, Homo sapiens
gggggtggtgataatttgacaaggtctcgctttaattaaaagtttttttcgtggacacaggatctcactgtgttttcgaggctgctcttgaactcctggcctcaagcaatgttcccacttgggcctcccaaagcactgggattatagacatcagccaccatacctggacccagagtcagtcctttttatcttctgttattt

SEQ ID NO: 366409 - DNA, 201 bp, Homo sapiens
tgggggtggtgataatttgacaaggtctcgctttaattaaaagtttttttcgtggacacaggatctcactgtgttttcgaggctgctcttgaactcctggcctcaagcaatgttcccacttgggcctcccaaagcactgggattatagacatcagccaccatacctggacccagagtcagtcctttttatcttctgttatt

SEQ ID NO: 366410 - DNA, 201 bp, Homo sapiens
ttgggggtggtgataatttgacaaggtctcgctttaattaaaagtttttttcgtggacacaggatctcactgtgttttcgaggctgctcttgaactcctggcctcaagcaatgttcccacttgggcctcccaaagcactgggattatagacatcagccaccatacctggacccagagtcagtcctttttatcttctgttat

SEQ ID NO: 366411 - DNA, 201 bp, Homo sapiens
attgggggtggtgataatttgacaaggtctcgctttaattaaaagtttttttcgtggacacaggatctcactgtgttttcgaggctgctcttgaactcctggcctcaagcaatgttcccacttgggcctcccaaagcactgggattatagacatcagccaccatacctggacccagagtcagtcctttttatcttctgtta

SEQ ID NO: 366412 - DNA, 201 bp, Homo sapiens
tgaacccaggaggcgaaggttgcaatgagccgagatcgtgccactgcactgcagcctaggtgacagagcaagactccgtctcaaaaaaaaaaaaaaaatcrgtatgcttgcaaagcagtttccccaccagctgatacctgttgctaaattttttcataatctggaaagaattgaagccttttactcctaccatagagctct

SEQ ID NO: 366413 - DNA, 201 bp, Homo sapiens
cccagcagcaatgcacagaatggatttctgtctgtcattaagctcccaatcattgggggtggtgataatttgacaaggtctcgctttaattaaaagttttwttcgtggacacaggatctcactgtgttttcgaggctgctcttgaactcctggcctcaagcaatgttcccacttgggcctcccaaagcactgggattatag

SEQ ID NO: 366414 - DNA, 201 bp, Homo sapiens
ctctcgtgtcgtaactgtgaccggcctccacccagtagttcgtgtggtgtcagatgtcactgttatctttgaaatgtcaaaatatctacagcatctttgcsagttcactgaagcgcttcagtgtgcagtttgggaatcacagctataaggcacagattaatctaaatttgagatttttgatatactttttttttttttttt

SEQ ID NO: 366415 - DNA, 201 bp, Homo sapiens
ggggatttgcaagcgtcctggcctgggcacaggagggttctccttgaagaagtgatggcttaacagatatttaagtgtcaggaattaaaaatgcagggtgytctggggatttgcaacagagcgtcctggccctgggcacaaaagagctctccttgaagaagtgatggcttaaccgggatatttaaggatgatcaagagtga

SEQ ID NO: 366416 - DNA, 201 bp, Homo sapiens
aattgataatataaaacctctttatacacacacacacacacacacacacacgaaatgtatgtatttataaaactttgtaagtattttattttaattaattwatttatttatttgagatggagtctcttgctctgtcacccaggctggagtgcagtggtgcaatctctgctcactgcaacctctgcctcccgggttcaagca

SEQ ID NO: 366417 - DNA, 201 bp, Homo sapiens
tgttattgatatatttcacccaaattgttcagattttcccattattacttgtattttacttgtatttcacccacacagtttgcggggcccagttccaaatraaaatgcagggccccttgttaaaacattgttgacaatttcaagtcagagacaggacaacatgaagacaggcataggtcctttcgaaatgcagtgcctgtg

SEQ ID NO: 366418 - DNA, 201 bp, Homo sapiens
tcctcatttcctaatccacagcaattttttcattagtgcctgctttttatcacaaccatccctgaatatgcagctttgcaaagatgtggcatcactgaaaygaatgcaggactctcgtgtcgtaactgtgaccggcctccacccagtagttcgtgtggtgtcagatgtcactgttatctttgaaatgtcaaaatatctaca

SEQ ID NO: 366419 - DNA, 201 bp, Homo sapiens
attgagaactgctttgagtggccagttgggatgtgatttcttgataatataattgataatataaaacctctttatacacacacacacacacacacacacamgaaatgtatgtatttataaaactttgtaagtattttattttaattaatttatttatttatttgagatggagtctcttgctctgtcacccaggctggagtg

SEQ ID NO: 366420 - DNA, 201 bp, Homo sapiens
accacaggggcacatgccctgcatttatgtcctaaccacttagcttctctcggcactgtacagcttttcaagtcttggaatcaggttagacacaactttcytcatttcctaatccacagcaattttttcattagtgcctgctttttatcacaaccatccctgaatatgcagctttgcaaagatgtggcatcactgaaacga

SEQ ID NO: 366421 - DNA, 201 bp, Homo sapiens
ttagtcctgtatggctaggtaataaacactttaagcctttgggagatgattgaagcgcactaccgattctcggtaaaattcatgcttgtgaagaagtagayaaatggctaactcatttgactgtttcctcagtgactgcaacctgcctgagaaccctctgttcattgcatgtggcggccagcaaaaccacacccaggggta

SEQ ID NO: 366422 - DNA, 201 bp, Homo sapiens
gggcccagttccaaataaaaatgcagggccccttgttaaaacattgttgacaatttcaagtcagagacaggacaacatgaagacaggcataggtcctttcraaatgcagtgcctgtgtgaccacaggggcacatgccctgcatttatgtcctaaccacttagcttctctcggcactgtacagcttttcaagtcttggaatc

SEQ ID NO: 366423 - DNA, 201 bp, Homo sapiens
ctccttctcaaaaaaaaaaaaaaaaaaaaaagtagaaatgagggtataagggtataattaaaattgattttaaaaagccacacaaacagtaataacattgkctctctcctcaatttttttcttcaggcccaatatgtattgatttctcctgaagtaagtatcccttgaaagactgaagaaagaaaaattaccaaaacaatg

SEQ ID NO: 366424 - DNA, 201 bp, Homo sapiens
gctaaggaaagatagctggaccttattctttcgttaggaaaagataattgagaaagaacatatttcttgtctcttgatccctgtcccaatttaccaaggtrtaaaattccatgagttgattgcttgtttgcatacatatacaaagaaagattcatcagaatttatgaaaatgtatgggaaattcagagaagtctccaaaaa

SEQ ID NO: 366425 - DNA, 201 bp, Homo sapiens
ttttaggtgcatactgccgtggttgtacagaatttaagagatctgccactcactactgagttatctggaacaagttgctaaaccttccaaaatcttatttmctcacctataaaattgggacagcaatactatttttaccataggatttttgtgaggagtaaattagatcagtcatgtaaagggtttagaatagagtaagca

SEQ ID NO: 366426 - DNA, 201 bp, Homo sapiens; identical to SEQ ID NO: 79288

SEQ ID NO: 366427 - DNA, 201 bp, Homo sapiens
gccacttttaatagtgaaataaacctcaactaaaatccccaagctctcccgtggacctgggtttttaggtgcatactgccgtggttgtacagaatttaagrgatctgccactcactactgagttatctggaacaagttgctaaaccttccaaaatcttatttcctcacctataaaattgggacagcaatactatttttacc

SEQ ID NO: 366428 - DNA, 201 bp, Homo sapiens; identical to SEQ ID NO: 79289

SEQ ID NO: 366429 - DNA, 201 bp, Homo sapiens; identical to SEQ ID NO: 79290

SEQ ID NO: 366430 - DNA, 201 bp, Homo sapiens
ttttggggttctgagatttattttcctttacaatacttttatactttggtatacttttttgtatactttatatactctgaaattaagatgtcagggtgagragacatttttataatagtgtttttaaaataattcttttcaattcaacttgaaacaatgaaaatactttaaattacttcttgaactctgaattcacaaaat

SEQ ID NO: 366431 - DNA, 201 bp, Homo sapiens
atgtatttcttgtatgaagagtgagattcaatgacattggggtcctgggatcagcatggggacatataagacctctggcaaaaactcagcaaaatgaaccsacttctattaggctacgagaaggaccctttcttttcatcccagtagtcctctcacttaaagtattagtaaaaaggatgagttgtcttctttagaaaaact

SEQ ID NO: 366432 - DNA, 201 bp, Homo sapiens; identical to SEQ ID NO: 79292

SEQ ID NO: 366433 - DNA, 201 bp, Homo sapiens; identical to SEQ ID NO: 79293

SEQ ID NO: 366434 - DNA, 201 bp, Homo sapiens
tttttgtatactttatatactctgaaattaagatgtcagggtgaggagacatttttataatagtgtttttaaaataattcttttcaattcaacttgaaacmatgaaaatactttaaattacttcttgaactctgaattcacaaaattaaccactctttttgtacgttatagttagtttccaatctgagtatacctacataa

SEQ ID NO: 366435 - DNA, 201 bp, Homo sapiens; identical to SEQ ID NO: 79294

SEQ ID NO: 366436 - DNA, 201 bp, Homo sapiens
tggaatgtagtggtgtgatctcaagctcactgcagcctctgcctcccaggttcaagcagttctcctgtttcattctcctgagtagctggaactacaggcaygcaccaccatgcccagctactttttttttttatttttagtagagatggagtttcaccatgttggccaggctggtctcaaactcccgatgtcaggtgatcc

SEQ ID NO: 366437 - DNA, 201 bp, Homo sapiens
caggtgatccgcccgcctcggcctcccacagtgctgggattacaggcgtgagccactgcgcccagtcactataccattttatatcaggggcttgaacatcygtggattttggtatctgtgagaggccctggaaccaatccttcgtggatactgagggatggctgtattgtttatagtagtaaaaagctagaaatagcctaa

SEQ ID NO: 366438 - DNA, 201 bp, Homo sapiens
atcccaagctgaggggcttgttgtcccccaaattctgtggtgtacggctcctagcattctgcatgtgacctctcgtgcctgcctggcagcaaatacaaccrcatctcagcttgggtgtggtttggaggatatcgttttttttttttgagatggagtcttgctctgtcacccaggctagcgtgcagcggcacgatctcagct

SEQ ID NO: 366439 - DNA, 201 bp, Homo sapiens
accgctctgtaagggctgcccaccattccaccttcagtgtcatgcacattgcttggacatagtagatggctagctaatacttgaattacttataaacacgktttgggatacatcacttcatcattttgctccaatagtaattaatctgaaagcacttccaacacatcgtaaaacgtttccaaaagtccttatggttttgtg

SEQ ID NO: 366440 - DNA, 201 bp, Homo sapiens
aggtgatccgcccgcctcggcctcccacagtgctgggattacaggcgtgagccactgcgcccagtcactataccattttatatcaggggcttgaacatccrtggattttggtatctgtgagaggccctggaaccaatccttcgtggatactgagggatggctgtattgtttatagtagtaaaaagctagaaatagcctaaa

SEQ ID NO: 366441 - DNA, 201 bp, Homo sapiens
tggtggtgcatgcctgtagttccaggctactcaggaggctgagacaggagaattgcttgaacccaggaggcgaaggttgcaatgagccgagatcgtgccaytgcactgcagcctaggtgacagagcaagactccgtctcaaaaaaaaaaaaaaaatcagtatgcttgcaaagcagtttccccaccagctgatacctgttgc

SEQ ID NO: 366442 - DNA, 201 bp, Homo sapiens
ttgtcccaggcctctctactccctgggggtcaggagtgctctttccgaggccgtggctcagcccaggggaagtaaacttgtgcctcttcagccctcaggtyggtttggctcggccttggctgtgttggactttaacgtggacggcgtgcctgacctggccgtgggagctccctcggtgggctccgagcagctcacctacaa

SEQ ID NO: 366443 - DNA, 201 bp, Homo sapiens
tgcaatggtgagatctcagctcattgcagcctcaacctcttggatgcaggtgatcctcccatttcagcctcccaagtagcagggattacaggcacgctccwccacactcggctaattttttgtattttttgttgagatggggtttctccatgttgcccaggctggtctcaaactcctgggttcaagtgatcctcctgtctc

SEQ ID NO: 366444 - DNA, 201 bp, Homo sapiens
ctcccaggttcaagcgattttcctgcctcagcctcccaagtagctgggactacaggtgcccgccaccactcccagctaatttttagtagagacggggtttyactatattggccaggctggtctcgaactcctgaccttgtgatcctcccaccttgacctcccaaagtgctaggattataggcgtgagccaccgcgcctggc

SEQ ID NO: 366445 - DNA, 201 bp, Homo sapiens
tactttttgtatttttagtagagatggggtttcaccatgttggccaggctggtcttgaactcctgaccttaggtaatccgcccacctgggcctcccaaagwgctgggattacaggcgtgagccaccacacccggctttaacaatttttttaacaaaaggctgcatgttttaattttgccctggcctccttaaattatgtag

SEQ ID NO: 366446 - DNA, 201 bp, Homo sapiens
gaatgggcgtggtggctcacgcctgtaatcccagcactttaagtggctgaggcaggtggattgcttgagctcaggagtttgagactagcctgggtaacatwgagaccctgtctctacaaaaaagtaacaaaaaatcagctgggcatggtagtgtgcacttgtagtcccagctattcgggaggctgaggtgggaggactact

SEQ ID NO: 366447 - DNA, 201 bp, Homo sapiens
gccaggcatggtggcgcacgcctgtagtctcagctgcttgggaggctgaggcaggagaattgcttgaacttggaaggcggaggttgcggtgaaccgatatygcaccactgcactccagcctgggtgacagagtgagactccatctcaaaaaaaaaataaaaataaaaaaataagtaaaatgtccattggttcagtccagaa

SEQ ID NO: 366448 - DNA, 201 bp, Homo sapiens
cctgttgacctggacctggacaaggaggcccacaggatccttgaaggcttccaggtgagacaccatctcatcctttctcttctagtggttagtagctactmttgcattttgtggcagattctccaggatgagtaactaataacaagaataattacagtaacaaacagctggtggtgtacatttgtgaagcactttttagtt

SEQ ID NO: 366449 - DNA, 201 bp, Homo sapiens
ctttgggagaccgaggcaggtggatcacctgagctcaggagttcgagcccagcctggccaacatagtgaaactccatctctactaaaaatacaaaaaaatyagctgggtgtggtggtgcatgcctgtagttccaggctactcaggaggctgagacaggagaattgcttgaacccaggaggcgaaggttgcaatgagccgag

SEQ ID NO: 366450 - DNA, 201 bp, Homo sapiens
gttgtttaatcacattgagcaccttttgattaggcttgcaatctttcttggggttgccagaaccctgacactagttggtgtcatgcccagggccccgtcasttacggctgttgtccactccctacttcagtcatttctgaagcctctctggctccctgagtcatctgctttttggctggttgacatctttgaatgtgaaaa

SEQ ID NO: 366451 - DNA, 201 bp, Homo sapiens
accttggcctcccaagtgttgggattataggtgtgagccactgcaccccctttgggttataaattaaaatgttatgtatatgtatgggtcagtttctgggytttctgatatgtccttttggtccctgaacaatattgattattttaattgctgtagctttataataagtcttgggctctgttagggcagatcttataacta

SEQ ID NO: 366452 - DNA, 201 bp, Homo sapiens
tttgtaacatatgaagtttaaacggcagtgcagtttcagcgcccacacagctgtagtggaacatagccgggctcgtctgctgtggactgcgcgtggctgcygtcgcgctgccgtggcagaactgactggttgctttggagactgatgccccacaaagcctaagtattattatctgcctgttctccaaaattgtttgctggc

SEQ ID NO: 366453 - DNA, 201 bp, Homo sapiens
tctgatggaagtgacagactttaaaaaaattcctttcagcccagcagcaatgcacagaatggatttctgtctgtcattaagctcccaatcattgggggtgrtgataatttgacaaggtctcgctttaattaaaagtttttttcgtggacacaggatctcactgtgttttcgaggctgctcttgaactcctggcctcaagca

SEQ ID NO: 366454 - DNA, 201 bp, Homo sapiens
ttgctaatgaggttacacttttcttctattttatggatcatttgtgtttgattttaagtgaaaactttttccagttttcagtctatttttctgttgggttrtttatcctttttatttatttgtgagtatttatatattctggcttctactctcttgtcagtttgtcacttagttattacaaatgtctttcacagtttgtgg

SEQ ID NO: 366455 - DNA, 201 bp, Homo sapiens
tagaatgaatggggatggagacaggcaagttataagaggaactgattggtaacacagaataaaatagcacagtgtgtatcctcaggcaggtaagtggtacmgatgtggtatgttggcattcagatgtgccatgggtacaacaggctgtggcccgggggcttcatggaagagcctgaaactgtgctggtccttgaagtgggc

SEQ ID NO: 366456 - DNA, 201 bp, Homo sapiens
ttctttttttttcttttcttttcttttcttttctttttttttttttttttgagacagagtcttgctctgttgcccaggctagagtgcagtggtgcgatctyggctcactgcaacctccacctcctgggttcaagcaattctcctgcctcagcttcccgagtagttatgactacaggtactcaccactacacctggctaatt

SEQ ID NO: 366457 - DNA, 201 bp, Homo sapiens
aatacttggtattgtccaactgttaaaatttccagcctgtttgtgtgtaatggtatctcattgaggttgcagtttgaatttcccagattgctaatgaggtyacacttttcttctattttatggatcatttgtgtttgattttaagtgaaaactttttccagttttcagtctatttttctgttgggttgtttatccttttta

SEQ ID NO: 366458 - DNA, 201 bp, Homo sapiens
aaagtgctgggattacaggcatgagccaccatgcgtggccggaaaacccatttctttttttttcttttcttttcttttcttttctttttttttttttttttgagacagagtcttgctctgttgcccaggctagagtgcagtggtgcgatctcggctcactgcaacctccacctcctgggttcaagcaattctcctgcctca

SEQ ID NO: 366459 - DNA, 201 bp, Homo sapiens
ggaggccaaggcaggtggatcacctgaggtcaggagttcaagaccagcctggccaacatggtgaaaccccacctctactaaaaatacaaaaattagctggscgtggtggcgcatgcctgtaatcccagctacgagggaggctgaggcaggagaattgcttgaacccaggaggcggaggtttcagtgagccgagatcacgcc

SEQ ID NO: 366460 - DNA, 201 bp, Homo sapiens; identical to SEQ ID NO: 79264

SEQ ID NO: 366461 - DNA, 201 bp, Homo sapiens
aacctcccaaagtgctgggattacaggcgtgagctaccgcgccctgcctttttattattattatttttttactaataaaatgttagtgtgaaaattgagtstattatgcgtcctcagcagttcattgagttagctgtcatctcccaccacttgcttgactgtggaagtaagagttggggctacaatttgtaatacacacca

SEQ ID NO: 366462 - DNA, 201 bp, Homo sapiens; identical to SEQ ID NO: 79266

SEQ ID NO: 366463 - DNA, 201 bp, Homo sapiens
atgctttattcaagctgtatatcttaagaaggatatgaatacctgccacttggttctatttaaaagtaatacttctactttattggactttttctctctcyttttaactttctatatgaaaatgccatgtcctcaaactgaaaattgtgatcttacctgatgacttagcctctggaaggccccctggtccttaatttatgt

SEQ ID NO: 366464 - DNA, 201 bp, Homo sapiens
gtaaattatactcctactgtaaaaggtcaactgatatggcacgtatgtaaaaaacctggcatacaggaaaaaattaatgcatgacagtctaatatattatsctgatacatggattaaattttctttccactaagtattaactatagttttaagcattgattctgcttaataactaaaatgtaaagaccttaccttgtaggg

SEQ ID NO: 366465 - DNA, 201 bp, Homo sapiens
aagcacctgtgagatagacaaagaaacctgagacatggtcccagccccaggtgcttgtagtctaggtgggaaaatacagcaggcccacaagaccatccagkttggtgtatgatgaccaagagccaaacgaggtcagacagcaactgcagcagaagtctttgctggtggagtcagggaagggcctgcagagatcatgggccc

SEQ ID NO: 366466 - DNA, 201 bp, Homo sapiens
ccaattatttaacttttctgtgccttaatcatttcttcttatgtaaaacgggaatatgatagtactaaccacctgaggtcattgctaggattaaataactrgtgcatgtaaagacttttacatggtgcctggcacaaaataatcacggaataactggtagctgctgctgctgttgttactattttcagcttcagaatcaaa

SEQ ID NO: 366467 - DNA, 201 bp, Homo sapiens
gaaactgtatggtcgaaaagtcatcaccgaaaatgtaatcgttgattgttcacatatccagttcttagaaatgtaagcgtaactcagaggacaatttgcarctgattttgttgtgacttcctttgcacagtttttatgtttttgtttcctgagactggattttggatttatggattctgcttattcaaaggcagttgcatg

SEQ ID NO: 366468 - DNA, 201 bp, Homo sapiens
ttttatttcaggattccatgtcctttatctacaaggctttggaaaggaacataaggacaatgttcataggtggctctcagttgtcacaaaagcacgtctcyagccccttagcatcttacttcttgtcatttccttatgcgaggcttggctggtacgtataagtttatctaacttgtgaatgttttcttcagtattaatttt

SEQ ID NO: 366469 - DNA, 201 bp, Homo sapiens
cattgcatgtggcggccagcaaaaccacacccaggggtaagtggattccaaaattgttcatagaaaaagtacatctcacctggaggagatgccctatagakgttgagaacacgggatctgttgagagacagctgtaggttcaaattccagatttgtcacttgcagctgtgtgatttttaaacaagctgcttgatttttgga

SEQ ID NO: 366470 - DNA, 201 bp, Homo sapiens
gtccggatgacaacatgtgcccaaggctgttggagcacatcttggttatctgtacattttagggagacttgggacatcaatcaataaatgcgaaatggctrttggccagttagctcagttgtggtgctaatgacaccagggtcgcaggttcagtccccttacaggtcagttgttttggccaggcatggtggcgcacgcctg

SEQ ID NO: 366471 - DNA, 201 bp, Homo sapiens
gattcttttatttcaggattccatgtcctttatctacaaggctttggaaaggaacataaggacaatgttcataggtggctctcagttgtcacaaaagcacrtctccagccccttagcatcttacttcttgtcatttccttatgcgaggcttggctggtacgtataagtttatctaacttgtgaatgttttcttcagtatta

SEQ ID NO: 366472 - DNA, 201 bp, Homo sapiens
gggaagaggaaggctgagtctggggtgactggcagcatgagccttcctggattaccatgatagtgacaaccgtcagcctacccaccctctctgggagaacrtgggctcttaattagtcctgtatggctaggtaataaacactttaagcctttgggagatgattgaagcgcactaccgattctcggtaaaattcatgcttgt

SEQ ID NO: 366473 - DNA, 201 bp, Homo sapiens
caggcaagagccactgcacctggcctcttatgtggtttttaataactagaaactgcaatttacttgcctgaaattttttgttaggtctcagtaacataaawgaatttatatttattaaaacttttaataggattgttattataaaatcacccaaacacacatgactctaatttgcttgtttggcaggacacagagaaactg

SEQ ID NO: 366474 - DNA, 201 bp, Homo sapiens
tgagatgctagctgtttccaaggtaaaggcgtcattcttccaaatcttaaaggattataaagataccaggaatagtaccatattcattttattttttctttctctctgccatagttatatcccacttactctacaaagtccccgtttttggtggaacaattccaagagtattttcttggaggactggatgatatggcattt

SEQ ID NO: 366475 - DNA, 201 bp, Homo sapiens
aggctgaggcaggagaattgcttgaacccgggaggcggaggttgcggtgaacggagattgcaccattgcactccagcctgggcaacaagagcgaagctccrtctccaaaaaaaaaacaaaaaacagaaaacaaaaacaaccacacagaaaccacacagaaatagattgggaggcaggtttgccctacacggttcccagctt

SEQ ID NO: 366476 - DNA, 201 bp, Homo sapiens
ttttttattatactttaagttttagggtacatgtgcacattgtgcaggttagttacatatgtatacatgtgccatgctggtgcgctgcacccactaactcrtcatctagcattaggtatatctcccaatgctatccctcccccctccccccaccccaccacagtccccagagtgtgatattccccttcctgtgtccatgtg

SEQ ID NO: 366477 - DNA, 201 bp, Homo sapiens
cagctggcatagtctgggccttgaacaaggattccttaggaccatgggagctgtgagtacatccctttatggggaatgactttatgggagtgatactgtcwcacctaagatcaaaacctgaccgttttaaaagaaaggaaaatgttaggttattcagacttctgcccaaagcagtgtttggttagagtcccatcttttcca

SEQ ID NO: 366478 - DNA, 201 bp, Homo sapiens
ctcaattgtttctttcttttacctactaaaagaaacctactaaagttagattttattggttgcgattttttatcttgtttattctgaggatttttttttttattatactttaagttttagggtacatgtgcacattgtgcaggttagttacatatgtatacatgtgccatgctggtgcgctgcacccactaactcgtcatc

SEQ ID NO: 366479 - DNA, 201 bp, Homo sapiens
ttcaccatgtttcctaggctgatcttaaactcctgacctcgagtgatccgcccgcgtcagcctcccaaagtgctgggataacaggcataagctgctgcgtrcagcctttctgtattctttattctgtttcattgatctgttccttttggtttcagtatcatactatttttgttttgtttctatagcttaaaaatatgtatt

SEQ ID NO: 366480 - DNA, 201 bp, Homo sapiens
tagagacagggtttcaccatgttggccaggctggtctcgaactcctgatctcaggtgatccacccaccttgacctcccaaagtgctgggattacatgtgtragccacaggacctggccgataatcctttcttaatgaggattaataccttttcaatgtttatatagtgaaggacaaatataaaaaccaagactatcaccct

SEQ ID NO: 366481 - DNA, 201 bp, Homo sapiens
ttatgtggtttttaataactagaaactgcaatttacttgcctgaaattttttgttaggtctcagtaacataaatgaatttatatttattaaaacttttaataggattgttattataaaatcacccaaacacacatgactctaatttgcttgtttggcaggacacagagaaactggtagctttcttgtttggaattacttct

SEQ ID NO: 366482 - DNA, 201 bp, Homo sapiens
gaacttaaaagttaaaaaaaagttgaacttaaaaataacagattggcccatgccaatcaaagtataatagaaagcatagtatacagaaaaaaaaaaaaaaagaaactgagggaggaaaaatagtacagagtaaagcatgggggtgagggataacctcacattccaaatcacttgtgacttagtcctttttaacttttattt

SEQ ID NO: 366483 - DNA, 201 bp, Homo sapiens
cttatgtggtttttaataactagaaactgcaatttacttgcctgaaattttttgttaggtctcagtaacataaatgaatttatatttattaaaacttttaataggattgttattataaaatcacccaaacacacatgactctaatttgcttgtttggcaggacacagagaaactggtagctttcttgtttggaattacttc

SEQ ID NO: 366484 - DNA, 201 bp, Homo sapiens
tcctgacctcgtgatccacctgcataggcctcccaaagtgctgggattacaggggtgagccactgcgcccggcctgtgtgtggtttttttttttttgagayagagtcttgctctgtcgcccaggctggagtgcagtggtgcaatttcagctcactgcaacctccgcctcccaggttcaagcaattcttgtgtctcagcctc

SEQ ID NO: 366485 - DNA, 201 bp, Homo sapiens
caatgtcaaaaacaatgtaaattatactcctactgtaaaaggtcaactgatatggcacgtatgtaaaaaacctggcatacaggaaaaaattaatgcatgayagtctaatatattatcctgatacatggattaaattttctttccactaagtattaactatagttttaagcattgattctgcttaataactaaaatgtaaag

SEQ ID NO: 366486 - DNA, 201 bp, Homo sapiens
tgaggtcgggagttcgagaccagcctggccaacatggtgagagcttgtctctactaaaaatacaaaaattagccagatgtggtggcacatgcctgtaatcyccgctactcgggaggctgagacatgagaatcacttgaaactaggaagcagaagttgcagtgagctgagatcacatcactgcactccagcctgggtgacag

SEQ ID NO: 366487 - DNA, 201 bp, Homo sapiens
tcttatgtggtttttaataactagaaactgcaatttacttgcctgaaattttttgttaggtctcagtaacataaatgaatttatatttattaaaacttttaataggattgttattataaaatcacccaaacacacatgactctaatttgcttgtttggcaggacacagagaaactggtagctttcttgtttggaattactt

SEQ ID NO: 366488 - DNA, 201 bp, Homo sapiens
cagaaccaagtcgtcattgctgctggaaggagttctttgggagcccgactctccggggcacttcacgtctatagccttggctcagattgaagatttcactrcatttccccactctgcccacctctctcatgctgaatcacatccatggtgagcattttgatggacaaagtggcacatccagtggagcggtggtagatcctg

SEQ ID NO: 366489 - DNA, 201 bp, Homo sapiens
ggtggctcacatctgtaatttcagcactttgggaagccgaggcgggtggatcacttgaggtcgggagttcgagaccagcctggccaacatggtgagagctygtctctactaaaaatacaaaaattagccagatgtggtggcacatgcctgtaatccccgctactcgggaggctgagacatgagaatcacttgaaactagga

SEQ ID NO: 366490 - DNA, 201 bp, Homo sapiens
ttgttaagtgctgtggaccaggttcctgtggaccagggtggaaggtgggaggaggaagaggattaggaaaaattgtggtgaaactgccctctagtggccartaatttaagtgacccatttacaggcaggtctaaaaatgtaggattaaccacataacaaaaatatggttattaactttatgggaagattctcggaaggtct

SEQ ID NO: 366491 - DNA, 201 bp, Homo sapiens
tccttggcacaatttcctgacagtccttcctttcagggcttctgtgcattcagctctagtgcaggagatggggaggtgaatgctgtctttactggtcgttsacttgtgtgtatggctacctccctgaaagatccgaaaggcctcctgctgggctggcagctacataagcacagccagccacaggggcatccctagggccat

SEQ ID NO: 366492 - DNA, 201 bp, Homo sapiens
ctcttatgtggtttttaataactagaaactgcaatttacttgcctgaaattttttgttaggtctcagtaacataaatgaatttatatttattaaaacttttaataggattgttattataaaatcacccaaacacacatgactctaatttgcttgtttggcaggacacagagaaactggtagctttcttgtttggaattact

SEQ ID NO: 366493 - DNA, 201 bp, Homo sapiens
agtgttaaaattacttcacttttccagaacatacctgagcttgggggcattgaacgctctgggtgtaaagataaatcagatgttatgtttcaaaaatgggyattgacaatcagaggatgatcagagtggcctttttctgagatttgggtacaagttatgttctgaagattccttcctttctgtggcataagagcattcagt

SEQ ID NO: 366494 - DNA, 201 bp, Homo sapiens
aattagtataggattaaatgctaatgagtagtctgaagaataagtctttacagtgggttgaagggctgcagaagccttcatagatttatatatataaccargtctgtaagacttgttaagtgctgtggaccaggttcctgtggaccagggtggaaggtgggaggaggaagaggattaggaaaaattgtggtgaaactgccc

SEQ ID NO: 366495 - DNA, 201 bp, Homo sapiens
tgtacacagtttaaatttcgatatggcagattaaaaagtttaaccttggctgggtgcagtgggtcacacctgtaatcccagcactttgagaagccgaggtyggtggatcgcctgaggtcaggagttcaagaccagcctggtcaacatggtgaaaccccggctctactaaaaatacaaaaaatagcccggcgtggtggtgca

SEQ ID NO: 366496 - DNA, 201 bp, Homo sapiens
cggggtttcactatattggccaggctggtctcgaactcctgaccttgtgatcctcccaccttgacctcccaaagtgctaggattataggcgtgagccaccrcgcctggccggtctggaggatatctttggcatcctgttgttccagtttatttgtttgttaatatatatacacatatacaaatacaattaaagttctgcat

SEQ ID NO: 366497 - DNA, 201 bp, Homo sapiens
gccaggatggtctcgatttcctgacctcgtgatccacctgcataggcctcccaaagtgctgggattacaggggtgagccactgcgcccggcctgtgtgtgktttttttttttttgagacagagtcttgctctgtcgcccaggctggagtgcagtggtgcaatttcagctcactgcaacctccgcctcccaggttcaagcaa

SEQ ID NO: 366498 - DNA, 201 bp, Homo sapiens
gggtttcaccatgttagccaggatggtctcgatttcctgacctcgtgatccacctgcataggcctcccaaagtgctgggattacaggggtgagccactgcrcccggcctgtgtgtggtttttttttttttgagacagagtcttgctctgtcgcccaggctggagtgcagtggtgcaatttcagctcactgcaacctccgcc

SEQ ID NO: 366499 - DNA, 201 bp, Homo sapiens
aaagtaacttatattttattcctttttgtaaaacactgcaaatgtaccttcctaattattgtttacctgggttagtgttaaaattacttcacttttccagmacatacctgagcttgggggcattgaacgctctgggtgtaaagataaatcagatgttatgtttcaaaaatgggtattgacaatcagaggatgatcagagtg

SEQ ID NO: 366500 - DNA, 201 bp, Homo sapiens
ccacaggtgagaatcttaaaagtaggattgctagatctaaaagtgtacacagtttaaatttcgatatggcagattaaaaagtttaaccttggctgggtgcrgtgggtcacacctgtaatcccagcactttgagaagccgaggttggtggatcgcctgaggtcaggagttcaagaccagcctggtcaacatggtgaaacccc

SEQ ID NO: 366501 - DNA, 201 bp, Homo sapiens
cattctcctgcctcagcctcccaagtaactgggactacaggcgcccgccaccacgcccggctaatttttttttttttttttttgtatttttagtagagacrgggtttcaccatgttagccaggatggtctcgatttcctgacctcgtgatccacctgcataggcctcccaaagtgctgggattacaggggtgagccactgc

SEQ ID NO: 366502 - DNA, 201 bp, Homo sapiens
ttttgccacgttgtcaaggctggtctcaaactcctggcctcaaatgatctgcctgcctctgccttccaaagtgctgggattataagcatgcaccactgcayccggcccagagtttttctgtttttctatggcttcagagatacacacacacaccttttttttttttttttttttttaagacagagtctggctcttgtcacc

SEQ ID NO: 366503 - DNA, 201 bp, Homo sapiens
aacatatgaagtttaaacggcagtgcagtttcagcgcccacacagctgtagtggaacatagccgggctcgtctgctgtggactgcgcgtggctgccgtcgygctgccgtggcagaactgactggttgctttggagactgatgccccacaaagcctaagtattattatctgcctgttctccaaaattgtttgctggcccttg

SEQ ID NO: 366504 - DNA, 201 bp, Homo sapiens
cttcttttgaaagtcgacagaagaaactgaggggcatggagggaaggaggagaagggacacagcagcgcagcgggtggtgtggaagatttgattgagactytccaacttttaagagagaatctagagccctgcttttgttttgtcaggaaaattccatgatgtgtctgagagcactcactggactccgtttcttaatgcaa

SEQ ID NO: 366505 - DNA, 201 bp, Homo sapiens
cttgaacctgggaggtggaggttgccgtgagcctagatggtgccactgtactccagcctgggtgatggagcaagactctgtctcaaaaaaaaaaaaaaaawgtttaaccttaaaatatacctgtaaaccactgattgcattcatccactgtataggctataagaaataaaaacagagagggcagagtccctgttcttgaaa

SEQ ID NO: 366506 - DNA, 201 bp, Homo sapiens
gcgggagacttgcttgaacctgggaggcagaggttgcagtgagctgagatcacgccactgcactccagcctgggcgacagagcaagactccttctcaaaaaaaaaaaaaaaaaaaaaagtagaaatgagggtataagggtataattaaaattgattttaaaaagccacacaaacagtaataacattgtctctctcctcaat

SEQ ID NO: 366507 - DNA, 201 bp, Homo sapiens
ctattctaaccaggtagccgggcttgcgattccgtgagccagtttaggctccgtccctcttactgtagggctctttttagtcatcaggcagacagtaccaygcgtattccaaaatctcagctggctcttccgttttagaggcttcttttgaaagtcgacagaagaaactgaggggcatggagggaaggaggagaagggaca

SEQ ID NO: 366508 - DNA, 201 bp, Homo sapiens
gcctaaagcatttggccattatttaactttttttttttttttttttttttgagacagagtctggctctattgcccaggctggagtgcagtggcacggtctyggctcactgcaacctcctcctcccaggttcaagccattttcctgcttcagcctcccgaatagctgggactacaggcatgcaccaccacgcctggctaatt

SEQ ID NO: 366509 - DNA, 201 bp, Homo sapiens
tctaaaactttctgtgttgctccttcagccttctgacgttaaaattttgtggtcttttaacctgtgattaacttgactatattcttcaactcagttttacrgggggttgttttctcagtcgtaaccagtttattcctctttctcttcaacagctcaaaaatgcagaaaaatgattttcacagaaatttgactacatcccta

SEQ ID NO: 366510 - DNA, 201 bp, Homo sapiens
ttcctttctgtgaggccagcaggaactgtggttcgtttcagatgacgtgtctaaggtggcattcctgaccgtgaccctacaccaaggcggagccactcgcrtgtacgcactcatatctgacgcgcagcctctgctgctcagcaccttcagcggagaccgccgcttctcccgatttggtggcgttctgcacttgagtgacct

SEQ ID NO: 366511 - DNA, 201 bp, Homo sapiens
tataatataaatgtatataatatgtatatattatatatacatgtatgtgtctatatataatgtatgaatgtatatataactatatattatatataaatatraattaatgtcaccatcaggttattgttattgatatatttcacccaaattgttcagattttcccattattacttgtattttacttgtatttcacccacaca

SEQ ID NO: 366512 - DNA, 201 bp, Homo sapiens
acaagaacaccatgacgcgtgttcctgacccacagtgtggtggcacaggggccactgcgtgctcgagtctagcccagcctgtcctgttccattctgttctscagcttccctctaatggcttcccatgaccacacacaggagtggggaaaccttacttgtacttcatcggttttcttccaaatcagcgacgggagtaacatt

SEQ ID NO: 366513 - DNA, 201 bp, Homo sapiens
ctataatgattcttttatttcaggattccatgtcctttatctacaaggctttggaaaggaacataaggacaatgttcataggtggctctcagttgtcacaraagcacgtctccagccccttagcatcttacttcttgtcatttccttatgcgaggcttggctggtacgtataagtttatctaacttgtgaatgttttcttc

SEQ ID NO: 366514 - DNA, 201 bp, Homo sapiens
caaaggtatatagttccctacgttattattattattattattattattattattattttagatacggtcttgatctgatgcccaggctggagtgcagtggygcaatcatagctcactgcaacctcagactcctggctttaagcgatcctcctgccttggcctcccaaagtgctgagattacaatcatgagccaccatgcct

SEQ ID NO: 366515 - DNA, 201 bp, Homo sapiens
tcctctttctcttcaacagctcaaaaatgcagaaaaatgattttcacagaaatttgactacatccctaactgaaagtgttgacaggaatataaactatacygaaagaggagtgttctttagtgtaaattcctggaccccggtaagaattttctgctctaagttgagaaagaggaatgctgcttcttgagataccttgtttc

SEQ ID NO: 366516 - DNA, 201 bp, Homo sapiens
gtcttcattccagaatactcttcttatattaatacctgcttcctcagtgcttctgttcagtgttgggggaaagcctctattgggaagagtttatctcttaygttctcagaggctttttcacttgtaaaaggggatccttcattagctatttaattattgaaattatggaattttttttaaagaaatgaaattgagaaattc

SEQ ID NO: 366517 - DNA, 201 bp, Homo sapiens
ttttctcagtcgtaaccagtttattcctctttctcttcaacagctcaaaaatgcagaaaaatgattttcacagaaatttgactacatccctaactgaaagygttgacaggaatataaactatactgaaagaggagtgttctttagtgtaaattcctggaccccggtaagaattttctgctctaagttgagaaagaggaatg

SEQ ID NO: 366518 - DNA, 201 bp, Homo sapiens
gtgttcatgaagaataaggtgttaataattgtgctcacatttgtttaggagccttccaaagacagtatcacaccttgacgtgttcgacacttgatgtgttygacaggcgatatgattgcttactcactcacataacccagtgtttggtacctactttcaaacagtaattaatgtgctcagtccattttagttcaaaattta

SEQ ID NO: 366519 - DNA, 201 bp, Homo sapiens
tttccttttcttatttggtgatgattcactttcattgcatctttccaaagcacttagctttcttagatacttaattgccaaagaaaaaacaccttttttttaaagttatttttacattttttagagacagggtcttgctctgttgcccaggctggggtgcagtggtgcaatcacagctcattacagcctcaaactcctggc

SEQ ID NO: 366520 - DNA, 201 bp, Homo sapiens
ttaataccaggaattagagaattcactgcttacaaactgtgggaactgcaggagcaggctctaggccaggtgtccagaaaggactcccaaaataatgcacwgaactggcctgtcaaggagctgctactcctgccattgacaggcattcactgccccatttgctacaaattcaacggtctcatacacggtttgtaaaataag

SEQ ID NO: 366521 - DNA, 201 bp, Homo sapiens
gtgcagtggtgtgatctcacctccacctcccaggttcaagcgattctcctgcctcagcctcctggtagctgggaatacaggcgtgcaccaccatgcccggstaatttttatattttcagtagagtcgcagtttcaccatgtttcccaggctggtctcaaactcctgacctcaagtgatccacccgccgcagcctcccaacg

SEQ ID NO: 366522 - DNA, 201 bp, Homo sapiens
ccagctacttgggaggctgaggcgggagaatggcgtgaacccgggaggcggagcttgcagggagcggagatcgcactgctgcgctccattccagcctgggrgacagagtgagactccatctcaaaacaaaacaaaacaaaacaaaacaaagtggtggggcatgcctctaatcctagctacttggaaggctgaggcaggaga

SEQ ID NO: 366523 - DNA, 201 bp, Homo sapiens
agcgggagacttgcttgaacctgggaggcagaggttgcagtgagctgagatcacgccactgcactccagcctgggcgacagagcaagactccttctcaaaaaaaaaaaaaaaaaaaaaagtagaaatgagggtataagggtataattaaaattgattttaaaaagccacacaaacagtaataacattgtctctctcctcaa

SEQ ID NO: 366524 - DNA, 201 bp, Homo sapiens
ctggttcggcaatttttactttaggaacggcatagaaaaattgaactgagggatctgaactcggcagttttgcttttagttaccctcgtaacatttggcaytccatgaggcatttgtggctcttggaggtttagcacagaggccagttctgtctttcctacccctcttgtgggaataaagagctacatgggacacgcactg

SEQ ID NO: 366525 - DNA, 201 bp, Homo sapiens
tggcttgaacccaggaggtggaggttgtggtgagctgagattgcaccactgcacttcagcctgggcaacaagagtgaaactccgtctcaaaaaaaaaaaaragactcattatttatttctttatgttataatgttgtatattatgttattaatgttataagacattaatattatggttaaaaggtatatgtctcttccaag

SEQ ID NO: 366526 - DNA, 201 bp, Homo sapiens
aagcgggagacttgcttgaacctgggaggcagaggttgcagtgagctgagatcacgccactgcactccagcctgggcgacagagcaagactccttctcaaaaaaaaaaaaaaaaaaaaaagtagaaatgagggtataagggtataattaaaattgattttaaaaagccacacaaacagtaataacattgtctctctcctca

SEQ ID NO: 366527 - DNA, 201 bp, Homo sapiens
gagactataggtgtgtacccccatacctggctacttttttattttatttttaaatttttgtagagacgtggtcttgctatgttgcccaggctagtctcaamctcctggcctcagggggtcctcccacttcagcctcccaaagtgctgggattataggcgtgcactactgcacccagcaaaactcttcatttgtattagttt

SEQ ID NO: 366528 - DNA, 201 bp, Homo sapiens
ggaggctgaggcaggtggatcacttgaggtcaggagttcgagaccagcctgactaatatggagaaaccccatctccactaaaaatccaaaattagccgggygtggtggtgcatgcccgtaatcccagttattcgggaggctgaggcaggagaatggcttgaacccaggaggtggaggttgtggtgagctgagattgcacca

SEQ ID NO: 366529 - DNA, 201 bp, Homo sapiens
gaagcgggagacttgcttgaacctgggaggcagaggttgcagtgagctgagatcacgccactgcactccagcctgggcgacagagcaagactccttctcaaaaaaaaaaaaaaaaaaaaaagtagaaatgagggtataagggtataattaaaattgattttaaaaagccacacaaacagtaataacattgtctctctcctc

SEQ ID NO: 366530 - DNA, 201 bp, Homo sapiens
actaaaagattttgtgaaatgaaggttttctaaaactttctgtgttgctccttcagccttctgacgttaaaattttgtggtcttttaacctgtgattaacwtgactatattcttcaactcagttttacagggggttgttttctcagtcgtaaccagtttattcctctttctcttcaacagctcaaaaatgcagaaaaatga

SEQ ID NO: 366531 - DNA, 201 bp, Homo sapiens
aagcaaccctcctgcctcagccttctgagtagctgagactataggtgtgtacccccatacctggctacttttttattttatttttaaatttttgtagagaygtggtcttgctatgttgcccaggctagtctcaaactcctggcctcagggggtcctcccacttcagcctcccaaagtgctgggattataggcgtgcactac

SEQ ID NO: 366532 - DNA, 201 bp, Homo sapiens
tgttctgtgaagttgaaattgccaaaactacagagtaagctgatgaggaacaaatataaatggaaatactccatttttaatccttagtgtttaaaaatttvcagattgcatctgaaattttaataaaaccagataattgcttgcccttcttcattaagtaccaaacaaaggtcctaatggacatttaaagaataatattta

SEQ ID NO: 366533 - DNA, 201 bp, Homo sapiens
tttataaatattttggttcactttttcatttcttataaaggggcctgagtggaaggtcagcattatctgagtgagttaattagaaatggcttcattcagcrtaaatcactggaatcctgtacacaggttatttgtatttgtgggttgtgacttttatgatattaatgcttatagtagtggcaatagttttttgttatatga

SEQ ID NO: 366534 - DNA, 201 bp, Homo sapiens
tgaagcgggagacttgcttgaacctgggaggcagaggttgcagtgagctgagatcacgccactgcactccagcctgggcgacagagcaagactccttctcaaaaaaaaaaaaaaaaaaaaaagtagaaatgagggtataagggtataattaaaattgattttaaaaagccacacaaacagtaataacattgtctctctcct

SEQ ID NO: 366535 - DNA, 201 bp, Homo sapiens
tgcagtggtgcaatcacagctcattacagcctcaaactcctggcctcaagcaaccctcctgcctcagccttctgagtagctgagactataggtgtgtaccmccatacctggctacttttttattttatttttaaatttttgtagagacgtggtcttgctatgttgcccaggctagtctcaaactcctggcctcagggggtc

SEQ ID NO: 366536 - DNA, 201 bp, Homo sapiens
tcccagcacttgtggcttgggaggcggaggaagcaggacagcctgataaatgtgtagaaaggatgcatgagagatccacccttgtaaggtgaggtggtctratatgttgactatctgcacaggtgagcctttttatagaaagcaaaaaatatctggagacaactttgcttgcatctctacacaaatttcatgttaaaatga

SEQ ID NO: 366537 - DNA, 201 bp, Homo sapiens
caaattgctgtaaaagtgcttggcttcaggaaggtcaagaaagtaagggagtttagttatccacatgcacggtgccaggaagatggcaggagttggagagsagaagggtacagcaagccagtgccaccgaccttaggggcaagggcagagtcatcctggatatagggagatggcaccacaaagagttatttaaaattttta

SEQ ID NO: 366538 - DNA, 201 bp, Homo sapiens
ttattccttttttgggtgagtttccttaagttacatttcctgggcctaaagcatttggccattatttaactttttttttttttttttttttttgagacagmgtctggctctattgcccaggctggagtgcagtggcacggtctcggctcactgcaacctcctcctcccaggttcaagccattttcctgcttcagcctcccg

SEQ ID NO: 366539 - DNA, 201 bp, Homo sapiens
actgaagctctctggtgtttgtgccttggtgcccaagctggttgtacctccctgactgccggagatgaccagcaccgaaaccgactgtcctgtaggatccygagtgatcagtgtcacttgaggatggggtgctattccgtgttctgtaatgccttcctttctgtgaggccagcaggaactgtggttcgtttcagatgacgt

SEQ ID NO: 366540 - DNA, 201 bp, Homo sapiens
tcttgctctgttgcccaggctggggtgcagtggtgcaatcacagctcattacagcctcaaactcctggcctcaagcaaccctcctgcctcagccttctgartagctgagactataggtgtgtacccccatacctggctacttttttattttatttttaaatttttgtagagacgtggtcttgctatgttgcccaggctagt

SEQ ID NO: 366541 - DNA, 201 bp, Homo sapiens
tatgcattgattttaggttacatatctccctttctcaactcctacagcgttgagagtatcttgctagctttcacctttttctaggacgttgaatttttttmtaggacatttgcaaaatgccgaggcagtaactttaaattttgactttgtcttttgctgagtcagatccattgagttttgagccagtcacatatggcagaa

SEQ ID NO: 366542 - DNA, 201 bp, Homo sapiens
ggttcgtttcagatgacgtgtctaaggtggcattcctgaccgtgaccctacaccaaggcggagccactcgcatgtacgcactcatatctgacgcgcagccwctgctgctcagcaccttcagcggagaccgccgcttctcccgatttggtggcgttctgcacttgagtgacctggatgatgatggcttaggtaagaaaggaa

SEQ ID NO: 366543 - DNA, 201 bp, Homo sapiens
ttttgtgggccccagctgtctgcagttcttgcagttctgtagcgtttgtgcccagagctaaagtcccactggactcggtgttattatgtatgggagcacakggaagcggcctcttctctagaccagcgagattaggaaaggcttcccagaggaggggacacctgagccaaattctgcagggtgacaggagtagccagcaga

SEQ ID NO: 366544 - DNA, 201 bp, Homo sapiens
agcaggaactgtggttcgtttcagatgacgtgtctaaggtggcattcctgaccgtgaccctacaccaaggcggagccactcgcatgtacgcactcatatcygacgcgcagcctctgctgctcagcaccttcagcggagaccgccgcttctcccgatttggtggcgttctgcacttgagtgacctggatgatgatggcttag

SEQ ID NO: 366545 - DNA, 201 bp, Homo sapiens
tttcccataaacaaggcacaagtttgtccgaaaaaacaggtcagattagctcagttttacacacaaaactcagtggacgctgacgtgagattgtatccacrcactgacactttgccagcatacggcaaacttctcagagggccactagccccatcaacccacaggtgccatttatatttctgaaatcaaagctgtgttcca

SEQ ID NO: 366546 - DNA, 201 bp, Homo sapiens
gcagcaataaatactcttgtgtgatgaaaagattgggactggtatatgactagttacagggaatttgcatacaaattccacttattccacttaggtttttwtgcatttttccacattttaccttgtctcatacatacctaattcaactgtagttttccttttcttatttggtgatgattcactttcattgcatctttccaa

SEQ ID NO: 366547 - DNA, 201 bp, Homo sapiens
tgtgaggccagcaggaactgtggttcgtttcagatgacgtgtctaaggtggcattcctgaccgtgaccctacaccaaggcggagccactcgcatgtacgcrctcatatctgacgcgcagcctctgctgctcagcaccttcagcggagaccgccgcttctcccgatttggtggcgttctgcacttgagtgacctggatgatg

SEQ ID NO: 366548 - DNA, 201 bp, Homo sapiens
agacagacaaaacccacactaatcaaggttctgaggagagtggaaaaggaatgtaaagtatttacctagcattttccagttttttctgcagcaataaatastcttgtgtgatgaaaagattgggactggtatatgactagttacagggaatttgcatacaaattccacttattccacttaggtttttatgcatttttccac

SEQ ID NO: 366549 - DNA, 201 bp, Homo sapiens
atatctgactgttgttgccgactctgctttgagccctcagtggcttctagtggacagtttcccataaacaaggcacaagtttgtccgaaaaaacaggtcarattagctcagttttacacacaaaactcagtggacgctgacgtgagattgtatccacgcactgacactttgccagcatacggcaaacttctcagagggcca

SEQ ID NO: 366550 - DNA, 201 bp, Homo sapiens
tcgcttgaacccaggaagcggaggttgcagtgagccgagatcgcgccgctgtactccagcctgggtgacagagtgagactccatctcaataataaaaaaaraaaaaggaatgaagattttctcttatttcaacttttcttgatattttgggctttcactctgaatattaactgttgtgctggcacattgttctcttaggag

SEQ ID NO: 366551 - DNA, 201 bp, Homo sapiens
cctcttagtctgttaactatcatttctcaatcctattattttgcctgcatgttatagttctcctttctaacctattatttctaatttagcacttcccaaastgtattcatgggagctctactgtcccttgatagcttctacaaaaaagaaagaagaaaggatatttttgtccattcaatttgagcaacattgcttaatgta

SEQ ID NO: 366552 - DNA, 201 bp, Homo sapiens
ttggaatgtctctagttggaggggaggttatcttggggttgacatctctctggctggaggggaggttatcttggggcttgcacgtctctggttggggaggrgtttggaatgtttctgattggagatgttatctgtgatttatggttatgctgactgtacccattaggctgatgccctttggatttaggcaatttttggtca

SEQ ID NO: 366553 - DNA, 201 bp, Homo sapiens
tgttttctagctgttatatctgactgttgttgccgactctgctttgagccctcagtggcttctagtggacagtttcccataaacaaggcacaagtttgtcygaaaaaacaggtcagattagctcagttttacacacaaaactcagtggacgctgacgtgagattgtatccacgcactgacactttgccagcatacggcaaa

SEQ ID NO: 366554 - DNA, 201 bp, Homo sapiens
atcgcttgaacccaggaagcggaggttgcagtgagccgagatcgcgccgctgtactccagcctgggtgacagagtgagactccatctcaataataaaaaaraaaaaaggaatgaagattttctcttatttcaacttttcttgatattttgggctttcactctgaatattaactgttgtgctggcacattgttctcttagga

SEQ ID NO: 366555 - DNA, 201 bp, Homo sapiens
aggaaaaatgacaaaaattctatcttatgcctgatcttagtcaaatcaaatgttgccctctgggattccaattcttcatgtcacagttaagtagtacttaytatgtattttacagtgatacgacccaaaatagcagcagtgtgctctgaggtgtgccaaaagtgtgccctgtgaaatataagtattatcaaatacaatctt

SEQ ID NO: 366556 - DNA, 201 bp, Homo sapiens
gcagtttccccaccagctgatacctgttgctaaattttttcataatctggaaagaattgaagccttttactcctaccatagagctctgatattataggaartatgttttataaggataggcttttaagccttagaaatgtgtttactaaaagattttgtgaaatgaaggttttctaaaactttctgtgttgctccttcagc

SEQ ID NO: 366557 - DNA, 201 bp, Homo sapiens
ggaccaggtgtggcggctcatgcccgtaatcacaacactttggaaggccaaggagggagggttgcttgtggccaggagttcaacaccagcttgggcaatgyggtgagatctgtctctacacacacacacacagaaattatctgagtgtggggctgggcgcagtggctcgtgcctgtaatcccagcacttcgggaggccgag

SEQ ID NO: 366558 - DNA, 201 bp, Homo sapiens
cagatttattttggagaagtaaacctgagaggggcttctggccgattttggtcaggaacactctctctcttacagactgagagtatttattggtgagagartttggaatgtttctgtgtgggggagaagtttatggtgggattggaatgtctctagttggaggggaggttatcttggggttgacatctctctggctggagg

SEQ ID NO: 366559 - DNA, 201 bp, Homo sapiens
ttaggcgtggtggcgcgtgcctgtagtcccagctactcgggaggctgaggcaggagaatcgcttgaacccaggaagcggaggttgcagtgagccgagatcrcgccgctgtactccagcctgggtgacagagtgagactccatctcaataataaaaaaaaaaaaaggaatgaagattttctcttatttcaacttttcttgat

SEQ ID NO: 366560 - DNA, 201 bp, Homo sapiens
aagagttaaagaaagaggaaagaaacatgaaaagcagcttaacagtcaaagacagatttattttggagaagtaaacctgagaggggcttctggccgatttyggtcaggaacactctctctcttacagactgagagtatttattggtgagagaatttggaatgtttctgtgtgggggagaagtttatggtgggattggaatg

SEQ ID NO: 366561 - DNA, 201 bp, Homo sapiens
gcttgcacctgtaatcccagcacttttgggagactgaggcaggcagatcacgaggtcaggagatcaagaccatcctggctaacacggtgaaaccctgtctstgctaaaaatacaaaaaattaggcgtggtggcgcgtgcctgtagtcccagctactcgggaggctgaggcaggagaatcgcttgaacccaggaagcggagg

SEQ ID NO: 366562 - DNA, 201 bp, Homo sapiens
tttcatgtcttggcaaagactggattgtcctgcctgccctgcctagactggattgtccttggcattaatgcacagtattttgtcaagtgttatgcaaatckcagatactattatttgtaagagttaaagaaagaggaaagaaacatgaaaagcagcttaacagtcaaagacagatttattttggagaagtaaacctgagag

SEQ ID NO: 366563 - DNA, 201 bp, Homo sapiens
ctagaccttggggtgacttctctgagattctcccacatgcactggggccagtgttcatcctgtgggcggcagagccagagggagaagcctcaggtatcctcttgccatggaaggactgaagcagggagtagacagagagctggaagtgttactggattcctgggcgctccagggagctcatggttcctttaggaggcacga

SEQ ID NO: 366564 - DNA, 201 bp, Homo sapiens
aaattctgagaactattttttggtgaaaacctaagtggcatgatagaagacattttgcaagagatcaaaaggtctgagtttgtgttccttctatattagcrtgtgatcttaaaaaagtcacttatccacagaatctcaattttcatgtcttggcaaagactggattgtcctgcctgccctgcctagactggattgtccttg

SEQ ID NO: 366565 - DNA, 201 bp, Homo sapiens
gctagaccttggggtgacttctctgagattctcccacatgcactggggccagtgttcatcctgtgggcggcagagccagagggagaagcctcaggtatcctcttgccatggaaggactgaagcagggagtagacagagagctggaagtgttactggattcctgggcgctccagggagctcatggttcctttaggaggcacg

SEQ ID NO: 366566 - DNA, 201 bp, Homo sapiens
agcgccctctctccgcgtctttctcgctgcaccgccgcgccgccctctgcaccttgccctaagcgccgcgcggcttctctcctggcgcgaccttctcccgsgggagggttgggttcggggatggagaaggctcgccagtagatgcacctgcggactgctgtcaccttttcacttttcgggtgctcatttgtcactaactgc

SEQ ID NO: 366567 - DNA, 201 bp, Homo sapiens
ttaatgacttagtttacatagttgcattttccatttagctataactgacctagttaagcatagaaattctgagaactattttttggtgaaaacctaagtgrcatgatagaagacattttgcaagagatcaaaaggtctgagtttgtgttccttctatattagcgtgtgatcttaaaaaagtcacttatccacagaatctca

SEQ ID NO: 366568 - DNA, 201 bp, Homo sapiens
tcctgtaggatcccgagtgatcagtgtcacttgaggatggggtgctattccgtgttctgtaatgccttcctttctgtgaggccagcaggaactgtggttcrtttcagatgacgtgtctaaggtggcattcctgaccgtgaccctacaccaaggcggagccactcgcatgtacgcactcatatctgacgcgcagcctctgct

SEQ ID NO: 366569 - DNA, 201 bp, Homo sapiens
agctagaccttggggtgacttctctgagattctcccacatgcactggggccagtgttcatcctgtgggcggcagagccagagggagaagcctcaggtatcctcttgccatggaaggactgaagcagggagtagacagagagctggaagtgttactggattcctgggcgctccagggagctcatggttcctttaggaggcac

SEQ ID NO: 366570 - DNA, 201 bp, Homo sapiens
attaattacaattcttcctcatccttgtgcatttcaaatcatttctgaaatagattcatgaatcattcagagggatatcaaaatatgtacttttgaagagytgacatagttggattagagaacacagtctcaatgggcagccctattcaggctttctaattcttgctccgaaagctagaccttggggtgacttctctgaga

SEQ ID NO: 366571 - DNA, 201 bp, Homo sapiens
acaatttgtttcccaacaatattgttggttaatgacttagtttacatagttgcattttccatttagctataactgacctagttaagcatagaaattctgaraactattttttggtgaaaacctaagtggcatgatagaagacattttgcaagagatcaaaaggtctgagtttgtgttccttctatattagcgtgtgatctt

SEQ ID NO: 366572 - DNA, 201 bp, Homo sapiens
atgtgctttcctggtttcttcttaaggacatctactgtaacttgggctggactctcttggctgcagatgtgaatggagacagtgaacccgatctggtcatyggctccccttttgcaccaggtggagggaagcagaagggaattgtggctgcgttttattctggccccagcctgagcgacaaaggtagtgcctgagggggaa

SEQ ID NO: 366573 - DNA, 201 bp, Homo sapiens
catgaatcattcagagggatatcaaaatatgtacttttgaagagctgacatagttggattagagaacacagtctcaatgggcagccctattcaggctttctaattcttgctccgaaagctagaccttggggtgacttctctgagattctcccacatgcactggggccagtgttcatcctgtgggcggcagagccagaggga

SEQ ID NO: 366574 - DNA, 201 bp, Homo sapiens
acatgagaagtaaaacacttgtgtgtgtatttaaaaaatacccaccacccctgcatcccaaacacaaccctagggactagtgctcgtggcagaaattaagscaatatggaggtctaaaagataatggtccttaatcagagggtttaagcattacagaaggaattctatgttaactagaaggtataagcattacagaaggaa

SEQ ID NO: 366575 - DNA, 201 bp, Homo sapiens
ccctagcatctgcaaaggaggtaagatgaaagtttgcagactgaatgaagtcacttttacttggttaataggaatagctatgactttaaaaatatatatawgtgtgtacaatatatttttaattgcacagtatattttccattattgttgagaacaatttgtttcccaacaatattgttggttaatgacttagtttacata

SEQ ID NO: 366576 - DNA, 201 bp, Homo sapiens
tcatgaatcattcagagggatatcaaaatatgtacttttgaagagctgacatagttggattagagaacacagtctcaatgggcagccctattcaggctttctaattcttgctccgaaagctagaccttggggtgacttctctgagattctcccacatgcactggggccagtgttcatcctgtgggcggcagagccagaggg

SEQ ID NO: 366577 - DNA, 201 bp, Homo sapiens
tctgaagttatatattgttgtgttttgtcttggattatgtgtgaattttaatcatttatttactttatgcctgctttccttcctttttccctttcattccrtctatacccccatatttctagcatctcatcacagaaaattggtggggcctatactccccaggctgttgactcctgccccttaatctctgtattttcttgc

SEQ ID NO: 366578 - DNA, 201 bp, Homo sapiens
ttcatgaatcattcagagggatatcaaaatatgtacttttgaagagctgacatagttggattagagaacacagtctcaatgggcagccctattcaggctttctaattcttgctccgaaagctagaccttggggtgacttctctgagattctcccacatgcactggggccagtgttcatcctgtgggcggcagagccagagg

SEQ ID NO: 366579 - DNA, 201 bp, Homo sapiens
cctgtgtttcacaatagctcttttgttttctgctccctccactggaagaaaagttccacatgagaagtaaaacacttgtgtgtgtatttaaaaaatacccrccacccctgcatcccaaacacaaccctagggactagtgctcgtggcagaaattaaggcaatatggaggtctaaaagataatggtccttaatcagagggtt

SEQ ID NO: 366580 - DNA, 201 bp, Homo sapiens
attcatgaatcattcagagggatatcaaaatatgtacttttgaagagctgacatagttggattagagaacacagtctcaatgggcagccctattcaggctttctaattcttgctccgaaagctagaccttggggtgacttctctgagattctcccacatgcactggggccagtgttcatcctgtgggcggcagagccagag

SEQ ID NO: 366581 - DNA, 201 bp, Homo sapiens
tcagcctcccaaagtgctgggattataggcatgagccaccatgcctggcaagtttatagtttttctgagacacaaatatgaaccacattacaagatgataycctctttcctgtggttttcaagagagtagagttggtgagatgcacctgtgtttcacaatagctcttttgttttctgctccctccactggaagaaaagttc

SEQ ID NO: 366582 - DNA, 201 bp, Homo sapiens
ataagggactcggaatggaaggaagtgagccagttgaccaaggaagaacatttagaagaaaaccgctaccatctactttcacatcatttaaaaagggaaarcactttttttagccctcccaaaacacaaaggacgtcatcttacactaaaacacaggtagcaactataaactgatatgcacatatgtgcgtgcttgtttgt

SEQ ID NO: 366583 - DNA, 201 bp, Homo sapiens
aggcatgagccaccatgcctggcaagtttatagtttttctgagacacaaatatgaaccacattacaagatgatatcctctttcctgtggttttcaagagagtagagttggtgagatgcacctgtgtttcacaatagctcttttgttttctgctccctccactggaagaaaagttccacatgagaagtaaaacacttgtgtg

SEQ ID NO: 366584 - DNA, 201 bp, Homo sapiens
cagttgataatttttctttttctttttaagccatagggtcttgctctgttgcccaggctggagttcaatggtgtgatcacagctcactgttaccttgaacwcctgaggtcaagcgatcctgccgcctcaagcctcttgagtaggtcagactacaggcacatgccaccacaccctactttttgtagtgatggggtctcactg

SEQ ID NO: 366585 - DNA, 201 bp, Homo sapiens
gacttttgcagtaatcctgaaagctggtgacattaagtaacttacagttgataatttttctttttctttttaagccatagggtcttgctctgttgcccagrctggagttcaatggtgtgatcacagctcactgttaccttgaacacctgaggtcaagcgatcctgccgcctcaagcctcttgagtaggtcagactacaggc

SEQ ID NO: 366586 - DNA, 201 bp, Homo sapiens
tttgcaaaatgccgaggcagtaactttaaattttgactttgtcttttgctgagtcagatccattgagttttgagccagtcacatatggcagaagtgataayagtagagtttaatcaatttcacactattttgctctgtattttgttgcaggaactggggagaaccagggagtcctaatagggatgtgggccagtaggtatc

SEQ ID NO: 366587 - DNA, 201 bp, Homo sapiens
agtaactagtttattttgtgttaaattgggaagaacctctttcttctgccacgggtgagatgatactaaaagcaggagaaaataacaaatgagaagagccmttctcttctcagcttctctcaagagtagagactggtgaaaaggggacaggaagaggaatccagctgaagagtggaaagttaacaagaacatcaagaggta

SEQ ID NO: 366588 - DNA, 201 bp, Homo sapiens
aaaaacaccccttacccagatatttaaaaactgaagcttatactatatatgatattgtcatgcctaatttttttacttatatcttaagcacattctcatgktagtaaatattcttctaaaacatgacttttgatatctgcattgcatttttttaatgccagcatttactaacatcatcctgttgctggaattgtaggctcg

SEQ ID NO: 366589 - DNA, 201 bp, Homo sapiens
attattgtaactatcaatattattgtcttactcataaacttcacccagattttacatgaaaatttatttattgatgagacagtgttgggagaagccctcartgttaagggccagaagcctggtttgtattttaagaaatgatattttctgctggagtcaggtaccaaccgacagtcatttatgcattcatttaataagtta

SEQ ID NO: 366590 - DNA, 201 bp, Homo sapiens
cacataaaaacaaaacaaaacaatctcatgaagtgcttttctaacctattcaaagagggaaagaatggaaactcagtgatcttataaacttgactggttcycatccagttggcttggttgatgctgctcgtgttttagaaatagagagacagttattgcaatatttggggtctgtgagaaatggctcagccaggcaggaat

SEQ ID NO: 366591 - DNA, 201 bp, Homo sapiens
gactttccaacttttaagagagaatctagagccctgcttttgttttgtcaggaaaattccatgatgtgtctgagagcactcactggactccgtttcttaaygcaagcgttcattatatccgagagaactatccccttccctgggagaaggtaggcgtggtcctccaatccttaaaatatttagcaccaaacctgccatgca

SEQ ID NO: 366592 - DNA, 201 bp, Homo sapiens
cggaatggaaggaagtgagccagttgaccaaggaagaacatttagaagaaaaccgctaccatctactttcacatcatttaaaaagggaaagcactttttttagccctcccaaaacacaaaggacgtcatcttacactaaaacacaggtagcaactataaactgatatgcacatatgtgcgtgcttgtttgtgtgcgtgcgt

SEQ ID NO: 366593 - DNA, 201 bp, Homo sapiens
taggcatgagccaccatgcctggcaagtttatagtttttctgagacacaaatatgaaccacattacaagatgatatcctctttcctgtggttttcaagagagtagagttggtgagatgcacctgtgtttcacaatagctcttttgttttctgctccctccactggaagaaaagttccacatgagaagtaaaacacttgtgt

SEQ ID NO: 366594 - DNA, 201 bp, Homo sapiens
acctctgctgtggaaaaaccaaatgcttccatgttagccgagggctccgtggtggaggctgggccatatcagactgtgagctgagacagcctgggaaatgyagtctgtgttttctagcctatagcatgcagctagacatcccataagggactcggaatggaaggaagtgagccagttgaccaaggaagaacatttagaaga

SEQ ID NO: 366595 - DNA, 201 bp, Homo sapiens
tggggtctcactgcatttcccaggctggtcttgaactcatgagctgaagtgatcctcctgcctcagcctcccaaagtgctgggattataggcatgagccaycatgcctggcaagtttatagtttttctgagacacaaatatgaaccacattacaagatgatatcctctttcctgtggttttcaagagagtagagttggtga

SEQ ID NO: 366596 - DNA, 201 bp, Homo sapiens
aagtacttctttgttgcacctatatatggtccacattattagtaagttcttatttaaaaaaaaaaaaaaaagggcgggatattgccaaacttttactttgyccagtgtgtccatcagagttcatttgcagataatggaaacccctctgctagtttaggcaaggaaaggattaataccaggaattagagaattcactgctta

SEQ ID NO: 366597 - DNA, 201 bp, Homo sapiens
gtgtttatagatatctgcctacctacctacctatctcactttccagaaagaaatatatatagtatatacattttcttctttatgcttttttttttttttttaatagttggagtcttgctatgttgccgaggctggccatgaacttctgggctcaagtgatcctcccatctcaggttcacaagtagccgggaccacaggcat

SEQ ID NO: 366598 - DNA, 201 bp, Homo sapiens
ctctccacgtggggaatgctgacagcctagcactcagcgtcagagctcagcagccacaaggggaagagggcatcttcccagagctctagtggagaagtctyggggaaggtgtgaacggaactagctttgctcaaaggtccatttctgagccaaactctgtggtgagggtgggcatgctggccacagcattctggtcagccc

SEQ ID NO: 366599 - DNA, 201 bp, Homo sapiens
atgtctcttccaagtgctacttgaacattttataggtatcttatatatatcacacttaaaatttaaagattttaatgatatgactcataatttgaaaaaaatacttgagaaattttttaaacagtacatttttaaaaatgtgctaatcttctctgtatcattccaatattagtatatgtgctgctgagaagaacacatctt

SEQ ID NO: 366600 - DNA, 201 bp, Homo sapiens
tgtgtttatagatatctgcctacctacctacctatctcactttccagaaagaaatatatatagtatatacattttcttctttatgcttttttttttttttttaatagttggagtcttgctatgttgccgaggctggccatgaacttctgggctcaagtgatcctcccatctcaggttcacaagtagccgggaccacaggca

SEQ ID NO: 366601 - DNA, 201 bp, Homo sapiens
cagcctggcaacatggtgaaactttgcctctactaaaaatacaaaaattagccaggtgtggtggtgcatacctgtaatcccagctactcgggaggctgagrcaggagaatcgcttgaatctgggaggcagaagttgcagtaagccaagatcatgccactgcactccagcctgggcaacagagcaagacttcatctcaaaaa

SEQ ID NO: 366602 - DNA, 201 bp, Homo sapiens
gcagcctctgcctcccaggttcaagcagttctcctgtttcattctcctgagtagctggaactacaggcacgcaccaccatgcccagctactttttttttttatttttagtagagatggagtttcaccatgttggccaggctggtctcaaactcccgatgtcaggtgatccgcccgcctcggcctcccacagtgctgggatt

SEQ ID NO: 366603 - DNA, 201 bp, Homo sapiens
cccgccaccacgcctggctaatttttttgtatttttttttagtagagatggggtttcaccatgttagccaggatgatctcgatctcctgaccttgcgatcygcctgcctcggcctcccaaagtgctgggattacaggcgtgagccatcgcgcctggcctgagttttctttaatttagataaaaattataacagaattttat

SEQ ID NO: 366604 - DNA, 201 bp, Homo sapiens
tgcagctctgagcattcccacgtcaccagagaagccggtgggcaatgagagcatgtctgctttcaggttgtggcctggcctgctgatcatgttgggttctstctgccatagaggttcaccgtgtggcctttcaacacacatagaaataggtaagtactggtgtcttgttatgttgttgagaggacaatacatctgtcaaag

SEQ ID NO: 366605 - DNA, 201 bp, Homo sapiens
tcaagctcactgcagcctctgcctcccaggttcaagcagttctcctgtttcattctcctgagtagctggaactacaggcacgcaccaccatgcccagctaytttttttttttatttttagtagagatggagtttcaccatgttggccaggctggtctcaaactcccgatgtcaggtgatccgcccgcctcggcctcccaca

SEQ ID NO: 366606 - DNA, 201 bp, Homo sapiens
cctgtaatcccagctactcagaaggccgaggcaggaagaattgcttgaacccggaaggcagaggttacagtgagctgagatcacgccactgcactccagcycggtgacagtgtgagactccatctcaaaaaaaaaaaaaaaaaaaaatccaaaaatacattttaatatctgaaggatacatccttcgttagtactcttctt

SEQ ID NO: 366607 - DNA, 201 bp, Homo sapiens
ggtaactcactgcaggctcgaactcgtcctcctgcctcggcctcctgaatagctgggactacaagtcgtgtgtgcccatgcctagctaattttttttttttaatttaaaaacatttttatagggatgggtttttgcagtgttgcccaggctcgtctcaaactggcctcaagtgatcctcctgcctctcctcttctttgaaa

SEQ ID NO: 366608 - DNA, 201 bp, Homo sapiens
tatataatatgtatatattatatatacatgtatgtgtctatatataatgtatgaatgtatatataactatatattatatataaatatgaattaatgtcacmatcaggttattgttattgatatatttcacccaaattgttcagattttcccattattacttgtattttacttgtatttcacccacacagtttgcggggccc

SEQ ID NO: 366609 - DNA, 201 bp, Homo sapiens
agaaaaaaagaaaaaaaatacaaaaattagccaggtgtggaggccagtgcctgtaatcccagctactcagaaggccgaggcaggaagaattgcttgaaccyggaaggcagaggttacagtgagctgagatcacgccactgcactccagcccggtgacagtgtgagactccatctcaaaaaaaaaaaaaaaaaaaaatccaa

SEQ ID NO: 366610 - DNA, 201 bp, Homo sapiens
ggaaaagggctaggaaatgcttgacttttgaaggaaaagccaaggctctgggcaagattgcaaattctcctccttagaaatttaaaaatacaatagacaartgtattattttctcacagttctggaagctagacgtccaagatcaaggttgaggtcagagggttggtttctcctgaggcctgtctccttggcttgcagatg

SEQ ID NO: 366611 - DNA, 201 bp, Homo sapiens
aacagagtgagaccctattttttaaaagataaataataatagaaaataagtttaattataacttttatgtatgtatataatatgctaatttataaagtgtrtataagtatactaatatataatataaatgtatataatatgtatatattatatatacatgtatgtgtctatatataatgtatgaatgtatatataactata

SEQ ID NO: 366612 - DNA, 201 bp, Homo sapiens
gcttgaacccaggaggtggaggttgtggtgagctgagattgcaccactgcacttcagcctgggcaacaagagtgaaactccgtctcaaaaaaaaaaaaaakactcattatttatttctttatgttataatgttgtatattatgttattaatgttataagacattaatattatggttaaaaggtatatgtctcttccaagtg

SEQ ID NO: 366613 - DNA, 201 bp, Homo sapiens
ctcactacaacctccacctcccaggtttaagcaattctgtctcagcctcctgagtagctgggactacaggtggggactacaggcgcatgccaccatgcccrgctaatttttgtatttttagtagagacggggtttcatcatattggtcaggctggtcttgaactcctgacctctggtgatccacccacctcggcgtcccaa

SEQ ID NO: 366614 - DNA, 201 bp, Homo sapiens
gaggaggctgaggtgggaagatcacttgagcccaggagttcaaggctgcagtgagctatgatcacacccactgcactccagcctgggcaacagagtgagaycctattttttaaaagataaataataatagaaaataagtttaattataacttttatgtatgtatataatatgctaatttataaagtgtgtataagtatact

SEQ ID NO: 366615 - DNA, 201 bp, Homo sapiens
gctgtgcacatggctgtgttaagcttacaggggaaactgttggggcgacaactgttgtcaaatcattccactttctttttttcttttctttttttttttttgagacagggtcttgctctgtcacccaggctagagtgcagtggtgcaatctcggctcaccgcaatctccacctcctgggttcaagagatcctcccacctca

SEQ ID NO: 366616 - DNA, 201 bp, Homo sapiens
tgtgcatagattcactgaaaatacaaaaggtgacccacagtttctaggtagagagccaaagagggcaaatagactattcccatagtgtctccatgtaaaayagaaacactgaggaggctttgcaccggaggcatctcagtggtgctctcgactgtccatagctgttgttgttgttgttgttgttattgttgttttttcttt

SEQ ID NO: 366617 - DNA, 201 bp, Homo sapiens
aatttgaggccagcctggacaatatagggagaccccatctctacagaaaaagaaaaaaaggtaggcatagtgatgggcacatgtagttccatctactgagraggctgaggtgggaagatcacttgagcccaggagttcaaggctgcagtgagctatgatcacacccactgcactccagcctgggcaacagagtgagaccct

SEQ ID NO: 366618 - DNA, 201 bp, Homo sapiens
ctgggattatagacatcagccaccatacctggacccagagtcagtcctttttatcttctgttatttaaggttcttgggtcaccaccagagcctcatgtctrtctgctgtttgtccttatctagggtgccgtgtatgtctactttggttccaaacaaggaggaatgtcttcttcccctaacatcaccatttcttgccaggta

SEQ ID NO: 366619 - DNA, 201 bp, Homo sapiens
  misc_feature (1)...(201): n = A,T,C or G
cttggtgacatgactggcaaatgcaaatcatggataactccatgtccagaagaaaaggtaagtgttctacaaaattctataacttattgggaaaggatcantaattgctgattccttgttaactcatgtccactataaagtgcttacctgaattcatacctcctagggtcaggacaccatcatctgtccatgttttgtggg

SEQ ID NO: 366620 - DNA, 201 bp, Homo sapiens
gtggaggtcgagggccctcccttgccagctgccctctgcagactcaactcttgccccttcctcctcacactccatttctagacatgccagcagtctgtcaygtcctgaactcatcaggctgtctcactttgcgacctttgctcgtacagtttcctctgcttgaaaagctttttctcccctgtctttctttaggagtgacat

SEQ ID NO: 366621 - DNA, 201 bp, Homo sapiens
atgccagtgaagggagacagaaatcccagctcatctgtagtttctggttatcacaacagcgaggtgacttccctgggcctctcctcaaatggtggatcccygcctgttgcctcctttcttactgagttagagatcctggaccctggcccacagggcttgcttgcttcccacagatgcttcctaccatagcagggaccacgc

SEQ ID NO: 366622 - DNA, 201 bp, Homo sapiens
cgtgggtccttcagcatgtgtgttatgtggcaagcaccactgtgtgaaaggccattcgttgttatgtaagttgtgaaagaattggagaacctggccgggcrcggtggctcatgcctataatcccagcactttgggaggccaaggcgggcagatcctgaggtcaagagatcaagaccagcctgatcaacgtggtgaaacccc

SEQ ID NO: 366623 - DNA, 201 bp, Homo sapiens
aagtttttctaacatcagaggctttagtttttgtaacagcaataaggaggagcgtgggggggtggggtagacagagctctgctactagtcaccaatgagtstggggcttttggtgatactggcctggcactgcattctctgagtgtcaagtgctagggggagaaccctagacttccagtcagatcgtcgtggttcttgttc

SEQ ID NO: 366624 - DNA, 201 bp, Homo sapiens
gaaagtttttctaacatcagaggctttagtttttgtaacagcaataaggaggagcgtgggggggtggggtagacagagctctgctactagtcaccaatgartgtggggcttttggtgatactggcctggcactgcattctctgagtgtcaagtgctagggggagaaccctagacttccagtcagatcgtcgtggttcttgt

SEQ ID NO: 366625 - DNA, 201 bp, Homo sapiens
gtacaaagagttcccatgtactgtttactcattttcccctatgttaacatcttacataattatggtatacttgtcaaaaattaagaataaaaacaacactstacatcactattaactaaacgccaggctttctttagatttccttcttttgtcctaagtggttattcatcacctgaaaaaacccgcagtgactacaaacgt

SEQ ID NO: 366626 - DNA, 201 bp, Homo sapiens
gaacaaggattccttaggaccatgggagctgtgagtacatccctttatggggaatgactttatgggagtgatactgtctcacctaagatcaaaacctgacygttttaaaagaaaggaaaatgttaggttattcagacttctgcccaaagcagtgtttggttagagtcccatcttttccaatttgttccttttttttttttt

SEQ ID NO: 366627 - DNA, 201 bp, Homo sapiens
tcctgctgggctggcagctacataagcacagccagccacaggggcatccctagggccattactggccagcattgagcctccaaagtgcagagaacagcaaygggtccactggagtgtctgtccctcccaccaggtatcacagccttaaacaactgctcttgactttttcctttgttctgccgtttgttctgatttcggctc

SEQ ID NO: 366628 - DNA, 201 bp, Homo sapiens
ttgacgtgttcgacacttgatgtgtttgacaggcgatatgattgcttactcactcacataacccagtgtttggtacctactttcaaacagtaattaatgtrctcagtccattttagttcaaaatttaaaaccaaggaacttcatatatttttggcataagctgatttattatttatgagaactttagtataagaagcatcc

SEQ ID NO: 366629 - DNA, 201 bp, Homo sapiens
tgacgtgttcgacacttgatgtgtttgacaggcgatatgattgcttactcactcacataacccagtgtttggtacctactttcaaacagtaattaatgtgmtcagtccattttagttcaaaatttaaaaccaaggaacttcatatatttttggcataagctgatttattatttatgagaactttagtataagaagcatcct

SEQ ID NO: 366630 - DNA, 201 bp, Homo sapiens
aagaagcatcctgcaatcacaaaagtggaactagttgatattttgaaatcatacttgatttaaccaccttcagaaattctataaaacactagcaacttccytttatcagacttatgaggtagttacattatttttccttttattgacatgattcatcaaaaaattattttatccaagctcataaactaagtcaataaaact

SEQ ID NO: 366631 - DNA, 201 bp, Homo sapiens
tgggccaggcgcagtggctcatgcctgtaatcttagcactttgggaggctgaggtgggtggatcatgaggtcaggtgatcgagaccatcctggctaacacrgtgaaaccctgtctctactaaaaacacaaaaaattagctgggcgtggtggtgggcacctgtagtcccagctacttaggaggctgaggcaggagaatggcg

SEQ ID NO: 366632 - DNA, 201 bp, Homo sapiens
ggatcagacttaggttctagttccagccatccagtaaagtagatgtgtgattctgagcaattcactttttacctacctctcaattctataaaatgaggggrttgaacttcttaaagaattctaaagtgtcttgcagttctatgttctgtgaagttgaaattgccaaaactacagagtaagctgatgaggaacaaatataaa

SEQ ID NO: 366633 - DNA, 201 bp, Homo sapiens
tttgctcactagaagccgggagctctcttcttcctcggttccccttcctttaaaacagtttcttttgcttcaagttttcatttctacgttcgtcctccttsgttcagtcttgtaatgacgctctcaagcagtaacagtagtaattgctgtgatgacggtctcaagtagtaaccatagcagtcagccacagaatcatttttg

SEQ ID NO: 366634 - DNA, 201 bp, Homo sapiens
ttgacctcctgggcaaagtgaaccttgcacctcagcctcctgagtagctgcgactacaggcagtcagccaccacattatctaattttttattttttgtagygagagggtctcaacatgttggccagactggtctctaactcctgggctcaagtaatcctcccaccttggtctcccaaagtgctgggattacaggcatgatc

SEQ ID NO: 366635 - DNA, 201 bp, Homo sapiens
gggcaatgagagcatgtctgctttcaggttgtggcctggcctgctgatcatgttgggttctctctgccatagaggttcaccgtgtggcctttcaacacacrtagaaataggtaagtactggtgtcttgttatgttgttgagaggacaatacatctgtcaaagacattaaggaagagactgaaaatcccgctcgtggattga

SEQ ID NO: 366636 - DNA, 201 bp, Homo sapiens
aaaagtttttttcgtggacacaggatctcactgtgttttcgaggctgctcttgaactcctggcctcaagcaatgttcccacttgggcctcccaaagcactgggattatagacatcagccaccatacctggacccagagtcagtcctttttatcttctgttatttaaggttcttgggtcaccaccagagcctcatgtctatc

SEQ ID NO: 366637 - DNA, 201 bp, Homo sapiens
ttagagagaagcggtgggtctgcacctggattttggagtcccagtgctgctgcagctctgagcattcccacgtcaccagagaagccggtgggcaatgagakcatgtctgctttcaggttgtggcctggcctgctgatcatgttgggttctctctgccatagaggttcaccgtgtggcctttcaacacacatagaaataggt

SEQ ID NO: 366638 - DNA, 201 bp, Homo sapiens
attaaaagtttttttcgtggacacaggatctcactgtgttttcgaggctgctcttgaactcctggcctcaagcaatgttcccacttgggcctcccaaagcactgggattatagacatcagccaccatacctggacccagagtcagtcctttttatcttctgttatttaaggttcttgggtcaccaccagagcctcatgtct

SEQ ID NO: 366639 - DNA, 201 bp, Homo sapiens
ttgcttttaatgtaaaatatgcataatttgtgttttaagattaccatcagtttcatgaagagcttaatttttcccatggatgaagtgtaagtgggtacctrataatatatcgtgagcttaacattttccaaaccctgtttcttggccctaaatctgcccccttccttccacctcccaagtggaattgacatctttgcttca

SEQ ID NO: 366640 - DNA, 201 bp, Homo sapiens
gcctcccaaagtgctgggattacaggtgtgagccaccgtgcccggcctattttagatactttcgaagataagttttgtgcttaatgtgggtctgaacatamacgaggctattttctacaaatctagaactcataagaaccaaccctctactttctggcatctctgcttcccctcaaggcagacagacatgctgaaaatata

SEQ ID NO: 366641 - DNA, 201 bp, Homo sapiens
gtgataatttgacaaggtctcgctttaattaaaagtttttttcgtggacacaggatctcactgtgttttcgaggctgctcttgaactcctggcctcaagcaatgttcccacttgggcctcccaaagcactgggattatagacatcagccaccatacctggacccagagtcagtcctttttatcttctgttatttaaggttc

SEQ ID NO: 366642 - DNA, 201 bp, Homo sapiens
tcaaaggcctctggtggccagaaggggtgtggaaacctgcacacattgcatggatggtggggactggaggagcaggacatgctctatcagggggcagctgrctctttggctgcagctggttgtcgtgtcacatgggagcgtcagttcatgatgccagttcttttgtttttaagagagccagaaatctagatttctacgtga

SEQ ID NO: 366643 - DNA, 201 bp, Homo sapiens
ggtgataatttgacaaggtctcgctttaattaaaagtttttttcgtggacacaggatctcactgtgttttcgaggctgctcttgaactcctggcctcaagcaatgttcccacttgggcctcccaaagcactgggattatagacatcagccaccatacctggacccagagtcagtcctttttatcttctgttatttaaggtt

SEQ ID NO: 366644 - DNA, 201 bp, Homo sapiens
agtatttttttcccctgtaaccattgattgactgctcttggatgttctgagagacaatatccaaagtcccaattaataattgtgactccctcacgcacagkctgtagaaggcccagagtgacagggaggcaaactcaaaggcctctggtggccagaaggggtgtggaaacctgcacacattgcatggatggtggggactgg

SEQ ID NO: 366645 - DNA, 201 bp, Homo sapiens
gtggtgataatttgacaaggtctcgctttaattaaaagtttttttcgtggacacaggatctcactgtgttttcgaggctgctcttgaactcctggcctcaagcaatgttcccacttgggcctcccaaagcactgggattatagacatcagccaccatacctggacccagagtcagtcctttttatcttctgttatttaagg

SEQ ID NO: 366646 - DNA, 201 bp, Homo sapiens
aagaccatattcataactatcacactaagcaaataatttcctcttattttattacatttatacgtttatgtcattctgaatctcaaatacaaaaaaatgcrtaatgagaaattgagacatttgggattagtattgtttggtaactgaacccattccttttttttttttgaggtggggtcttgcccaggctggagtgcagtg

SEQ ID NO: 366647 - DNA, 201 bp, Homo sapiens
ggtggtgataatttgacaaggtctcgctttaattaaaagtttttttcgtggacacaggatctcactgtgttttcgaggctgctcttgaactcctggcctcaagcaatgttcccacttgggcctcccaaagcactgggattatagacatcagccaccatacctggacccagagtcagtcctttttatcttctgttatttaag

SEQ ID NO: 366648 - DNA, 201 bp, Homo sapiens
ttttgctgagtcagatccattgagttttgagccagtcacatatggcagaagtgataacagtagagtttaatcaatttcacactattttgctctgtattttrttgcaggaactggggagaaccagggagtcctaatagggatgtgggccagtaggtatcacaggtggggctggggagctggcgtgtttacatctcctgcctg

SEQ ID NO: 366649 - DNA, 201 bp, Homo sapiens
tcactgcaacctctgcctcccaggttcaagtgattctctgcctcagcttcccagtagctggggttacaggtgcgcgccaccatgcctggctaatttttatrtttttagtagagacaaggtttcaccatgttgaccaggctgatctcgaacttctgggctcaagtgatcttcccgccttggcctcccaaagtcctgggattg

SEQ ID NO: 366650 - DNA, 201 bp, Homo sapiens
gggtggtgataatttgacaaggtctcgctttaattaaaagtttttttcgtggacacaggatctcactgtgttttcgaggctgctcttgaactcctggcctcaagcaatgttcccacttgggcctcccaaagcactgggattatagacatcagccaccatacctggacccagagtcagtcctttttatcttctgttatttaa

SEQ ID NO: 366651 - DNA, 201 bp, Homo sapiens
tgcttcctcagtgcttctgttcagtgttgggggaaagcctctattgggaagagtttatctcttacgttctcagaggctttttcacttgtaaaaggggatcmttcattagctatttaattattgaaattatggaattttttttaaagaaatgaaattgagaaattcagacacatttaggcataaatgtgtataattgggcag

SEQ ID NO: 366652 - DNA, 201 bp, Homo sapiens
agcatcccaagctgaggggcttgttgtcccccaaattctgtggtgtacggctcctagcattctgcatgtgacctctcgtgcctgcctggcagcaaatacarccacatctcagcttgggtgtggtttggaggatatcgttttttttttttgagatggagtcttgctctgtcacccaggctagcgtgcagcggcacgatctca

SEQ ID NO: 366653 - DNA, 201 bp, Homo sapiens
tcctggaaggcagaggttgcagtgagctgaggttgcaccactgcactccagcctgggtgctagagtgacaccctgtctcaaaaaacaaaacaaaaaaaaartagcagggagaaaagcttcaccttggaggctatcagacagagaaggcttcctggaggaggggacattcaagttaggtcttggacagtagatagtatttca

SEQ ID NO: 366654 - DNA, 201 bp, Homo sapiens
ttcccagcacttgtggcttgggaggcggaggaagcaggacagcctgataaatgtgtagaaaggatgcatgagagatccacccttgtaaggtgaggtggtcyaatatgttgactatctgcacaggtgagcctttttatagaaagcaaaaaatatctggagacaactttgcttgcatctctacacaaatttcatgttaaaatg

SEQ ID NO: 366655 - DNA, 201 bp, Homo sapiens
accaccttcagaaattctataaaacactagcaacttccttttatcagacttatgaggtagttacattatttttccttttattgacatgattcatcaaaaawttattttatccaagctcataaactaagtcaataaaactgcaaggaaaaatgacaaaaattctatcttatgcctgatcttagtcaaatcaaatgttgccct

SEQ ID NO: 366656 - DNA, 201 bp, Homo sapiens
cttcccagtagctggggttacaggtgcgcgccaccatgcctggctaatttttatatttttagtagagacaaggtttcaccatgttgaccaggctgatctcraacttctgggctcaagtgatcttcccgccttggcctcccaaagtcctgggattgcaggtgtgagccactgtgcccagccctctgcaactgttttaaatgg

SEQ ID NO: 366657 - DNA, 201 bp, Homo sapiens
cctccaaagtagctgggattacaggcgcctgccaccatacccagctaatttttgtatttttagtagagacagcatttcactgtcttggccaggctggtatygaactcctgatctcaggtgatccacctgccttggcctcccaaagtgctgggattacaggcgtgagccaccatgctcggcctgccatttgttctttatgtg

SEQ ID NO: 366658 - DNA, 201 bp, Homo sapiens
aagtgattctcctgcctcagcctccaaagtagctgggattacaggcgcctgccaccatacccagctaatttttgtatttttagtagagacagcatttcacygtcttggccaggctggtatcgaactcctgatctcaggtgatccacctgccttggcctcccaaagtgctgggattacaggcgtgagccaccatgctcggcc

SEQ ID NO: 366659 - DNA, 201 bp, Homo sapiens
ccttgccctaagcgccgcgcggcttctctcctggcgcgaccttctcccgggggagggttgggttcggggatggagaaggctcgccagtagatgcacctgcrgactgctgtcaccttttcacttttcgggtgctcatttgtcactaactgctcctgagcccccaatcgctgctagagacccactctctccccttagcatccc

SEQ ID NO: 366660 - DNA, 201 bp, Homo sapiens
aaaagccctggagtcatcactaacccctctccttcacctactttctatataatgatccatcagaaaatccagtgggctctaccttcaaaatacatccttttatgggataactcttcaccttgtccactgctaccaccctggttcaagccaccgtggcctcccacctaaatccgtgcaacaacctcctaacctgtctctctg

SEQ ID NO: 366661 - DNA, 201 bp, Homo sapiens
ttctcacctatacaatattgatttattgtgtctcacaggcaatggggaaactgggtacttccctttccagtggccacgtactgatgaatgggactctgaamcaagtgctgctggttggagcccctacgtacggtaggtcacacactgtgaaactgtgcttcctttcagtcatgtggctgcttgtacacgtcgtattggagg

SEQ ID NO: 366662 - DNA, 201 bp, Homo sapiens
tttctcacctatacaatattgatttattgtgtctcacaggcaatggggaaactgggtacttccctttccagtggccacgtactgatgaatgggactctgamacaagtgctgctggttggagcccctacgtacggtaggtcacacactgtgaaactgtgcttcctttcagtcatgtggctgcttgtacacgtcgtattggag

SEQ ID NO: 366663 - DNA, 201 bp, Homo sapiens
cctgggggtcaggagtgctctttccgaggccgtggctcagcccaggggaagtaaacttgtgcctcttcagccctcaggtcggtttggctcggccttggctrtgttggactttaacgtggacggcgtgcctgacctggccgtgggagctccctcggtgggctccgagcagctcacctacaaagtaaggctgctgctggatag

SEQ ID NO: 366664 - DNA, 201 bp, Homo sapiens
ttcattttattttattttatttttgagacagagtctcacttgtcacccaggctggagtacagtggcttgatcttggctcactgcaacctctgcctcccagkttcaagtgattctctgcctcagcttcccagtagctggggttacaggtgcgcgccaccatgcctggctaatttttatatttttagtagagacaaggtttca

SEQ ID NO: 366665 - DNA, 201 bp, Homo sapiens
cattctgttctccagcttccctctaatggcttcccatgaccacacacaggagtggggaaaccttacttgtacttcatcggttttcttccaaatcagcgacrggagtaacatttttattcctatcaccaaaccacctgaaaaatggactcctaaacttcctcatatgacatcacattaggctaatcatgtaccctcaatatc

SEQ ID NO: 366666 - DNA, 201 bp, Homo sapiens
gatcttcccgccttggcctcccaaagtcctgggattgcaggtgtgagccactgtgcccagccctctgcaactgttttaaatggtgcttgttagcaccttgyttgtcaatgaattcatcatcaacaaaagcattaatttatttgattaaaaaaatttttttttctgtactagagatggggtcttgctatgttgcccaggctg

SEQ ID NO: 366667 - DNA, 201 bp, Homo sapiens
ctgggattacaggcatgatccactgcacccacccctgaaaacatactttatataaaccattattttgtttactttatgggaaagatagtctttaaaaaaawaaataaataagaaccatttcctcccagattataaaggtgaattatgcttattgtggaaacttctgaaaatacaaggaaatatatagaaggaaaaaaaaaa

SEQ ID NO: 366668 - DNA, 201 bp, Homo sapiens
ggcacggtgacctcgtggtgggcgcaccaggctacagccgccccggccacatccacatcgggcgcgtgtacctcatctacggcaatgacctgggcctgccrcctgttgacctggacctggacaaggaggcccacaggatccttgaaggcttccaggtgagacaccatctcatcctttctcttctagtggttagtagctact

SEQ ID NO: 366669 - DNA, 201 bp, Homo sapiens
aggatgggcacggtgacctcgtggtgggcgcaccaggctacagccgccccggccacatccacatcgggcgcgtgtacctcatctacggcaatgacctgggyctgccacctgttgacctggacctggacaaggaggcccacaggatccttgaaggcttccaggtgagacaccatctcatcctttctcttctagtggttagta

SEQ ID NO: 366670 - DNA, 201 bp, Homo sapiens
ttgtgtttcaaagctttgttgaaaatgacatatgaaagtaacttagtgtatttttaaagcccctatcccatggaacttggagccagagaaaaattgtatargtcagttcactaggaataggtccactatgaggacctatcttttatttttcttttttgagacagtcttgctgtgtcgcccaggctggagtgcagcggtgtg

SEQ ID NO: 366671 - DNA, 201 bp, Homo sapiens; identical to SEQ ID NO: 79343

SEQ ID NO: 366672 - DNA, 201 bp, Homo sapiens
atgggactctgaaacaagtgctgctggttggagcccctacgtacggtaggtcacacactgtgaaactgtgcttcctttcagtcatgtggctgcttgtacaygtcgtattggaggaaagtgatgagatctggagctgaacagatctaggtttcaatatttccttttttcattaataacattctgtgtaactttggggaagtt

SEQ ID NO: 366673 - DNA, 201 bp, Homo sapiens
tctactgggaatttatgagaaactgtatggtcgaaaagtcatcaccgaaaatgtaatcgttgattgttcacatatccagttcttagaaatgtaagcgtaaytcagaggacaatttgcagctgattttgttgtgacttcctttgcacagtttttatgtttttgtttcctgagactggattttggatttatggattctgctta

SEQ ID NO: 366674 - DNA, 201 bp, Homo sapiens
agtggacactccaaggaagttttctcacctatacaatattgatttattgtgtctcacaggcaatggggaaactgggtacttccctttccagtggccacgtrctgatgaatgggactctgaaacaagtgctgctggttggagcccctacgtacggtaggtcacacactgtgaaactgtgcttcctttcagtcatgtggctgc

SEQ ID NO: 366675 - DNA, 201 bp, Homo sapiens
aattttaattaccttgcacgacgctggtaagagcaatgtacatctaaatatgtggtatctaagtggcatttagagccttgactttttttcttagaaaatayaactgacaatataattagaagtcttctgcactggtaaattttgaaaagtaaaattgcatattagcatagtttagattctttgagaaattgaattccactc

SEQ ID NO: 366676 - DNA, 201 bp, Homo sapiens
ctccccacacaggagagtggacactccaaggaagttttctcacctatacaatattgatttattgtgtctcacaggcaatggggaaactgggtacttccctktccagtggccacgtactgatgaatgggactctgaaacaagtgctgctggttggagcccctacgtacggtaggtcacacactgtgaaactgtgcttccttt

SEQ ID NO: 366677 - DNA, 201 bp, Homo sapiens
gaggcctgtcagttgggaggcaggatggtgggtgtggcacctggagagcctggatgttgcgattaactccaatagtccccacacttccaggcctggggtcrcagagacagagcctgctgggaggcctggatggggggaggtgcatttcctttccttgctcctgagtacctggccagctgtcagtcttgtgccctggcagct

SEQ ID NO: 366678 - DNA, 201 bp, Homo sapiens
cccctccccgcaccccacaacagtccccagagtgtgatgttccccttcctgtgtccatgtgttctcattgttcaattcccacctatgagtgagaatatgcrgtgtttggttttttgttcttgcgatagtttattgagaatgatgatttccaatttcatccatgtccctacaaaggacatgaactcatccttttttatggct

SEQ ID NO: 366679 - DNA, 201 bp, Homo sapiens
agaggattgtgaagggaatggggatggcgagaggctggagaggtatggacaatagaggggtgcatttcctgtagaacaggggtccctaacccctgggctgyggaccagtaccggtccatggcctgttaggaaccaggctgcacagcaggaggtgagcagcaggcgagcaaacgagcattaccatctaagcttggccttctc

SEQ ID NO: 366680 - DNA, 201 bp, Homo sapiens
aaaaaaaaaagctcaacatcactgatcattagagaaatgcaaatcaaaaccagaatgagataccatctcactccagtcacaatgactattactaaaaattaaaaaaaaaaaaaaagatgctggcaagattgtggagaaaaaggaacacttttacactgttggtgggagtgtaaattaattcaaccattttggaagacagtg

SEQ ID NO: 366681 - DNA, 201 bp, Homo sapiens
tttgaaaagaattgttgatagttacatcttcaaacttatcattccagtatgcatctttaagataatgtgattctaagtagatgactttatattcttgattraagagtgctatacatgttaagaaatgcattaaggaatacaataaatattctaaagtgatgtagatcagtgtgactgtcctttatttcacttgggaatggc

SEQ ID NO: 366682 - DNA, 201 bp, Homo sapiens
ctaggccccttgaaaatccaggtacacaaccaaaaattaataaaagcgagaaaaggtaattgccaatatgttaaatttttttcttgtgagaagccacaatwatcagaagagactgtcccagcatcattagctaaagtgaactctcttgtgaattttttgaagtgtgaaggacgccatatttccttttttgttcagttagct

SEQ ID NO: 366683 - DNA, 201 bp, Homo sapiens
tgtcatttatttaactgtaaggtgacaaaataaatatcacctcatgtgaaagtaatcttaaagctaaggcctatgtctttttgaaaaccttcaacaaagaycacctgggttaatttgctacagtatgaattgtgtttaaaaacattctttgtaaaatcagtggagtgtgtgtatagggtagagtgaggtggttaaaaatta

SEQ ID NO: 366684 - DNA, 201 bp, Homo sapiens
atagatctagtctacaaatactgaagtgataattagggcttatgcaagattgcttcatttgaaaaattagttgctttttttctttttctttttttttttttaaacgagtcacttttcaaatctttctggttcaaggacaaagctaaaagaaggcatcttaaagtcatggcttatataaatgatttaagtaagaaatgtggg

SEQ ID NO: 366685 - DNA, 201 bp, Homo sapiens
aagcttctttgtctcttcttacagtttttctcttgaaatctattttgtctgatgtaagtatagctactcctgttctgttttgtttttttttttttttttgkgggtttccattggcatgggatatatttttccatccctttatttttggtctctgtgtagctttataggtgaaccatgtctcttgtagacaacagaccactg

SEQ ID NO: 366686 - DNA, 201 bp, Homo sapiens
cttgtgttgaagaatcattgcaggtattaggaaagagaggctctcttttggcctaaggagagaaaatcctttaactaagcctgcaaatgtaataaaggctkccctcctgtgtcccggaacagacatctctgatggatcacagaatgctttcctggtaggccgagacacacattagggtctctttcaatacagtaatgtgcg

SEQ ID NO: 366687 - DNA, 201 bp, Homo sapiens
gtgttaagctctcaactccctatgagcccctctgctagtcttctgtgtgcataacctaccatctaagtttctctggaaatggcctatttctgtttttttttgaaggagcctgtaatagaaaacctatggggagggatgagagtgcttcactcaggagactgttgatgctttgtctcctgcaagcagcctggcatgcacgtg

SEQ ID NO: 366688 - DNA, 201 bp, Homo sapiens
ttttaaagaggatagaactataaatatttaaagtactaagattcccttaggcatcttaaatttgttttggatttagaagcagggtggcaaaggaacatacmtcttgcttttttgtttataatttttaaattatataatttacagcaaatgttttacatcaagaagtaaatgagtatgtttattgtgaatttaaaagaaaat

SEQ ID NO: 366689 - DNA, 201 bp, Homo sapiens
tagaccaagggccccaaccctcaggccatggacctgtactggcccatggtctgttaggaactgggccgcacagtgggagatgagtggtgggtgagtgagcrttactgcctgagctctgcctcctgttagatcagccctggcattatattctcataggagtgggaaccctgttatgaactctgcatgtgagggatctaggtt

SEQ ID NO: 366690 - DNA, 201 bp, Homo sapiens
tactatgattgtgtttaaaattttgtaattatttaatgactactatctttgctagtttgtaagtttcattatagcaggggctatgtctgggttttattttyaatattttaactttgtagccccagtattttgtatagttggtacaaatgagtgaaggaaagaaataatgagtttccataccactttcttaattcaggcttc

SEQ ID NO: 366691 - DNA, 201 bp, Homo sapiens
ctctttctgatccaaagcaaactagccataaagtggctttcccattccttgttttgttcttctatcactgtgcttaacagcaccagtatccatccagtatrtaagctggaaatcctggaaccatcttctcttctccttgctgcacttccaattgatcaccaagtgtcatatgtgtgcctctttctgaaatgttcctcagtg

SEQ ID NO: 366692 - DNA, 201 bp, Homo sapiens
tagactattgggaggtatcttcttttcttcattattactgaggggcagtggggagcatttaatactattttcactatagaaaattattagtgggaaaaagkttataagagtaccactaacactttacccaccattcatccttgaccctgtcttttcccaaatctctttccaacctctgactctcctgagctgcagtccttc

SEQ ID NO: 366693 - DNA, 201 bp, Homo sapiens
acctgctaatctgagtggaaatgacagttcatttgccctctttttgtttagtgatgcagcattatgttaaagcacggaactagaagattcacatcccaccygcttcccctgggaaagtttggttacagagaaatgtatgccacaaaatgattttgttgtgaaaacagctataaatatgtgttatcataaattgagtaaaca

SEQ ID NO: 366694 - DNA, 201 bp, Homo sapiens
ttaaaagaaaaataattagaagtgaagtgaaaatgaagctttatttctgcaactataaattttcatatacagtaagatctggaaacatatgaattgttttmaaaggtgttatgtcaacttacttcatatgtatttagcaccagttttgtctgaactaaagtaatagtttttttaaaaatctatccaagattcccaatttac

SEQ ID NO: 366695 - DNA, 201 bp, Homo sapiens; identical to SEQ ID NO: 79407

SEQ ID NO: 366696 - DNA, 201 bp, Homo sapiens
tgtgggtttgtcatagatagctcttattatcttgagatatgtcccatcaatacctaatttattgagagtttttagcatgaagggttgttgaattttgtcamggtcttttctgcatctattgagataatcatgtggtttttgtctttggttctgtttatatgctggattacatttattgatttgtgtatattgaaccagcct

SEQ ID NO: 366697 - DNA, 201 bp, Homo sapiens
ctgtgggtttgtcatagatagctcttattatcttgagatatgtcccatcaatacctaatttattgagagtttttagcatgaagggttgttgaattttgtcacggtcttttctgcatctattgagataatcatgtggtttttgtctttggttctgtttatatgctggattacatttattgatttgtgtatattgaaccagcc

SEQ ID NO: 366698 - DNA, 201 bp, Homo sapiens
ggctcactgcaacctccacctctcgggttcaagcaattcttctgcctcagcctcctaagtagctggcattacaggcatatgccaccatgcccggctaattwttgtatttttagtagggacggggtttgaccatgttggtcaggctggtctcgaactcctgacctcatgatccacccacctcaccctcccaaagtgctggga

SEQ ID NO: 366699 - DNA, 201 bp, Homo sapiens
attcagtatgatattggctgtgggtttgtcatagatagctcttattatcttgagatatgtcccatcaatacctaatttattgagagtttttagcatgaagkgttgttgaattttgtcacggtcttttctgcatctattgagataatcatgtggtttttgtctttggttctgtttatatgctggattacatttattgatttg

SEQ ID NO: 366700 - DNA, 201 bp, Homo sapiens
atctaatttaatccactacgtcttacatgctgtttaaaagcccctgctaaccataccaggaagtattttcaaaacttttcaattttgtgtactttaaaagrtacaaaaatatttctatcatttggaataaaactccctcgagagatatatatttatatcaagatgaagtatttatatatttataaataagcttactctttc

SEQ ID NO: 366701 - DNA, 201 bp, Homo sapiens
ttttagttggcattaccaataggcagcctttctgtagctgtaaaaacccaacacgaactttttctcttcctgtttctctatgactctcttcactgaaaaaygttccttgtttaattctattaattatattatgtctccctgttttccttggggtatatgataatggtgtaatttttaaaaactattatagataagactggt

SEQ ID NO: 366702 - DNA, 201 bp, Homo sapiens
gggacaatttgacttcctcttttcctaattgaatacccttgatttccttctcctgcctaattgccctggccagaacttccaacactatgttgaataggagyggtgagagagggcatccctgtcttgtgccagttttcaaagggaatgcttccagtttttgcccattcagtatgatattggctgtgggtttgtcatagatag

SEQ ID NO: 366703 - DNA, 201 bp, Homo sapiens
atttccttgagcagtggtttgtagttctccttgaagaggtccttcacatcccttgtaaaagttggattcctaggtattttattctctttgaagcaattgtkaatgggagttcactcatgatttggctctctgtttgtctgttattggtgtataagaatgcttgtgatttttgtacattgattttgtatcctgagactttgc

SEQ ID NO: 366704 - DNA, 201 bp, Homo sapiens
tccagcaccatttagttataatagggaaatccatttcgcaccaatttgccttgtgtgtgcggcagatgttgccgaagatcagatagttgtagatatgcggygttatttctgagggctctgttctgttccattgatctatatctctgttttggtaccagtaccatgctgttttggttactgtagccttgtagtatagtttga

SEQ ID NO: 366705 - DNA, 201 bp, Homo sapiens
gtactaacagtttttccaaggtggtcatttcagtttaaattccccttggcacatatgagagttctgattgtttcacatctttgtcgagacttggtattttyttcttttttagccatcccttcatgtttgtggtggtgtctcatcatactttttgccattaaaagtgttttgctacgaaaaatacttccccattaaaacaat

SEQ ID NO: 366706 - DNA, 201 bp, Homo sapiens
aatggcgtgcacccgggaggcggagcttgcagtgagcagagatcgcgccactgcactccagcctgtgggcgaaagagcgagactccgtctcataaaaaaawaaataaataaataaaataaaaaagaagttgcggatacctggcaaagaagagaaaagcattgggtcctatgaacaaaagcaatagggttttaaatacatct

SEQ ID NO: 366707 - DNA, 201 bp, Homo sapiens
agaaatctgattatacatatgtacctacacctataattacttgtgtgtgtgtgtgtgtatatatatatatatatattacatatatatatatatatatatattactatactagtcaggtataatagttttttgagagcccaatggtcagtctatcactctaaaatgtctggttgtgtaccaatgactttgaacctcaagata

SEQ ID NO: 366708 - DNA, 201 bp, Homo sapiens
gagaaatctgattatacatatgtacctacacctataattacttgtgtgtgtgtgtgtgtatatatatatatatatattacatatatatatatatatatatattactatactagtcaggtataatagttttttgagagcccaatggtcagtctatcactctaaaatgtctggttgtgtaccaatgactttgaacctcaagat

SEQ ID NO: 366709 - DNA, 201 bp, Homo sapiens
tgagaaatctgattatacatatgtacctacacctataattacttgtgtgtgtgtgtgtgtatatatatatatatatattacatatatatatatatatatatattactatactagtcaggtataatagttttttgagagcccaatggtcagtctatcactctaaaatgtctggttgtgtaccaatgactttgaacctcaaga

SEQ ID NO: 366710 - DNA, 201 bp, Homo sapiens
ctcacagaaaagtttttgaataacattggctgcatagtaggtactaaatttttcctctttgatttttatatttttaagagaatggggtgtcactatgttgrccagcctggttttgaactggcctcaagtgatcctcctgcttcagcctcccaaaatgctgagattacaggcatgagccactgccctggcctacattagttt

SEQ ID NO: 366711 - DNA, 201 bp, Homo sapiens
acgttcctgactctggctttctgactgcgtctcccatgtggaacctgattcagagagacctcatgatttcctgtgtaaactatttctcatccttctgttgytggacaagataatgaaggttgtcaatagttctatgttaaataaaattaagtaagcctcagagtgagaaactgaagagtaaggtttctactttaggacagg

SEQ ID NO: 366712 - DNA, 201 bp, Homo sapiens
cggctcactgcaacctccacctctcgggttcaagcaattcttctgcctcagcctcctaagtagctggcattacaggcatatgccaccatgcccggctaatwtttgtatttttagtagggacggggtttgaccatgttggtcaggctggtctcgaactcctgacctcatgatccacccacctcaccctcccaaagtgctggg

SEQ ID NO: 366713 - DNA, 201 bp, Homo sapiens
ccttttcatctcaaattttctcacttcttgtggcaattttgttaatttgcattttccaaaaagcatccatttcttttggattttcaaattcattcacccaraacatgtcatattcttgtatacctttaatttcctcagactgttattatatcttctctttatcctaatgctgtagatgttcagacttactaattttcttta

SEQ ID NO: 366714 - DNA, 201 bp, Homo sapiens
ctgagaaatctgattatacatatgtacctacacctataattacttgtgtgtgtgtgtgtgtatatatatatatatatattacatatatatatatatatatatattactatactagtcaggtataatagttttttgagagcccaatggtcagtctatcactctaaaatgtctggttgtgtaccaatgactttgaacctcaag

SEQ ID NO: 366715 - DNA, 201 bp, Homo sapiens
taaaattcttgatgcagaatagatgctgttatgacaaaggctgagaaatctgattatacatatgtacctacacctataattacttgtgtgtgtgtgtgtgtatatatatatatatatattacatatatatatatatatatatattactatactagtcaggtataatagttttttgagagcccaatggtcagtctatcactc

SEQ ID NO: 366716 - DNA, 201 bp, Homo sapiens
aacttggtagaggctgtggaaattttgttgtagaaatgcaaatattgattatatttctggaacctgaaggttcacacacccaaaataagattctggtcagkagctgtttacagctagagaagccaaccatatgattactctcccttaaaatgtagatgctatgacgatagggactttgctgtttcttggggattgagtgct

SEQ ID NO: 366717 - DNA, 201 bp, Homo sapiens
ataaaattcttgatgcagaatagatgctgttatgacaaaggctgagaaatctgattatacatatgtacctacacctataattacttgtgtgtgtgtgtgtgtatatatatatatatatattacatatatatatatatatatatattactatactagtcaggtataatagttttttgagagcccaatggtcagtctatcact

SEQ ID NO: 366718 - DNA, 201 bp, Homo sapiens
tttctagacttccacagctgctttttttttttttccctctcttttggagttaatgtttctcatgattctagacattattgcttgttgtctgttttttttcytttctttttggcaaaagaagtttcctcctaaacttttttgaaacttaaaatgagtcaggaagaaagcctggaatgtgagtctccctcttcctccccctca

SEQ ID NO: 366719 - DNA, 201 bp, Homo sapiens
atattcgtataacataaaggtaaaatcagggtaattgggatattcattaccatatttatctattctttatgctaagcacattcaaattattctcttctagsaactttgagaggtacaatagatttttaactatagttatcctatttatctattgaacgtgaggtcttactcacatttcctcttcattttactcattttact

SEQ ID NO: 366720 - DNA, 201 bp, Homo sapiens
gggcttttgcttcggtccaagcagataaaacgcatggtctcttcatatgtgggagaaaatgcagaatttgaacgacagtacttatctggtgaattagaagwggagctgacaccacaggtgagaaaatttgcttttcttttataatactaacttactttaaaaattccttttttctccgtggaaatttctttgtgcaaaaga

SEQ ID NO: 366721 - DNA, 201 bp, Homo sapiens
gctcatctttttttccagtaaaatttatttcagcagtgataaaatacaaagcatacctcaaccacgaataatttatttctgtttaatttaaagcgtttatsaatccggaaagagggagatggggaagccaaatctgctaaacctggagatgacgtaagggaacgaatcatcaagagggccgctcttgagtttgaggatggc

SEQ ID NO: 366722 - DNA, 201 bp, Homo sapiens; identical to SEQ ID NO: 79401

SEQ ID NO: 366723 - DNA, 201 bp, Homo sapiens
ttacttgcatgtctttcaggaccagggtagctatcctcttataattactcctagacacttcagagcaccttcttctgtttcctgtaattctttacccaatrtcatttataaacttttttcctgtcattcatgtgctttcaccttccaaatattccctttctctctccctctttcttcattcctttctttgttcaaatcatt

SEQ ID NO: 366724 - DNA, 201 bp, Homo sapiens
tgttgtgatggagcatgcggcattgctagctcattttattgcagaatctttccatacttgctatcagggtcaatccttaacagcaaaaagatgagttggcyatgaaatgagcatccagcaatcatctctccattatgctagccagaacgcatttcagaactagagttgcatcctttaagaaatgtatgtttgctgatgaga

SEQ ID NO: 366725 - DNA, 201 bp, Homo sapiens
ttgtttcaaaccatagttgaaataaatgtaccaaaattttctattttctatagcagctttttgtaaaacgcacttagtctgtttttccactagggggtgcrgtagggatgagaatggagttctacattcacatggctccattttgtgcagtgatggagtgtggcaatggatgcttgttttaattcccggaaataaaccgtc

SEQ ID NO: 366726 - DNA, 201 bp, Homo sapiens
cgtgttagccaggatggtctcgatctcctgaccttgtgatccacccacctaagcctaccaaaatgctgggattataggcctgagccaccacacccgacctygtcgaacttgcgaggttatttctgttttgtgccatataataattattttgatggaaattgtcattgtcctttttcttcccactctgacaggctgtgtttg

SEQ ID NO: 366727 - DNA, 201 bp, Homo sapiens
aagcaattacaggggattttgctttggtgaaagcctggaaggcggaccgagcaggaaacgtgattttcaggtattgtgatagttttaaaaacactcgtgcrtatcagcaactctaaaaatggacatcagagtgaatttggaatttaaaaatgtattttcgtaatggcccaaaatcatacatgcccatgtgtattgcacata

SEQ ID NO: 366728 - DNA, 201 bp, Homo sapiens
ttgcatacatcatctcatacagtgctcaccacagctctatggtaggacagatattcttattcctggtgtacagataatgaacacaaattcagagagatttrgtgttttgccattgactcatagttaacaggctagatctcaggtgttctgcatctaatcttgtgcatttttcactcttggaaacaagcattaaatttaaga

SEQ ID NO: 366729 - DNA, 201 bp, Homo sapiens
atttaacttgatgttaagtattaattcaagaaaaagtaccacagttcatttgttttatggataacaatgacagcttttttttttgttttggaaatggatccattctatctaaatatataatagttaaaattttgctgtaacttcagctttctggttagatagggtctcactagaatgctctctttgggaatcaagcaatgg

SEQ ID NO: 366730 - DNA, 201 bp, Homo sapiens
caattgcattaaattttctatgccccctctgtctgataaaggccttgactgcagcagcagccttgggtacaaacctgtaaaccatgtgctgcgggttgcaragctgcctccaccacttgtatccatagatagattccccattccttcctttatgggttccctccagaactctttataatgccctctgctctgcagccttct

SEQ ID NO: 366731 - DNA, 201 bp, Homo sapiens
tgtcctttgggtatctcagtgtttggaaggggcttggataattctgcagcctttccaggcttaaggacccagggcagaaacaggggcttataccaaaaccrtgccattttggttgtaacatattgaacctcaaagaagacttcaaatggttcttaacttgaggctttgaggatcaacttggaacccaattttcgtgggagt

SEQ ID NO: 366732 - DNA, 201 bp, Homo sapiens
ggcactaacttggaaaagcaacaagcttggcgggagatcctcccgcggccggagggccctgaaccctaggccaagactcatccacaacctagggggaggcrgccaccagcgccccatcgaagctaaagggctgacagaagggctgtagcggcaagtgtgcgccaacacagctgcacacgcccagacacctgaggcgctgag

SEQ ID NO: 366733 - DNA, 201 bp, Homo sapiens
atgtaaaggacacttggaagacttggattaagtcctgagtctctctatgactttctggttgctctgacaatatcgaggctttatttctggatatgtataartaggaattataaaaatctgaatgtaggtaggtatataggcatttgtaggagcttggattttaagtgcatttggaaaggtcataattttagcttgcgtatt

SEQ ID NO: 366734 - DNA, 201 bp, Homo sapiens
tctggtgagggcctcatgctgcttccactcatggcctaaattggaggaggagtgggtgtgcacaaagagatcatgtgatgagagaggaggcaagagccatwtgacttcttttgaatgaaagtcacatctgttgttcttttggggacataaataaagagggcctcagatactgatgctttctgttcacctgtgggcatacaa

SEQ ID NO: 366735 - DNA, 201 bp, Homo sapiens
ccattggaacctcaaatgaaaccttgttatacaaattgggaaactgaggtccagaaaattgaagtgatgggttcaagataacattgctagggactgagttyatacccagtctcctgcttgtgacccctggcctttttctctatacactgagttatatctgctgatgacctgacttgcacagaggtgcagacagcagtgcta

SEQ ID NO: 366736 - DNA, 201 bp, Homo sapiens
taatgatttttgaaatcaatttgctcagtggtcctgggtatgaagcagaaatgtgttaaatatcttcttcccttcggggaacatgggcatcttcatatcartataagatttgtttatattatgatttagcatgtagtaaggctggaagctctcatagtggtagtgtacactatgtagttatttgtaggaaagcttttccaa

SEQ ID NO: 366737 - DNA, 201 bp, Homo sapiens
cggatacctggcaaagaagagaaaagcattgggtcctatgaacaaaagcaatagggttttaaatacatctatttctctagactaatgatttttgaaatcartttgctcagtggtcctgggtatgaagcagaaatgtgttaaatatcttcttcccttcggggaacatgggcatcttcatatcagtataagatttgtttatat

SEQ ID NO: 366738 - DNA, 201 bp, Homo sapiens
aggccgaggcgggtggatcacgaggtcaggagattgagaccatcctggctaacatggtgaaacctcgtctctgctaaaaaatacaaaaaattagccgggcrtggtggcatgcgcttgagtcccagctactcgagaggctgaggcaggagaatggcgtgcacccgggaggcggagcttgcagtgagcagagatcgcgccact

SEQ ID NO: 366739 - DNA, 201 bp, Homo sapiens
ccaagcagatgttattacagatttttgtctttgatatgataaatttcccattaatttagaaaatctgtgtttaaggaatgtgctatcattgcatagttgarctgcaatttgtgaaagttcaagctgctgtactgacaaaccatttgacaaatttgtaactgagactcttttaagcaaagactaacttctggagcctaatgg

SEQ ID NO: 366740 - DNA, 201 bp, Homo sapiens
caatttactgtgcatttgggactaaaagtaggcaaggtcagagccgaaacctcttgcttagaagaaaccaagttagagaagacttaaaaaacagaaaaagrgctaattatactctgaaaataagaaatacaaatatttaccataactaaaattttaaactaggaagaacaattaacaagtttgttagcgttgttaattaac

SEQ ID NO: 366741 - DNA, 201 bp, Homo sapiens
gacagccctgaaaaacacattcccaaagtctgttcctctttcattcttctggccaatccctgagcaccagaggagaatttagttggaagaataacagaagkagcagacagtgtgatagtaacagattatttgcttcaaacagactgaacagcgtatcttcctctttaaacaaatctgaccactttcatttagttcctaaag

SEQ ID NO: 366742 - DNA, 201 bp, Homo sapiens
atgtatggtatcctttatccttctgagcccgggcaaagacatagcctttgcttttcccatattgatcaggctattagacctcttgcatagtgagtcatctstagtctatggtaacttttaaggtaattaatcaattttttttttttttttacaaaatgtggcatataatccaaaggtgtcaagatacatgacagatatctc

SEQ ID NO: 366743 - DNA, 201 bp, Homo sapiens
ttcagttaccaatgaatgttactatagagacccaaaggatctgatatacttttaggcagaaattttggtattgtcagaaaacttttttaaaatttaaaaayggtaactccatttatcaataaagacgatgaaaaacgatctttacttttggcaggagttttgaatagtgaaaatcattctttaaaagtcaagctgtgttta

SEQ ID NO: 366744 - DNA, 201 bp, Homo sapiens
tgacaaatggctagcttctgaggccactactttgatattaatgttactgaaaaagctgactaattagagactttttttttgaaaaattacaaaataatgcrccatgggtgattggagaatatattcatttattacattcagagtaagccacctttaaataaagcttctgttcagatctgtatatgtagaagatttatggta

SEQ ID NO: 366745 - DNA, 201 bp, Homo sapiens
attaaaggactattgtgataaaatgaagcacgcatgcacttttataagtgactcaaatgacctacttaaaaactgctatttctagtgaaaccagttaatcracatttgaaaaacaagtcttcagatgcccctggttatcatcctggggagtacaccatcaactgtgagaataggatgtcatatcttgcactaatgagatat

SEQ ID NO: 366746 - DNA, 201 bp, Homo sapiens
gatttttggttacatggataaattgtataatgctgaaacctgagattttagtggatccgtcccacatagtgaaatctgagttgttgcataaagtgcccaascttatttttctttttatcatgataaaatatttaatttttcccttaaaatgtaagcaatgtagtattgtattttatgtagtagatggtacgttcctgactc

SEQ ID NO: 366747 - DNA, 201 bp, Homo sapiens
cttattcctggtgtacagataatgaacacaaattcagagagatttggtgttttgccattgactcatagttaacaggctagatctcaggtgttctgcatctratcttgtgcatttttcactcttggaaacaagcattaaatttaagaatcaaaatagtgctttaaaggttgtaacatgtgctttggaaatgagacatcaagc

SEQ ID NO: 366748 - DNA, 201 bp, Homo sapiens
tctttatttctcctccatgcttgaaagatattttgccatatatactattctagggcaaaagtttctttccttcagtcctttaaatatgtcatgctactctytcctggcttgtaatgtttccactgaaaagtctgttgccagacatgttggagctctgttgtctgttgtttcttttctcttactgcttttggaattctttat

SEQ ID NO: 366749 - DNA, 201 bp, Homo sapiens
tgaataaggtaggagaacgaggcaagtggagataagagggtttgtgctctgttcagaaggaagagtaagtacaaggtgctgaggcagctacaggcttgccstgtttggggaacaggagggtggtgaggctggaacagcacatgaggcagagagtgataaggatggagattgaagagaggcaggagtcaaattcatgcaaag

SEQ ID NO: 366750 - DNA, 201 bp, Homo sapiens
tggaatcaggtgcctcaaactcgtagttttttaattttgtctgaattccctaggaatatgacagataatttatttcttaattcttagtactttttttttttacttaaagcaggaaaaagtgagttcatttctaaattagtgttatttattgaggtcctactctttgccaaaccctggtctaagcactgtggtaaaatgatc

SEQ ID NO: 366751 - DNA, 201 bp, Homo sapiens
gtctaaataagtttaaaaggcttcttgacaaagtaaaagacaggagcctaattgttaaaatgaactgtagtagtatctcataaagttcccggaaaacttgsgataaatactttgatagcttgctagaagttgaaaaattaattcacctcgtgaaaatatgagactaaaatatttcttaggttcatttctgcctggaatcag

SEQ ID NO: 366752 - DNA, 201 bp, Homo sapiens
cccaaatataactgttcatcttcaaagtgaaaatggagttctgggtttggtaagatgaaaatttgttttctaaaatccagtcttaatgaagaatgagatayttcatgttgtgaaattttttattaaatttttttatttcaatagcttttagggtgcaagtgatttttggttacatggataaattgtataatgctgaaacct

SEQ ID NO: 366753 - DNA, 201 bp, Homo sapiens
aggaactgttatgatagaatagagagttcatatggtcactatttattttgtatcttggacacatttgagcttttgatggaataacctacttctatttaaartgctgagtaggatggggtacatctatcctaggcatattatagaagagtagaatttcagataaaggtatttgagatgctcaggttggagaaaatttcaaaa

SEQ ID NO: 366754 - DNA, 201 bp, Homo sapiens
aaataataaagatattaaactatagtatatataatttaacagatacaggattattgtttccacttaacactcttcactggcttgtgattaattttttttttgcttgtttttgttaagaatgtgtaaatcttcttgagcaaaagatttatgatatagggaaaatgttcatagctatttataatttgggtccacatttcaatg

SEQ ID NO: 366755 - DNA, 201 bp, Homo sapiens
atattatagttctaatatgtgattcagtgagaatcttcatttactaattgaatgtatgttgtatttgacagggtccatatccacgacaacatgaagctgaygcagatctcatcaatgcaggtaagctcacttatttctagcccttccctttgctattaattttgtgctacataataagagtttggactcaattctttgtct

SEQ ID NO: 366756 - DNA, 201 bp, Homo sapiens
ctgtaaccacacagccttttcatatcgctgaactcttactcatgtggctcccttgtttggaatcactgtcctgacaagtatttaacacctggcaaactttsgttttctagtccaccaggtagaatgaattactccttcatctgtgctccttcggagcactgagtatccctccagcattggagaagaacatgtatgttccct

SEQ ID NO: 366757 - DNA, 201 bp, Homo sapiens
gataaaacgcatggtctcttcatatgtgggagaaaatgcagaatttgaacgacagtacttatctggtgaattagaagtggagctgacaccacaggtgagamaatttgcttttcttttataatactaacttactttaaaaattccttttttctccgtggaaatttctttgtgcaaaagaggtaaggcagaaggaatagtact

SEQ ID NO: 366758 - DNA, 201 bp, Homo sapiens
tttcttttgtcactggacctttgcttgtctgtttccttagctccccttagaccactttgactaagtcctgcttgcctaacactgcttatctttgaagtctstgggatgcttttccctctgagaaattttccctcagtaggcttgtatccttattatctacctctatcagagtgcctctatcacaatcaagacctatgcaaa

SEQ ID NO: 366759 - DNA, 201 bp, Homo sapiens
tttaattattaaattttggggggaagggtggttagagagaagggaggtgtctcataagggagagatcataactacttgtatggccttgtcactacctgccmctacaacatcagccctgatcttaaagctgataatgtggtaaattttaaaatgggaatatgcaagtatgctgtgagaggttcctaaaataatcatgtggat

SEQ ID NO: 366760 - DNA, 201 bp, Homo sapiens
aaagaagggaatgatcaactgagtgtgaagaggttggtaatacagggcctggaattgaatcattggatttgcaaaaacagaggtcattgacaactttaagrattattcctttttggaatagaggggatgaaaatctcattagattcaagaaagaaccaaaaagtgaggaagtggtgactacgaaatgtagaattctttcaa

SEQ ID NO: 366761 - DNA, 201 bp, Homo sapiens
agaaatgcagcctttattgatcactgtagtttgcctaatgttctactcatggctgtacatatgaagaaaaatagtcttagcttagtgagctcagcatctartggaggtggtggcaagaggtcaacatgtgaagggaggaggaagcacaggagcacctaggagggccacacactggggacacccatgggaacatgactgcag

SEQ ID NO: 366762 - DNA, 201 bp, Homo sapiens
gaagaggtaaaataactataattcactgtttctctcttaactttcacatttgtatgttttgggctacagtcctaaagtgtctttgctgcttccttttatcrcacctttatctgtcttcccaaagtcttataagccccgtcatgtgcttctgctagctgtgctgcttctagtgagctcagagatactaggaatgtacgagta

SEQ ID NO: 366763 - DNA, 201 bp, Homo sapiens
tgtgactggcttattttgcttagcataatgtattcagggttcatctgtgttgtagcatgtatgacaggattatcttctttttaaggctgtataatatttcrttgtgcatatataccacactttcatgacccactcatctgttggtagacatttgggttgcttccaccacttggctactgtgaatagtgctgcaaagaacat

SEQ ID NO: 366764 - DNA, 201 bp, Homo sapiens
tcaccctcactcacttcctgaaagtttctagaacatcgtaagaatatcttgccttgggacctttgcatttgttattctttatgcctagaatactttttccyagctatccacatggctcactgcctcacttcactcagactcaaaataccagagaagctttctttgactaccttattatatacaacagaactcttccgtctt

SEQ ID NO: 366765 - DNA, 201 bp, Homo sapiens
ctaggaatgttccagaggtcccatcaagatctgggctctaacctagagtaacccaatgcagttgtgaaatttctaagtctcatatttttgcttctgtattrtgcattttgcattcttcatttcttaatgttttcttattttaatatacagtattttaaatgacttaacttttgattaaagttgctttagaaagaataacca

SEQ ID NO: 366766 - DNA, 201 bp, Homo sapiens
gtcttaaaacctagagctcacacaggctggccatacaaccccaccatataagccaattgcttggtcctgtggcatttgtccctagaggggcaatggcattrtctcttttataagtagctttggagagaggaataacaaaaatggcaataataaaaggtgacgtttataaagccctttctctgtgccaggcaagttagagta

SEQ ID NO: 366767 - DNA, 201 bp, Homo sapiens
catcagacccttgttaaaagaaaaactttagacaaattaactttagcagagtttatttgagcaaagaacaattcatgaatcaggcagcactctgaaccagyagaggttcagaaagccccactcagcaatgtgagcaggcagtatttataggcagaaagaggaattgaggtacagaaacagcttgattgattatggcccagc

SEQ ID NO: 366768 - DNA, 201 bp, Homo sapiens
ttggaataacagttttgcttctctttctttttgtctgccctattatactgaggccatgcatggggtgttctcaaaacaggtgacttatctttggcacagtrgtatgtgagcaccttcctggttgagaccagaagctattcccaggcccctgaagctcctgaatagagaggaaatagatcacaagatgggagcagcttagat

SEQ ID NO: 366769 - DNA, 201 bp, Homo sapiens
taaaaccttaaaggtgacagagatgcttatttttcgtcttttcccccccactttcttatctcctccacccctgtaggaaaagtgcaaggaatttcaacttrccaatgtgcaaagctgcagaaaccacagtggtagaggtaagaggttatttttgaattcttggtgttaattatttaacttgatgttaagtattaattcaag

SEQ ID NO: 366770 - DNA, 201 bp, Homo sapiens
tgtcattaacatatggggataattggagccttaattatagatgtatagcaagaatgagtaaagagaagagcatctacgtctggaacttttggtacgttaargaaaggaaggttgtgtgtttatcgctatgctctgtgcatagtaggtgctcaataaatacttgttgaatgagtaatgagaatgcagtgccattaagagcaa

SEQ ID NO: 366771 - DNA, 201 bp, Homo sapiens
gcatcttccatctggagacatctttctgttgagagtgatctatgtggattcaaagcttttattaatgtgttttttagattctggatattagccctttgtcygaagagtaggttgcgaaaattttctcccattttgtaggttgcctgttcactctgatggtagtttcttttgccgtgcagaagctctttagtttaattagac

SEQ ID NO: 366772 - DNA, 201 bp, Homo sapiens
gaacccaggaggcggaggttgcggtgagccaagatcgcgccattgcactccagcctgggcaacaagagcaaaactccgtctcaaaaaaaaaaaaaaaaaaagtttcactaaattatttccacagatgctctgttgtttaaaaaaaagaaagaaaatgaactgtgagatatacttatctaaatactaaatgttattattagt

SEQ ID NO: 366773 - DNA, 201 bp, Homo sapiens
ctaattgctgattagggagttggcatttatcctcaccaaaatatcatagttacagttgacattttttcactgctgatttttcttttgtcctgggtcttgtstttccttttttttttttttttgagacagagtctggctctgtcgtccaggctggagtgcagtggcgtgatctcggctcactgcaagctccgcctctcgggt

SEQ ID NO: 366774 - DNA, 201 bp, Homo sapiens
atcccttccttgcaccttatacaaaaattaattcaagatggattaaagagttaaatgttagacctaaaaccataaaaaccctagaagaaaacctaggcatyaccattcaggacataggcatgggcgaggacttcatgtgtaaaacaccaaaagcaatggcaacaaaagccaaaattgacaaatgggatctaattaaactaa

SEQ ID NO: 366775 - DNA, 201 bp, Homo sapiens
gatcccttccttgcaccttatacaaaaattaattcaagatggattaaagagttaaatgttagacctaaaaccataaaaaccctagaagaaaacctaggcawtaccattcaggacataggcatgggcgaggacttcatgtgtaaaacaccaaaagcaatggcaacaaaagccaaaattgacaaatgggatctaattaaacta

SEQ ID NO: 366776 - DNA, 201 bp, Homo sapiens
tatacaccaataacaaacagagagccaaatcatgagtgaactcccattcacaattgcttcaaagagaataaaatacctaggaatccaacttacaagggacstgaaggacctcttcaaaccactgctcaatgaaatagaagaggatacaaacaaatggaagaacattccatgctcatgggtaggaagaatcagtatcgtgaa

SEQ ID NO: 366777 - DNA, 201 bp, Homo sapiens
ctgatcttagttatttcttgccttctgctagcttttgaatgtgtttgctcttgcttctctagttcttttaatcgtgatgttaggatgtcaattttagatckttcctgctttctcttgtgggcatttagtgctataaatttccctctacacactgctttgaatgtgtcccagagattctggtatgttgtgtctttgttctca

SEQ ID NO: 366778 - DNA, 201 bp, Homo sapiens
tcatcattaataccatgaaccaattcttttttttcttaaagaggcagatctcattatgttgcccaggctggactcaaactcctggcctcaagtgatccttyacctcccaaagcactgggatttacaggcatgagccatggtgtccagccccaatttttaactactgactagccagtcagttttctagtaagactgttgtaa

SEQ ID NO: 366779 - DNA, 201 bp, Homo sapiens
gtactgagagaaaaaatacgtgcacacgtgtgtgtctgtgtgtgtgtgtgtgtgtgtgtgtctatgtgtgtgtgtgtgtctatgtgtgtgtgtgtgtgtgkattgcagccacatttaacaagcacttaacagaaaagatgagcatgaaatgaggttttgtataaagcacagtcttaaagatttcaggtgaatgtattgaca

SEQ ID NO: 366780 - DNA, 201 bp, Homo sapiens
ctgaacgacaggattctaagtgcttctgggttgctgaacacatcagggctctgggagagtggcatacctgcatacagcatggaagctctgtgctcctgccstcaaaccttgccctatacatctcttccattgggccattccttagttgtatccttcataataaaccaataatagcaagtaaaatgccttcctgaatcctat

SEQ ID NO: 366781 - DNA, 201 bp, Homo sapiens
ctgtaggtatataaataattgtctatcccaaagtgcatttctataaatttttatttacttatacaaaatcttgcattttatgaaacatgaaattatgagawcattaaatattatgagtgcataatattgattaatcacatggctacaccatgtttatttgaccatttccctattgctgacattaaagttgttttcaattca

SEQ ID NO: 366782 - DNA, 201 bp, Homo sapiens
cctaaccagctcattttagtcatcattttctcatcaggttttccattaacgcttatgtttaaatcgcctgatctcactagactttttaatcctcccattgytccttccttattgttctcaagatcacacgaaactggcactgaagtcagtcccttcaatagctagcattaagatagttctgcctcttcattttttttttta

SEQ ID NO: 366783 - DNA, 201 bp, Homo sapiens
gacctcgatcagctttactcatggtagatttcagtcattgtccgaatgatggctattgtcaactataaataatgagattcagaagatatgattaagtatakagtttgagtacagtctgagggtagccacggaggagacactctaaacaaatggggttagcattccaacattgaaaagttaagttttcactcatagaggaac

SEQ ID NO: 366784 - DNA, 201 bp, Homo sapiens
tattagatgatgttagggctgaaaccacaaatcgatgtcttctgacttcaaatccagtactttctttatatcatactgtctttttttttaactataggaargctcagtgaaatacatggcattagaatcatatggactaaaatgtcccttactaaatattgacatcaataaattgctgttctttatcaaccattcctactc

SEQ ID NO: 366785 - DNA, 201 bp, Homo sapiens
tagtattagatgatgttagggctgaaaccacaaatcgatgtcttctgacttcaaatccagtactttctttatatcatactgtctttttttttaactatagraaggctcagtgaaatacatggcattagaatcatatggactaaaatgtcccttactaaatattgacatcaataaattgctgttctttatcaaccattccta

SEQ ID NO: 366786 - DNA, 201 bp, Homo sapiens
cccagagtccatgcattctgcctctgggcttccttttccttttgttaagcttttctgctggcaagcaccattaccactaacaacatgaagaatctgttttsttctcaatatcatgtacgggaaacgtgttcctaagtataactttcagaccacaaaaacaaaggaattcagttactgttgtcatttaatggcaacaaacaa

SEQ ID NO: 366787 - DNA, 201 bp, Homo sapiens
tttctatatattataaattgtttctcacttaagaccagaatatttagaggtaacatctggaaatgagccattactgtttatgtactaatgataaaggtaayggcaagaatgattttcagtgtgttttgtactttattttaaacagcatttcacagaaccattcaaatgcattcatttttcctttttgtaaaatccttaaaa

SEQ ID NO: 366788 - DNA, 201 bp, Homo sapiens
attcacactttctactatggcatatagcattactttaaaatgcttttaaaattgtttctatatattataaattgtttctcacttaagaccagaatatttakaggtaacatctggaaatgagccattactgtttatgtactaatgataaaggtaacggcaagaatgattttcagtgtgttttgtactttattttaaacagca

SEQ ID NO: 366789 - DNA, 201 bp, Homo sapiens
aaatgcattcatttttcctttttgtaaaatccttaaaatatcaccaaagatcatgtttacaacttgaattcctgttgttgttgttgtttttttttttttttggagtacaatgtaatattgatactttgatgtgttgactttttaatgttactgaatttataatagtttttctcttactttctttaaaattctagtattagg

SEQ ID NO: 366790 - DNA, 201 bp, Homo sapiens
aagctgtgaggtgccgtatccagaagatgttacaaaataatggactaggtgatagctctgaaaggtattatacttttattttgataaatcattaaatattkgagtgcctgttacatgctaggcatgctaggatgtggcagtgaccaaaactggacaaaaattactgatctcatgaagcttacattcagtctttttcctctt

SEQ ID NO: 366791 - DNA, 201 bp, Homo sapiens
cccttcctctctctgtgtgtgtggagtggggtgagcagttgtctttagagacccccttcttggttcctcctgcagcggctgctcctatgggtgatggctgratgcttccccagcagcttctgactttcctgcggtccacttaacatatagactcttaccggtggagtccctcttcctgggctatcctgttgacaaagcatt

SEQ ID NO: 366792 - DNA, 201 bp, Homo sapiens
agtgaacttatggggtgttggttgctcacttgcagggcacacttgcagagaggatccgtgcaggcggggctggagttcctgcattttacaccccaacaggktatgggaccctggtacaagaaggaggatcgcccatcaaatacaacaaagatggcagtgttgccattgccagtaagccaagagaggtaagaaacactctta

SEQ ID NO: 366793 - DNA, 201 bp, Homo sapiens
gggagagtctagagccaggatagagactttggaggcatcagcatatagtatttaaatctgtatactagatgagtgtctaggggctgagtgcagagcacctygttgacatttagaaattgggaagagaaggagcagcaaagagaaatgggaaagagtgattagtaagtaaagaagaaacccaggggcatctggcaatttgaa

SEQ ID NO: 366794 - DNA, 201 bp, Homo sapiens
aatttgggggaatagaattgtggggacctagccaggtactaggagtaggttaaaaactcagaaggcattgtgtgcattgagagtaatgggaagacagcccytgaacaacggaatccttaggcctctggtgacctctagtggacaaatgtattcttaacttgccgggcattctagctcaaaagtacactcttgaaaatgctt

SEQ ID NO: 366795 - DNA, 201 bp, Homo sapiens
gtgtggtggcgcatgcctgtaatcccagctactcaggaggctgaggcaggagaatcgcttgaacccgggaggcggaggttgcagtgagctgagatcctgcygctgcactccagcctgggtaacgagtgaaactccatccccctgcccccccaatcccccccaaaaaaggaagagccagagggcattactagcatattaatg

SEQ ID NO: 366796 - DNA, 201 bp, Homo sapiens
atattaatccgactaaataatttgaacattactggtccgaacaattaagactcacagtggattaaaaacaagactcagctgtatgttgtctataagaaatmcactttaatatacagacacaaattacaagtaaagagatgaatgtaaaaaattattctaacattaatcaaaagaaagctggagcaattaggctgggcacgg

SEQ ID NO: 366797 - DNA, 201 bp, Homo sapiens
caattaaagactttaaggattttacatttttaatcacccaattggcattttagccaattataaaagcagtttagaataaatagtgtaggttatttgggaartaaaactgatgctacttttttgtgcccatttttccttttctgagtctgtttccttctgggagactgtccctcctctttcctgtctatccacatctctcag

SEQ ID NO: 366798 - DNA, 201 bp, Homo sapiens
tctctttttatactttggctcaaaagattcacatattttggtttgggatgaagactaaagttatttcctgcttaaaacttgcttgtgctgaataaccactktgacttttttattctttaagaaagaaaagtttacttagctcatgattttagtgggtacaaagtccaagactgggtagctgtgtctggtgagggcctcatg

SEQ ID NO: 366799 - DNA, 201 bp, Homo sapiens
tgcctttgtatttgaaatatggagcattagttaatgacccattttatctctttttatactttggctcaaaagattcacatattttggtttgggatgaagaytaaagttatttcctgcttaaaacttgcttgtgctgaataaccactgtgacttttttattctttaagaaagaaaagtttacttagctcatgattttagtgg

SEQ ID NO: 366800 - DNA, 201 bp, Homo sapiens
acaccttcacgagagcaaggttcttataaatctgtcacttcatagcttgagttgtacaccctcaaattgatgacctctctctgcctttgtatttgaaatayggagcattagttaatgacccattttatctctttttatactttggctcaaaagattcacatattttggtttgggatgaagactaaagttatttcctgctta

SEQ ID NO: 366801 - DNA, 201 bp, Homo sapiens
agtgcatgatcaaaaaactaaattttgttttaaaaatattgttagcttaaatccttcagaaaactaaccaatatttgaagtccataaaatcaacttaaacrtgctgataccttacatcaagcaaaaactgtgatgactcttgaggggaatattatggacaccttcacgagagcaaggttcttataaatctgtcacttcata

SEQ ID NO: 366802 - DNA, 201 bp, Homo sapiens
atgtatcagtgttttagagatttggggcatcatgcttcttgctttagagaaatgaaaatgcctaaagagtaagcataattccttctctcttaaatttttcytattctttagactgctaatgcctaatgatacagttttaaaagcagtggaactcataatttttcaagaggcaataaaaagaatgttgggataggaagaaaa

SEQ ID NO: 366803 - DNA, 201 bp, Homo sapiens
ggcccttcctaaagtgactgtaggaagaaaaaacaaggaaataatatgtttgtctgaaaccttgaaaggaactgttatgatagaatagagagttcatatgrtcactatttattttgtatcttggacacatttgagcttttgatggaataacctacttctatttaaagtgctgagtaggatggggtacatctatcctaggca

SEQ ID NO: 366804 - DNA, 201 bp, Homo sapiens
acatattttaaggcaaggggtagtgttatggtaattttgatgatttaattttttgtaaatgttactaacttcacaacacaaggtagagtcatctctttccrttggctagataatcagttatctggaagattttcagttataccccaagtctctgtttccccagaatattccacctacttgaatgactcaatgtctcaagtc

SEQ ID NO: 366805 - DNA, 201 bp, Homo sapiens
ctagacactttgaagtgttcattgtgtcaggagtgccgggggtaggaaagaggtttggaaatgaaattctgagaattgggaaggaatcagctgagctggartggtcacttgtcggtgtgaggagtatgagagtggagagtggaatgaagttgggagaacaggtggcatcaggagaaatgtcagtggtttgtcacatactta

SEQ ID NO: 366806 - DNA, 201 bp, Homo sapiens
gccattctcctgccttagcctcccgagtagctgggattacaggcacccaccatcactcctggctaatttttgtatttttagtagagatggggtttcaccaygttggccagtctggtttcaaactcctgacctctagtcatctgcccaccttggcctcccaaagcgctgggattacaggcgtgagccacccacacccaactt

SEQ ID NO: 366807 - DNA, 201 bp, Homo sapiens
atctacccaaaggactataaatcatgctgctttaaagacacatgcacacgtatgtttattgcagcattattcacaatagcaaagacttggaaccaacccaratgtccaacaatgatagactggattaagaaaatgtggcacatatacaccatggaatactatgcagccataaaaaatgatgagttcatgtcctttgtaggg

SEQ ID NO: 366808 - DNA, 201 bp, Homo sapiens
gtcaaggaatttatccatttcttctagattttctagtttatttgcgtagaggtgtttgtagtattctctgatggtagtttgtatttctgtgggatcggtgrtgatatcccctttatcattttttattgcgtctatttgattcttctctctttttttctttattagtcttgctagcggtctatcagttttgttgatcctttc

SEQ ID NO: 366809 - DNA, 201 bp, Homo sapiens
cttgagatatgtcccatcaatacctaatttattgagagtttttagcatgaagggttgttgaattttgtcacggtcttttctgcatctattgagataatcaygtggtttttgtctttggttctgtttatatgctggattacatttattgatttgtgtatattgaaccagccttgcatcccagggatgaagcccacttgatca

SEQ ID NO: 366810 - DNA, 201 bp, Homo sapiens
gggtttgtcatagatagctcttattatcttgagatatgtcccatcaatacctaatttattgagagtttttagcatgaagggttgttgaattttgtcacggycttttctgcatctattgagataatcatgtggtttttgtctttggttctgtttatatgctggattacatttattgatttgtgtatattgaaccagccttgc

SEQ ID NO: 366811 - DNA, 201 bp, Homo sapiens; identical to SEQ ID NO: 79418

SEQ ID NO: 366812 - DNA, 201 bp, Homo sapiens; identical to SEQ ID NO: 79419

SEQ ID NO: 366813 - DNA, 201 bp, Homo sapiens
agctccgtttctcaggctgggtcctcctcaccttaaaattatggcaagtaagaccacccgaaagcattctgaatcaaagctgaatgtatttttcacatggmaagaaagagctgcatcattcaggtgtgagttcagtttatgtatttctgagcccagattgaaagggctatatttagggcaaaaaaaagaggaccggggtac

SEQ ID NO: 366814 - DNA, 201 bp, Homo sapiens; identical to SEQ ID NO: 79420

SEQ ID NO: 366815 - DNA, 201 bp, Homo sapiens
tgattccagagggcccgggatccttcaccagtgcagccaaagcttagcaagtcttctcttgtacatgtcttaacagctagaggcaccatgtcaaacaggcrtggcaacatggactcccacacattgaggggacgtactggggacatgatggcccagtcactttgagttgcaacccaaggccacctgtgtgtggtctcactc

SEQ ID NO: 366816 - DNA, 201 bp, Homo sapiens; identical to SEQ ID NO: 79421

SEQ ID NO: 366817 - DNA, 201 bp, Homo sapiens
  misc_feature (1)...(201): n = A,T,C or G
gtccccgactacggtactcttcttttctctccacccacctgttcatttagttgagttgaatccattttgttgagcatctactatgtgctaaataccactgngtgccaatacggtcccagccctcctggagcttgccttccagaaggttccccagggtccctgaaggccagacgcccccttgcactcccatcccctactcta

SEQ ID NO: 366818 - DNA, 201 bp, Homo sapiens
taaatgttaacggcatggttaatgttgttgtttcgtagtgaccagatctaaagtcacccccaagagaaatcaggaggagaaagtgtcctcctcctttccckccaagtcttctctcagtgacactggatgcatttactcaagagacaccatcgggagctgatgactcttatttgtctaccaaatttggcccaatagctccct

SEQ ID NO: 366819 - DNA, 201 bp, Homo sapiens
ccaatacggtcccagccctcctggagcttgccttccagaaggttccccagggtccctgaaggccagacgcccccttgcactcccatcccctactctagtgrcaatgcccacattcactccccactgcaatggacgttggtttttaaagccccctcaccacctctttttttctgttatctcatttgatcttcataacaaccc

SEQ ID NO: 366820 - DNA, 201 bp, Homo sapiens
gcctggcctgtcgctatatttttaatagcagtagtagatgtcgttttattattatcatcatctgaggtcactcatttggtctgggcagagcagaggtgccrtcctgtgcccattggcgctgccctgaaattcatctcctcttctctcctggttgctgggctgcttggcaggtgtgattccaatccagggcgggatcctgaa

SEQ ID NO: 366821 - DNA, 201 bp, Homo sapiens
gcaatggacgttggtttttaaagccccctcaccacctctttttttctgttatctcatttgatcttcataacaaccctgggagtcagctagaggagcggtgmgagccagccaggcctggggacactgccacgatctgccacttacaggctgtgtgaccttgggcaagtgtcttgacctccccgagtctcagtttcttcatct

SEQ ID NO: 366822 - DNA, 201 bp, Homo sapiens
ggccctacggctgtcactgcggactaggtggcagaggccaacccaaagatgccacggactggtaactcctttctcagggctggcaatcctatactgtcccygactacggtactcttcttttctctccacccacctgttcatttagttgagttgaatccattttgttgagcatctactatgtgctaaataccactgggtgcc

SEQ ID NO: 366823 - DNA, 201 bp, Homo sapiens
ccccagtaggctggggacccatgcagctgtgcaccctgtctgctccaggtgctgccagacccatgactgctgctatgaccacctgaagacccaggggtgcrgcatctacaaggactattacagatacaacttttcccaggggaacatccactgctgtgagtacgcagacctcagggcaggagctggagaccccaggaaggg

SEQ ID NO: 366824 - DNA, 201 bp, Homo sapiens
ccaatccttctgcccctctgcaaagagccttcagtggccgtcagtctcctagcatggtagcttcagccagagagctctggctggccaagctgtgctgcacrtctctggactgctgtgaaagttcaaactagaagtccagcaccagggtctgctgggcccatgatgatgacgctttggacacaggtcacttcacccctacct

SEQ ID NO: 366825 - DNA, 201 bp, Homo sapiens
tcatctgtaatctaccccattaagttattgcaagagctaaaatgagacagacagaatgggcctcacaggatgcctgccataataaattacacagagctacygattggctgttactttcatcatcactgatgctcgtggcagcctgtcgaggatcggcaaaaccctgattatctccattgtacagaccaggaaaccaaaact

SEQ ID NO: 366826 - DNA, 201 bp, Homo sapiens
aatctgcccaccttggcctctcaaacccgagatcatgccactgcattccagcctgggcaatagagcaagactttgtctcccaaagtgctgggattacagaygtgagccactgtgcctggcctgtcgctatatttttaatagcagtagtagatgtcgttttattattatcatcatctgaggtcactcatttggtctgggcag

SEQ ID NO: 366827 - DNA, 201 bp, Homo sapiens
tacggtcccagccctcctggagcttgccttccagaaggttccccagggtccctgaaggccagacgcccccttgcactcccatcccctactctagtgacaaygcccacattcactccccactgcaatggacgttggtttttaaagccccctcaccacctctttttttctgttatctcatttgatcttcataacaaccctggg

SEQ ID NO: 366828 - DNA, 201 bp, Homo sapiens
ccagaaggttccccagggtccctgaaggccagacgcccccttgcactcccatcccctactctagtgacaatgcccacattcactccccactgcaatggacrttggtttttaaagccccctcaccacctctttttttctgttatctcatttgatcttcataacaaccctgggagtcagctagaggagcggtgagagccagcc

SEQ ID NO: 366829 - DNA, 201 bp, Homo sapiens
ttctttactgcaacctgttttatcacaaggtctttatgactcgtatcttgtgctgacctcctatctcattctgtgacttagaatgccttaagcgtctgggratgcagcccagtaggtttcagccttattttccccagcttctattcaagatggagttgctctggttcacacacctctgacagttttacttctctgattctc

SEQ ID NO: 366830 - DNA, 201 bp, Homo sapiens
gtttcttcatctctgaagagcggataatatgagtacctccatcccatggtggttttaaggagtaagagagaatgcatagataaagcaagtgtctagtgcayaggaatcgctcaaaaaatgttagtcatcatgatcctgaggaagactgcagccctgcaggccttgactcttcccaggtggggacacgggttcttctccagt

SEQ ID NO: 366831 - DNA, 201 bp, Homo sapiens
tcaggcccacgactgaccagcttggtgaccacattgcttaacctctctgaacctcagtatcctcatctgtaatctaccccattaagttattgcaagagctraaatgagacagacagaatgggcctcacaggatgcctgccataataaattacacagagctactgattggctgttactttcatcatcactgatgctcgtggc

SEQ ID NO: 366832 - DNA, 201 bp, Homo sapiens; identical to SEQ ID NO: 79417

SEQ ID NO: 366833 - DNA, 201 bp, Homo sapiens; identical to SEQ ID NO: 79422

SEQ ID NO: 366834 - DNA, 201 bp, Homo sapiens; identical to SEQ ID NO: 79424

SEQ ID NO: 366835 - DNA, 201 bp, Homo sapiens
tgttccacctgcactggggcaatgccatctgatgaacagatccatttattaattcaacacgtttgtattgagagcctgctgggtgccgggcactattgtcracatgggtgatacagcagcaagcaaaacaagagaaacatctttgcaagcaggggagggggcctgcagtgttgggtgtgtggagttgttgctgggaagtag

SEQ ID NO: 366836 - DNA, 201 bp, Homo sapiens
aactgaggtaaagggcagaggaaggagagcgaggcaggcagacacggagaagggagggccaggggacaggaagaccggagatgaggggtggggctggcacratggagctctctctggcattaaacaggaatgctctatcacacagcggccagtgagtcataggccctggctttttttgaaaaatgactatggtcactgccc

SEQ ID NO: 366837 - DNA, 201 bp, Homo sapiens
catggtgttggggcctcacagatgatggagaagccagagttcaggcacttggcatgacccctggcatcgccttcagttgatttagtgtctctgccctgggrtattccatgggaccctgggctggcttctgtgtgcagaggtgggtgtgggccatagcccagacctgttgaaccagttgtaggctctggaatcctctgtccc

SEQ ID NO: 366838 - DNA, 201 bp, Homo sapiens
  misc_feature (1)...(201): n = A,T,C or G
ggccagcatcctccatgttcagccacatgggctttgtcttccttccaagagccagcctggggaagggagctcccaagaagtgtggggccattgggaggggnagggagactttcctggggacagagaggtccctgggagtccctcagtttatttccttggctgtctccacaggggtcaggccataatgtctcccaagaggcc

SEQ ID NO: 366839 - DNA, 201 bp, Homo sapiens
cagaagccttgctggccttgtcgaactgcacatagccatcctgcttgccgctgctgctgacgctgctgtcacactgcgtgtccaggaaggagctgctgtcrctgagggagcctctctggaactcccgctcacaaagctcgatggacgagctgcccatgcccagcacaaaccgctgcccgtagtcgtagaggcggccctggc
